United States Patent Application Publication US 2012/0070457 A1 - sequence listing, part 7

SEQ ID NO: 43622 - DNA, 792 bp, Neisseria meningitidis
atgaatgtttattttctcggcggcggcaatatggcggctgccgttgcgggcggattggtcaaacaaggcggttaccgcatctatatagccaatcggggtgcggaaaaacgcgaacgtttggaaaaagagttgggtgtcgaaacttctgaaaccttgccggagcttcattccgacgatgttttaatccttgccgtcaaaccgcaggatatggaagccgcgtgcaaaaatatctgcaccaacggcgcattggtgctttctgttgcagctggattgtcggttgatacgctcagccgttacctcgggggaacacgccgcattgtccgggttatgccgaatacacccggaaaaatcgggctgggcgtatccggtatgtatgccgaagcggaagtatcggaaacagaccgcaggattgccgatcgaatcatgaaatcagtcggtttgactgtttggttggatgatgaggaaaaaatgcacagcattaccggtatcagcggcagcgggccggcatatgtgttttatctgctggacgcattgcaaaatgccgccatccgacaagggtttgatatggcagaagcacgcgcgctcagtctggcaacgtttaaaggagcggttgcccttgccgagcagacgggtgaagatttcgagaagcttcaaaaaaatgtaacgtcaaaaggcgggacaacccacgaagccgtggaagccttcaggcggcatcgtgtcgccgaagccataagtgagggcgtttgtgcctgtgtgcgccgttcgcaggaaatggaacggcaatatcaataa

SEQ ID NO: 43623 - DNA, 234 bp, Neisseria meningitidis; identical to SEQ ID NO: 40733

SEQ ID NO: 43624 - DNA, 876 bp, Neisseria meningitidis; identical to SEQ ID NO: 38422

SEQ ID NO: 43625 - DNA, 1179 bp, Neisseria meningitidis; identical to SEQ ID NO: 36811

SEQ ID NO: 43626 - DNA, 3486 bp, Neisseria meningitidis
atgcgcctgacccatatcaaactctccggcttcaaatcttttaccgacccgaccacgattcatgtgccggggcagcttgtcgcggttatcgggcccaacggctgcggcaagtcgaatgtgattgacgcggtgcgctgggtgttgggcgaggcttcggcgaagcagcttcgtggcgagagtatgcaggacgtgatttttaacggtgcggcgacgcgccgtcctgcgccgagggcttcggtggagctggtgtttgacaacagcgaccacagtttgcagggggcgtgggggcagtatgccgaggtgagcatcaagcggcagctgacgcggcagggcgaatcgacttatttcatcaacaatcagaccgtgcgccgccgcgacattaccgatttgtttctgggtacgggcgtgggcgcgcgcggttatgccgttatcgagcaggggatgatttcgcgcatcatcgaagcgcggccggaggagttgcgcgcctatatcgaggaggcggcgggcgtgtccaaatataaggaacgccgcaaggagacggaaggtcgtctgaaagacacgcgcgagcatttgcagcgtttgggcgatttgcagaacgagttggcgcgtcaggtggaaaagctggaaaaacaagcggaaaccgccgaacgctacaaatccctgaccgcgcagctgaatcagcaacaggatttgctcgattacgcccaatggcggcaatcgcttgccgccgccgataaggcgaccgcgcagcatcaatctttgcaggcgcagcaggacgaaaccgccgcgcaggttcaggcgttaaacgacgaagtacacgccttgcagactgccgaacagtcgcagcagcaggcagtgcatgaattgagcaacaagcgcggcgtgttgcgcgagcagattgcccgtttggaagaacaaatccgccatcagcaaaacctgcaccaacgcatcgaacgcgacaagcaggcagcgcaggcgcagttacaacgcattcatcaagagcagcagcaaatccgcgtgcagcttgaagaaaacgagttgcaggtcgaagaaaaacaaaccgagctggcggaatgggcgatgcaggttgccgaacacgaggagcgtctgcccgaattggaagaagcccaagccacgctcaacgccgccttccaaacccagcaggacgaggcaaaccgcatccgccgcgaactggcgttgaagcagcagcagcttgcccatgccgaacaaacgattgccaagcacgaagagcgcaaaggtcgtctgaaacaggaaaaccaagccttaaacctgcccgacgaagccgaaaccgccgccgcgcaggaagcagccgccttgttgcaaagtcagcaagagcattacgaagaacaaatcattgccgccgaagaagccttacacgccgcccgcgaggcgtttcagacggcctcaaaccgcttccaaagcctgaagcagcaacacatcaccttgcaggcgcagcagcaggcgttgtcgcaaatcctgtcgcaacagcaggaagccgccgatttctggcaggcaaccgaccacgccgccgcgccgcaactgtggcaacacatcaccgcgcccgccgagtggcagcacgccttgtccgtcattcttgccgaacgcctgcacgcccgcgccgtgccgcaaggtttcgtgccgcccgagcctttgccgcaggggcaggcggcatggctttcagacgacctctcaggcggcatcaaaaaatccctgcccgtacaggcattgctgaaccaaatccaagcgcagccgccgtttcagacggcattgcactactggctcgacggcgtattgtgcgcgcccgatttgagctatgccctcgcgcatcaaaacgatttgggcgcacaccaaatctggctcacgcccgaaggtcatcaggtcgataaagtcagcgtcctgctctatgccaaacccgcgcaggaaagcctgattgcccaaaaagcgcgcctcgacggcatcgcgtccgaactggaaaacctcgcccccgaactttccgccgccgaagccgcgttcaaacaggcggaagctgccgtgcgctcgtctgaagtgcaacataaaaacctgatgcagcagcaacagcagcacacgcgccaatacagtcaagcacagcaacgcgccgccgaactcttagcgcgtaccaaccaagggcaaatccgccgcgaacacatcgagcgcgaactggcgcagttggcggaagaacagaccgtgttgcaacacacgtccgacgggctttcagacgacatcgttaccttgcaggaagccgccgccgaactcgaacaccagcagcaaaccaccgcgcacagccgccaagagcagcaaggccgtctgaaacaggcgcagcttgccctgttggaagccaaccgccaatacgggcttgccgaagtcgccgtccacaaactcaaccagcaaaaacaaaactaccggcagcaaatcgcccagcttgaacagcaaaccctcgactggcaggaacgccagcaagagcttgccctcgcctatgaaaccgagttccaaaacgacgagcagcacatcaagcttgaagaattaagcgaagccgtacagaccttggacgaagaatatattgttgtgcaagagaaactcgcgcagattcaggaacagggcagggagcaatacgctaaagtgcaaaccctgcaaaccaagctgccgcagcttcaggccgccacccaaaccgccttgttgcagcagcaggaagccctgatcaacgccaaacgctaccatcaaaacctgaccgaacgcgccgccgatttggacgcgctcgaagcgttggcgaaagaatcgccgaaagtattgaacagcagcatcggcagcctttcgcaacaaatcgaagcactcggcgcggtcaacctcgccgccctgcaagaactcgaagaagcgcgcgaacgcgacggctactaccgcagccaaagcgaagacgtgcaggcagccatcacccttttggaagaagccatcgcccaaatcgacgacaaaaccaaagcgcgtttcaaagaaaccttcgatgccgtcaacagcaaagtccaaaccttcttcccgaccctgttcggcggcggcgaagccactctcaaaatgataggcgacgacctactgaccgccggtgtgtccattatggcgcgtccgcccggcaagaaaaacagcaccatccacctcctctccggcggcgaaaaagccctcaccgccatgagcctcgtgttcgctctgttcagcctcaaccccgctccgttctgccttttggacgaagtcgatgccccgctggacgacgccaacacctcgcgtttctgcaggctggtcaaagaaatgtcggcgcaaacccagttcctctacatctcccacaaccgcctgacgatggaaatggcggagcagctggtcggcgtaaccatgcaggaaaaaggtgtctcgcgcgtcgtcgccgtggacatcaaacaggcgttggaaatggcggaagccgtttga

SEQ ID NO: 43627 - DNA, 300 bp, Neisseria meningitidis
atgggctatcgtgtcggcataaattgttttgatacaagattgcaggcagacgactatttattgtcgtcccttcctcctactgttacccaggacggaaaaatcatcaggccggaaagggtgggcgataaatggattttgaacggaaagccggtcacgctgtcttatccgaaatgttcgaattacgaacaagttaaatccggagcttatctcgggtctatggttttaattctgtttgtcgttatttacggcttcaggctgctgattaatttcttaaaagacataggcaaagtaggggcgtga

SEQ ID NO: 43628 - DNA, 666 bp, Neisseria meningitidis
atggatgcatggtttgaagatacggcgatggggcggtatgttgcaaaattggaacaggatttcttcgggcggtatctggattcataccgtttttcgggaatgtgtgcggttcaggtgggcggtccgtggctgagcctgtctgaagatgttgtctgtgtgccgcgagatatgtcgatgtcggcggagaatatggctttggcggatgtttctgcggatatgctgctttttccgcatacgcttgaaggcggtgttccttcgcaaatcctgtcggaagcgcaccggatattgaaaccgtgcggacgcttgatgctgacgggtttcaatccgtattcgctctggggattcagccgttggtttgacggcgaacgcctgccggaaaaacggttttgtctgccgctgcccgagttgaaaagacggcttgcggatgtcggtttcgatattgaatttgggaaatttatggtgtatctgccgccggtttcgtcgctcgggcaaatacgcttttggcggtttatggaaaaggcgggcgaccgttggtggccgcagtgtgccgcagtgtacggtttggttttggtcaaaagggcagcgggcgtaacgcccctgcccgcgtgggacgggtatttgggcggcaaagcccttgcggcgggtgcggcaagggttgcggattag

SEQ ID NO: 43629 - DNA, 819 bp, Neisseria meningitidis
atgaacaccattttcaaaatcagcgcactgaccctttccgccgctttggcactttccgcctgcggcaaaaaagaagccgcccccgcatctgcatccgaacctgccgccgcttcttccgcgcagggcgacacctcttcgatcggcagcacgatgcagcaggcaagctatgcgatgggcgtggacatcggacgctccctgaagcaaatgaaggaacagggcgcggaaatcgatttgaaagtctttaccgaagccatgcaggcagtgtatgacggcaaagaaatcaaaatgaccgaagagcaggctcaggaagtcatgatgaaattccttcaggaacaacaggctaaagccgtagaaaaacacaaggcggacgcgaaggccaataaagaaaaaggcgaagcctttctgaaagaaaatgccgccaaagacggcgtgaagaccactgcttccggcctgcaatacaaaatcaccaaacagggcgaaggcaaacagccgaccaaagacgacatcgttaccgtggaatacgaaggccgcctgattgacggtacggtattcgacagcagcaaagccaacggcggcccggtcaccttccctttgagccaagtgattccgggttggaccgaaggcgtacagcttctgaaagaaggcggcgaagccacgttctacatcccgtccaaccttgcctaccgcgaacagggtgcgggcgacaaaatcggtccgaacgccactttggtatttgatgtgaaactggtcaaaatcggcgcacccgaaaacgcgcccgccaagcagccggctcaagtcgacatcaaaaaagtaaattaa

SEQ ID NO: 43630 - DNA, 1419 bp, Neisseria meningitidis
atgtctattaaaaacgccgtaaaattgattgaagaaagcgaagcccgctttgtcgatttgcgctttaccgataccaaaggcaagcagcaccactttaccgtgcctgcgcgcatcgtgttggaagaccccgaagagtggttcgaaaacggtcaggcgtttgacggttcgtctatcggcggctggaaaggcattcaggcttccgatatgcagttgcgtcccgatgcgtctacagccttcgtcgatcctttttatgatgatgttaccgtcgtcattacctgcgacgtcatcgaccctgccgacggtcagggttacgaccgcgacccgcgctccatcgcacgccgcgccgaggcctatttgaaatcttccggcatcggcgacacggcatacttcggccccgagcctgaattcttcgtcttcgacggcgtagaatttgaaaccgacatgcacaaaacccgttacgaaatcacttccgaaagcggcgcatgggcaagcggcctgcacatggacggtcaaaacaccggccaccgccctgccgtcaaaggcggttacgcccccgtcgccccgattgacgcgggacaagacctgcgctccgccatggtgaacattttggaagaactcggcatcgaagtcgaagtccaccacagcgaagtcggtaccggcagccaaatggaaatcggcacgaagttcagcacgctggtcaaacgcgccgaccaaacccaagacatgaaatatgtgattcaaaatgtcgcccacaacttcggcaaaacagccaccttcatgcccaaaccgattatgggcgacaacggcagcggtatgcacgttcaccaatccatttggaaagacggtcaaaacctgttcgccggcgacggctatgccggcttgagcgacaccgcgctctactacatcggcggcatcattaaacacgccaaagccctgaacgcgattaccaatccgtccaccaactcctacaaacgcctcgtgccgcactttgaagcgccgaccaaactggcttattccgccaaaaaccgttccgcttccatccgtattccgtctgtgaacagcagcaaggcgcgccgcatcgaagcgcgtttccccgacccgaccgccaacccgtacttggcgttcgccgccctgctgatggcgggtttggacggcattcaaaacaaaatccatccgggcgatcctgccgataaaaacctgtacgacctgccgccggaagaagacgcgctcgtcccaaccgtctgcgcctctttagaagaagcattgtccgcccttaaagccgaccacgaattcctcctgcgcggcggcgtgttcagcaaagactggatcgacagctacatcgcctttaaagaggaagatgtccgccgcatccgcatggcaccgcacccgctggaatttgaaatgtattacagcctgtaa

SEQ ID NO: 43631 - DNA, 312 bp, Neisseria meningitidis
atggtcgtgttccaaaagacgggaaggctattttataacggcggcgtacagatggaaacgatgccgtctgaaaccgccttcagacggcatcgtttcctgtatcggtcgggaaaaatccggatgcggtgcgccggcttgtccgcattgttgacaatcttgccgtctgaaactatattttccggcttgaaatttgacgcaaaaccggtttcagacggcatcggcgtggtaaaatcgtgccgactttgcgtcaagccgccgcgttccgcatattttgctatttcccttttccaggagctgaaaaatgtctattaa

SEQ ID NO: 43632 - DNA, 654 bp, Neisseria meningitidis
atgttttccgtaccgcgttcctttttgccgggcgttttcgtacttgccgcgcttgccgcctgcaaacctcaagacaacagtgcggcgcaagtcgcttcttcaagtgcatccgcgtcggctgcggaaaatgcggcaaagccgcaaacgcgcggtacggatatgcgtaaggaagacatcggcggcgatttcacgctgaccgacggcgaaggcaagcctttcaacctgagcgatttgaaaggcaaggtcgtgattctgtctttcggctttacgcactgtcccgatgtctgcccgacagagcttttgacgtacagcgacacgttgaagcagttgggcgggcaggctaaggacgtgaaagtggtgttcgtcagcatcgatccggaacgcgacacgcctgaaatcatcggcaagtatgccaaacagttcaatccggactttatcggtctgacggcaacgggcggccaaaacctgccggtcatcaagcagcaataccgcgtggtttctgccaaagtcaatcaaaaagacgacagcgaaaactatttggtcgaccactcttccggtgcgtatctcatcgacaaaaacggtgaggttgccattttctcgccttacggaagcgagccggaaacgattgctgccgatgtaaggaccctgctctga

SEQ ID NO: 43633 - DNA, 1479 bp, Neisseria meningitidis
ttgccgtgttttaacgcctattttttgttccaaggatggtttatgccgctgctgtctgtcgagttcgcactgttctttctcgccttcctgccgatttactggggcttggcgaaatacccgtccgtccaaaacctgctgcttttggctgccggtatgggctggctctaccatatcggccctgtatttgcggcaatcatcgtcctttattcctcctgcgtgtaccttttgggcgaactgctccgttccgatcgcgaaaatacgcgccgtttctggctggggtgcggcattgccgcctcgctgaccgtcttgggctttttcaaatatttcgactttttccgcccgatgattgcccaatatgccggaaaaggcggcgcaatcgacatcctgatgccgctggggctttcgtattacaccttccagtcgctcgcctatctggtttactgcttccgcgccccgcacgccgcgcgtttcagctggcacgagctgctgctgcacctgagttttttccccaccgttacctccggcccgattatccgcgccgccgcattcaaaagcgcagacggcgagcaggcaggcgcattggcgcaaatccgtacccgccgagcgcgttcgcccgtccgccccgcactcgccgtttccctgattctgctgggtattgccaaaaaatggtggctggcggggatgctggcggaaaactgggtgtcgcccgtatttgaaaatcccgcccaattcgacggctggggcgtattgggcggcgtgtacggctataccttccaactctttttagacttttccggatattccgatttggttatcggcatggcgatgctgctgggctttaggctgcccaaaaatttctccgcaccgcttcgtgctttaaacatccgcgcattttgggacaaatggcacatcagcctttccacctggatacgcgactacatctacatccccttgggcggcagcaaaaaaggctttttacggacacagctcaacctgatggcggcaatggtgctctcaggcatctggcacggctacggctggaacttcctcatttggggcgcgctgcacggcacggcactggtgctgctcaacacgggcgaccgctatttcggacgcgacgcgctatgccgtctgaaatacttcgcgccgctctcatggctcattaccttccatttcgtctgccttagctttgtcgtcttcaataccgcaaatcccgacgatgcaggcgcagttttcagtgccctctttgccaatgccaacggctggaatgcgccgcaacaggcaaacatgctgttgcttgcctcgtttgcatccgtgatgctgctctacccttacctgcaacgcgctttcgacggcgcggtcaaaggtttggaaaaaatcccgatgtggctgtggtttatccccgtttccgccgtcctgctgctgattatcgtcctcgccccctcggggatacccggctttatttatgccaatttttaa

SEQ ID NO: 43634 - DNA, 1395 bp, Neisseria meningitidis
ttgattcaaagtgcggcacaattatatcggcagcggatattttcgtctttcaatatttacatttcagtcggcttacaaggagacacaatgaagccagtaaacatcggtcttttaggtttgggtacggtcggcggcggtacggctgccgtgttgcgggacaacgcggaggaaatttcccgtcgcttggggcgcgaaatccgtatttctgccgtgtgcgatttgagtgaagaaaaagcccgacaaacctgcccgtccgcagcctttgtcaaagatccgttcgaactggtcgcacgtgaagacgtcgatgtcgtcgtcgaattgttcggcggtaccggcattgccaaagatgcggtgttgaaagccattgaaaacggcaaacacatcgttaccgccaacaaaaaactgctcgccgaatacggcaacgaaatcttcccgctggcggaaaaacaaaacgtcatcgtccaatttgaagcggcagtagcgggcggtatcccaatcatcaaagccctgcgcgaaggtttggcggcaaacaggattaaatccatcgccggcattattaacggcaccagcaacttcatcctctccgaaatgcgcgaaaaaggcagcgcgtttgccgatgtactgaaagaagcgcaggcattgggttatgccgaagccgatccgaccttcgacatcgaaggcaacgatgcgggccataaaatcaccatcatgagcgcactggcattcggcacgccgatgaacttttccgcctgctacctcgaaggcatcagcaaactcgacagccgcgacatcaaatacgccgaagaacttggctatcgcatcaaactgttgggcattacccgcaaaaccggcaaaggcatcgagctgcgcgtccaccctaccctgattcccgaaagccgcctcttggcaaacgtcaacggcgtgatgaacgccgtgcgcgtcaacgccgatatggttggcgaaaccttatattacggcgcgggcgcgggcgcattgccgaccgcttccgccgtggttgccgatatcatcgacatcgcccgcctggttgaagccgataccgcccaccgcgtaccgcatctggcgttccaacccgcgcaagtccaagcgcaaaccatcctgcctatggacgaaattaccagcagctactacctgcgcgtccaagccaaagacgaaccgggcacgctggggcaaatcgccgcgctgttggcacaagaaaacgtgtccatcgaagcactgattcaaaaaggcgtgattgatcagaccactgccgaaatcgtgattctgacccacagcacggtcgaaaaacacatcaagtcggcaatcgcagccatcgaagcactggattgcgtggaaaaaccgattaccatgatccgcatggaaagcctgcatgactga

SEQ ID NO: 43635 - DNA, 756 bp, Neisseria meningitidis
atggggcgtttacttttgggcagtatccgcatgagcatcattgtcgaaaacctgaccgtcagctaccgccgccgacctgccgtgcaccatgtggacattacttttgaagaacatagtatgtgggcggttttcggtcccaacggcgcagggaaatccacctttctcaaatccttgatgggattgcagcctatcgatacaggcagcatccggctggacggattgacccgtcagaacatcgcctaccttccccagcagtccgatatcgaccgctcccagcctatgaccgttttcgacttggcggcaatggggctatggtatgaaatcggctttttcaaagggataaataccgctcaaaaacaacgcgttcacgaagccttggagcgcgtcggaatgcaacggtttgccgaccgtcagattgcctatctctcaaacggacaatttcagcgtgtcctttttgcccgaatgctggttcaaaatgccaaattcctgctgctcgacgaacccttcaatgccgttgatgcacggacaacctacgagcttctcgacgtattgcagaaatgccattgcggcggacacgccatcatcgccgtactgcacgattacgaacaagtccgtgcctactttcccaataccctgctgctcgcccgcgaaaaaattgcggcaggcgcaaccgagaccattctgacagaaccctacctcgcccaagccaacgccaaaatgcagcaacaggaaagccccgactggtgcgcctcataa

SEQ ID NO: 43636 - DNA, 1254 bp, Neisseria meningitidis
atgtccgaacaacatatttcgacttggaaaagtaaaatcaacgcattgggtccggggatcatgatggcttcggcggcggtcggcggttcgcacctgattgcctcgacgcaggcgggcgcgctttacggctggcagatcgcgctcatcatcatcctgaccaacctcttcaaatacccgtttttccgcttcagcgcgcattacacgctggacacgggcaagagcctgattgaaggttatgccgagaaaagccgcgtttatttgtgggtattcctgattttgtgcatcctctccgccacgattaacgcgggcgcggtcgccattgtaaccgccgccatcgtcaaaatggcgattccctcgctgatgtttgatgccggcacggttgccgccttgattatggcatcctgcctgattattttggtgagcggacgttaccgcgctttggatcgcgtttccaaaatcatcatcgttactttgagtatcgccacgcttgccgccgccggcatcgctatgtcgcgcggtatgcagatgcagtccgattttatcgagccgacaccgtggacgcttgccggtttgggcttcctgatcgcgctgatgggctggatgcccgcgccgattgaaatttccgccatcaattctttgtgggtaaccgaaaaacaacgcatcaatccttccgaataccgcgacgggatttttgatttcaacgtcggttatatcgccagtgcggttttggctttggttttccttgcactgggcgcgtttgtgcaatacggcaacggcgaagcagtgcagatggcgggcggcaaatatatcgggcaattgatcaatatgtacgccgttaccatcggcggctggtcgcgcccgctggtggcgtttatcgcgtttgcctgtatgtacggcacgacgattaccgtcgtggacggctatgcccgtgccattgccgaacccgtgcgcctgctgcgcggaaaagacaaaacgggcaacgccgaattctttgcctggaatatttgggtggcgggcagcggtttggcggtgattttctggtttgacggcgtaatggcgaatctgctcaaatttgcgatgattgccgcttttgtgtccgcccctgtgtttgcctggctgaattaccgtttggttaaaggtgatgaaaaacacaaactcacatcaggtatgaatgcccttgcattggcaggcttgatttatctgaccggttttaccgttttgttcttattgaatttggcgggaatgttcaaatga

SEQ ID NO: 43637 - DNA, 651 bp, Neisseria meningitidis
atgccgtctgaaaacacaaaaggaacaaccatgaccacacatcatgtcgaattgaggaaggtaaccaaacggttcggggcgcaaaaagccgtcaaccaagtcgatttggttttgaaggcaggagaaagcgtcgggcttgccggacacaacggcgcgggcaagtccaccattatgaagctgatactcgggctgattaccccgaccgaaggcgaagtgatgcttttgggcgaacgtaccggtagcaaagcgggggcgcggcttcgcagccaaatcggctacctgcccgaaaccgttgcgctgcacccttcgctgatcggcatcgaaacgctggatttttatgccaaacttaaaaaacagccgctcacgcagaaccgggggctgcttgagcgcgtcggcatttcacaggcggcacaccgccgcgtcggcacttattctaaagggatgcgccaacgccttgccttggcacaagccctgctgggcgagcccaaagtcctgctgtttgacgaaccgacaaccggtcttgaccctgcatcacgacaaatgttttacgaagtcgtgcgcgaactcaacgggcgcggcgcgaccgtattgctcagcacccacgcccttgccgagttggacgggcacgccgaccgcattatcgtggattaa

SEQ ID NO: 43638 - DNA, 1155 bp, Neisseria meningitidis
atgactgaaactactcaaaccccgaccctcaaacctaaaaaatccgttgcgctttctggcgttgcggccggtaataccgctttgtgtaccgttggccgtaccggcaacgatttgagctatcgcggttacgacattctggatttggcacaaaaatgcgagtttgaagaagtcgcccacctgctgattcacggccatctgcccaacaaattcgagctggccgcttataaaaccaagctcaaatccatgcgcggcctgcctatccgtgtgattaaagttttggaaagcctgcctgcacatacccatccgatggacgtaatgcgtaccggcgtatccatgctgggctgcgttcatcctgaacgtgaaagccatccggaaagtgaagcgcgcgacatcgccgacaaactgatcgccagcctcggcagcatcctcttgtactggtatcaatattcgcacaacggcaaacgcattgaggttgaaagcgacgaagagaccatcggcggtcatttcctgcaactgttgcacggcaaacgcccaagcgaatcacacatcaaagccatgcacgtttcactgattctgtatgccgaacacgagttcaacgcttctacctttaccgcccgcgtgatcgccggtacaggctctgatatgtactccagcattaccggagcaatcggcgcgttgaaaggtccgaaacacggcggcgcgaacgaagtggcttacgatattcaaaaacgctaccgcaatgccgacgaagctgaagccgacatccgcgaacgcatcggccgcaaagaaatcgtgatcggtttcggtcatccggtgtacaccatttccgaccctcgcaacgttgtcattaaagaagtggcacgcggtttgagcaaagaaaccggcgatatgcgcctctttgacattgccgaacgtttggaaagcgtgatgtgggaagagaaaaaaatgttcccgaatctggactggttctctgccgtttcctaccaaaaattgggcgtaccgaccgctatgttcacaccgctgttcgtaatttcccgtacaaccggttggagcgcacacgttcttgagcaacgcaaagacggcaaaatcatccgtccgagcgcaaactacacaggccctgaagatttggcgtttgtggagattgaagaacgataa

SEQ ID NO: 43639 - DNA, 702 bp, Neisseria meningitidis
atgacggaacctgcggccgaaggcggcaaagctgccaaggcgttaaaaaaatatctgattacgggcattttggtctggctgccgattgcggtaacggtttgggtggtttcctatatcgtttccgcgtccgatcagctcgtcaacctgctgccgaagcaatggcggccgcaatatgttttggggtttaatatcccggggctgggcgttatcgttgccattgccgtattgtttgtaaccggattgtttgccgccaacgtattgggtcggcagatcctcgccgcgtgggacagcctgttggggcggattccggttgtgaaatccatctattcgagtgtgaaaaaagtatccgaatcgctgctgtccgacagcagccgttcgtttaaaacgccggtactcgtgccgtttccccagcccggtatttggacgattgctttcgtgtcagggcaggtgtcgaatgcggttaaggccgcattgccgaaggacggcgattatctttccgtgtatgttccgaccacgccgaatccgaccggcggttactatattatggtaaagaaaagcgatgtgcgcgaactcgatatgagcgtggacgaagcattgaaatatgtgatttcgctgggtatggtcatccctgacgacctgcccgtcaaaacattggcaggacctatgccgtctgaaaaggcggatttgcccgaacaacaataa

SEQ ID NO: 43640 - DNA, 435 bp, Neisseria meningitidis
atgcgaatccgccgccgtctgaaacaaggagtcatcatggcaaaaaccaacaacaaaccagaaaccgccgaaaccgccgccccgtcgtttgaagacatcaaagccgaattggacgccgtgcaggcagagcttgccgccgcccgaaacgatgtcgaaatgctgaccacagccttggaaaaagccgaagacgacaaaaaggcactgtccgccgaacttgccgaactcaaagtgcagcatacgcaacgtgccgccgacgctttggcggacagccgcgatgtgatgctcgtcagtaccggcgcagacggcaaagaattttggcgcggcggcctgctgtttgacggcggctggcgcgaagtgaagcgcgccgaagtcggcgaagcggtgtggaaggcaatctgcgccgagcctatgctgcaacgcaaggcggtcgagtaa

SEQ ID NO: 43641 - DNA, 297 bp, Neisseria meningitidis
atgttccgcatattactgttgcttttcccttgtgcaatccttgccgcctgcacccgaaacataccggcaaacccggccgtttcaaattgcgcgcatcttcaaaaccgcaccatcctgtattttgacgcacacggcaaacccgccgacggcgcagtaaagggcggattttacaaaattatcgaaatacagggtgcaaactgcatccttattcaagactttaacagcacgggcaatgccctcggcggatcctatgtgccggactgccgcaaatcatcccttttcccgaaaaatatttga

SEQ ID NO: 43642 - DNA, 384 bp, Neisseria meningitidis
atgactttcgcctattggtgtattctgattgcctgcctattgccgcttttttgtgcggcgtatgccaaaaaagcgggcggattccggtttaaagacaaccacaatccgcgcggttttctggcgcacacgcaaggcgcagccgcccgtgcccacgccgcacagcaaaacggttttgaagcctttgcaccgtttgccgccgccgttttgacggcacacgcaaccggcaatgcggcgcaatcgaccatcaacacgcttgcctgcctgttcatcctgttccgcctcgcctttatctggtgctatatcgccgacaaagccgctatgcgctcactgatgtgggcaggcggatttgcctgcaccgtcgggctgtttgtcgcggctgcttga

SEQ ID NO: 43643 - DNA, 981 bp, Neisseria meningitidis
gtgcagccggggctttgggcttcagacggcatattttcggaatggcggcattcttgccgtcggcgcggcagccgtatggggaagggaggggatattgtggtcggtaacggcaaaaaatatgccgcaccattgctggtgctgggttgcgtggtgttcggtctgggcagtctgattgtcagatccgtccccgtcggttcgtatgcaatcgcattttggcggttgctgatttcggtgttcgtattttggtttttagcacggtttttcaggcaaaaattcccaaaaaacaggaaaaccgtccgatatgccctgacggcgggcgtgtttctcgctttcgatttggcgttgtggcacgaaagcatacacgcggtcgggccgggtatttccaccctgctcaacagcctgcaaatctttttcttgtcggcaatcggtgttttctttttcggcgagcgtttgagcgggctgaaaaaggcaggcttaatatcggcagttgccggcgtggcgatgattgccggtgcggaattcggctacaacggtaatgcggtttggggattcgccagcggtttggtatcgggactgatgctcgccctgtcgatggtgtttgtccgcaaaacccatgaaatcgagccggtggcgcttttcccttcaatgatgattttgagtttgggcggcgcggtatcgctggttgttccggcattgctgatggatggcggcgcgctttatccgacgacttggaaagatgcgggtttggtgcttgtgtacggcgtggtgatgcagtgcttcgcgtgggcgatggttgcctatgcgattccgctgctttcgctgtcgctgacggggctgctgcttttgtccgaaccggttgccgccctgttcatcgattatttcgggttgggcaaaccgattgaaggcgtgcagtgggcaggggtggcgctgacgctttcggcaatttacctcggttcgctgaaacggcagtcttcacattga

SEQ ID NO: 43644 - DNA, 558 bp, Neisseria meningitidis
atgaatatgaaaaccttattagcactagcggttagtgcagtatgttcagttggtgttgcgcaagcacacgagcataatacgatacctaaaggtgcttctattgaagtgaaagtgcaacaacttgatccagtaaacggtaacaaagatgtgggtacagtgactattactgaatctaactatggtcttgtgtttacccctgatttacaaggattaagcgaaggcttacatggtttccacatccatgaaaacccaagctgtgagccaaaagaaaaagaaggtaaattgacagctggtttaggcgcaggcggtcactgggatcctaaaggtgcaaaacaacatggttacccatggcaagatgatgcacacttaggtgatttacctgcattaactgtattgcatgatggcacagcaacaaatcctgttttagcaccacgtcttaaacatttagatgatgttcgcggtcactctattatgatccacacgggtggtgataatcactccgatcatccagctccacttggcggtggcggcccacgtatggcatgtggcgtgattaaa

SEQ ID NO: 43645 - DNA, 660 bp, Neisseria meningitidis
atgtcaaaccaacaagccttggtcatcttttcgggcggtcaggattcgaccacctgcctgattcaggcaatccaaacctacgggcgcgaaaacgtccaagccattactttccaatacgggcaacgccatgccgtcgagctggaacgtgcccgctggattgcgcaggatttgggcgtcaaacaaaccgtactcgacttgagcctgatgcggcagattacgcacaatgccctgatggacgacaccgccgccatcgaaactgccgaaaacggcgttccgaatacctttgtagacggccgcaacgcgcttttcctgctctatgccgcgatttacgccaaagggcaggggatacggcacatcatcgcgggcgtgtgcgaaaccgacttctccggctatcccgactgccgcgacgtgtttgtcaaatcgatgaacgttacccttaatttggcgatggactatgattttcaaatccacacgccgctgatgtatctgaccaaggcgcaaacgtgggcgttggcggacgaaatgggcgtgctggactatatccgcgagcaaacccacacctgctataacggcatcgtcggcggctgccgcgaatgcccgagctgtatcttgcgcgaacgcgggctggcggaatatctggaaagtaaaaaggccgtctga

SEQ ID NO: 43646 - DNA, 210 bp, Neisseria meningitidis
atgactgaatcgcggcaaacacgccttcaagtcaaatgtccgacctgtcaaacagcagtagtatggaaacccgaaaacgcattccgccccttctgttcgcaacgctgcaaactgatcgacttgggcggatgggcagacgggaaatatacggtttccggccaaacggaaagtttgccggaaatatccgaacccgacatggcataccgctga

SEQ ID NO: 43647 - DNA, 639 bp, Neisseria meningitidis
atgagcaccttcttccagcaaaccgcacaagccatgattgccaaacacatcaaccgcttcccgctattgaagttggatcaagtgattgattggcagccgatcgaacaatacctgaaccgtcaaaaaacccgttaccttcgagaccaccgcggccgtcccgcctatccgctgctgtccatgttcaaagccgtcctgctcggacaatggcacagcctctccgatcccgaactcgaacacagcctcattacccgcatcgacttcaacctgttttgccgtttcgacgaactgagcatccccgattacagcaccttatgccgctaccgcaactggctggcgcaagacgacaccctgtccgaattgctcaaactgatcaaccgccaactgaccgaaaaaggtttaaaagtagagaaagcatccgccgccgtcattgacgccaccattattcagaccgccgacggcaaacagcgtcaggccatagaagtcgatgaagaaggacaagtcagcggccaaaccacacggagtaaggacagcgatgcgcgttggatcaagaaaaacggcctctacaaactcggttacaaacaacatacccgcaccgatgcggaaggctatatcgagaaactgcacattatagtagattaa

SEQ ID NO: 43648 - DNA, 2748 bp, Neisseria meningitidis
atgcaacagcaacatttgttccgattaaatattttatgcctgtctctgatgaccgcgctgcccgtttatgcagaaaatgtgcaagccggacaagcacaggaaaaacagttggataccatacaggtaaaagccaaaaaacagaaaacccgccgcgataacgaagtaaccggtttgggcaaattggtcaaaaccaccgataccctcagcaaggaacaggtactcgatatccgcgacctgacgcgttacgaccccggcatcgccgtcgtcgaacaggggcgcggcgcaagctcgggctactcgatacgcggtatggacaaaaaccgcgtttccttaacggtagacggcttggcgcaaatacagtcctacaccgctcaggcggcattgggcgggacgaggacggcgggcagcagcggcgcaatcaatgaaatcgagtatgaaaacgtcaaggctgtcgaaatcagcaaaggctcaaactcggtcgaacaaggcagcggcgcattggcgggttcggtcgcatttcaaaccaaaaccgccgacgatgttatcggggaaggcaggcagtggggcattcagagtaaaaccgcctattccggcaaaaaccgggggcttacccaatccatcgcgctggcggggcgcatcggcggtgcggaggctttgctgatccacaccggccggcgcgcgggggaaatccgcgcccacgaagccgccggacgcggcgttcagagctttaacaggctggtgccggttgaggataccaatcagtacgcaaatttcatcgttgaagaagaatgcgaaagcaaaaattacgaaacgtgtaaagcgaatccgaaaaaagatgttgtcggcaaagacgaacgtcaaacggtttctacccgagactacacgggtcccaaccgcttcctcgccgatccgctttcatacgaaagccggtcgtggctgttccgcccgggttttcgttttgaaaacaaacggcactacatcggcggtatactcgaacgcacgcaacaaactttcgacacgcgcgatatgacggttccggcattcctgaccaaggcggtttttgatgaaaataaaaaacaggcgggttctttgtccggcaacggcaaatatgcgggcaaccacaaatacggcggactgtttaccaacggcgaaaacggtgcgctggtgggcgcggaatacggtacgggcgtgttttacgacgagacgcacaccaaaagccgctacggtttggaatatgtctataccaatgccgataaagacacttgggtggattatgcccgcctctcttacgaccggcagggcatcggtttggacaatcattttcagcagacgcactgttctgccgacggttcggacaaatattgccgcccgagtgccgacaagccgttttcctactacaaatccgatcgcgtgatttacggggaaagccacaagctcttgcaggcggcattcaaaaaatccttcgataccgccaaaatccgccacaacctgagcgtcaacctcggttttgaccgttttggttccgacctccgccatcaggattatttttatcaaaatgccaaccgcgcctattcgtcgaaaatacccactcaaaacggcaatcaaaacatcagccccaacggcagccaagacaaaccctattgggtcagcataggcgggggaaatgtggttacggggcaaatttgccgcttgggcaacaatacttatacggactgcacgccgcgcagcatcaacggcaaaagctattacgcggcagttcgggacaatgtccgtttgggcaggtgggcggatgtcggcgcggggttgcgctacgactaccgcagcacgcattcggacgacggcagcgtttccaccggcacgcaccgcaccctgtcttggaacgcgggtgtagtcctcaaacctttcacttggatggatttgacttaccgcacttcaaccggcttccgcctgccctcgttttcggaaatgtacggctggcggtcgggcgataaaataaaagccgtcaaaatcgatccggaaaaatcgttcaacaaagaagccggcatcgtgtttaaaggcgatttcggcaacttggaggcaagttggttcaacaatgcctaccgcgatttgattgtccggggttatgaagcgcaaattaaaaacggcaaagaagaagccaaaggcgacccggcttacctcaatgcccaaagcgcgcggattaccggcatcaatattttgggcaaaatcgattggaacggcgtatgggataaattgcccgaaggatggtattccacatttgcctataatcgtgtccgtgtccgagatattaaaaaacgcgcagaccgcaccgatattcaatcacacctgtttgatgccatccaaccctcgcgctatgtcgtcggcttgggctatgaccaaccggaaggcaaatggggtgtgaacggtatgctgacttattccaaagccaaggaaatcacagagttgttgggcagccgggctttgctcaacggcaacagccgcaatacaaaagccaccgcgcgccgtacccgcccttggtatattgtggatgtgtccggttattacacgattaaaaaacactttaccctccgtgcgggcgtgtacaacctcctcaaccaccgctatgttacttgggaaaatgtgcggcaaactgccggcggcgcagtcaaccaacacaaaaatgtcggcgtttacaaccgatatgccgcccccggtcgcaactacacatttagcttggaaatgaagttctaa

SEQ ID NO: 43649 - DNA, 1773 bp, Neisseria meningitidis
atgattccatccgacttcattgacgagcttttagccaaaaccgatattgtcgatattatcgacgagcaggttccgctgaaaaaaggcggggcgaactatatggcgtgttgcccgttccacaaggaaaaaacgccgtcgttttcggtcagtccaaccaagcagttttaccattgtttcagttgcggggcacacggctcagcgattggttttgtgatggaacatcagggactgtcgtttccggaggcggttcagttccttgccgaccgcgtgggtatggtcgtgccgaaagtgcacgggcaaaacgataatcccgaagtccgtgccgaacgtaagaaaaaacagcagacactggaggaaacgacggctgcggcagctgatttttacgcgcaacagctaaaattcaatccagcggcaaaagcttatttggacaagcgcggcttgagtgcagaagttatcgcgcattatggtttgggctatgcgcccgacggctggcagcctttgacgcaagtgttccaaccgtatcctaataccgcgttagtggatacggggatggtgattgacaatgagggacggcattacgaccgcttccgccatcggattatgttccccatccgcaatccgcgcgggcaggttatcggtttcggcggcagggtgctggacgactcgaagccgaaatatttaaattctcccgatacgcctttgttcgataaggggaaaaacctttacggactgtatgaagggcgtgccgctgtcaaggaagcggggcggattttggtggtcgaaggctatatggacgtggtcgcgctggcacagttcggcgtgggctacggcgtggcggctttgggtacggcgacgacggcggaacacgtcaaaatcctgatgcgtcaggcagacagtatttatttctgtttcgacggcgacagcgcggggcgaaaagcggcttggcgcgcgctggaaaacgcgctgccgcagttgaaggacgacaaatcgctgcattttttgttcctgccggaagaacacgaccccgacagctacatccgcgcctacggcaaagcgcaatttgaagacgcgcttctgaatcaaagcaagcctttgtcggagtatttctgggaacacctttcagacggcattcatctcaatacgcaggaaggcaaggcggaattggtaaaaaccagttcgccgcttttggcgcagattaccgcgccggcattggcttatttgttaaaacaacggcttagcgagctggtcggcatcgaccccgacaacctcgcgcaactgctaggacaggaagcgccgaagcggcacgtcaaacaaaaaaactacaaactgcctccgatttccgtcaaacagcccgtcatgctgacgctggtacagcggcaaatccgcagcctcttgataaatccggattgggctgcatatatagacctgcccgattatctggcgttggacggtgatttcgcctgccttgccaatcttgccgaatcgattaaaaaccatgccgccgtacccgaaaccgctcaggttttagagtatatgcgcggctcgccttacgaagaaacgataacccgaatcttccattcaacgcaccaatcggaagaaatgaacagcagcagtgaagaagattgcgagaatttccaaatcggcatgaaaaaactgctcaatgagttaaaatacagccaaatcgaaacattaaaacaaaaaagcctgcaatccggcttaaatgaaagcgagaaaaaacttttgctgtcgctgctgaccgcaaaacaaaattga

SEQ ID NO: 43650 - DNA, 417 bp, Neisseria meningitidis
atgcttaaacatctcgcattcctactgcccgccatgatgttcgccctccccacttcggccgccgtcctgacttcctatcaagaaccaggctgcacctacgacggcaatgtcggcaaagacggtaaacccgccggcaaaggcacatggcgctgccaagacgggcgcaactataccggttcgtttaaaaacggcaaattcgacgggcaaggcgtttataccgttgccgccaaccgcgaaatatttatcgaaccgttcaattccgacagtaccaaattccgcaacatggtactctcgggcacgttcaaaaaaggcttggcacacggcagatttaccgtctcgcaaaacggcgaaaccctcttcattatgaaatgcgaaaacggcatgattaaagaagtgaaactgcccaaaaacaaataa

SEQ ID NO: 43651 - DNA, 990 bp, Neisseria meningitidis
atgaaacagcctgtttttgccgttacttccggcgagcctgccggcatcggccccgatatttgtttggacttggcgtttgcacgcctgccctgccgctgcgcggtattgggcgacaaaaacctattgcgcgcgcgcgccgaagccttgggcaaaagcgtcgtcttgcgcgacttcgatccggaatcaggcggcgcggcatacggcgagctggaagtgctgcacatccctgccgccgaagcggttgaggcagggcggctcaatcccgccaacgccgcctatgtgctgcaacttttggacaccgcgctcgcaggcatttcagacggcattttcgacggcatcgttaccgcgccgctgcacaaaggcatcatcaacgacgcgcgcgcaagcacaggttttttcagcggacacaccgaatatctggcggaaaaaagcggcacggggcaggtcgtgatgatgcttgccggcaaaggcctgcgcgtcgccctcgtaacgacccacctgccgctgaaagacgttgccgccgccatcacgcaaccgctgattgaaagcgtcgcacgcattttgcatcacgacttaaaacacaaattctgcatcaaaaatcccaaaatcctggtcgccggactcaacccccacgccggtgagggcggacacctcggacacgaagaaaccgacaccattatccccgcgctcgaaaacctgcgccgcgaaaggataaacctcgccggcccgtatccggcggacacattgttccaaccgtttatgctcgaaggtgcggatgccgtattggcgatgtaccacgaccaagggctgcccgtgttgaaataccacagtttcgggcagggcgtgaacatcacactggggctgccctttatccgcacctccgtcgatcacggcaccgcgctcgatttggcggcaaccggcagggcggattccggcagcctgataactgccgtggagaccgccgtcgagatggcgcgcggcagcctttaa

SEQ ID NO: 43652 - DNA, 1467 bp, Neisseria meningitidis
atgaggcagatgccgtctgaagccgttttcctgcaatttcgacagacgagaaaaatcatgaaatacatcagcacgcgcggcgaaaccgcacacaaaccgttcagcgaagttttattgatggggcttgcccccgacggcggcctgatgctgccggaacattatccgcaaatcgggcgcgaaaccttggacaaatggcgcggtttagcttatcccgaattggcgtttgaaattatgcgcctgtttgttacggatattccggaggacgatttgcgcgacattctgaaccgtacttacacggaagcggcgttcggtactaaggaaatcacccccgtccgcacgctttcagacggcatcaaaatccaagccttgtccaacggcccgacgctggcgttcaaagatatggcaatgcagtttttgggcaatgcgtttgaatatgttttaaacaaagaaggcaaaaaactcaatatcttgggcgcgaccagcggcgatacgggttcggctgcggaatatgccttgcgcggcaaaaagggcgtgaacgtatttatgttgtcgcccgacggtaaaatgagcgcgttccaacgcgcgcaaatgtacagcctgcaagacgagaatatccacaatatcgccgtgaagggaatgtttgacgactgtcaggatattgtgaaggcggtgcagaacgatgccgcgttcaaggaaaaataccatatcggtacggtcaactcgatcaactggggacgcatcgtcgcgcaagtggtttattactttgcaggctatttcaacgccacttcaagcaatgacgaaaccgtcagcttctgcgtaccgagcggcaacttcggcaatgtttgcgcgggacacattgccaaacaaatgggcctgcctatccgccgcctgattgtcgcgaccaatgaaaacgatgtgttggacgagtttttcaaaaccggtgcataccgcccgcgcaacagcgcgcatacttatgtaacctccagcccgtctatggacatttccaaagcgtccaacttcgagcgtttcgtgttcgacctgatggatcgcgatcctgcggaaatcaatacgctgtgggcggaagtggctgcaggcaaaggctttgacctgcgatttgccttggacaaagtcggtggcaaatacggttttacctctggcaaatccacccacgccgaccgcctcgccaccatcaagcaggtttacgagcaagaccaagaactcatcgacccgcacactgccgacggcgtaaaagtcgcccgcgaagtgcgcgaagaaggtgaaatggtggtttgtttggaaaccgcgttggcggcgaaattcgatgcgaccatacgcgaagccgtcggcgatgccgccattccgcgccctgccgcgctggaaggtttggaaaacctgccgcagcgcgtgcaaaccgtgccgaacagtgcggatgcggtaaaaggcatcatcgaacaaacccttgcctga

SEQ ID NO: 43653 - DNA, 648 bp, Neisseria meningitidis
atgaaaacaaaattttacaatcatcaaggcggacatttaatcctgtattttgcaggttggggaacgccgcccgatgctgtaaatcatttgattttgccggaaaatcacgatttattgatttgctatgattatcaagatttaaatttggattttgatttttccgcctatcggcacatccgtttggtggcgtggtcaatgggcgtttgggcggcagagagggcattgcaaggaataagattaaaatccgcaacggcagtgaatggcacaggtttgccttgcgatgataatttcggtatcccttgcaccgtttttaaaggcacattggagaacctcacggaaaacacccgtttaaaatttgaacgcagaatgtgtggcgataaagcatcttttgaagattaccaacaatttcccgcacgcccgtttggcgaaattcatcaagaacttatcgcactttttgcgatgatcgggcaagatagacgtacagatcttatccgctggacaaatgccttggtcggatcgggcgataaaatttttatgcctgccaatcagcaccgatattggacaccgcgttgcaccgttcgggaaattgacgtcggacattacctgttttcaagattcacccattggtcggcactatggaatcactga

SEQ ID NO: 43654 - DNA, 594 bp, Neisseria meningitidis; identical to SEQ ID NO: 36941

SEQ ID NO: 43655 - DNA, 186 bp, Neisseria meningitidis; identical to SEQ ID NO: 37143

SEQ ID NO: 43656 - DNA, 2028 bp, Neisseria meningitidis
ttgtccctgtctgaatttatagaacgccgaacgtcatttaatccgatggttattttgacgactttgttttttgtgtgtgttttggtggtattggttttaaccgtgccggatcaggtgcagatgtggctcgatcgggcaaaagaagtcatttttaccgagttcagctggttttatgttttaacgttttccatttttctgggtttcctgctgatactctcggtcagcagtttgggaaacatcaggctcggacgggatgaagatgtgccggaattcggcttcctgtcgtggctggcgatgctgtttgcggccgggatgggcgtgggtctgatgtttttcggcgtggcagagccgttgatgcattatttttcggacattacggccggcacgccggaacacaggcagcagcaggcattgctgcacacggtgttccattggggcgttcacgcttggtcggtgtacggtacgattgcattggctttggcttatttcggtttccgctacaagctgccgcttgccctgcgttcttgtttttaccccctgttgaaagaaaaaatttccggaaggttcggcgatgccattgatattatggcgttgcttgctacttttttcggcatcatcaccacattggggttcggggcttcgcaactgggcgccggattgcaggaaatgggctggattgccgaaaacagcttcagcgtgcaggttttgattatcgccgccgtcatgtccctcgccgtcgtttcggcaatatccggcgtggggaagggcgtgaaggtgttgagcgagttgaacctgggccttgcgtttttgctgctgttttttgttttggcggcgggacccactgtttacctgttgtcggcattcggcgacaacatagggaactacctcggaaatctggtgcgcctcagttttaaaacttatgcgtacgaacgggaacacaagccgtggtttgaatcttggacggtgctttattgggcgtggtggtgttcttgggcgccgtttgtgggtttgtttatcgcgcgcatttcaaaggggcgcaccatccgcgagtttgtcttcggggttttgctcatccccggcctgttcggcgttttgtggtttaccgtcttcggcaatacggcgatttggctgaatgacggggttgcggggggaatgctcgaaaagatgacctcctctccggaaacgctgctttttaaattctttaattacctccccctgcccgaattgacgagcatcgtcagcctgctggtcatttctctgttttttgtaacttctgccgattccgggatttatgtcctgaacaatattacctctcgggacaaaggcttgagcgcgccacggtggcaggcggttatgtggggcgtgctgatgtctgccgttgccgttttgctgatgcgctcgggcggactcggcaacctgcagtctatgaccctgattgtttccctgccgtttgccctgctgatgctgataatgtgtttcagcctgtggaaaggcttgagtgcggataagaaatattttgagacccgggttaaccctaccagtgtattttggacgggcggcaagtggaaagaacggctggtgcagataatgagccagacgcaggagcaggatattttaaaattcctcaaacagactgcatcgcccgctatgcacgagttgcaacgggagctttcggaagaatacggcttgagcgtccgggtcgataaaatgtttcatcgggacgagcccgcaatcgagttcgtcattcggaaagagacgatgcgcgattttatgtacgggattaagtctgtcgggcaggatgtatccgaccagttgattaacgacggcaagctgccgcatatccggcatcagacaacttacaaaccctacgcttattttttcgacgggcgcgtcgggtacgatgtgcagtatatgaacaaggacgagctgattgccgacattttgaaaaactacgaacgttatttgatgttgttggatgatgtcggtcaggaactgatggcgcacgagcaggtggaattggcagagtaa

SEQ ID NO: 43657 - DNA, 693 bp, Neisseria meningitidis; identical to SEQ ID NO: 40219

SEQ ID NO: 43658 - DNA, 204 bp, Neisseria meningitidis
atgaaaaagtctttgattgctttatgtgttgcccattgtgcaaagttgaaaaacgattttggcgtaccaccgttacctgaaatcaaaatcacgccaagccctgttcgggtaggctctttgaaacaacatccgagcctgcgcttgggtaaatcaggcgtggcggctgctaaacgtgcggcgcgcaaacgcaagaatcgtcgttaa

SEQ ID NO: 43659 - DNA, 1497 bp, Neisseria meningitidis
atgtcgcttgccttggtttacagccgcgccttgagcggtatgaatgcgccgttggtcgaagtggaagcccaccttgccaacggcctgccacatttcaacatcgtcggactgcccgatatggaagtaaaggaaagtcgcgaccgtgtccgtgccgccattattcaaagcggttttgaattccccgccaaaaaaattaccgtcaacctcgcccccgccgacctgcccaaagagtcggggcgtttcgatttgccgattgcaatcggcatccttgccgcatcggggcaggttgcgcccgaaaaactggaggaatacgagtttgcgggggaattggcactgtcggggctgttgcgccccgtgcgtggcgcgttggcgatggcgtggcagggtatgcaggcaaaacgtgcatttgttttgcctgaagaaaatgcaggacaagccgccgtgatgcgcggcattaccgtttacggcgcgcgctctttgggcgaagtcgccgcccatttgaacggcatcgaacctttggcgcaaaccgaatgccaagttcctcagatgccgtttgaacatggcggacaacctgatttgtgcgatgtgaaaggtcagcacaccgcgcgccttgctttggaaatcgctgccgcaggcggacacagcctcttgatgatgggtccgccgggaacgggcaagtctatgctctcccaacggctgcccggcatcctgccgccgctgaccgaagacgaattggtagaagtttgggcattgcgttcgctcctgcccaaccaccaacaacaactcgacagcaaccgtcctttccgcagtccgcatcacagcgccagcgcggcggctatggtcggcggcggttcggatccgcgtccgggcgaaatttcattggcgcaccacggcgttttgtttttggacgagctgcccgagtttgaccgcaaagttttggaagttttgcgcgaaccgttggaaaacggcgaaatccacatttcccgcgcggcgcgccaagccgtctatcctgccaaattccaacttgttgccgccatgaacccctgcccgtgcggttatctcgggcatcccgtcaaaccctgccgctgcacgcccgaaagcgtcgcgcgttaccgcagcaagatttccgggccgctgctcgaccgcatcgatttgaccatcgaagtcccgagcctgtccgccgccgaactgatgcagcaggaagcaggggaaagcagcgcgtccgttttggaacgcgttatcgccgctagagacaaacaatacgcacggcaaggcaaagtgaatgccgccttgagtgtcagtgaactcgacacatccgcccgcattcaaaaagaagcgcaggaagcattgggcggcctgctggaaaaactctccctttccgcccgcagcttccaccgcattatgcgcgtggcgcgtacattggcggatttggcgggcgacgaagaagtcggcagaagccacgtcatgaaagccataggtttccgtcgtgctttatag

SEQ ID NO: 43660 - DNA, 3468 bp, Neisseria meningitidis
  misc_feature 3449, 3450, 3451, 3452, 3453: 'n' is a, c, g or t
atgaatgagggtgaagttgttttaacaccagaacaaatccaaaccttgcgtggttatgctttccgtggcgatacctatggcggttggcgttatttggctaatttgggtgaccgttatgcggatgatgctgctgcaattgtcggtaaggatgcaaacttaaatggtttgaatttatggatgaaaaaaggtgtggaaaacctatgggatgatacggtcggtaaaaagacccgtttagagaaatttgatcgggttgcattgcaacatttcagccaatatgtagatctaattaatgaaaataatggtagattacctaacactagtgaaattgagagaagttactataaagccgttaccgaaaatggtgtttcttctagtgcagctattgatttagttattaatcgctcacttccggatatggcagatggttattgggcattaggtttggggatagaagccgaacgtatccacaatgagcaagcagtaaataatccgaacggtagcgaaagggataatagaaagcagttaatatctgctttagataaaggatttgatggatcttttaaagagaagcattttacttttttacaatctgtgataatggatgtaacaaagttaggtgttgaatatacaatagatggttggcaaaaaattggaggttggggtaatgggataatcaatgatttatataaaagtgttgtaaaaagagagtggactggaatatttgagatcgttaataataacatcaagcaatttagagatctgttcccaaatccggaaggctggatcgatgatggtcaccaatgtttcgctccttgggttaaagaaactaaaaaacgcaatggcaaatatcatgtctacgacccccttgccctagatttggacggagacggcatagaaactgtcgctgccaaaggcttttcaggcagcttatttgatcacaccaacaacggtatccgcaccgccaccggttgggtttctgccgatgacggtctgcttgtgcgcgatttgaacggcaacggcatcatcgacaacggtgcggaactcttcggcgacaataccaaactggcagacggttcttttgccaaacacggctacgcggctttggccgaattggattcaaacggcgacaacatcatcaacgcggcagacgccgcattccaatccctgcgtgtatggcaggatctcaaccaggacggcatttcccaagctaatgaattgcgtacccttgaagaattgggtatccaatctttggatctcgcctataaagatgtaaataaaaatctcggtaacggtaacactttggctcagcaaggcagctataccaaaacagacggtacaaccgcaaaaatgggggatttacttttagcagccgacaatctgcacagccgcttcaaagacaaagtggaactcactgccgaacaggcaaaagccgccaatcttgcgggcattggccgtctgcgcgatttgcgcgaagctgccgcattgtccggcgatttggccaatatgctgaaagcttattctgccgccgaaactaaagaagcacagttggcattgttagataatttgattcacaaatgggcggaaaccgattcgaactggggcaaaaaatcgccaatgcgactttcaaccgattggacgcaaacggctaatgaaggtattgcactgacaccatcccaagtagcacaactaaaaaagaacgctttagtttccctttctgataaagctaaagcagctattgacgccgcccgcgaccgcattgccgtgcttgatgcctacacggggcaggattccaacacactctattacatgagcgaggaagatgcgcttaatatcgtcaaagtaaccaacgatacatacgaccatctcgccaaaaacatctaccaaaacctgttgttccaaacccgtttgcagccatatttgaatcaaatcagtttcaaaatggaaaatgatacgttcactttggattttagtggtcttgttcaagcatttaaccatgtcaaagaaactaatccgcaaaaagcttttgtggatttggccgagatgcttgcatatggcgaacttcgttcttggtatgaaggccgaagactaatgaccgattatgtggaggaggcaaaaaaagcaggtaaatttgaagattaccagaaagtgttgggtcaggagaccgttgcattattagctaaaacatcgggtacgcaagcagatgatatcctgcaaaatgtaggctttggtcataataaaaatgtttctttatatggtaatgacggcaacgacactctaatcggcggcgccggtaatgactatttggagggcggcagcggttcggatacttatgtcttcggcgaaggcttcggtcaggatacggtctataattacgactacgctaccggacgcaaagacatcatccgctttaccgacggtattacagccgatatgctgacttttacccgagagggcaaccatcttcttatcaaggcaaaagacggcagtggacaagtgactgttcagtcctatttccagaacgatggctcaggtgcttaccgtatcgatgagattcatttcgataacggcaaagtactggatgttgccactgtcaaagaactggtacagcaatccaccgacggttcggacagattgtatgcctaccaatccggaaataccttaaatggcggattgggcgatgactatctgtacggtgccgacggggatgacctgctgaatggtgatgcaggcaacgacagtatctacagtggcaatggcaatgatacgctcgatggaggagaaggcaacgacgccctgtacggctataatggtaacgatgcactgaatggtggcgaaggcaatgatcatttgaacggcgaagacggtaacgacactctaatcggcggtgcaggcaatgattacttggagggcggcagcggttcggatacttatgtcttcggcaaaggcttcggtcaggatgcggtctataattacgactacgctaccggacgcaaagacatcatccgctttaccgacggtattacagccgatatgctgacttttacccgagagggcaaccatcttcttatcaaggcaaaagacggcagtggacaagtgactgttcagtcctatttccagaacgatggctcaggtgcttaccgtatcgatgagattcatttcgataacggcaaagtactggatgttgccactgtcaaagaactggtacagcaatccaccgacggttcggacagattgtatgcctaccaatccggaaataccttaaatggcggattgggcgatgactatctgtacggtgccgacggggatgacctgctgaatggtgatgcaggcaacgacagtatctacagtggcaatggcaatgatacgctcaatggaggagaaggcaacgacgccctgtacggctataatggtaacgatgcactgaatggtggcgaaggcaatgatcattnnnnncacacacttaattaa

SEQ ID NO: 43661 - DNA, 201 bp, Neisseria meningitidis; identical to SEQ ID NO: 38240

SEQ ID NO: 43662 - DNA, 498 bp, Neisseria meningitidis
atgaatagcctccccattgccgacctcctcgtctccgccgtcatcgccgcctgcatcgtgctatccgcgatgcgcggcgtgattgcggaggcaggctcaatggcggcatgggtggtttccttctttttcgccaaactctttgccgcctccttcgccgacctcgcctttgcctcgttccaaccccgcctgtttgcattggctctgtcgttcatttccctgttcgtcattgcctgtctgatccagaaaatgctccgttcgctgctgaccagcgcagtttcggcggtcggtttgggctttgccaaccgcattttgggcggcgtattcggtgcattgaaaggcgttttgattgttaccctgctggtcatgcttgcttcaaaaaccgacctgcccgataccgaagaatggcggcaatcttacacactgccgtttttcgtatcgctttccgaagccgtgttgaaccatagcggcggcacggcggaaactccggaagacgattga

SEQ ID NO: 43663 - DNA, 1227 bp, Neisseria meningitidis
atgacctttttacaacgtttgcaaggtttggcagacaataaaatctgtgcgtttgcatggttcgtcgtccgccgctttgatgaagaacgcgtaccgcaggcggcggcaagcatgacgtttacgacgctgctggcactcgtccccgtgctgaccgtgatggtggcggtcgcttcgattttccccgtgttcgaccgctggtcggattcgttcgtctccttcgtcaaccaaaccattgtgccgcagggcgcggacatggtgttcgactatatcaatgcgttccgcgagcaggcgaaccggctgacggcaatcggcagcgtgatgctggtcgttacctcgctgatgctgattcggacgatagacaatacgttcaaccgcatctggcgggtcaattcccagcgtccgtggatgatgcagtttctcgtctattgggctttactgacgttcgggccgctgtctttgggcgtgggcatttcctttatggtcggctcggtacaggatgccgcgcttgcctcaggtgcgccgcagtggtcgggcgcgttgcgaacggcggcgacgctgaccttcatgacgcttttgctgtgggggctgtaccgcttcgtgccaaaccgcttcgttcccgcgcggcaggcgtttgtcggggctttggcaacagcgttctgtctggaaaccgcgcgttccctctttacttggtatatgggcaatttcgacggctaccgctcgatttacggcgcgtttgccgccgtgccgtttttcctgttgtggctgaacctgttgtggacgctggtcttgggcggcgcggtgctgacttcttcactctcctactggcagggagaagcgttccgcaggggcttcgactcgcgcggacggtttgacgacgtgttgaaaatcctgctgcttctggatgcggcgcaaaaagaaggcaaagccttgcctgttcaggagttcagacggcatatcaatatgggctacgacgagttgggcgagcttttggaaaagctggcgcggcacggctacatctattccggcagacagggttgggtgttgaaaacgggggcggattcgattgagttgaacgaactcttcaagctcttcgtttaccgtccgttgcctgtggaaagggatcatgtgaaccaagctgtcgatgcggtaatgatgccgtgtttgcagactttgaacatgacgctggcagagtttgacgctcaggcgaaaaaacagcagcaatcttga

SEQ ID NO: 43664 - DNA, 621 bp, Neisseria meningitidis
atgaaaccgcaattcatcactttggacggcatagacggtgccggcaaatccaccaaccttgccgtcatcaaggcatggtttgaacggagggggctgcccgtgctgttcacgcgcgagccgggcggaacgccggtcggtgaggccttgcgcgaaatcctgctcaaccctgaaaccaaagccggtttgcgtgcggaaaccctgatgatgttcgccgcgcgtatgcagcacatcgaggaagtcatcctgcccgcgctttcagacggcatacacgtcgtgtctgaccgttttaccgacgcgaccttcgcctatcagggcggcgggcgggggatgccgtctgaagacattgaaattttggaacattgggtgcagggcggtttgaagccggatttgaccctgctgctggatgtgccgctcgaagtgtcgatggcgcgtatcgggcagacgcgcgagaaagaccgtttcgagcaggagcaggcggatttctttatgcgtgtgcgcggcgtttatctcgaccgagccgccgcctgtcccgaacggtacgccgttatcgacagtaaccgcaacttggatgaagtcagaaacagcatagaaaaagtgttggacggacatttcggctgctga

SEQ ID NO: 43665 - DNA, 855 bp, Neisseria meningitidis
ttgttttccgaacacggcggacttgagatgaaacccgatatttatgctttgctggaacgcgccctgctttcgggcgacccagatgaaaaaggacggctgacggatgaggcgtttgccgccgttcaaaatgcggacggggcggaaacaaacgcaccgccggcggacttcccccgcgcgggacgaccggacaagcctgttttggtcgcgccgtcgcagctgacgccacgcaaaatgaacacaaccgaaggctatgcggcgatgctgcacgcgattgcgcatatcgaattcaacgccatcaatctggctttggacgcggcataccgtttccgcacgctgccgtttcagtttgtccgcgactgggtgaaagtggcgaaggaagaggtgtaccatttccgcctgatgcgcgaaaggctgcgcgctttcggcttcgattacggcgattttgaagcacacaatcatttatgggatatggcatacaaaaccgcctacgatcctttgttgcgtatggctttagtgccgcgcgttttggaagcgcgcgggctggacgttacgcccggcatacgcgcgaaggtggcgcagcgcggtgattcggaaacctgcggcgtgttggacatcatttaccgcgacgaagtgggacacgtcgccatcggcaaccggtggtatcaacacctttgccgcgaacgcggtttggagcctgtcgccctgttccgcagcctgattgcccgttacgatatgtttatcttccggggctatgtgaacatcgaagcgcgcgaaaaagcaggcttcagccgctttgaattggatatgttggaagatttcgagcagggtttgaaacaaaataaacatgccgtctga

SEQ ID NO: 43666 - DNA, 303 bp, Neisseria meningitidis
atgcaacgtcaatccttaacaaacgctgacggcgaagtgcgggaacttgccgccgaagattttgcgcttgcccgccccattgccgaagccctgcccgaagacttggcacaggtgcttttttcccatcaaaaacaattggaagaaaagggcgtaatgcaaaaacgaaacacaggcaaaaccccgaaacaactcgttaccatacgcctgtccgccgatgtggtcgaaaaattccgcgccggcggcaagggctggcagacgcgcatcaacgaggttttgcgccaatatatcgcccaattgaaataa

SEQ ID NO: 43667 - DNA, 762 bp, Neisseria meningitidis
atgaccgaattcgtcgtattgattccggcgcggctggattcgtcgcgcctgcccggaaaagccttggcggacatccacggcaaaccgatggtcgtgcgcgttgccgaacaggcggcaaaaagtaaagccgcgcgcgtcgtcgttgccaccgaccatcccgatattcagacggcctgtcaggcgcacggtatcgaagtcgtcatgacttcaaaccggcacgaaagcggcacgacgcgccttgccgaagcctctgtcgcgctgaagctgccgccgcatttgattgttgtgaacgtacagggtgacgagccgctgattgcccccgaactcatcgaccgcaccgccgaagtactcgtcgaaaacaacgtccaaatggcgaccgccgcccacgaattgcacgatttcgacgaattgatgaatcccaacgccgtcaaagtcgtcctcgacaaaaaccgcaacgccatctacttcagccgcgccccgattccctatccgcgtgatgcgatacgtgccggaaaacgcgaaatgccgtctgaaaccgccgtcctgcgacatatcggcatctacgcttaccgcgccggcttcctgcaacgctatgccgaaatgagcgtttcgccgctggaaaccatcgaatcgctggaacagctgcgcgtcctgtggcacggttatcccattgccgtcgaaaccgccaaagaagcccccgccgccggtgtggatacgcaagaggacttggacagggttcgcgccgtatttcagaccgtataa

SEQ ID NO: 43668 - DNA, 1575 bp, Neisseria meningitidis
atgttcagacggtatcttccgaacagacagatgaatatggtttccaaactggacaaatactggcagcaccccgccctctactggcctttgctcatcctttttgccgccgccaccccctttaccttcgcaccctactaccacttttggctgatgcccttgattttcggtgccttcgtccgcctcatcgaactgcgtccgcgttttgctgtctcttccgcctacctgttcggcctgaccgcatacacgacacagttctactggatacacaccgccctgcacgacgtttccggcctgcccgacctctatgccgtaccgctgaccttcctactccccgcctaccttgccctttatccggcactgtgtttctggctgtggaaaaaatttaccctgcctcggggcataaaaatcggtttggtactgcctatcctgtggacgctgaccgagtttgcccgcgaacgtttcctgaccggattcggctggggcgcaatcggctactcccaaatcaccccggacagcccgctcgccggctttgccccattgggcggcatccacatggttacactggcaaccgcctttctcggtgtctggctggttttggcgagtaataacaccgcacgttcgggcaaacgcctgcttccgattatcctgattgccgccctgcttgccgcaggctacaccgcccgacaaaccgacttcacccgccccgacggcagccgcagcaccgtcgccctgcttcaaggcaacatcgaccaaaccctcaaatggcgtgaagaccaagttatcccgaccatacagaaatattacgaacaagtcggcaaaaccaccgccgacatcgtcatcctgcccgaaaccgccatccccgttatgcgccaaaacctgccggaaaacatactggcgaaatttgccgaacaggcgcaaaacaacggcagcgcgctcgccgtcggcatcagccaatacacttcggacggcaacggttacgaaaacgccgtcatcaacctgaccggttatcaggaaaacaatcaggacggtatcccctactacgccaaaaaccacctcgtccccttcggcgaatacaaaccgctgcctttcctgaccacgccgctttacaaaatgatggatatgcccctttccgacttccgcaaaggcggcggcaagcaatccgccctgctgatgaaaaaccaaaaaatcgccttcaacatctgttacgaagacggattcggcgacgaactgattgccgccgcaaaagatgccaccctgcttgccaatgccagcaatatggcgtggtacggaaaatccaacgccatgtaccagcacctccaacaatcgcaggcgcgggctatggaactcggacgctatatggtccgcgccaccaacaccggcgcaaccgccatcatctcccccaaaggcaacatcatcgcccaagcccaacccgatacggaaaccgtattggaaggacacatcaaaggctatgtcggcgaaacgccctatatgaaaaccggcagttcatggtggttgatgggcatattggccctagccgcactgattcttttcatcttccgaaacaaagaacactga

SEQ ID NO: 43669 - DNA, 1575 bp, Neisseria meningitidis
atggctcaaatccaaatgagcgcaaatgttaaaaccatcaacgccgtctttgccgccatgctggtaggtacagtcggctattttatttattggggcttgggttatacccattacaattacgccgccttattcattattgccacgatgttcggcgtgtttatggcgttcaacatcggcggcaacgatgttgccaattctttcggcaccagcgtcggtgcgggtacgctgaccatcccgcaggctttgctgattgcggcggtatttgaggtcagcggcgcggtcatcgcgggcggcgaggtaaccaataccatacgcaaaggcatcgtcgatttgaagggtgttgatttcgaacccatacagtttgtgtttattatgatgtccgcgcttttggcggcggcgttgtggctgttgtttgcctcgaaaaaagggcttccggtatctaccacccattccattatcggcggcattgtcggcagcgcggtatgtatggcggtaatgaacgatgccgcatcgggcgatttgatacgttggggcaagctgggcggtattggtgtttcttgggtattgtcgcccgtgttgggcggcgcggtgtcctattttctgttttcgcgcgtcaagaaaaacgtcttagattacaacgcttgggcggaaggcacgctcaagggcatcaagcaggaaaaaaaggcctataaagaacggcaccgcctgtttttcgagggtttgtccgaagccgaaaaagtcgagtacgccaccaaaatggcgcacgacgcgcaaatttacgacgaacccgaattcgatccgcaagagctgcaatcggagtattaccgcggtctttatgcgttcgacaaccgtaaaaacaatgtcgattcctacaaggcactgcattcttggattccctttatcgcttcgttcggcgcgatgatgatttccgctatgctgattttcaagggcttgaaaaacctgcatttggggatgagcaacgtcaacagcttcctgaccatctttatgataggcgcggcggtgtggatggggacgtttgtttttgccaaaagcctcaagcgtaaagacttgggcaaatcgacctttcagatgttttcatggatgcaggtctttaccgcctgcggcttcgcattcagccacggtgcgaacgatatcgccaacgccatcggtccgtttgccgcgattatggatgttttgcgtaccaacagcgttgccgcgcaaaatgtcgtccccccgattgcgatgctgactttcggcatcgcgctgattgtcggtttgtggtttgtcggtaaagaggtgattaaaaccgtcggtacgagtttggcggaaatgcatcctgcttcgggttttaccgccgaactgtccgccgcctccgtcgtgatgggcgcgtcgctgatggggctgcccgtgtccagtacgcatatcttggtcggcgcggtactcggtatcggtctggtcaaccgcaatgccaactggaaactgatgaagcccatcggtttggcgtgggtcattaccctgcctgccgccgccgtattgtcggttgtctgctacttggttttacaggcagtattctga

SEQ ID NO: 43670 - DNA, 1542 bp, Neisseria meningitidis
atgaagtttttagaccgtgaggcaagcattgccaagccgggtttcaaccgttggctcgtaccgcccgcagcattggcggtacaccttgccatcgggcagatttacgcctattccgtattcaacgcgccgctgaccaaacttatcggcataaccgaatcggcggccggagattggaagctgacgaccgtaggttggattttcagtatcgcactcgcgatgctgggcgcgtcggccgccctgttcggtacgtggatggaacgggtagggccgcgcaaagccatatttgccgccgcctgctgcttcagcctgggcttcttcgtatccgcattcggcgtgcgtacgcacaacctcttcctgctctatttgggcaacggcgtcatcggcggcgtaggcttgggtttgggctacatcgggccggtttccacactgatgaaatggtttcccgacaagccgggtatggcgaccggtttggcgattatgggtttcggtggcggcgcaatgctggcctcgccgctttccgtatcactgatgaacaccttttcaaacgctgcttcggtcggggttgccgaaaccttcgccgtattgggtctgctttacctcgcactgatgatgttcggcgcgtttaccatccgcgtacctgccgacggctggaaacctgaaggctataccgcgccgaaaacgcaaaacaagctggtcagcagcaatcatgtcaacgtgtcccaagccatgaaaacgccgcagttttggctgttgttctgggtattgtgcctgaacgtaactgccggcatcggcgtattgggtcaggcatccgtgatgattcaggaactcttttccgaaacctccataggcaggcaggcagcagtcggcgcaggtgcggcggcaggcttcgtcagcctcctgagcctgtttaacatgggcggacgctttttgtggtcgagcgtttccgacaaaatcggacgcaaaaacacctacaccatcttcttcgtactcggttcgctgctgtatttcgccgttccctccatcggcgagggcggcagcaaagccctgttcatcatcggcttttgcgtgattatttccatgtacggcggcggatttgccgccattcccgcctacctgaaagacctgttcggcacctatcaggtcggcgcgattcacggacgcatcctgctggcctggtcaaccgccgccgtcatcggcccggtactggtcaattacatacgccaaagccaaatcgacagcggcataccggcggcacaggcatacagcgtaaccatgtacatcatggcgtgcctgctgattatcggtttgttgtgcaacctcgccgtcaaatccgtacacgaaaaacaccacgaaaaagacatcaaaaccgccgcacacagcggcaaccccgatgacgaaaccgccatatccgacgcttaccttgtgggcgaaaaagtttccggcggcggcatatcggtctggtggcgttgggcattggccgtcataccgctcgcctacggcgtggtgatggtctttgtcaaagcactcgaccttttctcctga

SEQ ID NO: 43671 - DNA, 5937 bp, Neisseria meningitidis
atgaataaaggtttacatcgcattatctttagtaaaaagcacagcaccatggttgcagtagccgaaactgccaacagccagggcaaaggtaaacaggcaggcagttcggtttctgtttcactgaaaacttcaggcgacctttgcggcaaactcaaaaccacccttaaaactttggtctgctctttggtttccctgagtatggtattgcctgcccatgcccaaattaccaccgacaaatcagcacctaaaaaccagcaggtcgttatccttaaaaccaacactggtgcccccttggtgaatatccaaactccgaatggacgcggattgagccacaaccgctatacgcagtttgatgttgacaacaaaggggcagtgttaaacaacgaccgtaacaataatccgtttgtggtcaaaggcagtgcgcaattgattttgaacgaggtacgcggtacggctagcaaactcaacggcatcgttaccgtaggcggtcaaaaggccgacgtgattattgccaaccccaacggcattaccgttaatggcggcggctttaaaaatgtcggtcggggcatcttaactaccggtgcgccccaaatcggcaaagacggtgcactgacaggatttgatgtgcgtcaaggcacattgaccgtaggagcagcaggttggaatgataaaggcggagccgactacaccggggtacttgctcgtgcagttgctttgcaggggaaattacagggtaaaaacctggcggtttctaccggtcctcagaaagtagattacgccagcggcgaaatcagtgcaggtacggcagcgggtacgaaaccgactattgcccttgatactgccgcactgggcggtatgtacgccgacagcatcacactgattgccaatgaaaaaggcgtaggcgtcaaaaatgccggcacactcgaagcggccaagcaattgattgtgacttcgtcaggccgcattgaaaacagcggccgcatcgccaccactgccgacggcaccgaagcttcaccgacttatctctccatcgaaaccaccgaaaaaggagcggcaggcacatttatctccaatggtggtcggatcgagagcaaaggcttattggttattgagacgggagaagatatcagcttgcgtaacggagccgtggtgcagaataacggcagtcgcccagctaccacggtattaaatgctggtcataatttggtgattgagagcaaaactaatgtgaacaatgccaaaggcccggctactctgtcggccgacggccgtaccgtcatcaaggaggccagtattcagactggcactaccgtatacagttccagcaaaggcaacgccgaattaggcaataacacacgcattaccggggcagatgttaccgtattatccaacggcaccatcagcagttccgccgtaatagatgccaaagacaccgcacacatcgaagcaggcaaaccgctttctttggaagcttcaacagttacctccgatatccgcttaaacggaggcagtatcaagggcggcaagcagcttgctttactggcagacgataacattactgccaaaactaccaatctgaatactcccggcaatctgtatgttcatacaggtaaagatctgaatttgaatgttgataaagatttgtctgccgccagcatccatttgaaatcggataacgctgcccatattaccggcaccagtaaaaccctcactgcctcaaaagacatgggtgtggaggcaggctcgctgaatgttaccaataccaatctgcgtaccaactcgggtaatctgcacattcaggcagccaaaggcaatattcagcttcgcaataccaagctgaacgcagccaaggctctcgaaaccaccgcattgcagggcaatatcgtttcagacggccttcatgctgtttctgcagacggtcatgtatccttattggccaacggtaatgccgactttaccggtcacaataccctgacagccaaggccgatgtcaatgcaggatcggttggtaaaggccgtctgaaagcagacaataccaatatcacttcatcttcaggagatattacgttggttgccggcaacggtattcagcttggtgacggaaaacaacgcaattcaatcaacggaaaacacatcagcatcaaaaacaacggtggtaatgccgacttaaaaaaccttaacgtccatgccaaaagcggggcattgaacattcattccgaccgggcattgagcatagaaaataccaagctggagtctacccataatacgcatcttaatgcacaacacgagcgggtaacgctcaaccaagtagatgcctacgcacaccgtcatctaagcattaccggcagccagatttggcaaaacgacaaactgccttctgccaacaagctggtggctaacggtgtattggcactcaatgcgcgctattcccaaattgccgacaacaccacgctgagagcgggtgcaatcaaccttactgccggtaccgccctagtcaagcgcggcaacatcaattggagtaccgtttcgaccaaaactttggaagataatgccgaattaaaaccattggccggacggctgaatattgaagcaggtagcggcacattaaccatcgaacctgccaaccgcatcagtgcgcataccgacctgagcatcaaaacaggcggaaaattgctgttgtctgcaaaaggaggaaatgcaggtgcgcctagtgctcaagtttcctcattggaagcaaaaggcaatatccgtctggttacaggagaaacagatttaagaggttctaaaattacagccggtaaaaacttggttgtcgccaccaccaaaggcaagttgaatatcgaagccgtaaacaactcattcagcaattattttcctacacaaaaagcggctgaactcaaccaaaaatccaaagaattggaacagcagattgcgcagttgaaaaaaagctcgcctaaaagcaagctgattccaaccctgcaagaagaacgcgaccgtctcgctttctatattcaagccatcaacaaggaagttaaaggtaaaaaacccaaaggcaaagaatacctgcaagccaagctttctgcacaaaatattgacttgatttccgcacaaggcatcgaaatcagcggttccgatattaccgcttccaaaaaactgaaccttcacgccgcaggcgtattgccaaaggcagcagattcagaggcggctgctattctgattgacggcataaccgaccaatatgaaattggcaagcccacctacaagagtcactacgacaaagctgctctgaacaagccttcacgtttgaccggacgtacaggggtaagtattcatgcagctgcggcactcgatgatgcacgtattattatcggtgcatccgaaatcaaagctccctcaggcagcatagacatcaaagcccatagtgatattgtactggaggctggacaaaacgatgcctataccttcttaaaaaccaaaggtaaaagcggcaaaatcatcagaaaaaccaagtttaccagcacccgcgaccacctgattatgccagcccccgtcgagctgaccgccaacggcataacgcttcaggcaggcggcaacatcgaagctaataccacccgcttcaatgcccctgcaggtaaagttaccctggttgcgggtgaagagctgcaactgctggcagaagaaggcatccacaagcacgagttggatgtccaaaaaagccgccgctttatcggcatcaaggtaggcaagagcaattacagtaaaaacgaactgaacgaaaccaaattgcctgtccgcgtcgtcgcccaaactgcagccacccgttcaggctgggataccgtgctcgaaggtaccgaattcaaaaccacgctggccggtgcggacattcaggcaggtgtaggcgaaaaagcccgtgccgatgcgaaaattatcctcaaaggcattgtgaaccgtatccagtcggaagaaaaattagaaaccaactcaaccgtatggcagaaacaggccggacgcggcagcactatcgaaacgctgaaactgcccagcttcgaaagccctactccgcccaaactgaccgcccccggtggctatatcgtcgacattccgaaaggcaatttgaaaaccgaaatcgaaaagctggccaaacagcccgagtatgcctatctgaaacagctccaagtagcgaaaaacgtcaactggaaccaggtgcaactggcttacgataaatgggactataagcaggaaggcttaaccagagccggtgcagcgattgttaccataatcgtaaccgcactgacttatggatacggcgcaaccgcagcgggcggtgtagccgcttcaggaagtagtacagccgcagctgccggaacagccgccacaacgacagcagcagctactaccgtttctacagcgactgccatgcaaaccgctgctttagcctccttgtatagccaagcagctgtatccatcatcaataataaaggtgatgtcggcaaagcgttgaaagatctcggcaccagtgatacggtcaagcagattgtcacttctgccctgacggcgggtgcattaaatcagatgggcgcagatattgcccaattgaacagcaaggtaagaaccgaactgttcagcagtacgggcaatcaaactattgccaaccttggaggcagactggctaccaatctcagtaatgcaggtatctcagctggtatcaataccgccgtcaacggcggcagcctgaaagacaacttaggcaatgccgcattaggagcattggttaatagcttccaaggagaagccgccagcaaaatcaaaacaaccttcagcgacgattatgttgccaaacagttcgcccacgctttggctgggtgtgttagcggattggtacaaggaaaatgtaaagacggggcaattggcgcagcagttggggaaatcgtagccgactccatgcttggcggcagaaaccctgctacactcagcgatgcggaaaagcataaggttatcagttactcgaagattattgccggcagcgtggcggcactcaacggcggcgatgtgaatactgcggcgaatgcggctgaggtggcggtagtgaataatgctttgaattttgacagtacccctaccaatgcgaaaaagcatcaaccgcagaagcccgacaaaaccgcactggaaaaaattatccaaggtattatgcctgcacatgcagcaggtgcgatgactaatccgcaggataaggatgctgccatttggataagcaatatccgtaatggcatcacaggcccgattgtgattaccagctatggggtttatgctgcaggttggacagctccgctgatcggtacagcgggtaaattagctatcagcacctgcatggctaatccttctggttgtactgtcatggtcactcaggctgccgaagcgggcgcgggaatcgccacgggtgcggtaacggtaggcaacgcttgggaagcgcctgtgggggcgttgtcgaaagcgaaggcggccaagcaggctataccaacccagacagttaaagaacttgatggcttactacaagaatcaaaaaatataggtgctgtaaatacacgaattaatatagcgaatagtactactcgatatacaccaatgagacaaacgggacaaccggtatctgctggctttgagcatgttcttgaggggcacttccataggcctattgcgaataaccgttcagtttttaccatctccccaaatgaattgaaggttatacttcaaagtaataaagtagtttcttctcccgtatcgatgactcctgatggccaatatatgcggactgtcgatgtaggaaaagttattggtactacttctattaaagaaggtggacaacccacaactacaattaaagtatttacagataagtcaggaaatttgattactacatacccagtaaaaggaaactaa

SEQ ID NO: 43672 - DNA, 849 bp, Neisseria meningitidis; identical to SEQ ID NO: 37501

SEQ ID NO: 43673 - DNA, 1341 bp, Neisseria meningitidis
atgttgaatccatcccgaaaactggttgagctggtccgtattttggacgaaggcggttttattttcagcggcgatcccgtacaggcgacggaggctttgcgccgcgtggacggcagtacggaggaaaaaatcatccgtcgggcggagatgattgacaggaaccgtatgctgcgggagacgttggaacgtgtgcgtgcggggtcgttctggttgtgggtggtggcggcgacgtttgcattttttaccggtttttcagtcacttatcttctaatggacaatcagggtctgaatttctttttggttttggcgggcgtgttgggcatgaatacgctgatgctggcagtatggttggcaatgttgttcctgcgtgtgaaagtggggcgttttttcagcagtccggcgacgtggtttcggggcaaagaccctgtaaatcaggcggtgttgcggctgtatgcggacgagtggcggcaaccttcggtacgttggaaaataggcgcaacgtcgcacagcctgtggctctgcacgctgctcggaatgctggtgtcggtattgttgctgcttttggtgcggcaatatacgttcaactgggaaagcacgctgttgagcaatgccgcttcggtacgcgcggtggaaatgttggcatggctgccgtcgaaactcggtttccctgtccccgatgcgcgggcggtcatcgaaggccgtctgaacggcaatattgccgatgcgcgggcttggtcggggctgctggtcggcagtatcgcctgctacggcatcctgccgcgcctgctggcttgggtagtgtgtaaaatccttttgaaaacaagcgaaaacggattggatttggaaaagccctattatcaggcggtcatccgccgctggcagaacaaaatcaccgatgcggatacgcgtcgggaaaccgtgtccgccgtttcaccgaaaatcatcttgaacgatgcgccgaaatgggcggtcatgctggagaccgagtggcaggacggcgaatggttcgagggcaggctggcgcaggaatggctggataagggcgttgccaccaatcgggaacaggttgccgcgctggagacagagctgaagcagaaaccggcgcaactgcttatcggcgtgcgcgcccaaactgtgccggaccgcggcgtgttgcggcagattgtccgactctcggaagcggcgcagggcggcgcggtggtgcagcttttggcggaacaggggctttcagacgacctttcggaaaagctggaacattggcgtaacgcgctggccgaatgcggcgcggcgtggcttgagcctgacagggcggcgcaggaagggcgtttgaaagaccaataa

SEQ ID NO: 43674 - DNA, 1584 bp, Neisseria meningitidis
atgccgaacaagaagaaaaaagccgcctttgcgcgtgctgcaacggagaacggtgtgccggacgtgtccaacatcaaaaattcatatgatgatttgatgtacgaatccggcgcattctctcaaaccgccatcaataatttggaggcgcgcgcccgcctgatgggtttgcagcccgcgcccgccgccaatgccaaggtcttggagctgggctgttcgatgggcggaaacatcatcacgcaggcactttattacccggatgcggaatttgtcggtatcgacctgtccggcaggcaggttgcacagggcaacgccatcattgaaaaaatgggcttgaaaaatgtgcgtctggaagaaaaagatattttgaccatcgatgagtcattcgggaagtttgactatatcatcgtccacggcatttggtcgtgggtgcctgacgcagttaaagacaaaattttttcgatttgctggaacaacctgaccaaacacggcattgcctatatttcatacaatgtttaccccggctggaaacggcaggagcagttgcgcgaaattatgtactttgccggcagggatgtgcttgaagaacccttggaagcgcggacgcggaaaggcttggacgcgctcaaggcgctggcggaaattttggaaaacgacaagggcttggacggcggcggcaaacttccggcgattcaaaaaatattgaatcataatttttattacatcgcacacgaatatatggaggcgtttaacgacccgatttacgtcaacggcttcatcgaatgggctaaccgccacaggctcgcatatatcggggataccaatttgcacgtgtcttttgtttcttggatggcggagcatacgcgggagcggattctggcattggcaggggacgattatattgccaaagaattttacagtgatattttatccgaccgccaattccgccgttcgcttttatgccgtgaggaagtcggggatactgtcaggcgtgatgagtcggttgccgtcgaagtgatagaaagtttgaatttccgcccggcaagaggggaaacaatcaactttgatgaaaacgatatcctgctttcgggcatacgcgatgtgatgaaaaccggagaggcgtttaaaacggaagatgttgcggaaaatctcgcccgccgatttcccggtttggaatttgaccgcatgaaaatcaattcccagcttttattgcaaaccattctcgggcgtttttctgtttcatcagacaatgcgggcaaaccattttttgaagaccataaaacctatgtgccggcgcgctttacaaactatgccgccgcctttgtggaacacggcgcggaagcgtttgtccggcctgccaaccgttacaacgaaagcaccccctcattcggatacgggcatttgtacattatgcgccaattgtcgcggccgacgagcaaacaggcattgattgaaacggttgccgaaaacttgaacatcgtcagcaccacgcccgacggtttgacattccatccgcctgccgaagtgtatgtggaagaaatattggcagacttggcagacaggcattttctcgtttcggcggattga

SEQ ID NO: 43675 - DNA, 1593 bp, Neisseria meningitidis
atgagggcgttctccgtccgcaaccataaaggaagtttcatgaaccggacttatgccaatttctacgaaatgctcgccgccgcctgccgcaaaaacggaaacggcacggcagtgttcgacggcaaggaaaaaaccgcctaccgcgcgctcaagcaggaggccgaagccgtcgcggcgtatctgcaaaatatcggcgtgaagttcggcgacacggtcgcgctggcggtttccaattccacagaatttattaccgcctatttcgccatctccgccatcggcgcggtcgccgtaccgatgaacacatttttgaaaaacagcgaatacgcgtatatcctgaacgactgcaaggcgcgcttcctgttcgcctcggccggcctgtcaaaagaattggcgggcttgaaggcgcaaacgcccgtcgaaaaaatcatttggacggacaaaagccgtccgaccggcgaaacggcggaaggcgatgccttttttgaagacgtgcgccgcttccccgaaaaacccgacttgggccgccaaccccggataaatgatttggcacacatcatctacacctccggcacgacggggcatcccaaaggcgcgctaatcagttacgccaacctgttcgccaacctgaacggcatcgaacgcatctttaaaatttccaagcgcgaccgctttatcgttttcctgccgatgttccacagcttcacgctgacggctatggtgctgctgccgatttatatggcgtgttcgattattttggtcaaatccgtttttccgttttccaacgttttgaaacagacactgctcaaacgcgcgaccgtgtttttgggcgtacccgcgatttacaccgcgatgagcaaggcgaaaatcccttggtatttcagatggttcaaccgcattcgcctgtttatcagcggcggcgcgcctttggcggaacaaaccatcctcgatttcaaagccaagttcccccgcgccaaattgctggaaggctacggactgagcgaagcctctcccgtcgtcgccgtcaatacgcccgagaggcaaaaagcccgcagcgtcggcatccccctgcccggtttggaagccaaagccgtcgatgaagaattggtcgaagtgccgcgcggcgaagtgggcgaactgatcgtcaggggcggttcggtgatgcggggctacctcaatatgcctgccgccaccgatgaaaccatcgtcaacggctggttgaaaacgggcgatttcgttaccatagacgaagacggctttatctttatcgtcgaccgcaaaaaagatttgattatttccaaaggtcaaaatgtctatccgcgcgagattgaagaagaaatctacaaactcgatgccgtcgaagccgccgccgtcatcggcgtgaaagaccgttatgccgacgaggaaatcgtcgccttcgtccaattgaaggaaggtatggatttgggcgagaacgaaatccgccgccacctgcgtaccgtgctggcaaatttcaaaatccccaaacaaatccactttaaagacgggctgccgcgcaacgctacgggcaaggtattgaaacgggtgttgaaggagcagtttgacggaaacaaatga

SEQ ID NO: 43676 - DNA, 231 bp, Neisseria meningitidis
atggctcgtcaatcattcaaacgtagaaaattctgccgtttcacggctgaaaaaatccaagaagtcgattacaaacaagttgatttgctgaaagacttcatctccgaaaacggtaaaatcattcctgcacgcatcacaggaacgaaggcattctaccaacgccaattggctgttgccgtaaaacgcgcacgcttcctggctctgctgccttacaccgaccaacacaaataa

SEQ ID NO: 43677 - DNA, 2136 bp, Neisseria meningitidis
atgaacaatccattggtgaatcaggctgctatggtgctgcctgtgtttttgttgagtgcttgtctgggcggaggcggcggcagtttcgatcttgattctgtcgataccgaagccccgcgtcccgcgccaaagtatcaagatgtttcttccgaaaaaccgcaagcccaaaaagaccaaggcggatacggttttgcgatgaggttgaaacggaggaattggtatccgtcggcaaaagaaaacgaggttaaactgaacgagggtgattgggaggcgacaggattgccgacagaacccaaggaactccctaaacggcaaaaatcggttattgaaaaagtagaaacagacagcgacagcaatatttattcttccccctatctcacgccatcaaaccatcaaaacggcggcgctggcaacggtgtaaaccaacctaaaaataaggcaaaaggttacgaaaatttccaatatgtttattccggttggttttacaaacacgctaaacaaaatcgtgatttgccaaataacattgtacgacaaggcgacgacggttatatcttctatcacggtaaagaaccttcccgacaacttcccgcttctggaacagttacctataaaggtgtgtggcattttgcgaccgatgtcaaaaaatctcaaaattttcgtgaaattatccaaccttcaaaaagtcaaggcgacaggtatagcggattttcgggcgatgaaggcgaagaatattccaataaaaatgaaccgactttacaaagcggtcatgaaggttatggttttacctcgaatttacaagtggatttcgacaataagaaattgacaggtaaattaatacgcaataatgcgaaccaaaataatactaataatgacaaacataccacccaatactacagccttgatgcgacgcttaagggaaaccgctttagcggaaaagcggaagcaaccgacaaacccaaaaacggcgaaaccaaggaacatccctttgtttccgactcgtcttctttgagcggcggctttttcggcccgaagggtgaggaattgggtttccgctttttgagcgacgataaaaaagttgccgttgtcggcagcgcgaaaaccaaagacaaagacgcaaatggcaatactgaggcggcttcaggcggcacaggtgcggcagcatcgggcggtgcggcagctatgccgtctgaaaacggtaagctgaccacggttttggatgcggtcgagctgacgcacggtggcacagcaatcaaaaaactcgacaacttcagcaacgccgcccaactggttgtcgacggcattatgattccgctcctgcccgaggcttccgaaagcgggaataccaatcaaggtacaaacggcggaacagcctttacccgcaaatttgaccacacgccgaaaagcgatgaaaaagacacccaagcaggtacggcggagaatggcaatccagccgcttcaaatacggcaggtgatgccaatggcaaaacaaaaacctatgaagtcgaagtctgctgttccaacctcaattatctgaaatacgggttgctgacacgcaaaaccgccggcaacacgggggaaggcggcaacggcagccaaaccgccgcccaaacggacgcgcaaagtatgttcctccaaggcgagcgcacaccggtatctgatatggcggcaaggacagaggcaaacgccaaatatcgaggcacttggtacgggcatattgccaacgacacaagctggagcggcaatgcttcagataaagagggaggcaacaaggcggactttaccgtgaattttggcgagaaaaaaattaccggcacgttaaccgctgaaaacaggcaggcggcaacctttaccattgagggaacgattcaggacaacggtttttccggtacggcgaaaactgctgacttaggttttgatctcgatcaaagcaataccaccggcacgcctaaggcatatatcacaaacgccaaggtgcagggcggtttttacgggcctaaagccgaagaaatgggtggatggtttgcttatccgggcgataaacaaacggaaaatgcaacagttgcatccggcaatggaaattcagcaagcagtgcaactgtcgtattcggtgcgaaacgccaacagcttgtgcaataa

SEQ ID NO: 43678 - DNA, 2043 bp, Neisseria meningitidis
atgatgtcgcccgaaacccgaaaacagctcaaaatcaccgatgtttccgccaagaagctcgacaaactcaacctccataccgcgtgggatttggtgttgcacctgccgctgcgttacgaggacgagacgcacattatgccgattaaggacgcgccgattggcgtgccgtgtcaggtcgagggggaggttatccatcaggaagtaacgttcaaaccgcgcaagcagctgattgtccaaatcgccgacggctccggcagcgtcctttttctgcgcttcatccacttttacgccagccatcagaaacagacggcggtcggcaaacgcatccgcgccgtgggcgaaatcaaacacggcttttacggcgacgagatgattcatcccaaaatccgcgatgccgagggcggcggtttggcggaaagcctcacgccggtttacccgaccgtaaacggtttgaaccagcccactttgcgccgtattattcagacggcgttggacgttacgccgctgcacgacacgctgcccgatgccctgctgtgccgtctgaagctgccacacctcgccgaaagcctgcgtcttttgcattcgccgccgccgagtttcacgattcatcagctttcagacggcacgctgcctgcatggcaacggctcaaattcgatgaacttttggcgcaacagctttcgatgcgcttggcgcgacagaagcgtatcggcggcacggcggcggcattgggcggcgacggcacattgacccaagccctgcgccaagccctgccgtttgccctgaccgatgcgcaagaaaaagttgtttccgaaatctgccgcgatatggcgcaaacctacccgatgcaccgcctgctgcagggcgatgtcggcagcggcaaaaccattgtggctgctttgtctgctttgacggctatcgaatccggtgcgcaggtggctgtaatggcgcccactgaaatccttgccgaacaacattttattaaatttaaacaatggctcgaacctttgggcattgaagttgtccgcctttttggcagtttgcgtaaaaaagccaaagacgaagccaaagccaaactcgccgacggcagcgtcaaaatcgccgtcggcacgcacgccctgttttcagacggcgtggcgtttcacaatttgggcttgaccattgtggacgaacagcaccgtttcggcgttgcccaacgcctcgccctcaaaaacaaagggcgcgaagtccatcagctgatgatgtccgccacgcccatcccgcgcacgcttgcgatgagttttttcgccgatttggacgtgtccgtcatcgacgaattgccgcccgggcgcacaccgattaaaacgcgcctcgtcaacaacgtccgccgcgccgaagtcgaaggcttcgtcctcggcacttgccgaaaagggcggcaggcgtattgggtctgcccattgattgaagaaagcgaaaccctgcaactgcaaaccgccgccgaaaccctcgcccggcttcagacggcattgcccgaactcaatatcggactggtacacgggcgcatgaaggccgccgaaaaggccgaagtgatggcgcggttttcttcgggggggctgaacgtcttggtcgccaccaccgtcatcgaagtcggcgtagatgtgcccaatgccgccctgatggtcatcgaacacgccgagcgcatgggcttggcgcagctgcaccaattacgcggtcgggtcgggcgcggcgcggcagaaagcgtgtgcgtcctcctgtttgccgaacccttgggcgaactcgccaaagcgcggctgaaagtcatctacgaacacaccgacggctttgaaatcgcccgccaagacctcaacatccgcggccccggcgaatttctcggcgcgcgccaaagcggcgtgcctatgctgcgtttcgccaagctcgaagaagacctgcacctcttggaacaagcgcgcgaaaccgccccgatgctgattgaacaaaaccccgaaatcgtcgaagcgcatttggcaaggtggctttccggcagggaagggtatttgggcgtgtga

SEQ ID NO: 43679 - DNA, 1068 bp, Neisseria meningitidis
ttgttttgccgtatcgggaattttgcgttttgcggcgtggtttctgcaggttgtttgcttaataataaacattcttattcgtatgcaaaggaaccgcacaccgtgaaaccgcgtttttattgggcagcctgcgccgtcctgctgaccgcctgttcgcccgaacctgccgccgaaaaaactgtatccgccgcatccgcatctgccgccacgctgaccgtgccgaccgcgcggggcgatgccgttgtgccgaagaatcccgaacgcgtcgccgtgtacgactgggcggcgttggatacgctgaccgaattgggcgtgaatgtgggcgcaaccaccgcgccggtgcgcgtggattatttgcagcctgcatttgacaaggcggcaacggtggggacgctgttcgagcccgattacgaagccctgcaccgctacaatcctcagcttgtcattaccggcgggccgggcgcggaagcgtatgaacagttagcgaaaaacgcgaccaccatagatctgacggtggacaacggcaatatccgcaccagcggcgaaaagcagatggagaccttggcgcggattttcggcaaggaagcgcgcgcggcggaattgaaggcgcagattgacgcgctgttcgcccaaacgcgcgaagccgccaaaggcaaaggacgcgggctggtgctgtcggttacgggcaacaaggtgtccgccttcggcacgcagtcgcggttggcaagttggatacacggcgacatcggcctaccgcctgtagacgaatctttacgcaacgaggggcacgggcagcctgtttccttcgaatacatcaaagagaaaaaccccgattggattttcatcatcgaccgtaccgccgccatcgggcaggaagggccggcggctgtcgaagtattggataacgcgctggtacgcggcacgaacgcttggaagcgcaagcaaatcatcgtcatgcctgccgcgaactacattgtcgcgggcggcgcgcggcagttgattcaggcggcggagcagttgaaggcggcgtttaaaaaggcagaacccgttgcggcggggaaaaagtag

SEQ ID NO: 43680 - DNA, 507 bp, Neisseria meningitidis
atgtttgaacaagaagacgaatggatcagcaaaacccaaatgaaaaagcagatgaacgatttgcaggatttgggtatggcgttgaccaagctctcaaacgatacgctgaaaaaaatcggtttggatgcggatttgtacgaggcggtaaccgcctataaaaaaatcacatccaacggcgcgctcaaacgccaggcacaatttatcggcaggctgatgcgcgataccgatcccgcgcccatcgaggcgtttcttgccaagctgcgcggcgacgatgcggcgcacaacgcctttttgcaacgcgtggaacaggcgcgcgtacggctgttggcagacgacggcgcgttgacgcagtttatgtcggattttccgcatgcggacgcgggcaagctgaggacactcatccgcaataccaaaaaagagcaggagcaaaacaaaccaccaaaaaatttccgcgccctgtttcaagagttgaaaaccgtgatggaaaacggggacgcggaaatttag

SEQ ID NO: 43681 - DNA, 405 bp, Neisseria meningitidis
atgaccgcccaaccctgccccatctgcacggcgcaaaatgaagacgttttgctgcaaacccccaacctccgcgtcatcgccgtccataacgacagcggttcgcctgcattctgccgcgtcatttggcgtaagcatattgccgaaatgaccgacctttcggcagcggaacgcggcgaattgatggaaatggtgtacaaagtcgaagccgctatgcgccaagtgttccggccggcaaaaatcaacctcgccagcttgggcaatgtcgtgccgcacctgcattggcatattatcgcccgctttgaaaacgatgcgtctttccccgcgccgatttgggcaaaccccgtccggaaacacggtatgaccctgccgcaagattggacggaacagcttaaaaagctgctttaa

SEQ ID NO: 43682 - DNA, 642 bp, Neisseria meningitidis
atgctgaaacccgaaaccatacacatatccggtcctgccggcattttagaaaccatccatatcccgtccgaacaagtaccggcacgcggtgttgccgtcatcaatcatcccaaccccctccagggcggaacaaacaccaacaaagtcatccaaactgccgccaaagccttaagcaaactcggcttccactgctacctgcccaaccttcgcggcgtaggcggcagcggaggcacacatgattacggacgcggcgaaacgcaagactgcctcgccgtcatcgattatgcccgcgcccaacaccccgaagcccccgaatttgccttatccggcttctccttcggcggttatgtcgccacatttgccgcacaagcgcgcacacccgatttattgctgctcatcggcgcggcagtctgccactataccgaccgtccggaaccgtccgccgttcccaacgttgccaaaacgctgatgatacacggcgcggaagacgaagtcgtcgaaatcgggaaagcactgaaatgggcggaaccgcaagatttgcccgtcattaccatcgccggttccacgcatttctttcacggcaaactcatcgtcctgcgcgacaccatcctccgcttcgcgcccgtatgcctgaacggataa

SEQ ID NO: 43683 - DNA, 1239 bp, Neisseria meningitidis
atggctttttatgcttttaaggcgatgcgtgcggccgcgttggctgccgccgttgcattggtactgtcgtcttgcggtaaaggcggagacgcggcgcagggcgggcagcctgctggtcgggaagcccctgcgcccgtcgtcggtgtcgtaaccgtccatccgcaaaccgtcgcattgaccgtcgagttgccggggcgtttggaatcgctgcgtaccgccgatgtccgcgcccaagtcggcggcatcatccaaaaacgcctgttccaagaaggcagttatgtccgtgccggacagccgctgtatcagatcgacagttccacttatgaagcaggtctggaaagcgcgcgcgcgcaactggcaacggctcaggcaacgcttgccaaagcggatgcggatttggcgcgatacaagcctttggttgccgccgaagccgtcagccggcaggaatacgatgctgcggtaacggcgaaacgttctgccgaggcaggcgttaaagcggcgcaggcggcaatcaaatccgccggcatcagcctgaaccgttcgcgcattaccgcgccgatttccggctttatcggtcagtccaaagtttccgaaggtacgttgctgaacgctggcgatgcgaccgtactggcgaccatccgccaaaccaatccgatgtatgtgaacgttacccagtctgcatccgaagtgatgaaattgcgccgtcagatagccgaaggcaaactgctggcggcggatggtgtgattgcggtcggcatcaaatttgacgacggcacagtttaccctgaaaaaggccgcctgctgtttgccgatccggccgtcaacgaatcgaccggtcagattaccctgcgcgccgccgtaccgaacgatcagaatatcttgatgcccggtctgtatgtgcgcgtgctgatggaccaagtggcggtggataacgcatttgttgtgccgcagcaggcggtaacgcgcggtgcgaaagataccgtgatgattgtgaatgcccaaggcggtatggaaccccgcgaggtaacggttgcgcaacagcagggtacgaattggattgttacgtcgggtctgaaggacggggacaaggtggttgtggaaggcatcagtatcgccggtataacgggtgcgaaaaaggtaacgcccaaagaatgggcgtcgtctgaaaaccaagccgccgcgcctcaatccggcgttcagacggcatctgaagccaaacctgcttctgaagcgaaataa

SEQ ID NO: 43684 - DNA, 1011 bp, Neisseria meningitidis
atgagcaaaaaacgagttctgaccggcgtaaccaccaccggcatcccgcatctgggcaactacgtcggcgccatccgccccgccgtccgcgcggcgcaaaacctcgataccgaatccttcctcttcctcgccgattaccacggtatcatcaaatgccacgagccggagatgattcaccaatccacccaagccgttgccgccacttggcttgcctgcggactcgaccccgagcgcaccaccttctaccgccaaagcgacactcccgaagtgatggaattgaactggattctgacctgcatcactgccaagggtttgatgaaccgcgcccatgcctacaaagccgccgtgcaggcaaatgcagaaaacgggcaggaagaccctgatttcggtgtggaaatgggtttgttcagttatccgattctgatgactgccgatattctgatgttcaacgccaacgaagtgcccgtcgggcgcgaccaaatccaacacgtcgaaatggcgcgcgacatcgccggccgcttcaaccaccgcttccgggaactcttcaccctgcccgaagtgaaaatcgatgaaaacgtcgaactcttggtcggtttggacggacgcaaaatgtccaaatcctacggcaacaccattccgctttgggaaaacgacaaaaaaacccaaaaatcggtcaacaaaatcatcaccaatatgaaagagccgggcgagccgaaacagcccgacgaaagcccattgtttgaaatctacaaagccttctccacgccgtctgaaacggtggaatttacgaaaatgcttgccgacggcttggcgtggggtgaagccaaaaaacttttggcggcgaaaatcaacgccgaactcgccgaaccgcgcgaacgctacaacgagctgaccgccgacccttcgcaaatcgaagagattttgcaggcaggcgcggcgaaagcgcgtaaagaagcacgcgaattattggacaaagtacgcgatgcggtcggcatccgcccgttgaaatga

SEQ ID NO: 43685 - DNA, 825 bp, Neisseria meningitidis
ttgatacaattccgcttttccaacacgcgcaatcatctttatatgaaaaccaagttaatcaaaatcttgaccccctttaccgtcctcccactgctggcttgcgggcaaacgcccgtttccaatgccaacgccgaacccgccgtcaaagccgagtccgccggcaaatccgttgccgcctctttgaaagcgcgtttggaaaaaacctattccgcccaagatttgaaagtgttgagcgtcagcgaaacaccggtcaaaggcatttacgaagtcgtcgtcagcggcaggcagattatctacaccgatgccaaaggcggctatatgttcgtcggcgaactcatcaacatcgacacgcgcaaaaacctgaccgaagaacgcgccgccgatttgaacaaaatcgacttcgcctccctgcctttggacaaagccatcaaagaagtgcgcggcaacggcaagctgaaagtcgccgtcttctccgaccccgattgtccgttctgcaaacgcttggaacacgagtttgaaaaaatgaccgacgtgacggtttacagctttatgatgcccattgccggcctgcaccccgatgccgcgcgcaaggcgcaaatcttatggtgtcagcccgaccgcgccaaagcgtggacggattggatgcgtaaaggcaaattcccggtcggcggcagcatctgcgacaatcccgtcgcggaaaccacttccttgggcgaacaattcggcttcaacggcacgccgaccctcgtcttccccaacgggcgcagccaaagcggctacagcccgatgccccaactggaggaaatcatccgcaaaaatcaataa

SEQ ID NO: 43686 - DNA, 711 bp, Neisseria meningitidis
atgacctcatgtgaacctgttaaagaacaaaccagtttcaacaatcccgagccaatgacaggatttgaacatacggttacatttgattttcagggcatcaaaatggttatcccctatggctatcttgcacggtatacgcaagacaatgccacaaaatggctttccgacacgcccgggcaggatgcttactccattaatttgatagagattagcgtctattacaaaaaaaccgaccaaggctgggttcttgagccatacaaccagcaaaacaaagcacactttatccaatttctacgcgacggtttggatagcgtggacgatattgttatccgaaaagatgcgtgtagtttaagcacgactatgggagaaagattgcttacttacggggttaaaaaaatgccatctgcctatcctgaatatgaagcttatgaagataaaagacatattcctgaaaatccatattttcataaactttactatattaaaaaaggagaaaatccggcgattattactcatcggaataatcgaataaaccaaactgaagaagataattatagcactagcgtaggttcctgtattaacggtttcacggtacggtattacccgtttattcgggaaaagcagcagctcacacagcaggagttggtaggttatcaccaacaagtagagcaattggtacagagttttgtaaacaatccaagtaaaaaataa

SEQ ID NO: 43687 - DNA, 780 bp, Neisseria meningitidis
atgagcgcaaccattcccccaaaaatcatccgatacgacagcaatccgaccgatgtctattttttcggcacttgcgtccttgatctttttatgcccgaagcaggcatggatgccattaccctaatcgagcagcagggcatacgcgtccatttcccgatggcgcaaagctgctgcggccagcctgcctattcatccggccatccgaccgaagccttcgatgtcgccaaagcacaactcgaccttttccctgaaaactggccgatcgtcgtgccgtccggctcgtgcggcggcatgatgaaacaccactggccgacgctgtttaaaggcagcgagtacgaggaaagggctgtggattgcgccggccgcatcatcgagtttacccatttcctgcttgccatcggtttcaaacccgaagacaagggcgaaccgctcaaagtcgccgttcacacttcctgcgccgcccgccgcgaaatgaatgtccatctttcaggctggcaactgattgacggtatggaaaacgtcgaacgcatcgtccacgaccacgaaagcgaatgttgcggcttcggcggcacattctccgtcaaacaagccgatatttccggcgcaatggtaacagacaaagtcgccgcgctgaaagaaaccggcgcaaccgaaatcatcagcgcggactgcggctgtatgatgaacatcggcggcaaaatcgccaaggacgagccggatatgccgcgtccgaaacatatcgcatccttcttgttggaacgcaccggaggcaaagcatga

SEQ ID NO: 43688 - DNA, 840 bp, Neisseria meningitidis
atgaccgccacagccgccgccatagaccgcctgcttccccaaacccaatgccgcgaatgcggctacgacggctgcctgccctacgcacaggcagtcgcaacaggcgaagcgtacaacctctgcgccccgggcggagaagccgtcattcgggacatttccgccctgctcggcaaaccccttgtcgcacctgccaaaacccaagccaaagcactcgcccggatagacgaatccgcctgtatcggctgcaccgcctgtatccgcgcctgccctgccgatgccattatgggcgcgggcaaacttatgcacaccgtcatcgccgacgaatgcaccggctgcggactctgcgtcgccccctgccccgtcgactgcatccatatgcagcccgttgccgacaccgtcctgccccgcgcgcgtcgcttcagcctgtccgccgacagccgttttgccgccgccgaacacgcgcgcgcgcgctacctcaaacgcaacgaacgcaaacagcgcgaagccgacgaacgcaaggccatgcttgccgaacgcgaagccgccgtccgcaacgcgcgtccgcaaacacccgacacaccgaaaaaaccggcgtttaaccctgccgacctcatcgccaaagccatggcaaaagcgcaaacccaacaagaccgcctcgccgccgccgacaaccgcaaagactatcaggcgaaacagatagccgaagcccgcgaacgcgccgagttgcgccgcgcccaacgcgatatgaaatacggcagcgacagcgaaaaagccgccgccctcgaatacctcaaacaatacaaagccaagcaggatgccgcacaaaacaccgcctcctga

SEQ ID NO: 43689 - DNA, 1179 bp, Neisseria meningitidis
atggaatttgtttacgacgtggcagaatcggcagtcagccctgcggtgattaaagtaatcggcttgggcggcggcggttgcaatgcaatcaataacatggttgccaacaatgtgcgcggtgtggagtttatcagtgccaatacggatgcgcagtctctggcaaaaaaccatgcggcgaagagaatccagttgggtacgaatctgacacgcggtttgggcgcgggcgcgaatcccgatatcggccgtgcggcagcccaggaagaccgggaagccattgaagaagccattcgcggtgcgaatatgctgtttatcacgaccggtatgggcggcggtaccggtaccggttccgcgccggttgttgctgagattgccaagtctttgggcattctgaccgttgccgtggttacccgaccgttcgcatatgaaggtaagcgcgtccatgtcgcacaggcagggttggaacagttgaaagaacacgtcgattcgctgattatcatcccgaacgacaaactgatgactgcattgggtgaagacgtaacgatgcgcgaagccttccgtgccgccgacaatgtattgcgcgatgcggtcgcaggcatttccgaagtggtaacttgcccgagcgaaatcatcaacctcgactttgccgacgtgaaaaccgtgatgagcaaccgcggtatcgctatgatgggttcgggttatgcccaaggtatcgaccgtgcgcgtatggcgaccgaccaggccatttccagtccgctgctggacgatgtaaccttggacggagcgcgcggtgtgctggtcaatattacgactgctccgggttgcttgaaaatgtccgagttgtccgaagtcatgaaaatcgtcaaccaaagcgcgcatcccgatttggaatgcaaattcggtgcggctgaagacgagaccatgagcgaagatgccatccggattaccattatcgctaccggtctgaaagaaaaaggcgcggtcgattttgttccggcaagggaggtagaagcggttgctccgtccaaacaggagcaaagccacaatgtcgaaggtatgatccgcaccaatcgcggtatccgcacgatgaaccttaccgctgcggatttcgacaatcagtccgtacttgacgactttgaaatccctgcgattttgcgtcgtcaacacaattcagacaaataa

SEQ ID NO: 43690 - DNA, 1677 bp, Neisseria meningitidis
ttgcaaaaacctactgccaaaaatgcgaaactgggggataataccgccctgaaaattcatcccatactgattaaaccttcaacaaaggaaatccaaatgtcttccatcaaacgcgccctgatcagcctatccgacaagacaggcgcagtcgaatttgcccaaaccctgcacaaactcggtgtcgaaattctttctaccggcggtacagcaaaactcttggctgatgcaggcgttcccgttatcgaagttgccgactataccggttttcccgaaatgctcgacggccgcgtgaaaaccctgcatccgaaaatccacggcggtattctcggtcgtcgcgatttggacgaacacgtcgccaagatggaagaacacggcatcggcaatatcgacctcgtgtgcgtcaacctctaccccttcgctgccaccatcgccaaaccaaactgcacgctggaagacgcgattgaaaacatcgacatcggcggcccgaccatggtgcgctctgccgcgaaaaactggaaacacgtcgccatcgttaccgacaccgccgatttcccggccatagctgccgaactcgaagccaacaacggcgcattgagcgacaaaacccgtttcaacctctcgcgcaaagcattcagccataccgcccaatacgacggtatgatttccaattacctgacctcgctttcagacgacgtcttgagcggcacgcccgaaatcgccggattccccggccggttcaatcaaagctggattaaagtgcaagacatgcgctacggcgaaaacccgcatcagcgcgccgcgttctaccgcgatattgaccccgccgcaggcagcctcgctgcatacaaacaactgcaaggcaaagaattgtcttacaacaacatcgccgatgccgatgccgcatgggaagccgtcaaatccttcgacgtgcccgcctgcgtgattgtgaaacacgccaatccgtgcggcgtagccatcgcctccaataccttggatgcctacaaactcgcctacgccaccgacaccaccagcgcgttcggcggcatcatcgctttcaaccgcgaagttgacggcgcaaccgtcaaacaaattaccgacaaccagtttatggaagtcctcatggcgcctaagttcaccgccgaagccctcgaaatcgccgccgccaagaaaaacgtgcgcgtattggaagtgccgcttgaggcaggcgcaaaccgcttcgaactcaaacgcgtcggcggcggactgttggtgcaaacgcccgacatccaccgcatcagccgcgccgatttgaaagtcgtctccaaacgccaaccgaccgagcaggaatggaacgatttgctgttcgtctggaacgtcgccaaatacgtcaaatccaacgccatcgtattcggcaaaggcggtcaaacctacggcatcggcgcaggccaaatgagccgcgtggacagcacccgcatcgccgcccgcaaagcgcaagatgccggtctcgacctcaacggcgcgtgtgccgcatccgatgccttcttccccttccgcgacggcgtggacgtgattgccgaacagggcatcaaagccatcatccatccggcaggctcgatgcgcgatcaggaagttttcgacgcagccgacgaacacggcatcgccatggtcgtaaccggcatccgccatttccgccattga

SEQ ID NO: 43691 - DNA, 462 bp, Neisseria meningitidis
atgtctgatttaccctctatctcccgattccttgccgacgaagccgccacactcgatttgggcgcggcgtggtcttcccgtttaaacgcaccgctggtcatttatctcgaaggggatttgggtgcgggcaaaaccacgctgacacgcggcatcctgcgcggattgggtcatcagggcgcagtcaaaagtccgacctacgccatcgtcgaatcttatccgctggaacgcttcaccctgcaccatttcgacctctaccgcttctcgttccccgaagaatgggaagacgcggggcttgacgaactgtttgccgcaaacagcgtctgcctgatcgaatggccgcaacagggcggggaatttacgccgcccgccgacatcaccgcaacattgacacacgacggcgacggcagaaaatgcctgctgaccgcccataccgaacgaggacgcgaaagcctgccgctatga

SEQ ID NO: 43692 - DNA, 915 bp, Neisseria meningitidis; identical to SEQ ID NO: 39317

SEQ ID NO: 43693 - DNA, 1035 bp, Neisseria meningitidis
atgcaaaccctgaccattatccgccccgacgatatgcacctgcacctgcgcgacggcgacgcgctcaaagccgttgccccttataccgcccgccaaatggggcgcgccgtcattatgcccaacctcaaaccgcctgtcgtcagtgtagccgacgcgcttgcctacaaagcgcgcattatggcggcgttgcccgaaggtagcgcgtttgagccgttgatgacgctttatttgactgataacgccacgcccgaacttgtacgcgaagccaaagccgccggcatcgtcgccttcaaactctaccctgccggcgcgaccaccaattccgattccggcgtaaccgacctgttcaagctcatccccgtgttggaagaaatggcgaaacagggcattttgttcctcgttcacggcgaagtaaccgaccccgaaatcgacatcttcgaccgcgaagccgcctttatcgggcgcgtgatgaaacccgttttggcgcaagtgccgaatcttaaagtcgtgttcgaacacatcaccaccgccgaagccgcccgcctggttttggaagcaggcgacaacgtagccgccaccgttaccccgcaacacctcctgctcaaccgcaacgacctcttggtcggcggcgtgcgcccccatcatttctgcctgcccgtactcaaacgcgaaacccaccgtcaggcattggtcgccgccgttaccggcgagaaggcgcataaattcttcctcggcaccgactccgcgccgcacgccaaatccgccaaagaaaacgcctgcggctgcgccggtatgttcagtgcgatgaccgctatcgagctttacgccgaagtatttgaaaaagcaggcgcgttggacaaactcgaagccttcgcctcaaaaaacggcgcaaggttctacggcattcctgaaaataccgacacgatcaccctcgtcaaacaaagccaaaccgttcccgcaagtgttccctacggcgacggcgaacttgtcccgatgcgcgcgggcggcgaaatcggctggacggtgcagtattga

SEQ ID NO: 43694 - DNA, 1776 bp, Neisseria meningitidis
atgaacaaaatataccgcatcatttggaatagtgccctcaatgcctgggtcgtcgtatccgagctcacacgcaaccacaccaaacgcgcctccgcaaccgtgaagaccgccgtattggcgacactgttgtttgcaacggttcaggcaagtgctaacaatgaagagcaagaagaagatttatatttagaccccgtacaacgcactgttgccgtgttgatagtcaattccgataaagaaggcacgggagaaaaagaaaaagtagaagaaaattcagattgggcagtatatttcaacgagaaaggagtactaacagccagagaaatcaccctcaaagccggcgacaacctgaaaatcaaacaaaacggcacaaacttcacctactcgctgaaaaaagacctcacagatctgaccagtgttggaactgaaaaattatcgtttagcgcaaacggcaataaagtcaacatcacaagcgacaccaaaggcttgaattttgcgaaagaaacggctgggacgaacggcgacaccacggttcatctgaacggtattggttcgactttgaccgatacgctgctgaataccggagcgaccacaaacgtaaccaacgacaacgttaccgatgacgagaaaaaacgtgcggcaagcgttaaagacgtattaaacgctggctggaacattaaaggcgttaaacccggtacaacagcttccgataacgttgatttcgtccgcacttacgacacagtcgagttcttgagcgcagatacgaaaacaacgactgttaatgtggaaagcaaagacaacggcaagaaaaccgaagttaaaatcggtgcgaagacttctgttattaaagaaaaagacggtaagttggttactggtaaagacaaaggcgagaatggttcttctacagacgaaggcgaaggcttagtgactgcaaaagaagtgattgatgcagtaaacaaggctggttggagaatgaaaacaacaaccgctaatggtcaaacaggtcaagctgacaagtttgaaaccgttacatcaggcacaaatgtaacctttgctagtggtaaaggtacaactgcgactgtaagtaaagatgatcaaggcaacatcactgttatgtatgatgtaaatgtcggcgatgccctaaacgtcaatcagctgcaaaacagcggttggaatttggattccaaagcggttgcaggttcttcgggcaaagtcatcagcggcaatgtttcgccgagcaagggaaagatggatgaaaccgtcaacattaatgccggcaacaacatcgagattacccgcaacggtaaaaatatcgacatcgccacttcgatgaccccgcagttttccagcgtttcgctcggcgcgggggcggatgcgcccactttgagcgtggatggggacgcattgaatgtcggcagcaagaaggacaacaaacccgtccgcattaccaatgtcgccccgggcgttaaagagggggatgttacaaacgtcgcacaacttaaaggcgtggcgcaaaacttgaacaaccgcatcgacaatgtggacggcaacgcgcgtgcgggcatcgcccaagcgattgcaaccgcaggtctggttcaggcgtatttgcccggcaagagtatgatggcgatcggcggcggcacttatcgcggcgaagccggttacgccatcggctactccagtatttccgacggcggaaattggattatcaaaggcacggcttccggcaattcgcgcggccatttcggtgcttccgcatctgtcggttatcagtggtaa

SEQ ID NO: 43695 - DNA, 420 bp, Neisseria meningitidis
atggcacaattaccgctatatctgacttctgaaatcaaagactttactgtcggcacgcctaaagttttagaatcattttccaaacatatcccttatggtgtcgtctttgaagacgacggcgacacaggctacttctatgccgcttcgcaagacgggattttagatgccttgcacatctataatgtcgaagatgtatccgacaaacatatccccaatcatgtcttgattttatgggatgatgcctgcaccatagccgcattgtgtatcaacgactacattcatgccgtctatgattttgtcgaacaggcaggatattgccgcaacggcttccctgaagcaggcggcgaatgggtgaaagtcgaaaaccgcgtcttggatgatgaattgctggacaaaatcctatcccgaaaatctacataa

SEQ ID NO: 43696 - DNA, 537 bp, Neisseria meningitidis; identical to SEQ ID NO: 37832

SEQ ID NO: 43697 - DNA, 141 bp, Neisseria meningitidis
atggacaccctattaaaaatcatcatcgcgctgtcattttccggcgctgaggcattggcggtatggcttttcatcacggccgccgatgccgtattacgccgcttccagaaaccgagtcattacaggagagtaaaaaaatga

SEQ ID NO: 43698 - DNA, 435 bp, Neisseria meningitidis
gtggcaaagaaaattatcggctatattaaactgcaaattcctgcaggtaaagccaatccatctcctccggttggtcctgctttgggtcagcgcggtttgaatattatggaattttgtaaggcatttaatgctgcaacccaaggtatggagcctggcttaccgattccggttgtgattactgcatttgcagataaatcattcacatttgtgatgaaaaccccgccagcttctatcttgttgaaaaaggctgccggtttgcaaaaaggtagttctaatcctctgaccaacaaagtgggtaaattgacccgtgcccagttggaagaaattgctaaaactaaagatcctgatttgactgctgctgacttggatgcggctgtccgtactatagcaggttctgctcgctcaatgggcttggatgtggagggtgttgtataa

SEQ ID NO: 43699 - DNA, 462 bp, Neisseria meningitidis
atgaatattattatggactcaacaagaaaatttgggattttatgggaagaaaactctgaatgtaatggttttatttatggaaaaattcagataataataggagagaatatatatcctaagatatgcccatatggatattttacgctaaatgcagtttttaatagtttgaagtcatcctttgaagagaagtattatgcaggtggaaacaatggtttagattttggagagcaactatttgatatagataaatataattctctggaattatgcaatatattttctattgatactacatatatgagtggagggggtaattgtgaaatagattgtttagtattagaaatgggatattctggtgaggaagagagacttttttatagttttgacaatgggaaaaactttaaagaaatcaggtataagaaaggtacagttgaatctgttatttttcaattgaatctataa

SEQ ID NO: 43700 - DNA, 789 bp, Neisseria meningitidis
atgatggaaaacggaaaaacagtcccgagatggcgttttgccttgaaaagtgcgggctggcacctcttaatcagcctgtcggttgcagggctggcggcattgctggtttttaaggtttggtatccttatccttatgccgagctgacgggagggctgtcgctttatcagctggtggtggctgtcgatattgtatgtggtccgctgctgactttaattttggcaagcccgaagaaaaagacaaaggcacgcatggtcgatttttccatggtcggcatcatccagctggcggctttggtgtacggtctgcacagcgtttcgctggcgcgtcctgtggtggaagcgtttgaacaggatcgtatgaccattgttacggcggcggaagtcgtggtcgaagatttgcacaaagcccccgaagggctgcaaagcctgtcgtggttcggcatccgccgcattgcattgaaagaacctgaggatgcggatgagaagaacaagacgctggatttgtccctgaaaggtatcgagccgagtatgcgtcccgaccagtggctgccgtattccgacaaggaagcagaagaaatccgcaaacatctgaaaccgctgaaagtcttggcggatgcgagaaaaacgacggttgcggacattctgaaacaggcaggtctcgccgaaggggaggagctgtattacctgccgtttaccagcagcaggcagaaagagtggatagtcattaccgataaagagggcaacaccaaaggctacgcgccgatagacggcttcatcatcaccccttaa

SEQ ID NO: 43701 - DNA, 1587 bp, Neisseria meningitidis
atggcacttttcctcagcatattccccatcgtcctgctgatttggctgatggtgaaaaaaaacagtatgccctcctacgtcgcgctgccgattaccgcagtgctgatttacgccatcaaacttttctacttcgacgatgcgggcatgctgctcaacgccaccgccgcttccggcctcgtcaaaacgctcacgccgattaccgtgattttcggcgcgattatgttcaaccgtatgatggaaaccacgggctgcatcgatgtcatccgcaaatggctggcgaccatcagcccgaaccccgtagcgcaactgatgattatcggctgggcttttgcctttatgattgaaggcgcatccggcttcggtacgcctgccgcgattgccgcgccgattctgatgagcttgggcttcaacccgttgaaagtggcgattttcactttggtgatgaactccgtccccgtctctttcggcgcggtcggtacgccgacctggttcggtttcgcaccgctgaacctgagtgccgaagacatcctcgccatcggcaggcagaccggcgtaatgcacttcttcgcaggtttcgtcatccccgtcatcggcttgggcttcatcgtaccttggtctgaaatccgcaaaaacttgggcttcgtcgccattgccgtcttctcctgcaccattccttatgtcgcattggcgatggtcaacgaagaattcccgtcgctcgtcgccggcgcgatcggcctgatggtgtccgtattcgccgccaaccaaggctggggcttgagcaaagaccacgccaaagacccgaatgccgaaaaagtgccgttcgcccaagtcgccaaagcactcgcccctttgggtatgctgatcggcatgctggtggttacgcgcatcaaacagctcggcatcaaaggcattttgaccagcaaagaagaatggttcagcttccaactgccgtttgatttgtccaaaatcaccgtcagcgactccctgacgattaccttcggcaatattttcggacaagatgtcagcgcgtcttaccaaacgctgtacgtcccggcttggattccgtttgtgctgaccgtttggatttgcatcctgctgtataaaaccaaattcaaagatgcctggacgatttattccgtaaccttcaatcaaaccaaaaaaccgctgcttgccctgatgggcgcgctgattatggttcagctgatgctggtcggcggcgacaattcgatggtgaaaatcatcggtaaggaatttgccgcaatggcgggcgaacactgggtttatttctcgccgtatctgggcgcgatcggtgcgttcttctccggttccaacaccgtgtccaacctgaccttcggcccgattcagcagcaaatcgccttggataccggcctgtccgttaccctgattctggcgttgcagtccgtcggcggcgcgatgggcaatatggtgtgcctcaacaacatcatcgccgtatgtaccgtattggatgtgaaaaattccgaaggtgcgattatcaagaaaaccgttatcccgatggcgatttacggcgtgattgccgtcgtcgcggcaatgattttcttcctctag

SEQ ID NO: 43702 - DNA, 606 bp, Neisseria meningitidis
atgacccgtcaatctctgcaacaggctgccgaaagccgccgttccatttattcgttaaataaaaatctgcccgtcggcaaagatgaagttgtccaaatcgtcgaacacgccgttttgcacacaccttcttcgttcaattcccaatctgcccgcgtggtcgtgctgtttggcgaagagcatgataaggtgtggcaatttgtcgaagacgcgctgcgtgccgtcgtgcctgccgacagttttgaaccgaccgcgcaaaaattgaacctgtttaaggcgggtgcggcaaccattttgttttatgaagatcaaaatgtcgtcaaaggtttgcaggagcagttccctgcttatgccgctaacttccccgtttgggcggatcaggcaaacgcgatggtgcagtatgccgtttggacgacacttgccgcggtcggcgtaggtgcaaacctgcaacattacaatcccttgcccgatgcggcgattgccaaagcgtggaatatccccgaaaactggttgttgcgcgcgcaaatggttgtcggcggtattgaaggggcggcaggtgaaaagacctttgaaccagttgcagaacgtttgaaagtgttcggcgcataa

SEQ ID NO: 43703 - DNA, 1104 bp, Neisseria meningitidis
atgttgattttacaagccgagcgcgacagcctgctcaagccgttgcaagccgttaccggcattgtcgaacgccgccacaccctgcccatcctgtccaacgtcctgattgagggcaaaggcggtcagaccaaactcttggcaaccgatttggaaatccaaattgacactacaggtcccgagagcggtgcgggcgacttccgcatcaccaccaatgccaagaaatttcaggacattttgcgcgcgctgcctgccggtgcactggtgtcgctggattgggacgacagccgtctgacgctgaaggcgggcaaatcgcgttttgccctgcagaccctgcctgccgccgattttccaatgatgaatgtcggcgaggacatcagcgcgactttctcgctggagcaggagcgtttcaaaaccatgctgtcgcaagtgcagtacagcatggcggtgcaggacatccgctattatctcaacggtctgctgatgcaggttgagggcagccagttgcgccttgtggcgaccgacggacaccgccttgcctatgcagcctgcgcgattgatgcggatttgccgcgcgccgaagtgattttgccgcgcaaaacggtgctggaactgttcaaactgttgaacaaccccgacgatccgattcaaatcgagctgctggacaaacaggtgcgtttccaatgcaacggcacgaccatcgtcagcaaggtcatcgacggcaaattccccgatttcaaccgcgtgattcctttggacaacgacaagattttcgttttgtcccgtgccgaacttttgggcgcgctggaacgtgtgtccattcttgccaacgaaaaattccgtggcgcgcgcctgttcctgcaacccggcctgttgagcgttgtgtgcagcaacaacgagcaggaagaagcgcgcgaagaaatcgaaatcgcctatcagggcggggaattggaagccggtttcaatatcggttatctgatggacgtgttgcgcaacatccattccgacgatatgcagcttgccttcggcgatgccaaccgctcgacgctgtttaccgtgccgaacaatccgaatttcaaatatattgtgatgccgatgcggatttga

SEQ ID NO: 43704 - DNA, 2604 bp, Neisseria meningitidis
atgagcaaaaccgtgcattatctcaaagactatcaaacgcccgcctaccatattctcaaaaccgatttacattttgatattaatgaaccgcaaaccgtcgtgaagtcgcgtttgacggttgagccgcagagggtaggggagccgctggtgttggacggttcggcgaaactcttgtccgtcaaaatcaacggggcggcggcggattatgtgttggaaggagagacgctgacgattgcgggcgtgccgtccgaacgcttcaccgtcgaagtggaaaccgaaatcctgccggcggaaaacaaatcgctgatggggctgtatgcttccggcggcaatttgtttacccagtgcgagccggagggcttccgcaaaatcacattttacatcgaccgtccggatgtgatgtccaagttcaccaccaccatcgtcgccgacaaaaaacgctatcccgttttgctttccaacggcaacaaaatcgacggcggcgagttttcagacggccgccattgggtgaaatgggaagacccgttttccaaaccgagctatctgtttgctttggtcgcgggcgatttggcggtaacggaagactatttcaccaccatgagcggcagaaacgtcaaaatcgagttttacaccaccgaagcggacaagcccaaggtcggctttgccgtggaatcgttgaaaaacgcgatgaaatgggacgaaacgcgcttcggtttggaatacgacttggatattttcatggtcgtcgccgtgggcgatttcaatatgggcgcgatggaaaacaagggtttgaacatctttaacaccaagttcgtccttgccgacagccgcaccgccaccgataccgatttcgaaggcatcgaatccgtggtcggacacgagtatttccacaactggacgggcaaccgcgtaacctgccgcgactggttccagctttcgctgaaggaagggctgaccgtgttccgcgaccaagaattttccggcgaccgcgccagccgcgccgtgcgccgcatcgaaaacatccgcctgctgcgccagcaccagttccccgaagacgcaggcccgaccgcccatccggtgcgccccgccagctatgaggagatgaacaatttctacaccatgaccgtttatgaaaaaggcgcggaagtagtgcggatgtatcacaccctgctcggcgaagagggcttccagaaaggcatgaagctctatttccaacgccacgacggacaggccgttacctgcgacgatttccgcgcggcgatggcggacgcgaacggcatcaatctcgaccagttcgccttgtggtacagccaggcgggcacgcccgttttggaagcggaaggtcgtctgaaaaacaatattttcgagttgaccgtcaaacaaaccgtgccgcccacgcccgatatgacggataaacagccgatgatgattcccgtcaaggtcgggctgctgaaccgcaacggcgaagcggtggcattcgactatcagggcaaacgcgcgaccgaagccgtgttgctgctgaccgaagccgaacagaccttcctgctcgaaggcgtaaccgaagccgtcgttccctcgctgctgcgcgggttcagcgcgccggtgcatctgaactatccgtacagcgacgacgacctgctgctcctgctcgcccatgacagcgacgccttcacgcgctgggaagccgcccaaacgctctaccgccgcgccgtcgccgccaaccttgccacgctttcagacggcgttgagctgccgaaacacgaaaaactgcttgccgccgtcgaaaaagtcatttcagacgacctcttagacaacgccttcaaagccctgcttttgggcgtgccatccgaagccgagctgtgggacggcgcagaaaacatcgacccgctgcgctaccatcaggcgcgcgaagccttgttggatacgcttgccgtccacttcctgccgaaatggcacgaattgaaccgtcaggcggcgaagcaggaaaaccaaagctacgaatacagccccgaagccgccggctggcgcacgctgcgcaacgtctgccgcgcctttgtcctgcgcgccgaccccgcgcacatcgaaaccgttgccgaaaaatacggcgaaatggcgcaaaacatgacccacgaatggggcatcctgtccgccgtcaacggcaacgaaagcgatacgcgcaaccgcctgctggcgcagtttgccgacaagttttcagacgacgcgctggtgatggacaaatattttgccctcgtcggctcaagccgccgcagcgacaccctgcaacaggttcgaaccgccttgcagcatccgaaattcagcctcgaaaaccccaacaaagcccgttcgctcatcggcagcttcagccgcaacgtcccgcatttccacgcagaagacggcagcggctaccgcttcatcgccgacaaagtcatcgaaatcgaccgcttcaacccgcaggtcgccgcccgcttagtgcaggcgttcaacctctgcaacaagctcgagccgcaccgcaaaaacttggtgaaacaagcattgcagcgcattcgggcgcaggaaggattgtcgaaagacgtgggcgaaatcgtcggcaaaattttggattga

SEQ ID NO: 43705 - DNA, 255 bp, Neisseria meningitidis
atgtttgatggcgaagtagaagcagatgaaagttattttggcggacaacgcaaaggcaaacgcggtcgcggtgctgccggtaaagtcgccgtattcggtcttttgaagcgaaatggtaaggtttatacggttacagtaccgaatactcaaaccgctactttatttcctattatccgtgaacaagtgaaacctgacagcattatttatacggattgttatcgtagctatgatgtaattagatgtgagcgaatttag

SEQ ID NO: 43706 - DNA, 564 bp, Neisseria meningitidis
atgaaaatactcgctttattaattgccgctacctgtgctttatctgcgtgtggcagccaatctgaagaacaaccggcatctgcacaaccccaagagcaggcacaatccgaattaaaaaccatgccggtaagctataccgactatcaatcagcagccaataaagggctgaatgaccaaaaaaccggtctgacccttcctgaacatgttgtccctatcgacaatgcggaaggaaagaatctgctgcatgacttttcagacggcctcacaatcttaaccgttgataccgataaagccgacaaaattactgctgtccgagtagtctggaatacagatgcaatgcctcaaaaagcggaaaaactgtccaaagctgccgcagccttgattgcggcaaccgctccggaagaccgcacaatgctgcgtgataccggcgaccaaatcgaaatggcgattgacagccataatgcgcaaaaagagccaacccgagaatgggcgcgtggtgggattgcttataaagtcactgttaccaatttaccgagcgtggttttgacggcaaaagctgagtaa

SEQ ID NO: 43707 - DNA, 291 bp, Neisseria meningitidis
atgaccatccgtcctttacacgaccgcgtcgtcgtcaaacgcttggaagctgaagaaaaaaccgcatcgggcatcgttttgccgggtgcggccgccgaaaaacccgatatgggcgaagtcatcgccgtgggcgcgggcaaaatcggtaaagacggcgcgcgccgtccgctggatgtcaaagtcggcgacaaaatcatcttcggcaaatacagcggccaaaccgtcaaagccgacggcgaagagctgttggtgatgcgcgaagaagacatcttcggcatcgttgaaaaataa

SEQ ID NO: 43708 - DNA, 201 bp, Neisseria meningitidis
atgtccgttcaaaccgttacatataataagttttttatgaacacaaaccaacctgccgtttacgacccgttgacacgcgcgctgcactggctgaccgttgccggcttcatcggcattctgaccaccattgtcctgtggacgatttatagtggattaacaaaaatcaggacaaggcgacgaagccgcagacagtacaaatag

SEQ ID NO: 43709 - DNA, 834 bp, Neisseria meningitidis
atggcaatcgttaaaatgaagccgacctctgcaggccgtcgcggcatggttcgcgtggtaacagaaggtttgtacaaaggtgcaccttatgcacctctgctggaaaagaaaaattctactgccggtcgtaacaacaatggtcatattactacccgtcataaaggtggtggtcataaacatcattaccgcgtcgtagattttaaacgtaacaaagacggtatccctgcaaaagtagagcgtatcgaatatgaccctaaccgtactgcatttatcgcactgttgtgctatgcagatggtgagcgtcgctacattattgctcctcgtggtattcaagccggtgcagtattggtttccggtgctgaagctgcgatcaaagtaggtaacactctgccgatccgcaatattcctgttggtacaactattcactgtatcgaaatgaaaccaggtaaaggtgcgcaaattgcacgttctgccggtgcttctgcggtattgctggctaaagaaggcgcgtacgctcaagtccgcctgcgctctggcgaagtccgtaaaatcaacgtagattgccgtgcaaccatcggtgaagtcggtaacgaagagcaaagcctgaaaaaaatcggtaaagccggtgccaatcgttggcgcggtattcgtccgactgtacgtggtgttgtcatgaaccctgtcgatcacccgcatggtggtggtgaaggccgtacgggcgaggcccgcgaaccggtcagcccatggggtactcctgctaaaggctaccgcactcgtaataacaaacgcacggataacatgattgttcgtcgccgttactcaaataaaggttaa

SEQ ID NO: 43710 - DNA, 1065 bp, Neisseria meningitidis
atgatctctttgaaaaacgacactttcctccgcgccctgctcaaacaacctgtcgaatacacgccgatttggatgatgcgccaggcggggcgttatctgcccgaatacaaagccacacgcgcgaaagcgggcagcttcctcgatttgtgcaaaaacaccgaattggcgaccgaagttaccatccaacctttggaacgtttcgatttggacgcggcgattttgttttccgacatcctgaccgtccctgacgcaatgggcttgggactgtattttgccgaaggcgaaggcccgaaattcaaacgcgccctgcaacacgaggccgacatcgccaagctgcacgttcccgatatggaaaaactgcaatacgttttcgacgcggtaacttccatccgtaaagcattggacggccgcgtaccgctcatcggcttctccggcagtccgttcacgctcgcctgttatatggtcgaaggcggcggcagcaaagaattccgcaccatcaaaaccatgatgtactcgcgccccgatttgctgcacaaaatcctcgataccaacgcccaagccgttaccgcctacctcaacgcccaaatcgacgcgggcgcgcaggcggtgcagattttcgacacttggggcggcgtgttgagcgatgcggcgtttaaagaattcagcctcaaatacatccgccagatcgtcgccggactcaaacgcgaaagcgaaggccgccgcgtgcctgttatcgtatttgccaaaggcggcgggctgtggctggaaagtatggcccaaatcggcgcagacgcattgggcttggactggacgtgtaacatcggcgaagcacgccgccgcgtcggcaagcaagtcgccctgcaaggcaacttcgacccgttcgccctcttcggtacgccggaatccatccgcaccgaggtcgcacgtatcctagccgactacggacacggcagcggccatgtcttcaacctcggacacggcatcaaccaacacgccgaccccgaacacgccaaaatcttagtcgataccgtacacgagctgtctcggcagtatcacggcgggtaa

SEQ ID NO: 43711 - DNA, 828 bp, Neisseria meningitidis
atgaaactgattgaacaacatcaaatttttggtggttcgcaacaagtttgggcgcatcatgcccaaacgctgcaatgcgaaatgaaatttgccgtctatttgccaaataatccagaaaatcgaccgcttggtgtgatttattggctttccggcttgacgtgtacggaacaaaatttcattaccaaatcaggctttcagcgttatgcggcagaacatcaagtaattgtggtggcccccgataccagccctcgcggagagcaagtgccgaacgatgatgcttacgatttaggacagagtgcaggcttttatttgaatgcgaccgaacagccttgggcggcgaattatcaaatgtatgattacattttgaacgagctgccccgtctgattgagaaacactttcctaccaacggcaaacgttccattatgggacattcaatgggcggacacggcgcattggtattggcgctgcggaatcaggaacgttatcaaagtgtttctgccttttcgcctattttatcgccaagcctcgtgccgtggggagaaaaagcctttactgcttatttagggaaagaccgtgaaaaatggcagcaatatgatgctaactcactcattcaacaaggctataaagtgcaaggtatgcgcatcgatcaaggcttggaagatgagtttttgccgacacaattgcgtaccgaagattttatcgaaacctgccgtgcggcaaaccagccggtcgatgtgcgtttccataaaggctacgatcacagctattacttcatcgccagttttattggcgagcatattgcttatcacgccgcgtttttgaagtaa

SEQ ID NO: 43712 - DNA, 357 bp, Neisseria meningitidis
atggccgaacgtaacaatgccgcccttcaagaagccataaccatagtaaacgggctggcaaaaacagacggatgcatactcgccacctatacatcggataccccggacaagaagaaagaccgtgaagccatactgacagttttaaaccagcgcgaatttgtctgtgcgggcgtattaggcggagcactgcacgagaaaatgtataaagatttcgaatactccatgctgttacgtgactgggacaacctaagcagctttatttttgaaatacgccgtatcaggagcgcaccgacggcctttcaagaatttgaagccgtagcccgaaaatggaagaaaaagcctctgaaaaccaaatag

SEQ ID NO: 43713 - DNA, 432 bp, Neisseria meningitidis
atgggcagcaacgcatggctgttttgggcattggcatcggcaggcttcgcctcattgaccgctattttcgccaaaatgggtttacagggtatagattccgatttcgccacctttatccgcaccttggtcatccttgccgctttgttattgtttttaacctacaccggcaaatggcagggtgtgaacggctttacggggcgcaactggacattcctcatcctatccggtcttgctaccggcgcatcttggctcgcctattttaaagccctgcaactgggcaacgcctcgcaagtcgcccccatcgacaaattcagcctggtcttggtcgcgctgatggcggtggttttcttggacgaacgcccgaacacgcaggaatggataggcttggggctggtaacggcgggcgtgttggtgctggcgttgaaacgttaa

SEQ ID NO: 43714 - DNA, 489 bp, Neisseria meningitidis
atgaccgtactgaccgtcatcctcgccctcgccctgatagccgtcggcacggcgggcatcgtttaccccgccctgcccggattggcattgatgtttgccggaacatggctgcttgcctatgccggcggctaccaaatctacggcgcgggcgttttgtggacggtcggactcatcagccttgccggcatactggcggactatgtggcaggcatatgggggacaaaatataccggagcgggcaagctcgccgttcgcggcgcattggccggcagcatcatcggcatatttttctcccttcccggactaatactcggtccctttatcggcgcggcggcaggcgaactgatcgaacggcgcaatatgcttcaggcaggtaaagcgggcttgggtacgctgttggggcttgtcgtcggcacggcgttcaaaatcggctgcgccgtatccatcttgtttatcctgttggtgaaatacatcgcctacctgttttaa

SEQ ID NO: 43715 - DNA, 249 bp, Neisseria meningitidis; identical to SEQ ID NO: 41580

SEQ ID NO: 43716 - DNA, 1296 bp, Neisseria meningitidis
atggcacaaaaaatccaatccgtcaaaggcatgaacgaccttctgcctgtcaagcaaaaagatttcaaactgacggctgcgttttggcaggcgtttgaagatacggtcggccgctggacacgcgcttacggttatcagcaaatccgtacgccgattgtcgagcaaaccggtttgtttgtccgctccatcggcgaggaaaccgatgtggtcggcaaggaaatgtacaccttctccgattcaaacgattctttgagtttgagcttgcgtcctgaaggtacggcttcctgcctgcgtgcggtggtcgaacacaaccttctgtacaatagcccgcaaaagctgtggtatatggggccgatgttccgccgcgagcgtccgcaaaaaggccgttatcgtcagttccatcaggtcggtatcgaggctttgggttttgaagggccggatattgatgcggaaatcatcgcgatgtctgccgacttatgggaaaaattgggtatccgcgaatacctgactttggaaatcaacagcttgggcaaccgtgaggaacgcgcggcacaccgtgcggcattggttgaatatctgacccgttatgaagataaattggatgaagacagcaaacgccgtctgaaaaccaatcctttgcgcgttttggatacgaaaaacccagatttgcaggaaatctgcaacgcggcgccgcgtttggtggattacttgggcgaggattcgcaaaaccactatgtacgcttcaaggcgatgttggatggtttgggtatccaatatattgaaaatccgcgcttggttcgcggtttggattattacaatcagacggtttttgagtggacgaccgacaaactcggcgcgcaggcgactgtgtgcggcggcggccgttacgatggcttgattgaagaactcggcggcaaacctgcgccgtctatcggctttgcaatgggtatcgagcggctgctgcttttggtgagcgaatacggctctctggaagtgaacgctgcgcctgatgtctatgcaatgcaccaaggcgaaggggcggacttgcaggtgatgaaatacgcacaagccttgcgcgcgcaaggtttcaatgtaatgcagcattccggctatcaaagcctgaaagcgcaaatgaaaaaagccgacaacagcggcgcacgctttgccctgattgtcgcgcaagacgaactggcgaacggtacggttacgctcaaagacatgaacggcgcacacggtcagcaaactgtcgccgccgaggatttaacccctactttacaacaatggaagaacgcataa

SEQ ID NO: 43717 - DNA, 210 bp, Neisseria meningitidis
atgccttatgtcaatattaaagtaaccggcggcaaggaagcaccgactgccgcgcaaaaagcggaactgatcggcggcgtaaccgaattgctggcacgcgtgctgggcaaaaatcccgaaacaacggttgtcgtgattgacgaagtggataccgataactggggaataggcggcaaaagcgtcagcgaacggcgcaaagagggcaggtaa

SEQ ID NO: 43718 - DNA, 867 bp, Neisseria meningitidis
atggcaggtgaaaccattaccgctgccgactacatcaagcaccacttgcagagcttgaccagtttgtcggatgttactcagggtcagggactgaaaaacattgctgatttttcgtttattaaccttgatgccgtcttttttgccgtcctgttgggcgtaatcggcagctttctgttgtggcgcggtgcaaaaaaagcgacggcaggcgttcccggacgtttccaggccgcagtggaaatcttgtttgagtttgtggacgatatgtgtaagagcatcattcacaacgaaaagtctagaaaagccgtcgcgccgttgggtctgacgctgtttgtctggatttttctgatgaacgcgatggatatgctgccggtcgatttgctgccgatggtatggcagggcattaccggcaaccatcacgccctgctgcgcgtcgtaccgactgccgatttgaacaccactttggcactcgctgtcggcgtgttgctgatttgtatctattacaacatcaaaatcaaaggattgggtggctggtttcacgagttgttcagcgcgccgttcggtgcaaaactcgcacctgcgaactttctgttgaatttggtcgagtttctttctaaaaccgtatcccacggtatgcggttgttcggcaatatgtatgcgggcgaattggtattcttgttgatagccttgcttggcggtgcttgggcggcttccggcagcgtcgaagtcatggatccgattctgtttgtattccacattattgccggtttggcatgggcgattttccatattttggtgattaccctgcaggcgtttattttcatggcgttggcgttcgtctatatcggacaggcacatgatgcgcactga

SEQ ID NO: 43719 - DNA, 1245 bp, Neisseria meningitidis
atggaacagcagcaaagatacatcagcgtactggatatcggtacgtctaaagtcctcgcactgatcggggaagttcaagatgacgacaaaatcaacatcgtcggtttggggcaggctccttcacggggcttgcgcgcgggcatggtaaccaatatcgatgccaccgtccaagccatcaggcaggcggtcaatgatgccgagctgatggcggataccaaaattactcacgttaccacaggtatcgcaggcaaccacatccgcagtctcaattcgcaaggtgtggttaaaattaaagatggggaagtcacgcaggcagacatcgatcgcgccattgaaacggcaaaggcaatcaatatcccgcccgatcaaaaaattctcgatgccgtggttcaagactacattattgacacccaacttggcgtgagggagcccatcggtatgagcggtgtgcgtctggatacgcgggtgcacatcattaccggtgcaagtacggcagtgcagaatgtccaaaaatgtatcgagcggtgcggtttgaaaagcgatcagatcatgcttcagccgttggcaagcgggcaggcggtgctgactgaagatgaaaaagacctcggcgtatgcgtcatcgacattggtggcggaacgaccgatattgccgtttatatgaacggtgccatccgccatacgtccgtcattccggccggtggtaatctgattaccaaagatttgtccaaatcgttgagaacacctctcgatgccgccgagtacattaaaatccattatggcgtggcatcatgcgatacggaaggcttgggtgagatgattgaagttccgggcgtgggtgaccggacatcgcgtcaggtttccagtaaggttctggcagcaatcatcagtgcacggattcaggagatttttggcgtagtgctgggcgagctgcaaaaatcgggtttccccaaagaagtgctgaatgcgggtatcgttctgaccggcggtgtgtccatgatgaccgggattgtggaatttgccgaaaaaatcttcgatttgcctgtacgcaccggtgcaccccaagaaatgggcggtttgtccgaccgcgtccgcacaccgcgtttttctaccgctatcgggctgcttcatgcagcatgcaagctggaaggaaacttgccgcagccggaaaacggtgcagtgcaagagagggaagggggcggcggtttgttggcaagattgaaacggtggattgaaaacagcttctga

SEQ ID NO: 43720 - DNA, 792 bp, Neisseria meningitidis
atgattgccctgaccggtactgccgccgctgcacaagagcttcaaaccgctaatgagtttaccgtccacaccgacctctcttccatttcttcaactcgtgctttcctgaaagaaaaacacaaagctgccaaacacatcagcgtgcgtgctgatattccttttgatgccaaccaaggcatccgcttggaagccggtttcgggcgcagcaaaaaaaatattattaatttggaaacagatgagaacaagctgggtaagactaaaaatgtaaaactgcccaccggcgttcctgaaaaccgtatcgatctttacacaggctacacctacacccaaacgttaagtgattctttaaatttccgtgtgggtgccggcttgggttttgaatcttcaaaagacagcattaaaaccaccaagcatacgcttcacagcagccgtcagtcgtggttagccaaagttcacgcggatttgctttcccaactgggtaacggctggtatatcaacccttggtctgaagtgaaatttgacctcaattcccgctataaattaaacaccggcgttaccaatctcaaaaaagacatcaatcaaaaaaccaacggctggggctttggattgggtgcaaatattggtaaaaaactgggcgaatccgccagcatcgaggcggggccgttctacaaacaacgcacttacaaagaatccggcgagtttagtgtaacaaccaagagtggcgacgtatcgctcaccatcccgaaaaccagtattcgtgaatacggcttgcgcgtcggcataaaattctga

SEQ ID NO: 43721 - DNA, 606 bp, Neisseria meningitidis; identical to SEQ ID NO: 39821

SEQ ID NO: 43722 - DNA, 843 bp, Neisseria meningitidis
atgcaaaaccatgttatcagcttagcttccgccgcagaacgcagggcgcacattgccgcaaccttcggcgtgcgcggcatcccgtttcagtttttcgacgcactgatgccgtctgaagaactgaatcggatgatggcggaattggtgccgggattggcaaaacagcacctgttgagcgaagtggaaaaagcctgctttatgagccacgccgtattgtggaaacaggcattggatgaaggtctgccctatgttgccgtatttgaggatgatgtcctgcttggcaaagacgcagaaaagttccttgccgaagatacttggttggaagagcgttttgataaggattctgcctttatcgttcgtttggaaacgatgtttgcgaaagttattgtcagaccggataaagtcctgaattatgagaatcggtcatttcctttgctggagagcgaacattgggggacggctggctatatcatttcgcgtgaggcgatgcggtttttcttggaaaggtttgccgttttgccggcagagtggattaaagcggtagattggatgatgtttacttatttctttgataaggaggggatgcctgtttatcaggttaatcccgccttatgtacccaagaattgcattatgccaagttcctcagtaaaaacagtatgttgggtagcgatttggaaaaagatagggaacaagaaagaagacaccgccgttcgttgaaggtgatgtttgacttgaagcgtgctttgggtaaattcggtagggaaaagaagaaaagaatggagcgtcaaaggcaggcggagcttgagaaagcttacggcaggcgggtcatatcgttcaaatag

SEQ ID NO: 43723 - DNA, 777 bp, Neisseria meningitidis
atggctaagaaattcgataaagacagcttcagcggcacgctgattgtcgtgttggcggtcagcctgatttgctcggtcatcgttgccggtgcggtcgtcggcttgaaacccatccaagagaaacaaaaactccaagacaaacaaggctatatcttgagcgtagccggtttgatggataaggacaccgacatcggtaaaacctttgccgagcgtatcgagcaacgtgttgtcgatttggcgaccggcgaatacgtcgccgatgcgcctaaagacttcagcgcgcgcatcgcaggcaaagaccctgcccaaagcatccgcatcaaaaccgaagacgatttggcaggcatcaaaagccgtgccaaatacaccgaggtttatttggtaaaaggcgaagacggcaaaatcgggcaaatcatcctgcctatgcacggtaacggtttgtggtcggtcatgtacggctttgtcgccatccagcccgacggcaacaccatcaacggcattacctactacgaacaaggcgaaaccccgggcttgggcggcgaaatcggcaatccgttgtggcagcaaaaattcgtcggcaaaaaactgtttgacggacaaggcaaactcgccctgcacgtcggcaaaggcgcgggttcggacaaagaacacggcgtagatgccctctccggcgcatcgctgacatccaaaggcgtgcaaggttcgttcgcctactggttcggcgaaaacggctatatcccctacctgaacaaattgaaatcagcaggagcgcaataa

SEQ ID NO: 43724 - DNA, 348 bp, Neisseria meningitidis
atggcttcaagcggcgtaaacaaagaaatcaaaggcagaaaactctccctgtgggccaagcgtcaagccggttcggtaaaatggttctgcggacagccggttgagcgcgacaacgccaaagccgccaacgacgacgttaccgccgccgccgccgccaacggtaagaagattgacaccaagcacctgccgtcaacctgccgcgacgcagcatctgccgtttgcacaaaacacccgagtattgcccgaatcacggcgaatggccgaaaaacttcgtcattcccgcgcaggcgggaatccaggtctgtcggcacggaaacttatcgggtaaaaaggtttctccggtcctga

SEQ ID NO: 43725 - DNA, 1404 bp, Neisseria meningitidis
gtgaaaccgctgcgcagactgacaaacctccttgccgcctgcgccgtagcggcggccgcactcatacagcccgccctcgcggcggacttggcgcaagacccgttcattaccgataacgcccaacggcagcactacgaacccggcggcaaataccacctcttcggcgacccgcgcggcagcgtttccgaccgcaccggcaaaatcaacgtcatccaagactatacccaccagatgggcaacctgctcatccaacaggcaaacatcaacggcacaatcggctaccacacccgcttttccggacacggacacgaagaacacgcccccttcgacaaccacgccgccgacagcgcgagcgaagaaaaaggcaacgttgacgaaggctttaccgtataccggctcaactgggaaggacacgaacatcatcccgccgatgcctacgacggcccgaagggcggcaattaccccaaacctacgggcgcacgagacgaatacacctatcacgtcaacggcacagcccgcagtatcaaactcaatccgaccgacacccgcagcatccggcaacgcatatccgacaattacagcaacctcggcagcaatttctccgaccgcgccgatgaagccaacagaaaaatgttcgagcacaatgccaagctcgaccgctggggcaacagcatggagtttatcaacggcgtcgccgccggcgcgctcaacccctttatcagcgcgggcgaagccttgggcataggcgacatactgtacggaacgcgctatgccatagacaaagccgcaatgcgcaacatcgcccccttgcccgccgagggcaaattcgccgtcatcggcggcttgggcagcgtggcgggctttgaaaagaatacgcgcgaagccgttgaccggtggatacaggaaaatcccaatgccgccgaaaccgtcgaagccgtcttcaacgttgccgcagcagccaaagtcgcgaagttggcaaaggcggcaaaaccagggaaggctgcggttagcggggattttgctgattcttataaaaagaaattggctttgtctgatagtgcgagacagttatatcaaaatgcaaagtatagagaagctctagatatacattatgaagatttaattagaagaaaaactgatggttcatcaaaatttattaacggcagagaaattgacgctgttacgaatgatgctttaatacaagccaaaagaacaatttcagcaatagataaacctaaaaatttcttaaatcaaaaaaatagaaagcaaattaaagcaaccatcgaagcagcaaaccaacagggaaaacgtgcagaattttggtttaaatacggtgttcattcacaagttaagtcatatattgaatcaaaaggcggcattgttaaaacaggtttaggagattaa

SEQ ID NO: 43726 - DNA, 354 bp, Neisseria meningitidis; identical to SEQ ID NO: 36723

SEQ ID NO: 43727 - DNA, 1284 bp, Neisseria meningitidis
atgtccaaatcaatcaaactcaacgtaccgggtcaggcaggtttggagctgccggtattggaagccagcatcgggcacgatgtggttgacattcgggggctgacaaaaaatacaggtttgttttccttcgaccccggatttgtttcaaccgcaagctgtgagtctaaaattacttacatcgacggcgatcaaggcttgctttattatcgcggataccccatcgagcagctggccgaaaagtccgattatttggaagtctgctacctgttgatttacggcgaactgccgactcccgagcaaaaggcagaatttgacaataccgtccgccgccacacgatggtgcatgaacagctgacttggttcttccgggggttccgccgcgacgcgcatccgatggcgatgatggtcggcgtggtcggcgcactgtctgcgttctaccaagacagcttggacattagcaatcccgaacaccgcaaaatcgcgatttaccgcctgatttctaaaatcccgaccattgcggcaatgtgctaccgctattcaaacggtctgccgttcaattatccgaagaataatctttcttattccgaaaacttccttcatatgatgttcgccacgccgtgtgaagactacaaacccaatcccgttttggcacgcgcgctcgaccgcatctttattttgcatgccgaccacgagcaaaacgcctcaacttcaaccgtccgtctggcagggtcttcgggtgcgaacccgtttgcctgtattgctgccggtatcgcctgcctgtggggtgcttcgcacggcggtgcgaacgaagccgtgttgaaaatgttggacgaaatcggcgatgtgtctaatgttgccgcatacatggaaggtgtgaaacaacgcaaataccgtctgatgggcttcggtcaccgcgtgtaccgcaatatggatccgcgtgccagcattatgcgcgaaacctgctatgaagttttgaaggaattgggcttggaagacagtccgaaattcaaactggcgatggaattggaacagattgcgctgaaagacccgttctttatcgaacgcaaactgtatccaaacgtcgatttctattccggcatcgtcctgtccgcgctgggcatcccgaccgaaatgtttaccgtcatcttcgccctgtcgcgcagcgtgggctggatttcgcactggcacgagatgattagcgatccttcgctgaaaatcggccgcccgcgccagctttataccggttcggaacgccgcgattatgtgccgccaggcgagaggtaa

SEQ ID NO: 43728 - DNA, 345 bp, Neisseria meningitidis; identical to SEQ ID NO: 36231

SEQ ID NO: 43729 - DNA, 714 bp, Neisseria meningitidis
atgatgtctcctgttttgtatttgattcctacgcctttgggtacacctgacacgccgtgcctgttgccgcatgaacaacaggcgattgtcgggctgacggattttgtcgtggaagcggaaaaaacagcgcgtgcgcatttgaaacatttgggcgtgactacgcctatccgcgagctgaatctgcaaacgttgaatgaacacacggatttgaagactttgccggaattgctgaaacctttgcaagaagggcgcagtatgggcattgtcagcgaggcaggctgtccggctgtggctgatccgggtgcgaatttggtggcattggcgcataaacacggttttgaagtacggcctttggtcggcccgtccagcttgttgctggcgctgatggcttcgggtgcgaatgggcagaactttgcgtttaagggttatctgccgtctgaaaaaaatgagcggattcagagtttgaaggctttggagcaacgttcgcgccagcagaatgaaacgcagctgtttatcgaaacgccgtatcgcaacgatgcgttgttggctgatgcggtggaaaacctgcatcctgaaacgcgcttatgtgtggctacggacttgactttaccgacacaggaaattatcagccagacgattgcgcagtggcgaaaaagaaaagaaatgccgaacttgaaaaaacgtccgacgatttttgtgatgtatgcgggttga

SEQ ID NO: 43730 - DNA, 276 bp, Neisseria meningitidis
atgaacgcgtcaaactggagcgtttacctgatattgtgtgaaaacagcgcgttctattgcggcatcagcccgaatccgcaacagcggcttgccgcccacgcttccggcaaaggcgcgaaatatacccgcgtattcaaaccggtggcgatgcgtatcgttgcaggcgggatggataaaggcacggcactcaggcaggaaatcgccgtcaaaaaactgaccgccgcacaaaaacggcaattgtgggagcaggcggaaaaaatgccgtctgaaacctga

SEQ ID NO: 43731 - DNA, 1074 bp, Neisseria meningitidis
  misc_feature 8, 9, 10, 11, 12: 'n' is a, c, g or t
gtgtgtgnnnnnattaccagcggcgacaataaaaccgcgctgtatgtgtatgatttggaaagcagcggcacgctgattaaaaaaatcgaagtacccggtggcaagggcgggctttcgtcccccacgctggtggataaagatttggacggcacggtcgatatcgcctatgccggcgatcgcggcggcagtatgtaccgctttgatttgagcaatcaagatcctaatcaatggtctgtacgcgccatttttgaaggcacaaaaccgattacttccgcgcccgctatttcccaactgaaagacaaacgcgtggttatcttcggcacgggcagtgatttgagtgaggatgatgtactcagtacgagcgaacaatatatttacggtatcttcgacgacgatacggtggcgaataacgtaaatgtaaaactcagcggtttgggaggcgggctgctcgagcaagagcttaagcaggaggataaaaccttattcctgaccgattacaagcgatccgacggatcgggcagcaaagggtgggtagtgaaattgaagggcggacagcgcgttaccgtcaaaccgaccgtggtattgcgtaccgcctttgtaaccatccataaatatacgggtacggacaaatgcggcgcggaaaccgccattttgggtatcaataccgccgacggcggcaagctgaccaagaaaagcgcgcgcccgattgtgccggccgagaatcaggctgtcgcgcaatattccggccataagaaaggcatcaacggcaaatccatccctataggttgtatgcaaaaaggcaatgaaatcgtctgcccgaacggatatgtttacgacaaaccggttaatgtgcgttatctggatgaaaagaaaacagacggattttcaacaacggcagacggcgatgcgggcggcagcggaacattcaaagagggtaaaaaacccgcccgcaataaccggtgcttctccggaaaaggtgtgcgcaccctgctgatgaacgatttggacagcttggacattaccggcccgatgtgcggtatgaaacgaatcagctggcgtgaagtcttctactga

SEQ ID NO: 43732 - DNA, 966 bp, Neisseria meningitidis; identical to SEQ ID NO: 42827

SEQ ID NO: 43733 - DNA, 3615 bp, Neisseria meningitidis
atgtctgcaagcatccaagcattcgacccgctaaccgtccccatttccggcaccaacctgattgaggcctctgccggcaccggcaaaacctacggcattgccgccctgtttacacgcctgatcgtattagaacaaaaaaacgtcgaacgcgtattggtcgtaaccttcaccaaagccgccaccgccgagctgaaaacacgcctgcgcgggcgtttggacgatgtgttacaagttttagaaagcaaaggaattgccaaacttggagacgacacgctttcagacggcattgccgcctactgcgccgaacaccacgaaggcgacaccttcctgcccgaactcttaaaacaggctttgcaaaaagagggccggacgcgtctgattgtccgcctcaaggccgccatcgggcaattcgacaacgccgccatctataccatccacggcttctgccagcgcatcctgcgcgactacgccttcctgtgccaagcaccgttcgatgtcgaaatgaccgaagaagacggcgaccgcctgcttatcccggcgcaagatttttggcgggaacgcgtcagcaatgatccggtgcttgccgcattggcgcttaaacgcaaagctgtgccgcaaaccgtccttgcccaaatttcgcgctatctttcccgcccgtacctgaatttccgccgtccgcaggcggatttgaaacaggcgcagcgcaacgccgaaacctcatggcaaaccatctgccgcctgctgccagaactggaagccggcttttggcgcattcatcccgacctcaacggcaacagttaccgcaaaaacagcttcggcaacctttttaaagaactggcacaaaaatccgccgccggacaactgccctttctggacaaagacacacacgacagactcttgaaacttgcatccgacaaactcgaagccggactgaaaaaaggcaaaacgcccgatgcggcagtatttgccgaattgcagaaactggcagacttcgggcgcgatttgaacgcactcgaagaagcggaagaagcaacaatgatccggctgcaactggatttaatcgaatacctcaaccgcagccttgccgagatgaaaaaatcgcgccgcgaacgcggtttcgacgacctgctgctcgatgtccacaccgcgctgaccgacaatccgcacgccgacactctcgcccgcgccgttgccgaaaactgggaaaccgcgctgatcgacgagttccaagacaccgacccgctgcaatacgaaatcttccaaaagattttcatcgcccaaaaccgaccgctgttcctcgtcggcgatcccaaacaggcgatttacagctttcgcggagcggacatttacgcctaccttcaggcggcggaagacgcgcggcaccgctacacgctcgccaccaactaccgcagccacgccgcgcttatcggcagcataggcgcgctgttccgcctcaaagaacgcccgttcgttttggaaaacatcggctattcggaagtcggtgcggcgcgtgccgaaagcaggctgtcccccgaacgtcctgccgtacaggttcgttggctgcacgaaaacgacaatgaaaaagccaacaaagacgttttgcgccgccgtgccgccgactattgcgccgacgaaatcgcccacgcgctcaacgaagccgccagaggccgtctgaatttcaaaggctgcccgttgcagtcgggcgatattgccgtgctggtacgcacgcacaacgaggcggtgatggtttccgccgccctgaaaaaacggcaggtgcaaagcgtcctgctttcgcgcgaatctgtgttcgcctcgcccgaagccgccgccctgtccgcactcatcggcttctggctcgaaccgcgccgcgccggaacgctgcgttttgtcctgacaagcagcatattcggttatgacgcgcagcaattgcacgacttcaaccaaaacgaaagcgagattttgcattgggcggaatctgcccgaaccgcactcgacaactggaataaatacggcattttcgccgctatgcagcaattttcccaaacacacggcatcgaaacgcgcctcttaagccggaacaacgggcgcagtctgaccaattatttccaactgctcgaactgcttgccgccgaagacgcgcaaaaccgcaaccccgccgcgctgcacaaatggctgggcgaccaaatcagccttgccgaaaacaacagcggcgacaaccgcgccatccgtctggaaagcgacgaagatttggtcaaaatcgttaccatgcacgcctcgaaaggtttgcagtatccgctggtgtactgcccgtttgcgtgggacgcgcaagataccggaccgtccgactggcaaatcctccaccaaggcgcaaaccgaaccgaactgttggcaaaggcgcaactgtcggaagacgaacagaaacaatacgccgatgaagaaatggcggaacgcctgcgcctgctttatgtcgcgctgacgcgtgccgaggaacagctcaacatctacgccgcgtactccaccaatactgccgacaaccccctcgcctacctgattgaaggctcgccccaagacagccgtgaaaccgtccgccgtgcctatgcgtgtgaaaaagacggcatcgcgatgctcaaacgcaactggcggcgcgtggcggacaacgccccttccggcacaaatttcgccttcaccgaaaatgcgccgccccctgccgcctatcgcagcaacgccggtcaaaccgccgaatttgccgcaaacagcattcccgaacgcggattccgatttgtccgccacactagctttaccgccttaagccgccatacccaaacgcccgacggcggcgaagaagatgcctgcccgtccttggatgccgccgaaacctcggtgccggcgatgccgtctgaaacgccgacggcttcagacggcatatcgatacacgattttccgaaaggcacgcaggcggggctgtgcctgcacgaaattcttgaagatttcaaattcggacaagcagccgccggacaggaaaccctcattgccgacaagctgaaaaaatacggttttgaagaaatatggctgcccgccgttgccgaaatggcggaagcctgccgcaaaacgccgctgacgggggcatacgacctgtccgacatctcacccgagtgccgctgtcccgaaatgggctttaccctccacaccgaagacttcagcctcaaacgcctgcgcgactggtttgcccgcgacgacatcaggctgcccgaagtctgccgtgccgctgccgaaacgctcgacttccacaccgtcaacggctttttaaacggctttgtcgatatggtctgccaagaccccgacggcaatatctgcgtcatcgactacaaatcaaaccacctcggtacggacgcatccgcctacacgcaacaggcaatggacgaagccgtcgcacaccaccactattaccttcaggcactgatttacgccgttgccgccgcacgctacttcaagctgcgcggacaaccgcccgccgccgtttccgtccgctacctgtttttgcgcggattggatggcaaaggcggcggcgtttggcgttgggacatagatgccgccgctttggaacagataaaataa

SEQ ID NO: 43734 - DNA, 1383 bp, Neisseria meningitidis
atggcaagagacaaccgcatccaaatgtttccgcacgaatggcgcgccagtacgacgctttccggcgtgtacgcgctgcgtatgctgggtatgttcctcgtgctgcccgtattggcggtgtatgccgcctcgctgcccggcgcggaaggcaacaaaacgctggtcgggctggcaatgggcatttacgggctgacacaggctctgctgcaactgcctttgggcatcgcttccgacaagttcgggcgcaagaaaaccatttatgcgggactggtcgtgtttgcggcgggcagctttcttgccgccgccgccgatacgctgcccatgctggtcgccgcacgcgccatacagggtgcaggggcggtcagtgcggcggttaccgcgctgctggcggatttgacgcgcgacggcgtacgtacccgcgcaatggcgatgatcggtttgagtatcggtttgacgttttcggtcagcctcgtcgttgcccccgtgattgccgacgcggtcggcgttcgcggactgtttatgctgaccggcattctgaccgtcatcagcatcggcgtggtggcgtggatgactcccgatcccgaagtttccaagctgcacgaagatacgcaggcgcagccttcgcgcataggcgaagttttgaaaaaccgtaggctgctgacgcttgatttcggcattttcgccctgcacgccgcacaaatggcattgtttaccgcgctgcctttcgcgatgacccagctcggtttggaaaaaatacagcattggaaagtctatctgccttcgaccattacgggcttggtggtgatggttccgctgattatcgtcggcgagacgcgcaacaagcttaagcaggtttttgttttgggtatcgtctgtattgcggcggcgcagctcggtttgctgtccggtatgcgctcggtaggcttgattaccgcttatttggttgtttactttatcggttttaatgtgttggaagcgagcctgccgtctatggtttccaaaatcgcgccgtccgacctgaagggtacggcgatgggcgtgtacaacacgatgcagtcgctcggactgtttgccggcggcgcggcaggcggtttgctgtttcaaaaatacggcttttccggcgtgtttgccttttgcagtatattgatgctgctgtggctggtaattgccgttttatcgcctgcgcccaagcccgtcaaaaacctcagttaccctgtcggcggcgtgtggcagggcaatcaggaagggttataccgcgccttgtcggagcttgagggtgtggaagacatcggtttcagtttcgacgggcagaccgtctatctcaaagtgttgcagaagggtttcgatcaggctgccgctgaaaaaatcatcacaggagtttaa

SEQ ID NO: 43735 - DNA, 1356 bp, Neisseria meningitidis
atgaaagcacccgaactcttattgcccgccggcggattggaaagaatgcgcgccgcctacgactacggcgcagacgccgtttacgccggcagcccgcgttactcactgcgcgcccgcaacaacgaatttgccaaacttgatgttttagaacaaggcattaaagaagcgcacgagcgcaacaaaaaattctttttaaccgtcaacaccctgccgcacaattccaaactcaaaaccttcgttgccgacatggagccgctgattgccatgaaacccgacgcgctgattatggcggatccgggtttgattatgaccgtgcgcgaaaaatggccggaaatgccgatccatctgtccgtacaggcgaacaccaccaactattggggcgtgaaattctggcaaaacatcggcgtcgaacgcattattctgtcgcgcgaattgagtatggaagaaatcgccgaaatccgccaagaatgccccgacatcgaactcgaagtcttcatccacggcgcattgtgcatcgcttattcaggccgttgcctattgtcgggctatttcaaccaccgcgaccccaaccaaggcacctgcaccaactcctgccgttgggattacaaggttcacaatgccacggaaagcgatgcaggcgatgcccagcttctgcaaggtttcaactttgaaaaagcccaagaagaagccaaccaaaactttgaaggcatcaacggtcaaaaacgccatccctacgccgacaaagttttcctgattgaagaatccaaccgcccgggcgaaatgatgccgattatggaagacgaacacggcacctacatcatgaattccaaagaccttcgcggtatcgaagtcgtcgaaaaactcgccaaaatcggcgtggacagcctcaaagtcgaaggccgtaccaaatcgctctattatgttgcacgcgtcgcccagtcctaccgcaaagcgattgatgatgccgtcgcaggccgtccgtttgattacagcctgttgagcgaactcgaaggcctcgccaaccgcggctacaccagcggcttcctcgaacgccaccaaactcaggattatcaaaactacctgaccggccattccaccgccaaacaaagccaatacgtcggacacgttaccgaaatcgatgaaaacggctgggcaacagtggaagtcaaaaaccgctttgccgtcagcgattcactcgaaatcatccacccgagcggcaaccaaaccatcaaattggaacaaatgacccgcaaaggccagcctgtcgatgttgccccgggcaacggcattcaggtcaaaatccccaatatgcagggtaaagaaaaagccctcatcgcacgcgtgttgaacccctaa

SEQ ID NO: 43736 - DNA, 1008 bp, Neisseria meningitidis
atgagcaccttctttcagcaaaccgcacaagccatgattgccaaacacatcgaccgtttcccactattgaagttggatcaggtaattgattggcaaccgatcgaacagtacctgaaccgtcaaagaacccgttaccttcgagaccaccgcggccgtcccgcctatcccctgctgtccatgttcaaagccgtcctgctcggacaatggcacagcctctccgatcccgaactcgaacacagcctcatcacccgcatcgatttcaacctgttttgccgttttgacgaactgagcatccccgattacagcaccttatgccgctaccgcaactggctggcgcaagacgacaccctgtccgaactgttggaactgattaactgccaactgaccgaaaaaggcttaaaagtagagaaagcatccgccgccgtcgttgatgccaccattattcagaccgctggcagcaaacagcgtcaggccatagaagtcgatgaagaaggacaagtcagcggccaaaccacaccgagtaaggacagcgatgcccgttggatcaagaaaaacggcctctacaaactcggttacaaacaacatacccgtaccgatgcggaaggctatatcgagaaactgcacattacccccgccaatgcccatgagtgcaaacacctgtcgccgttgttggaagggttacccgaaggtacgaccgtctatgccgacaaaggctatgacagtgcggaaaaccggcaacatctggaagaacatcagttgcaggacggcattatgcgcaaagcctgccgcaaccgcccgctgtcggaagtgcaaaccaagcgtaaccgatatttatcgaagacccgttatgtggtcgaacaaagcttcggtacgctgcaccgtaaattccgctacgcccgggcagcctatttcggactgattaaagtgagtgtgcaaagccatctgaaggcgatgtgtttgaacctgttgaaagccgccaacaggctaagtgcgcctgttgccgcctaa

SEQ ID NO: 43737 - DNA, 1002 bp, Neisseria meningitidis
atgcagtttccttaccgcaatgttccggcttcgcgtatgcgccgtatgcgcagggacgatttttcacgccgcctgatgcgcgaacacacgctgaccgccgatgatttgatttatccggtgttcgtattggaggggtcggcgcgcgaggaggatgtgccttctatgccgggtgtgaagcgtcaaagtttggacaggctgctgtttacggcggaagaggcggtaaagctcggtattccgatgttggcactgttccccgtggttacggcaaacaaaaccgagcgtgcgcaggaggcgtacaatcccgaaggactcgtgccgtcaactgtccgcgccttgcgcgagaggtttcccgaactgggcattatgacggatgtcgcgctcgatccttatacggttcacggtcaggacgggctgacggacgaaaacggttatgtgatgaacgatgaaaccgtagaggttttggtcaagcaggctttgtgccacgctgaagcgggcgcgcaggtggttgccccttccgatatgatggacgggcgtatcggtgcgattcgcgaggcgttggaggatgccgggcatatccatacgcggattatggcgtattccgccaaatatgcttctgcattttacggccctttccgtgatgcggtaggcagttcgggcaatttgggcaaggcagataaaaagacctaccagatggatccggcaaataccgatgaggcgttgcacgaagtggcgttggacattcaggaaggtgcggatatggtaatggtcaagcccggtttgccgtatttggacgttgtccgccgcgtaaaggacgagttcggtgtgccgacttatgcctatcaggtttcgggagaatacgcgatgttgcaggcagcgattgccaacggctggctggacggcggcaaagtggttttggaaagcctgctggcattcaaacgtgcgggtgcggacgggattttgacctattacgctattgaggcggcaaagatgttgaagcgttga

SEQ ID NO: 43738 - DNA, 627 bp, Neisseria meningitidis
atgaggaaaatccgcaccaaaatctgcggcatcaccacaccggaagacgcagctgccgccgcagcggcaggtgcggatgccgtcgggctggtctttttccaaggcagcagccgggccgtcgatattgcccgcgccaaaaaaatcaccgccgcactgccgccgtttgtcagcgttgtcgcccttttcgtcaacgaaagcgcgcaaaacatccgccgcatccttgccgaagtgccgatacacatcatccaattccacggcgacgaagacgacgcattctgccgccagttccaccgcccctatatcaaagccattcgtgttcagacggcatcagacatccgaaacgccgccacgcgcttccccgacgctcaggcactgctgttcgatgcctaccatccttcggaatacggcggcaccggaaaccgcttcgactggacgctgctggcggaatattcgggcaaaccgtgggtgcttgccggcgggctgacccctgaaaacgtcggcgaagccgtccgcatcaccggagcggaatcggtcgatgtatccggcggtgtggaagcgtctaaaggcaaaaaagatgccgccaaagtcgccgcctttatcgcaaccgccaaccgcctatcccgttaa

SEQ ID NO: 43739 - DNA, 546 bp, Neisseria meningitidis
atgggcaaaaccgtaaccttaaccgctggacacagcaacaccgacccgggtgcggtcaacggaagcgaccgtgaggcggacttggcgcaggatatgcgcaacattgtggcttcaatcctgcgtaacgattacggcctgaccgttaaaaccgacggcacgggcaaaggcaatatgccgctgcgcgatgcggtcaagctgattcgcggctcggatgtggcgattgagttccacaccaatgcggcggcgaacaaaacggcgacaggcatcgaagccttgtccacgccgaaaaataaacgctggtgtcaggtgctgggcaaagccgttgccaagaaaaccggctggaaactgcgcggcgaagacggctttaagccggataacgcagggcaacattcgcgcctggcttatgcgcaggcaggcggcattgtgtttgagccttttttcatcagcaacgacactgatttggccttgtttaagacgaccaaatggggcatctgccgcgcgattgcggacgcgattgcgatggaattgggagcggcgaaggtatga

SEQ ID NO: 43740 - DNA, 138 bp, Neisseria meningitidis
atgtcttggtatggtttgagcagattaagttatagtggattaaatttaaatcaggacaaggcgacgaagccgcagacagtacaaatagtacggcaaggcgaggcaacgccgtactggtttaaatttaatccactataa

SEQ ID NO: 43741 - DNA, 780 bp, Neisseria meningitidis
atgaaagaacacaaagcccgcaagcgtttcgggcagaattttttgcaggacacgcggattatcagcgatattgtcaacgccgtgcgcccgcaggcggatgatgtcgtgattgaaatcggcccgggtttggcggcgattaccgaacctttggcgaaaaagctgaaccgcctgcacgttgtcgaaatcgaccgcgacatcgtatgccgtctgaaaacgctgccgtttgcggataaactggtgattcacgaaggcgatgtattgcagtttgatttcaacggcatcgcaggcaaaaagaaaatcgtcggcaacctcccgtacaacatttccacaccgcttttgttcaagctggcggaggtggcggacgatgtcgtcgatatgcactttatgctgcaaaaagaagtggtcgagcgtatggttgccgcgccgaaaagcaacgactacggccgcttgggcgtgatgctgcaatattttttcgatatggaaatgctgattgacgtaccgcccgaatcgttcgaccctgcgccgaaagtggattccgccgtcgtccgtatgattccggtgaaacaccgcatcggcaaggcggacgatttcgagcattttgccaaactcgtgaaactcgccttccaccaacgccgcaaaaccatacgcaacaatctgaaagagcttgcaggcgacgatgatttgcaggcagtcggcatcaatccgcaagaccgcgccgaacatatcgcgccagagaaatacgtggcgttgagcaattatctggcgggcaaggtcgtctga

SEQ ID NO: 43742 - DNA, 144 bp, Neisseria meningitidis
ttgatttcaaatcatgatactgaattcacaagggatatttattcttctgccattttgaaaacagttgaagttcagcgcaatattgccgcaaaaggcagcagcagccgtaaaaaagttggagaattattggcaatttatgcgtga

SEQ ID NO: 43743 - DNA, 594 bp, Neisseria meningitidis
atgagaaacaaaaatagaataattgaagcatttccttttaattataatcaaaggcaatacgccgttattttgactaggtataaacctgatgaacctagaccagatgattatgcacaagcaaaattagagttttttaatttgaatagtgaaaattcaatatttgcgtatgctgatttttatgaagttcattttaaaagtgctactgattttattaatttttttaaaattaatgttcaggctggtgctgcgaaaatcagagaaatttttcagagttttagtaatctttttgcagatttcattccaacacaaactaaaaaagatttagacataatttataaaaagattgtagctactcgtttagaacctaattctcctaacactatttattgctatgatgtccgtagaaatgggaaagataaggctggcaagcctaatcgcaggagcgtggaaaatagtgaaaaagcaaaaattttgcgcccagagctatacgaaaaatttaaagccgatagtaattacagttttttcttttcagataatccaagcgatgaaaaaacagatgcagaaataattagagaagttaccaatcgtcaataa

SEQ ID NO: 43744 - DNA, 810 bp, Neisseria meningitidis
atggcaaaaattggggattttgccgtcaaatctatgatagggatacggagcaaacaaatgattaccctgccttccttaaacaatctgccgtcaaaatgggatgaaatccgccattggctcgaatctcgggtttttgagtgcggcgttatgccgcatcccaatctgacggaatgcgaagccaaacagttcgagcgggatttttgggacaatatcggctgcgcgcctgaagaatatgtccgcatccgccgcgccatccgtctgttggaagcgcgttatcccgacagtttgaacgagctggtgtgtgccgccattgccacgcctttgggcgagatgctggcggtgttcggtagcaggggtttgtgtttgctggaatttgtcggacagaagcatttggaacaggaaattgccgccgtccaaaaagccttgcgcggacggtttgtgtttcgggaggatgagcggacgcaacttttgcggcaggaattggacttatacttcaagggtcgtctgaaaacctttgccacgcctttggagcagattggcaccgagtttcaaaagcaggcatgggacgcgctcttggcgattccttacggcgaaacgcgcagctacaaggagcaggcgcagcgtttgggcaaccccaaagccgtccgcgccgttgccgccgccaacgggcagaacaaagtatctatcctgattccctgccaccgcgtcatcggcagcgacggcaaactgaccggctacgcgggcgggttgaaccgcaaacagtttttactggctttggaacacggcgaagttcagacggcattgttttaa

SEQ ID NO: 43745 - DNA, 1338 bp, Neisseria meningitidis
atgagtaaccatacttcttggtcgtccaaaatcggtttcgtccttgctgcggcaggttcggccatcggtttgggcgcgatttggaaatttccttatacggcaggcaccaacggcggcgcggtgtttttcctgctgtttttgatatttactatcttggtcgccctacccgttcagcttgccgaattttatatcgggcgcacgggcggtaaaaatgccgtcgattccttcagggttctgcgtccgggcacgcaatggctttgggtcgggcgtatgggcgttgccgcctgctttattttgctgtcgttttacagcgtggtcggcggatgggtattaaattatgtcgtccacagttttacgggggcggttcataccggcgcggactttgaagccttgttcggcgcgacgatttccaatccggcaggttcgctgtcctatcaggcactgtttatgctgattacggtttgggtggtcaaaggcggcatttcagacggcattgaaaaggcaaaccgttatctgatgccggggctgtttatcctctttattgcgctggcaatccgttcgctgacgctgccgggtgcaatggagggcgtgtctttcctgctcaaaccgaattggtcgtactttaaagccgatacgatgattacggctttaggccaggcgttttttgccctgagcatcggcgtttccgccatgattacctacgcttcatatttgggaaaagatcaggatatgttccgttccggccatacgattatgtggatgaacctcttggtttcgctgcttgccggcctggtgatttttccggcggtgttcgccttcggttttgaaccgagccaggggccgggattgatttttatcgtattgcccgcagtgtttatgaagatgccgttcggtacggttttgtttgcggtatttatgctgctggtcgttttcgccacgctgacttcggcattttcgatgttggaaacggtcattgcctcaaccatccgccaagacgagcgcaaacgcaaaaaacacacttggcttatcggcacggccattttcattatcggcatcccgtccgcgctgtctttcggcgtatggggcgagtttaaggttttcggcaaaaccatttttgatttgtgggactatgttatttccgccgtcattatgccgattggtgctttgagtgtttccatctttaccgcctggattcaggacaagcagtctgtgttaaaagatgccggcgcgggcagcaccgtaccacgggcagtgctgctgctgtggctgaataccttgcgctaccttgccccgattgccattattattgttttcatcaattctttggacatcctttaa

SEQ ID NO: 43746 - DNA, 918 bp, Neisseria meningitidis; identical to SEQ ID NO: 37376

SEQ ID NO: 43747 - DNA, 471 bp, Neisseria meningitidis
gtgaatatcaatgcaacattattcgctcaaatcatcgtctttttcggtttggtatggtttaccatgaaattcgtgtggccgccgattgcaaaagctttggatgagcgtgccgcaaaagtcgccgaaggcttggctgccgccgagcgtggtaaaagcgattttgagcaggctgaaaaaaaggttgcagaactcttggcagaagggcgtaatcaggtttccgaaatggttgccaacgccgaaaaacgtgccgccaaaattgtcgaagaagccaaagaacaggcttcttccgaggcggcgcgcattgcagctcaggcaaaggccgatgtggagcaggaattgttccgcgcacgcgaatccctgcgcgagcaggttgccgtgttggctgtcaaaggtgccgaatctattttgcgcagcgaagtcgatgcttccaaacacgcaaaactgctcgataccctgaaacaggagctgtaa

SEQ ID NO: 43748 - DNA, 405 bp, Neisseria meningitidis
ttggagtctcaaatggccaaatctttcaaccaagcagcttctgaacttactgatatattccctaatatctctctaaccggctttgacggtgtgaattacccagtaaccgttaattgtcctatgcacgggaacgttcgttattcgacatttaatgcccttataaagtcaaagtacgggtgtcctgagtgtgctaagatgtcaaaaacccaaacacctccaaatgtagggaagcccctcctcatcctcgacacaacgaccaacgaaacactcacgttcccaagcgttactgccgcaggtgctgctttaggtgtacatttccaacaaatcaatcacaggctcaagggtcgaacgtcgcccgacaaccttatttcaaacaggtacaaagtgcttgggtacgataggtaa

SEQ ID NO: 43749 - DNA, 5448 bp, Neisseria meningitidis
atgaaaaccaaacgttttaaaattaacgccatatccttatccatctttcttgcctatgcccttacgccatactcagaagcggcattggtcagagacgatgtcgattatcaaatattccgtgactttgcagaaaacaaaggcaaattttttgtcggcgcaaccgatttatcagtgaaaaacaaacaaggtcaaaacatcggcaacgcattatccaacgtaccgatgattgattttagcgttgcagatgtcaacagacgtacattaaccgtcatcgatccccagtatgccgtcagcgtcaaacatgtaaaaggagacgaaatctcttattacgggcatcacaatgggcacttagatgttagcaatgatgaaaacgaatatcgttcagttgcacaaaatgactacgaaccaaataaaaattggcatcacggtaatcaaggtcgtcttgaagactacaacatggcacgccttaataaattcgtaacagaagtcgcacctattgcaccaaccagtgcaggcggcggcgttgaaacctataaagataaaaaccgtttttctgagtttgtgcgagttggagcaggtacgcaatttgaatataacagccgctacaatatgacagagctttcacgagcttatcgttatgccattgcaggtacgccttatcaagacgtgaatgtcacatcgaatctaaatcaagaaggcttgattggcttcggtgataattcaaaacatcattccccagaaaaactcaaagaagttttatctcaaaacgcattgactaactatgctgtgttaggcgatagcggttcaccattatttgcttatgataaacaagaaaaacgctgggtctttttaggtgcttacgattattgggcaggctatcaaaaaaactcttggcaagaatggaatatctataaaaaagaatttgcagatgaaatcaaacaacgcgataacgccggcaccatcaaaggtaatggagaacatcattggaaaaccacgggcacaaacagccatatcggttcgacagcggtaaggcttgccaacaatgaaagggatgcaaacaacggacagaatgttacctttgaaaacaacggcactttggtattggatcaaaacatcaaccaaggcgcgggcggtctgtttttcaaaggcgattacacagtcaaaggtataaataatgacatcacttggctaggtgcggggattgatgttgccgacggcaaaaaagtcgtttggcaagtcaaaaatccgaatggcgacagattggcaaaaatcggcaaaggcacattagaaataaacggcacaggcgttaaccaagggcaattaaaagtcggcgacggtacggttattctgaatcaacaagccgatgccgacaaaaaagtccaggctttctcccaagtcggcattgtcagcggacgcggtacattggtattaaatagttcaaatcagattaatcccgataacctatatttcggtttccgtggcggtcgtttggatgccaatggcaatgacttgacttttgaacacatccgcaacgtggatgaaggcgcgcgcattgtcaaccacaacacaggccacgcctccacaatcacgctaacgggtaaatctttgattaccgatcccaaaaccatctctattcattatattcaaaataatgatgatgacgatgctggttattactattaccgccctaggaaaccgattccacaaggcaaagatctttatttcaaaaactaccgttattacgccctaaaatccggcggcagcgtgaacgcaccgatgcccgaaaacggacaaacggaaaataacgactggattttaatgggcagcacacaagaagaagccaagaaaaacgcgatgaaccacaaaaacaatcagcgtattagcggttttagcggtttctttggcgaagaaaacggaaaaggacataacggtgcattaaaccttaatttcaacggcaaaagcgcgcaaaaccgtttcttgttaacaggcggcactaatttaaacggaaaaataagcgtaactcaaggcaatgtcttgttatcaggtcgtccaacaccacacgcaagagattttgtgaacaaatcttcagcccgaaaagacgcacatttctccaaaaacaatgaagtcgtatttgaagacgactggataaaccgcacattcaaagccacagaaattgcggttaatcaatccgcatcattctcttccggcagaaatgtatccgacatcaccgccaacatcaccgcaacagacaacgccaaagtaaatttgggttacaaaaacggcgatgaggtttgcgtgcgctcggactataccggttacgttacctgcaacacaggcaacttatccgataaggctttaaacagctttggagcgacacagattaacggcaatgtgaatctgaaccagaatgcggcattggtcttgggcaaggctgcattatgggggcaaattcaagggcaaggaaacagccgtgtcagcctaaaccaacatagcaaatggcatttgaccggcgacagccaagtacacaatctgtcattggcggatagccatattcatttgaacaatgcctccgatgcgcaaagtgcaaataaataccacacgctcaaaatcaatcatttatccggtaacgggcattttcattatctgacgcacctggcgaaaaatcttggggataaagtgcttgtgaaggaatccgcatccggtcattatcagctccatgttcaagataaaacaggcgaacccaatcaggaagggctgaatctctttgatgcatcatccgtacaagaccgctcccgcctttctgtttccttggcgaataaccatgtagatttaggggcattgcgttatacaatcaaaacagaaaacggtattacccgattgtacaatccttatgccgagaaccgccgccgagtcaaaccggccccgtctcctgccacaaacacggcttctcaagcacaaaaggcaacacaaacggacggtgcacaaattgccaagcctcaaaatatcgtcgtcgcaccgcctagcccgcaggcaaatcaagccgaagaagcaaaacgccagcaagcaaaagcggagcaagtgaagcgtcagcaagcagaagcagagcgtaaatcggcagagttagcaaaacaaaaagcagaagccgaacgcgaagcaagagagctggcgacccgccaaaaagcagaacaagaacgcagcagcgccgaacttgcacgtcgacatgaaaaagaacgcgaagcggcagagttgtcggcaaaacaaaaagtcgaagccgaacgtgaggctcaagcattggcggtacgccgaaaagcagaagccgaagaggcaaaacgccaagctgcagagcttgcacgccggcatgaaaaagaacgcgaagcggcagagttgtcggcaaaacaaagggtcggggaagaggaacgccgtcaaacagcccaatcccagccgcaacgccgcaaacgccgtgccgcaccgcaggattatatggcagcttcccaagaccgtcctaaacgccgcggacaccgttcggtacagcaaaacaatgtggaaattgcccaagcccaagcagaacttgcgcgccgacagcaggaagaacgcaaagcggcagagttgttggcaaaacaaagggcagaagccgaacgtgaagctcaagcattggctgcgcgccgaaaagcagaagccgaagaggcaaaacgccaagctgccgaacttgcacatcgccaggaagcagaacgcaaagcggcagaattgtcggcaaaccaaaaagccgcagctgaagcccaagcattggcggcacgccaacaaaaagcccttgcgcgtcaacaggaagaagcacgaaaagctgcagagttagccgtcaaacaaaaagcggaaaccgaacgcaaaaccgccgaacttgccaagcaaagggcagcagccgaagcagcaaaacgccagcaagaagctcgccagaccgccgaacttgcacgtcgtcaagaagcggaacgccaagcagcagagttgtcggcaaaacaaaaagccgaaacagatcgagaagcggcagaatcggcgaaacgaaaagctgaggaagaagagcaccgtcaagcagcccaatcccagccgcaacgccgaaaacgccgtgccgcacctcaggattatatggcagcttcccaaaatcgtccgaaacgtcgcggacgcagatctactctgccggcaccgccctcgccatcatttgattcgtcagcttacgcagcacccagggccttgcataatccggactggtatgaaaatgactatgaagaaatccccttggatgcgttggaagatgaaaatgtatctgaatcagttgacacatcagacaaacagcctcaagacaatacggaacttcatgaaaaatatgaaaatgattatgaagaaatccccttggatgcgttggaagatgaagatgtatccgaatcggttgacacatcagacaaacagcctcaagacaatacggaacttcatgaaaaagttgagacagtgagtttgcaaccaagagccgcgcagccgcgagcccaagccgccactcagctgcaagcccaagccgccgcgcaagccgatgcagtcagcaccaataccaactcggctttatctgacgcaatggcaagcacgcaatctatcttgttggatacaggtgcttcattaacacggcacattgcacaaaaatcacgcgctgatgccgaaaaaaacagtgtttggatgtcgaacaccggttatggtcgtgattatgcttccgcacaatatcgccggtttagttcgaaacgcacgcaaacacaaatcggcattgaccgcagcttgtccgaaaatatgcagataggcggcgtattgacttactctgacagtcagcatacttttgatcaggcgagcggcaaaaatacttttgtgcaagccaacctttatggtaagtattatttaaatgatgcttggtatgtggccggcgatattggtgcaggcagcttgagaagccggttacaaacgcagcaaaaagcaaactttaaccgagcaagcatccaaaccggccttactttgggcaatacgctgaaaatcaatcaattcgagattgtccccagtgcggggatccgttacagccgcctgtcatctgcagattacaagttgggtaacgacagtgttaaagtaagttctatgtcagtgaaaacactaacggccggactggattttgcttatcggtttaaagtcggcaaccttaccgtaaaacccttgttatctgcagcttactttgccaattatggcaaaggcggcgtgaatgtgggcggtaattccttcgtctataaagcagataatcaacagcaatattcagcaggtgccgcgttactgtaccgtaatgttacattaaacgtaaatggcagtattacaaaaggaaaacaattggaaaaacaaaaatccggacaaattaaaatacagattcgtttctaa

SEQ ID NO: 43750 - DNA, 399 bp, Neisseria meningitidis
  misc_feature 380, 381, 382, 383, 384: 'n' is a, c, g or t
atgaacaatccattggtgaatcaggctgctatggtgctgcctgtgtttttgttgagtgcttgtctgggcggaggcggcggcagtttcgatcttgattctgtcgataccgaagccccgcgtcccgcgccaaagtatcaagatgtttcttccgaaaaaccgcaagcccaaaaagaccaaggcggatacggttttgcgatgaggttgaaacggaggaattggtatccgtcggcaaaagaaaacgaggttaaactgaacgagggtgattgggaggcgacaggattgccgacagaacccaaggaactccctaaacggcaaaaatcggttattgaaaaagtagaaacagacagcgacagcaatatttattcttccccctatctcannnnncacacacttaattaa

SEQ ID NO: 43751 - DNA, 156 bp, Neisseria meningitidis
atgcgcgataaaatcaaactggaatccagtgcaggtactggtcacttctacaccactaccaaaaacaaacgcactatgcccggcaaattggaaatcaaaaaatttgacccagttgcccgcaaacacgtagtgtataaagaaactaaactgaaataa

SEQ ID NO: 43752 - DNA, 840 bp, Neisseria meningitidis
atgctggtcgcttttttaattatgttgcgcgagggtattgaagccgcgctcattgtcggcatcgttgccggttttctgaaacagtccggacattccaaactgatgcctaaggtctggttcggggtcgtccttgcttctttgatgtgtttggggctggggtacggcatccattcggcaacgggcgagattccccagaagcagcaggagttcgtcgtcggcattatcggtttggttgccgttgccatgctgacttatatgattttatggatgaaaaaggcggcgcgttcgatgaagcggcagcttcaggattctgtgcaggcggctttgaaccgtggcagcggtcaaggatgggccttggtcggtatggcgtttcttgccgtggcgcgcgaaggtctggagagtgtttttttcctgcttgccgtattcaaacagagcccgacgtggcagatgccggccggcgcggtagcgggggttttggctgccgccgtgattggcgcgttgatttatcagggcgggatgcgcctgaatctggcgaagtttttccgttggacgggggcgtttctgattgtcgttgccgccggcctgcttgccggctcgctgcgcgcgctgcatgaggcaggtatttggaacgcgcttcaggacattgtgttcgactcatcaaaatatttgcacgaagacagtccgttgggcgtgctgctcggcggatttttcggctataccgaccatccgacgcagggcgagaccttggtttggctgctgtaccttattcccgtcataacttggtttttgtgcggcagcaggccgtctgaaactttaacccgtaaagaggagctgaaatga

SEQ ID NO: 43753 - DNA, 678 bp, Neisseria meningitidis
ttggtcaaaacggcagacggctacaaagccattgcccgtatccgaaccggcgaccgcgtcttcgccaaggacgaggcaagcggaaaaacgggatacaaacccgttaccgcccgatacggcaatccgtatcaagaaaccgtttacattgaaatttcagacggcatcggcaacaaccaaaccctgatttccaataaaatccacccgttttacagtcaaggaaaatggatacaggcaggtcgtctgaaaaaaggcgacaccctgctttccgaaagcggtgcaaaacagacggttcaaaacattaccctcaaacagcagccgctcaaagcctacaatctgaccgttgccgactggcatacttacttcgtcaagggcaatcgggcggaaacggaaggggtttgggttcataatgattgtccgccaagaaaaacaccatctacccccatatatgggaatgattcagaagcatatgcagcagcaaaggaattgggatatagaaaaataaaagaaagaacgagaaatgatgctgctatttttaaaaaaggaaagagttatatatcacgcgatgtagattcacataatggaggtgcttggaaagaggcatcttcacccgaaaaactgaacagaaaagaaacaagaaacggtacatttgataaaaacctaaatcgtattggagattaa

SEQ ID NO: 43754 - DNA, 423 bp, Neisseria meningitidis
atggcactgattaaagagccgttggacaaagtgaaacaaaggaacgaagaacttgaagcggcagaagaagcggcggcgcaggaggcattgggtcgggagcaggaagccgcccgcgtatccgaatgggaagaacgctacaagctgtcgcgcagcgagttcgagcagttctggaaaggattgcctcaaaccgtacagaataagctgcaagcctcacagaaaacatggaaaagcgggatggataaaatctgtgccaacaatgcgaaagctgaaggtaaaacgccaaacggcataaaattcagcgaactggcatgcaaaacggcgaaaaccgaagcacgcttggaagagctgcacaaccgtaaaaaagcccttatcgacgaaatggccagggaagcggacaagaaagaactgtcaaagcggctctga

SEQ ID NO: 43755 - DNA, 1089 bp, Neisseria meningitidis
atgaaacactttccatccaaagtactgaccacagccatccttgccactttctgtagcggcgcactggcagccacaagcgacgacgatgttaaaaaagctgccactgtggccattgttgctgcctacaacaatggccaagaaatcaacggtttcaaagctggagagaccatctacgacattggtgaagacggcacaattacccaaaaagacgcaactgcagccgatgttgaagccgacgactttaaaggtctgggtctgaaaaaagtcgtgactaacctgaccaaaaccgtcaatgaaaacaaacaaaacgtcgatgccaaagtaaaagctgcagaatctgaaatagaaaagttaacaaccaagttagcagacactgatgccgctttagcagatactgatgccgctctggatgaaaccaccaacgccttgaataaattgggagaaaatataacgacatttgctgaagagactaagacaaatatcgtaaaaattgatgaaaaattagaagccgtggctgataccgtcgacaagcatgccgaagcattcaacgatatcgccgattcattggatgaaaccaacactaaggcagacgaagccgtcaaaaccgccaatgaagccaaacagacggccgaagaaaccaaacaaaacgtcgatgccaaagtaaaagctgcagaaactgcagcaggcaaagccgaagctgccgctggcacagctaatactgcagccgacaaggccgaagctgtcgctgcaaaagttaccgacatcaaagctgatatcgctacgaacaaagctgatattgctaaaaactcagcacgcatcgacagcttggacaaaaacgtagctaatctgcgcaaagaaacccgccaaggccttgcagaacaagccgcgctctccggcctgttccaaccttacaacgtgggtcggttcaatgtaacggctgcagtcggcggctacaaatccgaatcggcagtcgccatcggtaccggcttccgctttaccgaaaactttgccgccaaagcaggcgtggcagtcggcacttcgtccggttcttccgcagcctaccatgtcggcgtcaattacgagtggtaa

SEQ ID NO: 43756 - DNA, 1407 bp, Neisseria meningitidis
gtggaatttagcacaaaaaccgaaatcttgcaggaacagcaggcaggcgcacagttatttgtctgcaccgaagcatcgcaactgagcaacccgaccgtccttgcccttttgtcttcgcttgaagaaggtcaaaattttgccgacacaaaaatcccgacaggcaacggtttgcaggctgttgccgtatgctgtctgaaaagcaccggccgcgccgcattgaacaaggccgccgccgaagccgccaaatgggcgcaaaatcaggaaacggtcaatgtggacgttcacgtctttgaagaagcgcaggctgcagccgttgccgaagcgtttgcgattgcgttcggcaatgccgcctaccgtttcgaccgctacaaaaaagaagccaagcccgccaaatttgaaactgccgtgttccataccgcgcacgaagccgccgtcaaagaagccttgcgcgtcgccgaagcgcaagtttacggacaaagcctctgccgcgacttgggcaacgccgcgcccaacgaatgcacgcccgaatttttagcgcgcaccgccaaagccgaagccgaaaaactgggcgcgcacgccaaaatcatcgaaaaagactacatcaaagaaaacatgggttcgttttggtcggtcgccaaaggcagcgcggaagccccctatttggtcgaactgagctatttcggtgcagccgacaaagaagccgcgcctgtggtattggtcggcaaaggcattaccttcgacaccggcggcatctccctcaagcccggcctgaacatggacgaaatgaagtttgatatgtgcggcgcggcaaccgtcatcagcaccttctgcgccgccgtcaaactgcaactgccgattaacctgattgccgtcgtcgccacttgtgaaaatatgccttccggcgcggcaaacaaaccgggcgatgtcgtgaaaagtatgaaagggctgaccatcgaagtgttgaacaccgatgccgaaggccgtctgattttgtgcgacgcgctcacttacgccgagcagttcaaacccaaagccgtcatcgacgtcgccaccctgaccggcgcgtgtattgttgccttggggcacgatgtcagcggcgtgatgggcaacaatcaggatttgatcgacagcctgcttgccgcttcctacaacgtggacgacaaagcatggcaactgccgctctttgagacctacaaagaccaactcaaatccaactttgccgacattccaaacatcggcacgcccggcgcgggcacgattaccgccgcaacattcctatcctactttaccgaagactatccatgggcacaccttgacatcgcgggtacggcgtggaaatccggtgcggaaaaaggtgcgaccggccgtcccgttcccttgctgctgaactatctgcggaatctttaa

SEQ ID NO: 43757 - DNA, 852 bp, Neisseria meningitidis
atgattacccatccccaattcgaccccgtccttatcagtatcggtccgcttgccgtccgctggtatgccctaagctacatcctcggatttattctttttacctttctcggcagaaggcgcatcgcgcaaggcttgtccgtttttaccaaagaatcgctcgacgacttcctgacatggggcattttgggcgtaattttgggcgggcgtttgggttacgtcctgttttacaagttttccgactacctcgcccatccgcttgatattttcaaggtatgggaaggcggaatgtcgttccacggcggctttttgggtgtagttattgccatatggttgttcggccgcaaacacggcatcggcttcctcaaactgatggacacggtcgcaccgctcgttccgctgggtctcgcttcgggacgtatcggcaacttcatcaacggcgaactttggggacgcgttaccgacatcaacgcattttgggcaatgggcttcccgcaggcgcgttacgaagatgccgaagccgccgcgcacaatccgctttgggcagaatggctgcaacaatacggtatgctgccgcgtcatccctcgcagctttatcagtttgcacttgaaggcatctgcctgttcgccgtcgtttggctgttctctaaaaaacagcggccgaccggacaagtcgcctcgctcttcctcggcggctacggcatattccgcttcattgccgaattcgcacgccaacccgacgactatctcgggctgctgaccttggggctgtcgatggggcaatggttgagcgtcccgatgattgttttgggtatcgtcggctttgtccggttcggcatgaaaaaacagcactga

SEQ ID NO: 43758 - DNA, 681 bp, Neisseria meningitidis
atgacttataccattacccccatcggcaccgcccgctcgccctacaaacagaaattcggcatcgcccgccagcccggtttggtctccgccgcaaaagcctgcatcgagctgaatcccaaattcaccgcagacagcgtgcgcgggctggaagatttcgattatgtgtggataagttttatttttcacggcgtattggatgaaggctgggcgcaaatggtgcgcccgccacggctcggcggcaaacaaaaaatgggcgtgttcgccacgcgcagcccccaccgccccaaccatctcggactctcgctcctgaaactcgaacgcatcgaaaccggcaaacccgtccgcctctattgcagcggcgcagacctgctggacggcacaccgattgtggacatcaaaccttatatcccctttgtcgaatccaaacccgatgccgcatccggtttcgtcagcggcaaacccgtagagttggaagtcgtttggcaggaaaacatcggcgcggaaaatttatctgcaaacaccaaaaaccttatcagccaaagcattgcccaagatccgcgccccgcctatcagaatattcccgaacggatttatgtgatgaatattgcagattacgaagtcagatttcaaatcgaggaaaaccgtgcaaccgttattgatctttccccaaccccgctttaa

SEQ ID NO: 43759 - DNA, 216 bp, Neisseria meningitidis
atgaaggcaattcatccgtatgcatgtccgcgctgctgccggctgcctgccaacacgtttcggacaggcatggcaaattccgcttccaaattctgcattgccaaaggcggcagacgggaagcaaaaaaagacgaaagcggcggcggatatgccctgtgccatttgccggacagcaggattgtcgaggagtgggaatatttccgttcacaatattga

SEQ ID NO: 43760 - DNA, 7545 bp, Neisseria meningitidis
atgaataaaactctctatcgtgtaattttcaaccgcaaacgtggggctgtggtagccgttgctgaaactaccaagcgcgaaggtaaaagctgtgccgatagtgattcaggcagcgctcatgtgaaatctgttccttttggtactactcatgcacctgtttgtcgttcaaatatcttttctttttctttattgggcttttctttatgtttggctgtaggtacggccaatattgcttttgctgatggcattattgctgataaagctgctcctaaaactcaacaagccacgattctgcaaacaggtaacggcataccgcaagtcaatattcaaacccctacttcggcaggggtttctgttaatcaatacgcccagtttgatgtgggtaatcgcggggcgattttaaacaacagccgcagcaacacccaaacacagctaggcggttggattcaaggtaatccttggttggcaaggggcgaagcacgtgtggttgtaaaccaaatcaacagcagccattcttcacaaatgaatggctatattgaagtgggcggacgacgtgcagaagtcgttattgccaatccggcagggattgcagtcaatggtggtggttttatcaatgcttcccgtgccactttgacgacaggccaaccgcaatatcaagcaggagaccttagcggctttaagataaggcaaggcaatgttgtaatcgccggacacggtttggatgcccgtgataccgatttcacacgtattctcagttatcattccaaaattgatgcacccgtatggggacaagatgttcgtgtcgtcgcgggacaaaacgatgtggtcgcaacaggtaatgcacattcgcctattctcaataatgctgctgccaatacgtcaaacaatacagccaacaacggcacacatatccctttatttgcgattgatacaggcaaattaggaggtatgtatgccaacaaaatcaccttgatcagtacggccgagcaagcaggcattcgtaatcaagggcagttgtttgcttcttccggtaatgtggcgattgatgcaaatggccgtttagtcaatagtggcacgatggctgccgccaatgcgaaagatacggataatacagcggaacacaaagtcaatatccgcagtcagggcgttgaaaacagcggtacggcggtatcgcaacaaggcactcaaattcacagtcagtcgattcaaaacactggcacattattgtcctcaggcgaaatattgattcacaattcgggcagcctgaaaaatgaaacatcaggcaccattgaagccgctcgtttggctattgataccgacacacttaataatcaaggcaaactctctcaaacaggttcacaaaaactccatattgatgcacaaggcaaaatggataaccgtggccgcatgggtttacaagataccgcaccaaccgcgtcaaatggttcaagcaatcaaaccggcaatagttacaatgcatctttccattcatccactaccacaccaacaacggcaacaggtacgggtactgcaaccgtttctatatcaaacataactgcgcctacctttgctgatgggacaattcgcactcatggtgcactggataattcaggcagtattattgccaatggtcaaacagatgttagtgcgcaacaaggtttaaataatgcaggacaaatagacattcatcagttaaatgcaaaaggttcggcgtttgacaatcacaatggaacaattatcagtgatgcggtccacattcaagccggcagcctgaataatcaaaatggcaacatcacaacacgccaacagttagagattgaaaccgatcaactggataacgctcatggcaagttattatcagcagaaatagcggatttagccgtttcaggcagcctgaacaatcaaaatggcgaaatagcgaccaatcaacaactgattattcacgatggtcagcaatctaccgctgtcattgataatacgaatggcacgatacaatcaggccgtgatgttgctattcaggcaaaatcgttatccaacaacggcacacttgccgctgataataaactggatattgcgttacaagatgatttttatgtagaacgcaatatcgtggcgggcaatgaattgtcgctcagtacacgaggcagcctgaaaaattcacatactttgcaagcaggaaaacgcattcggattaaagcaaataaccttgataatgcagcacaaggcaacattcaatccggcggtacgacagacattggcacgcagcacaatttaaccaatagaggcttgattgacggacaacaaaccaaaatccaagccgggcaaatgaataatatcggtacaggtcggatttatggcgacaatatcgctattgcggctacccgcttagacaatcaagatgaaaacggtacaggtgccgccattgcggcacgtgaaaacctgaatttaggcatcggacaattaaacaaccgtgaaaacagtctgatttacagcggtaacgatatggcggttggcggcgcattagataccaatggccaagccacaggcaaagcccaaaggatacacaatgccggcgcaaccattgaagctgcaggcaaaatgcgtttaggtgtagaaaagctgcacaataccaatgagcatttgaaaacgcagttggtagaaacagggcgcgagcatattgttgattacgaagcatttggacgacacgaattattgcgagaaggcacgcaacatgaattaggctggtctgtctataacgatgaatcagaccacttacgcacccctgatggagcggcgcatgaaaattggcataaatacgattatgaaaaagtcacccaaaaaacccaagttacccaaactgcgccagccaaaatcatttcaggtaatgatttaaccattgatggtaaagaagtatttaataccgatagccaaatcattgctggtggcaatctcattgtacaaacagaaaaagacggtttgcataacgagcaaacctttggcgaaaagaaagtattcagtgaaaatggcaaattacacagctattggcgtgagaaacataaaggacgagactcaacgggacatagcgaacaaaattacactttgccggaggaaatcacacgcaacatttcactgggttcatttgcctatgaatcgcatcgcaaagcattaagccatcatgcgcccagccaaggcactgagttgccgcaaagcaacggtatttcgctaccctatacgtccaattcttttaccccattacccagcagcagcttatacattatcaatcctgtcaataaaggctatcttgttgaaaccgatccacgctttgccaactaccgtcaatggttgggtagtgactatatgctggacagcctcaaactagacccaaacaatttacataaacgtttgggtgatggttattacgagcaacgtttaatcaatgaacaaatcgcagagctgacagggcatcgtcgtttagacggttatcaaaacgacgaagaacaatttaaagccttaatggataatggcgcgactgcggcacgttcgatgaatctcagcgttggcattgcattaagtgccgagcaagtagcgcaactgaccagcgatattgtttggttggtacaaaaagaagttaagcttcctgatggcggcacacaaaccgtattggtgccacaggtttatgtacgcgttaaaaatggcgacatagacggtaaaggtgcattgttgtcaggcagcaatacacaaatcaatgtttcaggcagcctgaaaaactcaggcacgattgcagggcgcaatgagcttattatcaataccgatacgctagacaatatcggtgggcgtattcatgcgcaaaaatcagcggttacggccacacaagacatcaataatattggcggcatgctttctgccgaacagacattattgctcaacgcaggcaacaacatcaacagccaaagcaccaccgccagcagtcaaaatacacaaggcagcagcacctacctagaccgaatggcaggtatttatatcacaggcaaagaaaaaggtgttttagcagcgcaggcaggaaaagacatcaacatcattgccggtcaaatcagcaatcaatcagagcaagggcaaacccggctgcaagcagggcgcgacattaacctagatacggtacaaaccagcaaacatcaagcaacccattttgatgccgataaccatgttattcgcggttcaacgaacgaagtcggcagcagcattcaaacaaaaggcgatgttaccctattgtcagggaataacctcaatgccaaagctgccgaagtcagcagcgcaaacggtacactcgctgtgtctgccaaaaatgacatcaacatcagcgcaggcatcaacacgacccatgttgatgatgcgtccaaacacacaggcagaagcggtggtggcaataaattagtcattaccgataaagcccaaagtcatcacgaaaccgcccaaagcagcacctttgaaggcaagcaagttgtattgcaggcaggaaacgatgccaacatccttggcagcaatgttatttccgataatggcacccagattcaagcaggcaatcatgttcgcattggtacaacccaaactcaaagccaaagcgaaacctatcatcaaacccagaaatcaggattgatgagtgcaggtatcggcttcactattggcagcaagacaaacacacaagaaaaccaatcccaaagcaacgaacatacaggcagtaccgtaggcagcttgaaaggcgataccaccattgttgcaggcaaacactacgaacaaatcggcagtaccgtttccagcccggaaggcaacaataccatctatgcccaaagcatagacattcaagcggcacacaacaaattaaacagtaataccacccaaacctatgaacaaaaaggcctaacggtggcattcagttcgcccgttaccgatttggcacaacaagcgattgccgtagcacaaagcagcaaacaagtcggacaaagcaaaaacgaccgcgttaatgccatggcggctgccaatgcaggctggcaagcctatcaaacaggtaagagtgcacaaaacttagccaatggtacaaccaatgccaaacaagtcagcatctccataacctacggcgaacagcaaaaccgacaaaccacccaagttcaagccaatcaagcccaagcgagtcaaattcaagcaggtggtaaaaccacattaatcgccacaggcgcagcagaacaatccaatatcaacatcgcaggctcagatgttgccggcaaagcaggcacaatcctgattgccgataacgacatcacactccaatcagccgagcaaagcaataccgaacgcggccaaaacaaatcggcaggctggaacgcaggtgctgccgtatcattcggacaaggaggctggtcattaggcgttaccgcaggcggcaatgtcggcaaaggctacggcaatggcgacagcatcacccaccgccatagccatatcggcgacaaaggcagccaaacccttatccaaagcggtggcgacactaccatcaaaggcgcgcaagtacgcggcaaaggcgtacaagtcaatgccaaaaacctaagtattcaaagcgtacaagatagagaaacctatcaaagcaaacaacaaaacgccagtgcacaagttaccgtaggttatggcttcagtgccggtggcgattacagccaaagcaaaatccgagccgaccatgtttcagtaaccgagcaaagcggtatttatgccggagaagacggctatcaaatcaaggtcggaaaccatacagacctcaaaggcggcatcatcaccagtacccaaagcgcagaagacaagggtaaaaaccgctttcagacggccaccctcacccatagcgacatcaaaaaccacagccaatacaaaggcgaaagttttggattgggcgcaagtgcgtccataagcggcaaaacactgggacagggcgcacaaaataaacctcaaaacaaacacctgacaagcgtagccgataaaaacagcgcaagttcatcagtgggttatggcagcgacagcgacagtcaaagcagcatcacaaaaagcggcatcaacacccgcaacattcaaatcaccgacgaagccgcacaaatccggctgacaggcaaaacagcggcacaaaccaaagccgatattgatacaaacgtaaccacagacaccgccgaacgacattcgggcagcttgaagaacaccttcaacaaagaagcggtgcaaagtgaactggatttacaaagaaccgtcagccaagattttagtaaaaatgttcaacaagccaataccgagattaaccaacatttagacaaactcaaagcagacaaagaagcagccgaaacagcagcagccgaggcattagccaatggcgatatggaaactgccaaacgcaaagcccatgaagctcaagatgcggcagcaaaagcagataattggcaacaaggcaaagtcattctcaacatgttagcctcaggtttagctgcgccgacccaaagcggagcgggcatcgctgcggctaccgcatcgccagccgtatcgtatgcgattggacagcactttaaagatttagccggtcaaaacgcgaatggtaaactaaccgccagtcaagaaaccgcacacgttcttgcccacgcggtattaggagcagcggttgccgcagtaggagacaacaatgctctagcaggagcattgagtgcgggcgggtcggaagcggctgcgccttacatcagcaaatggttatacggcaaagaaaaaggaagcgacttaacggcggaagagaaagagactgtaacagcgattacaaatgtattgggtacggctacgggtgcggcagtcggcaacagcgcaacagatgcagcgcaaggcagcctgaatgcgcaaagtgcggtggagaataatgatactgtagagcaagtgaaatttgctcttaggcaccctagaattgctattgcaattggatctgtacataaagatcctggctctacattagagcctaatatttcaacaattgcttcaacttttcaattaaatttatttcctaatagtgaatttggtggtgaaggtggagttggcaatgcattcaggcacgttttatggcaagcaaccatcacacgagaatttggcaaagatattgctgttaaagtaggaaatagtcatgaaagtggggaaaaaattaattattctataagacgtaatctttcattagataaagcagatgaaatgattgatcaactaaataacgaaataggaagagaaatagcattaaataccaataggttaaacacaaaagagttagttggattaattctggaaacttataaaaataatggtttttatcaagcagaaagaaacagtaatggaaattatgatgttgtaagaaaaagattatctgaaaaagattaccagaatacaagcaatatattgattcacttagataatactggtgccggatttaaaattcagcagaggagaaaacaaatcagagcacaaatttcagccagacaatggagaagataa

SEQ ID NO: 43761 - DNA, 471 bp, Neisseria meningitidis
ttgaacatcaccgttttggcagtcggcaccaaaatgccgcgctgggttgatgaggccgtcgccgaatacgccaaacgcttcggacgcgacgtcgcctacgcactcaaagaaatcaaacccgaaaaacgcggcgcgggcgtgaatgccgcccaaggtatggcggcggaagaaaaacgcatccttgaagccattccgcaaggcgcgttcctcgtcgttcttgacgaacgcggcaaagcaccgacctccgtcgagctggcggaacacctcaaaagctggcggcaaaacggcgaacacgtctgcttcgtcatcggcggcgcggacggcatgaccgaccgcctcaaacagcaggcacgcatgatgatgcgcctgtccagcctgaccctgccgcacggcatggtgcgcgtctttctgaccgagcagctctaccgcgccgtttccatcctgcacaaccatccctatcatcgggaataa

SEQ ID NO: 43762 - DNA, 2853 bp, Neisseria meningitidis
atgaaactgtccgaactgttcaaccccaacgaatttgccgcgcggcatttgagtttcggcgacgaagcggcgttgcttgccgctgtcggcgagaaaagtatggacgattttgtcggcaacaccgtgccgcaaagcatccgtatgccgtctgaactcgatttgcccgaggccttgaccgaggcggacgcattggcgaaattgaaaggcattgcgtcgaaaaacgtgatcaacaagtcctatatcggtttaggctattacccgacccgcgtgccgaatgtgattttgcgcaacgtattggaaaatcctggctggtataccgcctacacgccgtatcaggcggaaatcgcgcagggtcgtttggaagcattgttgaacttccaacaagtgtgcatcgatttgaccggtttccctgtggcgggcgcgtctttactggacgaggcaactgccgccgccgaagcgatggcgatggcgcaccgcgtgggcaaggtaaaatccgagcgtttcttcgtggacgagcgcgtgtatccgcaaactttggacgtgatgaaaacccgcgccaagtatttcggctttgaattggtggtcggcgattttgccaaagcggatgaaggcgaatacttcggcgcgctgttccaatacgtcggcaaagacggcgacgtgcaagacttgcaaagcgttataggccgtctgaaagccaaaggcacgattgtcgccgtttccgccgacatcatgagcttggttttgctgaagtctccggctgaattgggtgcagatattgctttgggcaacacgcaacgcttcggcgtgccgatgggcttcggcggtccgcatgctgcttatttcgcgtttaaagacgagttcaaacgttccgccccgggccgtatcatcggtgtatccaaagacgcatcgggcaaacctgccttgcgtatggcgttgtccacccgcgagcaacacatccgccgcgaaaaagccacgtccaatatttgtaccgcgcaggcattgctggcgaatttggccggtatgtatgccgtttaccacggccctgaaggcgtgaaacgcatcgccaaccgcattcacgcgctggcttctgcctttgccgatgcactggtttcagacggcatcaaagtggttcacgaagtcttcttcgataccgttaccgtcgatttcggcaacaaagagaaagcagaccaagtgtttgccgctgctttagagtcgggttacaacctgcgccgcgtcaacgatactcaagttgcggctgcattccatgaaacatcggcatacgaagatttggttgatttgtaccgcgcgtttaccggcaaggatgcgttcgcatttgccgatgatgtcaaaggccgtctgaacgccgaattgctgcgtcaagatgacattctgcaacatcctgtgttcaaccgttaccacaccgaacacgaaatgttgcgctatctgaaaaaactcgaagaccgcgatttggcgatgaaccgcagcatgatttcattgggcagctgcaccatgaaactcaacgcgactgcggaaatgttgccgattacttgggcggagttctccgacatccatccttacgctcctgaagcgcaaaccgccggctaccgcgaattgctcgccgatatggaaaacagcctgaaatccatcaccggttttgatgcaatttccttccagcccaactccggcgcgcagggcgaatacagcggtatgcttgccatccgccgctatcaggaagcccaaggcgaagcgcaccgcaacatctgcctgattcccaaatccgcccacggtaccaaccctgcgactgcggccatgctgggcttgaaagtcgtcgtcgtcgataccgacgaacacggcaacgtcaacatcgacgatttgaaagccaaagccgagcaataccgcgacgctttgtccgccatcatgattacctatccgtccacccacggcgtgtatgaagaaggcatccgcgacatctgccgcatcatccatgaaaacggcggacaggtttatatggacggcgccaacctcaacgctcaaatcggcatcatgcagcctgccgaagtcggcgcggacgtgttgcacatgaacctgcacaaaaccttctgtatccctcacggcggcggcggcccgggcatgggtccgattggcttgaaagcccaccttgccccgtttgcaccgggacacgctttgaccgacacgcacagcacaagtgccgggcaaaccgccgtggctgccgcagcatatggttctgcatccatcctgccgattacttggatgtacctgaccatgatgggcaaacaaggcatggaacaggcaacgcgctgggcattgctcaacgccaactacgtcgccaaagccttgggcgaggattatccgattctctacaccggcaaaaacggccgcgtcgcgcacgaatgtatcgtcgacttgcgtccgctcaaagccgaaagcggcattaccgaaaccgacatcgccaaacgcctgatggactacggcttccacgccccgacggtttccttccccgttgccggtacgctgatgatcgagccgaccgagagcgaaagcaaagccgaactcgaccgcttcatcgccgccctgaaacaaatcaaacaggaagtgctgaaagtcgggcgcggcgaatggccgaaagacgacaacccactggtcaacgcgccgcacaccgccgcagatataaccggcaactgggcgcatccgtattcccgcgaagaagccgtcttcccattgccgttcgtccgcgaacacaaattctggccgagcgtcaaccgtgtggacgacgtgtacggcgaccgcaatctcgtgtgcagctgcccaccgatggaaaattatgaagactga

SEQ ID NO: 43763 - DNA, 1167 bp, Neisseria meningitidis
atgaatttacacgagtatcaggctaaagaactgctggctagctacggtttgcccgtacaaggcggtattttggcacacaacggcgaagaagccgctgcagcttacgacaaattgggcggcaaattcgctgttgtcaaagcacaagtacacgccggcggccgcggtaaagcgggcggcgtaaaagtcgttaaaagccgcgaagaagctaaagaagtggctgaaagcctgattggcaccaacttggtaacttaccaaaccgatgccaacggccaacctgtcaacagtgttttggtttgcgaagacatgtatccggttcaaaccgagctgtacttgggcgcagtggttgaccgttctacccgccgcattacattcatggcctctaccgaaggcggcgtggaaatcgaaaaagttgctgccgaaactcctgaaaaaatcttcaaagtaaccgttgatccgctggtcggcctgcaaccttgccaagctcgcgaagttgcgttccaactgggcttgaaagacaaacaaatcaacgagttcgtcaaactgatgaccggtgcgtacaaagcgtttgtcgaaaatgacttcgccctgtttgaagtcaacccgctggcagttcgcgaaaacggcgcgctcgcctgcgtggacggcaaaatcggcatcgacagcaacgcgctctaccgcctgccgaaaatcgccgaattgcgcgacaaatctcaagaaaacgaacgcgagttgaaagcttctgaatttgacctgaactatgttgccctggaaggcaacatcggctgtatggtgaacggtgccggtttggcgatggccactatggacatcatcaaactgaaaggcggccaacctgccaacttcttggacgttggcggcggcgcaaccaaagaccgcgtggttgaagcgttcaaactgattctggaagacaaatccgttcaaggcgtattgatcaacatcttcggcggtatcgtacgttgcgacatgattgcggaagccatcgtggcagccgttaaagaaatcaacgtcaacgttcctgtcgttgttcgtttggaaggcaacaacgccgaactcggcgcgaaaatcctgaacgaatcaggtctgaaactgacttctgcagacggcctgaatgacgcagccgaaaaaattgttgcagccgtaaacgcctaa

SEQ ID NO: 43764 - DNA, 792 bp, Neisseria meningitidis
atggcaagacatccctaccgccgcctgcgtcctgcaaaatccggctttcccgaagtcggcatttccgaagaaggcaatatccgttcgcttcacttgggcagcgacaccgttcaaagctcgatgaacctcgaccacccgtccgagctggtgctctcttacagccgcgcgatgatgggctggctgctgtttaccgacgctcttccgcaacatatcacccaaatcggcttgggcggcggctcgtttgcacgctggatagatacctacctgcccgacacgcgccaaaccgccgtggacatcaatccgcaggtcatcgccattgcccgcaacctgttcgagttgcctttcgagggcgagaaatttgaaattattgaagcagacggtgcagaatatatcaaagtcttccgccacaacaccgatgtgattttggtggacgggttcgacggcgaacaaatcatcgatgcgctggttgaagaaccgttcttccgagactgccgcaacgcactctcttcagacggcatattcgtaaccaactggtggagcggcgacaaacgctaccaacgcttcatcgaacggttgttgagcgtttttgaagggcgcgtcttggaacttcctgccgaaagccacggcaatgtcgcggtaatggccttccaaagcagccccaaagagcaaaacatagacaaactcaaaaaacgtgccgacaaactgagcaacgcatacggattggacttccaccgtatgcttgccggcctgaaagcgtccaaccccaacaacggcaagcatttccacctttaa

SEQ ID NO: 43765 - DNA, 1266 bp, Neisseria meningitidis
atgttcagcttcttccgtcgcaagaaaaaacaggaaactccggctcccgatgaggctcaaattcaggaaaccgcagcaaaagcagaatctgaagttgctcaaatagttgaaaatattaaagaagatgctgaatctttaacggaaagcgtcaaagggcaggtcgaatcggctgttgaaaccgtcagcggtgcggttgaacaggtaaaggaagccgttgccgagatgctgtctgaagcagaggaagcggcggaaaaagcagcggaacaagtcgaagcggcgaaagaagctgttgccgaaaccatcagcgaggctgtcgggcaagttaaagaagccgttgcgacaactgaagaacacaagctcagttgggcggcgcgtttgaaacaaggtttgaccaaatcgcgcgacaaaatggcgaaatcgctggcgggcgtgttcggcggcggacaaatcgacgaagatttgtacgaagagctggaaaccgtgctgattaccagcgatatgggcatggaagccaccgaatacctgatgaaagacgtgcgcgaccgcgtcagcctcaaagggctgaaagacggcaacgaattgcgcggcgcgttgaaagaagccttgtacgacctgattaagcctctggagaaacctttggttttgcccgaaaccaaagagccgtttgtcatcatgcttgccggcatcaacggcgcgggcaaaaccacgtctatcggcaaactcgccaaatatttccaagcgcagggcaaatctgtgctgcttgccgccggcgatactttccgcgccgccgcccgtgagcagcttcaagcttggggcgaacgcaacaacgtaaccgtgatttcgcaaaccacgggcgattccgccgccgtgtgcttcgatgccgtccaagccgccaaagcgcgcggcatcgacattgtgctggccgacaccgccggccgcctgcccacgcagcttcatttgatggaagaaatcaaaaaagtgaaacgcgtgctgcaaaaagccatgcccgacgcgccgcacgaaatcatcgtcgtgcttgatgccaacatcgggcaaaacgccgtcaaccaagtcaaagcctttgacgacgcattagggctgaccggtttaatcgttaccaaactcgacggcacggcaaaaggcggcatcctcgccgcgcttgcctccgaccgccccgtccccgtccgctatatcggcgtgggcgaaggcatagacgatttgcgcccgtttgacgcgcgcgcgtttgtggacgcactgctggattga

SEQ ID NO: 43766 - DNA, 159 bp, Neisseria meningitidis
gtggtcgaacagagcttcggtacgctgcaccgtaaattccgctacgcccgggcagcctatttcggactgattaaagtgagtgcgcaaagccatctgaaggcgatgtgtttgaaccttttgaaagccgccaacaggctaagtgcgcccgctgccgcctaa

SEQ ID NO: 43767 - DNA, 1032 bp, Neisseria meningitidis
atgccggattttcaaagaattactattgaaaacatagagtattttattgtcgatagtattcaaaatttacgtgcggaagatagttttattcacaggaataacaagttatctgtttttggtggtaatggggaagcacgcaaatatgtaggtagttatattgatgatagtggtcgaaaactaagtacattttttgagtatgaaaattgggggattactgagacaaaaaatggaaggagggtagaatatcctttcattcagaaaaattgttttttttataagaaaaatttacagcgttatttggttgatgcaaaagttgaatatcacaaacaagaacagaaatatcatcatgatatttcaaggttttatgatgattacgttttaagtattaataatctgcctacagaaaatattttcttttcaatccatgatgtatcagaccatttggaaaattctaaaggttaccgtaggggttatatccgttcggaggatgatatatggtcaatttggcgtaagattgtattgcccaaaattagttatttatcaattcttaaactattgcctgtcaaagatatagaagattcagaaccattattttatttccgaatatttttggattatcaatttcgctctatcgtgcacccgcaactcttatcaagagaaaaattagaaataccggcttcagaatttaatcaattcgtagagcaagaaatcattaaacagaaaagtagaaaagggcagcagaaatatcgcaaggatgttataaatcatatgtcgcaatgtccatttacattaattacagatgagattttgttaagggctagtcatattaaaccttatatggtttgtattactgagaaaaatgagaaagaggcattagattatttaaatgggttagctttaacgccgacttatgattggttgttcgatcaaggttatattactttcttggatgatggtcgtttgatttgcggtactcgactaagccgttacacatgggaaaaacttaatatcaatccaaatgcaaaaaattaa

SEQ ID NO: 43768 - DNA, 636 bp, Neisseria meningitidis
atgcccatgaacctttttcaaaacgccaaattcttcacgacgatcaaccaccttaaagacctgcccgacacccctctcgaaattgcctttgtcggcaggagcaatgccggaaaatccagtgccatcaataccctgaccaaccatgtccgtcttgcctacgtttcaaaaacacccggacggacgcagcatatcaacttcttcgagctgcagaacggcaattttatggtcgatttgcccggctacggttatgcccaagtccccgaagcagtacgcgcacattgggtcaatctgctcggcgactatctgcaacagcgcaaacagcttatcgggctggttttgattatggatgcccgccatcctttaaaagaactcgacatccgtatgctggattttttccacacgaccggcagaccggttcacatcctgctgtcaaaagccgacaaattatccaaaaacgaacagataaaaaccctgtcccaagtcaaaaaactgctcaaaccttattccgacaggcaaaacatcagcgtacagctgttttccagcctgaaaaaacaaggtattgacgaggccaaccgaactgtcggaagctggttggacgcagcagatgccgccgcttcctctccagaggaaaactga

SEQ ID NO: 43769 - DNA, 945 bp, Neisseria meningitidis
atgtctgcatctaagaaatttccgattcctttgagctatttcagcatcgcgctgggcttgtttgccttggggctgtcgtggcgttacggcgcgtctgtcgggctgctgcccgccttggccgccgaatcgctgcttgcggcggcttcggtcgtctggctcttgctggtggcggcatacctgatcaaaatgtttgcgtaccgaaacgattttttgtctgatttacgcgacttggtgcaatgctgcttcatcagcgcgattccgattaccgctatgctggagggactcgcgctgaagccctatcaggcaggcgcggcggcagtcctgatttatgtcggcgttgccggacagttggctttttcgatgtatcgggcggccggtctgtggcgcggcctgcattccttggaggcgacgacgccgattatttatctgcctacggttgcgacaaactttgtcagcgcgtcatctctggcggcgttggggcatcatgattatgcagctttgtttttcggcgcgggtatgttttcctggctgagcttggaagcctccatcttgggcaggctgcgcacggcggcaccggtcggcacggcggcgcgcggcgtggtcggcatccagcttgcgcccgcctttgtcggctgcggcgcgtattttgccgtcggcggtaaagtcgacggttttgcgttggcattaatcggctacggctgcctgcagcttttgttcttgctgcgcctgacccgctggttttgggaaggtggttttacgatgagcttttggggattttcattcggtttcgcggcaatggcaggatgcggtctgcatctggcggcttccggcgtattgtcgggcttggggctgacgcttgccaccgccggatcggcaggcgtggcgctgctgcttgtcggtacgctgcaccggatagcgacggggcgtttcttggtacgcagctga

SEQ ID NO: 43770 - DNA, 666 bp, Neisseria meningitidis
atgatggattcccgaaaatttaccgaagcatccaaacggcggttgagcgaattgttggatgccaaaagcgaacaaggcaacacgatgcgttgcgacgaggttcaaggttttatgacggcgctgttgagcgggccggacaaattgacaccgctcgactggctgcccgaagtgttgggcgacgaatcgcaatttaccgccgccgaacgttccgaaatcgaacggctggttttggcaatggcgatggaaacaaccgccgcgatgtcggataaaaaactgcccgatttgtggctgtatgaaaacgaagacggcggcagcgatttttacacatggtgcaatgcttatctttacggtttggatattgtgccgaccgattggtttgaagccgtcgatgatgaagcgtttgaagagttgttttatcccatcatggcattgggcggtatttacgacgaagaggaaaacggcactatccgtctgcaattcacagaaggcgagctggcggaactggaatccgagttgccttatgcattggcggatatctaccgctactggcaggcagtcatcaacaaaccgcaaaccgtccgcagggaaggcaaaaaaacaggcaggaacgatccctgtccgtgcggcagcggcagaaaatacaaggcgtgttgcggtaagaattga

SEQ ID NO: 43771 - DNA, 270 bp, Neisseria meningitidis
atggcactgaccgtagaacaaaaagcacaaatcgttaaagatttccaacgcaaagaaggcgacaccggctcttccgaagtacaagtcgctctgttgactttccgcatcaacgacctgaccccccacttcaaagccaaccccaaagaccaccatagccgtcgcggcctgttgaaaatggtcagccaacgccgccgcctgctggcctacttgcgccgtacccagcccgatacgtatcgcgcgttgattacccgcttgggtctgcgtaaataa

SEQ ID NO: 43772 - DNA, 1068 bp, Neisseria meningitidis; identical to SEQ ID NO: 42520

SEQ ID NO: 43773 - DNA, 534 bp, Neisseria meningitidis
atggcagagttcgcaacgattgccagaccttatgcaaaggcattgttcggtctggctcaggaaaaaaaccaaattgagtcttggttgggcggactggaaaaacttgcggcggttgttcaggaagggaaggtggcttcattgattgaccgtcctgaaacgaatgcttcagaaaaagcagatatcctcatcgatttggtcggtttgaaagacaaggagttgaaaaactttgttatcgtcttggccgggcagaaacgtttgtcgatattgccggaagtatatgctcaatatcaagacttgaccttatcattcaaccatatcaaatctgccgtcatttacagtgcctatccgttgaccgacaaacaggtcggcgagttggtgcaaatgctgaataagcgtttcgacagcgagctgaaaatctctgtcgaaatcgaaccggagctgattggcggcataaaagttgaagtgggtgatcaggttttggatttgtctgtacaaggcaaattgagtgccttgtacacgactatgacgaattag

SEQ ID NO: 43774 - DNA, 999 bp, Neisseria meningitidis
atgaagattgcgatttacggtacgaaaagctatgaccgcgaacattttacccgcgccaaccggcatttcggcttcgagctggagttttttgattttatgctggatgcgaaaacggcgaaaatggcggaaggcgcggaagcggtctgtatttttgtaaacgacgacggcagccggcccgtgttggaaaaattggcgcaaattggcgtgaaaactgtggcgttgcgttgtgccggcttcaataatgtggatttaaaggcggctgaagagttgggcttgaaagtcgtgcgcgtgcctgcctattcgcccgaatcggttgcggaacatacggtcggtctgatgctgacgttgaaccgccgtatccacaaagcctatcagcgtacccgcgatgcgaatttttcgctggaaggtctgaccggtttcaatatgtacggcaaaacggcgggcgttatcggcacggggaaaatcggtattgcaaccatgcggattttaaagggtttcggcatgaacctgctggcttacgatccgttttgcaaccccgaagcggaaaaaatcggcggcaaatatgtggatttagacgagctgtatgcccggtcggacatcatcacgctgcattgccccgccacgccggaaaaccactatatgctgaacgaagcggcgttcgacaaaatgaaagacggcgtgatgattatcaacaccagccggggcgggctgattgacagtgccgccgcgattgaggcgttgaaacgccggaaaatcggcgcattgggcatggatgtgtacgagaacgagcgcgagctgttttttgaagacaaatccaacgatgtgattaccgacgacgtgttccgccgcctgtcgtcttgtcataatgtgctgtttaccggccatcaggcatttttgacggaagaggcgttgggtaatatttcggaagttacgctgtccaatatccgcgaggtcggacagaccggcgattgcggcaatgcggttcgtgccgacggctga

SEQ ID NO: 43775 - DNA, 729 bp, Neisseria meningitidis
atgcttttaggtgtcaacatcgaccacatcgccaccgtccgcaatgcgcgcggtacgacttatcccagccccgtggaggcggcactggttgccgaaacgcacggtgcggatttgattaccatgcacctgcgcgaagaccgccgccacatcaaagacgcggacgtgtttgccgtcaaaaacgccatccgcacgcgcctgaaccttgaaatggcgttgacggaagaaatgttggaaaacgctttgaaagtgatgccggaagacgtgtgcatcgtgcctgaaaaacgtcaggaaatcacgaccgaaggcggtttggacgtattggcgcaacaggaaaaaatcgccgggttcaccaaaatcctgaccgacgcaggcatacgcgtgtctttgtttatcgatgccgacgacaggcaaatccaagccgcccgtgatgtcggcgcgcccgttgtcgagctgcacacaggcgcgtatgccgacgcgcgcagccacgccgaacaaatcaggcagttcgagcgcatccaaaacggcgcgcatttcgccggcgatttgggcttggtcgtcaacgccggacacggactgaccatacacaacgttacccccatcgcccaaatcctcgccatccgcgaactgaacatcgggcattcgctgattgcccaagccctcttcctcggactgcccgaagccgtgcgccaaatgaaggaggcgatgttcagggcaaggctgctgccgtaa

SEQ ID NO: 43776 - DNA, 786 bp, Neisseria meningitidis
atgaatccgtttttgaatacagcctttaaagccgcccgccgtgccggtcagatgatgatacgcgccgcgggcaatctcgatgccgtcaaaaccgacagcaaagccttcaacgattttgtttccgatgttgaccgcaattccgaaatcatcctggttgaggctttgaaagaagcctatccgcaccacaaaatcacttgtgaagaaagcggctcccacggcaaagccgcagccgagtacgaatggattatcgatccgctcgacggcacgaccaatttccttcacggtcatccccaatacgctatctctatggcgctcctgcacaaaggcgtgttgcaagaagctttggtgtacgcacccgaacgcaacgacgtatatatggcatcccgaggcaaaggcgcgttgctcaacgaccgccgcatccgcgtttccaaccgcatcgaattgaaccgctgcctgatcggtaccggcttccccgttgtcgatcaaagcatgatggacaagtatctggcgattttgaaagatttcttgtcaaaaaccgccggcggccgtcgtgaaggcgcggcttctttggatttgtgtgctgtggcgactggtagttttgacggctttttcgagtttaacctcaaaccttgggacattgccgcaggtgcattgattgttcaggaagcgggcggtatcgtaaccgatatgacgggtgaagacagctggctggaaagcggcgatattgtggctgccaatcccaaagtgctggcgcaaatgttgaaaatcatttccgcacacgtttaa

SEQ ID NO: 43777 - DNA, 1518 bp, Neisseria meningitidis
atgtctcctaaaaaaatacccatttggcttaccggcctcatcctactgattgccctaccgcttaccctgccttttttatatgtcgctatgcgttcgtggcaggtcggcatcaaccgcgccgtcgaactgttgttccgcccgcgtatgtgggatttgctctccaacaccttgacgatgatggcgggcgttaccctgatttccattgttttgggcattgcctgcgcccttttgttccaacgttaccgcttcttcggcaaaaccttttttcagacggcaatcaccctgcctttgtgcatccccgcatttgtcagctgtttcacctggatcagcctgaccttccgtgtcgaaggcttttgggggacagtgatgattatgagcctgtcctcgttcccgctcgcctacctgcccgtcgaggcggcactcaaacgcatcagcctgtcttacgaagaagtcagcctgtccttgggcaaaagccgcctgcaaacctttttttccgccatcctcccccagctcaaacccgccatcggcagcagcgtgttactgattgccctgcatatgctggtcgaatttggcgcggtatccattttgaactaccccacttttaccaccgccattttccaagaatacgaaatgtcctacaacaacaataccgccgccctgctttccgctgttttaatggcggtgtgcggcatcgtcgtatttggagaaagcatatttcgcggcaaagccaagatttaccacagcggcaaaggcgttgcccgtccttatcccgtcaaaaccctcaaactgcccggtcagattggcgcgattgtttttttaagcagcttgttgactttgggcattattatcccctttggcgtattgatacattggatgatggtcggcacttccggcacattcgcgctcgtatccgtatttgatgcctttatccgttccttaagcgtatcggctttaggtgcgattttgactatattatgtgccttgccccttgtttgggcatcggttcgctatcgcaattttttaaccgtttggatagacaggctgccgtttttactgcacgccgtccccggtttggttatcgccctatccttggtttatttcagcatcaactacacccctgccgtttaccaaacctttatcgtcgtcatccttgcctatttcatgctttacctgccgatggcgcaaaccaccctgaggacttccttggaacaactcccaaaagggatggaacaggtcggcgcaacattggggcgcggacacttctttattttcaggacgttggtactgccgtccatcctgcccggcattaccgccgcattcgcactcgtcttcctcaaactgatgaaagagctgaccgccaccctgctgctgaccaccgacgatgtccacacactctccaccgccgtttgggaatacacatcggacgcacaatacgccgccgccaccccttacgcgctgatgctggtattattttccggcatccccgtattcctgctgaagaaatacgccttcaaataa

SEQ ID NO: 43778 - DNA, 387 bp, Neisseria meningitidis
atgaacctcgaaaccaaacccatcgctgaaacgccgaatttcatcgtgctcgaccaatatgaaaaaatcgaacagtcgggcagctaccaatcggaaaaccggttggaagcggagttaatcgccgatttgcagaatcagggttacgaataccgcaaggatttgaacagccaaagcaggctgctggaaaacctgcgcgcgcagttgcagcggctgaacgatgtggcgttttcagacggcgaatgggcgcggtttttgacggaatatctggacaggccgtctgaaaacattaccgataaaacccgcaaaatccacgacgaccatatttacgatttcgcttttgatgacggtccttggattcggatttcaagtgcaacactagtgtattag

SEQ ID NO: 43779 - DNA, 1635 bp, Neisseria meningitidis
atgataaaaccgaacctgaggccgaagctcggctcttccgcgctgattgccttcctttccctgtattcctcgctggtattgaattacgccttttttgccaaagttgtcgagcttcatccttttaacggcaccggggcggatatcttcctctatacgatgccggtggtgctgttttttttaagtaatttcgtttttcacgtcattgccctgcctttcgtgcataaggtattgattccgttgatattggttatcagtgcggcggtgtcttaccaagaaatatttttcaatatctatttcaacaagtcgatgttgaataatgtcttgcaaactacggctgccgaaagcgcgcgcctgattacgccgggctatgtgctgtggattgtatgtttgggcgtattgcccgcgctggcgtatatcgccgtcaaggttaaataccgcgtttggtataaggagcttttgacgcgccttgtgcttgccgccgtttcctttttgtgcgcgttgggcatcgcaatgttgcaatatcaggattacgcctcgtttttccgcaacaataaatcagtaacccatctgattgtgccgtctaatttcatcggcgcgggcgtgtcgaaatacaaagattggaagcgttccaatattccttatacgcaattggatatggcggtcgtgcaaaaccgcccggccggcagcctgcgccgtttcgtggtgctggtcgtgggcgagaccacgcgtgccgccaactggggtttgaacggttacagccgccaaactacgccgctgcttgccgcgcgcggcgatgaaattgtcaatttcccgcaggtcagaagctgcggcacatcgaccgcgcactccctgccgtgtatgttctcaaccttcgaccgcacggattatgacgaaatcaaagccgaacaccaagacaacctgctggacatcgtgcagcgcgccggcgtggaagttacttggttggaaaacgattccggctgcaagggcgtgtgcggcaaagtgccgaataccgacgttacctcgctcaacctgcccgaatactgccgcaacggcgagtgcctcgacaatatcctgctgactaagttcgacgaagtcctcaacaaaaacgataaagacgcggttttaatcctgcataccatcggcagccacgggccgacgtattacgaacgctataccgaagccgaacgcaaattcacgccgacctgcgacaccaacgaaatcaacaaatgcacccgcgccacgctggtcaacacttacgacaatacggttttgtatgtggaccagtttatcgacaaggttatccgcaaacttgaaaaccgcgacgatttggaaagcgtggtgcattatgtttccgaccacggcgaaagtttgggcgaaaacgggatgtacctgcacgccgcgccttacgccatcgcgccttccgggcagacgcatatcccgatggttatgtggttttccaaagccttccgccaacacgggggcatagatttccaatgcctcaaacaaaaagcggcggaaaacgaatattcgcacgaccactatttcagcacggtattggggctgatggacatttccaatagccaaacctatcggaaggaaatggatatattggcagcctgccgccgtccgcgctga

SEQ ID NO: 43780 - DNA, 1251 bp, Neisseria meningitidis
atgttttcaaaaagcgttaccctcgcacaatacgaccccgatttggcagcagccattgcccaagaagaccaacgccagcaagaccacgtcgagctgattgcttccgaaaactacgtcagctgcgccgtaatggacgcgcaaggttcccagctgaccaacaaatacgccgaaggctaccccggcaaacgctactacggcggctgcgaatacgtcgatattgtcgaacaattggcgattgaccgcgtaaaagaactgtttggcgcagcctatgccaacgtccaaccgcactccggctcgcaagccaaccaagccgtgtacgcttccgttttaaaaccaggcgacaccattttgggtatgtctctagcgcacggcggccacctgacccacggcgcgagcgttaatatctcaggcaaactctacaacgccgttacttatggtttggatgaaaacgaagtgctcgattatgccgaagtcgaacgcctcgcgctcgaacacaaacccaaaatgattgtggcgggtgcgtctgcctacgcgttacaaatcgactgggcaaaattccgcgaaatcgccgataaagtcggcgcatacctctttgtcgatatggcgcactatgccggtctggttgccggcggcgaatatcccaacccggtgccgttctgcgacttcgtgaccaccaccacccacaaaaccctgcgcggtcctcgcggcggcgtaattttgtgccgcgacaatacccacgaaaaagcgttgaactcttccatcttcccaagcctgcaaggcggtccgctgatgcacgttatcgccgccaaagccgtggcgtttaaagaagcattgcaacccgagttcaaacaatacgcaaaacaagtgaaaatcaatgcagccgccatggcggaagagttggttaaacgcggtttgcgcatcgtttccggccgcaccgaaagccacgttttcctcgttgacctgcaaccgatgaaaattaccggcaaagccgccgaagccgctttgggcaaagcgcacatcaccgtcaacaaaaacgccattccgaacgatccggaaaaacccttcgttacctccggcatccgcatcggctccgctgccatgaccacacgcggttttaacgaagccgacgcgcgcgtattggcgaacttggttgccgacgtattgtctaaccccgaagacgaagccaacctcgccaaagtccgcaaacaagtaactgctttgtgcaataaataccccgtttacggcgcgtaa

SEQ ID NO: 43781 - DNA, 408 bp, Neisseria meningitidis
atgactgtatggtttgttgccgctgttgccgtcttaatcatcgaattattgacgggaacggtttatcttttggttgtcagcgcggctttggcgggttcgggcattgcttacgggctgaccggcagtacgcctgccgccgtcttgaccgccgctctgctttccgcgctgggtatttggttcgtacacgccaaaaccgccgttagaaaagttgaaacggattcatatcaggatttggatgccggacaatatgtcgaaatcctccgacacacaggcggcaaccgttacgaagttttttatcgcggtacgcactggcaggctcaaaatacggggcaagaagagcttgaaccaggaactcgcgccctcattgtccgcaaggaaggcaaccttcttattatcacacacccttaa

SEQ ID NO: 43782 - DNA, 954 bp, Neisseria meningitidis
atgacacataccgtccacctgcatttagaagaaaccgacaacttggcgttgcagcgtctgtgcggttcttttgacaacaaccttgatttacttgccaaagcactcgatatccacatcagccgccgttttgaacatttcactttcaacggcgcatttgcacacgccggcaaacgcgcactgctcaaactcttggaaacggcgcagacgcgcgacctaaacgacggcgacatcaggcttgccgccgtcgaagcccaaaccgaagatgccggtcatcaagaaaaaaaccatgaccacgcctattatttccgcaccaagcgcggcagcatcggcggcagaacgccacggcaaaacggctatatccgcgccctgctcaaccacgacatcgtattcggtctcgggccggcaggtacgggcaaaacctatctcgccgttgccgccgccgtcgatgcgatggaaaaacaccaagtcgaacgcatcattttagtgcgcccagccgtcgaagccggcgagaaactgggcttcctgcccggagacctgacccagaaagtcgatccctaccttcgtccgctttatgatgccctctatgacctgatgggctttgaccgtgtaaccaagctgattgaaaaaggcctgattgaaatcgccccgctcgcctatatgcgcggcaggacgctcaacggcgcatacatcatcctcgacgaagcgcaaaacaccacgcccgaacaaatgaaaatgttcctgacccgcatcggcttcggcgcgaaagccgtcattaccggcgacaccagccaaatcgacctgcccaaaaacatcaaatcgggattaaaagatgcgcgtgagaaactgcacaacgtggaagggctgtatttccacacctttaccggcgaagacgttgtccggcatcctttggtgcaaaaaatcgtcgaagcctacgaatcggcagaacacgactga

SEQ ID NO: 43783 - DNA, 2307 bp, Neisseria meningitidis
atggcgaaaaacctattaatcgtcgaatccccgtccaaagccaaaaccctgaaaaaatatttgggcggcgattttgaaatccttgcatcctacggacacgtccgcgacctcgtccccaaaagcggcgcggtcgatcccgacaacggctttgcgatgaaataccaactcatcagccgcaacggcaaacacgtcgatgccatcgtcgccggtgccaaagaagctgaaaacatctacctcgccaccgacccggatagggaaggcgaagccatttcctggcatcttttggaaatcctcaaatccaaacgcggcttgaaaaacatcaagccgcagcgtgtcgtgttccacgaaatcaccaaaaacgccgtgctcgatgccgttgcccatccgcgcgaaatcgaaatggacttggtcgatgcgcaacaagcccgtcgcgctttggactatttggtcggtttcaacctttcgccattgttgtggaaaaaaatccgtcgcggtttgagcgcgggccgtgtacaaagccccgcactgcgtttgatttgcgaacgcgaaaacgaaatccgcgcgtttgaagcgcaggaatattggacggtacatctagacagccacaaaggccgcagcaagttcaccgccaaactcgcccaatacaacggcgcgaaactcgaacaattcgacctgccgaacgaagccgctcaagccgatgtgttgaaagaactcgaaggcaaagaggccgtcgttaccgccatcgaaaagaaaaagcgcagccgcaaccccgccgcgccgtttaccacatccaccatgcagcaggatgctgtgcgcaaactcggcttcaccaccgaccgcaccatgcgtaccgcccagcagctttacgaaggtattgacgtagggcagggtgccatcggtctgattacctatatgcgtaccgacagcgtgaacttggcggatgaagccttaaccgaaatccgccattacattgaaaacaaaatcggcaaagaatatctgccgagtgccgccaaacaatacaaaaccaaatccaaaaacgcccaagaagcgcacgaagccatccgcccgacttccgtgtaccgcacgcccgaaagcgtcaaacccttcctgagcgccgaccagttcaaactctatcaaatgatttggcagcgtaccgtcgcctgtcagatgacgcccgccaaattcgaccaaaccaccgtcgatattaccgtcggcaaaggcgtattccgcgtaaccggacaagtgcaaaccttcgcaggcttcctcagcgtttacgaagaaagcagcgacgatgaagaaggcgaagacagcaaaaaactgcccgaaatgagcgaaggcgacaaattgcccgtggacaaactctacggcgaacaacactttaccactccgccgccacgctacaacgaagccacgctggttaaagccctcgaagaatacggcatcggccgcccctcgacctacgccagcatcatctccacgctcaaagaccgcgaatacgttacccttgagcaaaaacgctttatgcccaccgacacaggcgacatcgtcaataaattcctgaccgaacacttcgcccaatacgtcgattaccacttcactgccaaactcgaagaccagcttgacgaaattgccgacggcaaacgccaatggattcccttgatggacaaattctggaaaccgttcatcaaacaagtggaagaaaaagaaggcatcgaacgcgccaaatttaccacgcaggaacttgatgaaacctgcccgaaatgcggcgaacacaaactgcaaatcaaattcggcaaaatgggtcgttttgttgcgtgtgccggttatcccgagtgcagctacacgcgcaatgtcaacgaaaccgccgaagaagctgccgaacgcatcgccaaagccgaagccgaacaggccgaactcgacggacgcgagtgcccgaaatgtggcggtcgcctagtgtacaaatacagccgcaccggcagcaaattcatcggctgcgtcaactatccgaaatgcaaacacgtcgagccgctggaaaaaccgaaagataccggcgtccagtgtccgcaatgcaaaaaaggcaacctcgtcgagcgcaaatcccgctacggcaaactgttttacagttgcagcacctatcccgactgcaactacgccacttggaacccgcccgttgccgaagaatgcctgaactgccattggccggtcttgaccatcaaaaccactaaacgctggggtgtagaaaaagtctgcccacaaaaagaatgcggctggaaagaacagattgaaccgcccgcgccgaaggagtaa

SEQ ID NO: 43784 - DNA, 933 bp, Neisseria meningitidis
gtgctttctgcaatgaagaagagggttcgcaaacctgccgccgtccgttccgatgcggatatcgccgcccttttccatgcccaccgtatgaagcaggcgcagcagagccgtattctgaatatgcttgccgttgaaatccgccccggttttgtgttggacaacaaacgcgcgcccgatatacgctccgctttgctcgacgtgtacggagaggcggacggcaaaccgtttttcctgccgctcaatctgctgctggggtttatgggtgcgcacgagtggcataagaaaggggttgccgttccgcagctgggcggcagcatacacgttcctttcggcgtattctcgccgttgcgcggcgaatacctcgacctgctcgcccatgcgccgtcaacgggttttcagacggcattcgatatcgggacaggctccggcgtgcttgccgccattttggcgaaacagggcattccttccgtcatcggcacggataccaatccgaaagccgtcgcctgcgcccgtgccaatattgcccgtttgggctttgaaaaacaggttgagatacgggaaaccgatctgtttcccgaagggtttgccgatctgattgtctgcaatccgccctggcttcccgccaagccgacttccgccgtcgaatccgcgttatacgaccccgaatctgcgatgctggctgcgtttttgcgggatgcgccgaaacatctgaatcccgacggagaaatccgcctgatcatttccgatcttgccgaacatctgcacctgcgtccatccgattttctggataaggcatttgctcaggcgggtttgcgtgttgccgatatgatgaaaaccaagccgaagcacaaaaaagccgcgaatccgagcgatccgcttgcttttgcgcgaacccgggaaaccactttcctataccgtttgaaaaaggcataa

SEQ ID NO: 43785 - DNA, 1047 bp, Neisseria meningitidis
atggaggcacgcccaccccgggcaaatgaagcccaagccccccgcgcggttgaaatgaaaaaagaaagccgccccgcgtttgacgcggcagccgtatttgacgcggcagccgtaccggtatccgacagcgggtttgccgccaatgcaaatgtccgccgttttgtggacgatgaagtcgggaaaggggatttttcccgggcggaatggcaggatttttttgacaaagcggcttacaaggcggacatcgtcaagattatgcaccgcccctccacatcgcgtccgtggtatgtgttccgcacgggaaattcgggcaaggcgaaatttcgcggcgcgcgccggttttatgcggaaaaccgcgcgcttatcgatgatgtggcgcaaaaatacggcgtgcctgccgaacttatcgtggcggttatcgggattgaaacgaattacggcaaaaatacgggcagtttccgtgtggcggacgcattggcgaccttaggctttgattacccccgccgcgccgggtttttccaaaaagaattggtcgagcttttaaagctggcaaaagaagaaggcggcgatgttttcgcctttaaaggcagctatgcgggcgcaatggggatgccgcaatttatgccttcgagctaccggaaatgggcggtggattatgacggggacggacatcgggacatatggggcaacgtcggcgatgtcgcggcatcggttgccaattatatgaagcagcacggttggcgcacgggcgggaaaatgctggtgtctgcaacattggcgccgggtgcggatgttcaggcaatcattggcgaaaaaaccgccctgacacggacggtggcggatttgaaggcgtacggcatcatccccggcgaagagcttgcagatgatgaaaaggcggttttgttcaaactggaaaccgcaccgggcgtgtttgaatattatttgggcttgaacaatttttatacggtatggcagtacaaccacagccggatgtatgtaacggcggtcagggacattgccaattcgcttggcggcccgggattgtaa

SEQ ID NO: 43786 - DNA, 1155 bp, Neisseria meningitidis
atgagcatccatctcgacttcggcattagtcctaaaacgttccgacagacttatctgtatcaaaagcccaagctctttaaaggagcggttcggaatctcgaatccgcatcttggaaagatatcaacgagatataccaacgagcagacccaaccgcaccgctgtttcatctgcgtaaaaaaggcgcaatcgttcctaaagaagaatacgtcgaaagtttcgacgatttgggcaaaactcgctaccgttttattaaatccgttatctacgaacatatgaagaatggtgcgtcgttagtctataaccatattaacaacgagccgttttcagaccatatcgcccgtcaagtcgcccgctttgccggcgcacatactattgttagtggatatcttgcttttggcagcgacgaatcttataaaaaccattgggacccccgcgatgtgtatgccatccagcttttcggcaagaaacgttggcaacttactgcccctgatttccctatgccattgtatatgcaacagactaaagatactgatatttccattcctgaacatatcgatatggatattatccttgaagcaggtgatgtcctctacatcccacgcggttggtggcacagacctatcccgctcggctgtgaaaccttccacttcgctgtcggtacctttccacccaacggctataattacctcgagtggctaatgaagaaatttcccaccatagaaagtctgcgccacagtttctcagactgggagcaagataggacgcgtatcaacgatactgccgcacaaattgctgccatgattgccgaccccgtcaattatgaagccttcagtgaagactttctcggcaaagaacgtaccgataccgcttttcatctcgaacagttcgcgaatcccaacgctactccgctttcagacgacgtcaggttgagattaaatgccaataatttggatacgttggaaaagggatatttgattgggaatgggatgaagataagcgtagatgagttggggaaaaaagtgttagaacacatcggtaagaatgaaccgttattgttgaaaaatctactggttaacttcaatcagggaaaatatgaagaagttaggaagttgatttatcagttgatagagttagattttctggaaattttgtga

SEQ ID NO: 43787 - DNA, 423 bp, Neisseria meningitidis; identical to SEQ ID NO: 40671

SEQ ID NO: 43788 - DNA, 399 bp, Neisseria meningitidis; identical to SEQ ID NO: 41900

SEQ ID NO: 43789 - DNA, 114 bp, Neisseria meningitidis
atgtcccaaaaagctgccgcagaccaactgaatttgcccgactgctccatcttgctgcaatggttgcgcctctaccatttgaatggtattaacggtttaaagcccaaaccctaa

SEQ ID NO: 43790 - DNA, 1113 bp, Neisseria meningitidis
atgagcaccttcttccggcaaaccgcgcaagccatgattgccaaacacatcaaccgtttcccgctattgaagttggaccaagtgattgattggcagccgatcgagcagtacctgaaccgtcaaaaaacccgttacctccgagaccaccgcggccgtcccgcctatcccctgctatccatgttcaaagccgtcctgctcggacaatggcacagcctctccgatcccgaactcgaacacagcctcatcacccgcatcgatttcaacctgttttgccgttttgacgaactgagcatccccgattacagcaccttatgccgctaccgcaactggctggcgcaagacgacaccctgtccgaactgttggaactgattaactgccaactgaccgaaaaaggcttaaaagtagagaaagcatccgccgccgtcattgacgccaccattattcagaccgccggcagcgaacagcgtcaggccatagaagtcgatgaagaaggacaaatcagcggccaaaccacaccgagtaaggacagcgatgcccgttggatcaagaaaaacggcctctacaaactcggttacaaacaacatacccgtaccgatgcggaaggctatatcgagaaactgcacatcacccccgccaatgcccatgagtgcaaacacctgtcgccgttgttggaagggttacccgaaggtacgaccgtctatgccgataaaggctatgacagtgcggaaaaccggcaacatctggaagaacatcagttgttggacggcattatgagcaaagcctgccgcaaccgcccgctgtcggaagtgcaaaccaagcgtaaccgatatttatcgaagacccgttatagtggattaaatttaaatcaggacaaggcgacgaagccgcagacagtacaaatagtacggcaaggcgaggcaacgccgtactggtttaaatttaatccactatatgtggtcgaacagagcttcggtacgctgcaccgtaaattccgctatgcgcgggcagcctatttcggactgattaaagtgagtgcgcaaagccacctgaaggcgatgtgtttgaacctgttgaaagcggccaacaggttaagtgcgcccgctgccgcctaa

SEQ ID NO: 43791 - DNA, 1011 bp, Neisseria meningitidis
atgtccatcaaaatcctgattatttcccccagttggataggcgactgcgtgatgacccagcccttgttccgccgtttgaaggaacttcaccccggttgcacgattgatgtgttcgcaccgaagtggtcgatggcggtgttcgagcgtatgccggaagtgaatgaaattcttgagaattcgttcggacatggtgcgttggagttgaaacgccgttggcgggtcggtagggatttggggcggcgcggatacgatcaggttatcgtgttgcccggttctttgaaatcggcaatcatcgcgctggcgacaggtatcggtaaaaggacgggttatgtcggtgaaagccgttattttctgttgaacgatatacgcaggctggataaggaacgtctgcctttgatggtggatcgatatacggctctcgcgcatccgagtcaggaagattttgacgggcattcgggattccccgagttttccattgatgaacggcggcgggaaatttctgtcgaaacctttggcttggatattggaaagcctgttctggctttttgtccgggtgcggaattcgggccggcaaagcgttggccgacaaggcattttgccgagttgggcaaacattatctggcggcgggttggcaggtttggctgttcggttcgcaaaaagatgatgaaattgccgaggaaatcaaccgcctttcagacggtatgtgtgtcaatttgtgcggcaaaaccgatttgtcgcaggcaatggatttgctgtcgttggcggacacggtcgtgtgtaacgacagcggattgatgcatttggcggcagctttgggcaggaaggtggtggcggtttacggttcttccagcccgacgcatacgccgcctttgagcgatagggcgaaaatcgtcagcctgcacttggaatgttcgccgtgttttaagcgggaatgtccgctggggcataccgactgcctcaacaggctgtatcccgagaagattgtgcaggcggttgaagaggcggtatga

SEQ ID NO: 43792 - DNA, 1302 bp, Neisseria meningitidis
atgccgtctgaacatcaacacatatcatcattgcttgatttcgaccgtacccatctgcttcatccctatacttccatgaccgatccgctgcccgtttatcctgtcaaacgtgcagaaggggtgtttatcgaattggcggacggcacgcggctgattgacgggatgtcctcctggtggtgtgcgatacacggctacaatcatcctgttttgaatcaggcggttgagacgcagatgaaacaaatggcgcacgtgatgttcggtggtttgacgcacgagccagcggtggagctgggcaagttgttggtcgggattttgccgcaggggctgaaccgtattttttatgcggattcgggttcgatttcggtggaagttgcgctgaagatggcagtgcaataccagcaggcgcggggtttgacggcgaagcagaatatcgcgacggtgcgccgcgggtatcacggcgatacttggaacgcgatgtccgtctgcgatccggaaacggggatgcaccatattttcggcagcgcgttgccgcagcgttattttgtcgataatccgaaaagccgtttcgacgatgaatgggacggggcggatttgcagcctgtccgcgccttatttgaagtgcatcatgcggatattgccgcctttattttagagccggtcgtgcagggcgcgggcggcatgtatttttatcatccgcagtatcttcgcggattgcacgatttgtgcgacgaatttgatatcatgctgatttttgacgaaatcgccactggattcgggcgcacgggcaagatgtttgcctgcgaacacgcggaggtcgtgccggatattatgtgtattggcaagggtttgagcggcggctatatgacgctggcggcagcaatcacttcgcaaaaagttaccgaaacgatttcgcgcggcgaagcgggcgtgtttatgcacggcccgacgtttatggcaaacccgctggcgtgtgccgttgcctgcgcttcggtcaaactgcttttgtctcaagactggcaggcaaatatccgccgcattgaaagcatcttaaaaggccgtctgaaagccgcgtgggacattcgcggcgtgaaagacgtgcgcgttttaggtgccatcggggtgatcgagctggaaaaaggcgtggatatggcgcgttttcaagcggactgcgtggcgcagggcatttgggtgcgcccgttcggcaggctggtgtatctgatgccgccctatatcatttcagacggcgttttgaccaaacttgccgacaaaaccgtgcaaatcttgaaggaacacagcaaatga

SEQ ID NO: 43793 - DNA, 573 bp, Neisseria meningitidis
ttgccgtactatttgtactgtctgcggcttcgtcgccttgtcctgatttttgttaatccactatatctgcatcagtttcatgaaacgcaagtcggaagcgtcaaacaactgattgcccattttgaccggctgattgacgaattggacaaacaaatcgacgaccacacccacacgcattttgacggcaaagcccaagtggcagaacaaatcaaaggcatcggttcgataacgacggctacgctgatggcgatgctgcccgaattgaggcggctgtcgcacaaacggatagcgggtttggccggcattgccccgcacccgagggagagcggggaaaccaaattcaaaagccgctgctttggcggaaggtctgcggtgcgtaaggcactgtatatggctaccgtggcagcgacacgttttgaaccgcttattcgggatttccaccaacgcccgctgtccgagggtaagccgtataaggttgccgttacggcatgtatgcgcaaactgctgacgatatcgaatgcccggatgcgtgattattttgccgaaaacgataccgccgaaaacggtatctaa

SEQ ID NO: 43794 - DNA, 1020 bp, Neisseria meningitidis
atgaaaaaaattctcgttaccggcggcaccggttttatcggctcgcataccgttgtttctttgctgaaaagcggccatcaagtcgtgattttggataacctatgcaattccagcatcaatatcctgccacgcttgaaaacgattaccggccaagagattccgttttatcaaggcgatatccgcgatcgtgagattttgcgccgtatttttgcggaaaaccgcattgattcggtgattcattttgccggcttgaaagcggtgggtgaaagtgtggccgagccgatgaaatattatgataataatgtttccggcagcttggtgttggcggaagaaatggcgcgtgcgggcgtgtttagcattgtgttcagttcttcggcgacggtttatggcgatccgggcaaagtgccttataccgaggatatgccaccgggcgacaccaccagcccttacggcgcatcgaaatcgatggttgagcgcattctcactgacattcaaaaagccgatccgcgctggagcatgattttgttgcgttatttcaatccgattggcgcgcatgaaagcggcttgattggcgagcagccaaacggcatcccgaataatttgttgccttatatctgccaagtggcggcaggcaaactgccgcaattggcggtatttggcgatgactaccctacccccgacggcacggggatgcgtgactatattcatgtgatggatttggcagaaggccatgtcgcggctatgcaggcaaaaagtaatgtagcaggcacgcatttgctgaacttaggctccggccgcgcttcttcggtgttggaaatcatccgcgcatttgaagcagcttcgggtttgacgattccgtatgaagtcaaaccgcgccgtgccggtgatttggcgtgcttctatgccgacccttcctatacaaaggcgcaaatcggctggcaaacccagcgtgatttaacccaaatgatggaagactcatggcgctgggtgagtaataatccgaatggctacgacgattaa

SEQ ID NO: 43795 - DNA, 738 bp, Neisseria meningitidis
atgaaaaaattatctcggattgtattttcaactgtcctgttgggtttttcggccgctttgccggcgcagacctattctgtttattttaatcagaacggaaagctgacggcgacgatgtcttctgccgcttatatcaggcaatatagtgtggtggcgggtattgcgcacgcgcaggatttttattatccgtcgatgaagaaatattctgaaccttatatcgttgcttcaacgcaaatcaaatcttttgtgcctaccctgcaaaacggtatgttgattttgtggcattttaatggtcagaaaaaaatggcggggggcttcagcaagggtaagccggacggggagtgggtcaactggtatccgaacggtaaaaaatctgccgttatgccttataaaaatggcttgagtgagggtacgggataccgctattaccgtaacggcggcaaggaaagcgaaatccagtttaagcaaaataaggcaaacggcgtatggaagcaatggtatgccgacggcagtatcaagacggaaatggttatggtcaacgatgagcctgccaaaattctgacttgggatgaaagcggccgattactctcggaactgtctatccgccaccatcaacgcaacggggtggttttggagtggtatgaagatggttctaaaaagagcgaagctgtttatcaggatgacaagttggtcaggaaaacccagtgggataaggatggttatttaatcgaaccctga

SEQ ID NO: 43796 - DNA, 1785 bp, Neisseria meningitidis
atggctttagttgaattgaaagtgcccgacattggcggacacgaaaatgtagatattatcgcggttgaagtaaacgtgggcgacactattgctgtggacgataccctgattactttggaaaccgataaagcgactatggacgtacctgctgaagttgcaggcgtagtcaaagaagttaaagttaaagtcggcgacaaaatctctgaaggtggtttgattgtcgtcgttgaagctgaaggcacggcagccgctcctaaagccgaagcggctgccgccccggcgcaagaagcccctaaagctgccgctcctgctccgcaagccgcgcaattcggcggttctgccgatgccgagtacgacgtggtcgtattgggtggcggtcccggcggttactccgctgcatttgccgctgccgatgaaggcttgaaagtcgccatcgtcgaacgttacaaaactttgggcggcgtttgcctgaacgtcggctgtatcccttccaaagccttgttgcacaatgccgccgttatcgacgaagtgcgccacttggctgccaacggtatcaaataccccgagccggaactcgacatcgatatgcttcgcgcctacaaagacggcgtagtttcccgcctcacgggcggtttggcaggtatggcgaaaagccgtaaagtggacgttatccaaggcgacgggcaattcttagatccgcaccacttggaagtgtcgctgactgccggcgacgcgtacgaacaggcagcccctaccggcgagaaaaaaatcgttgccttcaaaaactgtatcattgcagcaggcagccgcgtaaccaaactgcctttcattcctgaagatccgcgcatcatcgattccagcggcgcattggctctgaaagaagtaccgggcaaactgctgattatcggcggcggcattatcggcctcgagatgggtacggtttacagcacgctgggttcgcgtttggatgtggttgaaatgatggacggcctgatgcaaggcgcagaccgcgatttggtaaaagtatggcaaaaacaaaacgaataccgttttgacaacattatggtcaacaccaaaaccgttgcagttgagccgaaagaagacggcgtttacgttacctttgaaggcgcgaacgcgcctaaagagccgcaacgctacgatgccgtattggttgccgccggccgcgcgcccaacggcaaactcatcagcgcggaaaaagcaggcgttgccgtaaccgatcgcggcttcatcgaagtggacaaacaaatgcgtaccaatgtgccgcacatctacgccatcggcgacatcgtcggtcagccgatgttggcgcacaaagccgttcacgaaggccacgttgccgccgaaaactgcgccggccacaaagcctacttcgacgcgcgcgtgattccgggcgttgcctacacttcccccgaagtggcgtgggtgggcgaaaccgaactgtccgccaaagcctccggccgcaaaatcaccaaagccaacttcccgtgggcggcttccggccgtgcgattgccaacggttgcgacaacggctttaccaagctgatttttgatgccgaaaccggccgcatcatcggcggcggcattgtcggtccgaacggtggcgatatgatcggcgaagtctgccttgccatcgaaatgggctgcgacgcggcagacatcggcaaaaccatccacccgcacccgaccttgggcgaatccatcggtatggcggcggaagtggcattgggtacttgtaccgacctgcctccgcaaaagaaaaaataa

SEQ ID NO: 43797 - DNA, 1371 bp, Neisseria meningitidis
atgatcaaccccatcgcctcgctttcccctttagatggccgttatgcccaatccgttgaagcattgcgcccgattttttccgaatacggcctgatgaaggcgcgcgtcaaagtcgaattaaactggctcaaagccctcgccgccgagccgaagattgccgaagtgccgcccttcagtgccgaaacgcttgccgaaatcgacacggtgattgaaaacttttcattggaagacgcggccgccgtcaaagccatcgaagccaccaccaatcacgatgtcaaagccatcgaatattggctgaaaaaacgttttgccgaagtgccggaagtcgccgccgtgagtgagttcatccacttcgcctgcaccagcgaagacatcaacaacctgtcccacgctttaatgctgcaagaagcgcgtgaggctgttttgctgccgaagctggccgaaatcatcgaaaaactgaccgctatggcgcacgaccttgccgccgtcccgatgatgagccgcacccacggccagcccgccacgccgaccactttgggcaaagaaaccgccaatgtcgtgtaccgcctgcaacgccagtttaaaaacctgcaagcgcaagagttcctcggcaaaatcaacggcgcggtcggcaactacaacgcccatatggtcgcctatcctgatgtagattgggaaacccactgccgcaacttcgtcgaaatcagcctcggtctgaccttcaacccctacaccatccaaatcgaaccgcacgactatatggcggaattcttccaaaccctcagccgcatcaacacgattctcatcgactttaaccgcgacgtttggggttatatttcattgggttacttcaaacaaaaagtcaaagcaggcgaagtcggttcttccaccatgccgcacaaagtcaaccccatcgactttgaaaactccgagggcaacctcggtatggcaaacgccgtattgggctttttgtccgaaaaactgccgatttcccgctggcagcgcgacctgaccgacagcaccgtattgcgcaatatgggcgtaggcgtgggctatgccgtattgggtttcgccgcccacctgcgcggtctgaacaagctcgaacccaaccccgccgcgcttgccgccgatttggatgccacttgggagctgctcgccgagccgattcaaaccgtaatgcgccgttacggtgtcgccaatccttacgaaaaactgaaagacctgacgcgcggcaaaggcggcatcacgcccgaagtgctgaaaggctttatcggattgctggaaatccccgccgaagccaaagccaaattgcttgagctgacccccgcgctgtatgtgggcaaggctgaagcgttggcgaaacggatttga

SEQ ID NO: 43798 - DNA, 1311 bp, Neisseria meningitidis
atgtacgctaaaaaaggcggtttgggactggttaaaagccgccgtttcgcacctcttttcgctacgcagtttctcggcgcgttcaacgacaatgtgttcaaaaccgcgctgtttgtgatgattgggttttacggtttggggcaaaacggcttcctgcctgccggacagatgttgaacttgggcgcgttgctgtttattttgccgtatttcctgttttcctcgctgtcggggcagttgggtaacaaattcgacaaggccgttttggcgcgttgggtcaaggtgctggaaatgatcattatggcggtggcggcatacgggttttatatccggtctgccccgctgcttttggcgtgtctgttttgcatgggcgcgcaatcgacgctgttcgggccgctgaaatacgccatcctgcccgattatctcgacgacaaagagttgatgatgggcaacagcctgattgaatcgggtacgtttgtcgccatcctgttcggtcagattttgggaacggcggtggcaggtgtaccgccttatattgtcgggatactggttttgctggtcgccgtcggaggcacggtcggcagcctgtttatgccgtccgtacccgccaaggctgccgatacacaaattgagtggaatattgtccgtggcacaaaatccctgctgcgtgaaacggtgcggcacaagcccgtttttaccgccattatcggtatttcgtggttttggtttgtcggcgcggtttataccacgcaactgccgacctttacccaaatccatctgggcggcaacgacaatgttttcaacctgatgcttgctctgttttccatcggtattgccgccggttcggtactgtgtgccaagttcagcagggaacgcctgatgttggcttgggtaacggttggtgcgttgggtttgacggtttgcggcttggttttggtgtggctgacgcacggacaccgttttgaagggctgaacggcattttttggtttttatcgcaaggatgggcatatcccgtgatggcggtgatgacgctgatcggctttttcggcggatttttctccgttccgctctatacctggctgcaaaccgccagtagcgagactttccgcgcccgcgccgttgccgccaacaatatcgttaacggtatttttatggtttccgctgccgttttgagcgcggtgttgctgtttttgtttgacagcatttccttgttgtatctgattgtcgctttgggcaatattccgttgtcggtatttttgattaagcgcgaaaggcggtttttaggcgcggcggcaatcaggaaaaaaccttga

SEQ ID NO: 43799 - DNA, 1086 bp, Neisseria meningitidis
atgatttatctgtttacaggaaacatggggacaggcaaaacctcccgcgtcgtctctatgattttgaacaacgaagacggattgttcaaaatgaaattggaagacggcacagaggtagacagaccgctttatttctgccatatcgacggattggataaacggcagtttaaagcccacgaactgacggaagagcaaatcatgtccgccccgcttcgtgatgtcataccggaaggcgcagtgctgattgttgacgaagcgcactacacttatccggtacgcgcggcaggccgtcccgttccgccttatattcaggaactgacagaactccgccatcacgggcataccgttattttgatgacgcagcacccgagccaacttgatatattcgtccgcaaccttgtttcaaagcatgtacaccttgaacgcaaggcaatcggaatgaaacagtattattggtataaatgcgtaacctcgttggacaatcccgcaggcgtaagcggcgtagaagtcgcaagttggaaaccgccgaaagaagcctttaaatactataaatcagcaagccagcaccaaaagttcaagaaaaaagtaccttgggcggtttgggcgttgattgcgattgtagggtttgtaggctggaaaagttacggcatttttaaagtttacagcaaagccacagacagccggattgagcaggaagcgcaaaaagaaagcgttgtgcagacgatgacggagcagcctgcatcatcagaggaaatgcctttaaaaaattcagacaatttgaaacctgaagactttgtgccgactttacccgaaaagcccgaaagcaagcctatttataacacagtccgacaagtaaaaacctttgagcaaatcgccggatgtatagacggcggaaaatcagattgcacatgctattcaaatcaaggaacacccttgaaagaaataacaaagataatgtgtaaagaatatgtgaaaaacgggttgcctttcaatccttataaggacgaacagcaaaggacggaacaggtggaacagtccgcgaaagcggacaagccgcaagttctcgtaatgggcggaaagccgtag

SEQ ID NO: 43800 - DNA, 1344 bp, Neisseria meningitidis
atgagccaaaaccataccattctgcaatccctccccgtcggtcagaaagtcggcatcgccttctccggcggtcttgatacctctgccgcgctgttgtggatgaaactcaaaggcgcgctgccttatgcctacactgccaacctcggccagcccgacgaagacgactacaacgccattcccaaaaaagcgatggaatacggtgcggaaaacgcccgcttaatcgactgccgcgcgcagttggcacacgaaggcatcgccgccatccaatgcggcgcgtttcacgtttccaccggcggcatcgcctatttcaacaccacgcctctgggccgcgccgtaaccggcacgatgcttgtttccgcaatgaaagaagacgatgtgaatatttggggcgacggcagcacctacaaaggcaacgacatcgagcgtttctaccgctacggtttgctcaccaatcccgcgctgaaaatctacaaaccctggctcgatcagcaatttatcgacgaactcggcggccgtcacgaaatgagcgaatttctgattgccaacggcttcaactacaaaatgtcggtggaaaaagcctactccaccgattccaatatgttgggtgccacccacgaagccaaagacttggaatttttgaactcgggcatcaaaatcgtcaaacccattatgggcgttgccttttgggacgaaaacgtcgaaatcgaacccgaagaagtcagcgtacgctttgaagaaggcgtgccggttgcactaaacggcaaagaatacgccgaccccgtcgaactcttcctcgaagccaaccgcatcggcggccgtcacggcttgggcatgagcgaccaaatcgaaaaccgcatcatcgaagccaaatcgcgcggcatctacgaagccccgggcatggcgttgttccatatcgcctacgaacgcttggtaaccggcatccacaacgaagacaccatcgaacaataccgcatcaacggcctgcgcctcggacgtttgctctaccaaggccgctggttcgacagccaagccttgatgttgcgcgaaaccgcccaacgctgggtcgccaaagccgttaccggcgaagttaccctcgaactgcggcgcggcaacgactactcgattctgaacaccgaatcgcccaacctgacctaccaacctgaacgcctgagtatggaaaaagtcgaagacgctgcgttcactccgctcgaccgcatcggacagctcacgatgcgcaacctcgacatcaccgacacccgcgccaaactgggtatttattcgcaaagcggtttgctctcgctgggcgaaggttcggtattgccgcagttgggcaataagcaataa

SEQ ID NO: 43801 - DNA, 1143 bp, Neisseria meningitidis
atgcccctcccctctcccgaagcacggcaattctcgctcaaactgcaaaccctcattgccgaaaaaatcggcaaacacggcaactggattccattttcacgttttatggaattggttttatacgctccgcaatacggctactacaccggcggcagccataaaatcggcaataccggggattttattaccgcaccgaccctcacctctctgtttgcacagacactggcacgccaacttcaagaacttctatcccaaacggcgggcaatatctatgaattcggcgcgggaaccggacagcttgccgccgatttgttgggcagcatttcggacggcatcagccgttactatattattgaaatatcgccggagctggcagcacgtcagaaaaacctgattcaagcacgcgcaccggaagcatctcaaaaagttgtccacttgaccgcacttcccgaagcgtttgacggcatcatcatcggcaacgaagtactcgatgccatgcctgtcgaaatcgtccgtaaaaatgaaggcggctcattcgagcatgtcggcgtttgcctagataatgaccgttttacctattcggcacgaccgctgcacgacttgcagctatctgccttggcttccctctattttcctcaaacagattatccctataccagcgaactacatccgcaacaatatgcctttatccgcacccttgcctcaagactcgaacacggctgcatgatattcatcgactacggttttgatgcagcgcagtattaccaccctcaacgcaatcaaggtactctgatcggacactaccgacatcacattatccacaatccttttgacttcatcggattggccgacctgaccgcacatgtcaactttaccgacattgcacaagcagggacggatgccggattagatttgataggttaccttccccaatcccatttcttattgaacttgggcattaccgagctattggcacagacggggaaaacggattcggcagcctacatctgtgaagctgctgccgttcagaaactgattgaccagcatgaaatgggcgaactgtttaaagtcatcgcattcggaaaaaatatcggcatcgactgggcaggattccgcttcggcgacatctgccacaaactctaa

SEQ ID NO: 43802 - DNA, 453 bp, Neisseria meningitidis
atgcagactaaggcgttaggtacggtagatgaaattggcgatacagtacagcaggttgggaaacaggctagcggacaaaaaaccagcggtggtaatcctgcgattgatagcgacccctatagcccgagtagtgtggcagctcgcatagaagccggtaaggcgcgcagtgatttacaaatcaaagacattttgagcaatactactcaaaggagtaaaacaaaaggtcccgctgttcagtatgataaagtgggggattacaatgacgcactaaatgattttaatagtctgaatgttcgaaatgtacaaacacgtcctaatggaacgataacgggcaatttacctgatgggcgtgcggttaatgctcgtaatgatagtagtggtggagaaccaacacttgaaataacaattagtaataaccgaaaaataaaaatcagatatggaaatacacgataa

SEQ ID NO: 43803 - DNA, 324 bp, Neisseria meningitidis; identical to SEQ ID NO: 41034

SEQ ID NO: 43804 - DNA, 1977 bp, Neisseria meningitidis
atgtcccgaatcgccgccctgcccgaccatcttgtcaaccaaatcgccgccggcgaagtggtcgaacgccctgccaacgccttgaaagaaatcgttgaaaacagtatcgatgcaggcgcaacggcgattgaagtcgagctggcgggcggcggcatccgcctgattcgcgtcagcgacaacggcggcggcatccaccccgacgacatcgaacttgcgctccaccgccacgccaccagcaaaatcaaaaccttaaacgatttggaacacgtcgccagtatgggctttcgcggcgaaggtttggcaagcatcgcctccgtcagccgcctgaccctgaccagccgtcagaacgacagttcgcacgcgacccaagtcaaagccgaagacggcaaactcagcagccccaccgccgccgcccaccccgtcggcaccaccatcgaagccgccgaactcttcttcaacacccccgcacggcgcaagttcctcaaatccgaaaacaccgaatacgcccactgcgccaccatgctcgaacgcctcgcgctggcgcatccgcacattgccttctcgctcaaacgcgacggcaaacaagtgttcaaactccctgcacaaagcctgcatgaacggattgccgccattgtcggcgaagactttcagacggcatcattgggaatcgacagcggcaacggcgcgctgcggctctatggtgcgattgccaaaccgactttcgccaaaggtaaaaccgacaaacaatactgcttcgtcaaccatcgcttcgtgcgcgacaaagtgatgctccacgccgtcaagcaggcataccgcgacgtattgcacaacgcactcactcccgccttcgtcctctttctcgacctgccgcccgaagccgtggatgtcaacgtccacccgaccaaaaccgaaatccgcttccgcgacagtcagcaggtgcaccaacttgtgttccacacgctcaacaaagcccttgccgacacacgcgccaacctgaccgaaagcgtcggcaacgcaggcgaagtgttgcatgacattaccggcgttgtctccaccccaatgccgtctgaaaacgacagcgaaaatctgtttgatagcgtatccaactacccgacaggcaacaaatcagatacacacaatgcctttggttcatcaggcaaaaccgcgcccatgccctatcagtccgcatatgcgccgcaacaacgcagcctgtccctgcgcgaaagccgcgcggcaatgaatacttacgccgaactttacaaaaaaaccgacgacatcgaccttgagttaagccgattcgagcaggcacgtttcggcaatatgccgtctgaaacgcctgctccccaaacagatacgccgctttcagacggcatcccgtcccaatccgaactgccgccgctcggttttgccattgcccaattacttggcatctacattcttgcccaagccgaagacagcctgttgctcatcgatatgcacgccgccgccgaacgcgtcaactacgaaaaaatgaaacgccaacgtcaggaaaacggcaacctgcaaagccaacgcctgcttattcccgtaacctttgccgcgtcccacgaagaatgcgccgcccttgccgattatgccgaaacgctggcaggcttcgggctggaattatccgatatgggcggcaacaccctcgccgtccgtgcagttcccgccatgctcggcaaagccgatgtcgtctcgctcgccaaagacgtattaaacgaactcgcccaagtcggcagcagccaaaccatcgaggaacacgaaaaccgcatcctcgccaccatgtcctgccacggctcgatccgcgccggccgccggctcaccctgcccgaaatgaacgcccttctgcgcgatatggaaaatacgccgcgcagcaaccagtgcaaccacggcaggccgacttgggtcaaactgactttgaaagaattggacgcactgttcttgcgcggacagtaa

SEQ ID NO: 43805 - DNA, 1470 bp, Neisseria meningitidis
atgacaactgcgcgctgggtaatagataaacatttacagaattttcatattttatgtaaatttgcaggtattttgaaaacaaattcttttatatctgtagaggataaagctaagttatctgaaaaattggaaaaactagatttataccatagacgaaatacaggtaaatcattggatgctactactcataaaataaaagaattatcattctatatgtttggttatcgtgatgtgtgtgggcaagttacacagaaattcctgttcagtccattgggtaatttatttttgaaacacttggataataatgaatatattcaaaaaatttttcttactatgttgtgggcgataccatttcctcatccgtacattaagactgatgaaagtattcaattatatcccatgagactaatatttaagttgttatctgatgaaagattggattgtaaactattttcttatgaatatatctatttaatttcatttgtgaaatctgctgatcagaatagctatgaaaaattagtacaagacattttggtgttacgaacatgtgctgaagtaaaaattaaacatcaattaactgcggaaaatagtcgtagtcatgcttatgtaaatgcagcacatgagtgggaatcttatttttcaaaaacattgactgatgcaggtgttttgcaaaaaacagatggtaaaattatttgccgtctaaagcatggtaagaccgaaacatatcgtaaagtaacatcaagtgagttttcgattcctaagcaacttcaggaatttgtgaaaaaattgcaaagtgcttattcgttttcagaaatgccattaaatctgaacgatagtgatcgtttgaaaattgatgtcattaaggaaatttatagcttctatccaaaagagttattggaggaaattggtgagcttaaggatgaagcagcatatgaattattgcacttacctaggttgattgaacaatatgcagataataataatggaacagaggcatatctatttgaagatgttctagaaatggggttcaatatgttttataacgtagaagctaaaaaaattggtggaccaggtaatacggatttagagtgcttatatattacgcaaaagagaaaatttgcagtggaggcaaaatcaactaaaaataagttatcaggtattaattcaggaagattggaagatcataaaaataaaattaaggccatttacacaattgttgtcacaccacgttatgtccctgccgtattatccgatattcgtaattgcccaattgtaattattcgtgccaatacatttgctgaatttttatataattgtttgattaatcgctccagtattccagagattgattatcggtattttgatgaaattattattaaaaatcttggaaaagatattagttcagaaatttccaatttgactatgcaacagtttgcaagtaacaccacaatggaagcgtatagtacatga

SEQ ID NO: 43806 - DNA, 1503 bp, Neisseria meningitidis
atggcaaaagtactcatcgtacccgtatctgccggactggacgcctccgccgccgcacaagcctttgcaaaagcactggacgcacaaattttccaagccgttgacgcaaccgccgaaaccctgctcgcgcaaggcaaaagcgacgactggttcgacgcactggtcggcaaagttgccgcactcgatgccgccaacctcgtcatcgaaggcatcgcgcccgatgccgacaaaatctacctcgcaggcaaaaacgtcgaactggcattgtcccttgacgcggcagccgtcttcgccgtccgttccgacaacgccgatgccgacgaactggcaaatcgggtgaaccttgccaaacagttcttcgccgccgcgccgggcgtattggaaggttttgtcgtggacggcgcggcagcctccgttgccgaagcggcagccgaaaaaaccggcctgaccttcttcggttcgagcgacgcgctgaaagacgtatccgtattggcaggccgcgaagcaaaacgcctgtcgccggcgcaattccgctacaacctgatcgacttcgcccgccaagccgacaaacgcatcgtcctgcctgagggcgcagaaccccgcaccgtccaagccgccgccatctgccacgaaaaaggcattgcccgctgcgtcctgcttgccaaacgcgaagaagtcgaagccgttgccaaagaacgcggcatcagcctgcccgactctttggaaatcatcgatcccgcctcattggtcgaacaatacgtcgagccgatgtgcgaactgcgcaaatccaaaggcctgacacccgaagacgcgcgcaagcaactgcaagacaccgtggtactcggtacgatgatgatggcgcaaaatgatgtggacggtttggtatccggtgcggttcacaccaccgccaacaccatccgccccgctttgcaactgattaaaaccgcaccgggcgcaagcctcgtgtccagcgtattctttatgctgctgcccaaccaagtcctcgtcttcggcgactgcgcggttaatccgaacccgaccgcgcaacagcttgccgacatcgccatccagtctgccgattccgcaaaagccttcggcatcgacccgaaagtggcgatgatttcctactccaccgtcaactccggcagcggccccgatgtcgataccgtcatcgaagcaaccaaacttgcccgggaaaaacgccccgacctcgccatcgacggcccgctgcaatatgatgcggcaaccgtgccgggtgtgggcaaatccaaagctccgggcagcccggtggcaggacaggcaaccgttttggtcttccccgacctgaacaccggcaactgcacctataaagccgtccaacgcaacgccaacgtcttaagcgtcggcccgctgctgcaaggcctgcgtaaaccggtcaacgacctctcccgcggcgcactggtagaagatatcgtgtttaccatcgccctgactgccgttcaggcaaaacaaatggaaggctga

SEQ ID NO: 43807 - DNA, 762 bp, Neisseria meningitidis
atggaaacagcgaaacccgtcatgctgattgtccgtccgtcgggcagggccgcagaagatgtcgaaacttgcctgaatgccggttggcgcgcggaagtattgagtccggtcgaaatcgaagcagatgctgccggactggaacttttgtccgaacaatatgcccgtgcggatgccgtgttttgggtcagtccgaccgccgttgaaaccgccgtcccgtaccttaacctttcagacggcataaaggcgcagattgccgtagggcagggcagccgccgcgcattggaacgctgtttggtcagaacggtcatcgcgcctgatgacggcaacgacagcgaggcggttttgcgcctgccggtttggaacagtctgcccgaaggtgcgcgcgtattgtttgtgcgcggacacggcgggcgggattttttgatgaatgccttgcaggagaaaggttttcggacggaggtggcagaagtctatttcagacggcataaacctttgaactttcaaaatttccaaaccgaaaatattgccgccgcctatattacgtcgaccgagctggtgcgcttgctgttcgggcagcttccgccgcaattttcccgattcttcaaatccttgctatactttacccatcatccgcgcattgcggaggcattgaagcgcgaaggcgtgtgttcggtcgaaaccgtccctacgctggaagccgcgctttcccattcttccatttccgtttcagacggcatggtctttcccggaacctcaaattaa

SEQ ID NO: 43808 - DNA, 615 bp, Neisseria meningitidis
atgaggataaccgttataatcacaactttacagtctgcacagagaaaaccgatgccttggaatctccccatcttcctcacatggttgagggtcttgctcattcctgtcctgacagcccttttttacctgccttttccgtggttcgcggaggaaacgattaatctcaccgccgccgtcatttttgccgttgccgccttgaccgactggtttgacggatttttggcaaggttgtggaaacagacctcggatttcggcgccttcctcgatcccgttgccgacaagctgatggtcgccgtctctttgcttttactggtcaaactcgaccggacctatgttttgtttgccatgatcatcatcggcagggaaattaccatttccgcattgcgcgaatggatggcgcaaatgggcaaaaggaacagcgttgccgtcgccaccgtcggtaagtttaaaaccgccgcgcaaatgctggcaatcttcctgctgctgctgaattttcccgatttttatggatttaacctcgcattcatcggcaatgtattgatgtttatcgcatctttgctgacagtctggtcgatgctgtattatctgaaaatggcgtggaaagaaatcgcctga

SEQ ID NO: 43809 - DNA, 867 bp, Neisseria meningitidis
atgaaatggctatttatccttttggttgcgattaatattgccgtattcggcggtacggtaggttacaaactgacactgaaacaggccggcagaataccggaggcacagaatgccgcaaacaatttgcaggttcaaccagttgccccaactatgccggttgttcggaatattccagcatccggtcctgtcgttcaggcggcatctgaatcggatacaggcgcactgctcaaacagggcgacattctgagcgaagaacaggcggagcagttgcgcttgaaaaaagaagcggaacagaaaaaactgaaagagaaaaaacagcgtgaagaaaaagcccgccgcgaaaaactcgccgccgaaaaggcgcaggcggaacgcgaaaacggcgcggcggatgccttatgcgccgcgcaggcaagcctcacgatggacgaagatgactaccaccgcatcaaaggacttttgggcaaatggtcgcacgttgccagcaggagcgtcgaaaaacgcaccgcccaagccaaacctgccgacaaaacctaccgcgtcgtcctgcccgtttccgccgatgccgaaaatcaggcggcggagctgtctgccaaaggtttcaaccccataccgtttgacggcgcattgagtttgggtgtcggcaacagccgggaaaacgcccaagccctgcaaaaccggcttgccggcgccggattcggcggggcgcatattgtcgaacactttgccgaagccgacaggcaggacgattctttgagcgtgtcgcgtatgacggttttgtttaccggcgtgaatgccgccgatgcggacgaaattcgtaaaatcacgtccctatacggcaaactgaacctcaagtcttgcaaatag

SEQ ID NO: 43810 - DNA, 519 bp, Neisseria meningitidis
atgcgccttttcccgattgccgccgccctgtcgcttgccgcctgcggtactgtgcaaagcacacaatatttcgtgttgcccgacagccgctacatccgtcctgcaacgcaaggcggcgaaactgccgtcgaagtccgtcttgccgaaccgctcaaacgcggcggactggtctatcaaaccgacccctaccgcctcaacaccgcacaaaaccacgtctgggcagacaccttggacgatatgctcgaagcggcgttgagcaatgcattcaaccgtttggacagcacacgcatctttgttcctgcctcacgcagcggcagtaccgaaaaatggacggtctatatcgacgcattccaaggcagctacacgggcaaaaccctcatcagcggctacgccgtcctacccgacggtacgaacagacccttccatatcgaaaccgaacagcagggtgacggctacgccgcgatgaccgccgcactcgaacagggactgaaacaggcggcgcaacagatggtcgagtaa

SEQ ID NO: 43811 - DNA, 1527 bp, Neisseria meningitidis
atgaacacgccccttccttattccgattacctcatccgcatcctgacggcatctgtctatgatgtggcggtcgaaacgcctttggaaccggcacgcagcctttctgtacgtttgaaaaacaacatccttttgaaacgcgaagatttgcagccggttttttcgttcaaaatacgcggcgcgtacaacaaaatgtccaagttgccgaaagatgcgctcgcttgcggcgtgattgcggcaagcgcgggcaatcatgctcaaggcgtggcattgtccgcacagcgtttgggctgccgtgccgttatcgttatgccggagactacgccgaaaatcaaagtggatgcggttaaaagccatggcggcgaggtggttttgcggggcgtttcatacaacgatgcctacgattatgcgatggagttggcggaaaaagaagggttaacctatatcgcgccgtttgatgatcctgatgtgattgcgggacaggggacggtggggatggaaattgtcagccagcatcccgatccaatccgcgccgtattcgtaccgataggcggtggcggtttggcggcgggcgtggcggcatttatcaagcaggtccgtcccgaaatcaaagttatcggcgttcagaccaacgattcctgctgtatgaagcagtcggtcgaagcgggtgaaatcgtccatttgaaagatgtcgggctgttttcagacggcactgcggtcaaagtcgtcggaaacgaaaccttccgcctctgcaaagaacttttggatgaaatcattacagtcgataccgatgcggtttgcggcgcggtcaaggatattttcgatgacacgcgcagcattaccgagccggcgggcgcgttggcgttggcgggtctgaaagcctatatcgcccgagaaggcgcggaaaaccaaaccctgattgccgttaccagcggtgcgaatatgaattttcaccgtttgcgccacgtttcggaacggagcgaattgggcgagggcaacgaaggtatttttgccgttaccatccctgaagaacgcggcagcttccttaagtttgtcaatatattgggaaataggaatattaccgagttcaactaccgctacggagacgatgaaaaagcgcatatctttgtcggacttcaagcggcaggcccgcaggatttggcggttatcggcagccggttggatgaggcgggattgcccaatgtcgatttgaccaacaatgagattgccaaaatccatatccgctatatggtcggagggcggacggacaaagtagaaaacgagcgtttggtcagttttgagtttccggagcgtccgggggcattggcacgctttttgaaccatatgcagggagggtggaatattacgcttttccattaccgcaaccacggtgcggattacgggcggattttggtcggtatcgatgtgccgccgcacgatgccgccgcatttgacggtttcttggaaagtctgggatacagctatcacgaggaaacgcaaaatgccgcgtacaagctgtttcttgcctga

SEQ ID NO: 43812 - DNA, 876 bp, Neisseria meningitidis
atgtttcagaaacatttgcagaaagcctccgacagcgtcgtcggagggacattatacgtggttgccacgcccatcggcaatttggcggacattaccctgcgcgctttggcggtattgcaaaaggcggacatcatctgtgccgaagacacgcgcgttaccgcacagcttttgagcgcgtacggcattcagggcaaactcgtcagtgtgcgcgaacacaacgaacggcagatggcggacaagattgtcggctatctttcagacggcatggttgtggcacaggtttccgatgcgggtacgccggccgtgtgcgacccgggcgcgaaactcgcccgccgcgtgcgtgaggccgggtttaaagtcgttcccgtcgtgggcgcaagcgcggtgatggcggctttgagcgtggccggtgtggaaggatccgatttttatttcaacggttttgtaccgccgaaatcgggagaacgcaggaaactgtttgccaaatgggtgcgggcggcgtttcctatcgtcatgtttgaaacgccgcaccgcatcggtgcgacgcttgccgatatggcggaactgttccccgaacgccgattaatgctggcgcgcgaaattacgaaaacgtttgaaacgttcttaagcggcacggttggggaaattcagacggcattgtctgccgacggcaaccaatcgcgcggcgagatggtgttggtgctttatccggcgcaggatgaaaaacacgaaggcttgtccgagtccgcgcaaaacatcatgaaaatcctcacagccgagctgccgaccaaacaggcggcggagcttgctgccaaaatcacgggcgagggaaagaaagctttgtacgatctggctctgtcttggaaaaacaaatag

SEQ ID NO: 43813 - DNA, 1143 bp, Neisseria meningitidis
atgggaaaaagtttaaccgaaattgctgaggaactaaaaggaaacgataaaaaagtccagctaatctatgcttttaacggaacagggaaaacacgtttgtccagagagtttaagaatttaattgctccaaccagttcagaagagccagacggagagccaacaagaagaaaatttctctactataatgcatttactgaggatttattcttttgggacaatgatttgttagcgaacgaagctccaagattaaaaattcaaaagaatagttttaccgactggttgcttagggataatggactggatggagctgttattaaaaactttcaatattatacagatgataagttgactcctgattttaatgatgatttttcagaaattgcattttattttgctcgtggtaatgatgagcagattgaaaatatcaaaatttccaaaggtgaagaaagtaattttatttggagcattttctatgtattaatcagacaagtcatcgctgaattgaatattccagaagatagcgaagaaggacgttccacagatcagtttgacgatttggaatatatttttattgatgaccctgtcagctctttggatgaaaatcatctgattcagcaagcggttgatttggctgatttgataaagcttagcaaaccgaggttaaagtttatcattactacacataatgttttattttacaacgttctatacaatgaactaaaaaaattagaaaaggaaaagaaaagttatcttctgttaaaaaatgaagatggtagttttgatattcttgaaaaacaaggtgattccaataaaagtttttcatatcaccttcacttaaaaggagttattgaaaaagctatcgagaatcagcaggtagaacggtttcattttatgttgctgagaaacctgtatgaaaaaacagctaattttttaggctataagcaaaggtctgatattttgcccgaagacagcagacgaaactattttcaacgtattattaactttacaagtcattctacattatctaatgaggcatttgccgagccaacaccacaagaacaagaaactgtcaaattgcttttgcaacacttgctggataactataatttttttcaagatgatgaacaaagagataagccatga

SEQ ID NO: 43814 - DNA, 552 bp, Neisseria meningitidis
ttgagcggcatcaacataaacctcaaaaacggcgattccctgctgatacgcggcccgagcggttgcggcaaaacctcgctgttgcgcgcgctggcggggctttggccgttcggcagcagcggcaaagtcagccgtccgccgcatcaagacatcctcttcctgccgcaacgcccgtacacggcacagggcagcctgcgcgacgcggtttgttaccccgacattgacaagcagcatcccgagttagccgaagccatgaacacctgccgcttgggttatctggttgataaattagataaaaccgacgactggcaacacaaactctccccgggcgaactgcaacgcgtcgccttcgtccgcgccctgctttccaagcccaaaatcgtcctgctcgacgaagccaccgccgctttggacgaaccgaccgaggccctgctctaccgcgcactgaaacaaaaactgcccgacagcatcatcatcagcatcggccaccgcagcacgctcaacgcgttccacaatatgcgcctcgatgtcggcaacgttgcctgcggttga

SEQ ID NO: 43815 - DNA, 309 bp, Neisseria meningitidis; identical to SEQ ID NO: 39572

SEQ ID NO: 43816 - DNA, 2502 bp, Neisseria meningitidis
gtgctgaagacaccccctacgcttgctgcagaactttcgggtaaaaccggtgtgagcattagcgcaccgtatgccaatgagaacagtcgcatcctgctcagcaccacggatatcagttcggaaaacggcaaaatcaaaattcaatcttacggtgaccaatattactatgcgagacagagcgaactctatacctttgaacgccgcagctacaaaactggcaaatggtacaaccgcaaacacattaccgaagtcaaagaacacaaaaacgccaagcccgacgcagtaaccctcagcgcatcccaaggcatcgacatcaaatctggtggcagcatcgacgcctacgccaccgcattcgatgcccccaaaggcagcattaacatcgaagccgggcggaaattgacactctatgccgtagaagagctcaactacgacaaacttgacagccaaaaaaggcgcagatttctcggcatcagctacagcaaagcacacgacaccaccacccaagtcatgaaaaccgcgctgccctcaagggtagttgcagaatctgccaatctgcaatcaggttgggataccaaactgcaaggcacacagtttgaaaccacactgggtggcgcaaccatacgcgcaggcgtaggcgagcaggcacgggccgatgccaagattatcctcgaagggatcaaaagcagcatccacacagaaaccgtgagcagcagcaaatctactctatggcaaaaacaggcaggacggggcagtaacatcgaaaccttgcaattgccgagtttcaccggtcccgttgcgcccgtactgtccgcacccggcggttacattgtcgatattccgaaaggcaatctgaaaacccaaatcgaaaccctcaccaagcagcccgagtatgcttatttgaaacaacttcaagttgcgaaaaacatcaactggaatcaggtgcagcttgcttacgataaatgggactacaaacaggagggcatgacacccgcagcagcagctgtcgtcgttatcgtcgtaaccgtattgacctacggcgcactgtccgccccggcagccgccggaacggcgggcgcggcaggcgcaggagcgggaggagccgcagcaggaacggcagccggaactggagtagcagcaggaacggcagccacaaccggagtagcagcaggcacatcagctgcagctatcaccacagccgcaggcaaagccgcactggccagtctcgccagccaagccgcagtttccctcatcaacaacaaaggagacataaaccataccctgaaagaactgggcaaaagcagcaccgtcagacaggccgccaccgccgccgtaaccgcaggcgtactgcagggcataagcgggctgaacacccaagcagccgaagccgtcagcaaacattttcacagtcccgcagcaggcaaactgaccgctaacctgatcaacagcaccgctgccgcaagtgtccataccgccatcaacggcggcagcctgaaagacaacttgggcgatgccgcactgggtgcgatagtcagtaccgtacacggagaagtagcgagcaaaatcaaatttaatctcagcgaagactacattgcccacaagatagcccatgccgtagcaggctgtgcatcggcggtagcaaataaaggcaaatgtcgggacggcgcaatcggcgcggcagtcggcgagatggtgggagaaaccctgttggacggacgcgatgtaggcaaactgtcaccccaagaacgccaaaaagtcatagcctactcgcagattatcgcaggcagcgcagtggcattggttaaaggggatgtgaatacggcggcgaatgcggctactgtggcagtggagaataatagtcttttagctcgcaggagggtaaatatacgttggacttcgcgacaagaattggaacatgaatatgccattcttgaaatccaggccattaccaatcaaatccgaaggctggatccgaaatttaacgggattgctattatgaggaatcctagagagccgtggacaagacatgatgtacaaacatacaggcaatattataatcaattaagggaatccagaggctttgctgttgacccaatttatagaatcaggataaacaacggcaatgaatttaaccgtatcatgtcatcaaaatacccttataatgagctttatgtagccaatcctaaatcggcgacggggtattttagggtagattcgtataatcctgcgacagaggaaattatttcaagaaaatttacccaattttctcaaatccaagaaagtacggggattggttatatcaaggaggctgttagaaaatatagccctggtgctgtcatttccaatgttccaagtacacctactacgataagaggaagaaagcttgaaggaaaacttattttagaagttcctgctcaggtcaatccaattccacaatctgtattaagggcggcacaagaagaaaatgttatcattagagatacaacaggaaggatttacaaatga

SEQ ID NO: 43817 - DNA, 2691 bp, Neisseria meningitidis
atgtccgacaaccgcctcgacaccgcccgccgccattccctcttcctcgcccgccagctcgacaacggcaaactcaagcccgaaatattcctgcctatgctcgacaaggttttgaccgaagcggatttccaagcctttgccgactggggcgaaatccgcgcggaagaaaacgaggaagaattggcgcggcagttgcgcgagttgcgccgttatgtggtgtcgcagattatcgtgcgcgatatcaaccgtatcagcgatttgaacgaagtaacccgcacgattacgctgtttgccgattttgccgtcaataccgcgctggattttgcctacgcctattatcgggacatgtacggcacgccgatcgggcgttataccaaatcgccgcagcatttgagcgtggtggcgatgggcaaggcgggcggctatgagttgaacgtgtcttccgacatcgatttgattttcgtctatcccgaatcaggcgacaccgacggcaggcgcgaacggggcaatcaggaatttttcaccaaagtcgggcagaaactgattgcgctgctgaacgacattaccgccgatgggcaggtgttccgcgtcgatatgcggctgcggccggacggcgattcgggcgcgttggtattgagcgaaaccgcgctggagcaatatttgattacacaggggcgagaatgggaacgctacgcgtggtgcaaaggtcgcgtggttacgccgtatccgaacgacatcaaagcactggtgcgcccctttgtgttccgcaaatatctggattacggcgcgtatgaggcgatgcgtaagctgcaccgccaaatcagcagcgaagtcagcaaaaaaggcatggcggacaacatcaaactcggcgcgggcggcatccgcgaagtcgaatttatcgcccagattttccagatgatacgcggcggacaaatgcgcgcgctgcaactgaaaggcacgcaggaaacgctgaagaagcttgccgagctgggcatcatgctgtctgaacacgtcgaaaccctgcttgccgcctaccgcttcctgcgcgatgttgaacaccgcctgcaatactgggatgaccagcaaacccaaaccctgccgacctcgcccgaacagcggcaactgctcgccgaaagcatgggtttcgacagttattccgctttttcagacggtctcaatgttcatcggaacaaagtcaatcagttgttcaacgaaattttgagcgaacccgaagagcaaacgcaagacaacagcgaatggcaatgggcatggcaggacaaacccgacgaagaagggcggcgatgccgtctgaaggcgcacgggttcgatgccgaaaccgtcgccgcaaggctcgaccaaatccgccacggccataaataccgccatctttccgcacacgcccagccgcgtttcgatgcggttgtgccgctgttcgtacaggcggcggcagcgcaaagcaacccgaccgatacattgatgcggctgttggattttctcgaaaacatcagccgccgatccgcctatctcgccttcctcaacgaacatccgcaaaccttggcgcaactggcgcagattatgggccaaagttcttgggtggcggcgtatctgaacaaatatccgattttgttggacgaactcatcagcgcgcagcttttggataccgcgtttgattggcaggcgctcgccgccgccctttcagacgacctcaaagcctgcggcggcgatactgaagcgcaaatggacaccctgcgccgcttccagcacgcccaagtcttccgtctcgccgtccaagacctcgccggactgtggacggtagaatccctctccgaccaactctccgccctcgccgacaccatcctcgccgccgccctgctgtgcgcatgggcggacatgcccaaaaaacaccgcgacacaccgcaattcgccgtcgtcggctacggcaaactcggcggtaaagaactcggctacgcctccgacctcgacctcgtctatctctacgacgacccccaccccgacgcaggcgacgtgtacagccgcctcgcccgccgcctgaccaactggctttccgccgccactggcgcaggcagcctctacgaaaccgacctgcgcctgcgccctaatggcgacgccggtttcctcgcccacagcatcgccgcctttgaaaaataccagcgcgaaaacgcctggacgtgggaacaccaatcccttacccgcgcccgcttcatctgcggcacgtccgaaattcagacggccttcgaccgcatccgcaccgaaatcctcaccgccgaacgcgaccaaaccgccttggcaggcgaaatcatcgaaatgcgcgaaaaaatgttccccacccacccgcctgccgacagcaacgtcaaatacgcgcgcggtggcgtggtcgatgtcgaatttatcgtccaatatctgatacttgcccatgcccgccagtatccgcaactcttggacaactacggcaacatcgccctcttaaacatctccgccgactgcggtttgattgacaaaaccctcgccggacaaagccgcaccgcctatcgcttctaccgccggcagcagcacaacaccaaactgcgcgacgcggcaaaaaccgaagtaaccggcgaactgttggcacattacggcaatgtcaggaaattgtggcgggaagtgttcggcgaagaagcggcaaccgtctga

SEQ ID NO: 43818 - DNA, 1161 bp, Neisseria meningitidis
ttgaaaaccaatatgccgacaatgggggcggagatgaatacacggaatatgcgctatattcttttgacaggactgttgccgatggcatccgcttttggagagaccgcgctgcaatgcgccgctttgacggacaatgttacgcgtttggcgtgttacgacaggatttttgcggcacagcttccgtcttcggcagggcaggaagggcaggagtcgaaagccgtactcaatctgacggaaaccgtccgcagcagcctggataagggcgaggcggtcattgttgttgaaaaaggcggggatgcgcttcctgccgacagtgcgggcgaaaccgccgacatctatacgcctttgagcctgatgtacgacttggacaaaaacgatttgcgcgggctgttgggcgtacgcgaacacaatccgatgtaccttatgccgctctggtacaacaattcgcccaactatgccccgggttcgccgacgcgcggtacgactgtacaggaaaaattcggacagcagaaacgtgcggaaaccaaattgcaggtttcgttcaaaagcaaaattgccgaagatttgtttaaaacccgcgcggatctgtggttcggctacacccaaagatccgattggcagatttacaaccaaggcaggaaatccgcgccgttccgcaatacggattacaaacctgaaattttcctgacccagcctgtgaaggcggatttgccgttcggcggcaggctgcgtatgctcggtgcgggttttgtccaccagtccaacggacagagccgtcccgaatcgcgttcgtggaacaggatttacgccatggcaggcatggaatggggcaaattgacggtgattccgcgcgtgtgggtgcgtgcgttcgatcagagcggcgataaaaacgacaatcccgatattgccgactatatggggtatggcgacgtgaagctgcagtaccgcctgaacgacaggcagaatgtgtattccgtattgcgctacaaccccaaaacgggctacggcgcgattgaagccgcctacacgtttccgattaagggcaaactcaaaggcgtggtacgcggattccacggttacggcgagagcctgatcgactacaaccacaagcagaacggtatcggtatcgggttgatgttcaacgacttggacggcatctga

SEQ ID NO: 43819 - DNA, 1188 bp, Neisseria meningitidis
atgaataccttactcaaccaactcaaaccatatccctttgcccgactgcgtgaagcgatgcagggcatttccgcgcccgaaggtctggaagccgtccccctgcacattggcgaaccgaaacatccgacaccgaaagtcattacggatgcgctgaccgcctcattgcacgagttggaaaaatatccgctgacggccggtctgcctgaactgcgtcaggcgtgtgcaaactggttaaaacgccgttacgatggcttgacagtggatgcggataatgaaattctgccggttttaggcagtagggaggcgttgttttcttttgttcaaaccgtgttgaaccctgtttcagacggcatcaaacccgcaattgtcagcccgaatcccttttatcagatttacgaaggtgcgacacttttgggcggcggtgaaatccattttgccaattgccccgcgccgtctttcaaccccgattggcgcagtatttccgaagaggtttggaaacgcaccaaactggtgttcgtctgctcgcccaacaaccccagcggcagcgtgctggatttggacggctggaaagaagtttttgatttacaggataaatatggtttcattattgcctcggatgaatgctattccgaaatctatttcgacggcaacaaacctttgggctgcctgcaagccgctgcacagttgggtcgaagcaggcaaaaactgcttatgttcaccagtttgtccaagcgttccaacgttccgggcctgcgttccggttttgtcgccggcgatgccgaactgcttaaaaactttctgctttacagaacctatcacggcagtgcaatgagtattcccgtgcagcgcgcaagcattgccgcttgggatgatgaacagcacgttatcgacaaccgccgtatgtatcaggaaaaatttgagcgcgttattcccattttgcaacaggtatttgacgttaaattaccggatgcctcgttttacatctggttgaaagtccctgatggcgacgatttggcacttgcacgcaatttatggcaaaaagcggctatccaagtattgcccggacgttttttggcgcgggataccgaacagggcaatcccggggaaggttatgtgcgtatcgctttggttgccgatgtcgcaacttgtgtcaaagctgcggaaaccattgtttccctatatcggtaa

SEQ ID NO: 43820 - DNA, 2133 bp, Neisseria meningitidis
atgtctatcgtatccgcaccgctccccgccctttccgccctcatcatcctcgcccattaccacggcattgccgccaatcctgccgatatacaacatgaattttgtgcttccgcacaaagtgatttaaatgaaacgcaatggctgttagccgccaaatctttgggattgaaggcaaaggtagtccgccagcctgtcaaacgtttggctatggcgaccttacctgcattggtatggtgtgatgacggcaaccattttattttggctaaaacagacggtgggggtgagcatgcccaatatctaatacaggatttaactacgaataagtctgcggtattgtcttttgccgaattttctaacagatattcgggcaaactgatattggttgcttcccgcgcttcggtattgggcagtttggcaaagtttgactttacctggtttattccggcggtaatcaaataccgccggttgttttttgaagtattggtggtgtcggtggtgttgcagctgtttgcgctgattacgcctctgtttttccaagtggtgatggacaaggtgctggtacatcggggattctctactttggatgtggtgtcggtggctttgttggtggtgtcgctgtttgagattgtgttgggcggtttgcagacgtatctgtttgcacatacgacttcacgtattgatgtggaattgggcgcgcgtttgttccggcatctgctttccctgcctttatcctatttcgagcacagacgagtgggtgatacggtggctcgggtgcgggaattggagcagattcgcaatttcttgaccggtcaggcgctgacttcggtgttggatttggcgttttcgtttatctttctggcggtgatgtggtattacagctccactctgacttgggtggtattggcttcgttgcctgcctatgcgttttggtcggcatttatcagtccgatactgcggacgcgtctgaacgataagttcgcgcgcaatgcagacaaccagtcgtttttagtagaaagcatcactgcggtgggtacggtaaaggcgatggcggtggagccgcagatgacgcagcgttgggacaatcagttggcggcttatgtggcttcgggatttcgggtaacgaagttggcggtggtcggccagcagggggtgcagctgattcagaagctggtgacggtggcgacgttgtggattggcgcacggctggtaattgagggcaagctgacggtggggcagctgattgcgtttaatatgctctcgggacaggtggcggcgcctgttatccgtttggcgcagttgtggcaggatttccagcaggtggggatttcggtggcgcgtttgggggatattctgaatgcgccgaccgagaatgcgtcttcgcatttggctttgcccgatatccggggggagattacgttcgaacatgtcgatttccgctataaggcggacggcaggctgattttgcaggatttgaacctgcggattcgggcgggggaagtgctggggattgtgggacgttcggggtcgggcaaatccacactcaccaaattggtgcagcgtctgtatgtaccggagcagggacgggtgttggtggacggcaacgatttggctttggccgctcctgcctggctgcggcggcaggtcggcgtggtcttgcaggagaatgtgctgctcaaccgcagcatacgcgacaatatcgcgctgacggatacgggtatgccgctggaacgcattatcgaagcagccaaactggcgggcgcacacgagtttattatggagctgccggaaggctacggcaccgtggtgggcgaacaaggggccggcttgtcgggcggacagcggcagcgtattgcgattgcccgcgcgttaatcaccaatccgcgcattctgatttttgacgaagccaccagcgcgctggattatgaaagtgaacgagcgattatgcagaacatgcaggccatttgcgccaaccggacggtgctgattatcgcccaccgtctgtccaccgttaaaacggcacaccggatcattgccatggataaaggcaggattgtggaagcgggaacacagcaggaattgctggcgaagccgaacggatattaccgctatctgtatgatttacagaacgggtag

SEQ ID NO: 43821 - DNA, 282 bp, Neisseria meningitidis
atgattcacgaagaaatctccgccatgcctatgggctatgaaaccttaatcggcgatatgggcagcgcactgtcaggcggacaaaaacaacgcatcgtattggcgcgggccttatattgcgaaccgaaaatcctatttttagatgaagcgaccagccatttggatattgccaatgaaaaagcagtcaatgcaaacttgaatggcttgtctatcataaaaattatggcggcacacagaaaggaaacggtggaatcagcagataggaaaatgtctttaggataa

SEQ ID NO: 43822 - DNA, 2007 bp, Neisseria meningitidis
atggctgatatgaagaaaattacccctcaaaacctgcgccccctgctttcggaaagcttgggacataccgattttgtcaacgtcctcaacgcactgattaaatttttgcgccgtggcggcaaaaaatgtgcgggggaacgtttcgacctgattatcgacacattcaaacaagacagggaattactgtcccgcttcagccggtgtttttacatttggctcgcgcaaatacacatttatccggcactcatcaaactcggcatcttctcgcgccacagctttgcccgggaaatgggcatacgcatctacgaacgcttcagcccgtcatataaagattttgccaacttgggcgaagtcttcctttatcttttccattccgaaaacgacgacaaatggctgcaaacgctcaatatccgccaatggctggttttatacgaactcatccggagccacgccgagccgtccaaattgcagacggcgggcatccgccttgccgatgcgcgtttgcgcgccatcgaaatgctgtctgtctggacggcatccgaagccatcgaacccgacctcatccgcatcgccccgcgcctgctggaagccgattcttccttcgtcgccctccaacgcgaaaccgccaaactggtcgaacactaccgcaacggcaccgcgccttacgacaccgcccacctcgaagtgatgttcgaccaatgtttcagccagattgactatttgcgccgcaaagggacgggcgccggctccggttcgtcggtcaaagtcgcccacctgctcgaacggctccggcagaccgtagaccgtctaaagctgctcaccgacatccaaaccggtgccggcaacagcaaccgcctgaccatcgccctgatgaactccctcatctacgcggcggtcgaacaatacagcacccgccacctgcgccgcagcagcatccgtatgctcgcccgcagcattaccgaaaacaaaagccaccacggcgaacactacatcacccgcaaccgcaaagaatatttcaaaatgttctactcggcggcaggcggcggcatcatcatcgccctaatggcgctgctcaaaatccgcatcggctcactcggcctcagccccttcctcacttccttgtcggctgggttcaactacggcatcggctttatgatcatccatatgctgcactgcaccgtcgccaccaagcagcccgcgatgactgccgccagctttgccgaacaggtcgatctcaacgaaggcggcaaagcggtggacaacaaactcgccaagctcctcatcgacgtatgccgctcccaaagtgtcgccgtcttcggcaacgtttccatcgccatccttttggcgtgcgccatatcgttcggctatgcccatctgtaccggctgcccatactcgatgcccacaccgccgcctaccagttcaaatccatagacatcatcgcttacccaacgctgtggtatgccgccattgcaggtctgtggctgttctgctccggcatcatcgcaggttttttcgacaaccgcgccgactacctcaacctgcgccaacgcctgcccttcaaccccttgctgcgtaaaatcatgcgccccgggccccgccgcgtcctcgccgcctacatccacaaacactacggctcgctggtcggcaacttcatcttcgggatgctcttgggtatgaccggctatttcggacacctcctcgggctgccgctggacatccgccacgtcgccttttcctccgccaacctcggctatgccgccgtcagcggcaacgtcggtttgggcacgttcgtactcggcattttcagcgtcctcgccatcggcctggtcaacctctgcgtcagcttcagcctcgccctcttcgtcgccctgcgctcgcgcggcacgaaaatcggcagcatccgcaatctgattaaaagtttttggaatcagattaaaagcaatccctgcatacttttcctcccgcccgccaaagaacagggacatcctccttcggacaagccttga

SEQ ID NO: 43823 - DNA, 795 bp, Neisseria meningitidis
atgaccacgattttggctttcgatattgaaaccgtacccgatgtgcagggtatccgaacattgtacgagctgccgtcctcgctgcccgacgatgaagtggtgctgtttgcccagcaaaaacgccgtgctcagacgggcggcgattttatgcagcatcatcttcatcaggttgtggcgatttcgtgctgcatgcgttgggggcaggataaagtacatgtcggcaccatcggcgagatggatgacggcgaggaagtggtcattgctaaatttttcgaattgattgaaaaacatacgccgcaactggtcagttggaacggcggcggtttcgatctgcccgtactgcattaccgctccctgatatacggcatcaacgccgcgcgctattgggatatgggcgacggcgatttcggcgacagccgcgatttcaagtggaacaactacatcagccgttatcaccaacgccactgcgatttgatggatttgctcgcgctttaccagccgagggcaaacgtgccgctggacgatatggcgaaactgtgcggttttccgggcaagctgggtatggacggcagcaaggtttgggaggcattccatacgggcaggctgaaggaaatccgcaattattgcgaaaccgacgcggcaaacacttatctgatgtacctgcgtttctgtctggtcagcggcaggctggatgcggacgaatacgaaatggaaatcaaacggatgcggaattacctgtccgcacaagccggggaaaagccgcattgggaagagtttgtccgcgcgtgggaataa

SEQ ID NO: 43824 - DNA, 324 bp, Neisseria meningitidis
atgaacgcatttgcacaagcactttcctcggcactcgaccgctgtatcgccaccaacaccgtcgccaaacaaaaccggcccgtcggcttcctctaccgcgaagcccccgtttttgaaaacgacagcggctggcgtttcttcagcggcgacgagaccgacgaatacaccgacgatccggacaacttcagcatcgtcagcctcgccgacatcgccaaaaccaaccctgaaaccgccgcactgctctcccaacccgaaggcagcgcatgggagcttgccgaagacggcacattccaaaccgtcgccgactggcagccgcaagactga

SEQ ID NO: 43825 - DNA, 1032 bp, Neisseria meningitidis; identical to SEQ ID NO: 36792

SEQ ID NO: 43826 - DNA, 780 bp, Neisseria meningitidis
ttggcttggaaggttttggccgtcaatatttcagatatggcggcgatgggtgcgataccgcgttgggtgttgctgagcgcggctttgcccgaattggatgaggtatggctgaaacggttttgcggcagctttttcggtttggcaaaaaagtttggcgtaacgttaatcggcggcgatacgaccaagggcgatatggcgttcaatgtaaccattatcggcgaattgccgaagggtagggcgttgcggcgtgatgcggcggttgcgggcgacgatatttgggtgtcggggcgtatcggtatggcggcggcggctttgaactgccgtctgaaacggtgtgtgttgccagatgaagtgtttgccgaatgcgaacaaaagctgctccatcctgaaccaagggttgggctggggcttgcgctgttgccgtttgccagggcggcgcaggatgtttcagacggcctcgcgcaagatttggggcatatcctgaccgcttctggcaagggtgcggaaatttgggccgattcgctgccgtctttatccgtattgaaagatattttgccccgagcgcaatggctgtcttatactttggcgggcggcgacgattacgagctggtgtttaccgcgccggaaagttgccgcagccgcgtatttgatgcggcggaacggtgcggcgtgccggtaacgcgcatcggcaaaatcaacggaggatgccgtctgaaggttttagatgccgacggcagggaattggaactacattctttaggattcgatcattttggctga

SEQ ID NO: 43827 - DNA, 6822 bp, Neisseria meningitidis
atgaacaagcgatgctacaaggttatcttcaacaagaaacgcagttgtatgatggctgtagcagagaatgttcatcgtgacggcaagagtatgcaggatagtgaggcggcttcggttcgagtgaccggtgccgcttctgtttcttctgcccgggcagccttcggtttccgtatggctgccttttctgtcatgttggctttgggtgttgctgcgttttcccctgcccctgcttccggcatcattgccgacaaatccgcccctaaaaaccaacaagccgttattcttcagacagcaaacggtttgccgcaagtcaatattcaaactccgtcatcccaaggcgtttctgttaaccgattcaagcagttcgatgttgatgaaaaaggcgtaatactaaacaacagccgcagcaatacgcaaacgcaactcggtggatggattcaaggcaatccccatctggcacgcggcgaagcgcgggtaattgtgaaccagattgacagcagtaatccttcgttgttgaacggttatatcgaagtcggcggcaaacgcgccgaagtagtcgttgccaatccgtcgggcatccgtgtgaatggcggcggattgattaatgccgcttcggttacgctgacttcgggcgttcctgttttgaataacggcaatctgacgggctttgatgtttcttcgggtaaagtcgtgattgggggcaaaggtttggatacctctgatgccgattacacccgtatccttagtcgtgctgctgaaatcaatgcgggcgtttggggtaaagatgtcaaggtggtttcgggtaagaacaaattggattttgacggctctcttgccaaaacagcttctgcgccatcttcttcggattctgttactcctaccgttgccatcgacaccgccacactgggtgggatgtacgcagacaaaatcactttaatcagcaccgacaacggcgccgtaatccgcaacaagggtcggatttttgccgcaacaggcggcgttacgttaagcgcagacggcaaattgagcaacagcggttcgattgatgctgccgaaatcaccatttccgctcaaaccgttgataaccgccaaggctttatccgcagcggcaaaggcagtgtattgaaggtttcagacggcataaataatcaagcaggcttaatcggctcggccggtttgctggatattcgcgatacaggcaaaagcagcctgcatatcaataacacagacggcacgattattgcgggcaaagatgtttccttacaggcaaaatcactggacaacgacggcatattaaccgccgcacgcgatgtttccgtttctcttcatgatgattttgccggcaaacgcgatattgaagccggacgcacactcacgttctccacccaaggccgtctgaaaaacacccgcatcatacaggcaggcgataccgtatccctgaccgccgcccaaatcgacaacactgtctccggtaaaatccaatccggaaaccgcaccgggttaaacggcaaaaacggcatcaccaacaggggtttaatcaacagcaacggtataacgctgctgcaaaccgaagccaagtcggacaatgccggcacgggcagaatttacggcagccgtgtggcagttgaggcagataccttgttgaaccgggaagaaacggtcaacggcgaaaccaaagcggcggtaattgcagcgcgggagcggttggatattggagcgcgggaaattgagaaccgagaggcggcattattgtccagctccggcgatcttcatatcggttctgcattgaatggaagccgacaggtgcaaggagcaaatacatcactgcacaaccgcagtgcggcaatcgaatcatcaggcaatatccgtatcgctacaaaagatttgcagaataccaatgagcatctgcgtttccatacggaagaaacccatcgcgaacaccgtatcgaatatcaggcggaaggcagaacagaacgctatccggaaggttctcaaaaagagttgggctgggaaatatttgaagatgagtctttacatatgcggactccggacggcagcccccactctgtctggtacaaatacgattacgaacgaatcaccgccgagagcaaaattaccgaatccaagcccggtcaaatcatcagtggcggcaatttggttttagatgccgccaagctgaaaaatcataacagccggattattgccggcggcagattgatcgtcggtacgcccgaatccgcattggacaatgatgaaactttgggaacaaaaaccataaccgataaaggggacttgcaccgttaccaccgtcatcacaagaaagggcgggattctacgggatacagtcggtctccctacgaaccggcccccgaagtcagctccatccgtatgggtatttcagcctataaaggctatgcgccccaacaggcatctgatatacccggcactgttgtacccgttgttgctgaaaacggcatccatcctacatttactctgccgaacagcagcttgtttgccattgcgccaaacaacaaaggctatttgattgaaaccgaccctgcctttaccgactaccgcaaatggctgggcagcggctatatgcttgccgcactgcaacaagacccgaaccatatccacaagcgtttgggcgacggctattacgagcagaaactggtaaacgaacaaatcgccaagctgacaggctaccgccgcttggacggttataccaatgacgaagagcaattcaaggctttgatggataacggcattaccatagccaaagaattgcagcttactccgggtattgccctgtctgccgaacaggttgcccgtctgacttccgacattgtttggctggaaaacgagaccgttaccctgcccgacgggacaactcaaaccgtattgaaacccaaagtctatgtccgcgcacgccccaaagatatgaacggacaaggggcgttgctgtccggcagcgttgttgatatcggcagcggcgccattgaaaaccggggcggcttaattgccgggcgcgaagcactaattttaaacgcacagaatattaaaaatctgcaaggtgatttgcagggcaaaaacatcttcgccgcagcaggcagcgacattacgaataccggcagcatcggcgcagaaaacgccctgctgctcaaagcgagtaacaatatagaaagccgcagcgagacccgcagcaatcagaatgagcaaggctcggtacgcaatatcggccgggtggcaggcatttatctgaccggcaggcagaatggaagcgtcttgctggatgcaggcaacaatatcgtcctgacggcttccgaattgaccaatcaatctgaagacggtcaaaccgtactgaatgccggcggcgacatccgctcggatacgacgggcatttcccgcaatcagaacactatctttgattccgacaactatgtgattcgcaaagaacaaaacgaagtcggcagcaccatccgcacccggggcaatctcagtctgaatgcaaaaggagacatccgtatccgtgcagcagaggtcggcagcgaacaaggccgtctgaaactggcagccggacgggatatcaaagtcgaagccggcaaagcccataccgaaaccgaagatgccctgaaatacaccggtagaagcgggggcggcatcaaacagaagatgacccgccatctcaagaaccaaaacggacaagccgtatccggcacgctggacggcaaagaaatcattctggtttcaggacgcgatattaccgttactggcagcaatatcattgcagacaaccataccattctctcggcaaaaaacaatatcgtccttaaagcagccgaaacacgcagccgcagtgccgaaatgaacaaaaaagaaaaatccggactgatgggcagcggcggcatcggctttacggcgggcagcaaaaaagacacgcaaaccaaccgatccgagaccgtcagccacacagaaagcgtcgtcggcagcctgaacggcaataccctgatttcggcaggaaaacattacacccaaaccggttcgaccatatcctcgccccaaggcgatgtcggcatttcctccggaaaaatcagcatcgatgccgcacaaaaccgttacagccaagagagtaagcaggtttacgaacaaaaaggcgtaaccgtcgccattagcgttccggttgtgaataccgtaatgggcgcggttgacgccgtaaaagcagtccaaaccgtcggcaaaagcaaaaacagccgggtcaatgccatggctgctgccaacgccttgaataaaggagtagattccggcgtggcactctataatgccgcccgaaatcccaaaaaagcagccggtcagggcatcagtgtctccgttacctacggcgaacagaagaacacctccgaaagccgcatcaaaggcacgcaggtgcaagagggcaaaatcaccggcggcggcaaagtttccctgactgcttcaggcgcaggcaaagactcccgcatcacgattaccggctccgatgtgtacggcggcaaaggaacacgcctcaaagcagaaaatgccgttcagattgaagccgcccgccaaacgcatcaggaacgcagcgaaaacaaatccgcaggctttaatgccggagtcgccatcgccatcaacaaaggcatcagtttcggcttcacagccggagcaaactacggcaaaggttacggcaacggcgacgaaaccgcctaccgcaacagccatatcggcagcaaagacagccaaaccgctattgaaagcggtggcgataccgtcatcaaaggcgggcagcttaaaggcaaaggcgttggcgtaacggcagagagtctgcatatcgaaagtttgcaggataccgccgtgtttaaaggcaaacaggaaaatgtttccgcccaagttacggtaggctacggctttagtgtcggtggcagctataaccgctcgaaaagcagctcggattatgcatccgtcaacgagcaaagcggtatctttgcaggaggagacggctatcggattcgcgtaaacggcaaaaccggattggtcggcgccgctgttgtttcagatgccgacaaatcaaaaaacctgctgaaaacaagcgaaatctggcataaagatattcaaaaccatgcttcggcggctgcttccgccttgggcttgagcggcggtttttcatacagcccgaagcctaccagcggacagtattccaccaaaaaagaagcagaaatcggtaaaatcggcggcaaaccggtcagcctgatgcgttttgaccaggtttcggcgaaagacgacgagttgaacgaaaaatatcgaagtgagcgtattgaaaaaggggaaacctttaaagaggcaaatttaaatcaaaacaacgccggcggcttgaaattcggtttgaagcaaaacgatatacacagcaacgacaaatacgccttggcaaaaatgggtttgggcaatctgttgggcaatgccaaagaatcagaaagccgccaatccattacccgctccgtcatcagtgagggagattggcaaattgcttccgcgcagggcaggaaaaatattgccggtattgaaaaaggcacttcatccgcacataaggcattggcaaaagcagaccgcgaaggcttgctgaaagaagtcgaactcaatagggatgttgccaaagagtttatcaatgagacgctgatcggcggcattgcagacgaagcctaccgcagccagtttattgcagaacaccgcctgatgacctttaaaatggatgaaaacggcgagccgattgaagataagcagcttgaagaggatataaataaacagtttgacaactcagtaaagttgaaaaaagaatttgcctcatttaaagattattgggaagcctataaagccattgggggaaatatctacgaattgcgcgaagtatccgaccaggaacggaaaaatctgaaaactgcccgttacaccgacccggagaccggcaaaaccgttgaaaaaatcgttgtcggcgtcaacggcattttcaataatatacaagcagccgccaaatttgccgcccaacaatatgtggggcgtttcaatcccgagaaaaaccgatatgaacgcacctatgaaaatgtttatttcctgcacaatccggaaaccaatgggcggggcttttcaaaattgcccgaaatcgccgttgcggcctttcataaaatgctcgaaggggcaaaaataggcaataagaccgttatcggcttgagcaattcaggcttggctttaggcaatatcatggaagactacgggaaggataaaaacggcctgtttgtcggctcgcacagccgtggaaccctggtggtcgacaatgtactcaataccttgaatacccaagccaatcgggataagaaaattttatccaataccgaactgaaaatggtcggccctgccgccaacgttgtccgggcagataaaaggctgtttcaactgcagcagggggtaacgacacccagaacggcagatttcgcccgtcagtccatccaaatagaaaaccacgaattagaccttatcggcatgctgattggcagaaatccggcaacagtcggaaccaatacccggcaaaaaagccaatggcaggctataagggatattataggggattacacctcgccgcataattgctacggtatggctaataaacaatgtgtaacagatggttatcgagaccctgaaaataaacaaacccaaagtccgacaggtgtatttgaaagaggagtgtccaacgaaatcgaaattatgtaccgtcctgtacgcatttatgatctgcaacatccgaaaggaaaaacaaaatga

SEQ ID NO: 43828 - DNA, 273 bp, Neisseria meningitidis
atgaaaatgcagaaagaattgtcggtctatttgaaacagatattgcaggcagcgcaatatatccggctatataccgacaaaatggattatgggcaattttctgccgacacaaagactgtgcaggcagtcgtttttaatttgttccttatcggtgaaaacgcaacccatatccttaaatcgtatccggaatttgccgaggaaaccaaatatttgaattggatagggatgagggggtattgcgcaataggattgcccatggctactttgaaatga

SEQ ID NO: 43829 - DNA, 433 bp, Neisseria meningitidis
atgaaaaccttttcagcgaaaccccacgaggtgaagcgcgaatggttcgtcatcgatgcccaagacaaagtcttgggtcgcgttgcggccgaagtcgccagccgtctgcgtggcaaacacaaacctgaatacaccccccacgtcgataccggcgattacatcattgttatcaatgcggacaaactgcgtgtaaccggtgccaaattcgaagataaaaaatacttccgccattccggtttcccaggcggtatctacgaacgcaccttccgcgaaatgcaagagcaattcccgggccgcgctttggaacaagctgtaaaaggtatgctgcccaaaggtcctctgggttacgccatgattaaaaaactagaaagtgtatgcgggtgcggaacacgcccatgctgcgcaacaacccaaagttttggaactgaaataa

SEQ ID NO: 43830 - DNA, 177 bp, Neisseria meningitidis
atgggcggtgttttcttttctgttgctttccgacaagctcaaatccatatttatagtggattaaatttaaatcaggacaaggcgacgaagccgcagacagtacaaatagtacggcaaggcaacgcaacgctgtactggtttaaatttaatccactatattgcccgaaaaccgcataa

SEQ ID NO: 43831 - DNA, 1815 bp, Neisseria meningitidis
atgagtgaacacgatatgcagaacacaaatccgccattaccgcctctgccgcccgaaatcacgcagctcctgtcggggctggacgcggcacaatgggcgtggctgtccggctacgcttgggcaaaagcaggaaacggggcatctgcaggactgcccgcgcttcagacggcattgccggcggcagaacctttttccgtaaccgtcctttccgcctcgcaaaccggcaatgcgaaatccgttgccgacaaagcggcggacagcctggaagccgccggcatccaagtcagtcgcgccgaactgaaagactataaggcgaaaaacatcgccggcgaacgccgcctgctgctggttacctccacccaaggcgaaggcgaaccgccggaagaagccgtcgtgctgcacaaactgctgaacggcaaaaaagccccgaaattggacaaactccaatttgccgtactgggtttgggcgacagttcctatccgaatttctgtcaggcaggtaaagatttcgaccggcgttttgaagaattgggcgcaaaacggctgctcgaacgcgttgatgcggatttggactttaccgcctccgcaaacgcctggacagataatatcgccgcactcttaaaagaagaagccgcaaaaaaccgggcaacgcccgcgccgcagacaacgccccccgccggccttcagacggcaccggatggcaggtactgcaaggcagccccctttcccgccgccctgctggccaatcagaaaatcaccgcccgccaatccgataaagacgtgcgccacatcgaaatcgatttgagcggttcggatttgcactacctcccgggcgacgcgctcggcgtttggtttgacaacgatccggcactggtcagggaaatcctagacctgctcggcatcgatccggcaacggaaatacaggcgggcggaaagatgatgccggttgcgcgcgcactttcatctcatttcgaactcacgcaaaacactccggctttcgtcaaaggctatgccgcgttcgcccattatgaagaactcgataaaatcattgccgataacgccgttttgcaggatttcgtgcaaaacacgcctattgtcgatgtgctgcaccgcttcccggcaagcctgacggcagaacaattcatccgtttactgcgtccgcttgcaccccgtttgtattcgatttcttcagcacaggcggaagtgggcgatgaagtgcatttaactgtcggcgtggttcgttttgaacacgaaggccgcgccagaacgggcggcgcatcgggtttccttgccgaccggctggaagaggacggcacggtgcgcgtgtttgtggaacgcaacgacggcttcaggctgcccgaagacagccgcaagccgattgtgatgatcggctcgggcaccggcgtcgcaccgttccgcgctttcgtccaacaacgtgccgcagaaaatgcggaaggcaaaaactggctgattttcggcaatccgcattttgcccgtgattttctctatcaaaccgaatggcagcagtttgccaaagacggcttcctgcacaggtacgatttcgcctggtcccgcgatcaggaagaaaaaatctatgtgcaggacaaaatccgcgaacaggcggaaggactttggcaatggctgcaggaaggcgcgcatatctatgtgtgcggcgatgcggcaaaaatggcaaaagacgtggaagccgccttgctggatgtgattatcggggcaggacatttggacgaagagggcgcagaagaatatttggatatgctgcgcgaagaaaaacgctatcagcgtgatgtttattga

SEQ ID NO: 43832 - DNA, 1005 bp, Neisseria meningitidis
atgcaacgacaaatcaaactgaaaaattggcttcagaccgtttatcccgaacgggacttcgatctgacttttgcggcggcggatgctgatttccgccgctatttccgtgcaacgttttcagacggcagcagtgtcgtctgcatggatgcaccgcccgacaagatgagtgtcgcaccttatttgaaagtgcagaaactgtttgacatggtcaatgtgccgcaggtattgcacgcggacacggatctggggtttgtggtattgaacgacttgggcaatacgacgtttttgaccgcaatgcttcaggaacagggcgaaacggcgcacaaagccctgcttttggaggcaatcggcgagttggtcgaattgcagaaggcgagccgtgaaggggttttgcccgaatatgaccgtgaaacgatgttgcgcgaaatcaacctgttcccggaatggtttgtcgcaaaagaattggggcgcgaattaacattcaaacaacgccaactttggcagcaaaccgtcgatacgctgctgccgcccctgttggcgcagcccaaagtctatgtgcaccgcgactttatcgtccgcaacctgatgctgacgcgcggcaggccgggcgttttagacttccaagacgcgctttacggcccgatttcctacgatttggtgtcgctgttgcgcgatgcctttatcgaatgggaagaagaatttgtcttggacttggttatccgctactgggaaaaggcgcgggctgccggcttgcccgtccccgaagcgtttgacgagttttaccgctggttcgaatggatgggcgtgcagcggcacttgaaggttgcaggcatcttcgcacgcctgtactaccgcgacggcaaagacaaataccgtccggaaatcccgcgtttcttaaactatctgcgccgcgtatcgcgccgttatgccgaactcgccccgctctacgcgctcttggtcgaactggtcggcgatgaagaactggaaacgggctttacgttttaa

SEQ ID NO: 43833 - DNA, 471 bp, Neisseria meningitidis
atgtacgatgtcaatacccacgatgtccgccgctttttcgcccgcgtgtggcagcagcggctcaatccgctgcaactgagcgcactggaacagaaagccctccgcattgtcgaagcccatcccgaataccaccgttatctcgaacgcatcgaagaccatctggacaccgactggctgcccgaaaacggcgaaagcaaccccttcctgcatatgtcgctgcatctgtccgtccaagaacaggcgggcatagaccagccgcacggcatacgcgcaatccacgacaccctgtgcgccaaacgcggctggctggaagccgaacacgaaatgatggaggcactggcggaaacactgtggacggcgcaacgctacggcaccggtttggatgtcaatttctacatgacccgactgcgcaaactcatcggcttgggtgcagaagatcaagccagattgaacccgcatgaaatcgcctga

SEQ ID NO: 43834 - DNA, 1134 bp, Neisseria meningitidis
atgtcatacagcacctttcccaaaaccaaaaacgacgcgctgaatgagccgatgttttttggtcagccggttaatgttgcccgttatgaccagcagaaatacgaagtatttgaaaaactgattgaaaaacaattgtctttcttctggcggcctgaagaaatcgatgtctcgcgcgaccgtatcgactacgccaatctgcccgaacacgaaaaacatattttcatcagcaatctgaaataccaaacactgctcgattccatccaagggcgcagtccgaatgttgccttgctgcctttggtttcgattcccgagttggaaacgtggattgaaacgtggagcttcagcgaaaccatacactcgcgcagctatacccacatcatccgcaatattgtgaatgatccgtcggtcgtgtttgatgatattgtcgaaaacgaatacattaccgcccgcgccgaagacattgcctgctattacgatgacttaatcgaatacacccagtattacaacctgttgggcgaaggggtgcacaatgtcggcggcaaacccgttaccgtgtctttgcgcgggttgaagaaaaaactctatctctgcctgatgtgcgtcaacgtgttggaagccatccgtttctacgtttcattcgcctgctcgtttgcttttgccgagcgcgagttgatggaaggcaacgccaaaatcatcaaactgattgcccgcgacgaagccctgcacctgaccggcacgcagcatatgcttaatctgatgcgttctggtgttgatgattctgaaatggcagaaattgccgccgagttgcaggacgaatgtttccaactcttcaaaaaagcggcggaacaggaaaaagaatgggcggcatatttgtttaaagacggttcgatgattggtttgaacaaagaaatcttatcccaatacgtcgaatatattaccaatctgcgtatgcaggcggtggggttgccggccggatttgaaggcgcaaatcaaaacccgattccgtggattaatgcgtggctgtcgtccgacaacgtacaggtcgcgccgcaggaagtggaaatatcctcttatttgatcggtcagatagattctgaagtgaatacggatgatttgggcgattttgagttgtaa

SEQ ID NO: 43835 - DNA, 594 bp, Neisseria meningitidis
ttgtacggcagccaccgtttgctatgcactcaaacagatggggataacgcgcaaaaaaagaccaccacttacaaagaacaagacccggccaaagtaacgcattatttgacacagccggccgaattttctgactaccaacgcgtttatttggatgaaacaggatttgaccgccacctgttccgtccctatgcccgcagcctgaaagggcaaatagtgaaagcgcagataagtggaaaaagataccgacgcttatctctggtgtccgcacaagtcggcaaccggctgattgctccgatggtttatcaaaatacgatgaccggagtcttttttgaagcgtggtttcagcaatgcctactgcccgcattgactcaaaaatcggtgattattttagataatgcacgatttcaccgtatgggtgtcttacgggaaatggcggaaaaattgggacataaggtattgcctcttgcaccttattcacctgagctcaacccgattgagaaggtttgggcgaatattaagcggtatctgcgaaccgtattgtctgattacgcccgatttaacgatgcactactgtcctattttgattttaattga

SEQ ID NO: 43836 - DNA, 729 bp, Neisseria meningitidis
atgaccaaacagctgaaattaagcgcattattcgttgcattgctcgcttccggcactgctgttgcgggcgaggcgtccgttcagggttacaccgtaagcggccagtcgaacgaaatcgtacgcaacaactatggcgaatgctggaaaaacgcctactttgataaagcaagccaaggtcgcgtagaatgcggcgatgcggttgctgcccccgaacccgagccagaacccgaacccgcacccgcgcctgtcgtcgttgtggagcaggctccgcaatatgttgatgaaaccatttccctgtctgccaaaaccctgttcggtttcgataaggattcattgcgcgccgaagctcaagacaacctgaaagtattggcgcaacgcctgagtcgaaccaatgtccaatctgtccgcgtcgaaggccataccgactttatgggttctgacaaatacaatcaggccctgtccgaacgccgcgcatacgtagtggcaaacaacctggtcagcaacggcgtacctgtttctagaatttctgctgtcggcttgggcgaatctcaagcgcaaatgactcaagtttgtgaagccgaagttgccaaactgggtgcgaaagtctctaaagccaaaaaacgtgaggctctgattgcatgtatcgaacctgaccgccgtgtggatgtgaaaatccgcagcatcgtaacccgtcaggttgtgccggcacacaatcatcaccaacactaa

SEQ ID NO: 43837 - DNA, 1002 bp, Neisseria meningitidis
atgaaacggaaaatttggctgctgccgctgctggcggtttcggcatacctgcaggcgcagacggaagtcaggctggcggtgcataagtcgttcagcctgcccaaagggctgattgcgcgcttcgagcgggcaaacgatgcgaaagtgtcgattattcaggcgggcggcgcgaacgaaatgctcaacaaactgattttgagccgcgccaacccgattgccgacgcggtgtacggtttggacaacgccaatatcggcaaggcgcgggaaatgggcattttggcggcggcgcaacccgaatccgcccccgtcgcggtcggcctgccttcggctttggcggtcgattacggctatgtgtccatcaattacgacaaaaaatggtttgaaggcaaaaagttgcccctgcctcaaaccctgcaggatttgacccgccccgaatataaaaacctattggtcgtgccgtcccccgccacgtcttcccccggcttgggcttcctgatggcgaacatcagcggtctgggcgaagaaggcgcgttcaaatggtgggcacagatgcggcagaacggcgtgaaggtcgccaaaggctggagcgaggcgtattacaccgacttttcgcacaacggcggcgcgtatccgctggtggtcggttatgccgccagcccggcggcggaagtgtatttttccaaaggcaaatacagcgagccgccgacgggcaacctgtttttaaaaggcggcgtattccgccaggtcgaaggcgcggcggtcttgaagggcgcgaaacagccggaattggcggcaaaactggtgcaatggctgcaaagtcgggaagtgcagcaggcggttccgtccgaaatgtgggtttaccccgccgtcaaaaacacgcgcctgcccgacgtgttccgcttcgcccaagccccgacgcacaccaccgcccccgcgcagcgcgatattgatgcgaaccagcgcggatgggtttcccgttggattagaacggttttgaaataa

SEQ ID NO: 43838 - DNA, 1901 bp, Neisseria meningitidis
atgactacgccaaaaaaaaccgccaaaacttccggcaacgaagcgcgcgaacttgccgacttgagcgaagacatcggtatccgcttcaaatatccgaactcggaacgcgtgtatctgcaaggcagccgcgacgacatccgcgtgcctttgcgtgaaatccgtcaggacgacacctatacggcgcaaggcgcggaagccaacccgccgattcccgtctatgacaccagcggcgtgtacggcgatccagcggcacacatcgacctgaaacaaggtctgccgcacatccgcaccgcatggctgaacgaacgcggcgataccgaaatcctgcccaagctctccagcgaatacggcatcgaacgcgcacacgatccgaaaaccgcccatctgcgcttcaaccaaatcacccgcccgcgccgcgcgaaaagcggtagcaacgtaacccagcttcactacgcgcgccaaggcattatcacgcccgaaatggagtttgtcgccatacgcgaacgtttaaaattagacgaattgtcccaaaaatcggaatacgccaaactcttgaaacaacacgcagggcaaagtttcggtgcgaacatcccgacccatcccgaccaaatcacgcccgaattcgtgcgccaagaaatcgccgccggacgcgcaattatccctgccaacatcaaccaccccgaactcgaaccgatgattatcggccgcaacttccgcgtcaaaatcaacggcaacttgggcaactccgccgtcacctccagcctgaccgaagaagtcgaaaaaatggtgtggtcgctgcgttggggcgcggacacaattatggacttatccacaggcgcgcacatccacgaaacgcgcgaatggattatccgcaacgcgcccgtccccatcggcactgtgccgatttaccaagcgttggaaaaaaccggcggcatcgccgaagatttgacttgggatttgttccgcgacaccttaatcgaacaggcggagcaaggcgtggactatttcaccatacacgcgggcgtgttgctgcgttatgtgccgatgaccgccaaccgcctcaccggcatcgtctcgcgcggcggttcgattatggcgaaatggtgtttggcacatcatcgggaaaatttcctctacacgcatttcgacgaaatctgcgaaattatgaaagcgtatgacgtatcgttcagcctcggcgacggcctgcgccccggctgcattgccgatgccaacgacgaatcccaattcgccgaactgcacaccttgggcgaattgaccgataaagcgtggaaacatgacgtacaagtcatgatcgaaggccccggccatgtgccgctgcaacgcgtcaaagaaaatatgaccgaagagctgcaacactgttttgaagcgccgttttacaccctcggcccgctcgttaccgacatcgcacccggctacgaccacatcacctcgggcataggcgcggccaatatcggctggtacggcacggcgatgctttgttacgttacccccaaagaacatttggggctgcccgacaaagaagacgtgcgcaccggcatcatcacctacaaactcgccgcccacgccgccgatctcgccaaaggctggccgggcgcacaattacgtgacaacgccctgagcaaggcgcgtttcgagttccgttggcgcgaccaatttcgcttaagcctcgaccctgaacgtgccgagagcttccacgacgaaaccctgcctgccgaaggcgcgaaaatcgcccacttctgctcaatgtgcggccccaaattctgctcgatgaaaatcacgcaggaagtgcgcgactacgccgacaagcaaaaagcccaacggcagggcatggaggaaaaagcggtcgagttcgtcaaaaaggcgcgaagatttacagttga

SEQ ID NO: 43839 - DNA, 858 bp, Neisseria meningitidis
  misc_feature 4, 5, 6, 7, 8: 'n' is a, c, g or t
gtgnnnnncgaaatcagacggcaccgcacccaagggcagcaatacagcgccgaaaaagcccagcggcaaagccagactatcaaacagcgtaagcgacaaccctataagctcgattcgcagctgattcagcacatcgacccctttatccgccgcaaactcagtcccgaacaagtatgcgcctacgtgcgcaaacaccaccagatcacgctccaccacagcaccatttaccgctaccttcgccaagacaaaagcaacggcagcacgttgtggcaacatctcagaatatgcagcaaaccctaccgcaaacgctacggcagcacatggaccagaggcaaagtacccaaccgtgtcggcatagaaaaccgacccgctatcgtcgaccagaaatcccgtatcggcgattgggaagccgacaccattgtcggcaaaggacagaaaagcgcattattgaccttggtcgaacgcgttacccgctacaccatcatctgcaaattggatagcctcaaagccgaagacactgcccgggcagctgttagggcattaaaggcacataaagacagggtgcacaccattaccatggataacggcaaagagttctaccaacacaccaaaataaccaaagcattgaaagcggagacttatttttgtcgtccttaccattcttgggagaaagggctgaatgagaacaccaacggactcatccggcaatacttccccaaacaaaccgatttccgtaacatcagtgatcgggagatacgcagggttcaagatgagttgaaccaccgaccaagaaaaacacttggctacgaaacgccaagtgttttattcttgaatctgttccaaccactaatacactag

SEQ ID NO: 43840 - DNA, 2889 bp, Neisseria meningitidis
atgagtaacacaaccgtagaacaatttgccgccgagctgaaacgccccgtcgaagacctgttgaaacagttgaaagaagccggcgtcagcaaaaacagcggcagcgattccctgacgctggacgacaaacagcttctgaacgcctacctgaccaagaaaaacggcagcaacagcagcaccatcagcatccgccgcaccaaaaccgaagtcagcaccgttgacggcgtaaaagtcgaaacacgcaaacgcggacgcactgtcaagattccttctgccgaagaattggcagcacaggtaaaagccgcccaaacccaagccgcacctgtccggccggagcagacggcagaagacgcggcaaaagcccgagccgaagctgccgcacgcgcagaagcccgtgccaaggcagaagcggaagcggcaaaactgaaagcggcaaaagcaggcaacaaagccaaacctgccgcgcagaaacccaccgaagcaaaagccgaaaccgcacccgttgcggcggaaaccaaacccgccgaagaaagcaaagcggaaaaagcccaagccgacaaaatgccgtctgaaaaacccgccgagcccaaagaaaaagccgccaagccgaaacacgagcgaaacggcaaaggcaaagatgccaaaaaaccggcgaaacctgccgcacctgccgtgccgcaacccgtggtcagcgcggaagaacaggcgcaacgcgacgaagaagcacgccgtgccgccgcacttcgcgcccaccaggaagccctgttgaaagagaaacaggaacgccaggcacgccgcgaagccatgaaacaacaggcagaacaacaggcaaaagccgcacaggaagccaaaaccggcagacagcgtcccgccaaacctgccgaaaaaccgcaggcagccgcgccagccgtcgaaaataaacctgtcaatccggcaaaagcgaaaaaagaagaccgccgcaaccgcgatgacgaaggtcaaggccgaaacgccaaaggcaaaggcggaaaaggcggacgcgaccgcaacaatgcacgcaatggcgacgacgagcgcgtacgcggcggcaaaaaaggcaaaaaactcaaactcgagccgaaccaacacgccttccaagcaccgaccgaacccgtcgttcatgaagttttggttcccgaaaccattaccgttgccgatttggcgcacaaaatggcggtcaaaggcgtggaagtggtcaaagccctgatgaagatgggcatgatggttaccatcaaccaatccatcgaccaagacaccgccctgattgtggtggaagaactcggccacatcggcaaacctgccgcagccgacgaccctgaagcattcttggacgagggcgcggaagcagtggaagccgaagcattgccgcgtccgcccgtcgttaccgtgatgggccacgtcgaccacggcaaaacctcgctgctggactacatccgccgtaccaaagtggtacagggcgaagcgggcggcattacgcagcacatcggcgcgtaccacgttgaaacccctcgcggcgtgattaccttcttggacaccccgggccacgaagcctttaccgctatgcgcgcacgcggtgcgaaagcaaccgacatcgtgattctcgtggtcgccgccgacgacggcgtgatgccgcaaaccatcgaagcgattgcccacgccaaagctgcgggtgtaccgatggtggttgccgtcaacaaaatcgataaagaagccgccaacccagagcgtatccgccaagagctgaccgcacacgaagttgtgcctgacgaatggggcggcgatgtacagtttatcgacgtttccgctaaaaaaggcctgaacatcgatgcattgctcgaagccgtcttgctcgaagctgaagttttggaactgaccgcacctgtcgatgcgcccgccaaaggcatcatcgtcgaggcgcgcttggacaaaggccgcggcgcggttgccacattgctggttcaaagcggcacgctgaaaaaaggcgatatgctgctggccggtacggcattcggcaaaatccgcgcgatggtcgatgaaaacggcaaatccattaccgaagccggtccgtccatccccgtcgaaatcctcggcttgtccgacgtaccgaatgcgggtgaagacgcgatggtattggcggacgagaaaaaagcgcgcgaaatcgccctcttccgccaaggcaaataccgcgacgtgcgccttgccaaacagcaggcggcgaagctggaaaatatgttcaacaatatgggcgaaacccaggcccaatctttgtcggtcatcatcaaggcagacgtgcagggctcttacgaggctttggcgggcagcctgaaaaaactgtccacagacgaagtgaaagtgaacgtgttgcacagcggcgtgggcggcattaccgaatcggatgtcaaccttgccatcgcttcgggcgcattcattatcggctttaacgtgcgtgcagatgcctcttcgcgcaaacttgccgaaaatgaaaacgtggaaatccgctactacaacatcatctacgatgccatcaacgacgtgaaggcggcgatgagcggtatgctttccccggaagagaaagaacaggttaccggtacggtcgaaatccgtcaggtcatctccgtttccaaagtcggcaacattgcaggctgtatggttaccgacggcgtggtcaaacgcgattcccatgtccgcctcatccgcaacaacgtggttatccacacgggcgaactggcttcgttgaaacgctataaagacgatgtaaaagaagtccgcatgggcttcgagtgcggtctgatgctcaaaggctacaacgaaatcatggaaggcgaccaactggaatgcttcgacatcgtcgaagttgcccgcagcctgtaa

SEQ ID NO: 43841 - DNA, 1569 bp, Neisseria meningitidis
ttgagcttatctatgacactagcagagttctggccgatgtgcctccgccgccttcgcgatatgttgcctccggggcagtttgcgcaatggattgcgccccttacggtcggtgaggagggtggcgtatgggtggtgtacggcaagaatcagtttgcctgcaatatgctcaagagccagtttgccggaaaaatagaagcggtgagggaagagttggctgccggccgttccgccttcgtattcaaaccgggagaaggcgtgcgttatgagatggcggcggttgaaagtgctgtcgaacctgctgagccgtccttgcacgcggggtcggaggaaatgcccgtgcaggaggttctgttggacgagctgccgtctgaagagcctgtcaaacccgctgcgtcgaaaacggcggcggatattttggcggaacgtatgaaaaacctgccgcatgagccgcgccatactgccgaacctgcttcccgtccggaatcggcggtgcttgcgaaagcgcggacggatgcgcagcgtgatgcggaagaggcacgttacgaacaaaccaacctgtctccggattacacgtttgatacgttggtagaaggtaagggcaaccgccttgcagctgccgccgcgcaggcgatagcggaaagcccgggacagagttataacccgttttttctctatggcagtacgggtttgggtaaaacccacttggttcaggccgtgggtaacgagctgttgaaaaaccgtcccgatgcgaaagtgcgctatatgcattcggacgactatatccgcagctttatgaaggcggttcgcaacaatacctatgacgtattcaagcagcaatacaagcaatacgacctgctgattatcgacgacatccagttcatcaaaggcaaagaccgtacgatggaggaattcttctatctgtacaatcatttccacaacgagaaaaaacagctcatcctcacttgcgatgtgttgcctgccaaaatcgaaggcatggacgaccggctcaaatcgcgtttctcttggggtttgactttggaactcgaaccgcctgaattggaaatgcgcatcgccattttgcagaaaaaggcagaggcggcgggtatcagcatcgaagacgaagcggcattgtttattgccaacctgatccgttctaatgtgcgcgaattggaaggtgcgtttaaccgtgtcagtgcgagcagccgctttatgaaccggccggttatcgatatcgatttggcgcgtacggctttgcaggacattattgccgagaagcataaggtcattaccgccgatatcattattgatgccgttgccaaatattaccgtatcaaaatcagcgatgtgctcggtaagaaacggacacgaaacattgcccgtccgcgccaggtggcgatgagcctgaccaaagagctgaccacgttgagcctgccgtctatcggcgattcgtttggcgggcgcgaccatacgaccgttatgcacggcatcagggccgtgtcgaaactgcgcgaagaagatccggaattggctcaggattatgaaaagctgctgattctgattcaaaactga

SEQ ID NO: 43842 - DNA, 402 bp, Neisseria meningitidis; identical to SEQ ID NO: 37561

SEQ ID NO: 43843 - DNA, 1422 bp, Neisseria meningitidis
atgttcagacggcatttttgttttcagatgcagggaaaaccgatggcaaaaacgcttaaaaccctttaccaatgcaccgaatgcggcggcacttcgccgaaatggcagggcaaatgcccgcattgcggcgagtggaacacgcttcaggaaagccttgccgcgcccgagccgaaaaacgcccgtttccaatcttgggcggcggatacctcgaccgtccaatccctctccgccgttaccgccaccgaagtgccgcgcaatccgaccggtatgggcgaactcgaccgcgtattgggcggcggtttggtcgatggtgcggtcatcctgctcggcggcgaccccggcatcggcaaatccacgctgctgttgcaaaccatcgccaaaatggcgcaaagccgtaaagtgctatacgtttccggcgaagaatccgcccaacaagtcgccctgcgcgcgcagcgtttggaactgccgaccgacggcgtaaaccttcttgccgaaatccgcatggaagcgattcaggcggccttgaaacagcatcagcccgaagttgtcgtcatcgactctatccaaaccatgtattccgaccaaatcacgtccgcccccggctccgtgtcgcaggtgcgcgagtgtgccgcccaactgacgcgcatggcgaaacagatgggcatcgccatgatactggtcggacacgtgaccaaagacggcgcgattgccggcccgcgcgtgctggaacacatggttgataccgtgctgtatttcgagggcgaccaacattccaactaccgcatgatacgcgccatcaaaaaccgcttcggcgcggcaaacgaactgggcgtgttcgcgatgacggaaaacggtttgaaaggtgtgtccaacccgtccgccatcttcctcgccagctaccgcgacgatacgcccggctcgtgcgttttggttacacaggaaggcagccgcccgcttttggtcgaaattcaggcattggtcgatgacgcgcacggcttcacgcccaaacgcctcaccgtcggactggaacaaaaccgtcttgcgatgctgcttgccgtgttaaaccgccacggcggcatcgcctgtttcgatcaggatgtgttcctcaacgccgtcggcggcgtgaaaatcggcgaaccggcggcggatttggcggtcatcctcgcgatgctttccagcttccgcaaccgccctatgcctgaaaaaaccgtggttttcggcgaaatcggcttaagcggcgaagtccgccccgtcgcacgcgggcaagagcggctcaaagaagcggaaaaactcggcttcaaacgcgccatcgtccccaaagccaatatgccgcgcaacgccaaagagtttccgaacctgaaaatctacggcgtttcgagtttgcaggaagccatcgatatttgccgcgacagcagggaataa

SEQ ID NO: 43844 - DNA, 384 bp, Neisseria meningitidis
atggaaccttcctcctacgcggcagaaaaaaaaggcaaaggcggcatcaggcgcgtcattaacgcattcggctattcgatagacggcatcgccgccgcctaccgttacgaagcggcattccgtcaggttttgtggctgaacgtactgctggtgtgcgcggcatttttttgggtttccgaaaccgccgtccgcctgccgttgattatcgcgtcttttgtgtcggtcattgtcgaactgttcaacaccgccgtcgaagctgccgtcgatcatacttcgaccgaaaaacacgagctggccaaactcgccaaagacgcaggttctgccgcacaattgttcgcgatgctgatgttggcggcggtttggctgtctgccctgttcgggtaa

SEQ ID NO: 43845 - DNA, 333 bp, Neisseria meningitidis
atgagcagcgaattgattgtacacaccagcgatgccgcttttgaaaaagacgttttaaatgcagatatccccgtcctgctggacttttgggctccgtggtgcggcccctgcaaaatgattgccccgattttggacgacattgccgccgaatttgaaggccgtctgaaagtggtcaaaatcaacatcgacgacaacgaagccaccccgtcccgtttcggcgtgcgcggcattccgaccctgatggtgttcaaaaacggcgaagtcgtcgccaccaaagtcggcgcattggcaaaaggtcagctgaccgcctttgtcgaagcctctatcgcctga

SEQ ID NO: 43846 - DNA, 759 bp, Neisseria meningitidis
atggataaattggattattgccgccgtttttttgcgacttggttaggatttgtgattttcggtgtcggcggcattatgatgaaattggttttgttgccttatactttgaacggcacttcagggtctgtcgcccgccaattggcggcgcgccggattatcggaacatcttggcgtttgttcgttgcttatctgaaatggtcgggcgtgttggaggtatcgttcaagggtgttgaaaaactcaaccgcccgggacagttgattttggcaaaccatccgtctttgctggatgtggtgctgcttgtcggccatgtgcccgaaatgaactgtatcgtgaaaaaagatttgcagcacaatccggcaatgagcagccagattaaaggtgcgggctatattccgaacgaagagtcggaagcaatgctggaaacggtaaaggcggtttttgacagcgggcagagcctgctggtgttccccgaaggaacgaggacggggtgggacggacgggtaaaaatgcaccggggcgcggtttctttgggactgcggtatgccgaagtgattacgcccgtatgtatcaaaatgaatccgcccaattttaaaaaggggcagccgtggtaccgcatccccccgaaaaggatacggtatgaaattaccgtcggagacgacatcctcccccaagactggctcgccgagaaaccgttgccgattgcggcgcggcggctgaatgaatatctgcaggactattttacaaggaaaaccatatga

SEQ ID NO: 43847 - DNA, 1452 bp, Neisseria meningitidis
gtgaattatttccctattttcgccaacctcgccggccgccccgtattggtcgtaggcggcggcgcggtcgccgcacgcaaaatcagcctgctgctgaaggcgggcgcagaggtcagggttgccgcaaaacacctgaatgccgaactctccgcgttggcggcggaaaacaaaatcctgtggcttgccgaagaatttcgtgccgaacacatccgcacggttttcctcatcattgcggcaagcagcgaccaagccctcaaccggcgcgttttccatcttgccgaaagctgccaaaagccggtcaacgtggtggacgaccgcgaccattgcagcttcatcttcccgtcggttatcgaccgcaacccggttcagattgccgtttccagctccggcagcgcgcccgtcctcgcccgactgctgcgtgaaaggctggaagccctgctgccgccgtctttgggcgatatggcggaaatttcaggaaggtggcgcgatgccgtcaagggcaaactgaaatccgttaccgaacgccgccgcttttgggaaaagcagtttaacggacgtttcgccgccctcgtcaaaaaccggcaaaacacccttgccgaacgggaattggcaggccaattggaacaaagtcgtcaaaatgatcaaggcggctccgtctcgctggtcggcgcgggtcccggcgatgcggggctgctgacgctcaaagggctgcaggaaatccagcaggcagacgtggtgctttacgacgcgctggtttcagacggcatactgtccctcgtccgccgcgatgcggaacggatttttgtcggcaagcgcgcccggggcgagcgcaccccgcaagaggacaccaatgcgcttatggtcaggctggcccgcgaaggcaggcgcgtggtgcgtttgaaaggcggagaccctttcgtgttcggacgcggcggcgaagaattggaaaccttggcacgccatcagattccgttttcggtcgtccccggcattaccgccgccgtcggcgcgaccgcctatgccggcatcccgctcacgcaccgcgattatgcccaaagtgcggttttcgtaaccggccaccgcaaggcggatgcgcccgacatcgaatggcagaccctcgcccgcagccgccagaccttggtgatttatatgggtgcgctcaaagccgccctgattgccgaacggctgcaacagcacggacgctcgcccgacacgccggcagccgttatcagccaaggcacgctgccggctcaaaaaaccgcaaccggcacgctcgccaaccttgccgaactcgccgaaaccgcgccgaatccggcattgattgtcataggcgaagtggtggggctgcacgaaaaactcgcctggttcggtgaaaacggcgaaggagaaaaccgggtcgggcagacgtatcccgcattgggcggactgaatgccggacaacgggcggcataa

SEQ ID NO: 43848 - DNA, 1689 bp, Neisseria meningitidis
atgcgttccatgatttacggctcaatgccgtctgaaaagctcacaatttttcagacggcatttgttatgcaagtaaatattcagattccctgtatgctgtacagacgcgggagtgttaagccccccttgtttgaagctccgcggctcctgccgagcttcaccgaccccgttgtgcccaagctctctgctcccggcggctacattgtcgacatccccaaaggcaatctgaaaaccgaaatcgaaaagctggccaaacagcccgagtatgcctatctgaaacagctccaagtagcgaaaaacgtcaactggaaccaggtgcaactggcttacgataaatgggactataagcaggaaggcttaaccagagccggtgcagcgattatcgcgctggctgttaccgtggttactgcgggcgcgggagtcggagccgcactaggcttaaacggcgcagccgcagcagcggccgatgccgcctttgcctcactcgcttctcaggcttccgtatcgctcatcaacaataaaggcgatgtcggcaaaaccctgaaggaactgggcagaagccgcacggtaaaaaatctggttgtagcggcggcaacggcaggcgtatccaacaaactcggtgcctcttcccttgccacttggagcgaaaccccttgggtaaacaacctcaacgttaacctggccaatgcgggcagtgccgcgctgatcaacaccgctgttaacggcggcagcctgaaagacaatctggaggcaaatatcctggcggcattggtgaataccgcgcatggggaggcggcgagtaagatcaaaggactggatcagcactatgtcgcccacaaaatcgctcatgccgtagcgggctgtgcggctgcagcggcgaataagggcaaatgtcaggacggcgcgatcggtgcggctgtgggtgagattgtcggggaggctttggttaaaaataccgattttagcgatatgaccccggaacaattagatctggaagttaagaaaattaccgcctatgccaaacttgcggcaggtacagttgcaggcgtaacgggaggagatgtcaatactgctgcacaaaccgcacaaaacgcggtagaaaataatgcggttaaagctgttgtaactgctgcaaaagtggtttataaggtagccagaaaaggattaaaaaacgggaaaatcaacgttagagatttaaaacagacgttgaaagacgaaggttataatttagccgacaacctgaccaccttattcgacgaaacattggattggaacgatgccaaagccgttattgatattgtcgtcggaacagagctgaatcgcgctaataaaggggaagcggcacaaaaggtcaaggaagttttagaaaaaaatcgtccttatatccctaataaaggtgctgtaccgaatatgagtacatacatgaaaaataatccttttggaaaacagctggctcaaatttcagaaaagacaacgcttccgacgcagcaagggcagtctgtcttcttggtaaaaagaaaccaagggttattaaaaaccggtgataggttttatttagatggccaacataaaaatcatttagaggtttttgataaaaatgggaactttaagtttgttctaaatatggatggttcgcttaaccaaatgaaaactggggcagcaaaaggtcgtaaattaaacttaaaatag

SEQ ID NO: 43849 - DNA, 643 bp, Neisseria meningitidis
atgagaaaaagtcgtctaagccagtataaacaaaataaactcattgaactgtttgtcacaggtgtaactgcaagaacggcagcagagttagtaggcgttaataaaaataccgcagcctattattttcatcgtttacgattacttatttatcaaaacagtccgcatttggaaatgtttgatggcgaagtagaagcagatgaaagttattttggcggacaacgcaaaggcaaacgcggtcgcggtgctgccggtaaagtcgccgtattcggtcttttgaagcgaaatggtaaggtttatacggttacagtaccgaatactcaaaccgctactttatttcctattatccgtgaacaagtgaaacctgacagcattttttatacggattgttatcgtagctatgatgtattagatgtgcgcgaatttagccattttagcttcgctgaaacttcgttttcgtatcaatcacagcacacattttgccgaacgacaaaaccatattaatggaattgagaacttttggaatcaggcaaaacgtcatttacgcaagtttaacggcattcccaaagcgcattttgagctgtatttaaaggagtgcgaatggcgttttaacaacagtgagataaaagttcttgttccattttaa

SEQ ID NO: 43850 - DNA, 357 bp, Neisseria meningitidis; identical to SEQ ID NO: 36545

SEQ ID NO: 43851 - DNA, 345 bp, Neisseria meningitidis
atgaacctagaaaattatgaaaacattttaataaaattacttttttatcataacaacttagtaaatgaatattcttattttattgaaaataaaaatttatttaaaatagtatctcgaacgaaaacgagtaagggcttttttttcactatagaaaaaccattaaattttctaagcaaaaaaacttattttgagtttaattttaaatatttacactcagggaaagaacgctttggttcgtttatgtgctggataaatactaatttaatggaatttgagggggttttttttaacgacctgctccctgataatatgataataaataacttttttgaaataaatgattaa

SEQ ID NO: 43852 - DNA, 780 bp, Neisseria meningitidis; identical to SEQ ID NO: 36766

SEQ ID NO: 43853 - DNA, 330 bp, Neisseria meningitidis
atgtcccgatgttgtctgaagcggcttcagacggcatcggctgtttcggcgttctccggcggcgttttggaggtggtaagattgtgctgccggcggctatccgtccttttcaatccgagcgtgatgctgtttgtgccggactgtcccgtcggcggcgcggctgggtttttccaatatgaaatgctttgcccgtttttctggcaggggcggttgcagaccggttcgaatcttgcttacgatgtttttatgtctgccggacgtttgaatggcgggcggaaccccccgcacagccgccgttttcttgccctgctttgctccgttgccttataa

SEQ ID NO: 43854 - DNA, 1407 bp, Neisseria meningitidis
atgaacgattacgcagccatgccgtctgaagaccgtgaggtcggcgcattgtctctgcccccacactcaatggaggcggaacaatccgttttgggtgggttgatgctggaaaatccggcatgggacaggattgccgatgtggtttccggtgaagacttctaccggcatgaacaccgcctgattttccgatccattgccaaattgattaatgagagccgtcccgccgatgtgattacggttcaggaagatttgcagcggaacgaagaattggaagcggcaggcggattcgaatatctgattacgctggcgcaaaacaccccgtctgccgccaacatccgccgctacgccgaaatcgtgcgcgagcgttccattatgcgccaactcgccgaagtggggacggaaatcgcccgcagcgcatacaatccgcaaggcagggacgcggggcagcttttggacgaggcggaaaacaaagtattccaaatcgccgaaagcaccgccaaatccaagcagggctttttggagatgcccgatttgctgaaagaagtcgtacagcgcatcgatatgctctactcgcgcgacaatcccgatgaagttaccggcgtgccgacggggttcatcgacctcgacaaaaaaacctcgggtctgcaacccggcgacctgattatcgttgccggtcgtccgtctatgggtaagaccgccttttctatcaatatcgccgaacacgttgccgtagaaggcaggctgcccgttgctgttttctcgatggaaatgggcggggcgcaactggtcatgcgtatgctcggctcggtcggacggttggatcaaagcgttttgaaaaccggcaggctcgaagacgaacactggggtcgcctgaacgaagcagtcgtcaaactctccgacgcgcccgtgtacatcgacgagaccccgggtctgaccgcgctcgaactgcgcgcccgtgcccgccgtctcgcccgtcaatttaacaataagcttggattgattgtcatcgactacctgcaactgatggcaggatccggccgttccgacaaccgagcttcggagctgggagagatttcacgttcgctcaaagcgttggcgaaagaattgcaagtccccatcatcgccctgtcgcaattgagccgcacggtcgaatcgcgtaccgacaaacgccccatgatgtccgaccttcgcgagtccggcgcaatcgagcaggatgccgacctgattatgttcatgtaccgcgacgaatactacaaccaggactcacccatgaaaggccttgccgaatgtatcatcggcaaacaccgcaacggtcccgtcggtaaaatcttcctcacatggacgggacaattcaccaaattcgacaatgctgcctatattcccgaggaggcaaagatagaggattaa

SEQ ID NO: 43855 - DNA, 819 bp, Neisseria meningitidis; identical to SEQ ID NO: 37573

SEQ ID NO: 43856 - DNA, 189 bp, Neisseria meningitidis
atggaagaagttaaggcaaacccacagggcaaaactcctgcgagaatacctcctatgtccgatactaaaaatggttggttagcaaaagacggttgggttaagcgtgttcaaaacgtaaacaaaattgaaatacattacattgaaaactcaagaaccggtgagaaaacagattttaagtttaaggattag

SEQ ID NO: 43857 - DNA, 261 bp, Neisseria meningitidis
ttgacgaaggcggtacgccgaaaaaatgtgcaaacccccaaaatatgctatgcattccgaacgccctccgcatacgggcaataccttgccgacgcgggattcgactacctcagcttcgccaacaaccacagcaacgacttcggcgcgcaaggcatcacggcaacggcggcgagcggcagctcttttacatactcgatcgcgctaaagccgctgccgataacgaggccaaaattgcggaaaataccgccatcgcccagataa

SEQ ID NO: 43858 - DNA, 1434 bp, Neisseria meningitidis
atgaacgaatattcccaattaatcaagcatcccgatatttcccttcccccggtttcagacggcatcaaagtcgataatccggcaacgggcgagactttggcgtttgtccgcaagacggattcggacaagctgaaaaacctgattcaaaaagcagctgcagcacaaaaattatgggcggcaaaaactgcgttggaacgcgccgatgtgttgtggcgttggtattttcagattaaagaaaacaaagaagcattagcgcgcctgatgacgatggagcagggcaaaagcctgaccgaggcgcgtggcgaaatcgattatgcggcttcgtttgtgcgctggtttgccgaagaggcgcggcggattgacggcgatgtgctgacgagtgtgaaagcgtcgcaaaaactggtcgtgttgaaacagcccgtcggcgttaccgctgcgattacgccgtggaactttccgtccgcgatgattgcgcgcaaggccgcgcctgctttggcggtgggttgcgcgatgatcgtcaaacccgcatcgctcacgcctttgagtgcgtatgccttggcttcgttggcttacgaagcgggcataccgcaggatttgttgcctgttgtcagcggcagtgcttcggaaatcggccatgaatttgctacgaacccgattatccgcaaaatcagcttcaccggctcgaccgaagtcggcgcaaaaatttttgccgacagcgcggcggacattaaaaaactcagtttggagctgggcggcaacgcgccgtttatcgtgtttgacgatgccgatttggacaaagccgtcgaaggcgcgctcgccagcaagttccgtaacagcggtcagacctgcgtctgcaccaaccgcgtttacgctcaatccgccatttacgacgaattttgccgcaaattgagtgaaaaagcagccgcgctcaaattgggcaacggcttggaggatggtgtgaaccaagggccgctgattgaggaaaaagcggtggagaaagtcgagcagcacatcgccgacgcgcttgctaaaggtgcaagctgcctgaccggcggcaaacgcagcgcgttgggcggaacgtttttcgaaccgactgttttaagcggcgtaacggcgcaaatggcggtggcacgcgaagaaaccttcgggccgttgtgtccggtattccgttttgaaaccgaagccgaggtcatcgaggctgcgaacaatacggaatacggtttggcagcttaccttttcaccgccgacaccgcccgccaatggcgcgtcggcgaagccttggaatacggtatggtcggcatcaatacgggcttaatcagcaatgaagcggcaccgttcggcggcgtgaaacgtagcggtttgggacgtgaaggcagcaaatacggtgcggacgaatatctagaattgaaatatctgtgtatggatgtcgggtga

SEQ ID NO: 43859 - DNA, 624 bp, Neisseria meningitidis; identical to SEQ ID NO: 37513

SEQ ID NO: 43860 - DNA, 1257 bp, Neisseria meningitidis
atgaacgccgcacaactcgaccataccgccaaagttttggctgaaatgctgactttcaaacagcctgccgatgccgtcctctccgcctatttccgcgaacacaaaaagctcggcagtcaagatcgccacgaaatcgccgaaaccgcctttgccgcgctgcgccactatcaaaaaatcagtaccgccctacgccgtccgcacgcgcagccgcgcaaagccgctctcgccgcactggttctcggcagaagcaccaacatcagccaaatcaaagacctgcttgatgaagaagaaacagcgttcctcggcaatttgaaagcccgtaaaaccgagttttcagacagcctgaataccgccgcagaattgccgcaatggctggtggaacaactgaaacagcattggcgcgaagaagaaatcctcgctttcggccgcagcatcaaccagcctgccccgctcgacatccgcgtcaacactttgaaaggcaaacgcgataaagtgctgccgctgttgcaagccgaaagtgccgatgcagaggcaacgccttattcgccttggggcatccgcctgaaaaacaaaatcgcgcttaacaaacacgaactgtttttagacggcacactggaagtccaagacgaaggcagccagctgcttgccttattggtgggcgcaaaacgaggcgaaatcattgtcgatttctgtgccggtgccggcggtaaaaccttggctgtcggtgcgcaaatggcgaacaaaggcagaatctacgccttcgatatcgccgaaaaacgccttgccaacctcaaaccgcgtatgacccgcgccggactgaccaatatccaccccgaacgcatcggcagcgaacacgatgcccgtatcgcccgactggcaggcaaagccgaccgtgtgttggtggacgcgccctgctccggtttgggcactttacgccgcaatcccgacctcaaataccgccaatccgccgaaaccgtcgccaaccttttggaacagcaacacagcatcctcgatgccgcctccaaactggtaaaaccgcaaggacgtttggtgtacgccacttgcagcatcctgcccgaagaaaacgagctgcaagtcgaacgtttcctgtccgaacatcccgaatttgaacccgtcaactgcgccgaactgcttgccggtttgaaaatcgatttggataccggcaaatacctgcgcctcaactccgcccgacaccaaaccgacggcttcttcgccgccgtattgcaacgcaaataa

SEQ ID NO: 43861 - DNA, 507 bp, Neisseria meningitidis
atggctcacccgcaagaaatccgtgaaaagttacgccggctctatgtgagcggcgagcaaactttggaaacggcggccttgatgtgcgaaatcccgcagaccactgcgcgtgcgtggaaacgtgcggataaggaaaaaggcgacgactgggataagatgcgcgccgcttacactttggccggtggcggtattgaggatttgagccgtgcgatgttggccggttttatggtgcagtacaacagcacgatgacgatgctgcaggattcgagtaccgaagatttgccaccatccgaccgcgccaagctgttggccagcctggccgatgcgtttacgaaaaccgtatcggccaatgcgcgtgtgatgccggaaacgtcaaaactggcgacggctttggaattgattgagttcttgatggcgtttgtacaagaaaaacatcccaaacatttgcctgcctttgtggaggtattggagccgtttggggtggaagtggagaagaagtttggttag

SEQ ID NO: 43862 - DNA, 570 bp, Neisseria meningitidis
atggaaatcctgacacagttgggctatcaggtcgtcaagctgcctgccaacatcgacgaaacggtcagacagaacgaagaccctgcccgttacgttcaaaggatggcagaagaaaaaaaccgaaccgccctgaccctcttttgcgaaaccaacggcacaatgcccgatttccccctgattaccgccgacacctgcgtcgtttcagccggcattatattaggcaaaccccactcccaagccgaagcaatcgaatttttaaaccgattgtccggcaaacaacataccgtcctgactgccgtctgcattcattatcgcggcaatgcggaaaaccgcgtccaaaccaaccgcgttgtttttaagcccctgagttcggaagaaatttccgcctatgtgcaaagcggcgaaccgatggacaaagccggtgcctacgccgtacaaggcataggtggcatctttatccaatctatcgaaggcagcttcagcggcattatgggactgcccgtttatgaaaccgtttcgatgttgcaggatttgggataccgctcccccttgtccgcccttaaaccgtaa

SEQ ID NO: 43863 - DNA, 2226 bp, Neisseria meningitidis
atgactcaaaaatccaccattgtttatacccataccgacgaagcacccgcgctggcgacccaatcgctgctgccgattgtgcaggcttttgcccgccacgccgatattgatgtcaaaaccagcgacatttctctctccggccgtattttggcggcgtttcccgaatacctgaccgaagcgcaacgcgtacctgatgcgcttgccgaattgggcgaactggtgaaacaacccgatgcaaacgtaatcaaactgccgaacatcagcgcgtccgtaccgcaactgactgccgcgattaaagaattgcaatctaaaggctttgccgttcccgactatcccgccgacccgcaaaccgatgaagaaaaagccgtacgcgaacgctacgaccgcatcaaaggcagcgcggtaaaccctgtcctgcgtgaaggcaactccgaccgtcgcgcccctaaagcagtgaaaaactttgcgaaaaaaaatccgcacagcatgggcgcatggaccaaagactccaaaacccacgttgccaccatgcaaagcggcgacttttttcataacgaacaatctgttatcgtacctgaagcgacttccgtatccatcgtattcaccgacaaacaaggcaacaaaaaagagctgcgcgagcccgtcgccctgaaagccggcgaaatcatcgacgcgaccgtgatgagtaaaaaagccctgctcgccttccttgccgaacaagtaaaagatgcgaaagcaaaaggcgtgttgttctcgctgcacatgaaagccactatgatgaaagtgtccgacccgattatcttcggacacgccgtcaaagtattcttcgcgcctgtttttgaaaaattcggcgacaaactggctgctgccggcgtcaacgttaacaacggcttcggcaacctgcttgccaatctggacaaactggatgcggacacccgcaccgccgtcgaagccgaaatcgccgccgtttacgctgccaaccccgatttggcgatggttgattccgacaaaggcatcaccaacctgcacgttcccagcgatgtcatcgtcgatgcctctatgcctgcgatgattcgcaattccggccgtatgtgggacaaaaacggcaaagcgcaagacaccaaagccgtgattcccgacagcagctatgccggcgtttaccaagcaaccatcgacttctgccgcgaacacggcgcatttgacccgacaaccatgggtactgtgcccaacgtcggactgatggcgcaagcggcggaagaatacggctcgcacaacaaaacctttgaaatcgaagccgacggccaagtccaagtcattgatgcggcaggaaaagtcctaatgcagcacgacgttgaagccggcgacatctggcgtatgtgccaaaccaaagacgctccggttaaagactgggtacaacttgccgtcaaccgcgcccgtctgagcaacacgcctgccgtgttctggctcgacgaaaaccgtccgcacgacaagagcctgctcgccaaggttaaagcctaccttgccgaactggataccaatggcctcgacatccgcgtcctcgctcctgaagaagccgccaagttcagcttgggtcgtctgaaaaacggcgaagacaccatctccgtaaccggtaatgtcttgcgcgactacctgaccgacttgttcccaattttggaactcggcacaagcgcgaaaatgctgtctatcgttccattgatgaacggcggcggtatgtttgaaaccggcgcgggcggttctgcaccgaaacatgttcaacaattcctcgaagaaaaccatttgcgctgggactcgctgggcgaattcctcgcactcgccgtatcgtttgaacatttggcgcaaaaaaccggcaatgccaaagcccaagtcctcgccgacactttggatgcagccaccgaaaaactgctgttgaacgacaaatcgcctaaacgtaaagccggcgaactcgacaaccgcggcagccatttctacctcaccctctactgggcgcaagaattggcggcgcaagacaaagatgccgaactgaaagccgcatttacgccattggcagccgctttgaccgccgacgaagcgaaaatcgttgccgagctttccgccgtacaaggcaaagcggccgacatcggcggctactacgccgccaatcctgaaaaagccgcacaagtgatgcgtccgagcgtaacctttaatcaggcactaaacgccttataa

SEQ ID NO: 43864 - DNA, 804 bp, Neisseria meningitidis
atgaatttatttttcgataccgaattgggaaagcaacaaaataaagcaacccataaaatccgtgtaatgagcgaggcttggttggaaaaaaacggctactgcccctgttgcggaagcaagccgatgcagagatttgccaataacaaacctgttgcagacctcttttgcccaaattgccacgagcaatatgaattaaagagtaaaaatcaaaaaaccataggcaacagcgtgcctgacggtgcatatcacaccatgttggagcgcatccggtcagataccaaccccaactttttctttcttgcatataaaaaagcggattactccatacggcaattggtgcttgtacccaaacatttcatcacgccggatatgattattcccagaaataaaggcattaaaaaccggccgaaccacattatgtgttctatcaatctcgcccctttgcctgaaagcggcaaaatattcttaatagacaattcccgcattatcgaacccgaaaccgttctgaaaaaatggcaatccaatttgtttttacgcaaccaaaatgcggagcgcaaaggctggcttctggctgttatgaaatgtatcgaccaactccccgaagaattcacattgtcgcaaatgtatgaatttgaaaacaaactatccatccaatttccccaaaacaaccatatcagagacaaaatccgccaacagttgcaaattctgcgcgaccaaaatacgatcgaattcattggtcgcggactttacaaaaaatcaataaattgcgcccaactcccaaggtattttgatttcaaatcatga

SEQ ID NO: 43865 - DNA, 198 bp, Neisseria meningitidis
atgagcgacccgattttggatgccttggcgcgtattgaaaacaagactgatcaaacgctgaaaaatcagaaggaaatgcaggcggaaattgcgcaaattcgccaagacacgaaacgcacggccattacattcggcgcactgggcggcggcgtgattacggtcggctgggaattgcttaaagcgaaaatgggactgtaa

SEQ ID NO: 43866 - DNA, 906 bp, Neisseria meningitidis
atggacattctggacaaactggtcgatttcgcccaattgacgggcagtgtggatgtgcagtgccttttgggcggacaatggtcggtacggcatgaaaccttgcaacgcgaaggattggtacacattgttacatcgggcagcggctatctctgcatcgacggcgaaacttccccgcgtccggtcagtacaggggatattgtatttttcccgcgcggcttgggtcatgtgttgagccacgacggaaaatgcggagaaagtttacaaccggatatgcggcagcacggtgcgtttacggtcaagcagtgcggcaacggacaggatatgagcctgttttgcgcccgtttccgctacgacacccacgccgatttgatgaacgggctgcctgaaaccgtttttctgaacattgcccatccgagtttacagtatgtggtttcaatgctgcaactggaaagcaaaaaacctttgacggggacggtttccatggtcaacgcattgtcgtccgtcctgctggtgcttatcctgcgcgcctatctcgaacaggataaggatgtcgaactctcgggcgtattgaaaggttggcaggacaaacgtttgggacatttaatccaaaaggtgatagacaaaccggaagacgaatggaatgtcgacaaaatggtggcggctgccaatatgtcgcgcgcgcaactgatgcgccgtttcaaaagccgggtcggactcagcccgcacgcctttgtgaaccatatccgcctgcaaaaaggcgcgttgctgctgaaaaaaaacccggattcggttttgtcggtcgcactgtcggtaggctttcagtcggaaacgcacttcggcaaggcgttcaaacggcaatatcacgtttcgccgggtcaataccggaaagaaggcgggcaaaaataa

SEQ ID NO: 43867 - DNA, 219 bp, Neisseria meningitidis; identical to SEQ ID NO: 36291

SEQ ID NO: 43868 - DNA, 372 bp, Neisseria meningitidis; identical to SEQ ID NO: 36794

SEQ ID NO: 43869 - DNA, 168 bp, Neisseria meningitidis; identical to SEQ ID NO: 37435

SEQ ID NO: 43870 - DNA, 2151 bp, Neisseria meningitidis
atgctcaccgatttagaaaaaaacgccatccgcgaccattaccaaaacatcggcaaaaacctgcccggtttccgtccgcgtgcttcgcagcgggaaatgattgcggcggttgccaacgctttttcgcggacgttggcgcgcgaagaaggcggcgagccgcccaagcgcgaaggcgagagcattgccgtgatcgaagggccgaccggcgtgggcaaatcgttggcctaccttttggccggcggcatcatggcgcaaacacgcggcaagcggctgattgtgagcagcgcgacggttgccttgcaggagcagttggtagaccgcgacctgccgtttctggtcgaaaaaagcggtttggaactgaccttcgcacttgccaaagggcgcggccgctatctctgcccctacaaactctatcgactgacgcaaagcaatgcccagcaaaacctgctcggctttgaagcccccgccgtcttgtgggacagcaaacccaagcccgaagaattgaagctgctgcgcgacatcgccgacgaattttccgcccgacggttcaacggcgaccgcgacacttggccggaaaaaatcgatgacgcgatttggctcaaagtgaccaacgaccgccacggctgcctgaaaaccgcctgtcccaaccgtccggaatgtccgttttacctagcacgcgatgtcttggaaaccgtcgatgtcgtcgttgccaaccacgatcttctgcttgccgacatcagtatgggcggcggcgtgattctgcctgcgcccgaaaacagtttctattgcatcgacgaagcgcaccacctgcccaaaaaagccctcagccgttttgccgccgaacattcatggaatattgccgtttggacgctggaaaaactgccgcagctgaccggcaaaattgccgcgctgaccgataaagccgaacttgccaacctagccgacgaagccgccgcatccttgctcgacagcctgcatgaatggcaattccatttggcggaagagccgtctttaagtctgggggtgtctgaaaacgacagacgaaccaacagcgaaccgacttggctgtgggaagacggcaaaatccccgaaggcctcgaaaccaccgtttccaatacggccattgctgcgcgcagcctgctcaaacacgttatcgggctgaacgatgcgctttctgccgcacgccgcgaaaaagaacaggacggcgcgctcctcgaccgcctgaccagcgagttcggtctttttatcgcccgtatcgaacaaatcagcgcggtttgggatttgctctccactgtccccctcgagggtgaagaaccgttggcgaaatggataacccgccgcgccgacgacaaaaacgactacattttcaacgccagccccatcagcagcgcatcccaccttgccaacagcctgtggcggcgtgcggcaggcgcggtattgacttccgccaccctgcaatccttgggcaacttcaacctgatgctgcgccaaaccgggctgcaatggctgcccgaaaccaccaccctcgccctcaaaagcccctttgactttgaaaaacagggcgaactctacatcccccccatatacgccagccccaaagaccccgaagcccacaccgccgccgtcatcgaatggctgcccaagcttatttcgcccaccgaagccatcggcacgctcgtcttgttttcctcgcgcaaacaaatgcaggatgtcgccctgcgcctgcccggagactacctgccgctcttgctcgtacaaggcgaattacccaaagccgtcctcctgcaaaaacaccaccgggccatagaagaaggcaaagccagcatcatcttcggactcgacagctttgccgaaggactcgacctgcccggcaccgcctgcgtgcaagtcatcatcgccaaacttcccttcgccatgcccgacaaccccatcgaaaaaacccaaaaccgctggatagaacagcgcggcggcaaccccttcatcgaaatcaccgtccccgaagccggcatcaaactcatccaggccgtcggccgcctcatccgcaccgaacaagactacggccgcgtaaccatcctcgacaaccgcatcaaaacacagcggtacggccaacaattattggccggcctgccgccgtttaaaaggatagggtaa

SEQ ID NO: 43871 - DNA, 501 bp, Neisseria meningitidis
atggcggatttgcagaaaacttttcaaacttcgttccgtgatgcgatggcatcctgtgcggcaggcgttcatgtcatcacgacagacggtgcggcagggcgttacggcattacaatgacggcggtcgcgccggttaccgacgagccgccgaccgtgatgctgtgcatcaaccggagtgcgcgaatcattccgatcctgtcggaaaacggcagcctgtgcatcaatacgctggcggacgaacatcaggatgttgccgaacattttgccgggctgaccggcctgtcgcccgaagagcggtttgcctaccacatctggcatcgcggcaaaacgggacaacttgaaatagaaggcgcgttggcgcacctgcacgggcatattgtcggcaaacatgaaatcggcacgcattttgtgttttacgtcaggctcgacgaaatcaaaaactgcgggtgcaaacgccccgcgctgctgtatttcagacggcagtttagatttttagactga

SEQ ID NO: 43872 - DNA, 957 bp, Neisseria meningitidis; identical to SEQ ID NO: 42418

SEQ ID NO: 43873 - DNA, 966 bp, Neisseria meningitidis; identical to SEQ ID NO: 42351

SEQ ID NO: 43874 - DNA, 1128 bp, Neisseria meningitidis
atgtacactttccgcccgtttcccaaactgcacacagaaacacacattatgaacatacaaaacatccgcaccctcctcgacaccgtcgccgttccgaatacggcacgcacgctcggcggcgaaaaggccgtccgttcggtcgaacagcgttcagacggcatccatatcgccctgcatttcggcttccccgtcgcgcacattgcctcagaaacagccgaccgcatacaggaaatcctgatgccgctgacaggcgacacacacatccatctgtccatggacactgaaatcggcacacacaaagtccagcccggcgttaccaccatcaaaggcgtgaaaaacatcatcgccgtcgcatcgggaaaaggcggcgtgggcaaatcaacaaccaccgccaaccttgccgccgcaatggcgcgcatgggcgcgcgcgtcggcgtgctcgatgccgacctttacggcccgagccaaccgaccatgttgggtgtggacgaccgcaaacccgatcagaaaaaccaaaaactcattcccgtcgaatcttcagacggcatacaggtcatgtctatcggctttctcgtcgataccgaccaagccgtcgtctggcgcgggccgatggtcagccaagccttgcagcaactgatgtttcaaagcgagtgggacgaagtggattatcttttcatcgacctgccccccggcacgggcgacatccaactcacgctgtcccaacgcatccccgttaccgggtccgtcatcgtaaccacgccgcaggacatcgcgctgatagacgcgcgcaaggctgtggatatgttccgcaaggtcaacattcccattttaggcgtattggaaaacatgtccgtccacatctgctccaactgcgggcatagcgaagcactgttcggcacggacggcggcaaagatttcgccgcacgcctcaacgtccccctgctcggacagcttcccttaagcctgcccgtgcgcgaagcaatggacggcggcacaccggcgcaactgttcgacgaacaccccgccatcgcccgaatctacaccgatgccgcattccaaatcgccctgagcattgccgacaaaggcaaagacttcagcagccgcttccccaaaatcgtcatcgaataa

SEQ ID NO: 43875 - DNA, 1776 bp, Neisseria meningitidis
atgagtatcgtgctgcacggcgtggcggcgggcaaaggcattgccgtcggttgcgcccacctgattgcgcgcggtacggaggaagtgccgcagtatgatgttgcggaggcggacaccgatgccgaagccgaacgtttcgatgccgccgtcaaagccacgcgcaaagagttggaacagctccgcagcgcgattcccgaaaacgccccgaccgagttgggcgcgttcatctcgctacacctgatgctcttgaccgatgttaccttgtcgcgcgaacccgtcgatattttaagggaacaaaaaatcaacgccgagtgggcattgaagcagcagagcgacaaactcgccgcccaattcgacaatatggacgatgcctatttgcgcgaacgcaagcaggatatgctgcaagtcgtccgccgcatccacaacaacctgatcgggcagggcaacgagttggaagttgccgacaacctgtttgacgaaaccgttctgattgcaaacgacctttcgcccgccgacacggttttgtttaaagagcagcgcattgccgccttcgttaccgatgccggcggccccaccgggcatacggcgattttgggcaggagcttggacatcccgtccgtcgtcgggctgcacaacgcgcgcaaactgattaccgaaggcgaaacggtcattgtggacggtatcaacggcgtgttgattatcgcgccggatgagtcggtgttgaacgaataccgccgccgtgcccgcgaataccgcagccacaaacgcgatttgaacaagctcaaaaaaaccgccgccgccaccgccgacggggtctgcatcgagcttgtgggcaatatagaatccgccgaagacgtgaaaccgctgcacaacctcggcgcagacggcatcgggctgttccgcagcgagtttctttacctgaaccgcgatacgatgccgtctgaagacgagcagtacgaagtgtacagcgcgattgtcaaaaaaatgaaaggcaaaagcgtaacgatacggacagtcgatttaggtgtggacaaaaacccgcgctggttcgggaaaaacagcacgcccaacggcagcctcaaccccgcgctgggcatgaccggcatccgcctgtgccttgccgaaccggtcatgttccgcacccagatgcgcgccatcctccgtgcggcggtacacggccccgtgcggatgatgtggccgatgattacctccgtatccgaagtgcgccagtgcctcatccacctcgacaccgcgcaacgccagcttgccgaacgcggcgatgccttcggtaaagtcggcatcggctgtatgattgaaattccgtctgccgcgctgaccgtcggcagtattttgaaactggtcgatttcatctccgtcggtaccaacgacctgattcaatacatcttgtccgtcgatcgcggcgacgacagcgtcagccacctctaccagcccggccatcccgccgtgctgaaaatgctgcaacacgtcatccgtaccgccaaccgcatggacaaagacgtatccgtatgcggcgagatggcgggcgataccgcgtttacccgcgttttattgggtatggggctgcgccgtttttccatgaaccccaacaacatcctgcccgtcaaaaacatcattctgcacagcaatgtcggacagctcgaaagcgatattgtgaaagtcatccgctgcgaagacgaagagaagtcggaaaagctgatcaaacagatgaacagcgtgtctgtcgaggaagaagccgacttcaaggggcggaaataa

SEQ ID NO: 43876 - DNA, 552 bp, Neisseria meningitidis; identical to SEQ ID NO: 37351

SEQ ID NO: 43877 - DNA, 789 bp, Neisseria meningitidis
atgaatcctaaaatcgtgtttttcgacattgacgatacgctgtaccgaaaatatacggatactttgcgcccttccgtgaaaacggcggtggcggctttgcgcggcaaaggtatattgacggcgttggcaacggggcggtctttggcgacgattcccgaaaaggtcagggatatgatggcggaagcgggaatggatgccgtggtaacgataaacggacagtttgcgctgctgcacggaaaaaccgtgcgcgaagtaccgatggatgccggtttgatgggcagggtttgcgcgcatttggatggcttgggcatggattatgcgtttgtcggcggagaggggatcgctgtgtccgcgctgtcggaatgcgtgtgccgcgccttgaagcatatcgccagcgatttttttgccgataaggattatttttcaagcaaaccggtgtatcagatgctggtgtttgcggaggaaaacgaaatgccgctttggtcggatattgtggaacgggaaggcttgaaaacggtgcgctggcacgaggaagcggtcgatctgctgcctgcgggtgcgtcgaaaacggacggcatcagaagcgtggttgaagcattgggatgggaaatggcagacgtgatggcgttcggcgacggtttgaacgatgtggaaatgctgtcagaagtcgggttcggcgtggcaatgggcaacggggaacaggcggcgaaagaagcggcgaaatatgtttgccccagcgttgatgaagacggcgtgttgaggggcttgcaagatttgggcgtgatttga

SEQ ID NO: 43878 - DNA, 1419 bp, Neisseria meningitidis
atgaatattcacaccctgctctccaaacaatggacgctgccgccattcctgccgaaacggctgctgctgtccctgctgatactgcttgcccccaatgcggtgttttgggttttggcactgctgaccgccaccgcccgcccgattgtcaatttggactatcttcccgccgcgctgctgatcgccctgccttggcgtttcgtcaaaattgccggcgtattggcgttttggctggcggttttgtttgacgggctgatgatggtgatccaactcttcccttttatggatctcatcggcgccatcaacctcgtccccttcatcctgaccgcccccgccccttatcagataatgaccgggctgttgctgctgtatatgctggcgatgccgtttgtgttgcagaaagccgccgccaaaaccgacttccggcacattgccgtctgcgccgccgttgtggcggcagccggctatttcaccggccatttgagttactacgaccggggtcggatggccaatatcttcggcgcaaacaacttctactacgccaaaagtcaggcgatgctctacaccgtcagccagaatgccgactttattaccgccggcctggtcgatcccgtcttcctccccttgggcaatcaacagcgtgccgccacgcatctgaacgagccgaaatctcaaaaaatcctctttatcgtcgccgaatcttgggggctgccggccaatcccgaacttcaaaacgccacttttgccaaactgctggcgcaaaaagaccgtttttcggtttgggaaagcggcagttttcccttcatcggcgcgacggtcgaaggcgaaatgcgcgaactgtgtgcctacggcggtttgcgcgggttcgcactgcgccgcgcgcccgacgaaaaatttgcccgctgcctccccaaccgtttgaaacaagaaggttacgccacctttgcgatgcacggcgcgggcagttcgctttacgaccgcttcagctggtatccgagggcgggctttcaagaaatcaaaaccgccgaaaacctgatcggtaaaaaaacctgcgccattttcggcggcgtgtgcgacagcgagctgttcggcgaagtgtcggcatttttcaaaaaacacgacaagggactgttttactggatgacgctgaccagccacgccgactatcccgaatccgacattttcaaccacaggctcaaatgcaccgaatatggcctgcccgccgaaaccgacctctgccgcaatttcagcctgcacacccaattcttcgaccaactggcggatttgatccaacgccccgaaatgaaaggcacggaagtcatcatcgtcggcgaccatccgccgcccgtcggcaacctcaatgaaaccttccgctacctcaaacaggggcacgtcgcctggctgaacttcaaaatcaaataa

SEQ ID NO: 43879 - DNA, 1077 bp, Neisseria meningitidis
gtgtgccgtatgtttggcgggatttcggttaaaatggcggcatttccatctgaagcagaaagccctgtcatgtatccacttgcccgtcgcatcctgtttgcactcgatgccgaaaaagcccaccacttcacgctcgacgcgctctacacggtttataaattgggtttgattcctgtaaccgacaaccgtaccaaacctgtaaaattgatgggtatggatttgcccaaccctgtcggacttgccgccggactcgacaaaaacggcgaatacatcgacgcattgggcgcgctcggctttggtttcatcgaaatcggcacggtaacgcccaacccgcagcccggcaacccgcagccgcgcctctttcgcgttcccgaacaccaaggcatcatcaaccgcatgggtttcaacaaccacggtatcgacaccatgatacgcaacatcgaaaaaagtaaattcagtggcgtattgggcatcaacatcggtaaaaacgcggttacacccatcgaaaacgctgccgatgattatttaatctgccttgaaaaagcctacgcacacgcaagttacattaccgtcaatatttcctcgcccaacactaaaaacctccgcgcgctgcaaggtggcgacgagttgagcgcattgcttgaggctttgaaaaacaaacaggcacagcttgcctctgtacacgggaaatacgtcccgctcgccgtcaaaatcgcccccgatttggatgaagcacaaatcgaagacatcgcccacgttgtcaaatccgtcgaaatggacggcatcatcgctaccaataccaccatcgacaaatcaagtctcggcagccatccgctcgcaggcgagcagggcggtttgagcgggctgcccgttcatgaaaaaagtaatcgggtgttgaagctgttggcagaccacatagacggcaagctgccgattatcggcgtaggcggcattatggaaggcgaggactcggcagataaaatccgcttgggcgcgaccgccgtccaagtgtacagcggattgatatacaaaggtccggcattggtcaaagaatgtttgaaggctttggcgcgatga

SEQ ID NO: 43880 - DNA, 132 bp, Neisseria meningitidis; identical to SEQ ID NO: 39343

SEQ ID NO: 43881 - DNA, 159 bp, Neisseria meningitidis
atggaattacacgacaggcaggaaatgccgtctgaaaggattttccggtcagtcttgcgattggtcggggtttcatcggaaacggtgaaacgaaagtttgccggcgtagagttgagctacgcgggtaaagccgcaggcgaaagcctgtattgtttgtga

SEQ ID NO: 43882 - DNA, 1386 bp, Neisseria meningitidis
atgtcttcaggactcgtaacagcggcgtatatcgttgccgcaattttattcatcttctcactggcggggctgtccaaacaggaaaccgccaaacagggctgctattccggtatcgccggtatggcggtcgccctttttgtaactgttttttccgacaatacccacggactgggctggatcatcatcgccatgctcatcggcgcggcaatcggcatctacaaagccaaaaaggtggaaatgaccgaaatgcccgaactgattgccctgctgcacagcttcgtcggcctagcggcggttttggtcggcttcaacagctatatcgcgccgggcaacgtttcgcacgatatgcacaccatccatctggtcgaagtgtatttaggcatcttcatcggcgcggtaacctttaccggctcgctggtcgcattcggcaaactcaacggcaaaatcagcagcagcccgctgcaactgcccgccaaacacaagctcaacgcactggcacttgccgtatcgtttgtgttgctgctcgtatttgtcggcattgacggcagcggcttcatcctgctgattatgaccctgattgccctcgcattcggctggcacttggttgcctccatcggcggcgcagatatgcccgtggtcgtgtccatgctcaactcctactccggctgggcggccgcagcggcaggcttcatgctctccaacgacctgctcatcgttaccggcgcgctggtcggctcaagcggcgcgattctgtcctacattatgtgcaaagccatgaaccgctcgtttgtctcggtaattgccggtggtttcggcagcgacagcggcacattatcttccggcagccaagagataggggaataccgagaagtcaaagctgccgatattgccgaaatgctgaaaggcgcaaacaatgtcatcattaccccgggctacggtatggcagtcgcacaagcgcaataccccgttgccgaaatcaccgagcttttacgtaaaaacggcaccgaagtacgcttcggcatccaccccgtcgccggccgcctgcccggtcatatgaacgtactgctcgccgaagccaaagtcccctacgacatcgttttggaaatggacgaaatcaacgacgacttccccgaaaccgatgtggtcttggtcatcggtgcgaacgacaccgtcaaccccgccgcccaaaccgacccgaacagcccgattgcgggtatgcccgtgttggaagtgtggaaggcaaaagaagtcgtcgtcttcaaacgctcgatgaataccggctacgcaggtgtacaaaacccactgttcttcaacgaaaacagcgtgatgtgtttcggagatgcgaagaaaaccgtagatgacattctgtccgaactgaaaaaataa

SEQ ID NO: 43883 - DNA, 1827 bp, Neisseria meningitidis
ttgtctgaaacggattcgattatgaaaaaactgatttgcctgttcgccgtatttttgatgttgtgcggacgagctttcgcgctggatgcgaacgatctgctgccgccggaaaaggcattcgtgccggagcttgccgttgccgacgacggtgtgaacgtccgtttcaggattgccgacggatactatatgtatcaggcgaaaatcgtcggcaagaccgatccggcggatttgttgggacagccttctttcagcaagggcgaagagaaggaagacgagtttttcggcaggcagacggtttaccatcacgaggcgcaggttgcctttccttatgcaaaggctgtcggcgaaccgtataaattggttttgacctatcagggctgtgccgaagccggcgtgtgctatccgcccgtggataccgagtttgatattttcggcaacggcacttaccatccgcaaaccgacgaaccggcatccgccaaagaccgctttttgcagccttcctctcaaaacggcagcggggcgctgccgcccccgaagggggatgagggcggcgacagccgtttcaagctgtcttgggatacgctcaacgccaatcttttggcgttttttctcgctggtttgggcctgagttttaccgcctgtatgtatcccctgttgccgattgtttccagtattgtggtcggcgacaaaaaggcgggcaaggcgcgggcgtttgtgctgtccgtcgtttatgttcagggtttggctctgacttatacgctggtcggcattgttgccggactgacgggcgcactgctgaccgtatggttgcagcaggcttgggtggtattggcggcatcggctttaatggtcgtcttggcactgtctatgttcgggctgttcaacatccagcttcccaacgccgtgcagtcgtattttcagaatcaaagcagcaggctttcaggcggtaaaatcgtttccgtctttattatgggcatattgtccgcgctgattgtcgggccgtgcgtcgccccgccgctggcatttgctttgggctacatcggtcagacgggcgatgcggttttaggcggtttggcactttacactttggcgttgggcaccggcgttccgctgattgccatcggcacgttcggcgggcatatcctgcctaaggcaggcgattggatgaatgccgtcaaatacgcattcggcttcatcctgctagccgtcgccgtttacctcgccacgccgcacttgccctattatctcgtcgtcgcgctgtacacgctgctgatgctggttcctgcctttatgctgctggtcaacggacgcaggcagaaacgccgtccgaaagctgtggcattcgcattgggcggtatattgctgataggcggcgcgtggttcggctggcagggcgcaaacggcaaaacgaccgcgctgcaccatttcctgaccctcaatccaccagccgaagcaggcaaatcttcggaacacggcaaaatgtttgccgatactgccgcgctgaaggcagcgatggatacggcgttgaaagaacatcccgacaaacccgtcgttttggatttttatgccgactggtgcatttcctgcaaagaaatggcggcttacacgctcaatcagccggaagtgcatcaggcagtcgatatggaacgctttttccaaatcgacgtaaccgccaacacgcccgaacatcaggcgttgttgaaagaatacggtctgttcgggccgccgggcgtgtttgtcgtccgctccgacggcagccgcagcgagccgctgctgggttttgtcaaagcagacaagtttatcgagtggtatgaacaaaaccgctga

SEQ ID NO: 43884 - DNA, 4170 bp, Neisseria meningitidis
atgaccgataccgcaccgacagataccgatccgaccgaaaacggcacgcgcaaaatgccgtctgaacaccgccctaccccgccggcaaaaaaacgccgcccgttgctgaagctgtcggcggcactgctgtctgtcctgattttggcagtatgtttcctcggctggctcgccggtacggaagcaggtttgcgcttcgggctgtaccaaatcccgtcttggttcggcgtaaacatttcctcccaaaacctcaaaggcacgctgctcgacggcttcgacggcgacaactggtcgatagaaaccgagggggcagaccttaaaatcagccgcttccgcttcgcgtggaaaccgtccgaactgatgcgccgcagcctgcacattaccgaaatttccgccggcgacatcgccatcgttaccaaaccgactccgcctaaagaagaacgcccgccgctcagccttcccgacagcatagacctgcctgccgccgtctatctcgaccgcttcgagacgggcaaaatcagcatgggcaaagcctttgacaaacaaaccgtctatctcgaacggctggatgcttcataccgttacgaccgcaaaggacaccgccttgacctgaaggccgccgacacgccgtggagcagttcgtcgggggcggcctcggtcggcttgaaaaaaccgtttgccctcgataccgccatttacaccaaaggcggactcgaaggcaaaaccatacacagtacggctcggctgagcggcagcctgaaggatgtgcgcgccgaactggcgatcgacggcggcaatatccgcctctcgggaaaatccgtcatccacccgtttgccgaatcattggataaaacattggaagaagtactggtcaaagggttcaacatcaatccggccgccttcgtgccttccctgcccgatgccggactgaatttcgacctgaccgccatcccgtcgttttcagacggcatcgcgctggaaggttcgctcgatttggaaaacaccaaagccggctttgccgaccgcaacggcatccccgtccgtcaggttttaggcggctttgtcatccggcaggacggcacggtgcatatcggcaatacgtccgccgccctgctcggacggggcggcatcaggctgtcgggcaaaatcgacaccgaaaaagacatcctcgatttaaatataggcatcaactccgtcggcgcggaagacgtactgcaaaccgcgttcaaaggcaggttggacggcagcatcggcatcggtggcacgaccgcctcgcccaaaatctcttggcaactcggcatcggcacggcgcgcacggacggcagcctcgccattgcaagcgacccagcaaacggacagcggaaactggtgctcgacaccgtcaacatcgccgccgggcaaggcagcctgaccgcgcaaggctatctcgagctgtttaaagaccgcctgctcaagctggacatccgttcccgcgcattcgacccttcgcgcatcgatccgcaacttccggcaggcaatatcaacggctcaataaaccttgccggcgaactggcaaaagagaaattcacaggcaaaatgcggtttttacccggcacgttcaacggcgtaccgattgccggcagtgccgacattgtttacgagtcccgccaccttccgcgtgccgccgtcgatttgcggctggggcggaacattattaaaacagacggcggcttcggcaaaaaaggcgaccggcttaacctcaatatcaccgcacccgatttatcccgtttcggtttcggactcgcggggtctttaaatgtacgcggacacctttccggtgatttggacggcggcatccgaacctttgaaaccgacctttccggcgcggcgcgcaacctgcacatcggcaaggcggcagacatccgttcgctcgatttcacgctcaaaggttcgcccgacacaagccgcccgatacgcgccgacatcaaaggcagccgcctttcgctgtcgggcggagcggcggttgtcgataccgccgacctgatgctggacggcacgggcgtgcagcaccgcatccgcacacacgccgccatgacgctggatggcaaaccgttcaaattcgatttggacgcttcaggcggcatcaacagggaacttacccgatggaaaggcagcatcggcatcctcgacatcggcggcgcattcaacctcaagctgcaaaaccgtatgacgctcgaagccggtgcggaacgcgtggcggcaagtgcggcaaattggcaggcaatgggcggcagcctcaacctgcaacacttttcttgggataaaaaaaccggcatatcggcaaaaggcggcgcacacggtctgcatatcgccgagttgcacaatttcttcaaaccgcccttcgaacacaatctggttttaaacggcgactgggatgtcgcctacgggcgcaacgcgcgcggctacctcaatatcagccggcaaagcggcgatgccgtattgcccggcgggcaggctttgggtttgaacgcattttccctgaaaacgcgctttcaaaacgaccgcatcggaatcctgcttgacggcggcgcgcgtttcgggcggattaacgccgatttgggcatcgccaacgccttcggcggcaatatggcaaatgcaccgctcggcggcaggattaccgcctcccttcccgacttgggcgcattgaagccctttctgcccgccgccgcgcaaaacattaccggcagcctgaatgccgccgcgcaaatcggcggacgggtaggctctccgtccgtcaatgccgccgtcaacggcagcagcaactacgggaaaatcaacggcaacatcaccgtcgggcaaagccgctctttcgataccgcgcctttgggcggcaggctcaacctgaccgttgccgatgccgaagtattccgcaacttcctaccggtcggacaaaccgtcaaaggcagcctgaatgccgccgtaaccctcggcggcagcatcgccgatccgcacttgggcggcagcatcaacggcgacaaactctattaccgcaaccaaacccaaggcatcatcttggacaacggctcgctgcgttcgcatatcgcgggcaggaaatgggtaatcgacagcctgaaattccggcacgaagggacggcggaactctccggtacggtcggtatggaaaacagcggacccgatgtcgatatcggcgcggtgttcgacaaataccgcatcctgtcccgccccaaccgccgcctgacggtttccggcaacacccgcctgcgctattcgccgcaaaaaggcatatccgttaccgggatgattaaaacggatcaggggctgttcggttcgcaaaaatcctcgatgccgtccgtcggcgacgatgtcgtcgtattaggcgaagtcaaaaaagaggcggcggcaccgctccccgtcaatatgaacctgactttagacctcaatgacggcatccgcttcgccggctacggcgcggacgttaccataggcggcaaactgaccctgaccgcccaatcgggcggaagcgtacggggcgtgggcacggtccgcgtcatcaaagggcgttataaggcatacgggcaggatttggacattaccaaaggcacggtctcctttgtcggcccgctcaacgatcccaacctcaacatccgcgccgaacgccgcctttcccccgtcggtgcgggcgtggaaatattgggcagcctcaacagcccgcgcattacgctgacggcaaacgaaccgatgagtgaaaaagacaagctctcttggctcatcctcaaccgcgccggcagcggcagcagcggcgacaatgccgccctgtctgcagccgcaggtgcgctgcttgccgggcaaatcaacgaccgcatcgggctggtggatgatttgggctttaccagcaagcgcagccgcaacgcgcaaaccggcgaactcaaccccgccgaacaggtgctgaccgtcggcaaacaactgaccggcaaactctacatcggctacgaatacagcatctccagcgcggaacagtccgtcaaactgatttaccggctgacccgcgccatacaggcggttgcccgtatcggcagccgttcgtcgggcggcgagctgacatacaccatacgtttcgaccgcttctccggttcggacaaaaaagactccgccggaaacggcaaaggaaaataa

SEQ ID NO: 43885 - DNA, 435 bp, Neisseria meningitidis; identical to SEQ ID NO: 39366

SEQ ID NO: 43886 - DNA, 429 bp, Neisseria meningitidis; identical to SEQ ID NO: 41701

SEQ ID NO: 43887 - DNA, 312 bp, Neisseria meningitidis; identical to SEQ ID NO: 39965

SEQ ID NO: 43888 - DNA, 924 bp, Neisseria meningitidis
atgctgcaaagaactttggcgaaatccatcagcgttaccggcgtcgggctgcattcgggcgaacgcgtcgcgctgaccctgcaccccgcgcctgaaaacagcgggatttccttccgccgtaccgatttggacggcgagatgggcgaacaaatcaagctgaccccttatttgatcaacgatacccgcctttcctccaccatcgttaccgacaaaggcgtgcgcgtcggcacgatcgaacacattatgtccgcgctgtccgcctacggcatcgacaatgcgctgattgagctgaacgcgcccgaaatcccgattatggacggctccagcctgccgtttatttaccttttgcaagatgcgggcgtggtcgatcaaaaggcgcaaaagcgttttttgaaaatcctcaagcctgtcgaaatcaaagaagcgggcaaatgggtgcgctttacgccgtatgacggctttaaggtaacgctgaccatcgaattcgaccatccggttttcaaccgcagctcgcccacttttgaaatcgatttcgccggcaaatcctacatcgacgaaatcgcgcgcgcgcgcactttcggctttatgcacgaagtggaaatgatgcgcgcccacaatctgggtttgggcggcaatttgaacaacgccatcgtgattgacgacacggatgtcctgaatcctgaaggcttgcgctatcccgatgagtttgtgcgccacaaaatccttgatgccatcggtgatttgtatatcgtcggacatccgattgtcggcgcatttgaaggctacaaatcgggacacgccatcaacaacgcactcttgcgcgcggttttggcagacgaaacggcttacgaccgggtggaatttgccgacagcgatgatttgcccgacgcatttcacgagctgaacatcagaacttgtggataa

SEQ ID NO: 43889 - DNA, 912 bp, Neisseria meningitidis
atggttcatattatgtttaatcaggcagcacaagaattgacgactatccgcgatattttacgttttgcagtcagccgttttaatgaggcagggctcttttttggtcatggaacagataatgcgcatgatgaagcagcttatttgattctgcatactttgaatttgcctttggatatgcttgccccatatcttgatgcaaaactcttggaagctgaaaaagaggaagtgctggcggttattgagcgtcgtgctgtcgaacacattccagccgcttatttgacacaccaggcatggcagggagagtttgatttctatgtggatgagcgcgtaatcatacctcgttcttttatttatgaattgttgggtgacggacttcgtccttggatagaatacgatgagttggtgcataatgctttggatctttgcaccggaagcggttgccttgccattcagatggcgcatcattatcctgatgcccaaattgatgcggttgatgtgagcttggatgctttggaagtggcagggattaatgtcgaagattatggtttggaagaacgcatccggcttattcatacggatttgtttgaaggattggaaggcacttatgatttgattgtttccaatcctccttatgtggatgcggaatcggttgagttattgcctgaagagtatttgcacgaaccggaattggcattgggcagcggggcggacgggttggatgccaccaggcagattcttctgaatgcggcaaagtttctgaatcccaaaggtgtattgctggtggaaatcgggcataacagggatgtattggaagcagcgtatccggagttgccttttacttggttggaaaccagcgggggcgacggttttgttttcctcttgacgcgcgagcagttattgggtgaagagtga

SEQ ID NO: 43890 - DNA, 216 bp, Neisseria meningitidis
atgaaacaaggtattcacccgaactaccacgaagtcaacgttacctgctcttgcggcaacaaattcgcaaccaaatccgcgatggaaaaagaaaacttcaatatcgaggtttgctccctgtgccacccgttctataccggcacccaaaaaatcgttgataccaccggccgcgtggacaaattcaacaacaaattcggcaacctgttcaaacgctga

SEQ ID NO: 43891 - DNA, 258 bp, Neisseria meningitidis
atggtattgttattaattgtaaataaatattggaaggtaaatgatatgaaaaatgaaattcaaaaaaatatggacaaatataatccctggcatgaagatgattttgagtcgtatgaagacattgccagagatgtatcgctgacgacagataaaacgttcattgaacattatttgttagaagtttattcagaagaaaacggacattttgaccaagagaatgtccatgcaatgatagaagaaattaaaaatgcaatttag

SEQ ID NO: 43892 - DNA, 246 bp, Neisseria meningitidis
atgctcaaatccatcgaactcaattcccacatccgcaaccgccttgcagaatatctgaaaggcaggggtatggattttcagacggcaatgcaggaagaaaaaggcaacaaagaaatcgccgccatcgtccacagcggtttgcccactctggtccgcaaactgtattccgaacaaaaaatgcagaagtttttttgggaaaagcgggatttgattgccgactacatcagccgccggatgcagggatag

SEQ ID NO: 43893 - DNA, 285 bp, Neisseria meningitidis
atgaaaaaactgttattggctgccgttgtttctctgagtgccgctgccgcatttgccggcgactctgccgagcgtcagatttacggcgatccccattttgaacaaaaccgcacaaaagctgtgaaaatgttggagcagcgcggttatcaggtttacgatgtcgatgccgacgaccattggggtaagcctgtgctggaagtggaagcctataaagacggccgcgaatacgacatcgtgttgtcttaccccgacctgaaaatcatcaaagagcagctcgatcgctga

SEQ ID NO: 43894 - DNA, 321 bp, Neisseria meningitidis; identical to SEQ ID NO: 38688

SEQ ID NO: 43895 - DNA, 324 bp, Neisseria meningitidis
atgggagattccgtactatccgccatccaacaaaccatcacccagcgaaaatctgccaatccgtccgaatcttacgtcgcacagctcttgcataagggcgaagacaaaatcctaaaaaaagtgattgaagaggcgggcgaagtgttgatggcatccaaagacaaaaacccgtcccacctggtttacgaagttgccgacttatggtttcacaccatgattcttctgacacaccacgacctgaaggcggaagacgtattggacgaacttgcgcgccgtcaggggctgtcggggctggtcgaaaaagccgctcgcacagaatcttga

SEQ ID NO: 43896 - DNA, 339 bp, Neisseria meningitidis; identical to SEQ ID NO: 39659

SEQ ID NO: 43897 - DNA, 396 bp, Neisseria meningitidis
atgatgcggcaacggggtaaaaaaatgttgtttgaagaaaatccgatagacggacagtttgcggaatatgaatgcggtgcgggcggaatccggctggcggggcaaagtttccataaacccgtgcttgtacataaggattcggtctgcctgtcgcaatgccgaaccttgtccgatctgactccggaaaacctgttgtccgacgtcaaacctgttgactatccggaaatattgattatcgggacgggcgcggctcaggagtttatccatcccaaaatcatggcggatttttcccgaatcggaatcagcgtggaatgcatgaataccgattcggcattcaggacattggttttcctgcactcggaagggcgcagggcttgggcttggcttcagccgtaa

SEQ ID NO: 43898 - DNA, 396 bp, Neisseria meningitidis
atgatgtattcgtttgaagcgaatgcaaatgcagtaaaaatatctgaaactgtttcagttgataccggacaaggtgcgaaaattcataagtttgtacctaaaaatagtaaaacttattcatctgatttaataaaaacggtagatttaacacacatccctacgggcgcaaaagcccgaatcaacgccaaaataaccgccagcgtatcccgcgccggcgtattggcgggggtcggcaaacttgcccgcttaggcgcgaaattcagcacaagggcggttccctatgtcggaacagcccttttagcccacgacgtatacgaaactttcaaagaagacatacaggcacgaggctaccaatacgaccccgaaaccgacaaatttgcaaaggtctcaggctaa

SEQ ID NO: 43899 - DNA, 417 bp, Neisseria meningitidis; identical to SEQ ID NO: 36667

SEQ ID NO: 43900 - DNA, 447 bp, Neisseria meningitidis
atgcagcacgaagaaggcaaccgccaacgccctcaaggcgaactgctcctgcgtaccgtcgctatgccgcgcgataccaatcccaaccaagacattttcggcggctggattatgtcgcagatggatttgggcggcggcatattggcggcggaaatcgcgcggggacgcatcgttaccgtcgccgttcaggaaatgaacttcatccgcccggtcaaggtcggcaacgtcgtctgctgctacgggcattgcgtccgcgtgggcaacacttccctccagcttaaagtcgaagtctgggtgaaaactttgatgaacgattgcgttaccgaagaccgccacctcgtaaccgaggcggtgttcacttatgtcgccatcgatgcggaaggcaatccgcgcccgattccgaaagaaggcaaccccaaattggcgggcttattgcctactccgtaa

SEQ ID NO: 43901 - DNA, 1272 bp, Neisseria meningitidis
atgttccaatggctttatgatgtattgtggctgcttgcgccgatatggatacggcgttatttggacaaacgctccggaagtgccccggcatatcgggcgcatcgggacgagcgtttcggcaagccgtatccgaatcccgttaccggcgcggtttggatacacgccgtttcggtcggagaaacgcgtgccgcccagtccttgatacgcgagttgcggcggcgttttcccgatgcgccgctgctgatgacgcagatgaccccgacggggcgggaaaccgcgcaagttctgtttcccgatgcgcaatgccgctatcttccgtatgacaaaaaaacgtgggtacggcagtttttgcgcgaacaccgcccgatgttcggcattttgatggaaaccgaaatctggcccaacctgatgagggaatgccggcgcgcgggtgtgccgctgtttttggcgaatgcgcggctgtcggaaaaatcgttgaacggttatctgaaagtccgccgcctgatccgtcctgccgccgcttcgctgacggggtgtctggcgcagacagaggcggatgcggcgcggttggcgaaattgggcgcggcatccgtgcaggtgtgcggcaataccaaatacgacatcataccgtcggaacagatgaaaacgctggcggggcagtttgaaaaacgcatcggaggccggccggttgccgtgtgcggcagcacgcgcgtttatcggggtgaagacgaggcggaaaaactgctggcggcgtggcaacaatatcgcggcgatgcgctgctggtcgtcgtgccgcgccatcccgagcattttcagacggtatttgaaacggcaaaacgcttcgggtttaaggttcagcggcgcagcgacggtttgccggtcgaacctgatacgcaggtgtggataggcgacagtatgggcgagctgtatgcgtattacctgtgcgccgatgtcgcttttgtcggcggcagtctggtcgattcgggttgtcagaacatcatcgaaccgctttcctgcggcgttccgacgatattcggcttttcaacctacaatttttccgaagcctgccgacacgccttggcatcgggtgcggcggttcaagtcgaatcggcggatgcgtggcgggaagccgttgaaaaaaccttatcgtccgaggggggggggatgcagatgcaggcgcgcgtggacggctttatcgcacaacatcgcggagcgggcgcgagaatcgccgaggcggtgcgggaagcggtatgcggatatcgggggcgatag

SEQ ID NO: 43902 - DNA, 2058 bp, Neisseria meningitidis
atgacacgcaaaatcttagttacctccgccctgccctatgccaacggcagcatccacctcggccacatggtcgaacacatccaaaccgacgtttgggtgcgctttcaaaaactgcgcggccacgcgtgccactactgctgcgccgacgacacccacggcacgcccgtaatgcttgccgcgcaaaaacaaggtatcgcgcccgaagacatgattgccaaagtgcgcgaagagcacctcgccgactttactggctttttcatcggttacgacaattattacagcacccattcccctgaaaacaaacagttttcccaagacatttaccgcgcgctgaaagccaacggcaagattgagagccgcgtcatcgagcagcttttcgaccccgaaaaacaaatgttcctgcccgaccgcttcgtcaaaggcgaatgcccgaaatgccacgcccaagaccaatacggcgacaactgcgaagtctgcggcacgacctattccccgaccgaactgattaacccgtattccgccgtttccggtacgaaacccgaattgcgcgaatccgaacacttcttcttcaaactgggcgaatgcgccgacttcctcaaagcatggacttccggcaacaacccgcacgacggcaagccccatctgcaagccgaagccctcaacaaaatgaaagaatggctgggcgaaggtgaagaaaccaccctgtccgactgggatatttcccgcgacgcgccgtatttcggttttgaaatccccgacgcgccgggcaaatacttctacgtctggctggacgcgcccgtcggctacatggcgtcgtttaaaaacctgtgcgaccgcatcggcgtcgattttgacgaatacttcaaagccgacagccaaaccgagatgtaccacttcatcggcaaagatattctctatttccacgccctgttctggcccgctatgctgcatttctccggccaccgcgccccgaccggcgtgtacgcacacggctttttgaccgtcgacggacaaaaaatgtccaaatcgcgcggcacgtttattaccgccaaatcctatctggaacaaggcctgaaccccgagtggatgcgctactacatcgccgccaaactcaacagcaaaatcgaagacatcgatttgaacctgcaagactttatcagccgcgtaaacagcgacctcgtcggcaaatacgtcaacatcgccgcccgcgcctcaggtttcatcgccaaacgctttgaaggccgtctgaaagatgttgccgacagcgaattgctggcaaaactgactgcgcaaagcgaagccattgccgaatgctacgaaagccgcgaatacgccaaagccctgcgcgacatcatggccttggcagacattgtcaacgaatacgttgatgccaacaagccgtgggaactcgccaaacaagaaggccaagacgaacgcctgcacgaagtatgcagcgaactcatcaacgccttcaccatgttgaccgcctacctcgcccccgtcttgccgcaaaccgccgcaaacgccgccaaattcctgaatttggaagccatcacttgggcaaatacacgcgataccttgggcaaacacgccatcaacaaatacgaacatttaatgcaacgagtggagcaaaaacaagtggacgatttaatcgaagccaacaaacaaagcatcgccgccgcagccgcacctgccgccgaagagggcaaatacgaaaaagtcgccgaacaggcgagtttcgacgactttatgaaaatcgacatgcgcgttgccaaagtattgaactgcgaagctgtcgaaggcagcaccaaacttttgaaattcgacctcgatttcggttttgaaaaacgcatcatcttctccggcatcgccgcgtcttacccgaaccctgccgaattgaacggccgcatggtcatcgccgtcgccaacttcgccccgcgcaaaatggcaaaattcggtgtatctgaaggcatgattttgagtgccgccacggcagacgggaaactgaagctcttggatgtggatacaggcgcgcagccgggcgacaaagtcggttaa

SEQ ID NO: 43903 - DNA, 528 bp, Neisseria meningitidis
atggaaatgaaacaaatgcttttagccgtcggcgtggtggcggtgttggcgggctgcggcaaggatgccggcggttacgagggttattggcgcgaaaagtcggacaaaaaagagggtatgattgccgtcaaaaaagaaaaaggcaattacttccttaataaaatccacgtggttacaggcaaggaagagtccttgcttttgtctgaaaaagacggcgcgctttcgataaacacagggataggggaaatcccgatcaaactttccgacgacgggaaagagctgtatgtcgaacgtaggcagtatgtcaaaaccgatgcggcgatgaaggacaaaatcatcgcccatcagaaaaagtgcggacaaacagcacaggcataccgcgacgcgcgaaatgcgttgccgtcaaaccagacgtatcagcagcatctggcggcgatcgagcaattgaaacggcggtttgaagccgagtttgacgaattggaaaaagaaatcaaatgcaacggcagaagcccggcattgttgctttag

SEQ ID NO: 43904 - DNA, 1401 bp, Neisseria meningitidis
atgaccccttccgcactgaaaaaaaccgtcctgctgctcggcactgcctttgccgccgcatccgtccacgcatccggctaccacttcggcacacagtcggtcaacgcgcaaagcacggcaaatgccgccgccgcagaagccgccgacgcatcgaccatcttctacaaccctgccggcctgaccaaactcgacagcagccagatttccgtcaacgccaacatcgtgctgcccagcattcattatgaggcggattccgccaccgactttaccgggcttcccgtccaaggttcgaaaagcggcaaaatcaccaaaaccacggtcgcgccccacatctacggcgcatacaaagtcaacgacaatctgaccgtgggcttgggcgtgtacgtccccttcggctctgccaccgaatacgaaaaagattccgtgttgcgccacaacatcaacaaactcggtctgaccagcatcgccgtcgaacctgtcgccgcgtggaaactcaacgaccgccattccttcggcgcaggcatcatcgcccaacatacttccgccgaactgcgcaaatatgccgactgggggattaagagtaaagcagagatattgacggcaaaaccgcccaaacctaacggtgtagccgaagctgcaaaaattcaggccgacggacacgccgatgtcaaaggcagcgattggggcttcggctaccaactggcgtggatgtgggacatcaacgaccgtgcgcgcgtgggcgtgaactaccgttccaaagtctcgcacacgctcaaaggcgatgccgaatgggcggcagacggcgcggcggcgaaagcaatgtggagtacgatgcttgcagcaaacggctacacggcgaatgaaaaagcccgcgttaaaatcgttacgcctgagtctttgtccgtacacggtatgtacaaagtgtccgataaagccgacctgttcggcgacgtaacttggacgcgccacagccgcttcgataaggcggaactggtttttgaaaaagaaaaaaccgtcgtcaaaggcaaatccgaccgcaccaccatcacccccaactggcgcaacacctacaaagtcggcttcggcggttcttatcaaatcagcgaaccgctgcaactgcgcgccggcatcgcttttgacaaatcgcccgtccgcaacgccgactaccgcatgaacagcctacccgacggcaaccgcatctggttctccgccggtatgaaataccatatcggtaaaaaccacgtcgtcgatgccgcctacacccacatccacatcaacgacaccagctaccgcacggcgaaggcaagcggcaacgatgtggacagcaaaggcgcgtcttccgcacgtttcaaaaaccacgccgacatcatcggtctgcaatacacctacaaattcaaataa

SEQ ID NO: 43905 - DNA, 318 bp, Neisseria meningitidis
atggcggaaaagctggcgatgtcggcaggcgggtatgccaaaatcgaacggggcgaaacgcagttaaatatcccgcgtttggagcagttggctcagattttcaaaatcgatatgtgggacttgctcaaatcgggcggtggtgggatggtgtttcagattaatgaaggtgatagtggtggcgatattgcgttgtatgcgtcgggtgatgtttcgatgaaaatagaatttttaaaaatggagttgaaacactgcaaagaaatgttggaacaaaaagacaaagaaatcgagctgctccgcaagctgaccgaaaccgtttaa

SEQ ID NO: 43906 - DNA, 1293 bp, Neisseria meningitidis
atggctgtcttcccactttcggcaaaacatcggaaatacgcgctgcgtgcgcttgccgtttcgattattttggtgtcggcggcatacattgcttcgacagagaggacggagcgcgtcagaccgcagcgcgtggaacaaaatctgccgccgctgtcttggggcggcagcggcgttcagacggcatattgggtgcaggaggcggtgcagccgggcgactcgctggcggacgtgctggcgcgttcgggtatggcgcgggacgagattgcccgaatcacggaaaaatatggcggcgaagccgatttgcggcatttgcgtgccgaccagtcggttcatgttttggtcggcggcgacggcggcgcgcgcgaagtgcagttttttaccgacgaagacggcgagcgcaatctggtcgctttggaaaagaaaggcggcatatggcggcggtcggcttctgaggcggatatgaaggttttgccgacgctgcgttcggtcgtggtcaaaacgtcggcgcgcggttcgctggcgcgggcggaagtgcccgtcgaaatccgcgaatccttaagcgggattttcgccggccgcttcagccttgacggtttgaaggaaggcgatgccgtgcgcctgatgtacgacagcctgtatttccacgggcagcaggtggcggcgggcgatattttggcggctgaagtcgttaagggcggcacaaggcatcaggcgttctattaccgttcggacaaggaaggcggagggggcggcaattattatgatgaagacggcaaggtgttgcaggaaaaaggcggcttcaacatcgagccgctggtctatacgcgcatttcttcgccgttcggctaccgtatgcaccccatcctgcacacatggcggctgcacacgggcatcgattatgccgcaccgcagggaacgccggtcagggcttccgccgacggcgtgattacctttaaaggccggaagggcggatacggcaacgcggtgatgatacgccacgccaacggtgtggaaacgctgtacgcgcacttgagcgcgttttcgcaggcggaaggcaatgtgcgcggcggcgaggtcatcggttttgtcggttcgaccgggcgttcgaccgggccgcacctgcattacgaggcgcgcatcaacgggcagcccgtcaatcctgtttcggtcgcattgccgacaccggaattgacgcaggcggacaaggcggcgtttgccgcgcagaaacagaaggcggacgcgctgcttgcgcgcttgcgcggcataccggttaccgtgtcgcaatcggattga

SEQ ID NO: 43907 - DNA, 1113 bp, Neisseria meningitidis
atgcaaaccgccgcccgccgctcgttcgactacgatatgccactcatccaaacgccgacttccgcctgccaaatccgtcaggcgtgggcgaaggttgccgacacgcccgaccgcgagacggcagatcgtctgaaagacgaaatcaaggctttgctgaaggagaaaaacgcggtcttggtggcgcattattacgttgatccgctgattcaggatttggctttggagacgggcggatgcgtgggcgattcgctggaaatggcgcgcttcggtgcggaacacgaagccggtacgctggtggtggctggtgtgcgcttcatgggcgagagcgcgaaaatcctctgccctgaaaaaacggtgctgatgcctgatttggaggcggaatgttctttggatttgggttgcccggaagaagcgttttcagcgttttgcgaccaacaccccgaccgcacggtggtggtgtacgccaacacttccgccgccgtgaaagcgcgtgccgattgggtggtaacgtcttcggtggcgttagaaatcgtatcgtatttgaaatcacgcggcgagaagctgatttggggacccgaccgccacctcggcgactacatctgccgcgaaacgggcgcggatatgctgttgtggcagggttcgtgcatcgttcacaacgaattcaaagggcaagagctggcggcgttgaaggcggaacaccccgaagcggtggtgctggttcatcctgaatcgccgcaaagcgtcatcgaactgggcgacgtggtcggctcgaccagcaaactgctcaaagccgccgtatcgcgtcctgaaaaaaaattcatcgtggcgaccgatttgggcatcctgcacgaaatgcaaaagcaggcgcccgacaaacaatttatcgccgcgccgacggcgggcaacggtggaagctgtaaaagctgcgcgttctgcccgtggatggcgatgaattcgctgggcggcatcaaatacgccctgacaagcggacgtaacgaaatcctgttggacaggaagctgggcgaagccgccaaactgcctttgcagcgtatgctcgactttgcggcagggctgaagaaaaaagatgtgttcaacggcatgggccccgcctga

SEQ ID NO: 43908 - DNA, 495 bp, Neisseria meningitidis
atgactttcaatcaagaacaagattattgggctggctataaggcaaatgaaagagccttgattattcaaacatggtcaggatttgggcgatatgctccagaccacctatatcccccccatatcctgccattggataccgacaatgaaactttaggcacaacggtcttgcaagcattggcaaacagcaggactttcgtttatgacagtccagaagaccaagatttttttgataccgaaaaaattcggcaacgctatgaggattgggttgccaagctatgcgggaacttgggctataaaaccagacgcgccctatttaaaaacatgatgagcgtagatatttggctgcacaacggctgcctgaaaatcagcccgagccgccatgtcaagctggaagcgtgggatgccattgatgcagacgatgtaattttatcattggataacagccctgaagaaatcggagcaggtttaaagttggcattgagccgctgccgataa

SEQ ID NO: 43909 - DNA, 624 bp, Neisseria meningitidis
atgatgaaaccgcacaacctgttccaattcctcgccgtttgctccctgaccgtcgccgtcgcttccgcacaggcgggcgcggtagacgcgcttaagcaattcaacaacgatgccgacggtatcagcggcagcttcacccaaaccgtccaaagcaaaaagaaaacccaaaccgcgcacggcacgttcaaaatcctgcgaccgggccttttcaaatgggaatacaccaaaccttacaggcaaaccatcgtcggcgacggtcaaaccgtttggctctacgatgttgatctggcacaagtgaccaagtcgtcccaagaccaggccataggcggcagccccgccgccatcctgtcgaacaaaaccgccctcgaaagcagctacacgctgaaagaggacggttcgtccaacggcatcgattatgtgctggcaacgcccaaacgcaacaacgccggctaccaatacatccgcatcggcttcaaaggcggcaacctcgccgccatgcagcttaaagacagcttcggcaaccaaacctccatcagtttcggcggtttgaataccaatccccaactctcgcgcggcgcgttcaagtttaccccgcccaaaggcgtggacgtgttgagcaactga

SEQ ID NO: 43910 - DNA, 909 bp, Neisseria meningitidis
atgaacacgccccaatccgccatcattcccgaccacgcccaagccggcatctttatcgaagccgacttcgccgccaatcgcctcaacgatattaaagccgcctgccgcgcttcgctcgacgcgttaactgccttgaaagcccgctttccggacgatattttgggtctgaccatcgccttcggcagcaaagcctgggcaacattcggacatacggacgaaggcagtgaaatcaaacccttctccgaaatgggcaacgggcttgcgccgtccacgcagcacgatatgtccatccacatccaatccttccgccaaaacgccgcctacgcgcttgcccaatccgttttgggcgcgttcggcgacagcatatgcgtcgcgtccgaagaacacggtttgcgcctgtatcaggatcgcgggctggacggtttcgtcgacggcacggaaaacccgcagggcgatgaaaatgtccgcgaagtcgccatcatccccgaaggaaaacccgatgcgggcggcagctatgtcctgctgcaaaaatacctgcacgatttgaaaaaatgggatgccgtccccgtcgccgaacaggaggcctcggtcggacgcggcaaggaaaccgacgacgaattcggccgcgatgtccgcctgcccgattcgcacctcggccgcgtcaacctgaaagaaaacggagtcggcctgaaaatcgtccgccgcagcctgcccttcggcaaaatcagcggcgaacacggtttgatgtttaccgcatactgccgcacgctgcacaatatcgaagcgcaattattgagtatgttcggcgatacggacggcaaaaccgacctgctgctccgacatctctccgccgccgtttcgggcggatactactacgcgccgtctgtcgaacgcctgcaaaacctctaa

SEQ ID NO: 43911 - DNA, 840 bp, Neisseria meningitidis
gtgaaacgaatttttctgtttttggctaccaatatcgctgttttggtcgtaatcaacattgttttggcggttttgggcatcaacagccggggcggcacgggcagcctgttggcgtattccgccgtcgtcggcttcactggttcgattatttcgctgctgatgtccaaatttatcgccaaacaatcggtcggcgcggaagttatcgacacgccgcgcaccgaagaagaagcctggcttttgaacactgtcgaagcccaagcgcggcaatggaacctgaaaacgcccgaagtcgccatctaccactcccccgaacccaatgcctttgccacgggcgcatcgagaaacagctccctgatcgccgtcagcaccggtttgctcgaccatatgacgcgtgacgaagtggaagccgtattggcgcacgaaatggcacacgtcggcaacggcgatatggttacgctgacgctgattcaaggcgtggtcaatacctttgtcgtgttcctgtcgcgcattattgccaacctgattgcccgaaacaacgacggcagccagtcccagggaacttatttcctggtcagcatggtattccaaatcctgttcggcttccttgccagcttaattgtcatgtggttcagccgacaacgcgaataccgcgccgatgcgggcgcggcaaaactggtcggcgcgccgaaaatgatttccgccctgcaaaggctcaaaggcaacccggtcgatttgcccgaagaaatgaacgcaatgggcatcgccggagatacgcgcgactccctgctcagcacccacccttcgctggacaaccgtatcgcccgcctcaaatcgctttaa

SEQ ID NO: 43912 - DNA, 303 bp, Neisseria meningitidis
atgaccgcgcaacaccaatccgacacgctcttgcaccgtctgaacaccctgccgccgaaacgttacggcgttttcctattgaacgacgattacaccacgatggaatttgtcgtcgaaatcctgaccgaaatctttatgctcggacaagaacaggcggtagcggtaatgctcttggttcatcacgaaggcaaaggcctgtgcggcacttacacgcgcgatattgcccaaaccaaacaacaacaagtcatgcagcgggcaaaagccgaagggcatccgctgcaatgtattgtcgaggagatttaa

SEQ ID NO: 43913 - DNA, 732 bp, Neisseria meningitidis; identical to SEQ ID NO: 41210

SEQ ID NO: 43914 - DNA, 339 bp, Neisseria meningitidis
atgaaatatatcgtatcaatctctctggctatgggattggctgcctgttcgtttgggggatttaaaccaaatccgtgggacgccgcgtcattttgggaattgaaaaattacgccaatccctatccgggatcagcctcggcggcacttgaccaatatccatcgaaagcaagacgaaggcaactgaaagacatgcaagagtgcggctatgacccaatagacggcggaaagtctgaagcagatgcctgcctgaggaaaaaaggctggtgtcgtaagggtttcgacccttatcccgaaaacaaaaaatacgaatggcctcgagaagaaggaaaaacaaaatga

SEQ ID NO: 43915 - DNA, 1332 bp, Neisseria meningitidis
atgaacacaacatcccaatttaccagtaatttctggaatatatatattgcagttattgtcttactgagctttatcgctttggcttggctgctgctgtctcaaaatgttgtcaaacgtccgaagaagggcgaagaagtacaaactacgggtcatgagtgggacggcattgccgaatacgacaatccgctgccccgctggtggttttggctgtgtgttttgacgtggctgttcggtatcggttatttggttatgtatccgggtgtcggcgactacaaaggtctgctgaaatggaccagccataaccaatatgaaaaagaggtcaaaaaagccgatgagcaatacggcaaactgtatgccaagtttgcggatatgccgattgaaaaagtggcaaaagaccctcaagccaagcaaatcgcccaaaacctgtttaacacttattgtatccagtgccacggctctgatgctaaaggctctaaaggttttccgaatctgaccgatagcgattggttgtggggcggtgatcccgataaaatccacgagaccatcgaaaaaggccgtgttgcgactatgcctgcctggggtcctgctttgggcgaagaaggcgtgaaagacgttgcccattatgtgatgtccctttcaaaacccgaaggtcagtatgatgaggaacgtgccgcgcgcggacaagccttgttcagcggtccgcctgccaactgtttcacttgccacggcgataagggacaaggtatccaaggtttgggtccgaacctgactgatgacgtgtggttgtggggcggtacgcaaaaatccattatcgaaaccattaccaacggtcgcagcagccaaatgcccgcttggggacatttcttggataaagacaaactgcatattatgactgcttatgtatggggtctttccgataaagacggtaaagctccggtgaaaaaagccgagcctgcaccgactcccgcaccggcggcagaacccgcagcctctgctcctgcagaagcagcacaagccgtgtccgaagccaaacctgccgcagcagaacctaaagccgaggaaaaagctgcacctgctgccaaagcggacggcaaataggtttatgaaaccgtttgtgccgcctgccatggcaatgcgattccgggtattccccatgtaggcatcaaagccgattgggccgaccgcatcaaaaaaggcaaggacacgttgcacaaacacgcgatcgaaggtttcaatacgatgcccgcaaaaggcggtcgcggcgatttgagcgatgatgaggttaaagctgcggttgactatatggtcaaccagtcaggcggcaaattctaa

SEQ ID NO: 43916 - DNA, 234 bp, Neisseria meningitidis
atggaagccactgtctatctcgaagacaacgaatacatcgccttgtgcgacctcttgaaattggtcggacttgccgaaagcggcggacaggcgaaagcgtttatcgccgaagggctggtgttgcgcaacggcgaaaccgaaacccgtaaaaccgccaaaatacgcggcggcgaagtcatcgagtttgacggcgctcgcttggaaatcgccgatggatacgaccctgaagtataa

SEQ ID NO: 43917 - DNA, 318 bp, Neisseria meningitidis
atggtagtacgcggcggaatctatctggtctccttagacccgaccgtaggaagcgaaatcaaaaagacacgtccttgtgtcgtagtctctcctcctgaaatacacaactatctcaagactgtgctgatcgttcccatgacgagcggaagccgtcctgccccgttccgcgtcaatgtccgctttcaggataaagacggtttgcttttgcccgaacagattagggctgtggataaagccggattggtcaaacatcttggaaatttagacaacagtacggctgaaaaactgtttgcagtattgcaggagatgtttgcctga

SEQ ID NO: 43918 - DNA, 822 bp, Neisseria meningitidis
atgacgtttgataaatggttgggcttgtcaaaactgcctaaaaatgaagcaagaatgctgctgcaatatgtttcggaatatacgcgcgtgcagttgttgacgcggggcggggaagaaatgccggacgaagtccgacagcgggcggacaggctggcgcaacgccgtctgaacggcgagccggttgcctatattttaggtgtgcgcgaattttatggcagacgctttacagtcaatccgagcgtgctgattccgcgccccgaaaccgaacatttggtcgaagccgtattggcgcgcctgcccgaaaacgggcgcgtgtgggatttggggacgggcagcggcgcggttgccgtaaccgtcgcgctcgaacgccccgatgcgtttgtgcgcgcatccgacatcagcccgcccgcccttgaaacggcgcggaaaaatgcggcggatttgggcgcgcgggtcgaatttgcacacggttcgtggttcgacaccgatatgccgtctgaagggaaatgggacatcatcgtgtccaacccgccctatatcgaaaacggcgataaacatttgttgcaaggcgatttgcggtttgagccgcaaatcgcgctgaccgacttttcagacggcctaagctgcatccgcaccttggcgcaaggcgcgcccgaccgtttggcggaaggcggttttttattgctggaacacggtttcgatcagggcgcggcggtgcgcggcgtgttggcggagaatggtttttcaggagtggaaaccctgccggatttggcgggtttggacagggttacgctggggaagtatatgaagcatttgaaataa

SEQ ID NO: 43919 - DNA, 375 bp, Neisseria meningitidis; identical to SEQ ID NO: 37856

SEQ ID NO: 43920 - DNA, 210 bp, Neisseria meningitidis
atgaagaaaatgttcgtgctgttctgtatgctgttctcctgcgccttctcccttgcggcggtaaacatcaatgcggcttcgcagcaggagttggaggcgctgccaggcataggccctgcggtgctggcgaagctgaaggatcaggcttccgtcggcgcgcccgcaccaaaaggcccagccaaaccagtgctgcccgcggataaaaaataa

SEQ ID NO: 43921 - DNA, 300 bp, Neisseria meningitidis
atgaagaaaatgttcgtgctgttctgtatgctgttctcctgcgccttctcccttgcggcggtaaacatcaatgcggcttcgcagcaggagttggaggcgctgccgggcataggcccggcgaaggcgaaggccattgcggaataccgtgcgcaaaacggtgcgttcaagtctgtagacgatttgaccaaggtaaagggcatcggccctgcggtgctggcgaagctgaaggaccaggcttcggtcggcgcgcccgcaccaaaagccccagccaaaccggtgctgcccgcggataaaaaatag

SEQ ID NO: 43922 - DNA, 300 bp, Neisseria meningitidis; identical to SEQ ID NO: 43921

SEQ ID NO: 43923 - DNA, 300 bp, Neisseria meningitidis; identical to SEQ ID NO: 43921

SEQ ID NO: 43924 - DNA, 540 bp, Neisseria meningitidis
atgaacatcattgataccgccattcctgacgtaaaactgcttgagccccaagtcttcggcgacgcgcgcggcttttttatggaaaccttccgcgacgagtggtttaaaacccaagtctgcgaacgcaccttcgtgcaggaaaaccactccaaatccggcaaaggcgtattgcgcggcctgcactatcaaactgaaaacacacaaggcaaactcgtacgcgtggttgtcggcgaagtattcgacgtggccgtcgatatgcgtaaagactcccccactttcggcaaatgggtaggcgaaattctgtccgcagaaaacaaacgccaactgtgggtacccgaaggtttcgcacacggcttctatgtactgagcgatgaagccgagttcgtctataaatgcacagactattacaaccccaaagccgaacactcgctgatttggaatgatccgaccgtcggcatcgactggccgttgcaaggcgagccgaacctgtcgcctaaagacttggcaggcaaagtattgtctgaagcggtaacgttttaa

SEQ ID NO: 43925 - DNA, 867 bp, Neisseria meningitidis
atgaaaggcatcatactggcaggcggcagcggcacgcgcctctaccccatcacgcgcggcgtatccaaacagctcctgcccgtgtacgacaaaccgatgatttattaccccttgtcggttttgatgctggcgggaatccgcgatattttggtgattaccgcgcctgaagacaacgcctctttcaaacgcctgcttggcgacggcagcgatttcggcatttccatcagttatgccgtgcaacccagtccggacggcttggcacaggcatttatcatcggcgaagaatttatcggcaacgacaatgtttgcttggttttgggcgacaatattttttacggtcagtcgtttacgcaaacattgaaacaggcggcagcgcaaacgcacggcgcaaccgtgtttgcttatcaggtcaaaaaccccgaacgtttcggcgtggttgaatttaacgaaaacttccgcgccgtttccatcgaagaaaaaccgcaacggcccaaatccgattgggcggtaaccggcttgtatttctacgacaaccgcgccgtcgagttcgccaaacagctcaaaccgtccgcacgcggcgaattggaaattaccgacctcaaccggatgtatttggaagacggctcgctctccgttcaaatattgggacgcggtttcgcgtggctggacaccggcacccacgagagcctgcacgaagccgcttcattcgtccaaaccgtgcaaaatatccaaaacctgcacatcgcctgcctcgaagaaatcgcttggcgcaacggttggctttccgatgaaaaactggaagaattggcgcgcccgatggcgaaaaaccaatacggccaatatttgctgcgcctgttgaaaaaataa

SEQ ID NO: 43926 - DNA, 2274 bp, Neisseria meningitidis; identical to SEQ ID NO: 37870

SEQ ID NO: 43927 - DNA, 552 bp, Neisseria meningitidis
atgaaagttttgaacggttggtcggacaggaagatgtggcgggttttgagtgctttgccgataggcgtggtgttttttgatttgatctacggttttgtgttgaatgtgttgcagggtttggatttgcagcgtgccgtgccggattcggaaggcgtgttggcggttacgcccgatattgcattcaacagtttgcagattgtcgccaacggcggtatggcggcggtggtctgtttcgggttggcggttgtgtttttgctcaaccgttcggtgcggcggcggcaggtgttggaaatcggggtgttccggatgttggggctggtggcggtattggcgttcagcgcgccgtcggtgtgggagtgggcgaacgcgctgccgctgctgctgaagggcgcggacgtggtcaatacggggaatgcgcgttatgtgctgacggctttgtgtatgccctttccggcggtgtcgtgcgtcatcgggctggtggggcggttcaggcttcagacggcatcgggcagggcggcaaagtcagggggtgcgggcaaggcggacggatag

SEQ ID NO: 43928 - DNA, 558 bp, Neisseria meningitidis
atgatgcaaaaacacaaatgtctaatagattttattttgactgttgccagccaaattgcttatgctgacttacctttaagtttggaagaattattgactgacaagggtaaattcaaactagaaagcagtattagctacatcaacactgaacgcaatcaaagcgaatttgctaatcctatttatgtgcaaaccagcgcaacgaaaattgcaactgtaatggctatgatgattacacctgtaatggcgcaaaatttagacagccaagtttttgacagccaaaatgtgaaagcaattcaattatcacaggctgaaatgaaagaaacacaaggtgaatttgttcccattattgcagccgctgcttttggcggtgcattaggtgcatgggggtatcatggtgctaatttgtataatcatggtaaattaggaactgcgcaaggcgcggctactgcgacaggaatcggtgcggcaacaggagtagcggcaaaacagggctggctgctgctgccggaggcggattggctgggaatttggcatggagaccgggtattcatgcactag

SEQ ID NO: 43929 - DNA, 666 bp, Neisseria meningitidis
atgatgatgcacgcttctgtccaaagccgtttcgcaccgatactttatgttttgattttctttgccggttttttgaccgcgcaaatctggttcaatcagaaagcctatactgaagagctgcctccgcttctgtccgcattgtccgccgtcgcgctggtgtggctggcgtgggcgttcgtgtcggcgcgttcaaaggccaaggcggaaaagttctaccgcgaaaaaatgatacagaacgaaagcatacaccccgtcctgcacgcctctttgcaacacttggaacacaagccgcaaatactcgccctgctggtcaaaaaccacggcaaagggatggcggaacaggtcaggttcaaggcggaagtgctgcccgacgacgaagacgcgcgcacgattgccgccgagttggcaaaaatggatatgttcgcattggggacggacgcggtcgcctcgggcgaaacctatggacgcgtgttcgccgatattttcgagttgtcggcggctttggaagggcgcgcgttcaaaggaatgttgaaactgacggcggaatataaaaacatcttcggcgatgcctgccgttcggaaacggcgttggagttgggcgcactcaatcaggcgttgcaggagatttcaaaaacatcggaaaagtccaaacggatattttattga

SEQ ID NO: 43930 - DNA, 1218 bp, Neisseria meningitidis
atgcaacgtcgtattataaccctgctctgcgcggcaggtatggcattctcaacacaaactttggcggcaaatttggaggtgcgcccgaacgcgccggaacgctacacggtcaaacagggcgacaccctgtggggcatttcgggcaaatacctgtacagcccgtggcaatggggccgcctgtgggacgcgaaccgggatcaaatccacaatcccgacctgatttatccggaccaggtattggtgttgcgccacgttgacggcgaaccgcgcctcggcttggaacagacagacggcatccccgtcgtcaaaatgagtccggataaggaagtgtccggatacggtattcccgccatcgatgtcaacttctaccgcatctttatgcggcatccgcaaatcgtttcccgcaaagaaaccgctgccgcgccgcgcctgctctcgggcccggaaggcaggctgctgtacaccaaaggcaccagggtttacaccaaaggcctgaaagagccgggccgctacctgacctaccgaatcaataaaaacatcaccgatccggatacgggtaaattcctcgggcaggaagtcgcattcagcggcatcgtgcgctccctcgactataccgactctgtcctcgaacaacgctcgaaacaggctggagaacggccgaaagacaacgaataccatacccgcacccatcctttgattaccccgctgcgcaccccttcgatacagccgctggtggtcgaaaccgccatttccgaaatacagcagggcgactacctgatgaaaatgccggaagacaccgaccgcttcaacatgatgccgcacgaaccgtcccgcccggttcaggctaaaatcgtttccgtgtttgaaggcacaaggattgccggccagtttcaaaccatcaccatcgacaaaggcgaggcggacggtttggacaaaggcacggttttgagcctctacaaacgcaagaaaacgatgcaggtcgacctctccaacaatttcaaaagcagggataccgtcgagctgatttccactcctgccgaagaagtgggcttggcaatggtttaccgcacctccgaacacctgtcgtccgccatcattttggaaaacatctccgatatttccgtaggcgacaccgccgccaatccgggacgcgatttggacaatataccggatcagggccgcagccgcgtgaagtttggcttcaaccgctccgaataa

SEQ ID NO: 43931 - DNA, 927 bp, Neisseria meningitidis
atgaaagtcatcttcgccggcacgcccgattttgccgccgccgccttaagagccgttgccgccgccggttttgaaattccgctggtgctgacccagcccgaccgtccgaaagggcgcggtatgcaactgactgccccgcccgtcaaacaagccgcgctggaactcggtttgcgcgtcgaacagcccgaaaagctgcgcaacaacgccgaagccctgcaaatgctcaaagaggtcgaggcagacgtaatggtggttgccgcctacggtttgattctgccgcaggaagtgttggatacgccgaaacacggctgcctcaacatccacgcttcgctgttaccccgttggcgtggcgcggcgccgattcaacgcgcgattgaagccggcgatgccgagacaggcgtgtgtattatgcagatggacatcggtttggacaccggcgatgtggtcagcgaacaccgctacgccatccaaccgaccgataccgccaacgaagtccacgacgcgctgatggaaatcggtgcggcggcggttgttgccgatttgcaacagcttcaaagcaaaggccgtctgaacgcggtcaaacagcccgaagaaggtgttacttacgcgcaaaaattgagcaaagaagaggcgcgtatcgattggagcaaaagcgcggcggttatcgaacgcaaaatccgcgccttcaaccccgtgcctgccgcgtgggttgagtatcagggcaagccgatgaaaatccggcgggcggaagtggtggcgcaacaaggcgcggcaggcgaagtgttgtcctgttcggcggacggtttggtcgttgcctgcggcgaaaacgcgctgaagattaccgaattgcagcctgccggcggcaggcggatgaatatcgcggcgtttgcagcaggacggcatatcgaagcaggggcgaagctgtaa

SEQ ID NO: 43932 - DNA, 570 bp, Neisseria meningitidis
atggcggcaggcaaacataccaaacacagcaaccgggtacgcattatcggcgggcaatgccggggcaggaaattgagtttcacatccgccgacggactgcgtccgacacccgacagcgtgcgtgaaaagctgtttaactggctgggacaggatttgacgggtaaaacggttttggatctcttcggaggcagcggcgcactcggtatagaagccgcttcgcgcaacgccaaacgcgtgctgatttcggataacaaccgccaaaccgtgcagaccttgcagaaaaacagtcgcgaactgggtttggggcaggtgcaaatcgtcttttcagacggcatcgcatatttgaagaccgtatccgaacagtttgatgttgtctttctcgacccgccgtttgcatggcaggactggcaaatcctgttcgatgccttgaagccgtgcctgaacccccgggcattcgtctatctcgaggcgggtacgctgccgaatattcccgattggctgacggaatatagagaagggaaatcggggcagagtacatttgaattaagggttttccaagtggctgaataa

SEQ ID NO: 43933 - DNA, 372 bp, Neisseria meningitidis
atgccaactatcaaccaattagtacgcaaaggccgtcaaaagcccgtgtacgtaaacaaagtgcccgcactggaagcttgcccgcaaaaacgtggcgtgtgcacccgtgtatacacaactacccctaaaaaacctaactctgcattgcgtaaagtatgtaaagtccgcctgaccaacggttttgaagtcatttcatacatcggcggcgaaggtcacaacctgcaagagcacagtgtcgtattgattcgcggcggtcgtgtaaaagacttgccaggtgtgcgttaccacactgtacgcggttctttggatactgcaggtgttaaagaccgtaaacaagcccgttccaaatacggtgctaagcgtcctaaataa

SEQ ID NO: 43934 - DNA, 4176 bp, Neisseria meningitidis
atgaatttgttgaacttatttaatccgttgcaaactgccggcatggaagaagagtttgatgccattaaaatcggtattgcctctcccgaaaccatccgctcatggtcttatggcgaagtcaaaaaacctgaaaccatcaactaccgtacgttcaaacctgagcgtgacggtttgttctgtgccaaaatctttggcccggtcaaagactacgaatgcttgtgcggaaaatacaaacgcttgaaatttaaaggcgtaacgtgtgaaaaatgcggcgtggaagtaaccctgtccaaagtgcgccgcgaacgcatgggtcatatcgaattggctgcgcccgtcgcacatatttggttcttaaaatccctgccttcccgcttgggtatggtgttagacatgactttgcgcgacatcgagcgcgtattgtactttgaagcatttgtggtaaccgatcccggtatgactccgctgcaacgccgccaattgctgactgaagacgattactacaacaagctggacgaatacggcgacgatttcgatgccaaaatgggtgcggaaggtatccgcgaattgctgcgtaccctgaatgtagcgggcgaaatcgaaatcctgcgccaagagttggaatcgaccggttccgacaccaaaatcaaaaaaatcgccaaacgcttgaaagtattggaagccttccatcgttccggtatgaaactggaatggatgattatggatgtgctgccggtattgccgcctgatttgcgtccgttggttccattggatggtggtcgttttgccacttccgatttgaacgatttgtaccgccgcgttattaaccgtaacaaccgtctgaaacgtctgttggaactgcatgcgcctgacatcatcgtccgcaacgaaaaacgtatgttgcaagaagcagttgactcgctgttggataacggccgtcgcggtaaagccatgaccggcgccaacaaacgcccgctgaaatcattggcagacatgattaaaggtaaaggcggtcgcttccgtcaaaacctgttgggcaaacgtgtggactactccggccgttccgtgattaccgtaggcccgtacctgcgtctgcaccaatgcggtttgccgaaaaaaatggctttggaactgttcaaaccgttcattttccacaaattggaaaaacaaggtttggcctctaccgttaaagcagcgaaaaaattggtagagcaagaagtaccggaagtatgggacatcttggaagaagtcatccgcgaacatccgattatgctgaaccgtgcgccgaccctgcaccgtttgggtattcaagcgttcgaacctatcttgattgaaggtaaagcgattcagttgcacccattggtgtgtgctgcgttcaacgccgactttgacggcgaccaaatggcggtacacgttccattgagcttggaagcacaaatggaagcacgcacgctgatgctggcttcaaacaacgtattgtctccggccaacggcgaaccgattatcgtaccttcccaagacatcgtattgggcctgtactatatgactcgcgatcgtatcaatgccaaaggcgaaggcagcctgtttgccgatgtgaaagaagtgcatcgcgcataccataccaaacaggtcgagctgggtacgaaaatcaccgtacgtctgcgcgaatgggtgaaaaacgaagcaggtgagtttgagcctgtcgttaaccgttacgaaacaaccgtcggccgtgcattgttgagcgaaatcctgccgaaaggcctgccgtttgaatatgtcaacaaagcgttgaagaaaaaagaaatttctaaactgattaacgcatcgttccgcctgtgcggcttgcgcgatacggttatctttgctgaccacctgatgtacaccggtttcggatttgcggcaaaaggcggtatttccattgccgttgacgatatggaaattccaaaagaaaaagcggccttgctggctgaagccaatgccgaggttaaagaaatcgaagaccaataccgtcaaggtttggttaccaacggcgaacgctacaacaaggtggtcgatatttggggtcgtgccggcgataagattgctaaagcgatgatggacaacttgtccaaacaaaaagttatcgaccgtgccggcaacgaagtcgatcaagagtcattcaactccatttatatgatggcggactccggtgcccgtggttctgcagctcagattaaacagttgtccggtatgcgtggcttgatggcaaaacctgacggctcgattattgaaacgccgattacctcaaacttccgtgaaggtctgaccgtattgcaatactttattgcgacccacggtgcgcgtaagggtttggcggataccgcattgaaaaccgcgaactccggttacctgactcgtcgtctggtagacgtaactcaagatttggtcgttgttgaagacgattgcggtacttcagacggctttgtcatgaaggcagtggtacaaggcggtgatgtgattgaagcattgcgcgatcgtattttgggtcgtgttaccgcgtctgacgttgtcgatccgtcaagtggcgaaaccttggttgaagccggtacgttgctgactgaaaaactggtggatatgatcgaccaatccggtgtcgatgaagtcaaagtccgtacgccgattacttgtaaaacccgtcacggcctgtgtgcacactgttacggtcgtgacttggcacgcggcaaactggttaacgccggtgaggcagtcggtgtgattgctgcacaatccattggcgaaccgggtacccagttgaccatgcgtacgttccacatcggtggtgcggcatcccgtgcggcagcagccagccaagtggaagccaaatccaacggtacggcacgattcagcagccagatgcgctacgttgccaacaacaaaggcgagttggttgtcatcggccgttcttgtgaagtcgtgattcacgacgatatcggccgtgaacgcgaacgccacaaagtaccttacggtgccatcctgctggtacaagacggtatggccattaaagccggtcaaaccttggcaacctgggatccgcatacccgtccgatgattaccgaacacgcaggtatggtgaaattcgaaaacgtggaagagggcgttaccgttgccaaacaaaccgatgatgtaaccggtttgtccactttggtggtgattgacggtaaacgtcgttcctctagtgcttccaaactgctgcgtccgactgtgaaactcttggacgaaaacggcgtggaaatctgtattcccggtacttctactccggtatccatggcattccccgttggtgcggtgattaccgtacgcgaaggtcaggaaatcggtaaaggcgacgtattggcgcgtattccgcaagcctcttccaaaacccgcgacattaccggcggcctgccgcgcgttgccgaattgtttgaagcacgcgtgccgaaagatgccggtatgttggcggaaattaccggtaccgtttccttcggcaaagagaccaaaggcaagcaacgtctgattgttactgacgtggacggtgtagcatacgagaccttgatttccaaagagaaacaaattctggtacacgacggtcaagtggtaaaccgcggtgaaaccatcgtggacggcgcggtcgatccgcacgatattctgcgtttgcaaggtatcgaagcactggcacgctacattgtccaagaggtgcaagaggtttaccgtctgcaaggtgtgaagatttctgataaacacatcgaagtcatcatccgtcaaatgttgcgccgtgtgaacattgcggatgccggcgaaaccgggttcattaccggagagcaggtcgaacgcggcgatgtgatggcggccaatgaaaaagctttggaagaaggcaaagaaccggcgcgttacgaaaacgtattgctgggtattaccaaagcttccctgtccaccgacagcttcatttctgccgcatcgttccaagaaacgacccgcgttctgaccgaagccgcgattatgggcaaacaagacgagttgcgtggtttgaaagaaaacgtcatcgtcggtcgcttgattcctgccggtaccggtttgacttaccaccgcagccgtcatcaacaatggcaagaggtggaacaggagactgccgaaacccaagtaacggatgaataa

SEQ ID NO: 43935 - DNA, 321 bp, Neisseria meningitidis
atgggtatgaatcaacaacgtttgactcaagtgattttggcacctatcgtttctgaaaaaagcaacgtattggctgaaaaacgtaaccaaatgacgtttaaagttttggcaaatgcaaccaaacctgaaattaaagcggctgttgagctgctgttcggcgttcaagttgcagacgttactactgttaccattaaaggtaaagttaaacgttttggtcgcactttaggtcgtcgcagcgatgttaaaaaggcttatgtaagcttggctgccggtcaagagttggatttggaagccgctgctgcagctgcagataaggaataa

SEQ ID NO: 43936 - DNA, 714 bp, Neisseria meningitidis
atgatggtttatataatgaatgctttcgatataaagtcgacaaagatggacgtattgtctatatctttgcatacgtcagacttgtttgatttggaagatgtgctggtcaaattgggcaagaagtttcaagagtctggtgttgttccatttgtgctggatgttcaagagtttgattatcccgagtctttggatcttgctgcattggtttcgttgttttcaaggcatggtatgcaaattttgggtctgaagcattctaatgaacgttgggctgctgcggctatgaagtatcatttgctgttttgtctgtctcattcggaaaatgttaaagaactgggtcaggttgaggtgcagaaaacggaggatggtcagaaagcaaggaaaacagtattgattacatcccctgtccgtaccggtcagcaggtttatgccgaagatggcgatttgattgttacgggggcggtcagccagggggcggaattgattgcggatggcaatatacatatttatgcgccgatgagggggcgtgctttggccggtgccaagggtgatacttctgcccgcatatttatccactccatgcaggcagaactggtttctgtggcgggtatttaccgtaattttgaacaggatttgccgaaccatctgcacaagcagccggtacagatattgttgcaggataaccgattggttatcagtgcaattggctcagagtaa

SEQ ID NO: 43937 - DNA, 1185 bp, Neisseria meningitidis
atgacaccacaagtcctgaccatattaggcagtaccggcagcataggcgaaagcacgctggacgttgtctcccgccaccccgaaaaattccgcgtattcgcgctggcagggcataagcaggtcgagaaactggcggctcaatgtcaaacgttccgccccgaatatgccgtcgttgccgatacggaacacgccgcccggcttgaagccctgttgaaacacgacggcacggcgacacaggttttacacggcgcgcaggcattggttgacgttgcgtctgccgacgaagtcagcggtgtcatgtgcgccatcgtcggggcggcggggctgccttccgcgctcgcagcggcgcaaaaaggcaaaactatttatctggcgaacaaagagacgttggtggtttccggcgcgttgtttatggaaaccgcccgtgcaaacggcgcggcagtgttgcccgtcgacagcgaacacaacgccattttccaagttttgccgcgcgattacacaggccgtctgaacgaacacggcatccgttcgattatcctgaccgcttccggcggcccgtttttaacgaccgatttaggcgcgttcgacagcattacgcccgcccaagcggtcaaacaccccaattggcgtatgggacgcaaaatctccgtcgattccgccaccatgatgaacaaaggtttggagctgattgaagcgcattggctgttcaactgtccgcctgacaagctcgaagtcgtcatccatccgcaatccgtgatacacagcatggtgcgctaccgcgacggctccgtgttggcacaactgggcaatcccgatatgcgtacgcccatcgcgtattgtttgggcttgcccgagcgcatcgattcgggtgtcggcgaccttgatttcgacgcattgtccgcgctgaccttccaaaagcccgactttgaccgcttcccctgcctgaagctcgcctatgaagccatgaacgcaggcggagccgcgccctgcgtattgaacgccgccaacgaagccgccgtcgccgcctttttggacgggcagattaagtttaccgacattgccaaaaccgtcgcccattgtctcgcacaagacttttcagacggcataggcgacataggggggctcttggcgcaagatgcccggacacgcgcacaagcgcgggcatttatcggcacactgcgctga

SEQ ID NO: 43938 - DNA, 1128 bp, Neisseria meningitidis
atgaacacctcgcaacgcaaccgcctcgtcagccgctggctcaactcctacgaacgctaccgctaccgccgcctcatccacgccgtccggctcggcggggccgtcctgttcgccaccgcactcgcccggctgctccacctccaacacggcgaatggataggcatgaccgtcttcgtcgtcctcggcatgctccagtttcaaggggcgatttactccaaggcggtggaacgtatgctcggcacggtcatcgggctgggcgcgggtttgggcgttttatggctgaaccagcattatttccacggcaacctcctcttctacctcaccgtcggcacggcaagcgcactggccggctgggcggcggtcggcaaaaacggctacgtccctatgctggcggggctgacgatgtgcatgctcatcggcgacaacggcagcgaatggttcgacagcggcctgatgcgcgcgatgaacgtcctcatcggcgcggccatcgccattgccgccgccaaactgctgccgctgaaatccacactgatgtggcgtttcatgcttgccgacaacctgaccgactgcagcaaaatgattgccgaaatcagcaacggcaggcgtatgacgcgcgaacgtttggagcagaatatggttaaaatgcgccaaatcaacgcacgcatggtcaaaagccgcagccacctcgccgccacatcgggcgaaagccgcatcagccccgccatgatggaagccatgcagcacgcccaccgtaaaattgtcaacaccaccgagctgctcctgaccactgccgccaagctgcaatctcccaaactcaacggcagcgaaatccggctgctcgaccgccacttcacactgctccaaaccgacctgcaacaaaccgtcgcccttatcaacggcagacacgcccgccgcatccgcatcgacaccgccatcaaccccgaactggaagccctcgccgaacacctccactaccaatggcagggcttcctctggctcagcaccaatatgcgtcaggaaatttccgccctcgtcatcctgctgcaacgcacccgccgcaaatggctggatgcccacgaacgccaacacctgcgccaaagcctgcttgaaacacgggaacacggctga

SEQ ID NO: 43939 - DNA, 558 bp, Neisseria meningitidis
atgattaacgatattcaaaaaacagccgaaggcaaaatgcagcgttcggtcgaagtactgaaagaaaatctggcgaaagtgcgtaccggccgcgcgcataccggtctgctcgaccaagtggaagtcgaatactggggcagcatggttcccgtcagccaagttgccaacgtaacgcttctggacgcgcgcaccatcggcgtgaaaccgtttgagggcaatatggcggccaaagtcgagaaagccatccgcgattcaaacttgggactgaacccggcagctgtcggcgacctgatccgcgtgccgatgcccatgctgaccgaggaacgccgcaaagacctgattaaagtcgtacgcggcgaagcggaagaaggccgcgtctctatccgcaacgtgcgccgcgatgccaacgaccacatcaaaaaactcctcaaagacaaagaaatttccgaagacgaggcacgtcgcggcgaagaagcggttcaaaaactgaccgacaaatacattaccgaagccgacaaactcctgactgccaaagaagaagatttgatggcaatttaa

SEQ ID NO: 43940 - DNA, 1887 bp, Neisseria meningitidis
atgatttaccccaaaacctacgacgttatcgtcgtcggcggcggacacgccggcacggaagccgcgcttgccgccgcacgcatgggcgcgcagacgcttttgctctcacacaatatcgaaacgctcggacaaatgtcgtgcaacccttccatcggcggcatcggcaaagggcatttggtgcgcgaactcgacgcgctcggcggcgcgatggcgttggcaaccgacaaatccggcatccagttccgccgtctgaacgccagcaaaggcgcggcagtacgagccacgcgcgcacaggccgaccgcattttgtataaagccgccatccgcgaaatgttggaaaaccaagaaaacctcgaccttttccaacaagccgtcgaagacgtaacgctcgagggcgaacgcatcagcggcgtaatcaccgcgatgggcgtggagtttaaagcacgcgccgtggtgctgaccgcaggcacgtttttgtccggcaaaatccacatcggtttggaaaactacgaaggcggacgcgccggcgaccccgccgccaaatcgttgggcggacgtttgcgcgaattgaagctgccgcaaggccgtctgaaaaccggcacgccgccgcgtattgacggacgcacgattgacttctcccaactgaccgaacagcccggcgacacgcccgttccggtcatgtccgtgcgcggcaacgccgatatgcacccgcgccaagtgtcctgctggattacgcataccaacacgcaaacccacgacatcatccgctcaggcttcgaccgcagcccgatgtttaccggcaaaatcgaaggcgtgggcccgcgttattgtccgtctatcgaagacaaaatcaaccgcttcgccgataaagacagccaccagattttcctcgaacccgaaggcctgaccacgcacgaatactaccccaacggtatctccaccagcctgccgttcgacatccaaatcgccctcgtccgcagcatgaaaggtttggaaaacgcccatatcctgcgccccggttacgccatcgaatacgactacttcgatccgcgcaacctcaaagcaagcctcgaaaccaaaaccattgagggactgtttttcgccgggcaaatcaacggtacgaccggctacgaagaagccgccgcgcaaggtttattggcaggcgcgaacgccgtgcaatatgtgcgcggacaagacccgctcctgctgcgccgcgaacaagcctacctcggcgtattggtggacgacctcatcaccaaaggcgtgaacgaaccttaccgaatgttcaccagccgcgccgaataccgcctgcaactcagggaagacaacgccgatatgcgcctgaccgaagacggctacaaaatcggcttggtgggtgaagcgcaatggcgcatgttcaacgaaaaacgcgaagccgtcgaacgcgaaatccaacgtttgaaaacaacgtggtacacgccgcaaaaactcgccgaagacgaacaaatccgcgtgttcggacaaaaactcagccgcgaagccaacctgcacgatttgttacgccgcccgaacctcgactacgccgcgctgatgacgctcgaaggcgcgatgccgtctgaaaacctctccgccgaagtcatcgaacaagtcgaaatccaagtcaaataccaaggctatatcgaccgccaaaacgaagaaatcgacagccgccgcgacatcgaaaccttaaaactgcccgacggcatcgattacggcaaagtcaaaggcttgtcggcagaagtgcagcaaaagctcaaccagcacaaacccgaaaccgtcgggcaggcaagccgcatttccggcgtaacacctgcggcagtggcattgctgatggtgcatttgaagcgcggatttaaagacgcgaaataa

SEQ ID NO: 43941 - DNA, 2760 bp, Neisseria meningitidis
atgaaaagaatgttatttaacgcaacgcaggccgaagagctgcgcgttgccatcgtcgacggacaaaacctgctggatttggacatcgaaacgctgggcaaagaacagcgcaaaggcaatatctacaaaggcatcattacccgcatcgagccgtcgctggaagcgtgtttcgtggattacggaaccgaccgccacggcttcttgccgtttaaagaagtctcccgctcatacttccaagactacgaaggcggacgcgcgcgcatccaagacgtgctcaaagaaggtatggaagtcatcgtccaagtcgaaaaagacgagcgcggcaacaaaggcgcggcgctgaccaccttcatcagcctcgccggacgctatctggtattgatgccgaacaacccgcgcggcggcggcgtatcccgccgtatcgaaggcgaagagcgtcaagagttgaaagccgctatggcggaactcgacattccgaacggcatgagcatcatcgcccgtaccgccggcatcggccgcagtgcggaagagttggaatgggacttgaactacctcaaacaactttggcaggccatcgaggaagcaggcaaagcacatcatgacccctacctgctctttatggaaagctcgctgctcatccgcgccatccgcgactatttccgccccgacatcggcgaaattttggtggacaatcaagaagtttacgaccaagttgccgagttcatgagctacgtcatgccgggcaatataggccgtctgaaactctacgaagaccacacgccgctgttttcccgcttccaaatcgaacatcaaatcgaaagcgcgttttctcgcagcgtcagcctgccttccggtggcgcgattgtgatcgaccacaccgaagccctggtttccatcgacgtgaactccgcacgcgccacacgcggcgcggacatcgaagacaccgcgttcaaaaccaatatggaagccgccgaagaagtcgcccgacaaatgcgcctgcgcgacttgggcggcttggtcgtcatcgacttcatcgacatggaaaatccgaaacaccagcgcgatgtggaaaacgtcctgcgcgacgcgctcaaaaaagaccgcgcacgcgtgcaaatgggcaaactgtcccgcttcggccttttggaattgagccgccaacgtttgaaacccgctttgggcgaaagcagccatgttgcgtgtccgcgctgtgccggtaccggcgtcatccgcggcatcgaatccaccgccttgcacgttttgcgcatcattcaagaagaagcaatgaaagacaacaccggcgaagtacgcgcacaagtgcccgtcgatgtcgccaccttcctgctgaacgaaaaacgcgccgagctgtttgcgatggaagagcgtttggatgtcaacgtcgtcctgattccgaacatccacctcgaaaacccgcactacgaaatcaaccgcatccgcaccgacgacgtagaagaagacggcgaaccgagctacaagcgcgttgccgagccggaagaagacgaatccgccaaaccgttcggcagcgaaagggccaaagccgcccgtcccgaacccgccgtcaaaggcgtgcgccacaccagccccgccccgactgccgcccccgagaaaaaaacctcctggtgggacagcttcaaagcatggctcaaacgcattttcggcggcagcgaaacccaagccgcgcccgctgccgaaacctccgaaaaacgcagcacggcaaaccgcagcggcagccgcgccaacaaccgccgccaaaacccgcgccgcagcaaacgcgaaggcagcaaagtagaagtccgcgaagtggcaggcaaaactgccggacaggaagcgcgcgccgacaaagccgaaacgcgcaacaacggcaaccgccgccgcagcgaacgcggcgaccgtgccgccgaacgcgccaacgaagcggaaatccaaggccgcaacgtacagcctgccgcaaccgttgcagatgccgcaccgtccgaaaccgaagtgcaaaccggaaaacgccgccgcaacggcagccgcagcgaacgcggccaaaccgcgccggaaaccgccgccgttgccgaaacaaccgttcagacagcggaaaacacgccgtccgaaccgcataccgcagaagacaaaggcagcaagcccaaatccgaacgcaaccgccgcgaacgcgacagccgagatgccaaagaacgccgcgagcgcaacaatcagcgcgaccgccgtcaaaacggcaaaaaacgcaatattccgtctgccgccaaaatcgagcagtacctgaatattcacgacaccgccgacaaagtccgttccgccgccgcgcacgttttcggcgaaaccgacgcaaacgcgccgattaccgtcagcattgccgatccggttgcagaaagggatcttccgacagcatctcccgccgtttcaaacggcgacgcaccggtttatgatgcggcggaaaaaatccgccgtgtcaccgccgccatcctgcccgaaggcgtagcaccgaaagccgaagcacaggaaatgccgtctgaaaccgcaacctttacggctgcggcggaacaggcacgggaaaccgcacaaaccggcggactcgtcctgatcgaaaccgaccctgccgcattgaaggcatgggcggcacaacccgaagtccaaaccggacgcggtttgcgccgttccgaacagcccaagccgtctgaagtcgcaaccgtccctgccgaagaaatgatccaagtcgaaacccggcaaggctga

SEQ ID NO: 43942 - DNA, 1977 bp, Neisseria meningitidis
atgaacgaattttcgcttgcccctattgtgattgttttgctggtgtcggtcattacggtgatcctgtgccgcaagttcaacattccctccatgctgggctacctgctggtgggctttttggcggggcccggtatgctcagcctgattccgaaaagccatgcgacggattatttgggtgaaatcgggattgtgttcctgatgttcagcatcggtttggagttctcgctgcccaagttgagggcgatgaggcggctggtgttcgggctgggcggtttgcaggtcggcattacgatgctgtcggtaatgggcatcctgatgctgacgggcgtgccgttcaattgggcgtttgccgtgtcgggcgcgttggcgatgtcgtccacggcgattgtgagccggattttgtcggaaaagacggaattggggcagccgcacggtcagatggcgatgggcgtgctgctgatgcaggacatcgccgtcgtgccgctgatgattctgattcccgcgctggcgggcggaggggacggaaatatttgggcggccttgggtttggcgtttgcaaaaatgctgctgacgctggggctgctgtttttcgtcggcagcaaaattatgtcgcgatggttcaggatggtggcaaaacgcaaatcgtccgaactctttatgatcaatgtgctgctggtaaccttgggtgtggcttatctgactgagctggaaggtttgtctatggcgttgggcgcattcgttgccggcatgctgctttcggaaacggaataccgtttccaagtcgaagacgacatccgcccgttccgcgatattttgctcggctttttctttatcacggtcggcatgaagctggacattcaggcattgatcggcggctggcggcaggtattgatgctgttggcaatgctgctggtgttgaaggcactggttgtgtttgccattgccttcaaaatgaaacattcggtcggcgacagcctcaaaacggctttgtatctcgcgcagggcggcgagttcggcttcgtgatgctggccattgccgggcagcttgatatggtttcgccagaatgggaacaggcggcgacggcggcggttctgctgtcgatgattatcgcgcccttcctcttgggcggcagcgatgcgctggtcgggcgtttggtcaagtcaagctgggacatgaagtcgctcgatctgcacagtatgctggtagaaaccatgagcaagtccgaccatgtgctgattgtcggcttcggcaggggcgggcagacggtcggacgcgtccttgcccaagaggatattccgtatttcgcgctcgacttggacattgcgcgggtgcaggttgccagaagtgcgggcgaaccggtgtcgttcggcgatgcgaaacgcagggaagtattggaagccgccggtctgggacgggcgaaaatggtggtgctgacgctcaacaatatgcacgaaacgcaacacgttttagacaatgtgctgtccatgtatcccaatatgcccgtatatgtgcgcgccaccaacgacgattatgtgaaaacgtttaccgatataggtgcggaagaagccgtgtcggacaccaaagaaaccggactcgtgctggcaggctatgcgatgttaggcaacggcgcgtcgtatcggcacgtctatcagacgatggcaaatatccgccacagccgttatgccgcgttggagggactgtttgtcggtagtgatgatgaggcaggattcggcgaaaacggcgaaactgtccgtcacgcctttcctttggctgcagaagcatacgccgtcggcaaaacagtcggcacgcttccgatggcggcttacggcatcaaactcttgttcgtccgccgccgcaccggccggattgaaaacccggatgcctcgtttacattggaaggcggtgacgtgttggtggtcgcaggcaaaaaagaagaaattatctcttttgaaaactggagtttgcagggaatataa

SEQ ID NO: 43943 - DNA, 1386 bp, Neisseria meningitidis
atgatcagcattttcgatattttcaaaatcggtatcgggccttccagttcgcatacggtcggcccgatgaaggcagccgccgcctttgcggcaggtttggatgcacaggctgttcgcatcgtcatcgacatttacggctcgctcgcactgaccggatacggacacggtacatttgacgcgctgatgctcggtttggaaggcagcctgccgcacgacatcccgcttgccggcattcccgaacgcctcgaacgcatccgcacgcagcacatcctccggctcaacgggcaagaaatccgcttcatccccgaccgcgacctgaacatactcggcaatcaagtgctgcccaaacaccccaacagcctgcgttttaccgcctatgcttcagacggcacggtattgaatgaacaggtttattattcggtcggcggcggctttgtcgttaccgaagaagattttgaccggcaggcggaaacggaaaaagccgttccctatccctataccagttgcgccgaactgcttgcccgatgccgtctgaaccggctcgacatctccgaagtcgtgttggcaaacgaagccgcgcttgccggatgcggcgaagccgaaatccgccgccgcgccgctgccgttgccgatgtgatggaaggctgcatcaaacgcggtttggcggcagacggcgagctgcccggcggattgaacgtccgccgccgcgccccgcagcttgccgccaagctcaaagtcctgcgcgaaaccgaaatcgtcaacacccagctctggccgatggtgtacgccatggcggtcaacgaagaaaacgccgccggcggacgcgtcgttaccgcactgaccaacggcgcggcaggcatcattcccgccgtattgcactatttccgcaagttcaacccccacgccacacaggagcgcgtcgaaaacttcctgctcaccgccggcgcaatcggcatcctctacaaaaccaacgcctccatttccggtgcggatgtcggctgtcagggcgaagtcggcgtagcgtgttcgatggcggcgggcgcatacgccgaagtcatcggcggcacgcccaaacaagtggaaaacgccgctgaaatggcgatggaacaccatttggggctgacttgcgaccccgtcggcgggctggtgcaaatcccctgtatcgaacgcaacggcatcgccgccgaaaaagccctcaaactcggcacgctcgcgcttttggaagacggcacggacaaaaaagtctcgctcgacgaagtcatccgaaccatgctgcaaaccggccgggatatgaaggcgacctacaaagaaacctcgcttgccggactcgccgccacgctccggaaaaaagccgtccccgtatccgtgcgcgtggtcgagtgctga

SEQ ID NO: 43944 - DNA, 873 bp, Neisseria meningitidis
atggaaatatggaatatgttggacacttggctcggtgccgtcccgatacgtgcggaggcggtcgaatccgtggcggcggttgcggctttgctgctggcgcgcgcccttctgttgaatatccacttcaaacggcatccggatttcggcatcgaaagcaagcggcggtttttggttgccagccgcaatataacgctgcttttggtgctgttttcgctggcatttatctggtcggcgcaaatccaaacgctggctttgtcgatgtttgcggtggcggcggcggtcgtcgtggcgacgaaggaactgattatgtgtctgtcgggcagtattttaaggtctgccacccagcaatactcggtcggcgactatatcgaaatcaacggcctgcgcgggcgcgtggtcgacatcaacctgttgaacacgctgatgatgcaggtcggtccgaaccccttggtcggacagcttgcgggaaccaccgtttctttccccaacagcctgttgttgagccaccccgtgcgccgcgacaatattttgggcgactatgtcatccatacggtcgaaatccccgttcccatccatttggattcggatgaagccgtatgccgtctgaaagccgtactcgagcccttgtgcgcgccctacatccccgccatccaacggcatttggaaaacgtgcaggcggaaaaactgtttatcacgcccgccgccagaccgcgcgttacccgcgtgccgtacgatgacaaggcataccgcatcatcgtccgcttcgcttcccccgtttcaaagcggctggaaatccaacaggcggttatggacgaatttttgcgcgtacaataccgcctgttaaatcaccccgccggctccgaaacactttaa

SEQ ID NO: 43945 - DNA, 360 bp, Neisseria meningitidis
atgattaacctagaattgaaagccatcaatctttacgattgtgcctttgaagatttcgttcccgaaatcaaagacaatttttgtgtgggaattgatttagacataggaactgatgatagtgatgctgcagatatattttctgttcgcatatgctctcctaaatggattttgcataattgtttccaaaatcaaagggttaaatggggggcgggtatgatgattatgaatgaatttaatcattctgttattaaatcggaaattgagaaaattcttaaagaatgttcaaaagaaacttgggaaaagtcattgacttatttacttcgttttttttcgtgggaatttgaagattatcagtgctaa

SEQ ID NO: 43946 - DNA, 1452 bp, Neisseria meningitidis
atgctttctttccttagcggcttattgagcttgggtatagaagtcttgtgggtgaggatgttttcgttcgcagcacagtccgtgcctcaggcattttcatttacccttgcctgttttctgaccggtatcgccgtcggcgcgtattttggcaaacggatttgccgcagccgctttgttgatattccctttatcgggcagtgcttcttgtgggcgggtattgccgactttttgattttgggtgctgcgtggttgttgacgggtttttccggcttcgtccaccacgccggtatcttcattaccctgtctgccgtcgtcagagggttgattttcccgctcgtacaccatgtgggtacggatggcaacaaatccggacgacaggtttccaatgtttatttcgccaacgttgccggcagtgcattgggtccggtccttatcggctttgtgatacttgatttcttgtccacccaacagatttacctgctcatctgtttgatttctgctgctgtccctttgttttgtacactgttccaaaaaagtctccgactgaatgcagtgtcggtagcagtttccctaatgttcggcatcctcatgttcctactgccggattctgtctttcaaaatattgctgaccgtccggataggctgattgaaaacaaacacggcattgttgcggtttaccatagagatggtgataaggttgtttatggggcgaatgtatacgacggcgcatacaataccgatgtattcaatagtgtcaacggcatcgaacgtgcctatctgctaccctccctgaagtctggcatacgccgcattttcgtcgttggactgagtacaggttcgtgggcgcgcgtcttgtctgccattccggaaatgcagtcgatgatcgttgcggaaatcaatccggcataccgtagccttatcgcggacgagccgcaaatcgccccgcttttgcaggacaaacgtgttgaaattgtattggatgacggtaggaaatggctgcgtcgccatcctgatgaaaaattcgacctgattttgatgaatacgacttggtactggcgtgcctattccaccaacctgttgagtgcggaatttttaaaacaggtgcaaagccaccttaccccggatggtattgtaatgtttaataccacgcacagcccgcatgcttttgctaccgccgtacacagtattccctatgcataccgctatgggcatatggtagtcggctcggcaaccccggtagttttccctaataaagaactgctcaagcaacgtctctcccggttgatttggccggaaagcggcaggcacgtatttgacagcagcaccgtggatgctgcagcacaaaaggttgtctctcgtatgctgattcagatgacggaaccttcggctggggcggaagttattaccgacgataatatgattgtagaatacaaatacggcagagggatttaa

SEQ ID NO: 43947 - DNA, 1077 bp, Neisseria meningitidis
atgcaggaatggttccaaaacctctttgccgcaacgctcggtctgggcgatttgggtattactgtaggcttggtggtatccgtcatcgtcaaaattgtgattatcctgattccgctgattctgaccgtcgcctacctgacttatttcgaacgtaaagtcatcggcttcatgcagcttcgcgtcggtccgaacgtaaccggcccgtggggtctgattcagccgtttgccgacgtgttcaaactcttgtttaaagaagtaacccgtccgaagctgtcaaacaaagccctgttctatatcggcccgattatgtcgcttgccccgtctttcgcggcgtgggcagtgattccgttcaatgaagaatgggtgctgaccaacatcaatatcggtcttttgtacatcctgatgattacctcgctgtcggtttacggcgtgatcatcgcgggctgggcttccaactccaaatattcgttcttgggcgcaatgcgtgcttccgcgcaaagcatttcctacgaaatcgccatgagtgccgcgctggtgtgcgtcgtgatggtgtcgggcagcatgaacttctccgacatcgttgccgcgcaggcaaaaggcatcgcaggcggttcggtattctcttggaactggctgccgctcttccccatcttcatcgtctatctgatttccgccgttgccgaaaccaaccgcgcaccgtttgacgtggcagagggcgagtctgaaatcgttgccggtcaccacgtcgaatattccggcttcgcattcgcgctgttcttccttgccgaatacattttcatgattctgattgccgcgctgacatcgttgatgttcctcggcggctggctgtctcccttcccgcaaagctggggcattgtcggtacgccttccgcattttggatgttcgcgaaaatggcggcggttctgtactggtatctgtggatacgcgccaccttcccacgctaccgttacgaccaaatcatgcgcttgggctggaaagtgctgattccgatcggcttcgcctacatcgtgattttgggcgtgtggatgatttcaccgctgaatttgtggaaataa

SEQ ID NO: 43948 - DNA, 342 bp, Neisseria meningitidis; identical to SEQ ID NO: 37907

SEQ ID NO: 43949 - DNA, 1857 bp, Neisseria meningitidis
atgttgaacaaaatattttcctggttcgagtcccgaatcgacccttatcccgaagccgccccgaaaacgccagaaaaaggcttgtggcggtttgtctggagcagcatggccggcgtgcggaaatggatagccgccctggctgcgctgaccgccggcatcggcattatggaagccctggtttttcaatttatgggcaaaatcgtggagtggctcggcaaatacgcgcccgccgaactgtttgccgaaaaaggttgggaactggcggcaatggcggcgatgatggtattttcggttgcgtgggcgtttgccgcgtccaacgtgcgcctgcaaacccttcagggcgtgttccccatgcgcctgcgctggaacttccaccgcctgatgctgaaccaaagcctcggtttttatcaggacgaatttgccggacgcgtgtccgccaaagtcatgcagaccgcgctggcgttgcgcgacgcggtgatgacggttgccgatatggtcgtttatgtgtcggtgtatttcattacctccggcgtgattctcgcctcgctcgactcatggctgctgctgccctttatcggctggattgtcggtttcgcttcggtgatgcgcctgctgattcccaaattggggcaaaccgccgcatggcaggcggatgcccgctcgctgatgaccggccgcattaccgatgcctattccaatatcgccaccgtcaaactcttctcccacggcgcgcgtgaagccgcctatgccaagcagtcgatggaagaatttatggttacggtgcgcgcccaaatgcggctggcgacgctgctgcattcgtgcagcttcatcgtcaacacctccctgaccctctccaccgccgcactgggcatctggctctggcacaacgggcaggtcggcgtgggcgcggttgctacagccaccgccatggcgttgcgcgtcaacggtttgtcgcaatacattatgtgggaatccgcgcggctgtttgaaaacatcggcaccgtcggcgacggcatggcaaccctgtccaaaccgcacaccatcctcgacaagccccgggcactgccgctgaacgtgccgcaaggcgcaatcaaatttgaacacgtcgatttctcctacgaagcgggcaaaccgctgctcaacggcttcaacctcaccatccgcccgggcgaaaaagtcggcttgatcggacgcagcggcgcgggcaaatccaccatcgtcaacctgcttttgcgcttctacgaaccgcaaagcggcacggtttcgatcgacgggcaggacataagcggcgttacccaagaatctttacgcgcccaaatcggtttggtcacgcaagatacctcgctgctgcaccgttccgtgcgcgacaacattatttacggccgccccgacgcgaccgatgccgaaatggtttctgccgccgaacgcgccgaagccgccggcttcatccccgacctttccgatgccaaagggcggcgcggctacgacgcacacgtcggcgaacgcggcgtgaaactctccggcgggcaacgccagcgcatcgccatcgcccgcgtgatgctcaaagacgcaccgattcttcttttggacgaagccaccagcgcgctcgattccgaagtcgaagccgccatccaagaaagcctcgacaaaatgatggacggcaaaaccgtcatcgccatcgcccaccgcctctccaccatcgccgcaatggacaggctcgtcgtcctcgacaaaggccgcatcatcgaagaaggcacacacgccgaactcctcgaaaaacgcgggctttacgccaaactctgggcgcaccagagcggcggcttcctcaacgaacacgtcgagtggcagcacgactga

SEQ ID NO: 43950 - DNA, 1074 bp, Neisseria meningitidis
atgatgaaaatcaaagccctgatgattgccgccgcattgctggcagcagccgatgtccacgccgcaccgcaaaaggcaaaaaccgcatccgccaaagctgccaaagctgccaaagctgccaaagctgccaaagttgccaaagttgccaaagttgccaaagttgccaaagttgccaaagttgccgccacggcgcaaaaagaagccgcacccgcacaacagcagggcggtatccgcttttcagacggcattgccgccgttgccgacaacgaagtcatcacgcgccgccggcttgccgaagccgttgccgaagccaaagccaacctgcccaaagacgcgcagataagcgaatccgagctgtcccgacaggtgctgatgcagcttgtcaaccaatccctgattgtacaggcgggcaaacgccgcaacattcaagcaagcgaagcggaaatcgatgccgtcgtcgcaaaaaatcccgccctcaaaaacctcagccccgcccaacgccgcgattttgccgacaacatcattgccgaaaaagtccgccagcaggcagtgatgcagaacagccgcgtgagcgaagctgaaatcgatgccttcctcgagcaggcgcaaaaacaaggcatcaccctgcccgaaggcgcaccgttgcgccaataccgcgcccaacacatcctgattaaagccgacagcgaaaacgccgccgtcggcgcggaaagcaccatccgcaaaatctacggagaggcccgcagcggcacagacttttccagcctggcgcgccaatattcgcaagacgcgagcgcgggcaacggcggagatttgggctggtttgccgacggcgtgatggttcccgcctttgaagaagccgtccacgcgctcaaacccggacaggtcggcgcgcccgtccgcacccaattcggctggcatatcatcaaattgaacgaagtgcgcgatgccggcacacctcaggaacgtatccgcaattccgtgcggcaatacatcttccaacaaaaagccgaacaggcaaccgtcaacctgttgcgtgacctgcattccggcgcgtatgtcgacatccgctaa

SEQ ID NO: 43951 - DNA, 645 bp, Neisseria meningitidis; identical to SEQ ID NO: 37921

SEQ ID NO: 43952 - DNA, 249 bp, Neisseria meningitidis
atgagaagtttactggttcgggcgatgtttggggagaggatggtgggaagatttgttttacaaagtggcaaaaggtcgtctgaaaatagggttcagacgaccttttggtttagttgggaagggctgtggtttaaaaagactgcgtgcgtatgtaccgcacacaccctacacacggattccaagttttgcgtgatttgcaggtcgggtgtgccgaaagataaggacacggttgggcaggctacttattaa

SEQ ID NO: 43953 - DNA, 651 bp, Neisseria meningitidis
atgataactatttcaaatgaagataacatgatcttaatgtctcggtatcctgacaagtattttgatttggcaattgtagatcctccttatgggattttgaataaaactaaacgtggtggtgattataaattcaatatgaatgaatactcacaatgggatattaagccagaccaaacttactttaatgaattatttcgcgtgtcaaaaaatcaaattatttggggtgggaattattttggcgagttatggttgagaagtgaatataataaaggatttattatttgggataagaatcaaccagagacattaaataatttttctatggcggaaatggcttggtcgtcattcgataggccatctaaaattttccggtttagtgtgcggaaaaatcgtaataaaactcacccaacacaaaaaccagtcgaattatatcagtggttgttaaaaatgtatgcaaagcagggtgataagattttagatacacatttaggaagtggaactcttgctattgcatgctgcattgcacagtttgatttgacagcttgtgaaatcaattccgattattaccaacaatcgattgagaaaataaaaaataatttacctgaagctagaatcagttttgggcatccaggttattgtattattgaataa

SEQ ID NO: 43954 - DNA, 1422 bp, Neisseria meningitidis
atgaccaccatctacaacaccctaacccgtcaaaaagaacccttttcccccatcgaccctgaaaacgtgcgtatgtacgtctgcggtatgaccgtttacgattactgccatttgggacacgcccgcgtgatggtggtgttcgacatgattgcccgttggttgcgcgagtgcggctatccgctcacttatgtacgcaacatcaccgacatcgacgataaaatcattgcccgcgcggctgaaaacggcgagaccatcggcaaactgactgcgcgtttcatccaagccatgcacgaagatgccgatgctttgggcgtgttgcgtccggatattgagccgaaggcaacggaaaacattccgcaaatgattgccatgattgaaaccctgattcaaaacggcaaggcatatcctgccgcaaatggcgacgtttactacgccgtgcgcgagtttgccgcttacggacaattgtcgggcaaatcgttggacgacctgcgtgcgggcgaacgcgtggaagtggacggtttcaaacgcgatccgcttgattttgtgttgtggaaagccgccaaagcaggcgaaccggcgtgggaaagcccgtggggcaacggccgtccgggttggcacattgaatgctctgccatgagtgaaaacctgttcggcgataccttcgacatccacggcggcggcgcggatttgcagtttccgcaccacgaaaacgaaattgcccaaagcgtcggcgcgacggggcatacctgcggtcatcatcacgcgcaaacccaccacgggcaaagcatcgccagccacgtcaaatactggctgcacaacggctttatccgcgtggacggcgaaaagatgtccaaatcgctgggcaacttcttcaccatccgcgaagtgttgaaacaatacgatccggaagtcgtgcgcttcttcatcctgcgcgcccactaccgcagcccgttgaactattccgacgcgcatttggatgatgcaaaaggcgcgttgacgcgtttgtatacgactttgaaaaatacgccgcccgccgatccgatgccgtctgaagccggcgatgactacacgcgccgcttttatgttgcgatgaatgatgattttgatacggtgaaagcggtggcggtgttgttcgaacttgccggcgaagtgaacaaaaccaatgacgcgcaactggcaggccgtctgaaagccttgggcggcatcatcggactgctgcaacgcgatccgaccgagttcctgcaaggcggcgcggcttcagacggtctctccaacgaagaaatcgaagacttgatcgcccggcggaaacaggcgcgcgccgataaaaactgggcggaatccgaccgcatccgcgaccttctgaacgaacacaaaatcattttggaagacaacgccggcggcacgacttggcggcgcggttaa

SEQ ID NO: 43955 - DNA, 1395 bp, Neisseria meningitidis
atgaccgtcaaaacccgtttcgcccccagccccaccggctacctgcacatcggcggcgtgcgcaccgccttgttttcatgggcgtttgcccgccatcataaaggcgagttcctattacgtattgaagacaccgacttggcgcgttctaccgccgaatccgtcaacatcatcctcgacggcatgaaatgggtcggtctcaattacgacaacgccgacaacgtcgtttaccaaactcgccgtttcgaccgctacaaagaggtcattgccgaacttttagaaaaaggccatgcctactactgctattgcagcaaagaagagctggaagccatgcgtgagaaagccgaaaaagaaggctcggcgacttacgaccgccgctggcgtccggaagtaggtaaaaccctgcccgaaatcccgtccgacgtacaacccgttgtccgtttcaaaacgcctttggacggtgtgaccaaatggacagacttggtcaaaggcgaaatctccatccccaacgaagcactcgatgacctgattatcgcccgcgccgacggtacgccgacctacaacttctgcgttgtcgtagacgactacgacatgggcgttacccacgttatccgcggcgacgaccatgtgaacaacacgccgaaacaaatcaacatcttaaaagccatcgacgcgaacctgcccgaatacggccacctgccgatgattcttaacgaacaaggcaaaaaaatctccaaacgcagcggcgataccgttgccattaccgatttcggcgcaatgggcatcctgcccgaagcgatgctcaactatctggcacgcttgggctgggcgcacggcgacgatgaattcttcacaatggaacaattcatcgaatggtttgatttgaaagacgtttccccgtctccaagccgtatggacttgaaaaaactctactggatcaacggcgaacacatcaaaatcacacccaacggcaaactcgccgaactcgtcaaaccccgccttgcgttgcgcgatattcatgaaaccgaaaaacctgctttggaagatgtgttggaactggtcaaagaccgcccccaagacttgaacacgcttgccgacgagtgcttctacttctacgtcaaacaaacgcctgccgaagcagacgtgcagaaacactgggacgatgaagccgccgcccgtatgctgcgctttgccgaacgcctcgaagggctggaagactggaatgccgaagccatccacgacctcttcaaacccttctgcgacgaagaaggcattaaaatgggcaaactcggcatgcccctgcgccttgccgtctgcggtacggcgaaaacccccagcgtcgatgctgtgttggcattaatcggcaaagaagaagtgttgaaacgcatccgcgcttaa

SEQ ID NO: 43956 - DNA, 1326 bp, Neisseria meningitidis
atgaaaaaatacctattccgcgccgccctgtacggcatcgccgccgccatcctcgccgcctgccaaagcaagagcatccaaacctttccgcaacccgacacatccgtcatcaacggcccggaccggccggtcggcatccccgaccccgccggaacgacggtcggcggcggcggggccgtctataccgttgtaccgcacctgtccctgccccactgggcggcgcaggatttcgccaaaagcctgcaatccttccgcctcggctgcgccaatttgaaaaaccgccaaggctggcaggatgtgtgcgcccaagcctttcaaacccccgtccattcctttcaggcaaaacagttttttgaacgctatttcacgccgtggcaggttgcaggcaacggaagccttgccggtacggttaccggctattacgaaccggtgctgaagggcgacgacaggcggacggcacaagcccgcttcccgatttacggtattcccgacgattttatctccgtccccctgcctgccggtttgcggagcggaaaagcccttgtccgcatcaggcagacgggaaaaaacagcggcacaatcgacaataccggcggcacacataccgccgacctctcccgattccccatcaccgcgcgcacaacagcaatcaaaggcaggtttgaaggaagccgcttcctcccctaccacacgcgcaaccaaatcaacggcggcgcgcttgacggcaaagccccgatactcggttacgccgaagaccctgtcgaacttttttttatgcacatccaaggctcgggccgtctgaaaaccccgtccggcaaatacatccgcatcggctatgccgacaaaaacgaacatccctacgtttccatcggacgctatatggcggataagggctacctcaaactcggacaaacctccatgcagggcattaagtcttatatgcggcaaaatccgcaacgcctcgccgaagttttgggtcaaaaccccagctatatctttttccgcgagcttgccggaagcagcaatgacggccctgtcggcgcactgggcacgccgctgatgggggaatatgccggcgcagtcgaccggcactacattaccttgggtgcgcccttatttgtcgccaccgcccatccggttacccgcaaagccctcaaccgcctgattatggcgcaggataccggcagcgcgattaaaggcgcggtgcgcgtggattatttttggggatacggcgacgaagccggcgaacttgccggcaaacagaaaaccacgggatatgtctggcagctcctacccaacggtatgaagcccgaataccgcccgtaa

SEQ ID NO: 43957 - DNA, 1371 bp, Neisseria meningitidis
atgccgcaaaacactttaaacatcgtcatcctcgccgccggcaaaggcacgcgcatgtattccaaaatgccaaaagtgctgcaccgcatcggcggcaagcccatggtcgggcgcgttatcgacaccgcagccgcactgaatccgcaaaacatctgcgtcgtcatcggccacggcaaagagcaagtcttggacaccgtcaaacgcgatgtcgtctgggttgaacaaaccgaacagctcggcaccggccacgccgtcaaaaccgccctgccccacctttccgccgaaggccgcacgctggtgttgtacggcgacgttcctttaattgacgttgaaaccctcgaaaccctgctcgaagccgcaggcaacgaagtcgggctgttgaccgacgttcccaacgacccgacaggcttggggcgtatcatccgcgacagcaacggcagcgtaaccgccatcgtcgaagaaaaagacgccgacgccgtccaaaaagccgtgaaagaaatcaataccggcatcctcgtcctgcccaacgccaaactcgaaaactggctgaacagcctttccagcaacaatgcacaaggcgaatactacctgaccgacctcatcgccaaagccgttgccgacggtattaaagttcatcccgtccaagtgcgcgcctcccacctcgccgccggcgtgaacaacaaactccagctcaccgaactcgaacgcatcttccaaaccgaacaggcgcaagaattgctcaaagcaggcgtaaccctgcgcgatccggcacgtttcgatttacgaggccgtctgaaacacgggcaagacgtcgtgattgatgtgaactgtatctttgaaggcgacatcgagctcggcgacaacgtcgaaatcggcgcaaactgcgtcatcaaaaacgccaaaatcggcgcaaacagcaaaatcgcccccttctcccacctcgaaagctgcgaagtcggcgaaaacaaccgaatcggcccgtacgcccgcctgcgtccgcaagcccgccttgcagacgacgtacacgtcggcaacttcgtcgaaatcaaaaacgccgccatcggcaaaggcaccaaagccaaccacctcacctacatcggcgacgccgaagtcggctgcaaaaccaacttcggcgccggtacgattattgccaactacgacggcgtgcacaaacacaaaaccgtcatcggcgacgaagtgcgcatcggttcaaactgcgtcctagtcgcccccgttaccctcggcaacaaagtaaccacaggcgcgggcagcacgattacccgcaatgtcgaagacaacaaactcgccctcgcccgcgcccgccaaaccgtcatcgaaggctgggtgcgtcctgaaaaagacaaacaataa

SEQ ID NO: 43958 - DNA, 300 bp, Neisseria meningitidis
atgaagaaaatgttcgtgctgttctgtatgctgttctcctgcgccttctcccttgcggcggtaaacatcaatgcggcttcgcagcaggagttggaggcgctgccaggcataggcccggcgaaggcgaaggccattgcggaataccgtgcgcaaaacggtgcgttcaagtctgtagacgatttgaccaaggtaaagggcatcggccctgcggtgctggcgaagctgaaggaccaggcttcggtcggcgcgcccgcaccaaaagccccagccaaaccggctataccggccgctaaaaaatag

SEQ ID NO: 43959 - DNA, 867 bp, Neisseria meningitidis; identical to SEQ ID NO: 43925

SEQ ID NO: 43960 - DNA, 1164 bp, Neisseria meningitidis; identical to SEQ ID NO: 38788

SEQ ID NO: 43961 - DNA, 618 bp, Neisseria meningitidis
atgccctatacggaagatatgcgcccaggcgataccgctaatccttatggtgcgtccaaagcgatggtggaacggatgttaaccgacatccaaaaagccgatccgcgctggagcatgattttgttgcgttatttcaatccgattggcgcgcatgaaagcggcttgattggcgagcagccaaacggcatcccgaataatttgttgccttatatctgccaagtggcggcaggcaaactgccgcaattggcggtatttggcgatgactaccctacccccgacggcacggggatgcgtgactatattcatgtgatggatttggcagaaggccatgtcgcggctatgcaggcaaaaagtaatgtagcaggcacgcatttgctgaacttaggctccggccgcgcttcttcggtgttggaaatcatccgcgcatttgaagcagcttcgggtttgacgattccgtatgaagtcaaaccgcgccgtgccggtgatttggcgtgcttctatgccgacccttcctatacaaaggcgcaaatcggctggcaaacccagcgtgatttaacccaaatgatggaagactcatggcgctgggtgagtaataatccgaatggctacgacgattaa

SEQ ID NO: 43962 - DNA, 558 bp, Neisseria meningitidis
atgaacatcattgataccgccattcctgacgtaaaactgcttgagccccaagtcttcggcgacgcgcgcggcttttttatggaaaccttccgcgacgagtggtttaaaacccaagtctgcgaacgcaccttcgtgcaggaaaaccactccaaatccggcaaaggcgtattgcgcggcctgcactatcaaactgaaaacacacaaggcaaactcgtacgcgtggttgtcggcgaagtattcgacgtggccgtcgatatgcgtaaagactcccccactttcggcaaatgggtaggcgaaattctgtccgcagaaaacaaacgccaactgtgggtacccgaaggtttcgcacacggcttctatgtactgagcgatgaagccgagttcgtctataaatgcacggactattacaagcctgaagccgaacaggttttaatatggaacgacccgacagtcggcataggctggccgcttcaaaccgcgccgctgctgtcgcccaaagaccttgccggcaaaacgtgggcgcaagccgaaaagctccgccttccgctttaccgataa

SEQ ID NO: 43963 - DNA, 291 bp, Neisseria meningitidis
ttgaaggttcccgcaaaacgctatttcacgctggacgagttgtgcggactgttgcaaatcagcccctatggttttgcgcaatggcagcatgatcacggtgtggttgtcggttacggcggcgaacgctacacccgtttggatgtggtgaaactgttgaaattgcagagcacgtttgcaccgtatgcagaaggtgcggaatcgggttcggacggcaaccgtccggttacgcttcaggaaatcggagacgctctgaaagacctgttggcggatttggataaggaattgtgctga

SEQ ID NO: 43964 - DNA, 774 bp, Neisseria meningitidis
atgaacactattgcagacgtgcaatccagccgagatttgcgcaatctgccgatcaatcaggtcggtatcaaagacctgcgctttccgattaccctgcaaactgcagaaggcatccagtccaccattgcccgtctgaccatgacggtttacctgcctgctgagcagaaggggacgcatatgtcgcgttttgtcgcattgatggagcaacatgccgaagccttggattttgcacaattgcgcaagctgactaccgaaatggtcgcgcttttagattcccgcgccggcaaaatcagcgtttctttcccatttttccgcaagaaaaccgccccggtttccggtattcggtccttactggattatgatgtctgtctcacgggcgaaatcaaagacggggcatacggccacagtatgaaggtcatgattcccgtaacctcgctttgcccgtgttccaaagaaatttcccaatacggcgcgcacaaccagcgttcgcacgttaccgtcagcctgactgccgatgccgaagtcggtatcgaggaagtcatcgattatgtggaggcgcaggcgagctgccaactctacggcctgctcaaacgccccgatgaaaaatacgttaccgaaaaagcctacgaaaacccgaaattcgtggaagatatggtgcgcgatgtcgctacttcgctgattgccgacaaacgcatcaagagtttcgtcgtcgagagcgagaatttcgagtctatccacaaccattcggcttatgcctatatcgcctacccgtag

SEQ ID NO: 43965 - DNA, 207 bp, Neisseria meningitidis; identical to SEQ ID NO: 39999

SEQ ID NO: 43966 - DNA, 378 bp, Neisseria meningitidis
atgtgtgagttaaaaaacttcagaagaaatattacttgttttgaggggtatgacgaaaattcatttattggcaaatggtatgatgacggggtgtgggatgatgaagaatattggaagttggagaatgatttaatcgaggttagaaaaaaatatccttatccgatggacataccaagatatgttgtcattggaatcggtaccattattgatttcttaatggttccaaattggaaactttttgaaattaaagcttccccttggctacctgatagcgtaggaattaatgaacgttatgaaaggcttaaaacaatgctccgttatatttttaccgagaaagacatagtcaacgtgcaatttgattattacaacaaaaaatag

SEQ ID NO: 43967 - DNA, 498 bp, Neisseria meningitidis
ttgccaaaaatgccaatcgaaaaacaaaaggagaagagcatggtcgacgcggtcgttaaaactcccgaatttttaccttttacttctgtaggaatattccgttttggtgcggatataacacagtacaaaaacatactggaaacttttatgtatgaacctcctgatgagtttagaacagaatattatgaatctcccgactcaaatttactcatttccgtcaaaaaaaaaaacaaaattatttcgatattttgttatcaggagctatattttatgggcgttaatataataggtctgaattttgaagattttaaacagcttttccattaccctaaatcatacggtgttgataaatattatttatcaaatgaatcttatccgacatatgtctatgagtttgatgaaataggagtacaagcttgggaagcaaaagggaaaattgttactatcattgccgggggcaaagacaattattcaacagaaccttactacgatgaataa

SEQ ID NO: 43968 - DNA, 378 bp, Neisseria meningitidis
atgtgtgagttcaaggatattataagaaacgttccttattttgaggggtatgacgaaaattcatttattggcaaatggtatgatgacggggtgtgggatgatgaagaatattggaagttggagaatgatttaatcgaggttagaaaaaaatatccttatccgatggacataccaagatatgttgtcattggaatcggtaccattattgatttcttaatggttccaaattggaaactttttgaaattaaagcttccccttggttgcctgatagtgtgggaattcatgaacgttatgaaagattcacaacgatgctccgttatatttttaccgagaaagacatagtcaacgtgcgatttgattattacaacaaaaaatag

SEQ ID NO: 43969 - DNA, 408 bp, Neisseria meningitidis
atgtgcgagttcaaggattttagaagaaacatcccttgttttaaggagtatgacgaaaattcatttattggcaaatggtatgatgacggggtgtgggatgatgaagaatattggaaattggagaatgatttaattgaggttagaaaaaaatatccttatccgatggatataccaagggacatcgtgattggaatcggtaccattattgattttttaatggttcaaaattggaaactttttgaaattaaagcttctacttggttgcctaaaagtgtcaaaattaatgagcgttatgaaaggttcagggtaatgctccgttatatttttactgatctagatgtagaggactggaaatttttttactttccaatacaacatagtaaaggtagattgagacgaaaagtttaa

SEQ ID NO: 43970 - DNA, 1107 bp, Neisseria meningitidis
atgtccttgacccgcctaatcttgaaattctatgcactgttgcgcctttttttgggcaaaaacgcccgcaccgcatggatttcgcatcccgcctgtgccgggcacgaacccggcgcaaaccatcccgattcgcccgaccgcatcctctgcatcgagcaggcattgcgccgcgccggtatttggcagcacctccaaaccatagaggcggaagaaatcagcgatacgcgcctcgcacttgtccactcgagcaaatatctgaaccgtttggaatcttgcctgccccaaaaaggcaagatttcccgcctggataacgacactgcaatcagcacaggatcgctgtctgccgcacgctttgccgccggttcggcagttcaggcagtcgacatggtcatgaaccgtaaagcatggcatgccttttgcgccgcccgcccgcccggacaccatgcgggcagcggcaaagccggcggattctgcctgctgaacaacgttgccgccggcgtcatgcatgccattgccgaataccgcctgaaacgcattgccgtcatcgatttcgatgtccactacggcgacggtacggcagaaatattcaaagacgatccgcgcatcctgtttttcaacctgtttgaaaccgaccttttccccttccccgaaaacaacgatatgcccgacggcggcaatatggtgcacctgcccttgccgccaggaacgggcagccgcacattccgcgaagccgtccgcaggcagtggctaccccgacttgccgcattcaaacccgaactggtgctgctgtcggcaggattcgacgcacaccgtctagacgaatcgggcaggctcaacctgcacgaggcggattttgcctggctgacacacaaaatcattcagacggcatcgggctgccccggcaaaatcatatccgtactcgaaggcggctacacccttgaacctctggcacaatctgctgccgagcatatccgcgtgctggcagggctgggcaaatccgatgccgcaaccgcctatcagaaaacactggacccaacaaaaaaacggtttgccaaaccgaaaaccggacaggtgcgccaacctacccaatccgaccgttacgacata

SEQ ID NO: 43971 - DNA, 543 bp, Neisseria meningitidis
atgaggacacaccgcaagacctgctctgcggtgtgttttgcttttcagacggcatcgaaacccgccgtttccatccgacatcccagcgaggacatcatgagcctgaaaatccgccttaccgaagacatgaaaaccgcgatgcgcgccaaagaccaagtttccctcggcaccatccgcctcatcaacgccgccgtcaaacagtttgaagtggacgaacgcaccgaagccgacgatgccaaaatcaccgccatcctgaccaaaatggtcaaacagcgaaaagacagcgcgaaaatctacactgaagccggccgtcaggatttggcagacaaagaaaacgccgaaatcgaggtactgcaccgctaccttccccaaatgctttccgccggcgaaatccgtaccgaggtcgaagctgccgttgccgaaaccggcgcggcaggtatggcggatatgggtaaagtcatggggctgctgaaaacccgcctcgcaggtaaagccgacatgggcgaagtcaacaaaatcctgaaagccgtgctgaccgcctga

SEQ ID NO: 43972 - DNA, 924 bp, Neisseria meningitidis
atgaatacaggcaaaccccaaaaacgtgccgtcaacggtgttttgctcttggacaaacccgaaggcctttccagcaacaccgcgctgcaaaaagcgcggcgtttgtttcatgccgaaaaagccggacataccggcgtgctcgaccctttggcaaccggacttttgcccgtctgcttcggtgaagcgaccaagttcgcccaatacctgctggatgccgacaaagcctacaccgccacgctgaaactcggcgaagccagcagcacgggtgatgccgaaggcgaaatcattgccaccgcccgcgccgatatttccttagccgaatttcagacggcctgccaagcactgacaggcaacatccgccaagtgccgccaatgttttccgcgctcaagcacgaaggcaaaccgctgtacgaatacgcccgcaaaggcatcgtcatcgaacgcaaagcgcgctacattaccgtttacgccatcgatattgccgaatttgacgcgcccaaagccgtcatcgacgtacgttgcagcaaaggcacctacatccgcaccctcagcgaagacatcgccaaacacatcggcacgttcgcccacctgaccgccctgcgccgcactgaaaccgccggctttaccatcgcccaaagccacacgcttgaggccttggcaaatttgaacgaaacagaacgcgacagcttgctgctaccctgcgacgtattggtttcacactttccccaaaccgttttaaacgattatgccgtccatatgctccactgcggacaacgtccgcgtttcgaagaagacctgccttccgacacgccggtacgcgtttacacggaaaacggccgctttgtcggtctggcggaatatcaaaaagaaatatgccgtctgaaagccttgcgcctgatgaacacggcggcatccgccgcctga

SEQ ID NO: 43973 - DNA, 906 bp, Neisseria meningitidis
atgggtttggacggacttgcggcatacttggacgcttatttggaaaatatcgtgcgcgagggtaaatcggagcacacggttgccgcataccggcgcgacttgcaggaactgcttgcccttctggaagaaatgccgtctgcaaacccttcaaattgcactcgcggcgacttcgtacaggcattacgccggctgtccggccgcggtttgggggaacggacgctggctcgcaagctttcgtcttggcggcagtattgcgtttggctggtaaagcgcggcctgatgcacgccgacccgaccgccgacatcaaaccgccgaagcagcccgagcgcgtacccaaagccctgccgcaggaatggctgaaccggatgctggatttgcccgtggacggcggcgacccgctggcggtgcgcgaccacgccctgttcgaactgatgtacggcagcggtttgcgcgtgagcgagatacacggcttgaatgcagatgatgtctatttggacgaggcgtgggtacacgttatcggcaaagggcgcaagcagcggcaggtgccgctggtcggcaaaagcgtggaagccctgaaaaactatctgccgctgcgtcagacggcatcggacggcaaagccctgtttaccggcaggaacggcacgcgcctgagccaacgccaaatccaaaaacgtttggcgcaatgggcggcgcaaaacggcgacggcaggcacgtttcgccgcatatgatgcgccacagctacgccggacacctattgcaggcttcgcgcgacatcagggcggtgcaggagctgctcgggcacagcagcctttcgaccacgcagatttataccaagctcgatttcgaccacatcgcccgcctgtatgacgaagcccacccgcgcgccaagcggcaggacgaatga

SEQ ID NO: 43974 - DNA, 432 bp, Neisseria meningitidis
atgaccgaaaacgcacaggacaaggcgcggcaggctgtcgaaaccgtcgtcaaatccccggagcttgtcgagcaaatcctgtccgacgagtacgtgcaaataatgatagcccggtgtttccattcgggaccgttgccgccgccgtccgacttggcgcaatacaacgacattatcagcaacggggcagaccgcattatggcaatggcggaaaaagaacaagccgtccggcacgaaaccatacggcaagaccaaaccttcaacaggcgcgggcaactgtacggcttcatcagcgccatcctgatactgctttttgccgtcttcctcgtatggagcggctaccccgcaaccgccgcctcccttgccggcggcacagtgtttgccttggcgggtgctttcgtgattggaagaagccgagaccaaggcaaaaattaa

SEQ ID NO: 43975 - DNA, 393 bp, Neisseria meningitidis
atgggtaagcgaatgactttcgataccgccaaatcacgctttcaagagaaatttccacatttagaattgttggagttcagtggcatttataaaccttccagtgttagatgtcctacgcacggggttgtccaacttttgtattacgacacagctataaagtcaaagtatgggtgtccggagtgcgggaaacttaaaatgaaggaaaatacgcctccccaaaaccaaaaacctgtctccatcctcgacaccgccacaggcgaaacactcacgttccccagcgtacaagctgccgccaaagccctaaacaccccctacggctctatacgaaccaagctcgacggacgttcaaatcccgacaaccttgtctgtaacaggtataaggttctgctataa

SEQ ID NO: 43976 - DNA, 561 bp, Neisseria meningitidis
atgaccgccaactttgcacagacgctggtcgaaatacaggacagtctgtacagggttgtgtcaaccgtccaatacggggatgacaacctcaagcggttgacagcggacaaacggaagcagtatgagttgaacttcaagatttccgagggttctacgcgtgtagagtccgactttaaagagactttggttcggttcggtagagatatgcttcaagatatgccccctaaaatccgttcggcaacgctggtagcgttgacgaccctgcttgtcggaggggcgttgggttacggttatttggaatacctgaagcaggttgcttcggaagggtatcagaccgagcgtctgtataatgccgtcgaccgtcttgcagaatcccaagaacggataacgtccgccatcctgaagggtgctagaggtgccgatttcgtgcaaatcggcagacgttcctacagtagggaggatatatcggaggcaaatagacgtgcagagcgtgtcccgtatggcgcagagttggtttcagacggcaattttaccgctgttttatctgatataggggattaa

SEQ ID NO: 43977 - DNA, 321 bp, Neisseria meningitidis
ttgttgatgtgtgtactattgcataggcggttaagccatgcaggagatgaaagtgtatatgtcgcgcaaagcccattagccgcaagcgaggggcggggtgcgcgagagagaggggggcaggtgctaagtcattggttatctccttactatctatctaactacgggtgcattatgcgcctatgcctgttttttgtcaaacactatacagttaaaatgtgtaaatatttagtaaggacatatacccttttctttacatttagctccatcggataccagtgcgttcagagaaaatttgaaaatttctatattttggttgtataa

SEQ ID NO: 43978 - DNA, 1197 bp, Neisseria meningitidis
ttgcccacttttccgaaccacaccatgcacaccatttcctttccaaaccgcacccgactcaccgccctgccgcccctgtcgctttacatccacatcccgtggtgcatcaaaaaatgcccgtattgcgacttcaattcccacagcctgaaaaacggattgcccgaagccgcctatatcgacgcgctgctgaccgatttgcagcttgaattgcccaatatttggggcaggccggtggaaacgatctttttcggcggcggtacgcccagcctgtttcaggcggaatcgattgaccgtttgttaagcggcgtgcgttcgctgttgcgcttgcagccggaagcggaaattaccttggaagccaatccggggacatttgaaatcgagaagtttcaaggatttaaagacgcgggtattacgcggctttctatcggcgtacagagtttcaacgacgatatgctctcaaggctggggcgcgtccacaacggtaaggaagccttaaccgctatcgataccgccttgaaattatttgataaagtcaatatcgacttgatgtatgccctgccgaaccaaaccgttcagacggcattggacgacgtacaaaccgctatcgctacgggcgcaacccacatcagcgcgtatcacctgacgatggaaccgaacacgccgttcggtcatacgccgccgaaaggtttgccgcaagacgaagccgccctcgacatcgaagacgcggtacacggcgcgctggaaggcgcgggttttgtccactacgaaacatcggcttttgcgaaaccagccatgcagtgccgccacaatttgaactactggcagttcggcgattatttaggcataggcgcgggcgcgcacggcaaaatttcctatcccgaccgcatcgagcgcaccgtccgccgccgccaccccaacgactacctcgccttaatgcaaagccaaccgagtgaagccgtcgaacgcaaaaccgtcgctgccgaagatttgccgttcgaattcatgatgaacgccctgcgcctgaccgacggcgtacccgccgcgatgttgcaggagcgcacgggcgtaccgagtgccaaaatcatggcgcaaatcgaaacggcaaggcaaaaaggcctgctggaaaccgaccctgccgtattccgcccgaccgaaaaaggacgcttgtttttaaacgatttgctgcagtgtttttta

SEQ ID NO: 43979 - DNA, 261 bp, Neisseria meningitidis; identical to SEQ ID NO: 40012

SEQ ID NO: 43980 - DNA, 390 bp, Neisseria meningitidis
atgtggaaaattagtaaagaaaattgtgaagatttaggatttgcaatagtctgtatgttctatgatgctattaatctttctgaatttaaattatggttggatatagttgtcagagatattcctattgatacaattccattgtatatttttgatttgattgattttgataagagtataggggaaatttatgatgtaattggagtcgttaattatggttacatttcaaatgatcaaaaaaatgcattaacgggcattgccttcttaagggggatagatgtctatgatccgcctatttcaaaagaaaaagcattaaaagccttagagaaatatcctgaaatttatcagaggtttcagcatttctttccttttgtagagcttccgcttttttaa

SEQ ID NO: 43981 - DNA, 1536 bp, Neisseria meningitidis; identical to SEQ ID NO: 40679

SEQ ID NO: 43982 - DNA, 225 bp, Neisseria meningitidis
atgaagaaaaacgccccgaaatcgtttgaagaagccttgtcgcgcctcgaatcgctgacgcagtctatgcagggcgaaatgcccttggaagacgcgcttgccgcctatcaggaaggcaacgaactggtcaggtactgccaaaccaaactggcacaagtcgaacaaaagctacaggttttagacacagacgggctgaaggagttaaaccttgaatccgacgaatga

SEQ ID NO: 43983 - DNA, 366 bp, Neisseria meningitidis
gtgtggggacgctatgaaaaattgcgaattttttatgacccgacaagggcaatctatgatagcggtgcagattacttaactagggaaaaacatagattagtcgtaattgcaaatagtgcttgggggctattgcttaatttatcttgttattatgacgaggttttggaaaagcggaaaataccgttcggcaaacaggaaattgatgacgatatggacaaagtgtccgcccttaagcggaagtttaaagatatttctgaaatcaaagtaggggatggttgggaatacccgttcaattatgagcagggaatgaaagaattagatgaagtgctattgaaatacattcccttttttgaagaagaacgataa

SEQ ID NO: 43984 - DNA, 1356 bp, Neisseria meningitidis
atgtctgatttttttcattctgacgtgttgtccgtttccgagttgaacgcatttgccaaaagtcttttggaaaaccaccttgccggtttgtggattgccggcgaagtatccaacctgacccgtgccgccagcgggcattattatttctcgctcaaagacagccgcgcacaggtgcgttgcgcgatgttcaagggtgcggcggtgcgtttggcgaagcctttgaaagaaggcgaccatatcgaggtatcaggaaaaatcagtatttatgaagcgcggggcgaatttcagattaccgtaaacgaagtacggctcaaaggtttggggcagctttacgaagcctatgagcggttgaaggcgcagttgcaggcggaaggcgcgtttgcggcggaacgcaagaaacctttgcccgtccgtccgcaatgtatcggcatcgtaaccagtctggcggcggcggctttgcgcgatgtcgttactaccttgaaacgccgcgcacccgaaatccccgttatcgtttatccgacacccgttcaaggcgcaggcagcgaattgcaaattgcccaagcgattaaaaccgcctcgcaacgcgccgaatgcgatgtgttgattgtctgtcgcggcggcggcagcattgaagacttgtgggcgtttaacgaagaaccggtcgtgcgcgccatcgaatcctgcacggttccggtcgtcagcggcgtaggccacgaaaccgatttcacgctcgccgatttcgtcgccgatatgcgcgcgcccacgccgaccggtgcggcggaactggtcagccccaaccgccaagaatcgctgcaccgcctcgcccaagcccaatgccgtctgaaaaccgttttggaacaacgctatttcgatgccagccaaaaactcgactggctggcgcggcaaatccgtcatccgcgccaaaaactcgacgaacagcgcgcttcaatcggcaagctggcgcaaacgctgtcttactcgatgacgcaaaacgtccgtacccacaccgcccgtttcgaacgccaaacccaagccctgaaacattgccgtcctgatgtttccgtttgcaaaaaaaacatcgaccgctttcagacggccctgtcgcacgccttccaccaactgcttacccaccgccgccaaagcctgactgcccaagccgcattgctcgaagccgtttcgccgcagcacattctggagcgcggcttttccgtcgtcaaaaacacacgcggacaagtcatccgcaacgccgatgttttgaagcaggggcagaagctgcacattatcttcgccgacggcgaaaccgacgtgcgcgtaagcaaagaacaagggcagcaggatttgttcgattgcatttaa

SEQ ID NO: 43985 - DNA, 273 bp, Neisseria meningitidis
gtgtttgctgttattttcttttcgacattgggctgtattttagcatggataagagatattcctaaaataaaatcaaaaaaaattttggcaagatccttatatattataggaataataaatgtaataatcggctatgtattaattaaaaatatattggtttctgtttcggatggaggtggaataaaatatgttgcaatatatttatcaaatctttttttttggacagtattgatgtatgttcttgtgaaaagattatctaaaaagccaagctga

SEQ ID NO: 43986 - DNA, 273 bp, Neisseria meningitidis; identical to SEQ ID NO: 37685

SEQ ID NO: 43987 - DNA, 517 bp, Neisseria meningitidis
atggcaaaacatgaaattgaagaacgcggtgacggtctgattgaaaagatggtcgctgttaatcgcgtaactaaagtagttaaaggtggccgtatcatggctttctcagcactgactgttgttggtgatggtgatggtcgcattggtatgggcaaaggtaaatcaaaagaagtaccagttgctgttcaaaaagcaatggatcaagctcgacgctctatgattaaagtacctttgaaaaacggtaactattcatcatgaggttattggccgtcatggtgctactaaagtatttatgcagcctgctaaagagggtagtggcgtaaaagccggtggacctatgcgtttggtttttgatgctatgggcattcataatatctccgccaaagtgcacggatctactaacccatataatatcgtacgtgcaacattagatggtttgtctaagttgcatactcctgctgatatcgcagccaaacgtggcttgacagtggaagacattttgggagttaaccatggc

SEQ ID NO: 43988 - DNA, 111 bp, Neisseria meningitidis; identical to SEQ ID NO: 40033

SEQ ID NO: 43989 - DNA, 411 bp, Neisseria meningitidis
ttgacagaagaaatgatgaaaaagcagcggcatatcctgtgtgtcggctgcctgtatattatattgaaggtcaacgtatttcccaataccggctggatggaagcgtcgaaagggatgcagggcatgtcgttcagtaccttcggatacgcggatgctccgggctatacattcagccgcattggccatactttaattttcctacttggaaagaccacagggacacgtacaactgtttccgatagttcgcataatgtatattatgttaaattatatatttgtgcaaataactccaaggcattaagctgttgtttgatgctttgccagtttgggagaaagttgtccatatgcgccataaaacgggcgttgcgatggcgttcgagcaaatgggtcagttcgtggacgacgacgtat

SEQ ID NO: 43990 - DNA, 2486 bp, Neisseria meningitidis
atgcatcactttgggcgggctgcgacgagttgcgcggcggtatggatgcgagcctttataaagaactatgtgcttacgctattgtttttaaaatatgtttctgataagcataagtacggcggcggcatgattgagctgcacgccggtacgacttttgacgacatcgtcaaactcaaaaacaccgccgacatcggcgaccgcctgaataagattatcgcccaaattgccgaagccaacgacttaaaaggcgtgatcgacgttaccgacttcaacgacgaagacaaactgggtaaaggtaaggagatgatcgaccgtttgagcaggcttgtcggcatttttaaaaagctcaacctttcttccaaccaagccgaagacgacgatttgttaggtgatgcctacgaatacctgatgcgccattttgcgaccgagtcaggcaaatccaaagggcagttttacacgcctgccgaagtctcccgcattatggcgaagattatcggaatcagcgcagattgccgtccagcaccagcgtttatgacccgacctgcggctcgggttcgctgttgctcaaagccgccgcccaagccggcagccaaatcagcctttacggtcaggaaaaagatgtggcaaccgcgtcccttgcccgtatgaatatgattttgcacaacaacgaaaccgccgaaatcaacaccgggaacaccttgtccgattcgtctttccgtgatgaaaacgacgggcttaagaccttcgattttgccgttgccaatccgccttatcccgcccgaaaaaaacggcgattacgcctttttgctgcatctgctcaaaagcctgaaaccaagcggcaaaggtgcgattattcttccgcacggtgtgctgtttcgcggcaatgccgaagcgcgtattcgcacggaattgcttaaccttgaccttattaaaggcattatcgggctgcctgccaacctgttttacggcacgggcattcctgcctgcatcatcgtcatcgacaaagaacacgcccaaaccgcccaatttgccgaagagggaacaaaccaagttatcagcggcggcagcgtgtttatgattgacgcatcgcgcggcttcattaaagacggcaacaaaaaccgtctgcgtgagcaagacattcacaaaatcatcgacactttcacaaacctcgttacagccgtatggtgcatttaagcgaaatcgcagcacaagattacaaccttaatctgcctcgctatatcgacagcggagaagtcgaagacctgcaaaatctcgccgcctatctatctttatggcggcatacctgcgcacgatatggacgcattggaagcctattggcaagttttaggccgtatgaaaaacgagttgtttgccgaacacgatggccactttaccactatacaacggaatcgattgcaaatctttcccactctcaacagcttaaaatcctgcgggattggtgtggaatttagggctaatctagtacagccccaaatttaatccactataaaatcgaaagcagccaaatcaaagcccatatattggcgcaccccgattacgccgccttcaaagccggacacctagcaaagtttgccgcgtggcacactcaaaacgaccttgccgccatccaaccgggcaggcttatccggaaatggagcgaaagcctgctggacgcgttcaaacccggcagcctgattgaagaatacgatttctaccaaatcctgacggactactgggcggaaaccctgcaagacgatgtttatctcatcgcccaagatggctggaaggcggttaaaaacctggccgaaatcaccaaagaaagcgatgaagccgcgaacctgaccgtcgtctttgaggaaaccgaaaccgacaaaaaaggcaaagccaaaaccaagcgcatcagcaaaaaataccgcagcgaagtcatcgcccccgagctggttgcccgccgctacttttcagacggcatcgccaagctggaagaaaaacaaagcgagctggaacgcctaagccaagaattggaaaaccacatagaagaacacggcggcgaagagggtgcgctgaacgacgtattggatgcaaaaggcaaactttccgccaaacttctgaaaaccgcattggaagaaagcggcatagaagaaggcgaacgggctgttttacaaaccacccaaacactgatgacgcaggaaaaagccgcgaaagacgcagtcaaaacccaaatcgaagccctgaaccttgccgtattcaaacaatttggccgactttccgaagccgaaatcaagcagcttgccgttcaagacaaatggcttgccgatttacaaagccgaatcgaaaatcgcttggaaaacagtattcagcagcttatcagccgcttgaacacgctggaagaccgctaccgcagcccgatggccgagcttgcccgagaagtggaaaagtggcaaagcaaagtcaatgcccaccttgaaaatatgggttttggaggctga

SEQ ID NO: 43991 - DNA, 222 bp, Neisseria meningitidis
ttgaaggtagtacctgagcgtaccgtttcggcagatgcaaaaaccagagacccgatgtgggacaatgcggctttacagaccagcgaaggcgtaaattttattgctcgtttcctaggattttttagcgatggggaataccgctatgtggatgtcctgcaacccaaccattccgatattattcggtattcaggtaaagatttttccgctaaatcaaatatttaa

SEQ ID NO: 43992 - DNA, 228 bp, Neisseria meningitidis; identical to SEQ ID NO: 37977

SEQ ID NO: 43993 - DNA, 360 bp, Neisseria meningitidis
ttgaataatattcctgttgaaatccgtttgttgaaaaaccgtaccgtgttggttttgacttatggggacgaacctaaaaatctgcctgccgaatttttacgcgtctattcgccgagtgcggaagtgcgcggacacggtgtgggacaggatgttttgcagaccggcaaggcggatgtccaaatcacggatttgcagcctgtcggacagtacgcgctgaaaatcagtttttcggacgggcacgacagcggtctttacgattgggcgtatctgcacagactggcatacggatacgatgcgatgtggcaggaatatttggacaaattggcggcatcgggcgcgtcgcgttttgaagagaaataa

SEQ ID NO: 43994 - DNA, 1662 bp, Neisseria meningitidis
atgctgacctataccccgcccgatgcccgcccgcccgccaaaacccacgaaaagccgtggctgctgctgttgatggcgtttgcctggttgtggcccggcgtgttttcccacgatttgtggaatcctgacgaacctgccgtctataccgccgtcgaagcactggcaggcagccccacccccttggttgcccatctgttcggtcaaaccgatttcggcataccgcccgtgtatctttgggttgccgccgcgttcaaacatttgctgtcgccgtgggctgccgactcatacgatgccgcacgctttgcaggcgtattttttgccgttatcggactgacttcctgcggctttgccggtttcaactttttgggcagacaccacgggcgcagcgtcgtcctgattctcatcggctgtatcgggctgattccagttgcccatttcctcaaccccgctgccgccgcctttgccgccgccggactggtgctgcacggttattctttggctcgccggcgcgtgattgccgcctcttttctgctcggtacgggctggacgctgatgtcgttggcagcagcttatccggcagcatttgccctgatgctgcccttgcccgtactgatgtttttccgtccgtggcaaagcaggcgtttgatgttgacggcagtcgcctcacttgcctttgccctgccgcttatgaccgtttacccgctgctcttggcaaaaacgcagcccgcgctgttcgcgcaatggctcgactatcacgttttcggtacgttcggcggcgtgcggcacgttcagacggcattcagtttgttttactatctgaaaaacctgctttggtttgcattgcccgcgctgccgctggcggtttggacggtttgccgcacgcgcctgttttcgaccgactgggggattttgggcgtcgtctggatgcttgccgttttggtgctgcttgccgtcaatccgcagcgttttcaggataacctcgtctggctgcttccgccgcttgccctgttcggcgcggcgcaactggacagcctgaggcgcggcgcggcggcgtttgtcaactggttcggcattatggcgttcggactgtttgccgtgttcctgtggacgggctttttcgccatgaattacggctggcccgccaagcttgccgaacgcgccgcctatttcagcccgtattatgttcctgatatcgatcccattccgatggcggttgccgtactgttcacacccttgtggctgtgggcgattacccggaaaaacatacgcggcaggcaggcggttaccaactgggcggcaggcgttaccctgacctgggctttgctgatgacgctgttcctgccgtggctggacgcggcgaaaagccacgcgccggtcgtccggagtatggaggcatcgctttccccggaattgaaacgggagctttcagacggcatcgagtgtatcggcataggcggcggcgacctgcacacgcggattgtttggacgcagtacggcacattgccgcaccgcgtcggcgatgtacaatgccgctaccgcatcgtcctcctgccccaaaatgcggatgcgccgcaaggctggcagacggtttggcagggtgcgcgtccgcgcaacaaagacagtaagttcgcactgatacggaaaatcggggaaaatatataa

SEQ ID NO: 43995 - DNA, 627 bp, Neisseria meningitidis
atgagatgttttatgattcaaaatgtcgttacttcaataatcctgtattctgggacagccgtagacttacttattatcctaatgttattttttgccaaaagaaaaagtagaaaagacatcattaacatctatttaggacaatttctaggctctgttagtctgatattgctaagtttactttttgcatttgtcttagattatattcctagtaaagagattttaggtttgctcggcttgattccaattctcctaggcatcaaagttttgcttttaggagattctgatggagaggctattgccaaagagggtttgcgcaaagataataaaaacctgatttttctagtcgctatgattacttttgcaagttgtggtgctgacaatattggtgtctttgtcccatattttactaccttaaatttagcgaatttgatagtggctttacttacctttctagtcatgatttatctcttggttttttctgcccaaaaattagcacaagtcccttctgttggagaaactttggaaaaatatagcagatggtttgttgctgttgtttatttaggattggggatatatatcctggttgaaaacaacagttttgatatgctatggactgtgttgggctag

SEQ ID NO: 43996 - DNA, 825 bp, Neisseria meningitidis
gtgaatcgaactgccttctgctgcctttctctgaccactgccctgattctgaccgcctgcagcagcggagggggtggtgtcgccgccgacatcggtgcggggcttgccgatgcactaaccgcaccgctcgaccataaagacaaaggtttgcagtctttgacgctggatcagtccgtcaggaaaaacgagaaactgaagctggcggcacaaggtgcggaaaaaacttatggaaacggtgacagcctcaatacgggcaaattgaagaacgacaaggtcagccgtttcgactttatccgccaaatcgaagtggacgggcagctcattaccttggagagtggagagttccaagtatacaaacaaagccattccgccttaaccgcctttcagaccgagcaaatacaagattcggagcattccgggaagatggttgcgaaacgccagttcagaatcggcgacatagcgggcgaacatacatcttttgacaagcttcccgaaggcggcagggcgacatatcgcgggacggcgttcggttcagacgatgccggcggaaaactgacctacaccatagatttcgccgccaagcagggaaacggcaaaatcgaacatttgaaatcgccagaactcaatgtcgacctggccgccgccgatatcaagccggatggaaaacgccatgccgtcatcagcggttccgtcctttacaaccaagccgagaaaggcagttactccctcggtatctttggcggaaaagcccaggaagttgccggcagcgcggaagtgaaaaccgtaaacggcatacgccatatcggccttgccgccaagcaataa

SEQ ID NO: 43997 - DNA, 1017 bp, Neisseria meningitidis
atgaacacacgtcccttttatttcggactgatatttatcgcgattatcgctatacttgctaactatttaggaaacactgatttttcccatcattatcatatcagtgctttaattattgctatcttgctgggaatggcaatcggcaataccatttatccgcaattttcgacacaagtggaaaaaggcgttttgtttgccaaaggcgcgcttcttcgcactggcattgtgttgtatggttttcgcctcacttttggcgatattgccgatgtaggattaaatgcggttgtcactgatgcaatcatgctaatttcaaccttcttttttaccgcacttttaggcattcgttatctaaaaatggataaacaattggtttatctcactggggcaggttgcagcatttgcggtgcggcagcagtgatggcggcagagcctgttactaaagcagaatcccataaagtttcagtggcgattgccgtagtggtcattttcgggacgcttgctatttttacttaccccttgttctacacgtggtcacaacatttaattaacgcccatcaattcggtatttatgttggttctagtgtacacgaagtggctcaagtgtatgcgattggggaaaatattgatcctatcgtggcgaatactgccgtcatttccaaaatgatccgagtgatgatgctcgccccctttttattaatgctttcttggttattaacacgtagtaatggagtatcagaaaatacatcacacaaaattacaattccttggtttgctgtactttttattggtgttgccatttttaattcttttgatttattaccaaaagaactcgtgaaattattcgttgaaatcgattctttcttattaatttcatcaatggctgcgcttggcttaacgacgcaagcaagcgcaatcaaaaaggcaggattaaaaccgtttgttttaggaatactaacttatttatggctagtggttggtggatttttagtgaactatggaatatcaaaattaatataa

SEQ ID NO: 43998 - DNA, 264 bp, Neisseria meningitidis
atggcaaacagcgcacaagcacgcaaacgtgcccgccagtccgtcaaacaacgcgcccacaatgctagcctgcgtaccgcattccgcaccgcagtgaaaaaagtattgaaagcagtcgaagcaggcgataaagctgccgcacaagcggtttaccaagagtccgtcaaagtcatcgaccgcatcgccgacaagggcgtgttccacaaaaacaaagcggcacgccacaaaagccgtctgtctgcaaaagtaaaagccttggcttga

SEQ ID NO: 43999 - DNA, 864 bp, Neisseria meningitidis; identical to SEQ ID NO: 37982

SEQ ID NO: 44000 - DNA, 1143 bp, Neisseria meningitidis
atgcagaaatggcaaaccgagctttattccacaccgctttggctttgtctgacaccgaaaagcgcggtcaaagtcttgctgctgattacggcgatgattacgctggtgttaaccgaaatgcggctgaatgtgttgagtacctttatgtccaaagggctttacgactcgatgcaggatttaaatgcttcggcattttggatgtttgctgcaatgaacgcgggcgtggtgctgatacgggcgtttaacaacgtcgtcaacgacttcctcgatcaaggcttggcgattaaatggtcggagcggctcaacgaagtgctgacagcacgctggcttgccgacaaaaactactaccgcctgcaaatgcgccgccacgcgccggacaacatcgaccagcgtatccaacaggacgcgcaggaatttatcgcttcgaccatcgaatttgtgcgcggcatggtcaattcggtcgttacttctctggaatttgccgttgttttgcggggcttggctggcatcctgaccgtgttcggcttcgacattccgcacggcatcgtttggtttgtctatatatttgtgattttggcgacctttatcgccatgtggataggcaaccctttgattcgttacaattatgaaaacgaaaaactcaacggcgactaccgttattccctcatccgcgtgcgcgaccacgccgaaagcgtggcgttttacagcggcgaaaaacacgaacacgaccagctttctgaccgttttaaagccattatccgcaaccgctggcgtattgcgcgacaaagcgtctgcctgagcggctttaatgatatgttcaccaacggcatcaagctcttccccattattttgcaagcgccgcgcctgtttgccggacaaatcaaaatcggcgacatccagcagaccgtccaagccttcgcgcgactgcaaaacgcgctttctttcttccggatgttctacaacaaattcaccgcctaccgcgcccgattggagcgtctgtacggctttttgctgagtaccgaagaacaacacagcgcgcggcaacccgagattagcgaagtttcagacggcattgcactggaatgtaaggcggcggcagcttttgcacgaattggcggcagcttttgcaccgccgaagcgtag

SEQ ID NO: 44001 - DNA, 1677 bp, Neisseria meningitidis
atgtcccaacaatacgtctattctatgctgcgcgtgagcaaggttgtgccgccgcagaaaaccatcattaaagatatttccctttctttcttccccggcgcgaaaatcggcctgctcggtttgaacggcgcgggcaagtccaccgtgctgcggattatggcgggcgtggataaggaatttgagggcgaagccgtgccgatgggcggcatcaaaatcggctacctgccgcaagagcctgagcttgatccggaaaaaaccgtgcgcgaggaagtggaaagcggtttgggcgaagtggctgccgcgcagaaacgtttggaagaagtgtatgccgagtacgccaatcctgatgcggattttgacgcgttggcagaagagcagggccgcttggaagcgattattgcggcaggttcgtccacgggcggcggtgcggaacacgaattggaaatcgccgccgacgcgctgcgcctgccggaatgggatgccaaaatcgataatttgtccggcggtgaaaaacgccgcgttgccttgtgcaaactcttgttgagcaagcccgatatgcttttgctggacgagccgaccaaccacttggatgcggaatcggtcgagtggctggagcaatttctcgtgcgcttccccggcacagtcgttgcggtaacgcacgaccgctacttcctcgacaacgccgccgaatggattttggaactcgaccgcggccatggtattccgtggaaaggcaattactcgtcttggctggagcagaaagaaaaacgcttggaaaacgaggcaaaatccgaagccgcgcgcgtgaaggcaatgaagcaggaattggaatgggtgcgccaaaatgccaaaagccgccaagccaagtccaaagcgcgtttggctcgttttgaagaaatgagcaactacgaataccaaaaacgcaatgaaacgcaggaaatctttattcccgttgccgagcgtttgggtaacgaagtgattgaatttgtaaatgtttccaaatcgttcggcgataaagtgctgattgacgatttgagcttcaaagtgcctgcgggcgcgattgtcggcatcatcggcccgaacggcgcgggtaaatctacgctgttcaaaatgatttcgggcaaagagcagcctgattccggcgaggtgaaaatcggacaaaccgtgaaaatgagcttgattgaccaaagccgcgaaggtttgcaaaacgacaaaaccgtgttcgacaacattgccgaaggccgcgacattttgcaggttggtcagtttgaaattcccgcccgccaatatttggggcgtttcaacttcaaaggcagcgaccaaagcaaaattgcaggtcaattgtctggcggcgaacgcggtcgtctgcacttggcaaaaaccttgttgagcggcggcaatgtattgctgctggatgaaccgtctaacgaccttgacgtggaaaccctgcgcgcgttggaagacgcattgttggaatttgccggcagcgtgatggtgatttcgcacgaccgttggttcctcgaccgcatcgccacgcatatcttggcgtgtgaaggcgactctaaatgggtgttcttcgacggcaactatcaggaatacgaagccgacaagaaacgccgtttgggcgaagaaggcgcgaaaccgaaacgcatcaaatacaaaccggtaacgcgttaa

SEQ ID NO: 44002 - DNA, 2085 bp, Neisseria meningitidis
atggattatttatcaagactgtcctttggatttaacaaaaagctacctgtcattctgcaaacagaagttgctgaatgtggtttagcatgcctgacatccatcttgtcctattatggctttcacactgatttaagaacgttacgccaaaaatacaccctgtcattaaagggcgcaaatcttgcagacatcatgagatttggcaatgaaatgaatttaacgccacgagctttgcgtttagagttagatgagctgtcaaatttacaactaccctgcattctccattggaacttaaaccattttgttgtactttgttccatttccaaagacagtatcgtcattatggaccctgctgtcggtatgcgaaaaatcaaaatggacgaagtttcacaaaaattcacagggattgccctagaattattccccaatacccattttgaagagaaaaaagaaacaaagaaaatcaaaatattatctctattaagggggtcaggcttaaaacgctctttaattcaaatgcttatattagctatttctttggaagtctttgcattggttagtccattctttatgcaatgggtaatagaccatgtcattgtaactgctgataaaaatttattattgacccttactttgggatttggtttactgactatcctgcaacagttaattagcctgttacaagcatgggtaggtatgcacctatctacaactcttaatttacaatggaaagccaatatatttaaaaggttacttgacttacctaatgactatttcagtaaacgacatttaggagatgtgatttcaagatttggttcaatagatcatatccaagaaacactaacttctactttttttgttttagttttaaatagcttaatggctgtttttactttcgtgttaatgacaatttacagcactcaattatcgctgattgttcttttaacacttgttttgtacatactaattcgttggcttgcatattacccattaagaaatgcaacagaagaaaatattgttcatgaagccaaacaaaactcatatttcatggaaaccattcgtggtatccaatcagttaaattatttgataaacattatcaaagacatggcacttggatgagcctatttgtgaatacagtcaataccaagctgacaacagataaactctctgctttatttgaattttcaaataaactgttgtttagcatggaaaatgttatcataatttatcttggtgcaagcgcaattttagatggttcatttacagtcggtgttctgatggcttttttggcttataaagggcaatttgaaagcagaacagcttctctcgttgaccaatacatccaaatcaaaatgttagggcttcatgctgaacgtttggctgacattactttaaatgaaacagaaactgaaattattaagtataatcatatacctaaattagataatgaacaactggttcttaaagttgaaaacgtctcattcagatatgctgataatgagccatatctttttgaaaacattaatttggaatttaaagataatgaagcagttgttttaacaggacaatctggtcgggggaagtccactttgttaaacattttaacaggtagcctaaaacctgaaactggtacagttagtattaatgggcatgatatatatcaagtttctccatcctttattaggggattgagcgggattgttcgccaagatgatgtcctttttgcaggttctattggggaaaatatttcattttttgatgaaagcccaaatatggagctcattgaacaatgtgcaaaaatggcacaaatacatgacgatatacttaaaatgccaatgggctatgagaccttgattggcgatatgggaaatatcttatcaggtggacaaaagcagagagttatcttggctcgtgcattgtataaacgacccaaaattctatttttagacgaagcaagtagccatttagatgtagaaaatgaacaaaaaattaaccataacctaaaaagtcttggtattatgaaaataatggttgcacaccgccaagaaacaattcaatcggcagataaaattctgaatttaggttga

SEQ ID NO: 44003 - DNA, 1392 bp, Neisseria meningitidis
atgtttcccgatttctcccaaaccctctccaaagaccgccacttcctgcgttccgccttcaaaaatcccaacaaatacggcggtttgtccaaaatcgaagaaaaataccgaaaatcgcacgaaatctttttgaagcgtttggcagccttgccaaaacccgaattcgacaacaccctgcccgttcacgagaagctcgaagaaatcaaaaaagccattgccaagaatcaggtaacgattatttgcggcgaaaccggttcgggcaaaaccacgcagttgcccaagatttgcttggaactcgggcgtggggcggcaggattgatcgggcatacccagccgcgccgtttggccgcgcgctccgtagcagagcggattgccgaagagctgaaatccgaaatcggcagcgcggtcggctataaagtacgcttcaccgaccacacctcgcgcgatgcctgcgtcaagctgatgaccgacggcatcctgctggcggaaacgcagaccgaccgttatctcgccgcctacgacacgattatcatcgacgaagcgcacgagcgcagcctgaacatcgacttccttttgggctatttgaaacaactcctgccgcgccgccccgatttgaaagtcatcatcacctcggcaacgatagacgcagaacgcttctcccgacacttcaacggcgcgcccgttttagaagtgagcggacggacgtatcccgtcgaaatcctctaccgaccgctgaccggcaaagacgaagacgacgcagaagtggagttgaccgacgcgattgtcgatgcggcggacgaattagcgcgacacggcgaaggcgatattttggtattcctgccgggcgagcgcgaaatccgcgaaactgccgaagccctgcgcaaatccacgctgcgccgcaacgacgaaatcctgcccctgttcgcacgcctgtcgcacgccgagcagcacaaaatcttccacccctcaggcgcgaaacgccgcatcgtattggcaaccaacgtcgccgaaacctcgcttaccgtgccgggcatcaaatacgtcatcgacaccggcctcgcgcgtgttaaacgctattccgcacgggcgaaagtggagcagcttcatatcgaaaaaatctcccaagccgccgcccgccaacgatccggccgctgcggacgcgtctccgcaggcgtgtgtatccgactgttttcagaagaagattttaacagccgccccgaatttaccgaccccgaaatcgtccgcagcaacctcgccgccgtcatcctgcgcatggcagcattgaaactcggcgatgtggcggcattcccgtttttagaaatgcccgattcacggtatatcaatgacggttttcaggtgttgttggagttgggggcggtggaggccgtctga

SEQ ID NO: 44004 - DNA, 658 bp, Neisseria meningitidis
atgggcaggcatttcgggcgcaggcgttttctgacggttgccgccgttgcggcggcgggcgcggcggtttctttcctgccgaatccttttgccgccgatgatgaaaaacgcaacggggatgaaaaacgcaatgaaaatgtgtttttctggaaaggtgtcgcactgggttccggtgcggagctccgtctgttcggtgtggacgacaggcgtgcggcggatttggtcaacaaggttttggcggaagtggcgcgtttggaaaaaattgttcagcctttaccgtgaagacagcctgatcagccgcctgaacagggacggttatctgacttcgccgtcggcggattttttggaactgttgagcctgtgccgcgatattcacgcgctgacggacggcgcgttcgatccgacagtgcaggcgttgtggaaactgtatgccgattattttgccgcccgtcccgatgcggaaacgccgcctcctcaaaacagcgtggacgaagccctgaaacgggtcggcttcggcaaagtctcgtttgacgaccgtgaaatccgttttgccgaaaagggtatgggtttgtccttgaacggcatcgcgcaaggctatagtggattaacaaaaaccagtacggcgttgcctcgccttagctcaaagagaacgattctc

SEQ ID NO: 44005 - DNA, 816 bp, Neisseria meningitidis
ttgacagcctataatgaatccacttattcatcaagcaaaggaatcatctatgcaaaccctcatcctctccgccgtactgctggctttttcaaccgctgcctttgccgggggcgcattcacgctgcaattcgacaacccgtccgaagacggcggcttcacgcaaaaccagcttttgagcgcgccttacggcttttgctgttcaggcgacaatgcttcgcccgcgctgtcgtggaaaaatccgcccgccgggacaaaagtttcgtcctgaccgtttacgataaagacgcgccgaccggactgggctggatgcaccgggtggtcgccgacattcccgccgatgtccaccgccgcaacgcgacctcgctgcaattaagccgctgcgccaacatcgccgaccggactgggctggatgcactgggtggtcgccgacattcccgccgatgtccgccgccgcaacgcggcctcgctgcaattaagccgctgcgccaacatcgccgacgaccagtccgcagccatatcggcggtaatcagtttgcggatttgccgcatcaggttgacgccttcgtacacggcaaaaccgatgccgtcatgctgcaaccacgccaacacgccgcaaagcgcggcctccgcagcattgtgcggcacttcttcatccgccagtaccgcagcctcataatcaaacgccgcgcccatacgcccggaatacggcagctttaccgcatcgcacactgcctgcgccgtcccgtattgtgcggcgaacctttctacggtttcctgttcgaaagcaatccattgcgcctgatagaggccgtctga

SEQ ID NO: 44006 - DNA, 1117 bp, Neisseria meningitidis
atgggcttgaaaaaggcttgtttgaccgtgttgtgtttgattgttttttgtttcgggatattttatacatttgaccgggtaaatcagggggaaaggaatgcggtttccctgctgaaggagaaacttttcaatgaagagggggaaccggtcaatctgattttctgttataccatattgcagatgaaggtggcggaaaggattatggcgcagcatccgggcgagcggttttatgtggtgctgatgtctgaaaacaggaatgaaaaatacgattattatttcaatcagataaaggataaggcggagcgggcgtactttttccacctgccctacggtttgaacaaatcgtttaatttcattccgacgatggcggagctgaaggtaaagtcgatgctgctgccgaaagtcaagcggatttatttggcaagtttggaaaaagtcagcattgccgcctttttgagcacttacccggatgcggaaatcaaaacctttgacgacgggacaggcaatttaattcaaagcagcagctatttgggcgatgagttttctgtaaacgggacgatcaagcggaattttgcccggatgatgatcggagattggagcatcgccaaaacccgcaatgcttccgacgagcattacacgatattcaagggtttgaaaaacattatggacgacggccgccgcaagatgacttacctgccgctgttcgatgcgtccgaactgaagacgggggacgaaacgggcggcacggtgcggattacttttgggttcgcccgacaaagagatgaaggaaatttcggaaaaggcggcaaaaaacttcaaaatacaatatgtcgcgccgcatccccgccaaacctacgggctttccggcgtaaccacattaaattcgccctatgtcatcgaagactatattttgcgcgagattaagaaaaacccgcatacgaggtatgaaatttatacctttttcagcggcgcggcgttgacgatgaaggattttcccaatgtgcacgtttacgcattgaaaccggcttcccttccggaagattattggctcaagccggtgtatgccctgtttacccaatccggcatcccgattttgacatttgacgataaaaattaa

SEQ ID NO: 44007 - DNA, 1059 bp, Neisseria meningitidis
atgtcttcacgcaaaattatccacatcgacatggacgcattctacgcatcggtagagctgcgcgaacagccgcatttgaaagggcggccggtggtcgtcgcgtgggagggcgcgcgttcggtgatttgcgccgcatcgtatgaggcacggcagttcgggctgcattccgcgatgtcggtggcaacggcgaaaaggctgtgtccgcaagcggtgtatgtgccgccgcatttcgatttgtaccgtcaggtttccgcgcagattcacgccgtattcaggcgttataccgatttaatcgaacccttgtcgctggacgaagcctatcttgacgttacccgtaatttcaaaaacatcccttacgccggcgacgttgccaaagaaatccgtgccgccatttttgcggaaacaggtttgactgcatccgcaggcatcgcgccgaacaaatttctggcgaaaatcgcgtcggactggcgcaagccgaacgggcagtttgtgttgccgccgcacaaagtcatggcatttttggaaaccctgcctttgggcaaaatccccggcgtgggcaaggtaacgctgaaaaaaatgcagtcgctgggtatgcggacggcgggcgacttgcgccgtttcgagcgcggcgaactcttaaaccatttcggacgctacggataccgcctctatgatttggtgcgcggtacggacgaacgccccgtcaaagccgaacgcgaacgcctccaaatctccacagaaattaccctgcccgaagacctgccgctcgagcaggctgccggacacctcccccatcttgccgaagacttgtggcggcaaatcacgcgcaaaaacgtcgaagcccaaagcgtaacgctcaagctgaagacctacgatttccgcatcatcacgcgcacactgacttattcctccgtattgcccgactgcgcagctctgctgcaggctgcgcaaatgttgatggcgcgcgtctcgccgcagacggaagacgcgttccgccttatcggtatcggcgtggggcatcttgtgccgaaaaaccagcagcaggatttgtgggcgtaa

SEQ ID NO: 44008 - DNA, 1269 bp, Neisseria meningitidis
atgcaacaaattaaatttattgacttattttccgaaatgagtggcatcaggaaaggattcgaacaagcctgtcggaaacagtcggttgcttgcgaatgtgtttttacttcagaaatcaaaccggcagctttggaagtattgaagcaaaactaccctgatgaagtgccgtatggagatataacgaaaattgaaacaggggatattcccgattttgacatcctgttggcaggcttcccttgtcaggctttttctttcgcctgaaaaagattaggctttgaagatacacggggaacgcttttctttgatgtggcaaggattttaaaggcaaaaaaaccaaaaggttttattttggaaaatgtggaaggattggtgacacacgatagaaaagattcgacacaaaaaatagggcgcaccctgaccgttattttggaaaccttggaagcattgggctactatgtttcttggaaagttttaaatgcaaaagatttcggcattccccaaaacaggaagcgcatttatctgacaggcagtttgaaatccaaacccgacttatctttcgaaacaagcccaagtccgaaattaaaaaatattttggaatcgggactgcctaccgaaagcagccctttcatcaaaaaattgctaaaaaaatttcccccgtccgaactgtacggaaaatcagtaaaagacaaacggggagggaaaaacaatattcacagttgggatattgaattaaaaggcgcagtaaccgaagaagagaagcaattgttaaatatccttctaaaagaacggaggaaaaaatgggcttcagaaatcggcatagattggatggatgggatgcctttgacaaaagcgcaaatttcaactttctataaacaccccgatctccaaaatattttggacagcctgacagataaaggctatttggttttagagcatccgaaacaaaaaattggcgggcaaagaatcaaagatgaatccctgcccaaaggctacaatattgtttcaggcaaaaaatcttttgaaatcaataaaatattagatcaaaacgatgttgcgccaaccttggttgcaatgaatatggagcaccttttcgtcgttgacaacggcggtttgcgtacacttaccggaaaagaagggttgcgcttattcggctatccggacgattattcgtttgatattcccaaaaaagacagatgcgatttattgggtaataccgttgccgtccctgtgattaaggcggtatctgaaagacttctgcatactttataa

SEQ ID NO: 44009 - DNA, 1002 bp, Neisseria meningitidis
atgcacacaccacttacctatattgaccttttctcaggagcaggaggcctatccttgggttttgaacaagccggattccaacaattgctttctgttgaaatggagtctgattattgtcagacttaccgtaccaacttcccccatcatcaattactgcaaaaagatttaaccacactaaccgaacaagatttaatcaattgtcttaacggacaagcagttgatttgattattggaggaccaccttgtcaaggttttagtatggcaggaaagattggacggacatttacagatgacccacgcaaccatttatttaaagagtttgtccgaatagttaaaattgtccaaccatatttttttgttatggaaaatgtagcgcgactctatacacacaattcaggtaaaacacgtattgagattattcaagcatttcagaatatcggttattcggtggaatgtaagatactgagtgcagccgatttcggtgttcctcagatacgtagccgagtgatatttatcgggaggagggataaaggcaaaatttcctttcccgaacctttgcagatttcccatcagactgttggatcagcaataggacattttccaaaactggctgctggcgaaagcaatccacacgttgcaaatcatgaagctatgaatcattcggcacaaatgttagaaaaaatggcatttgttaaaaatggaggtaaccgtaacgatattcctgaaccattacgtccgaaaacaggtgatatccgtaaatacatccgttacaacagcaacaaaacagccgtttgtattacaggagatatgcgcaaagtttttcactatgaacagaatcgggcgttaaccgttcgtgaattagctgccttacaatctttccctgataattttattttttgcggcagcaaaattgcccagcagcagcaggttggtaacgccgtaccgcctttattggcaaaagctattgctgaaagtattttaaaaatgagtgaaaatgaataa

SEQ ID NO: 44010 - DNA, 3255 bp, Neisseria meningitidis
atgcgaacgaccccaaccttccctacaaaaactttcaaaccgactgccatggcgttagctgttgcaacaacactttctgcctgcttaggcggcggcggaggcggcacttctgcgcccgacttcaatgcaggcggtaccggtatcggcagcaacagcagagcaacaacagcgaaatcagcagcagtatcttacgccggtatcaagaacgaaatgtgcaaagacagaagcatgctctgtgccggtcgggatgacgttgcggttacagacagggatgccaaaatcaatgccccccccccccccccgaatctgcataccggagactttccaaacccaaatgacgcatacaagaatttgatcaacctcaaacctgcaattgaagcaggctatacaggacgcggggtagaggtaggtatcgtcgacacaggcgaatccgtcggcagcatatcctttcccgaactgtatggcagaaaagaacacggctataacgaaaattacaaaaactatacggcgtatatgcggaaggaagcgcctgaagacggaggcggtaaagacattgaagcttctttcgacgatgaggccgttatagagactgaagcaaagccgacggatatccgccacgtaaaagaaatcggacacatcgatttggtctcccatattattggcgggcgttccgtggacggcagacctgcaggcggtattgcgcccgatgcgacgctacacataatgaatacgaatgatggaaccaagaacgaaatgatggttgcagccatccgcaatgcatgggtcaagctgggcgaacgtggcgtgcgcatcgtcaataacagttttggaacaacatcgagggcaggcactgccgaccttttccaaatagccaattcggaggagcagtaccgccaagcgttgctcgactattccggcggtgataaaacagacgagggtatccgcctgatgcaacagagcgattacggcaacctgtcctaccacatccgtaataaaaacatgcttttcatcttttcgacaggcaatgacgcacaagctcagcccaacacatatgccctattgccattttatgaaaaagacgctcaaaaaggcattatcacagtcgcaggcgtagaccgcagtggagaaaagttcaaacgggaaatgtatggagaaccgggtacagaaccgcttgagtatggctccaaccattgcggaattactgccatgtggtgcctgtcggcaccctatgaagcaagcgtccgtttcacccgtacaaacccgattcaaattgccggaacatccttttccgcacccatcgtaaccggcacggcggctctgctgctgcagaaatacccgtggatgagcaacgacaacctgcgtaccacgttgctgacgacggctcaggacatcggtgcagtcggcgtggacagcaagttcggctggggactgctggatgcgggtaaggccatgaacggacccgcgtcctttccgttcggcgactttaccgccgatacgaaaggtacatccgatattgcctactccttccgtaacgacatttcaggcacgggcggcctgatcaaaaaaggcggcagccaactgcaactgcacggcaacaacacctatacgggcaaaaccattatcgaaggcggttcgctggtgttgtacggcaacaacaaatcggatatgcgcgtcgaaaccaaaggtgcgctgatttataacggggcggcatccggcggcagcctgaacagcgacggcattgtctatctggcagataccgaccaatccggcgcaaacgaaaccgtacacatcaaaggcagtctgcagctggacggcaaaggtacgctgtacacacgtttgggcaaactgctgaaagtggacggtacggcgattatcggcggcaagctgtacatgtcggcacgcggcaagggggcaggctatctcaacagtaccggacgacgtgttcccttcctgagtgccgccaaaatcgggcaggattattctttcttcacaaacatcgaaaccgacggcggcctgctggcttccctcgacagcgtcgaaaaaacagcgggcagtgaaggcgacacgctgtcctattatgtccgtcgcggcaatgcggcacggactgcttcggcagcggcacattccgcgcccgccggtctgaaacacgccgtagaacagggcggcagcaatctggaaaacctgatggtcgaactggatgcctccgaatcatccgcaacacccgagacggttgaaactgcggcagccgaccgcacagatatgccgggcatccgcccctacggcgcaactttccgcgcagcggcagccgtacagcatgcgaatgccgccgacggtgtacgcatcttcaacagtctcgccgctaccgtctatgccgacagtaccgccgcccatgccgatatgcagggacgccgcctgaaagccgtatcggacgggttggaccacaacggcacgggtctgcgcgtcatcgcgcaaacccaacaggacggtggaacgtgggaacagggcggtgttgaaggcaaaatgcgcggcagtacccaaaccgtcggcattgccgcgaaaaccggcgaaaatacgacagcagccgccacactgggcatgggacgcagcacatggagcgaaaacagtgcaaatgcaaaaaccgacagcattagtctgtttgcaggcatacggcacgatgcgggcgatatcggctatctcaaaggcctgttctcctacggacgctacaaaaacagcatcagccgcagcaccggtgcggacgaacatgcggaaggcagcgtcaacggcacgctgatgcagctgggcgcactgggcggtgtcaacgttccgtttgccgcaacgggagatttgacggtcgaaggcggtctgcgctacgacctgctcaaacaggatgcattcgccgaaaaaggcagtgctttgggctggagcggcaacagcctcactgaaggcacgctggtcggactcgcgggtctgaagctgtcgcaacccttgagcgataaagccgtcctgtttgcaacggcgggcgtggaacgcgacctgaacggacgcgactacacggtaacgggcggctttaccggcgcgactgcagcaaccggcaagacgggggcacgcaatatgccgcacacccgtctggttgccggcctgggcgcggatgtcgaattcggcaacggctggaacggcttggcacgttacagctacgccggttccaaacagtacggcaaccacagcggacgagtcggcgtaggctaccggttctga

SEQ ID NO: 44011 - DNA, 993 bp, Neisseria meningitidis
atgaaacaaaaaatcttcgtcctctacacaggcggcaccataggcatgacccaaagcagcgaaggcctgcgccccgataccgcactggttagccaagccctttcccccttttcagacggcctcgatttcgagtggcacgtctgcaatcccttgattgattcctcctccgttacgctgcaacactggcgcgattggctggacatcattgccgacaaactcccttcatgcgacggcatcctgatactgcacggcacggacagcatggcgtacaccgccaatctcctcgcgctcgctctgcaaggtttgggcaaaccgattgtcctgactggttcccaatggccttacgccgccgaaaacagcgatgccccgcgcaacctctccaccgccgttgccgccttcagcctcaagctcaaacaaaccgtcatcgcgtttgacggcaaactgtatcccgccgtcggcagcagcaaagtcagcaccgaaactgctgcaggcttcgacaatccgcatttcggcacgcttgccgaatgggacgaaacccggggttggcacaatcttcgcctcccgtcccaagacgcagcagccgtttcagacggcctcaaaatccgttatcccgacccgcaggcaaaaatcgctgtccgcacgcttatccccggctttgccgtccaagaacttgcggacggactcggacagcttcccgcccaagctcttatcctgcaaagctacggacacggcaacacgcccgcagacgaaggttttatccgcgccgtccgagacttcgcgcggcagggcaaactgctgctcaacatcagccaagtccgacaaggcaaaaccgccgccgtttacgcgcaaggcaacgcgttccgcaactcgggcatcatcaacggcggcaaatgcaacctcgaaaccgccaccgcgctgatgaccctcgccgtatcgcaaggctggggtaaggaagatgtttacaaagaattggtaagactaaagttagtgtga

SEQ ID NO: 44012 - DNA, 2190 bp, Neisseria meningitidis
atgatctaccaccgcatcgccgtaaacgtgccgctttcagacggccttttgacttattcccattccgatccgcttcctccgggaacgcgggtgcttgtgcctttccgcaataaaaccgtggtcgggatggtgtgggaaacggatattgcgccggatatggatacggcgcggattttgggcgttcagacgaccttttcggacgaaccgctgctgcccgaaagctggcgtgatttgttggcgtttacgtcgcgttattaccactatccgaccgggcaggcagtatttgccgcattgccgcaaggtttgaaggaaacgcgcgcggtggaaatgccgcagccgcccttgttttacgcgttgaacgaagcgggcagggcgcaaacgccgccgccggcgcggttcaacaaaaaagcggctttgtgggacgcgctgctgtcgggcgaaatgacgatggcagcgttgaagcaggtaaacgcgcaggcggcgaagttaatcgaagattgggcggagcagggttggattgaaacgacggaagcggcgaagcccgttttaaggtcgtgtaatgggcaggcttcgcactctgaatttgtattaaatgctgaccagcagaaggcttccgatgccattcagacggcattgggacgcttccagccgtttctgctgtacggcatcaccggcagcggcaagaccgaagtgtatttcgatgcgatggcgaaagtgttggctcaggggcggcaggtgttgtttctgttgcccgaaatcaacctcacgccgcagcttttgaagcgggtggaaaaccgttttgccgacgtgccgaccgccgtgttgcacagccggatggcggcaggcaggcgaacgcaggattatctgcgcgcgatgtcggggcaggcgaagctggtgatcggcacgcggctggcggtgttcacgccgatggatgatgtcgggctgattgtggtcgatgaggaacacgacggctcgttcaaacaggacaacgaattgcgctaccacgcccgcgatttggcggtgtggcgggcgaagcagggcggctgtcccgtcgtgttgggcagcgcgaccccaagcttggaaagctggcacaaggcacaaagcggcgcgtaccgcctcttgcaactgaccgaacgcgcccatgccgccgcgcaactgccgcaagtagaaatcctcaacgcaggccgtctgaaactcgacaacggtttctcgccgcaagccttgcagcttctgaaacagaattttgaagcaggcggtatgtcgctggtgtacctcaaccggcgcggctttgcgcccgcgctgttttgcggcgactgcggccataccttcggctgcccgaactgctccgccaaaatggtgttgcaccaacgcgcccgccaactgcgctgccaccactgcgaccaccgcgaatccatcccgttcaaatgccccgactgcggcaaccaagacctgaccgccgtcggccacggcacgcagcgcgtcgaagaaaccctgcgctccttcctgcccaaggccgccgtcgtccgtgttgacagggacagcacggcgcacaaaaacgactgggcggatttgtaccgccgcattgccgacaacgaaatcgacattctggtcggcacgcagatgctcgccaaaggccatgatttcgcgcggctcaacctcgttatcgtgttgaacgccgacggcagcctgtacagcgcggacttccgcgcaccggaaaggttgtttgccgagttgatgcaagtgtccggcagggcggggcgcgccgacaaacccggcaaggtgctgatacagacccaactgcccgaacatcccgtcttcgccgccgtcaaagcgcaggattatgccgtgtttgccgaaaatgaattgaacgagcggcaaatgttcgcgatgccgcccttcggtttccagaccgccgtccgcgccgatgcgccgcgtgttgccgatgcgatggaatttctcaatgccgccaaagaaaccctcgccccgctgttgcccgaaagcgtttcccagtttggcgccgcccctatgctgatggtgcgccttgctgaacgcgaacgcgcgcaaatcttcctcgaatcggtatcccgacaggatttgcaccgcgccgtgagtttgtgggtgcaggtgttgcagcaaaaccgcgacagcaaaatcagatggtcggtggatgtcgatccgcaggaggcttga

SEQ ID NO: 44013 - DNA, 903 bp, Neisseria meningitidis
atgaatccggcaatgattgagcgtcttaaggcagtcgagaatcaggcggaagcaatggaacgcggcgcacgctctgcatatcttaagcagcaggcgcaggaattgggcatcagccttgccacgctataccgcaagctggaggcggtcagcgtcaagccgacgcgcaaacggcgcagcgatgcgggcaagacggagcttaaaccggaagaagccaaattgatttcggcggttttggtggaggcgatgaggcgcaacggcaagcggttgatgtcggtgcggcaggcggtggaaatgctgcgcgccaacggaaaaatcgaggcggcgcggattgatggggaaaccggggaagtcatcccgtccgtccgcactgctttccgcccgctggcaagacatcgacctcaccgcccggttatggcacatccccgccgccgacatgaagaccaaacacccctttaccgtcctactgtcggactgggcggtagaaatactccgagagctgcacacacagaccggcgacaacatccaccttttccccggcatccgcccacggcgcaaacccgcccccctcccgaccacatcagcatcaaattcgcccacaacgccatccgacgactgggctatgacggcagcacccccggcaaatccaaacacacaatgcacggattccgccacctcttcaccaacatcagcctgaccgccggaaaagacaccctcacaacagacctcgccctcggccacatcagccgcgccgccctccaacgcgccggcttctcaagcctgcaccactacctgaccgccgacagctaccgcctccaagagcggcgcgaactcgccgaatggtacagccgccgccaccgccaagcatacgaagccgccgcccaaaacacttgcaataaaacctaa

SEQ ID NO: 44014 - DNA, 1410 bp, Neisseria meningitidis
atgaatttccccaaaacagcggcctccctgctgctgcttctcgcctccctcgccgcacacgcgctcgataccggccgcattccgcaaaacgaaatcgccgtatatgtccaagagcttgacagcggaaaagtcatcattgaccaccgctcggatgtccccgtcaaccccgcctccacaatgaaactcgttaccgcgtttgccgccttcaaaaccttcggcagcaattaccgctgggcgaccgagtttaaaagcaacggtacggtaaacgacggcacgcttgacggaaacctatattgggcgggcagcggcgaccccgttttcaatcaggaaaacctgcttgatgctcaaaaacagttgcgcgaacaaggcatactcaatatcacgggacacctgatgctcgaccacagcctgtggggcgaagtcggcagccccgacgatttcgaagccgacagcggttcgccgtttatgacgccccccaatccaactatgctgtctgccggtatggttatggtgcgcgccgaacgcaatgccgccggcagtaccgacatcctcaccgatccgcctttgccgcatattttcgcccaaaacaacttgaaaattaccgcctcccaagctgcctgcccttcgatcaaaaaactgatgcgtgcatctttttcggacaatacgctgaaattgcgcggcaatattcccgagagctgtttgggcaagcctgtcggtgtccggatgttcgcgcttgacgaactgatccggcaaagttttaccaaccactggctgctcggcggcggacggatttcagacggtatcggcatagccgacacgccggaaggcgcgcagacacttgccgttgcacacgccaaaccgatgaaagaaattttgacggacatgaacaagcgttcggacaatctaattgcgcgttccgtcttcctcaaactcggcggcgacggcaaactgcccgccgtttccgaacaggcggcgtctgccgtccggcgcgaacttgccgtatcgggcatcgatgttgcggatttggttttggaaaacggttcgggcctgtccagaaaagaaagggtaacggcgagaatgatggcgcaaatgttggaaacggcttatttcagcccgtttgcacaagatttcatcgacacgctacccatcgccggcacagacggaactttacgcaaccgcttcaaacaaagcggcgggctgttgcgcttaaaaaccggcacgctcaacaatgtccgcgcccttgcaggttattggctgggcgacaaaccgatggcggtggtcgtcatcatcaacagcggccgcgccgtttccctgctgccagacttggacaacttcgttgccaacaacatcatctccggcggcgatggctggctggatgcgaaactgatgtgcaaagaacgccgagcctga

SEQ ID NO: 44015 - DNA, 1182 bp, Neisseria meningitidis
  misc_feature 8, 9, 10, 11, 12: 'n' is a, c, g or t
gtgtgtgnnnnncgacatcctcgtcgtcggcgcaggccggcgggtttaagttttgcagccgaacttgccggcagcggtttgaaagttaccctgatcgaacgcagcccactgactgttctgcaaaatcctccatatgacggacgcgaaatcgccctgacccatttttcccgcgaaatcatgcagcgtttgggtatgtgggacaaaattcccgaaaacgaaatctaccctttgcgcgatgccaaagtgctgaacggacgttccgactaccagctccactttccccaaccgactgaagcgcgcggcgaacctgccgactgtttgggctatctgatttccaaccacaatatccgccgcgccgcctatgaagtcgtatcacaactcgacaatgtcagcattctgaccgatacggttgtcaaagaagtcaaaacatctgacaacgaagcacaagtcattttggaaaacggcaaaatactgactgcacgcctgcttttggcggcagacagccgcttctcgcaaacccgtcgacaactcggtatctcctccgatatgcacgattacagccgaaccatgttcgtctgccgtatgaaacataccctttccaaccaacataccgcttacgaatgcttccattacggacgcaccatcgcactgctgccgctggaagagcacctgaccaataccgtcattaccgtcgataccgataaaatcaacagcgttcaaaacctttcgcccgaagaattggcggcaagcgtaaaagaacagctcaagggcaggctcggcgatatggaattggtcagcagcatccaccattacccccttgtcggcatgattgccaaacgtttctacggcaaacgcagcgcgctgattggcgatgccgccgtcggtatgcaccccgttacagcacacggtttcaacttggggctttccagcgcagatattttggcaaaactgatactcgaagccgaacagcgcggtcaagacatcggtgcatcttcattattggaaaaatacagcagcaaacatatgctgcacgcccatccgctttatcacggaaccaatatgatgctgaaactgtttaccaatgagaccgcaccggcaaaactgttgcgcggcttggtattgcgtgccagcaacaatttcccaccgctgaagaaactgatcaccaaacaactgaccggttga

SEQ ID NO: 44016 - DNA, 2109 bp, Neisseria meningitidis
atgaagacagacattcaaaccgaattaacccaagccctactaccacacgaaaaagtatgggcgaacgaagaaaaaaccattttagccaaaaacatcctgttggatttggtggaaaaaaccgacccgaccattatcggtttgttattgagtaatgatgagttaaaacgccatttctttgtggaagtgaatggtgtgctggtgtttaaattgcaggatttccgttttttcttggacaaacacagcgtcaataattcctacacaaaatacgccaaccgcattggtttgacggacagcaaccgctttttgaaagacagcagtgatattgtgttggattttccgtttaaagattgtgtgttaaatggcggacaaagcaccgaggaaggcgaagaaatttattttaaacgcaataacagccagccagccagccagccagccagccagccagccagccagccagccagccagccagccagccagccagccagccagccaatatacactaaattaacccgaaaaagacaagaaatcttttttaatcaaacccttgcttttgatgaaattgatcggctttttgacgcaaaagcattctcaaaattctctcgctataccgcagacggcaaacaagccgttggcgaaatcaaacgacattcagacggcacacccgccgaaaatctcattatcaaaggcaataatctgattgccctgcattcgcttgccaagcagtttaaaggcaaagtgaagctgatttatattgacccgccatataacacgggtaatgacggttttaaatacaacgacaaatttaatcattccacttggctgacttttatgaaaaaccgtctagaaatcgccaaagagctgcttatgaaagacggttcgatttttgtgtcaattgacgacaacgaacaggcatatttgaaaattttaatggatgaagttttcggaaatgaaaatttcatctgcaattttatttgggaaaaaaagacaggtgcgtccgatgccaaacagatagcgactattacagagtttgtcttatgttactcaaagaactttaaaacagttaaattaaataaaaacacgttttcttatgatacagagagatacaaattaagtgataagtttgaacaggaaagaggcaaatattatatcgacaatttagatagagggggattgcagtatagtgacagtttgaattttgcaatccaatgtccagatggcacttttacgtatccgaatggcaggactgaatttgtcaatgatggctggatatggaaatggagtaaaaataaaattgattgggcaataacaaacggttttttggagtttagaaaatcaaagtctaaaaaatctggatggagtgtatgttataaaaactatatgttggttgataacgaaaacaagccgatagaacgttctgctccctataagaacttaatacaggatatcttaaatacacatgcgacagatgaattgaaaaaactgttcggcagcaaagtttttactactccaaaacctgagagcttattgcagtatcttattcaaattgccacatccgaatccgacatcgtcttagactaccatcttggtagtggcacaaccgccgccgttgcccacaaaatgaaccgccaatatatcggtattgaacaaatggattatattgaaacgcttgctgttgaacgcttgaaaaaagtgattgatggcgagcaaggcggtatttccaaagccgtgaattggcaaggtggtggcgagtttgtttatgccgaacttgccccatttaacgaaaccgcaaaacaacaaattttggcttgcgaagattcagacggcatcaaaacgctgtttgaaggtttatgcgaacgctatttcttgaaatacaacgtcagcgtaaatgaatttagtcaaatcattcaagagcctgaatttcaatctttgccattagacgaacaaaaacaaatggtgcttgaaatgttggatttaaatcaaatgtatgtttcattatccgaaatggatgacgaacaatttgcagattgcctgaacgatgatgataaagccttaagccgtgcattctatcaatcagtaaaaaatcaagcggagaaaaaagatggcgaataa

SEQ ID NO: 44017 - DNA, 2778 bp, Neisseria meningitidis
atggcgaataataaaacgttgtttgaagtgattgaaaatgaacgtaaagcggttaaaaaatacaagcctgaattacttgaaatgccagaatttacgtccaaaaacttaaaatatgatttttttgaatggcaaaaatctgcccttgaaaactttttgatttttgaccgcacttcaaagctagacgatttccctgatttaaaaaataagccaacgcatttgctgttcaatatggcaacaggtgctggcaaaacgatgatgatggcggcgttgattttgtattattttgaaaaaggttatcggcattttctgttttttgtgaatcaaaacaatatcgtggataaaacggaaaataattttaccgatccgacgcacgcaaaatttttatttaccgagaagattttgcagggcgatacggtaattcctattcgcaaagtggagacatttagcccacattcagacggcattgaaattaaatttaccagcattcaaaagctgtataacgatattcgcacccggcgggaaaatcaaaccacattggcggatttgcacaaattgaaccttgtgatgctgggtgatgaagcgcaccatttaaacgcgcaaaccaaaggcaaaaaacaaggcgaattagatttagaaaaggaaatgaacgaccgcaccagcaatgccgaaattgaacgtaaaggctgggagcatatggttttggaattgttactcaataaaaatggcaatcatagccaaaatgtgctgttggaatttaccgccacgctgcctgaaaatgccgatgtacaacaaaaatacgctgataaaatcatcacaaaatttggcttaaaagaatttttgcaaaaaggttataccaaagaaatcaatttggtatccagtacgctgggtaagaaagagcgagtgttacacgctttattgtttgcttggtatcgacatcgaattgcgttgaaatatggcattgccaatttcaagcctgtgatgttgtttagaagtaagacgattgatgaatcaaaagcggattatctggcatttttaaattgggcagaaaatgtgcaggcggttgatttttcgtttttaactacattttcaacaagcttgaacgatagcgatagcgataacgccaacgaacaaggcaaaacccgcactgaacaagccctaaaatttatgcaggaaaaaggcgttgagtttgcacatttggcagattgggtaaaacaaaattatcaaaaacacaatgtgattattaccaactccgaaaccaacaaaaccaaaaccgaaaaaaccgacagcgaaacagaaaaattgctgaataatttggaagcggctgataatccgattcgtgccatttttacggtggacagattaaccgaaggttgggacgttctgaatttgtttgatattgtgcgtttgtatgaagggcaaaacggcggcggttcaaataaaaaatcaggcaaaacggctgccgctactgtatcggaaaagcagttgattggtcgcggcgtgcgttattttccatttgcgtttgaaggtaaacagccgaataaacgcaaatttgacaacgatatgcaacacgaattgcgtattttggaagaattgttttattacacgcacgatgagcaatctcgctatattacagaactgaaaaacgagttacgaaaagacggttatttgcctgaaaaagacgatgataaggtattggcaacatttaaactcaaatctgaatttgccgataatcaggattttagagagttgttaatttgggcaaataaaaaaatccccaatcccaatgccagagccaataatgcagacagcctgaaagccaatccgcaaacgcttccattccaagttcacggcaatcaactgttgcaggaaacgcaatttacagccgatgaaaatgatgaaatagcccgacaaatcgacacacaaaataattttactcaaatcataaaaatgagtgaaatggaacggcacattttcaataaatccctgcatatcaaaggaaaaaatggtcaatctttattccattttgaccgcttgcaaagcaaactcaacatttacaatcgcaatgaattgcaaaataacttgttaaaagattgacaaattgaatttttgggattagggcaagacaaacagatcagcccagatgacaaacttgcaggctgcctaaaaatcttggaaatggttgaaaaacatttgaatgaaagtgatatgccatttatcggtacaaaagaatttacgcctaaaaaattgtgggaaatttttggcacaccaaaacaaaaatgggtcaaaaaagatgatataaaaactgccattgccacgcaaaatgattggtatgtgatggataattttgctggaacgagtttggaagaagcgttaattcaatttatttcagagcatttgggcgatttgaagtctaaatatgatgttcatttaatccgtaatgaagaagtgtttaaattgaataacttttccgatggtgaaggatttatgccggactttattttattgctgaaaaataaacaaaaatcttcttccaatggtgtggatgactttttgcattaccaaattttcattgaaccaaaaggtgagcatttggtggaaaatgattcgtggaaagacgcttttttaaaggcaattacagcggaatacgggacggataagattctgcaaaaagatacaccgcattatcgtttgatcggtttgccgttttttactgacaatcaggaaaatgaacaatttacaaagtcattccctttaggggcggcatcgcttgaaaaatag

SEQ ID NO: 44018 - DNA, 984 bp, Neisseria meningitidis; identical to SEQ ID NO: 40053

SEQ ID NO: 44019 - DNA, 1161 bp, Neisseria meningitidis
atggatatgcaaaacaaagcgaaaaaattgattgagatgattcagacggcaccggtggagtggaagccgttgggggaagtggcgaaagtattaagaggaaaacgtttgacaaagaaagagctaattgaaggtgggaaatatccggtttttcatggcggattgattcctcttggttggtttgaccagtttaatcgtagagctaatcaaacgatgattattaatacgggaagtattggtgaagttatatggagtggcgtagatttctggtcatctgatggtacttttgtgattcaaacaccaaactatcttgatgataagtttatattctactttttaaaaacaagagaaggatatataaaatcccaaaagagagttggtggagttcctactattgatagattagtagttgaaaatatttcgatccccatcccacccctggaaacccaacaaaaaattgtaaaaatacttgacaaattcacagagctgtaagctacgctggaagcggaattaaccctgcgcaaacgccaataccggtattaccgcgactttcttttagattttaacaatcaaatcgggggggtagctgatggctataaaggccgtctgaaagatgtggtttggaagacgttgggggaggtatttaatatttttgctggaggcgacgtaccaaaagacgctttctctgaagtggaaacggaagaattttgtatccccattttatctaatggtataggaagtaaggcactatatggctggactaatgttgctaaaatcaatcaacctagcttaactatatcagctagaggaactataggttgggctagctttcagaataaaccttttttcccaatagtacgcctgttagtgttaacaccaaaaattgaattaaacctaaaatatgcctactactttatgaaaagtattgaatcaaattataaagttcctgaaagcggtattccacagctaacgaaaccaatgataaaagatatttcaatccccatccctccactccccgaacaggaaaaaatcgtcgccatcctcgacaaattcgacaccctgacccactccatcagcgagggcctaccgtacgaaattgccctgcgccggaaacaatacgaatattaccgcgggcagttgttgagcttcccaaaggctgcctga

SEQ ID NO: 44020 - DNA, 489 bp, Neisseria meningitidis
atgctcaaaataaccctaattgcggcgtgtgcggaaaacctgtgcatcggggcgggcaatgctatgccttggcacatccccgaagatttcgcatttttcaaagcctataccttgggcaaacccgtcattatggggcggaaaacgtgggaatccctgcccgtcaaacccctgcccggacggaggaacatcgtcatcagccggcaggcggattattgcgcggcaggcgcggaaacggcggcaagtttggaggcggcattggcattgtgcgcaggcgcggaagaagccgtcattatgggcggcgcgcagatatacggacaagcgatgccattggcgaccgatttgcggataaccgaagtggatttgtctgtggaaggagatgcatttttccccgcaatagaccggacgcattggaaagaagcagagcggacggaacgccgtgtcagcagcaaaggcacgcgctatgcttttgtgcattatttgagatattga

SEQ ID NO: 44021 - DNA, 1527 bp, Neisseria meningitidis
atggattatccaccgcttaagggtgcggcattggcgtgggttacgctgtctttggggcttgccgtatttatggaagttttagatacgactatcgccaatgtcgccgttcccgtcatcgccggcaacctcggtgcggcaaccactcaggggacgtgggtcatcacttccttttctgtggcaaacgccgtttccgtgccgctgacgggctttttggcaaaacgcatcggcgaggtcaaattgtttaccgccgccgctgtcggtttcgtcatcacatcgtggctgtgcggtattgcccccaaccttcagtcgctggttgttttccgcatcttgcagggctttatcgccgggccgctgattcccttgtcgcaaagcctgttaatggcatcctatccgcccgcaaaacggacgctggcactggcattgtgggcaatgaccgtcgttgtcgcccctgttctcgggccgatactcggcggctggatttccggaaactggcattggggttggattttcttcattaatatccctatcggtatcatatcggcatggattacatggaaacatttgaaatatcgggaaacggaaaccgttaaaatgccgaccgactatgtcgggcttacattgatggtagtcggtatcggcgcgttacagatgatgctggacaggggtaaggaactcgactggttcgcctctggagaaatcattaccttgggcgtagtcgcactggtgtgcttgtcgtattttattgtttgggaattgggagaaaaatatccgattgtcgatttatcgctgtttaaagatcggaattttaccgtcggcgtcattgccacgtcattgggttttatggtgtatatggggacgctgaccctgctgccgttagtgttgcagaccaacctgggctatacctccacgtgggcagggcttgccgccgcacctgtcggcatcctgcctgttttcctgtctccgttaatcggcaggttcggcaataaaatcgatatgcgcctgttcgtaactgccagcttcctgacctttgcctttactttctattggcgtacggatttttatgccgatatggatattggcaacgtcatctggccgcagttttggcagggtgtcggtgtcgccatgttttttctgccgctgaccaccatcacactgtcgcatatgaagggcgggcagattgccgccgcaggcagcctgtcgaatttcttgcgcgtgctgatgggcggtgtcggcgtatccgtcgtcagcaccctgtgggaacggcgcgaagcgttgcaccacacacgctttgccgaacacatcacgccctattccgcaacattgcacgaaacggccgctcatttgtcccagcacggcgtttccgacattcaaaccctaggcatcatcaacaataccattacccagcagggttttattatcggctcgaacgaaatctttatggcgggcagcttgttattcattatcatgatacccgtcatatggctggcaaaaccgccgttccacaacggcggcggcggtggacattga

SEQ ID NO: 44022 - DNA, 1644 bp, Neisseria meningitidis
atgaatgcttttacccgtgcatggtatgcgctcgaacgccattatcaggatacgcgtcatgtccttttgcgcgaccgctttgcctgcgaaccggaccggtttgagcgtatgcacgagcgtttggacgggatgttgttcgattacagcaaaaaccgtttgggcgaagatacgctgcaactgctctgcaatcttgccgacgcggcggatttggaagggaaaatgcgtgctttgcggacgggtgcgaaagtcaacggcagcgaggggcgtgccgcgctgcatacggctttgcgcctgcccgacggtgcggatgccgtttatgtggacggcagggacgtgttgcccgaaatccgccgcgagttaaatcgtgcgttgaagtttgcacacagtttggacgacggttcgtatcaggggataaccggaaaacggattacggattttgtccacatcggcataggcggatccgacctcgggccggcaatgtgcgtgcaggcacttgagccgttcagacggcatatcaccgtccattttgccgccaacgccgatcctgcctgcctggatgcggttttatgccgtctgaaccccgaaacgacagtgttttgcgttgccagcaagtccttcaaaacaccggaaaccctgctcaatgcacaggcagtcaaggcgtggtatcgcggtgcagggttctcggaatccgaaacggcgtgccatttttgcgcggtgtctgccgacactgcggcagctgcggcttttggtatcgcggcggaacgcgtgtttgcgatgtacgactgggtgggcggacgctattccgtctggtcgcccgtcggtttgcccgtgatggttgcggtcggcggggcgcgtttccgcgagttgttggcgggggcgcacgcgatggacaggcattttttcagtacgccgacgcgtcataatatccccgttttaatggcactgattgccgtgtggtacaacaatttccagcacgcggacgggcagaccgccgttccgtacagccacaacctgcgcctgctgccggcgtggctgaaccagctcgatatggagagtttgggcaaaagccgcgcttcagacggcagtcccgccgtgtgcaaaacgggcggcatcgtgttcggtggtgaaggggtcaactgccagcacgcctatttccaactgctccaccaaggcacgcgcctgattccctgcgattttatcgtcccgatgacggcgcagggcagagaggacggacgcagccgttttaccgttgccaacgcctttgcccaagcggaagccttgatgaagggcaaaaccttggacgaagcacgcgccgaactggcagatttgcccgaagcggaacgcgaacgcctcgcgccgcacaaagagttccccggcaaccgccccagcaacagcattttgattgaccgcctcacgccctacaatttgggtatgctgatggcggcttacgaacacaaaaccttcgtccaaggcgcgatatggaacgtcaaccccttcgatcagtggggggtggaatacggcaaacagttggcaaaaaccatcatcggcgaactggaaggcggcacgtccgtacacgatgcctcgaccgaagggctgatggcgttttaccgcgaatgccgtctgaaaggcggcggcgcggcataa

SEQ ID NO: 44023 - DNA, 735 bp, Neisseria meningitidis
atggcttcgcataatactacacatcagatgaaaacgctgtgttcttcctgttctttgcgggaactctgcctgcctgtcgggctgctgcccaacgagctcagccaactcgatgccgtcatccgtcaaagccgccgcctgaaaaagggcgaatacctgttctgtgtcggcgaagcctttacctcgctctttgccatccgttcgggcttcttcaaaacaaccgtcgccagtcaggacggccgcgatcaggtaacgggtttctttatgtcgggcgaactcatcggcatggacggcatctgttcccatgtgcacagttgcgacgcggtcgccttggaagacagcgaagtgtgcgaactgccgtttacccacatcgaagaactggggcaaaacatccccagcctgcgtacgcacttcttccgcatgatgagccgtgaaatcgtgcgcgaccaaggtgttatgctgctgttgggcaatatgcgcgccgaagagcggattgccgccttcctgctgaacctttcccaacgcctttattcccgaggttttgctgccaacgacttcatcttaagaatgtcccgcgaagaaatcggcagttatctcgggctgaaacttgaaaccgtcagccgcacattatctaaatttcatcaggaaggattgatttccgtcgagcataagcacatcaaaatcctcaatctgcaggtgttgaaaaaaatggtgtccggctgctcgcacgccatttga

SEQ ID NO: 44024 - DNA, 2109 bp, Neisseria meningitidis
atgaaaatatcatttcatttagctttattacccacgctgattattgcttccttccctgttgctgccgccgatacgcaggacaatggtgaacattacaccgccactctgcccaccgtttccgtggtcggacagtccgacaccagcgtactcaaaggctacatcaactacgacgaagccgccgttacccgcaacggacagctcatcaaagaaacgccgcaaaccatcgatacgctcaatatccagaaaaacaaaaattacggtacgaacgatttgagttccatcctcgaaggcaatgccggcatcgacgctgcctacgatatgcgcggcgaaagcattttcctgcgcggttttcaagccgacgcatccgatatttaccgcgacggcgtgcgcgaaagcggacaagtgcgccgcagtactgccaacatcgagcgcgtggaaattctgaaaggcccgtcttccgtgctttacggccgcaccaacggcggtggcgtcatcaacatggtcagcaaatacgccaacttcaaacaaagccgcaacatcggagcggtttacggctcaagggcaaaccgcagcctgaatatggacattaacgaagtgctgaacaaaaacgtcgccatccgtctcaccggcgaagtcgggcgcgccaattcgttccgcagcggcatagacagcaaaaatgtcatggtttcgcccagcattaccgtcaaactcgacaacggcttgaagtggacggggcaatacacctacgacaatgtggagcgcacgcccgaccgcagtccgaccaagtccgtgtacgaccgcttcggactgccttaccgcatggggttcgcccaccggaacgattttgtcaaagacaagctgcaagtttggcgttccgaccttgaatacgccttcaacgacaaatggcgtgcccaatggcagctcgcccaccgcacggcggcgcaggattttgatcatttctatgcaggcagcgaaaatggcaacttaatcaaacgtaactacgcctggcagcagaccgacaacaaaaccctgtcgtccaatttcacgctcaacggcgactacaccatcggccgttttgaaaaccacttgaccgtaggcatggattacagccgcgaacaccgcaacccgaccttaggttacagccgcgcctttactgcttccatcgatccatacgaccgagcaagctggccggcttcgggcagattgcagcctatcctcacccaaaaccgccacaaagccgactcctacggcatctttgtgcaaaacatcttctccgccacgcccgatttgaaattcgtcctcggcggccgttacgacaaatacacctttaattccgaaaacaaactcaccggcagcagccgccagtacagcggccactcgttcagccccaacatcggcgcagtgtggaacatcaaccccgttcacacactttacgcctcgtataacaaaggtttcgcgccttatggcggacgcggcggctatttgagcatcgatacgtcatcttctgccgtgtttaacgccgaccccgagtacacccgccaatacgaaaccggcgtcaaaagcagttggctggacaatcgtttggacaccacattgtccgcctaccaaatcgaacgcttcaatatccgctaccgccccgacgcggaaaataatccctacacttgggcagtcggcggcaaacaccgttcgcgtggcgtggaattgtccgccatcgggcaaatcatccccaaaaaactctatctgcgcggttcgttgggcgtgatgcaggcgaaagtcgttgaagacaaaaaaaatcccgaccgagtgggcatccatttgaataataccagcaacgttaccggcaacctgtttttccgttacccgaccgaaaacctctacggcgaaatcggcgtaaccggtacaggcaaacgctacggttacaactcaagaaataaagaagtgactacgcttccaggctttgcccgagttgatgccatgcttggctggaaccataaaaatgttaacgttacctttgccgcagccaatctgttcaatcaaaaatattggcgttcggactctatgccgggtaatccgcgcggctatactgcccgggtaaattaccgtttctga

SEQ ID NO: 44025 - DNA, 3090 bp, Neisseria meningitidis
atgaatcaaaatcatttttcacttaaaattctgaccgttatgctgttatcggcttacggtggttcttttgcagacggtgttgtgcctgtttcagacggcaataccgtcagtctggatacggtcaatgtacgcggctctcatgctttgttgggcaagaccgaaaagacccgttcttatacgatagatcggatgtccaccgccacaggtatgaggattgcgggcaaggatacgccgcagtcggtcagcgtcatcacgcgcagccgccttgacgataaggcggtgcatacgcttgaagaggcaatgaaaaacacgacgggtgtcaacgttgtgcgcgattcaggcttgcagacgcggtttttgtcacgcggtttctatattgatcagattggtgaagacggtatgaccgtcaatgttgcaggccgttcgggatatacggcgaaaatcgacgtgtctccgagtaccgatttggcggtttatgaccatattgaagttgtacggggtgcaacggggttgacccaatccaattcagagccgggaggaaccgtcaatttgatccgtaagtgacctaccgcttctttcaaacataccggagagctgaccgccgaccatcgcggcagccggcgtgcagtgttggatgtttcaggcagcctgaataaggcgaataccttacgcggaaggttggtgggtgcggaagagtataaaaaatcgtttaaagaccgagtttggggcaggaaacatatggtttacggcattgccgaagccgatgcgggcgacagcagtgtgcttactttgggcggcatgtatcagaagagtagggaggttcctgatttttcgggcattattttgccctgtgaaaatcagaaaactgccccgttcagttcaacgcctgcctgcaaccggcctttgcaactgccgcgcaacacttatttgggggaggattggtcgcggttaagtgccgacaaatacaaccttttctcaggattcaaacatgtgtttgacaacggttggcagctcaatgccgaagtgtcttataccaagaatgaatccgatgcgaaggtggggcagttttttctgaaaaacgaatatgcggcgggtttgtcgggtgaggatgcggtaggctttttgactgaaaaaaacgaagtcatcccgttcgagccgaaagataaggcattggagaaactgaaagcatatcgtgatgaaaccgccaaggaataccgggagcgcaaagacgattttgttaaaaaccgtttcgataatactgctttcgaacagtatcgcagccgccgtgccgcagaacgcaaagccggttttgacaagtgtatgagtgaccctttcgcgctggactttatctgtcaaggttcttggggggatccgggcgttgatgccgacaaggcggaatttgtcgataaagcccttgcgaaggagggcatctttaataatgcggcacaacgttttccaaacagcctgtatgactcttcctttaatcggaaggctaccgccaaccgacgatacagttatatgccgttgcggcataccaaagacgaccgccaatggggaattaaacttgacctgaccggcacatatgggctgttcgggcgggagcatgatttctttgtcggctatgcctacggtgatgaaaagatacgttcggaatatctagaaatctacgaacgccgctacagagtacgtccgaatacgggggcaacgcacggcgtgtatgcgggaagttgtcaggaggagccggacggcgatttgtcgtctcctttggtcagggggcataaagaacccgattggcaggcgtacgatgaaaaaggcaaccgtaccgtttatgccgaagaatgcaggaacgccaagaaaataaaaaccgagcccaagctcgatgccgaaggcaagcaggtgtattactatgacgaatacagcggcagccggacaccggtatatgtcgatgtatatgagctggacgaaaaaggcaacaagattcaggagaccaatcccgacggcacgcctgcctttaccggtttttccggtacggtgccggtttggaaaaccgtcaaagtggcagacgaccatgttcctgcgctgtataactacgccaaatacctcaacaccaacaaaacccattcgctgactgccagcacgcgtttcaacgtaaccggccgactgcaccttttgggcgggctgcactacacgcgctatgagacttcgcaaaccaaagatatgcctgtccgctatgggcagccggcaagcgattttcagacggcatcgagcattagggcggatcaggaccattacacggccaagatgcaaggtcataaattgacgccctatgcaggcattacctatgacttgacaccgcaacagagtatttacggaagttataccaaaatcttcaaacagcaggataatgtcgatgtcagtgccaaaaccgttttaccgcctttggtcggcacaaactatgaggtaggctggaaaggcgcgttcttgcaaggacggctgaatgcttcgttcgcattgttttacctcgaacagaaaaaccgcacggtcgtcgatttcggctatgttcccggagcaggcggcaagcaggggtcgttccaaaccgttgccaaaccgataggcaaagtggtcagcaggggtgcggaattcgagttgtcgggtgagttgaacgaagattggaaagtctttgcgggttacacctacaacaagagccgctacaaaaacgccgccgaagtcaacgccgaacgccttgccaaaaattccagtgcagacccgtacaacttcagcaatttcacacccgtgcacatattccgtttcggaacgagcttccatataccgaatacggggctgaccgtcggcggcggcgtgtccgcacaaagcggcacaagcagtctgtataacatcaggcagggcggctacgggctgatagacggtttcgtccgttacgaattgggcaaacacgccaaattgagcctcatcggtacgaacttaaacggacgcacttattttgagaacaactacaaccgtacgcgcggcgcaaacaacttctacggagagccgcgcactgtcagcatgaaactggattggcagttttaa

SEQ ID NO: 44026 - DNA, 630 bp, Neisseria meningitidis
atgagtgaaaccgaaaatcaagcattgacatttgccaaacgcttgaaggcggataccacggcggttcacgacagcgtggataacctcgttatgtctgtccaaccgtttgtcagcaaagaaaactacatcaaatttttgaaactccaatccgttttccacaaggctgtcgaccacatctataaagatgccgaattaaacaaagccattcccgagctggaatacatggcgcgatacgatgccgtaacgcaagaccttgcagatttgggtgacaaaccttacgaatacggcaaaccgctgccgcatgaaaccggcaacaaagcaatcggctggctttattgcgccgaaggatccaatttgggcgcggcatttttgttcaaacacgcccaaaaactcgattacaacggcgaacacggcgcgcgccacctcgcaccccatcccgacgggcgcggcaaacactggcgcgctttcgtcgagcatctgaacgctttgaacctgactcccgaagccgaagcggaagccatccaaggcgcgcgcgaagcctttgcattctacaaagtcgtgttgcgcgaaaccttcggcttggcagccgatgccgaagcaccggaaggaatgatgccgcacaggcactaa

SEQ ID NO: 44027 - DNA, 513 bp, Neisseria meningitidis
atgggatcaaaattctttttcctgctgctgcgttttgccggttcggggttgccgccgtcacatatgcgcggcatcggcatcgtcggcagacgggtgcgcggttttttggcgcggcgggtttctccgcatatcggacgcggggtcaatatcgaacgcggggcgtatgtgtttccggatacggttttgggcgacggctcgggcatcggggcaaactgtgaaatctgccgtgggctggtggtcggcaaaaatgtgatgatggagccggaatgtctgttttattcaaataaccacaagtttgaccgcaaaaaacgctttgagggctacacggaaatccgtccgattacgttggaggacgatgtctggccggggcacagggtgattgtaatggcgggcgtaaccgtcggacgcggttcggtcgtgggcgcaggcgcggtggttacaaaagacattccgccctactctttggcggcaggcaatccggcagtggtgaaaaagaatctgccggaaggttga

SEQ ID NO: 44028 - DNA, 2424 bp, Neisseria meningitidis
atgtcggcacaaaccgatccgggctacttcttcatgcccaaccacatcatcctgataggcgcgagcgaacaaccgtacagcctgggcgaacgtgtactcagcaacctgctgagtacgccctttcaaggaaaaatcacccccgtaaacccgcgccaccacaccatagccggactgcccgcctacaccagcctcaacaaaatccccggcaatgcagacctgattattgccgttaccctacccgacagttacgacaccctcttcaaaacctgccgcaaaaagcagctccgacacatcatcctcatacaggactgggacaacctgtctgccgcagaactgcacaccgccgaaactgccatccgcaaacaccacggcaacggactcaacatcaccgcctgcaccaccgcaggcatccaactgccctcactcggactcaacatcagtacccaagacggatacgccgcaggccataccgccatactgaccggcaatgccgccgtcagccgccaaatcgacaacatcctgaacaaactccgtcaaggcacatcccgccacatcagcctgcatcccggcatcagccccatcacatccgccgattggctcaaccgcttcggacacagcctgcacaccaaaaccgccgtcctacaccacaaccctgaagaggatcagcgcaaactgttcagcgcaatccgccaatttacccgccatacgccgctgattctccacatcacctgccgcacgacagaaaccgaccgtgccgtactgcactgcctcgcccgacactgcaacttcctcgtcagtttcaacgccgacgacctcgaagccgcactgcgcgcccaactgtccgaccttccacccctgtcccgactcgacatcctgtccgacacgcctgccgaatggctgcacgcgcacgcgccaaaaaacctcaccctccactttcccaaccttccccaccacatccgcaacggacacctgaccggcacacccacaccctcaatctgccacgacatcgcctcacgtcagcttgcccaccccgacacccaagccgtcctaaccatcctcagtccctccggacacgaggattacaaaaaaacagcacgcgcccttatccgcctgtccgaacagaccgccaaacccctgctcgtcagcagccccttttcagacggcataacccatttcgacacccccactcaggcaatccgcaccctttcctaccgcaacaccgccgccgccctgaaacaggcacagctcgacattgcaccgccgcagccatgccgtctgaaaacaccgcaaccccaaaacatcaaaaaagcccttgcagcggcaaacccctccctgctcgccgaagccctgcacctccccccctaccggcacaccacccataacgccgtacaattccaattcgacagccaccccctctatggcgacatcctgaccgcacgctgcaacggacaaaccactgccgtactcccgccgtttaccacgctcgacagccgccaccttgcccgctttgccgaactcgacggcacacaaaccctcgaccagttcctgcacacactgaccgtcattcccgaataccgccaacacattctcggcatcaccctcaacctcaacggcggacaatacagcagcgatttcctcttaaagacacccgaaacacacgacacgcccaaacgcaagaacacaggcaaagccgcccaaaccctcgaacatgccgccgcaaaaatgcagagtgccgccgcatacctgaaacacaaaaacccgacagccgccgaatttctccgccacacaagcgaagccgccgcagaactgctcggcagcaaaaccgaaaccggagcagccgtacccaacgtacttgccccctatcccgcagcataccccaaaacactgtccctaagaaacaacacgaccgttaccattacccccattttgcccgaagacgcagaagccaaacagcagttcgtccgcagcctcggtcccgaagcacggtacacacgcttcatgacccacaccaacgaactgcccgcagccacgttggcacgcctgtgcaaccccgattaccactgtgaagccgcatggacggcaaaggatgccgacagcaacatcgtcgccgtcgtccgccacagccgcctgaatcgcaacgaatgcgaattcggcatcacactggcggaacatatgcgcggcagcggactggcacagaaaatgatggaactcatcatccaaaccgccgcacagcaaggctaccggactatgagtgccgacattctcaaaaccaatacccccatgatcaaacttgcagaaaaatcaggatttaccctcaaggaatcggacaccgaaaaaaacctgtaccgcgcatatctgaaccttgcggcagacaaaacaacagaaaaaacaaataaaaacttgcgcaccgaccacaaaataacc

SEQ ID NO: 44029 - DNA, 1866 bp, Neisseria meningitidis
atgagccaagccttaccctaccgcccggacatcgacacattgcgcgccgccgccgtcttgtccgtcatcgtgttccatatcgaaaaggattggctgccgggcgggtttctcggtgtcgatatattctttgtgatttcaggctttttgatgacgacgattcttcaccgcgaaatgtggggggggaggttttccctgaaggcattttatatccgccgcatcaagcggattctgcccgcatttttcgccgtattggcggcaacgctggcaggcggcttctttttattcaccaaagatgatttctttcttttgtggaaatccgcgctgaccgccttgggtttcgcctctaacctgtattttgcaagggggaaggattatttcgatcccgcgcaggaagaaaagcccctgctgcacatctggtctttgtcggtcgaagaacaattttactttgtctttccgatactgctgctgcttgtcgcccgcaaaagcctgcgcgtacagttcggcttccttgccgcactgtgtgccttaagccttgccgcctcctttataccttccgcgctcgataaatattacctgccccacctgcgcgcctgcgaattactgataggatcgctgaccgccgtgtggatgcgctgccggcaacctgccgtcggcagacgctgtgccgccgtcggcgcattgtttgccgtgtgcatattgtcaacctgcctgttttcctattcggaacaaaccgcctatttcccgggccccgccgctttgattccctgtctggctgttgccgcgctgatttatttcaatcattacgaacacccgcttaaaaaatttttccaatcgaaaatcactgttgccgccggtttgatttcctattcgctttatctgtggcattggccgatattggcctttatgcgctatatcggcccggacaacctgccgccttattcgccggcggcggcggtcgtcctgatattgctgctttccctgttttcttaccactgcatcgaaaaaccgtttaaaaaatggcaaggttcgttcgcacaatccgttttatggatttatgccttgcctatgctcattttgggggcgggctcgttttttgcgatgagactgccgtttatggcgcaatacgaccgcttggggctgacgcgttccaacacctcctgccacaacaataccggcaaacaatgcctatggggggatacggaaaaacagccggaactgctggttttgggcgactcccacgccgaccattacaaaacattcttcgatgccgtgggcaaaaaagaaaaatggtccgccactatggtttccgccgacgcttgcgcctatgtggaaggctacgcgtcccgtgtgttccaaaactgggcagcctgccgcgccgtttatcgctatgccgaagaacacctgccccggtattcaaaagtggttttggcgatgcgctggggcagccaaatgcccgaaaacagccgctcccttgcctatgatgccggttttttccaaaaattcgaccgtatgctgcataaactctcgtccgaaaaacaagccgtttacctgatggcggacaaccttgcctcgtcttacaacgtccagcgcgcctatatcttgtcttcacgcataccgggttaccgccaagccctgcgcccggacgacgaaagcaccctgaaagccaatgcacgcatcagggaattggcagccaaataccccaacgtctatattattgatgccgccgcctatatccccgcagattttcaaatcggcggattgccggtttactcggacaaagaccacatcaacccttacggcggcacggaattggcaaagcgtttttccgaaaaacaacggtttctcgatacgcgccataaccattga

SEQ ID NO: 44030 - DNA, 1869 bp, Neisseria meningitidis
atgcaagctgtccgatacagaccggaaattgacggattgcgggccgtcgccgtgctatccgtcatgattttccacctgaataaccgctggctgcccggaggattcctgggggtggacattttctttgtcatctcaggattcctcattaccggcatcattctttctgaaatacagaacggttctttttctttccgggatttttatacccgcaggattaagcggatttatcctgcctttattgcggccgtgtcgctggcttcggtgattgcctctcaaatcttcctttacgaagatttcaaccaaatgcggaaaaccgtggagctttctgcggttttcttgtccaatatttatctggggtttcagcaggggtatttcgatttgagtgccgacgagaaccccgtactgcatatctggtctttggcagtagaggaacagtattacctcctgtatccccttttgctgatattttgctgcaaaaaaaccaaatcgctacgggtgctgcgtaacatcagcatcatcctgtttttgattttgactgcctcatcgtttttgccaagcgggttttataccgacatcctcaaccaacccaatacttattacctttcgacactgaggtttcccgagctgttggcaggttcgctgctggcggtttacgggcaaacgcaaaacggcagacggcaaacagcaaatggaaaacggcagttgctttcatcactctgcttcggcgcattgcttgcctgcctgttcgtgattgacaaacacaatccgtttatcccgggaatgaccctgctccttccctgcctgctgacggcactgcttatccggagtatgcaatacgggacacttccgacccgcatcctgtcggcaagccccatcgtatttgtcggcaaaatctcttattccctatacctgtaccattggatttttattgctttcgcccattacattacaggcgacaaacagctcggactgcctgccgtatcggcggttgccgcgttgacggccggattttccctgttgagttattatttgattgaacagccgcttagaaaacggaagatgaccttcaaaaaggcatttttctgcctctatctcgccccgtccctgatacttgtcggttacaacctgtacgcaagggggatattgaaacaggaacacctccgcccgttgcccggcgcgccccttgctgcggaaaatcattttccggaaaccgtcctgaccctcggcgactcgcacgccggacacctgagggggtttctggattatgtcggcagccgggaagggtggaaagccaaaatcctgtccctcgattcggagtgtttggtttgggtagatgagaagctggcagacaacccgttatgtcgaaaataccgggatgaagttgaaaaagccgaagccgttttcattgcccaattctatgatttgaggatgggcggccagcctgtgccgagatttgaagcgcaatccttcctaatacccgggttcccagcccgattcagggaaaccgtcaaaaggatagccgccgtcaaacccgtctatgtttttgcaaacaacacatcaatcagccgttcgcccctgagggaggaaaaattgaaaagatttgccgcaaaccaatatctccgccccattcaggctatgggcgacatcggcaagagcaatcaggcggtctttgatttgattaaagatattcccaatgtgcattgggtggacgcacaaaaatacctgcccaaaaacacggtcgaaatatacggccgctatctttacggcgaccaagaccacctgacctatttcggttcttattatatggggcgggaattccacaaacacgaacgcctgcttaaatcttcccacggcggcgcattgcagtag

SEQ ID NO: 44031 - DNA, 620 bp, Neisseria meningitidis
atggctgtacgttccaaatcctcaaaagcgtggctgcacgaacacgtcaacgaccactacgtccatatggcgcaaaaagacggctaccgcgcccgtgccgcatacaaacttttggaaatcaacgaaaaagacaaattaatcaaacccggcacggtacttgccgacttgggcagcgcgccgggaagctggtcgcaggttgccgccaagctgacgggtacttccggagcagttttcgccttggacatcctgcctatggaagccatagggggcgtctccttcattcagggcgacttccgcgagaacgacgtactggcacaattcgaaaccttgttggacaaccgcccgctcgaccttgtaatttgcgatatggcgcccaatatgtcgggaaacgccgtaagcgatcaggcacgcagcttttatctgtgcgaactggctttagacttcgcctcgcaacacctgaaaaccggcggcagctttttggtcaaagtctttcagggtggcaggctatcaggaatacatggcagccatgcgcgaaattttcggcacggtgcagacgcgcaaacccgaagcctcgcgcaatcgctccagtgagattttatttattgggcaaaaataaacgc

SEQ ID NO: 44032 - DNA, 978 bp, Neisseria meningitidis
atgcaagaaaacccgaccgtgtggctgttcgacctcgacaacacgctgcacaatgccgatgccggcatcttcacactcatcaaccgcgctatgacacgctatatggcacgccgcctcaaactctccgaatctgccgcgtccgacctgcgtcaagactattggcaccgctacggcgcaacgctcgccggactgcaaatccaccatcccgaaatcgacatcgccgaatttttacgcaaaagccatccgatcgatgcactcctgaccaggctgcacggcatgcctgaaacacaaaacaccctgagccgcctaaaagggcgcaaggcggttttttccaacggcccgtcgttttacgtccgtgccgttgtcggcgcactcggtttggaaaaccgtttcgacgcgcttttcggcacggatgatttcgggctgctgtacaaacccaatccgcaagcgtatctcaatgtctgccgcctgttggacgtaccgcccgaatgctgcattatggtggacgacagcacggacaacctgcatcaggcaaaagcatttggcatgaaaaccgtctggttcggtgcaaaatcccacgcgctgccctttatcgacacctgcgcacgcgatatggcgcaactggctcggtatgcagaaactttgtcagaacgccgccaaaatcattacaataccccctaacccccgaaaatacgaaagaaaaccatgcgtaaaaccttccttatcctgatgactgccgccgcccttttgtcgggctgcgcgtgggaaacttatcaagacggcaacggcaagaccgccgtccgtcaaaaatatcccgccggcacgcccgtttattaccaagacggcagctactcgaaaaatatgaactacaaccaataccgccccgaacgccatgccgtgctgcccaaccaaaccggcaacaacgccgacgaagagtcccgccaacactggcaaaaaccaaagtttcaaaaccgataa

SEQ ID NO: 44033 - DNA, 459 bp, Neisseria meningitidis; identical to SEQ ID NO: 37616

SEQ ID NO: 44034 - DNA, 1224 bp, Neisseria meningitidis
atgaatagacccaagcaacccttcttccgtcccgaagtcgccgttgcccgccaaaccagcctgacgggtaaagtgattctgacacgaccgttgtcattttccctatggacgacatttgcatcgatatctgcgttattgattatcctgtttttgatatttggtaactatacgcgaaagacaacagtggagggacaaattttacctgcatcgggcgtaatcagggtgtatgcaccggatacggggacaattacagcgaaattcgtggaagatggagaaaaggttaaggctggcgacaagctatttgcgctttcgacctcacgtttcggcgcaggaggtagcgtgcagcagcagttgaaaacggaggcagttttgaagaaaacgttggcagaacaggaactgggtcgtctgaagctgatacacgggaatgaaacgcgcagccttaaagcaactgtcgaacgtttggaaaaccaggaactccatatttcgcaacagatagacggtcagaaaaggcgcattagacttgcggaagaaatgttgcagaaatatcgtttcctatccgccaatgatgcagtgccaaaacaagaaatgatgaatgtcaaggcagagcttttagagcagaaagccaaacttgatgcctaccgccgagaagaagtcgggctgcttcaggaaatccgcacgcagaatctgacattggccagcctcccccagcggcatgagacagaacaaagctggcttgaacgcaccattgccgatatttctcaagaagttttggattttgaaatgcgctctgaacaaatcatccgtgcaggacggtcgggttatatagcaataccgaacgtcgaagtcggacagcaggttgatccttccaaactgctcttgagcattgttcccgaacgtaccgagctatatgcccatctatatatccccagcagtgcagcaggctttatcaagccgaaagacaaggttgtcctacgttatcaggcatatccctatcaaaaattcgggcttgcttccggcagtgtcgtatcagtagcaaaaacggcactgggcagacaggaattgtcgggattgggcatggtatcctccgatttggcgaagagcaacgaacctgtttatcttgtgaaaataaaacccgacaaatcaaccatcactgcatacggtgaggaaaaaccgctgcaaatcggcatgacgttggaagcagacatcctacacgagaaacggtga

SEQ ID NO: 44035 - DNA, 1428 bp, Neisseria meningitidis
atgtttttctccgccctgaaatcctttctttctcgatacattactgtatggcgcaatgtttgggcggtgcgcgaccagttgaaaccgcccaaacgcacggcggaagaacaggcgtttttgcccgcgcatttggaactgaccgatacgccggtctctgccgctccgaaatgggcggcgcgttttattatggcgtttgcgcttttggctttgttgtggtcctagttcggcaaaatcgatattgtggcggcggcttcgggcaaaacggtgtcgggcgggcgcagcaaaaccatccagccgctggaaacggcggtggttaaggcggtacatgtgcgcgacgggcagcatgtgaaacagggagaaacgctggcggaactggaggctgtgggaacagacagcgatgtggtgcagtcggagcaggctttgcaggctgcccaattgtccaaactgcgttatgaagcggtattggcggcattggaaagccgtaccgtgccgcatatcgatatggcgcaagcacggtctttaggtctctccgatgccgatgtgcaatcggcgcaggtgttggcgcagcaccagtatcaggcatgggcggcgcaggatgcgcaattgcagtcggctttgcgcggccatcaggcggaattgcagtcggccaaggcgcaggagcagaagctggtttcggtgggggcgatcgagcagcagaaaacagcagactaccgccgtttgcgggccgacaattttatttcggaacatgcgtttttggagcagcagagcaaatcggtcagcaattggaacgatttggaaagtacgcgcggtcagatgaggcagattcaggcggccattgcacaggcggagcagaatcgggtgctgaatacgcagaacctgaaacgcgatacgctggatgcgctgcgccaggcaaacgaacagattgaccaataccgcggccaaacggataaggcaaagcagcggcagcagctgatgacaatacagtcgcctgcggacggcacggtgcaggaattggctacctatacggtgggcggtgtggtgcaggctgcccaaaaaatgatggtgattgcgcccgatgacgacaaaatggacgtggaagttttggtattgaacaaagacatcggttttgtggaacagggacaggatgcggtggtgaagattgagagctttccctatacgcgctacggttatctgacgggcaaggtgaaaagtgtcagccatgatgcggtaagccacgaacagttgggcttggtttatacggcggtggtgtcgctggacaaacataccttgaatattgacggcaaagcagtgaatctgacggcgggcatgaatgtcacggcggagattaaaacgggtaaacggcgggtgctggattatctgttaagcccgctgcaaaccaaattggacgaaagctttagggagcgatag

SEQ ID NO: 44036 - DNA, 2259 bp, Neisseria meningitidis
atgtacacaagaatcatggaaatcagcccttggacgctgcgttcggcaaaactggaaaaagaacacaaacggctgcaagagagcctgaccagcttgggcaacggctatatgggtatgcgcggcagctttgaggaaacctattccgccgacagccacttaggcacctacatcgccggcgtgtggttccccgacaaaacccgcgtcggctggtggaaaaacggctatcccaaatatttcggcaaagccatcaacgcgttcaatttcagcaaagtcaaaatctttgtcgacgggcaggaagtggacttggcgaaaaacgacgttgctggcttctccgtcgaactcgatatgcagcacggcgtgttgcgccgctcgttcaccgtattcggtgtgcgtttcaatgtgtgcaaattcctgtctgtcgcacaaaaagagctggcggtcatccgctgggaagccgtatccgttgacggtaaaacccaccaagtccgcatcgattccatcatcgatgccgacgtgaaaaacgaagactccaactacgaagaaaaattctggcaggtattggacaaaggcgtttcagacagtctctcctacattgccgcccaaaccgtcgccaatcccttcggcgtggaacaattcatcgtcaacgccgagcaaacctttgccggcagcttcaaagccctcggcggcagccaaaccgactggcaggtctccaattcttttgaatccgaagtcggcagcacacccgaaacctttgaaaaacgcgtgattgttaccaccagccgcgattatcagagcttggaagcagtgaaagccgcaggccgcgccttgtcggaaaaaattgcaggcgttgcgtttgaaaccttgctggacgcgcacaaagcaggctggctgcaccgttgggaaatcgccgacgtggtcatcgaaggcagcgacgaagcgcagcagggcatccgcttcaacctgttccaactgttctccacctactacggcgaagacgcgcgactgaacatcggcccgaaaggctttaccggcgaaaaatacggcggcgcgacctattgggacaccgaagcctacgccgtaccgctctacctcgcactggccgaacccgaagttacccgcaacctgctgcaataccgccgcaaccaactgccgcaggcgcagcacaacgcgcgcgaacagggcttggcgggcgcactctatccgatggtaacgtttacgggcatcgagtgccacaacgaatgggaaatcaccttcgaggaaatccaccgcaacggcgcgattccttacgccatctacaactacaccaactacaccggcgacgagggctatcttgccaaagaaggcttggaagttttggtcgaagtgtcccgcttctgggcggaccgcgtccacttctccaaacgcaacggcaaatacatgattcacggcgtaaccggtccgaacgaatacgaaaacaacatcaacaacaactggtacaccaacaccctcgccgcatgggtattggactacacccgcgaagccttggcgaaatacccgcgtccggatttgaacgtgcgtgccgacgagttggaaaaatgggcggacatcagcgcgaatatgtaccgtccgcatgacgaagaactcggcgtattcgtgcagcacgacggcttcctcgacaaagacatccgccccgtgtccgcgctttcgcccgacgatttgccgctcaaccaaaaatggtcgtgggacaaaatcctgcgttcgccctttatcaaacaggcggacgtattgcaaggcatctacttcttcagcgaccgtttcaatatcgacgaaaaacgccgcaacttcgacttctacgaaccgatgaccgtgcatgaaagctcgctgtcgccctgtattcactctattctcgccgccgaactgggcaaagaagaaaaagccgtggaaatgtaccagcgcaccgcccgcctggacttggacaactacaacaacgacaccgaagacggcctgcacatcacctccatgaccggctcgtggctcgccatcgtccaaggtttcgcccaaatgaaaacctggggcggcaaactcagcttcgcaccgttcctgccgagtgcgtggacaggctacgccttccacatcaactaccgcggccgtctgattaaagtcgccgtcggcaaagaaaacgtcgtcttcactctgctcaaaggcgagtcgctcgatttgcaggtgtacggcaaagacatcacgctcgacggcagccacaccgttgcgttggaaaaataa

SEQ ID NO: 44037 - DNA, 1305 bp, Neisseria meningitidis
atgaaaaaacacatatgggcggcatctttgctgccggcatccctatcggcagaacctttaaactggtggaagccttattccgccgtcaattcgggcgataccgcctgggtgatgactgcggctgccttggtactgttgatgacgcttcccgggctggctttattctacggcggtatggtgcggaaaaaaaacctgctctcgacgatgatgcacagcttttccatcgcgacattggtgggcatcctttgggtcgccgtcggctattctttagcgttcacgccgggaaatgcctttatcggcggtttggggcgcgtatttttaagcgggatgcagatagacgctaccgcacagatgctgaccgtgtcgcccaatgcgccgactgttcccgaaccggtatttatgttttttcagatgacgtttgccattatttcgaccgccattattaccggcgcgtttgccgaacggatgaaatattcggcaatgatgctgttttcgggcatatggtttttattggtttatgtgccgggcgcgcattgggtgtggggcggcggctttatgagcaagggcggcgtattggattatgccggcggtacggtggtgcacatcaatgccggtatcgcgggactcgtcgccgccttggttttgggcaggcgcataggctacgggcgcgaggcgatgcctccgcacaatatggcgatgacactgatcggcgcggcaatgttgtggttcggctggttcggctttaacgccggatcggcgcttgcggcagacgcggcggcgggtatggcgatggcggtaacgcaggtgtcggccgtattcggcgcggcaggctggcttgcctgcgaaaaaatagcgggacacaaaccttccgctttggggctggcttccggcgcggtttccggtctggtcggcatcacccctgccgccggctttaccggcccgtcgggcgcggccgccatcggtatattgactgccgccgcgtgctttgtgtccgtcaccgtcgtcaaacacaaattgcgttacgatgattctttggacgctttcggcatacacggattcggcgggctggtgggcggaatattgaccggcatctttttcgacaaccgcattttcggcggggatgcggcagtttggcagcagttgtggatacaggtaaaagacggggtcgttatggcggcatacagcgggctaatgagttgggcgattttgaaggtcgtggggaaaatctgcggcggcctgcgcgtcggcaaggatgtcgaacgcgaaggtttggatctgaatatccacggcgaacgcgtggaataa

SEQ ID NO: 44038 - DNA, 1155 bp, Neisseria meningitidis
atgaaatttaccaagcaccccgtctgggcaatggcgttccgcccattttattcgctggcggctctgtacggcgcattgtccgtattgctgtggggtttcggctacacgggaacgcacgagctgtccggtttctattggcacgcgcatgagatgatttggggttatgccggactggtcgtcatcgccttcctgctgaccgccgtcgccacttggacggggcagccgcccacgcggggcggcgttctggtcggcttgactatcttttggctggctgcgcggattgccgcctttatcccgggttggggtgcgtcggcaagcggcatactcggtacgctgtttttctggtacggcgcggtgtgcatggctttgcccgttatccgttcgcagaatcaacgcaactatgttgccgtgttcgcgctgttcgtcttgggcggcacgcatgcggcgttccacgtccagctgcacaacggcaacctaggcggactcttgagcggattgcagtcgggcttggtgatggtgtcgggttttatcggtctgattggtacgcggattatttcgttttttacgtccaaacgcttgaatgtgccgcagattcccagtccgaaatgggtggcgcaggcttcgctgtggctgcccatgctgactgccatgctgatggcgcacggtgtgttggcttggctgtctgccgtttttgcctttgcggcaggtgtgatttttaccgtgcaggtgtaccgctggtggtataaacccgtgttgaaagagccgatgctgtggattctgtttgccggctatctgtttaccggattggggctgattgcggtcggcgcgtcttatttcaaacccgctttcctcaatctgggtgtgcatctgatcggggtcggcggtatcggcgtgctgactttgggcatgatggcgcgtaccgcgcttggtcatacgggcaatccgatttatccgccgcccaaagccgttcccgttgcgttttggctgatgatggcggcaaccgccgtccgtatggttgccgtattttcttccggcactgcctacacgcacagcatccgcacctcttcggttttgtttgcactcgcgcttttggtgtatgcgtggaagtatattccttggctgattcgtccgcgttcggacggcaggcccggttga

SEQ ID NO: 44039 - DNA, 723 bp, Neisseria meningitidis
atgaaacccgcctatttcatttccgacctgcatttgagcgaaaagcagcccgaactgaccgcgctgctgctgcgttttttacgttcttccgccgccgggcaggcgcgggcgatttacattttgggcgatttgtttgatttttgggtgggcgatgacgaagtttccgagttgaatacttcggttgcgcgtgaaatcaggaaattgtccgacaaaggcgttgccgtgttcttcgtcaggggcaaccgcgacttcctgatcggtcaggatttttgccggcaggcgggcatgacgctgctgccggattactcggttttggacttgttcggctgcaaaaccctcatctgccacggcgacactctgtgtacagatgacagggcataccaacgtttccgcaaaatcgtgcatcggaagcggctgcaaaaactgttcctaatgctgcccctgaagtggcgcacgcgccttgccaccaaaatcaggcgtgtcagcaaaatggaaaaacaggtcaagcccgccgatattatggatgtcaatgccgcctttaccgcgcggcaggtacgcgccttcggtgcggaaaggctgatacacggacacacccaccgcgagcatatccatcacgaaaacggctttacccgcatcgttttgggcgactggcataacgactatgcttcaatcctccgcgtggacggggacggcgcggtattcgtgccgctggaaaaatactga

SEQ ID NO: 44040 - DNA, 249 bp, Neisseria meningitidis
ttgtactgtctgcggcttcgccgccttgtcctgatttttgttaatccactatatgctgatgccggagacgtatattgcgtctataacatcagactgaagcagtacactgcctgccaggttacccgagttgaagaacacggtggcaaaaaaaacacatgcgaccctgctggctttggactggcagggcaacaaaccgcttggggcggaggagctggcggatttgaaatcgctttacaaagacttaaagaa

SEQ ID NO: 44041 - DNA, 423 bp, Neisseria meningitidis
atgtattgggaacgcggtctgcacatgtataaggcaagtgccgtcgtgccgacgggatatgtacgggttgggaataccgcgccgctggtcggcgaagacacgcaacggtatgcctctttttggggcgacggctacgacgtgtaccgtcagttgagatggcagcagatacccgaaaaacagagaaaggcattcaaaaaagccgccaaaagcaaaaagaccgtgatgtttgccggacgggaatacggcatatccaaacagaatttgagcgatgtttgggatgattttgaagacgcgatggaactgaaggcgtttccctgcctgtcttcgctgtttctgaccaaatggcataaaaatctatatgatagtggattaacaaaaaccagtacggcgttgcctcgccttagctcaaagagaacgattctc

SEQ ID NO: 44042 - DNA, 957 bp, Neisseria meningitidis
atgaacaccgccgccatctaccgccagtaccaaacctatgtccgctccgataaatccggctgggcgttggacggctgttccgacagcgcgctcattgcgcaggcaaaacagcccggtttgcatctggaaatgtgcatcaaccgcttcgattcgggcatcaccttgtcgcggatgcgcggcggcggaacgggcgcgtttcccaccgaaatccacaatttcagccacaactgcgccttgttcgtcatggtgtcggggcagaaccggttacaaatgggcggcagggaataccgcccatctgccggcgaaatctgactggtacgcggcgatttggcggacgtatccgaaaccctgctgcccgacaacagcggcatgtgcgcgctgcatttggatttttcgctggaaaaactgcgccgctggcacgacgaaggcttgctggacgaacgcctgttttcgccgcaaacaataggccgattcgccctgcaacggctggcgcaaaacgcagcggcactgacggcggcggcctgcccactgctgcaacgcccgttcgaatcggacggcttcggcctgcttgccgacgaagccgccgcgctggaactctccgcccgattattgcgcttcaccttccgccgccacgacaacggttaccgccgtcggcgcatagacgaagccgccgacatcctgcaacacgaattcgcccgtccgctgaccatcgccgaaatcgcccgccgcgtcggactgaacgaatgctacctgaaacgctatttcaaagcgcaaaccggcgaaaccgtcgccggatgcctgcgccgcctgcggctggaacacgcgctcgccctcatcgaatccggcagcaccgtccaagccgccatgcacttttgcggctaccgccacgcgggacggttcaacgaagcgttcagacggcattacggatttttgccttcggatgtgaagaagtgctga

SEQ ID NO: 44043 - DNA, 360 bp, Neisseria meningitidis
atgaccgaccgtccgagcctgctgtggataaagcccggacaggctgaaatcatggaatattgcgaacctgaagaagcatccgacccgtacgcaacatacaggcgtgccaacctgatggcgggtctgccgctgtttgtcgtgattttggttctgctcaatattgtttttccgcttccggcgtatccattggcttggctggtgcctgcaggtttcatggttttgggcggcggctttcccttatcgctgccgcttgtggcgctgcttgtcctgacctgctgcattctggcgcattgtccgccattatcccgtcttttgtgctacccttgcccgaatcatccgatgtctaaaaattctgcctga

SEQ ID NO: 44044 - DNA, 650 bp, Neisseria meningitidis
ttggccgtccaatcggcagaagacaaatatgccgatttgaaacggcatatccatgatatttatcgacgacataagggaagatacggctaccggaggattgcggcagccatccgtcacgcaggaacaccggtcaatcacaagaaagtcagccgtctgatggcgaagacggggctgaaggcagtgatacggcggcgcaaataccgctcgttcaaaggagaagtcggcaaaattgcgccgaatatcctgcgacgctgtttccatgcagaaaagccgaatgagaaatgggtaacggacgttaccgagttcaatgtaggcggagaaaagatatacctttctccgattatggatttgtttaacggggaaatcgtcagttaccgtattcaaatccgcccgactttcgatttggccggcgagatactgaaaggtgcgccggagaaaccgggatcgtctgaaaagccgatactgcattcggatcaaggttggcaatatcagatgttttttatcaaaagcagttgaaaggcaacggtctggttcagagtatgtcccgcaagggaaactgcttggacaatgcggcaatggaaagtttcttcggaacgttgaaatcggaatgtttccatacgtgcaaatatgattccgttaccgaatcgtaa

SEQ ID NO: 44045 - DNA, 168 bp, Neisseria meningitidis
  misc_feature 4, 5, 6, 7, 8: 'n' is a, c, g or t
gtgnnnnntgcgctgaaattcgaccagttgatactcgaatttcctgagcgcggggacggcgcatgggtacacatcggtttccgacgcaacagcccgcaacgcaaccagatactgaccgcaaccaagaaaaacggcaaaaccgtgtatctgcccgggctgcatccttga

SEQ ID NO: 44046 - DNA, 321 bp, Neisseria meningitidis
gtggattggatgggcagtctgttcctgccgggtggcgcactgttgtttctgagcgtggtttcgaccactttgtccgcacgtttgggaatgcctttgctgctggtttctcctgccaacgtgttggacagggcggcggaagccttggcgattgcggcgttcctgatgctggtcgcgcgtccgtcggcagtgttcggcggtttgtggaaattcaattacagcctgcgtgaaaaggcgtatagccgaatagaaatgcagtccgacaccgtgcttcaggcggggatttggcgtggtacatcctgcccgacggcaaggtcgatatag

SEQ ID NO: 44047 - DNA, 210 bp, Neisseria meningitidis
atgggcagcgcattaaagcgtaccaacatgccgtccgaacctttagacggcattccaaaaacaaagcaatcaagagaaaatatgaacgaacaagatttagatttggacaatctcgacaacctgcttgaagattttgacggcgttaccgtggaaggcggcgtcgattcggaaaacgacgacggctgcgaaggcggggcgtgcaaaatctaa

SEQ ID NO: 44048 - DNA, 1485 bp, Neisseria meningitidis
atgtcccacttattccgaaaagaagtctttgtagcccaacaaaataagtggacaggtcaggttatcttgacccgtccattctcttttttatttctgactttttgcgcttttctcattgctctgtgtatcattatctttttgatttttggtagctataccaataaaacaaccgttgaaggtcaattacttccaactatgggggtggttcgtgtttactcttccgatatcggcacgattacgcataaatttgttgaagatggtaactttgtcaaagctggcgaaccattgttcaaactttccacatcgcgttttggcgaaaaaggaaacgtacaagccaaattggcagcagaagccaaccttaaaaaaactttggcattacaagaattggaacgtttaaagcgcattcatcaaaatgagcaaaaaaatgttcataacaacattcatcgtttaaacaatcaattagagaatattaaacagcaaattacagggcaaaatcgtcaaattcgtttagcggaaaaaacccttaacaagaacaagtttttagccagtcaaggcgcagtatcccaacaagataagatgaccgccgaaagccatttattggaacaacgctcacgtttggagagcctaaaacgtgaacaaaataatgcaatcagggaacttgatgaacagaaaatcacattaagcagcctgcctgaacgccataaaaccgaattgagccaactcaaccgtgcgattacggaaatgaaccaagaaattttggattttgatttgaaatccgaacaaaccatacgagctagtaaatcaggttgagacctttgcaaaaataatctgttaacgaaatttgacgcataaaaatgcgccaaaaaattttcaattgcctaaaaccttcctaatattgagcaaaaagtaggaaaaatcagaaaagttttgcattttgaaaatgagattgagcataaaattttagtaacctatgttattgcaaaggtctcaggttatatatcaacaattaatgttgatatagggcaacaagttgaaccgtctaaattgctgttaagcattgtccctgaacaaactgaattggtcgccaatctttacatacccagtaaagctgttggttttattaaaccgaaagataaagttgttttacgttaccaagcgtacccttaccaaaaatttggacatgccacaggagaaattatttcagttgccagaactgctctcggtaaacaaaagctatcaggtttaggtatcattttcactaacccaaccttattaaatgaacctgcctatcttgtgaaagttaaattggaaaaacaaacgattaaagcatacggagaaaacaagccgcttcaaattggcatgattttagaagcagatattctccatgaacgaaaaaattgtacgaatgggtacttgacccactttacagcatttcaggaaaaatcaattaaaaatggattatttatcaagactgtcctttggatt

SEQ ID NO: 44049 - DNA, 189 bp, Neisseria meningitidis
ttgccgaaattcggagaattccatctccccagccctcccccacgggggagggggcaggttgcagcggattttgcggttgcaggcggtttgagaaagaatgcccgaaatatcaacagcgggaatttttcaggcagcctttatcgcaaggcaggtggaacaaacgccgcgaacgttttttcagacgacctt

SEQ ID NO: 44050 - DNA, 234 bp, Neisseria meningitidis; identical to SEQ ID NO: 40078

SEQ ID NO: 44051 - DNA, 381 bp, Neisseria meningitidis
ttgtactgtcttcggcttcgtcgccttgtcctgatttttgttaatccactatacatcatcgctactaccgttccggcgcaacaggcattcctcgatgccgccgaactgatgcaatggagtatagaaaccgaagggctgggcttgaacgtcatctcgcacaagatactcggcaaagaccacgcccaagtcgaatttgaagcctacttccgagacggacaacaccgatccgcgcatcacgaactgtccggcttcgtcaacatcggcggacaatggtattttatcgatcccaccgttccgcatcctgcgatgaaacaaccctgcatttgcggatcaggcaaaaaattcaaagcctgctgcggcaaatatctgaaacctgtcgca

SEQ ID NO: 44052 - DNA, 189 bp, Neisseria meningitidis
atgaacacgaatcaagatacgattccatttggcggcaaccttgtgatttgctgttcgacgggaaacggcggggacgggcggttttcttgtctgattaccgatcagataccggatttaaatcttgtcagaagcgggcaggcgttcccgatgttcatttatgagtacgaaactagagaaaaaaggaaagcc

SEQ ID NO: 44053 - DNA, 291 bp, Neisseria meningitidis
ttgaggcaggcatttcagacggcattccttaaatgcgtgtacctgtggtgttccaaaaggtcgtctgaaagtgcagcttctgcgaagctaaagcgcggtatcaacgaagttaaaatttgcctgaaccttaaaggcagcctgcaccccaatcccctctcccgtgggagagggctaggacgaggcgggcaaactgaaagtttgcttgggcggcattttcaatgtgcaggctgcttttatagtggattaacaaaaatcaggacaaggcgacgaagccgcagacagtacaaatag

SEQ ID NO: 44054 - DNA, 507 bp, Neisseria meningitidis
gtggaaaccacttttgctctgctaaattttaaggaatctttatgttacatataccccccaacggaacctgttcgatatgttagcagtattgtagccttaaacgtgcatagtcctaacggtacaggcgactggcatagtgcaaaggcattgagtgatcgggcttaccctgaaaaattttatatttacggtgaaaatcaagagcgaaataccaatcatttatttggtgataatggcattattgatgggacggatcgactgaacaaaatgggttatttccctgaaaacatcccagtttggctcgcagatcacccccgtgcttgcgtggattatctttacacagcagtgttacaaactggctcaatcggtcgggtgattttagatgattggtttccaagcgatgaagacaagcaatcagtttatgacttacttaaccaaatcgaaccgcacttgaatactcaagaatgggagaatttacagctatggaaacgcaaaaacccaataatgtaa

SEQ ID NO: 44055 - DNA, 420 bp, Neisseria meningitidis
atgctgattgggctgctgccttgggcattaatactcggtatgcagggcggacaaaaaggcatgagctggctggaaatgttgttgatgaccagtatgaacttcgccggcggctccgagtttgccacggtcaacctgtgggcggaacctctgccgatactgcttatcgccaccgtaacctttatgattaattctcggcatatcctgatgggggcggcgcttgccccgcacctgaaaggaataccgctgaaaaaagccgtgcccgcactgttttttatgtgtgatgaaagctgggcgatggcattctccgaaatccaaaaacggaaagcagccggtttgcccgcattcaatatgcctttttatagtggattaacaaaaaccagtacagcgttgcctcgccttagctcaaagaaaacgattctc

SEQ ID NO: 44056 - DNA, 291 bp, Neisseria meningitidis
atgacagctaaaggacaaatgttgcaagatcccttcctgaacgccctgcgtaaagagcacgttccggtttcgatttacttagttaacggtatcaaattacaaggtcaggttgagtctttcgatcaatacgttgttctcctgagaaacacttccgtcacccaaatggtttacaaacacgccatttccaccatcgtaccggcacgctccgtcaacctacaacatgaaaacagaccccaagccgcaccgacttcgaccctcgtccaagtggaaaccgtccagcagcctgccgaa

SEQ ID NO: 44057 - DNA, 441 bp, Neisseria meningitidis
atgaaaaaacaaatcactgaagccacgatgatgctgtctataatcgcccccgcaatggcaaacggattggacaatcaggcatttgaagaccaagtgttccacacgcgggcagatgcgccgatgcagttggcggagctttctcaaaaggagatgaaagaaactgaaggggctgcggcaccgttggtggcaataggaattttgcatgcgggcagattccttgcgcagcgttgggttacgcagcgtgttgcagcacaagctttatcaagaggagctaatgtctatgcacgaacatctcaacaagcaagagcggtagcaaaccaagcttggggaagacaaaatgttattagacatgggcagaaggaaatccattcaaattattctcatttccagaactcaagtcaaaaaattcgagggcatgctttttatggaaataagcataga

SEQ ID NO: 44058 - DNA, 417 bp, Neisseria meningitidis
atgtctttcggctatttgattgcaacatcgcaaccttgcgaattgttgacaaaatctcgaggtgaaactttttctttaattatggataagatggatttatggatttatttcagattttgtgaaggaaatatttatacaataaggaagaatgaaactgaatcttgtcttacagaaagaggaggcgaatggttgaaacatatttatgaatttaatcggggaagttttattttttcttatgtgcttctaaaaaagagagaaagcgaagagaattttgcagaaattgttttaaaatcaataaaaaataataaaattttgacagttaaggtacggtcaggcttgcattttgacttaaggaatatttatcgtattgagatgtatagcggattaaatttaaaccagtacggcgttgcctcacct

SEQ ID NO: 44059 - DNA, 243 bp, Neisseria meningitidis
ttgctgattttgttaatttttgagtataggaagtttctaatggcaaccggtatcgtaaaatggtttaacgacgctaaaggttttggtttcatcacgcctgatgaaggcggcgaagatttgttcgctcacttctcagcaatcaatatggaaggtttcaaaaccctgaaagaaggccaacgcgtctctttcgacgtaaccaccggccctaaaggcaaacaggccgccaacattcaggctgcttaa

SEQ ID NO: 44060 - DNA, 237 bp, Neisseria meningitidis
atgttgcgtgtccaaaaatgggggaactcggcggccgtccgactgcctgccgacatgctgaaacaattggattttaaaatcggcgacgctttggtagcggaagtacataacggcgaactccgtgtgcgtgctgcccgacgtttccgcttggcagacttgcttgccgaaatggaagaaaccccgccgcgcgtagaaggctgggaaatcttggatgatgccggcaacgaggtcgtctga

SEQ ID NO: 44061 - DNA, 192 bp, Neisseria meningitidis
ttggactaccgcttcggaaggcagtaccgcttgttaaaaacggatgatttttcatccgtttttgcattcaggaaacgccgcagccgagaccttctgcaagtctcccgttcagacggcaacggactggggcacccccgcctcgggctggtcgtcggcaaaaaaacgccaaacgggccaacgaacggaattaca

SEQ ID NO: 44062 - DNA, 300 bp, Neisseria meningitidis
atgttaaatgaaatttttgaaatttattcgagacaaggggaatctttgataggaattggaattagagaagccgcattacccgtccctattgcaatagatatattaaatttatttatcaatgagagaatacttgtattggggggagatatttatatcaagaaagataattatttttatcaaacatatgataattggtattacgagggaagtaatttatttaacagtatcgacaaagcaatgcattatttatctcaaataaaattagagaatgcatacgtatcttttgtgttgaaatttatc

SEQ ID NO: 44063 - DNA, 204 bp, Neisseria meningitidis
atggatacgaccctgaagtataaagccgaagcccttttgggcgagccgcttttagacgaacccgtccgacccgagtcgtgggaatgctgcggcagcgactgcggcgaggcgtgcattcagacgatttactgggcggataaagccaaatacgacgtgcaacggcagaaattgaaagaagcgggttggtcggacgatgccgtctga

SEQ ID NO: 44064 - DNA, 207 bp, Neisseria meningitidis
atgaatatactatccataaataatcaaaactcaactatttcactaactcaagatgaagtttttgttttacgagctatcttgaatgagatatatgcgggcgtatgtgtagattcaagagaatttgaaaatgtatctggtgttagaaaacatgaagtagataatttacaacaacagtttgctggaatttataaaaaaatgacaacttaa

SEQ ID NO: 44065 - DNA, 195 bp, Neisseria meningitidis
gtgaagcataagctcgcgtcttggtggaaaaccatcaagctgacggcaaacttgatggcaggcgtgcccgattatgaaaactacgttgcacagcagcgcaaacataatcccaacgcccccgtgatgaccaagctgcagtttcaagactattgccgcaaacgccgctgcggcgcaaacggcggacgctgctgttaa

SEQ ID NO: 44066 - DNA, 441 bp, Neisseria meningitidis
atgaagtggttattaaatatgataatgagacctattaaatttagtatggtaaatacgttattatttattgttatatgtagttcattttttgatctgctcgttcaattatgtacaattttatttcatagccaaaaaatatactttattacattatttttattatttatttttaattttgttacaaaatctatctatatggcaattatttatcctattttatatttttttacgataaaaaaatattatccttactctaggaaagtgataattctattatcattagcattatctatatattttagttttatggacttttactttttttccatatattcagataaccttagctatgaaacggagcctttacatttatacatccctattattattaattttttctcacttttagtttctaattttattttatcttttatcaacaag

SEQ ID NO: 44067 - DNA, 195 bp, Neisseria meningitidis; identical to SEQ ID NO: 40091

SEQ ID NO: 44068 - DNA, 804 bp, Neisseria meningitidis
atggcagacatcctaccatccgacaagcggcggcaaccgccaaaaacgaaaggaagtacgatgaacataatcgaacaagaaatgaaacactccagtctgagaaaaatagatgccgaaatcgccaaaatcattgccgacgcgcacaaaatcaacgccgaatccgtaaaaatagcccaagagtcccgctggtatcccatgatagcggccaccgggctggttaccgccatcgccgccgtgttggcactgatattcaaatttgcctgaccacaagccccgcgaggggctttatcccacgaacaaaatgaacagagccgcactattcaaccgctaccccgaatggattatcgggcaagacggcgcaagccgtttcattacccattgccgctatccccgcctgattgccaaaatccacaggcagacagacggcgaatgcccgggcaggcattaccgccattccgaaaacggcatcaccctttacgattttatttttttcgacggcaaaccggcagacgaagcccgatttgccgccatccttaccgaaacctgccgccgggcagtcaaaaaaatatgcgaaacaaaataaaccgcaacgacatggaactcggctacacgccttacaacctccgcacccttcgcaaccgctgcaaactgacacaggccgagttggcgcaaatcgtcggggtgaagcactacatacaggtaggccgctgggaagccgaacccgataccgaaacccgtcgggccgatatgccgctggaaaaatggcggcagttcctcgattggatagaaaaaacaaacgccgtc

SEQ ID NO: 44069 - DNA, 978 bp, Neisseria meningitidis
atggcaatggcagaaaacggaaaatatctcgactgggcacgcgaagtgttgcacgccgaagcggaaggcttgcgcgaaattgcagcggaattggacaaaaacttcgtccttgcggcagacgcgttgttgcactgcaagggcagggtcgttatcacgggcatgggcaagtcgggacatatcgggcgcaaaatggcggcaactatggcctcgaccggcacgcctgcgtttttcgtccaccctgcggaagcggcacacggcgatttgggtatgattgtggacaacgacgtggtcgtcgcgatttccaattccggcgaaagcgacgaaatcgccgccatcatccccgcactcaaacgcaaagacatcacgcttgtctgcatcaccgcccgccccgattcaaccatggcgcgccatgccgacatccacatcacggcgtcggtttccaaagaagcctgcccgctggggcttgccccgaccaccagcaccaccgccgtcatggctttgggcgatgcgttggcggtcgtcctgctgcgcgcacgcgcgttcacgcccgacgatttcgccttgagccatcctgccggcagcctcggcaaacgcctacttttgcgcgttgccgacattatgcacaaaggcggcggcctgcctgccgtccgactcggcacgcccttgaaagaagccatcgtcagcatgagtgaaaaagggctgggcatgttggcggtaacggacgggcaaggccgtctgaaaggcgtattcaccgacggcgatttgcgccgcctgtttcaagaatgcgacaattttaccggtctttcgatagacgaagtcatgcatacgcatcctaaaaccatctccgccgaacgtctcgccaccgaagccctgaaagtcatgcaggcaaaccatgtgaacgggcttctggttaccgatgcagatggcgtgctgatcggcgcgctgaatatgcacgacctgctggcggcacggattgta

SEQ ID NO: 44070 - DNA, 879 bp, Neisseria meningitidis
atgccgtctgaaaaaaccctctttcccctgcccgacaccctgttgcgccccatagtagaacaagccttgagcgaagacttgggcaggcgcggcgatattacgtccgccgccgtcatcgcccccgacaaaaccgccaaactcttccttgtcagccgcgaagacggcgttatcgccggcatggacttggcgcgtctcgcctttcagacgatggatccgtccgtccgcttccaagccgaaatccgagacgggcaagccgtccgcgcaggtcagacgcttgccgccgtcgaaggcaacgcccgcgcgctgctcgccgccgaacgcaccgcgctcaactacctcacgcacttaagcggcatcgccaccgccaccgcgcgtgccgttgccgaagtcgccgaatacggtacagacatcgtgtgcagccgcaaaaccatccccctgctgcgtgtcctgcaaaaatacgccgtcagggcaggcggcggtgtgaaccaccgcatgggtttggacgacgccgtgctcatcaaagacaaccacctcgcctattgcggcagcatcgcccaagccgtgcagcaggcaaaacaggctgtcggagcattgacctgcgtggaaatcgaagtggatacgttggcacaactggacgaagccatcgcagcgggcgcggaacggattttgctggataacatggacgacgaaaccctgaaagaagcggcaaaccgctgccacacgcaaaccgcccacccccacaccatctattgcgaagcatcgggcggcatcggcttcgaccgcctgaagcgcgtggcgcaaaccggagtggacggcatcgccctcggctatctgacccacagcagccgttcgttggacataggtttggatttcgtggcg

SEQ ID NO: 44071 - DNA, 432 bp, Neisseria meningitidis
atgaaaaaacaaatcagctcagccgtaatgatgctgtctatgattgcccccgcaatggcaaacggcttggacaatcagacatttgaaaaccaagtgttccacacgcaggcagatgcgccgatgcagttggcggagctttctcaaaaggagatgaaggagactgagggggagtggattcctaatgctgttggaggcattatgggaggagttggagggcatttcagctatatggctagtgctattgctagtggctcgtataatcgaaatgaacattggacagcaattggaggtggtgcgttaattggtgcgatgaaccctattaacggaggaagagcactgattaatggtatgcgaggtgtagcagtggggactgttgctggtggcataaatggttatgcaggttctacgggtaagaacactgacattcgccgt

SEQ ID NO: 44072 - DNA, 303 bp, Neisseria meningitidis; identical to SEQ ID NO: 40930

SEQ ID NO: 44073 - DNA, 279 bp, Neisseria meningitidis
atgaaaaccctcgtcctcctcctgctttccttctccacgaccaccgctttcgccgcatacggtttgggtttggggcaggcaccgaaatatcctgccggctttcgcgcctacggttatgtttattccggacggcagggctaggttttaaaaacagaggcggatgccattaaattagacacgcttttcaaacgctttgtgtaccgtccttccgccgccaatcaaaaccccgtcggacagcgttcggacggcatacccgccaaccacacaaaggaaaaacca

SEQ ID NO: 44074 - DNA, 219 bp, Neisseria meningitidis
atgggcggcaaagtgcagcacaataaaggcaaaatacgcgacaatgctttaaaagccttagtgaaatccgatttgttccggcacaaggtggaacggaaaaggaaaggcaaaggcagctacaacaggcaggaagcgaaaaaatggcgggacggttttgatacggtcccgccgtttttatgccttaaacgtggaagctttcgccgcagccgcaggagtctt

SEQ ID NO: 44075 - DNA, 216 bp, Neisseria meningitidis
atgagtatgcccgaaatacccaaatggtacgacgatgacggacagatcgtgtcctgtaccgaaaagatcaaagtgatgtccgaaaatatggccgagctgtatcagacggcacaagacgcgtttgaagacgcgctgctgatgggttgcggcgaacgtcagttgcgcgattacctgctcgcgctgattgaaggtttggaaaatccctaccgcaaagtc

SEQ ID NO: 44076 - DNA, 291 bp, Neisseria meningitidis
atgaccgctatgccgtctgaaccgcctttcagacggcatttcacacatcaaaacagaaaaaccgcgcccaaaatcatcatcacaaaacacaacggcaaaccggatacaaaacccaacaccgccgccaaaatgccgtctgaagccgtcggcgcaaccatccttatctggggcccgcttcaggggcgcataactttccttaaccatccttttgacagccaaataaacagtgcttttgcctgtcagaaacaaaaccaatattttgcagttcgtatcggaacatttatagtggat

SEQ ID NO: 44077 - DNA, 201 bp, Neisseria meningitidis
atgccgtctgaagcagcttgggctttcagacggcatttccttcgcttaaaacagcgtatcggcaaccccgccctgcctgtccacggcaatctgcatctgaaaaccatctgtatcccaaaccacacccccatccctgtttccatcatgtgcaccctgtccgtattgggcaatcatctgtttttcgcttacaatagccgaatc

SEQ ID NO: 44078 - DNA, 195 bp, Neisseria meningitidis
atgccgtctgaaaaccgcagcgcgggggtttgtggtgcattatatgccgtattgcaggacaaggcacagggcagggcggcggggtgcatcgtagcaactgtatttttgcccgacggggtgaaaaatacagttgctacacccactgataatgaaaaaagagagcaatgccgtctgaaccgcgtgttgcggcgagca

SEQ ID NO: 44079 - DNA, 159 bp, Neisseria meningitidis
atgaagattagcgcactcgaccatctagtactaactgttgccgacattgaccgaaccatcgcgttttatagtgaattaaatttaaaccggtacagcgttggctcgccttgccgtactatttgtactgtctgcggctcgccgccttgtcctgatttttgt

SEQ ID NO: 44080 - DNA, 294 bp, Neisseria meningitidis
atggaagaagtttcatttggcagcgaccgtaaagctttgttgtttggcagtcagaaaatcaacctacacgggcgcggtgcggaaattcagcctaacgcgcaacacgccgcctgcggcacagcggatttatgcctgctgaccgatacgccactggaaacggttttacaggaattatccgcacacggcatcaaacctttaagcggcatcgtagcgcgcacaggcgcaatgggcaaaatccaatcggtttacctgcgcgatcccgatggcaacctgctggaaatcagcagttattga

SEQ ID NO: 44081 - DNA, 222 bp, Neisseria meningitidis; identical to SEQ ID NO: 40096

SEQ ID NO: 44082 - DNA, 531 bp, Neisseria meningitidis
atgtttccccccgacaaaacccttttcctctgtctcagcgcactgctcctcgcctcatgcggcacgacctccggcaaacaccgccaaccgaaacccaaacagacagtccggcaaatccaagccgtccgcatcagccacatcgaccgcacacaaggctcgcaggaactcatgctccacagcctcggactcatcggcacgccctacaaatggggcggcagcagcaccgcaaccggcttcgattgcagcggcatgattcaattcgtttacaaaaacgccctcaacgtcaagctgccgcgcaccgcccgcgacatggcggcggcaagccgcaaaatccccgacagccgcctcaaggccggcgacctcgtattcttcaacaccggcggcgcacaccgctactcacacgtcggactctacatcggcaacggcgaattcatccatgcccccagcagcggcaaaaccatcaaaaccgaaaaactctccacaccgttttacgccaaaaactacctcggcgcacatactttttttacagaa

SEQ ID NO: 44083 - DNA, 328 bp, Neisseria meningitidis
ttgataaacatgaaaacatcgacggtcgtttttggcggattttttatggcagacaacggagagcgaatccaaatccccgttttggaaaatcctgacattagggaaatcaatcactttttttccgtatcaaattttgagaaaaaaaccggcgtccttgttttcagaatcatccccgagccggaatttggcaataccgaattaactgtctattttaaaaaaggatattatagtggattaacaaaaaccagtacggcgttgcctcgccttgccgtactggtttttgttaatccactatatcagacgaaaacaaacacccgcgccaatagcc

SEQ ID NO: 44084 - DNA, 1230 bp, Neisseria meningitidis
atgccttctgcccattatcctgaaatgagcgaaaaactgatggcggttttgatggcgatgctggttacgctgatgccgttttccatcgatgcctacctgcccgcgattcccgaaatggcgcaatcgctgaacgcggatgttcaccgcatcgaacagagtttgagtttgtttatgttcggcacggcgttcggacaggtggtcggcggttcggtgtccgacatcaaagggcgcaaacccgtcgccctgaccggtttgattgtatattgccttgccgttgccgccatcgtatttgtttcgagtgccgaacagctcctcaacctgcgcgtcgtgcaggcattcggtgcgggcatgactgtggtcatcgtcggcgcaatggtgcgcgattattattccggacgcaaagccgcccagatgtttgcccttatcggcatcattttgatggttgtgccgctggtcgcacccatggtcggcgcattgttgcagggcttgggtggctggcaggcgatttttgtttttctggcggcgtattcgctggtgctgctcggtttggtacagtatttcctgcccaagcccgccgtcggcggcaaaatcggacgggacgtgttcgggctggtggcggggcggttcaagcgcgtattgaaaacccgtgctgcgatgggttatctgttttttcaggcattcagcttcggttcgatgttcgcctttctgaccgaatcttccttcgtgtaccagcagctctaccgtgttacgcctcatcaatacgcttgggcgtttgcactcaacatcatcacgatgatgtttttcaaccgcgttaccgcgtggcggctcaaaaccggcgtgcatccgcaaagcatcctgctgtgggggattgtcgtccagtttgccgccaacctgtcccaactcgccgccgtgctgtttttcgggttgcccccgttttggctgctggtcgcgtgcgtgatgttttccgtcggtacgcagggcttggtcggtgcaaacacgcaggcgtgttttatgtcctatttcaaagaagagggcggcagcgcaaacgccgtattgggtgtattccaatctttaatcggcgcgggggtgggtatggcggcgaccttcttgcacgacggttcggcaaccgtgatggcggcaacgatgaccgcgtccacctcttgcggcattgcgcttctgtggctctgctcgcatcgtgcgtggaaagaaaacgggcaaagcgaatacctt

SEQ ID NO: 44085 - DNA, 1008 bp, Neisseria meningitidis
atgcacatcggcggctattttatcgacaaccccatcgcacttgcgccgatggcgggcattaccgacaaaccgttccgccgactttgccgagattttggcgcaggttgggcggtgtgcgaaatgctgaccagcgacccgacgctcagaaatactagaaaaaccttgcaccgcagcgattttgccgatgaaggcggcattgttgccgtgcagattgccggaagcgatccgcagcagatggcggatgccgcgcgttacaacgtcagccttggggcgcagcttatcgacatcaacatgggctgtcccgctaaaaaagtctgcaatgtccaagccggtagcgcgctgatgcagaacgagccgctggttgccgccattttggaagccgtcgtccgtgcggcaggcgtacccgttaccctcaaaacccgtttgggttggcacgacgaccatcaaaacctgcccgtcatcgccaaaatcgccgaagattgcggcatcgccgcccttgccgtccacggacgcacgcgtacgcaaatgtacaaaggcgaagcgcgttacgaactcatcgccgaaaccaaatgccgtctgaacatcccggtctgggtcaacggcgacattacttcgccgcaaaaagcccaagccgtcctcaaacaaaccgccgccgacggcattatgatagggcgcggcgcgcaaggcaggccgtggttcttccgcgatttgaaacattatgccgaacacggtgttttgccgcctgccttgagtttggcagaatgcgccgccgctattttgaaccacatccgcgccatacacgcgttttacggcgacaccgccggtgtgcgcatcgcacgcaaacacataggctggtacatcgacgaaatgcccgacggcgaacagacacgtcgtgaaatcaaccgcttggacagtgcggcggcgcaatacgacatgcttgcaggttatcttgaaagacttgccgaaaaaaccgacagttgggcgtgcgcctaccgcccaaatgccttc

SEQ ID NO: 44086 - DNA, 297 bp, Neisseria meningitidis
atgcattatttcagtattcatgaccaatcgggacggcatataggctttttcatcctgcttgccgacgacgaatcggaagcacggccgcaaagcgggcgttttgccgtcaaacttgaaggcggaatggaaaatcatgtcctgtcgccgttcggtcagacggaaatcccccaatattggcgcgtggtcaaagaccgtatcgagctgttttttgacgaagctcccgtcggaactttgcgtaacgaatatctgaccgtgtcggggcagacttttgttttgaacgatttgacagggaatatg

SEQ ID NO: 44087 - DNA, 204 bp, Neisseria meningitidis; identical to SEQ ID NO: 40102

SEQ ID NO: 44088 - DNA, 258 bp, Neisseria meningitidis
atgccctctccccggccctcccccacgggggagggagaaggttgcagcagattttgcggttgcaggcggtttgaaaggcaacttagatttgcagctgttgtttcaggtcatctgaaaaataaaaagcagcctgcacaacctgttttccttgcaaaacccttaatcccaaccgccaccacgtcctctctcccatgggagagagtcagagagagggcaacaaactgtaaggcttacacaaacagtaacccgacaacagaa

SEQ ID NO: 44089 - DNA, 1359 bp, Neisseria meningitidis
atgtcttccccttcaaataccaatcgtcaaacctggtccagccgattaacctatatcctgaccgttgccggcgcgactgtcggtttcggcgcgacgtggcgtttcccgtatttggtcggtgaaaacggtggtgcgtatgtgtttttattctgtatcgcgatgctggttatcggcatcccgatgattttggtggaaaatgtcatcggacggcgcaaaggcgtgaacgcgctggatgcgttcggcggcccgatgaacggcaaacccattgccaaaatttggaaactggtcggctggatgggcttcggcgcgttcggcatcatggcttattacatggtactcggcggctgggtaatcagctatatcgttaatattattggaggaaatttgaatatttccagccccgtcgacggtgtggttacaaaaggcttctttgccgaacacattgacagcccttgggaaattgcgttttatacgctgctttttgtcgccgtgaaccaatggattttggtcaaaggcgttatcggcggcattgaaaaagcggcaaaatagctgatgccgctgctgtttttgttcctaatcgcgatggtcgtccgcaacgttacccttccgggcgcaatggaaggggttgctttctatctgaaacctgatttcagcaagattaccgccgaactgttcgtcttcgttttggggcaggtattttttgccctgagcttgggtttcggcgtgatgattaccttgtccagctatttggataaaaacgaaaatctggttcagacggcagttatcacggcaattaccaataccatcatcgccatacttgcgggctttatgattttcccgtcgctcttcagcttcggcgttgcccccgattccggcccgactttggtgttccaaagcttgccgattgtgttctcacatatgtgggcgggatctgtgttcgccgtgattttcttctcgctgctcctgattgccgcgttgacaacttcgctgaccatttatgaagtgttgattacgaccattcaggaaaaaaccaaaatccgccgtaccgccgcgattacgattgtattggctgccatcttcattttcggcaacatcccgtccattctgagctatggtccgtggaaagacgttctgttcggcaaaaatattttcgatgccttcgactacatcagcggcaacatcttgtttatgctgaccgcgctcggttccgcgctgtttgccggttttgtgatgaaggacgaagcgaaggacgaattgctttataaaggcaaccatacgacggtcaatatttggtttgcttatgtgaaatatcttgtgccgctggtgattctgctgattttcgtcagcaacctgttctaa

SEQ ID NO: 44090 - DNA, 429 bp, Neisseria meningitidis
ctcagctacaacaacgaaggcttgatgtctgtcgggcaggtaagggagatttttgagcgtttcggcaaatataatttggttcaaacggaataccggcgttttaaggcagataagacagaaaaccgtaatcataaggcaaattcgatattcgaatatctgcatgagacctttgcaaaaatagtctgttaacgaaatttgacgcataaaaatgcgccaaaaaattttcaattgcctaaaaccttcctaatattgagcaaaaagtaggaaaaatcagaaaagttttgcattttgaaaatgagattgagcataaaattttagtaacctatgttattgcaaaggtctctgcatattttagaaaagaccttttatagtggattaacaaaaaccagtacagcgttgcctcgccttagctcaaagagaacgattctc

SEQ ID NO: 44091 - DNA, 1074 bp, Neisseria meningitidis
atgcgcccgtttttcgtcggcgcgacagtgcttgccatactcggcgcgttggtgtttttcatcagccccggtgccgtcgtcctgcaccgccaaatcttcttagaactcatgctacctgcggcatatggtggtttcctgactgcggctttgttggactggacggttttttcgggtaacctgaaacctgtcgcgactttgatggcggcattattgctcgccgcatccgctatactgcccttttcgccgcaaactgcctcgtttttcgtcgccgcctattggctggtgttgctgctgttctgcgcccggctgatttggctagaccgaaacaccgacaacttcgccctgctaatgttacttgccgcgttcactgtttttcagacggcatatgccgtcagcggcgatttgaacctgttgcgcgcgcaagtgcatctaaatatggcggcggtgatgttcgtatccgtgcgcgtcagtattcttttgggcgcggaagccctgaaagaatgccgtctgaaagaccccgtattcatccccaacgttgtctataaaaacatcgccatcaccttcctgctgctgcacgccgccgccgaactttggctgcctgcgcaaaccgccggttttaccgcgcttgccgtcggtttcatcctgctcgccaagctgcgcgaactgcaccatcacgaactcctgcgcaaacactacgtccgcacttattacctgctccagctttttgccgccgcaggctatttgtggacaggtgcggcgaaactgcaaaacctgcccgcctccgcgcccctgcacctgattaccctcggcgacatgatgggcggcgtgatgatggtgtggctgaccgccggactgtggcacagcggctttaccaagctcgactacccgaaactctgcctcatcgccgtcctcctgctctttatggctgccgtctcgcgtgctttcttgatgaacgtgaatccaatattcttcatcaccgtccccgcgattctgaccgccgtcgtgttcacgctttatcttttcacgtttgttccgatttttcgggcgaatgcgtttacggacgacccggaataa

SEQ ID NO: 44092 - DNA, 1008 bp, Neisseria meningitidis
atgattttctccatcatcgtccctatttacaatgtggaaaacctccgctgctgcgtggattccgtgcttgccgaaaattttgccgattatgaaatgattttggtcgatgacggttcgccggacggctgcgggaagatttgcgacgaatatgcaggcaaatatccgcatataaaagtgattcatcaagaaaacggcgggctgtcggatgcccgcaacgccggtatccgggcggcaaaaggcgattacctaatctttttggacagcgacgattattgggccgataccaaccgttcaaaaaacgggggggggattctctttgatttacaacaacttgcagacaaaaaggttgatttgatcctgcatccctcgtccttcaattaccgcgacatccccaaaggggcggacttttcggataatgattttgtccgccattttgaaacgctggtggaggggcggtactatatcgccaacgcgtggacaaagattgtcaggcgggaaatcatcattaaaaacaatctgtttttcccaaaaggatacattcacgaggatttcccgtacagtttgcaattggcgcgttttatcaagacttttgccttttacgataaccctttttaccagtaccgcgttctcggcggctctatcagccacaacatcaaatacaaaaatttcagcgatgtgctgacgcatctcgactggggtgtggattttttagtcgaaaacaaaaattcccccatctacggcggtttgcaaaaatttgtcttcgacaatatcggctatctgaggtctatattggtaaggctttatttttccaaaaacattatcctcatctaccggaaatatttttcatttaaagaaaaatgcagaaagatattcggcgcgaaggcaatccgtccggtttttatcgggaagaccgcattcatcataggattgccgatattgcgcctgctcgtaccgcctatgctgtacccggcaatcaaggccgtttatcagaaatttttttcggaataa

SEQ ID NO: 44093 - DNA, 657 bp, Neisseria meningitidis
atgataaaaaatctttataaattgataaattatgcggctttgattggtttcgccccaaatatagtttttgcttggcctatgtttgttgaccccccgccttaccaaaacatccatgtacggagttggaaagcacggcgagattccggcatagtaaaacaagatttggatttttcttgcggcgcggcttcgattgccacgttactgaataatttttatggcagacattattctgaagcggaaatcttagacaaaatggataaaacccaaatgcgtgcttcttttgacgatatgcaacgcataatgcccgaactgggttttgaagcacaaggttatgctttgccatttgaacagttggtacaactaaaaattcctgtaattgtgtatttaaaataccgtaaaaacaaccatttttcggtattgaacggtattaacggagaaactgttttgctggctgatccatcgctggggcacgtctcaatgagcaaatcacaattcttgagcgcatggaaaacacgtgatggcgaaatggaaggaaaaattttagccatcgtgccaaaaaatactgattttgttagaaatcagatgttttttaataagaatcccgttcgtcaaacacgttttacggtagaacaaatccaaatgcggcaaaaacgataa

SEQ ID NO: 44094 - DNA, 1173 bp, Neisseria meningitidis
atggatttaagtatcgtagttcctatttataatgtcgaaagttatttggaagcgtgtttaagttccatagaatctatattaagtaatgaaaatgtcgaacttatccttgtgaatgacgggtcaaaagacggaagtgaagatatatgttacaaatatatagataaaacaacaaacaacaaacaacaaacaacaaacaacaaacaacaaacaacaaacaacaaacaacaaacaacaaacaacaaacaacaaacaacaaacaacaaacaacaaacaacaaacaacaaacaacaaacaacaaacaacaaacaacaaacaacaaacaacaaacaacaaacaacaaacaacaaacaacaaacaacaaacaacaaacaccggacaccaaatatcaaatatatatatcaggataaccaagggttgtcggaggcgagaaataccggaataaaaaattcaaacggaaaatatatagtctttattgattcggatgattttattaactgtcagattttgctggattttcttagtaaagatgatactgatatgccggatgtggtgtttttaaatgcggttaaatatgataagggaagtgtttcatattttggcgaagattatcagcctgaaaaaatactcaatcaatccaaagtcgaagttttgaaaggattatgccgatttagaaaatttccgggttcggcgtggaataagattataaaaagagaattgattattagagaaaaactgttttttgaaaggggaatttattctgaagatatcgaatggtcaatgaggttatttaatgcggcaacaactttttcttatttggacggttgttattactattatcggcagggaagaaaagattctattacgggaactgtttcggaaaaaagtataaagtcattattatatattttggagaaaaatgcggaaatggaatttaatagggatatatcgagttatctttattcttttctttcctacgaatatctcgttttgctttttataatgacgagtaaaaatatagagtgtgatgctgatataaaaagaagggcgtatcatttaaggtttatgctgttaaagtccaataaattgatatataagctgatattcccgataatcacattactcggggtcgatattacaggcaggattttaaaagcaatcagggggaatatttaa

SEQ ID NO: 44095 - DNA, 1053 bp, Neisseria meningitidis
gtgtttgaaacgccgacatttgagcaaatccgcgagcgtatcctgcgcgataccaaaagcctgtggccggatgccgatatcagccccgacagcgaccattatgtgcacgccagccgtttggccagctgcgccgaagggcaatatgcgcatcaaagctggattgtgcggcagattttccctgataccgccgaccgcgagtatttggagcggcatgcctccatgcgcggcttgagccgccgcaatcctaccacggccagcggcacgctgaccgtaagcggtattgcgcaatccatgctttcagacgacctgcaagtgcgtatcggccagcgtttttaccgcactaccgcccgcgccgttatcggcagcggcggcacggcggaaataccggcaatcgccgacgagccgggcgcggccgccaatgtggacggcgaggcgcaactgatggccgcccccgccggtgtggccaccgaatgccgccttaccgtacaaggcggcaccgaccgagaaagcgatgcctcactgctggcgcgtctgttggaaatcatccgccgaccgcccgcaggcggcaaccgttacgactataaaaactgggcgttgagtgttgacggcgtaaccagcgcatatgtttatccgctgcgccgcggcttgggtacggtggatattgccattacctccgccgacggtgtgtcgtcggaagaaactgtgcgccgcgtacaggcttatatcgacgagatgcgcccggtaacggcaaaaaatgcgctggtactcaagccaaccgtaacggcggtgcctgttaccgtgcaagtcaagctcgacggtatcgacttggacgaggccaagcgccgcatacggacggccctaaaagaatatttcgacaccctgatccccggcgacggcctgactgtgtcgcaaatcgaggctgctatcagcaatgtggatggtgtgatcgaccgccgtctgactgcgccgacggccaaccgtgccgccgatacggttaaccgcatcgagtggtttaaagcgggcgcgattaatgtaacggagatgccgtcatga

SEQ ID NO: 44096 - DNA, 1053 bp, Neisseria meningitidis
atgaagctcaaaatagacattgcaaccaacaacttcaaacacggcggcggcacggaacgctacacattggatttggtaaagggtctgaacagacaaaacatcacaccggccgtttatgcgacgaaatttgatcacagcattcctgaatacgccctaatcgaaccccatcttgtcgatcaacaccggacgctgaaaaaactacgctcattcctcttttcaagccggctcgctcaaaccagaaaaaacagtgccgccaaactgattgcctgccaccacgccgattacgccgacctcctcatctgcggcggcacacacttgggctacctgcaccatatggcgcaaaaaccgaacctgctcgaccgcctcgccatacgccgcaaccgcagcaactacgccaccgccaaactgattatggcgcattcccatatgatgcggcgcgaactggtcggactgtacggcgttccccctgaaagaatccaagtcgcccccccccccgcagatacggaacgcttctttccacaacccggagaaactgccgacctgcgcgccaaatacggctttgccgaccatgaaaccgttttcctgttcccatcgaccggccacacgcgcaaaggtctggaactgcttgccgactttttcgaacataccagcctgcccgtcaagctcgccgttgtcggctccccgcttccccgccctatgaaaaacgtcgtcggactgggcttctgcaccgatatgcccgaactctaccgcgccgccgactttaccattatggcttccctgtacgaacccttcgggctggtcggcgtcgaatccgtcctatgcggcacacgcgtcgtcctctccgaaaacatggcatgtacagaggtcatgaacgaagaagccggcttctttttctcacgccaaaacccggaaaccctggcgcaagccgttgcccaagccgtcagccttaaaaaacagggcggacaccgcctgtccgacccgatgcgggcactgaactacaacccggctttagacaaacacatcgggctgattcttgaaatgcttgccgcctga

SEQ ID NO: 44097 - DNA, 510 bp, Neisseria meningitidis
atgaaacgcaccaaaaaataccctttcttaacgttgcagcggcaacgtttccatttgaactttgaaaacgcctcttccgccgccggcatcccagccgaacgcgatttctaccgctgggcgtggtctgccttgaaaaatgaataccgccgcgccgacatcagcctgattcttctggacgaagaagaagcccgagcctacaaccgcgactaccgcggcaaagattacgccaccaatgtattgagtttcgcgctcaacgaaggcgaaatcctgccctgccaagtttcggaaaaactgtacggcgatttgattatctgcccgcaagtggttttgaaagaagccgccgaacaaggcaaaacacccgagcagcattttgcccacctgaccatacacggtactttacacctgatgggctacgaccacatcgaagacgacgaagccgaaataatggaagccgaagaaatccgcctgatgcgggcggcaggcttccccaacccctaccaagaggactga

SEQ ID NO: 44098 - DNA, 708 bp, Neisseria meningitidis
atggatacttttttagataggctcaaatttctttggcctcatggggctaagccatctgacatctataacaaaatagaaatgtcggcttctggatttaatagagtttggaaagagggagctatcccaacagccgattacctagtaaaaattcattgtgatttaaactggctgctgaccggaaaaggcttgccgtatctcgataaagccaggccggaaaacgccggagcattctctgtaagtagaaattctgatggaatcaccgacactatgggcaatcctgtcgacctgtccgagtttgtattcgtgccgcgctacaacgtagccgcagcagcagggtatggcgcaccagtcttcggcgaagaacctttattctgcttggctttccggaaatattggattgacaactatgtgaccaaacagccggaaaaactgtctgtaattaccgttaaaggcgattcaatggagggcgtgctcaatcatgaggattccattctcatcaaccacgccgaaactgacccgcgtgacggcctatatgtcttgcgtataggcaatgacctctttgtcaaacgtgtgcaacgtataccgggcaaactgcttgtaacgtctgaaaatccacgttacgcaccgtttgaaatagatttgagcaatgcccaagacgacatcgccatcataggccgtgttgaatggtatggccggagtattgattaa

SEQ ID NO: 44099 - DNA, 2118 bp, Neisseria meningitidis
atgggcaaagccaacgcctttaccgcaccgattaccgtcgtcaattacgacgaacaagccctcaataacaccgaagcgcgtactttggtggatgccgtagcgaaaaaagacgcttccgtctggcagttcggcggcgaaagcaacacgctgaccggactgtatttcagaggttatcagcttgactcgcgccaattcagcgtcaacggtttggcaggtatgtacggcacgcaaggcacggccagcgtgcaagttggatcggcacaactgattaaaggcgcatccactgccgtaaacggcatggaccctgaaggtgcggtatccggttccgtcaatatcgaaaccaaaaaagccgccgatgaaggcaaccgcaaaatcggtttgggctggttcagtaacaaccgcgcccaaggtacgttcgacttgggccaacgtttcggcgaaaacaaagcattcggcgtgcgcgccaacggcaaactgcgccacggcgacaccccgcgccacggttacagcgaagacaacaaagaatttgcggtaaatgccgattatcgcggcgaaacactgcgcgtagcgttcgattccatctacgcaaaacgcaaaaccaacggcggccgcgcgcgtatgcaggatattcaaaacgccggcggacgcttgtttggcgcgcccgatggtaaaaccaacctgctgccttcttggaactggcaaaataccgccggccaaaccaatatgcttacgtttgaatgggatgcgtttgataatgcacagattacaggcggtatcggctacaacaaggcacgctattacggcacgctgatttccccgaccgtatgtttgaatgctaccagcacttgtaccgatatgcaaaacacaaacgccagcggcaaagtaacggcacgcaactatgactacaataccggtactgcgcgcctgaccgaccaatatttccgcacattgagtatgaacctgaccgcacgcggcgaatttgaaaccggcccggtaacacataactggagtatggctttcgaccgcgttatccgccagcggaaaaccataaacggcagcgggaacggcaacagcaagatagaagtgaaggcaaacgaaaatattgcgaatcaattggcatcgtttacagccgactatcccaattcttgggagaactctgccaacttggatgccaatatcaaagtcaacagcctggctttgtccgacaccttgggcttcgtggataacaaataccgcctgactttgggcggacgtttccaaacagtcgaatataccgacaaaaaatcacagagcggcgatgccaaacgtttcagcccgatgctgatggcggcgtgggtgccgcaacctgatttggttgtgtacggcaactatatggaagacttggagcctgccgacatcaaaaccgatgattccggcgaaacgacaatggcgaaaccgcgtgtcagccgccagtttgaagtgggcgtgcgtaaaaactggggcaatttcgtaaccacgttaaacgcgttccaaatcaaacgcccctactggcgcggtcatacaactaccaagacaacaaaaggggtaacaacaacgctgacctatggcaacaattccgatttcgcccgctataaggcgcaaggcggcgtagccggcgacgagcaaggtatggaacgcaatcgcggtatcgagttcaatgcctatgctaacctgttaaacaaaaccctgcgtccgactttgggcctgatgtatctgcaatcgaccgtgaaagagtatccaaattcacgcgatatgctggttaacggcgtacaagtcgccaatccgcgcgtaattgccaaagcaggtttggaatgggatacaccgtttgccaaaggattgactttaaacggtaatgtttcgtatttcggcaagtctgaccaagacacgcaaaaacaatacgccttcccgtcctataccttgattgacgtaggcgcgcgctacaaaaccaagctcggcaaaaatactttgaccgtcagcagctcggtggaaaacctgttcaacaaaaactattggcaggtacagcgcggccaatacgaccgcagcttcgccgtcgtcggtatgccgcgcacttactggctgaaggcggaattggatttctga

SEQ ID NO: 44100 - DNA, 1302 bp, Neisseria meningitidis
atgtggacgggatttttttcaaaatcaggcactggcattgcagaggaaaggcatcaaaaccgccgtgcttgcaccgatgttccgctacttgcggaaagaaacagcaagcatcctgaccgacccttacggttttgcaaaatatagtggattaaatttaaaccagtacagcgttgcctcgccttgccgtactatctgtactgtctgcggcttcgtcgccttgtcctgatttttgttaatccactatatcggcaaagcggtttggacatctatgcatggcacggcatgtatttcttcccccgctttccgttcatcgacatcgaccgcatccgctgggtgtgtgcgggtttgaaagctttcaaacactacatccgcgaaaacgggctgcccgacctgattcacgcccactgtatgaactatgccggcatacttgccttcaagatttcccaaaaatacggcatcccctatgtcgtcacggaacacagcagcaccattacgcgcggtttggtgcgcccgcaccaatggcagcctatgaaaaatgcggcggcacacgccgccgcacgtctcgccgtcagccgccatttcgcacacgtcctgcaacacaaatacggctgcgaatggcagtacctccccaacatactgggcggaatattcaaccgaccgtttgaacaaagagaaaaaaacaacaaaccgcatttcgtgttctgcaccgtctcgcaccttcgccgtctcaaaggacacgatgtcctactcactgcctttgcccgggcgttggcacaatgcccgcaactgcgcctgaacatcggcggcagcggacaggaagaacagcggctgaaacagcaggcggcagacttgggcattacccatgccgttacatttttgggcgcattgcagcccgaagcagtcttggatttgatgaggaacagcgacgcattcgtccttgccagccgcacagaaaccttcggcgtagtctatatcgaagcactgtcccaaggattgcccgtcattgcaacacgctgcggcggtgcggaatctattgtttcagacggcaacggatatttggttcctgttgacgacgacgatgcccttgccgacgcactcatcaaaatgtgtgaacaccactctgatttcgaacctgcccgacttagagaaaactgtctgaacgaatttggcgaaaatgccgttataggcaggttgatcggcattttccgacaggcaatcgcagaatacggtaagaaaataccggtgaaatatagtggattaacaaaaatcaggacaaggcgacgaagccgcagacagtacaaa

SEQ ID NO: 44101 - DNA, 963 bp, Neisseria meningitidis
atgcaagcacggctgctgatacctattcttttttcagtttttattttatccgcctgcgggacactgacaggtattccatcgcatggcggaggtaaacgctttgcggtcgaacaagaacttgtggccgcttctgccagagctgccgttaaagacatggatttacaggcattacacggacgaaaagttgcattgtacattgccactatgggcgaccaaggttcaggcagtttgacagggggtcgctactccattgatgcactgattcgtggcgaatacataaacagccctgccgtccgtaccgattacacctatccacgttacgaaaccaccgctgaaacaacatcaggcggtttgacaggtttaaccacttctttatctacacttaatgcccctgcactctctcgcacccaatcagacggtagcggaagtaaaagcagtctgggcttaaatattggcgggatgggggattatcgaaatgaaaccttgacgactaacccgcgcgacactgcctttctttcccacttggtacagaccgtatttttcctgcgcggcatagacgttgtttctcctgccaatgccgatacagatgtgtttattaacatcgacgtattcggaacgatacgcaacagaaccgaaatgcacctatacaatgccgaaacactgaaagcccaaacaaaactggaatatttcgcagtagacagaaccaataaaaaattgctcatcaaaccaaaaaccaatgcgtttgaagctgcctataaagaaaattacgcattgtggatggggccgtataaagtaagcaaaggaattaaaccgacggaaggattaatggtcgatttctccgatatccgaccatacggcaatcatacgggtaactccgccccatccgtagaggctgataacagtcatgaggggtatggatacagcgatgaagtagtgcgacaacatagacaaggacaaccttga

SEQ ID NO: 44102 - DNA, 414 bp, Neisseria meningitidis
atgattgatgtcaaaatagacaatatctttgtcgtcctaaaccaaatcgagcggcttggcaacgggatcgaaaaccgctacctgctgatgcgccgactgtccgaaaccatgcacacggcggtcaagctcaatttccgctacgcaggccgtccgaaatggttgggctaataccgcgacggcaagccgctttcggattcgggtcgtctgaaagacagtttttccacactgtcagacaacgatacagcccttgtcggtacgaatatcgtctatgccgccatccacaacttcggcggtatggcggggcgcaaccgcaaagttcggattccgcaacgggaatttttgacgctgacggacgacgacaaacaggctttgatggacgatgtgcaggattatttttcgggtctgataccgtga

SEQ ID NO: 44103 - DNA, 2121 bp, Neisseria meningitidis
ctcaaaggtgcgcagctcatcggcaaaggcatacaggcagatacgcgcaacctgcatatagaaagtgttcaagatactgaaacctatcaaagcaaacaacaaaacgccagtgcacaagtgaccgtaggttatggcttcagtgccagtggcgattacagccaaagcaaaatccgagccgaccatgcttcggtaaccgagcaaagcggtatttatgccggagaagacggctatcaaatcaaagtcagagacaacacagacctcaagggcggtatcatcacgtctagccaaagcgcagaagataagggcaaaaacctttttcagacggccaccctcacccatagcgacattcaaaaccacagccgctacgaaggcaaaagcttcggcataggcggcagtttcgacctgaacggcggctgggacggcacggttaccgacaaacaaggcagacctaccgacaggataagcctggcagccggctacggcagcgacagcgacagtcaaagcagcatcacgaaaagcggcatcaacacccgcaacatacacatcaccgacgaagcgggacaacttgcccgaacaggcaggactgcaaaagaaaccgaagcgcgtatctacaccggcatcgacaccgaaactgcggatcaacactcaggccgtctgaaaaacagcttcgacaaagacgcggtcgccaaagagatcaacctgcaaagggaagtaacgaaggagttcggcagaaacgccacccaagccgtagcggccgttgccgacaaactcggcaatacccaaagttacgaacggtatcaggaagcccgaaccctgctggaggccgaactgcaaaacacggacagcgaagccgaaaaagccgccttccgcgcatccctcggccaagtaaacgcctatcttgccgaaaaccaaagccgctacgacacctggaaagaaggcggcataggcaggagcatactgcacggcggggcggcaatcggctatgcggcgggcgggaatgtcggtacggcggcagtaggggcgaatgtcgattggaacaataggcagctgcatccgaaagaaacacaaatccttaacaaactgtcaaaaggcaaatcggctgaagaacagtaccgcctaaaagccgctgcatgtgcattaacccggtgcgcggaaggcgtacctgacttcgaccctctttataaaggactaaaaaacctccaagatgccggtaaacagtttgtagcggaacaaaacgtattgatgcggacggatgcatttaaatatggaacatggaacagcctgaatgatatacgcagcagttacgaccgtgctgccaccaaaattaagggtgcgggcaatatgggattgggtgcaacgacttttgtcggttcgggtgctataggcggaggtctgtgcagtaccgggattggctgtgcggccggtggacttattgcaacggcaggtatgaccggtggttatacacaggcctcagaaggaagccggcaattgtttggcacttaccagtccgattttggtaaaaaagttgtcctatctttgggtacaccaatagaatacgaatcgccgttagtatctgatgcgaaaaatctagccgtatggggattggaaacgctgattacgcgcaaattgggaaacttggcaacgggtgtgaaaacttccttgactccgaaaactgctgacgtacagcgaaatatcctgtcccaatccgaagtcggtatcaagtggggcaaggggattgaaggacagggaatgccttgggaggattatgtcggtaagggcttgtctgccaatgcaaggttacctaaaaattttaaaacatttgattattttgatcgtggtacaggcacggcaatcagtgccaaaactctggatacgcaaactacggcacgcctgtccaaacccgaacagctttacagtaccatgaaagggtacatcgataagacggcaaatttcaaaagttatgaattatcagaagtaccgttaagggcagacatgatcaaacagcgcgaaatccatctggccatacccgcacaaactaataaggagcaaagattgcagttgcaacgtgtggtagagtatggcaaaagtcaaaacattacagtcaaaattacggagatcgaa

SEQ ID NO: 44104 - DNA, 402 bp, Neisseria meningitidis
atgagaaaaagtcgtctaagccggtataaacaaaaactcattgaactgtttgtcgcaggtgtaactgcaagaacgacagcagagttagtaggcgttaataaaagtaccgcagcctattattttcatcgtttacgattacttatttatcaaaacagtccgcatttggaaatgtttgatggcgaagtagaagcagatgaaagttattttgctgaacgacaaaaccatatcaatggaattgagaacttttggaaccgggcaaaacgtcatttacgcaagtttgacggcattcccaaagcgcattttgagctgtatttaaaggggtacgaacggcgttttaacaacagtgagataaaagttcaaatttccattttaaaacaattagtaaaatcgagtttatcctag

SEQ ID NO: 44105 - DNA, 1980 bp, Neisseria meningitidis
atgtctcaactggcaaacgcaatccgcttcctctcggccgatgccgttcaaaaagccaattccggccaccccggcgcgcctatgggtatggcggaaatggcggaaacattgtggacgaaattcctcaatcacaaccccgccaaccccaaattctacaaccgcgaccgcttcgtcctctccaacggccacgcgtctatgctgttgtacagcctgctgcacctgaccggctacaacctaagcattgaagacttgaaaaacttccgccaactgcacagcaaaacccccggccatcccgaatacggctacaccgacggcgtggaaaccacgaccggcccgttggggcaagggattgccaacgcggtgggtatggcattggcagaaaaaatccttgccgccgaatttaataaagacggtttgaacatcgtcgatcattacacctacgtctttatgggcgacggctgtctgatggaaggcgtatcgcacgaagcctgttcgctcgccggcaccttgggcttgggcaaactgattgttttatatgatgacaacaatatttccattgatggtaaagtggacggctggtttaccgaaaacatcccgcaacgctttgaaagctacggctggcacgtcgttcccaatgtaaacggtcatgacaccgccgccattcaagccgccatcgaagccgcacgtgccgaaaccggcaaaccgtccatcatctgctacaaaaccttaatcggcaaaggcagtgccaacaaagaaggcagccacaaaacccacggcgcacctttgggcgcggacgaaatcgaagccacgcgcaaacatttgggctggacttaccccgcctttgaaatcccgcaagaaatttacgatgcgtggaatgccaaagaacaaggcgcgaaactggaagccgactggaacgaactgttcgcgcaatatcaagccaaatatcctgccgaagccgcagaatttgtgcgccgtatggataaaaagctgccggacaatttcgatgaatacgttcaagccgcattgaaagaagtgtgcgccaaagccgaaaccatcgccacccgcaaagccagccaaaacagcatcgaaatcttggcaaaagagttgcctgaattggtaggcggttctgccgacctgaccccgtccaatctgaccgactggtcaaacagcgtctccgttacccgcgacaaaggcggcaactacatccactacggcgtgcgcgagttcggcatgggtgcgattatgaacggtttggtattgcacggcggcgtaaaacccttcggcgcgactttcctgatgttcagcgaatacgagcgcaatgccctgcgtatggctgcgttgatgaaaatcaaccctgtatttgtgtttacccacgattccatcggtttgggcgaagacggcccgacccatcaaccgattgagcaaaccgccaccctgcgcctgattccgaatatggacgtatggcggccgtgcgacaccgccgaatccttggtggcttgggcagaagccgtcaaagccgccgatcacccgtcctgcctgattttcagccgtcaaaacctgaaattccaagcgcgcagcgagcaacaactgaacgacatcaaacgcggcggctacgtcatcagcgaagcccaaggcaacgcccaagccgtcatcattgccaccggctcagaagtcgagctggctttggaagcgcaaaaagccctcgccgcgcaaaacatcgccgtgcgcgtcgtttccatgccgtccaccaacgtattcgaccgccaagacgccgcctatcaagccgccgtcctgcccgaaggcctgccgcgcatcgccgtagaagccggacacgccgacggctggtacaaatatgtcggactgaacggcgcagtcgtcggcatcaaccgcttcggcgaatccgcccctgccgatttactcttcaaagcattcggctttaccgtggacaatgtggttgatacggtgaaatccgtgctgtaa

SEQ ID NO: 44106 - DNA, 354 bp, Neisseria meningitidis
gtgattacattgcgcatcgtgtgggcggttgccaaccgcgccaagcgtccgcaaagcgactgcaaggctgcggcggcaggccacggcattctgtatctgctcatgcttgctgttcccgttatcggcatgatccgccaatacggcagcggccgcggcccgttgaaagtgttcggcgttgaagtgatgcaaggttcgccggaaaaaatcgagtggatggcaaacttgggcaacacgttccacggcaatttgggcttgctgctgtttgccgccgtcgccggacacgtcgccatggtcgtcgcccaccgtgttcagggtagagatgttctgtgccgcatgacgggtcgtgtccgctga

SEQ ID NO: 44107 - DNA, 2172 bp, Neisseria meningitidis
atgaataccccattgttccgtctcagcctgctctcgctcacacttgcggcaggttttgcccacgcggcagaaaataatgccaaggtcgtactggataccgttactgtaaaaggcgaccgccaaggcagcaaaatccgtaccaacatcgttacgctgcaacaaaaagacgaaagcaccgcaaccgatatgcgcgaactcttaaaagaagagccttccatcgatttcggcggcggcaacggcacgtcccaattcctgacgctgcgcggcatgggtcagaactctgtcgacatcaaggtggacaacgcctattccgacagccaaatcctttaccaccaaggcagatttattgtcgatcccgctttggttaaagtcgtttccgtacaaaaaggcgcgggttctgcctctgccggtatcggcgcaaccaacggcgcgattatcgccaaaaccgtcgatgcccaagacctgctcaaaggcttggataaaaactggggcgtgcgcctcaacagcggctttgccagcaacgaaggcgtaagctacggcgccagcgtattcggaaaagagggcaacttcgacggtttgttctcttacaaccgcaacgatgaaaaagaatatgaagccggcaaaggcttccgtaatttcaacggcggcaaaaccgtaccgtacagcgcactggacaaacgcagctacctggccaaaatcggaacaaccttcggcgacggcgaccaccgcatcgtattgagccacatgaaagaccagcaccgaggcatccgtaccgtccgtgaagaatttaccgttggcgacgcaagttcacggacaaatattacacgccaagccccatcctaccgcgaaaccacacaatccaacaccaacttggcgtacaccggcaaagatttgggctttgtcgaaaaactggatgccaacgcctatgtgttggaaaagaaacgctattccgccgatgacaaagataacggctacgcaggcaatgtggtcggccctaaccacacccgaatcaccactcggggtatgaacttcaactttgacagccgccttgccgaacaaaccctgttgaaatacggtatcaactaccgccatcaggaaatcaaaccgcaagcgtttttgaacggcgaatttgagatctccggtaagaagaaagatccgaaagatcccaaaaaagaaatagataagaccgatgaagaaaaagcgaaagacaagaaagatatggatcttgtccattcctacaaactgtccaacccgaccaaaaccgataccggcgcgtatatcgaagccattcacgagattgacggctttaccctgaccggcgggctgcgttacgaccgcttcaaggtgaaaacccacgacggcaaaaccgtttcaagcagcaaccttaacccgagtttcggcgtgatttggcagccgcacgaacactggagcttcagcgcaagccacaactacgccagccgcagcccgcgcctgtatgacgcgctgcaaacccacggcaaacgcggcatcatctcgattgccgacggcaccaaagccgaacgcgcgcgcaataccgaaatcggcttcaactacaacgacggcacgtttgccgccaacggcagctacttctggcagaccatcaaagacgcgcttgccaatccgcaaaaccgccacgtctctgccgccgtccgtgaagccgtcaatgccggttacatcaaaaaccacggttacgaattgggcgcgtcctaccgcaccggcggcctgactgccaaagtcggcgtaagccacagcaaaccgcgcttttacgatacccatcctaaaaaactgttgagcgcgaatcctgaatttggcgcacaagtcggccgcacttggacggcttcccttgcctaccgcttccaaaacccgaatctggaaatcggctggcgcggccgttatgttcaaaaagccgtgggttcgatattggtggcaggtcaaaaagaccgcaacggcaaattggaaaacgttgtacgcaaaggtttcggtgtgaacgatgtcttcgccaactggaaaccgctgggcaaagacacgctcaatgtcaatctttcggttaacaacgtgttcaacacgttctactatccgcacagccaacgctggaccaataccctgccgggcgtgggccgcgatgtacgcttgggcgtgaactacaagttctaa

SEQ ID NO: 44108 - DNA, 2112 bp, Neisseria meningitidis
atgacactgaaagcaagcaagcaagcaagcaagcaagcaagcaagcaagcaagcaagcaagcaagcggtcgggttaatctattaacattatctgttttatcgctgttttgcacgccatatgtttgaggttcggatgcgtacgatcccgtcaaagaagccgagattaaaaacaaatttattttagaagcggcggaagacagaaattcccacgtttggcgcggcccgtgcagcatatcttttgattgcttcggtatgttcagagctcagcttggttcaaatactcgttctaccaaaatcggcgacgatgccgatttttcattttcagacaagccgaaacccggcacttcccattatttttccagcggtaaaaccgatcaaaattcatccgaatatgggtatgacgaaatcaatatccaaggtaaaaattacaatagcggcatcctcgccgtcgataatatgcccgttgtcaaaaaatatattacagagaagtatggggctgatttaaagcaggcggttaaaagtcaattacaggatttatacaaaacaagaccggaagcttgggcagaaaataaaaaacggactgaggaggcgtatatagcacagtttggaacaaaatttagtacgctcaaacagacgatgcccgatttaattaataaattggtagaagattccgtactcactcctcatagtaatacatcacagactagtctcaacaacatcttcaataaaaaattacacgtcaaaatcgaaaacaaatcccacgtcgccggacaggtgttggaactgaccaagatgacgctgaaagattccctttgggaaccgcgccgccattccgacatccatacgctggaaacttccgataatgcccgcatccgcctgaacacgaaagatgaaaaactgaccgtccataaggattatgcgggcggcgcggatttcctgttcggctacgacgtgcgggagtcggacgaacccgccctgacctttgaagacaaagtcagcggacaatccggcgtggttttggaacgccggccggaaaatctgaaaacgctcgacgggcgcaaactgattgcggcaaaaacggcggattccggttcgtttgcgtttaaacaaaattaccggcagggactgtacgaattattgctcaagcaatgcgaaggcggattttgcttgggcgtgcagcgtttggctatccccgaggcggaagcggttttatatgcccaacaggcttatgcggcaaatactttgtttgggctgcgtgccgccgacaggggcgacgacgtgtatgccgccgatccgtcccgtcaaaaattgtggctgcgcttcatcggcggccggtcgcatcaaaatatacggggcggcgcggctgcggacgggtggcgcaaaggcgtgcaaatcggcggcgaggtgtttgtacggcaaaatgaaggcagccgactggcaatcggcgtgatgggcggcagggccggccagcacgcatcagtcaacggcaaaggcggtgcggcaggcagtgatttgtatggttatggcgggggtgtttatgctgcgtggcatcagttgcgcgataaacaaacgggtgcgtatttggacggctggttgcaataccaacgtttcaaacaccgcatcaatgatgaaaaccgtgcggaacgctacaaaaccaaaggttggacggcttctgtcgaaggcggctacaacgcgcttgtggcggaaggcattgtcggaaaaggcaataatgtgcggttttacctacaaccgcaggcgcagtttacctacttgggcgtaaacggcggctttaccgacagcgaggggacggcggtcggactgctcggcagcggtcagtggcaaagccgcgccggcattcgggcaaaaacccgttttgctttgcgtaacggtgtcaatcttcagccttttgccgcttttaatgttttgcacaggtcaaaatctttcggcgtggaaatggacggcgaaaaacagacgctggcaggcaggacggcactcgaagggcggttcggtattgaagccggttggaaaggccatatgtccgcacgcatcggatatggcaaaaggacggacggcgacaaagaagccgcattgtcgctcaaatggctgttttga

SEQ ID NO: 44109 - DNA, 1554 bp, Neisseria meningitidis
atggatttcagttggttggcagaaccgcatacctggataggttttgccacgcttttggtgttggaagtcgtattggggatagacaatcttgtctttgtggcgattttggcaaacaaggtccagcccgcacggcgcgaccgcgcacggattatcgggctggggctggcagtcgtcatccgcatcattatgcttgcttttatggcgcacatcatcacgctgaccgagccgctgttccaaatcggcggcctcgccgtttccggcaaggacatgattatgctcgcgggcggtattttcctgctttacaaagccaccaccgaactgcatgaacgcctcgaagggcacaaccgttttaccgttgccgacagccaaaaacacgcgccgttttggggcgtggtcgcgcaaatcctgatactggatgccgtgttttccatcgattcggtcattactgcggtggcgatggtcgatcatatcgtcgtggcgatgggtgcggtcgtcgtcgcgatggctgtaatgatttctgccagcaaactcttgaccgaatttgtcgacagacaccctaccgtcgtgatgctctgccttggttttttgttgatgatcggtttcagcctgattgccgaagccttccatttccacattcccaaaggctacctctacgccgccatcggcttctcgattttaatcgaattgtttaaccagatttcgcagcgcaacagccgcaaaaacgactacatcggcagctcgtggcgcaagcgcaccgccgaaaacgtcttgggtatgatgggtatacgcgaaagcgtgcttgccgacgcgggcggcgaatccggggacgacgcgcattttgaagaaaacgaaaaatcgatgatacgcagcgtgctgacgcttgccgaacgcccgattatgggggtgatgatcccacgccgcgacatcgaacggctggacatttcccaaagccgcgaagaacagtgtgcccaactgcaaaacacgccttacagccgcctgctcgttgtcggtaaggcgggcgtggacgaacctttgggctacatcaacaaaaaagacctgctgtcccaactgctggaaacaggcggtctcgacattcagacggcattgcgccagccgctcgtcctgcccgacagcaccaccgcgctgggcgcaatcgaactcttccgccaaagcagcgcggattatgctttggtggtggacgagttcggcgcggtattgggcatggtaaccatgaaagacctgctcgaaaccatcgcaggcgagttccccgaagaatttgagcgcgaagaagaaccagccgttcaggggaatcccgatgaaagcctgacggtggaaggcgcgttggaatatgtggaactcgcaccgcaactcaacctgccgcagcaggaggaagatgccgatttccatacggttgccgggctgattatggaagaattgcaaaccatccccgatgtcggcgattttgccgatttccacggctggcggtttgaagtggtcgaaaaagaagggcagcgcatcgagcgggtcaaaatcaccaaattgcccgaagaataa

SEQ ID NO: 44110 - DNA, 2040 bp, Neisseria meningitidis
atgaaactcgaagcaagcaagcaagcaagcaagcagcagaagtttaaaaaatcatttattgtaagtctatttttttctattctttatacctctccgcttttggctgttgattacgtttacgacaaaaccaagctcactaatgatgaaattacccgcttaaaaaaactccgcgataaaacgagtgaatattggaaaaaagaaacttatcttataaccgaggataatccaaaagttccaccctttcccgcactataccctagaacataccaattcgaaaacatcaataactcaaaaaagatttctttttatgatcaagaatataccgaaggttacctagttggcttcgcccgaggtttaggggttgcaaaaagaaatggggacacagaagaacaaatacggaaatattttaaggaatgttttaattctaacactaagatacgtgattatagtacttgccaagctgaaaaatttggatcccatcctcttatagtaaaaagtcatatattctccttaggtccaaaaataaaaaatagtcatatcaacagcgaaattttatctgtcgggaattatacagaatgggctaatcaagtaattcatcatattgaaaattatgtttcttttgcagcacatctatattctggtttagatccattccactatattgaggttacagacaactcgcacgttatcgggcaaacgattagtttggatgaattccgcttagaaaattctctctgggagccccgttgggattctaatgttgggaaattaaaaacaacgaatgcagacatccgttttaatactaaaagtgaaagtttactcgtaaaagaagattatgctggcggagctcgttttcgttttgcttacgatcctaaagaagcgaaaaatactgcattaatttttgagaaaaatgttactggcacttccgacatcatcttcgaaaatccaatagacgatttaaaaagcctcgatgggcatcaaattatcaaagtaaatggcacagcagataaacacgcattccgtctttctggcaaacaccaaaagggaatttatacgctttctttacaacaacgcccagagggcttttttaccaaagtgcaagaacgcgatgatatggcgatttatgcacaacaggctcaagccgccaataccttattcgccttgcgtttgaacaacaaaaacagcgatattttcgaccgcactttaccacgcaaaggcttgtggttgcgtgtgattgacggacattccaaccaatgggtgcaaggcaaaacagcacctgtagaaggctatcgtaaaggtgtgcaactcggcggcgaagtattcacatggcaaaacgaaagtaatcaactttctattggcttaatgggcggacaagcagaacaacgtagcactttccacaacccagatacagacaatcttacaacgggaaatgtgaaaggctttggtgcaggcgtttacgccacttggcaccaacttcaggacaaacagacaggtgcgtatgcggatagctggatgcaatatcaacgcttccgccaccgtatcaacactgaagatggtacagaacgttttacttcaaaaggtattactgcctcaattgaagcaggttacaatgcgttattggcggaacacttcactaaaaagggcaacagccttcgtgtttacctacaaccacaggcacaattgacttatttgggggtaaacggaaaattcagcgatagcgaaaatgcccacgtgaatttacttggctcccgccaattacaaactcgggttggcgttcaagctaaagctcaattttcactctataaaaatatcgctattgaacctttcgccgctgtgaacgcgctttaccacaacaaacctttcggtgtggaaatggacggagagcgtcgagtgataaacaataagacggcaattgagagccaattaggtgtagcagtgaaaatcaaatctcacttaaccttacaagccacattcaaccgccaaacaggcaaacatcatcaagctaaacaaggtgcgttgaatttacagtggacgttttaa

SEQ ID NO: 44111 - DNA, 2064 bp, Neisseria meningitidis
atgctgccaacccaacccaacccaacccaacccaacccaacccaacccaacccaacccaacccaacccaagccctgatctaagcgacacagccggggcgaacactgaggcaatctacacttcagacggcattaccgccaactctacccaactcgaacagctcaaaaaactgtttcccgcctgttttgacgcagacggaaatttccttatcgacagattacaagccgaaatcgcgccgcagaccgacatcggacgcgaattttacgaaatgaactggctgggcaaatcatatgctcgcctgcttcgcaacctgccgcccgaaaccctgataagtgaagacaagacgcacaacgccaagcccgaaaatgcaggcagccaaaacctgctgattcgtggcgacaatctagaagtgttgaaacacttaaaaaacgcctacacaaacagcgtgaagatgatttacatcgacccgccctaaaacaccggatcagacggctttgtctatcaggacgaccgcaaattcacacccgctgaacttgcccgcctagccaatattgatgaagacgaagccgcgcggattttagatttcaccgacaaaggctcaaactcgcacagcgcatggctcacctttatgtatccgcgcctgtatgtcgcccgcgaactgttaaaggacgacggtgtgatttttatctcgattgacgataacgaagcggcgcagttgaaattgttgtgtgatgaagtgtttggggaagggaattttgttgcacaattgccttggcgaaaaagaacagctaaatcagatgtgccttttggtatttcgcaggattatgaatggatatttgtattcgcaaaatcttgccaatttattgcagcaactaaaggcaaggaacgacgctattatgagactgatgatttccccgatcgtccttggcgtacccacgacttaacgaaacaaacaactgcggcggaaaggccaaatagttttttcacaatggttgatcccaagacaggaaaaaaatatccagcaaatccaaatgcaacttggcgtgtaaccaaagatacatttcaagattattataataaaggaaaaatcgttttccctgatgattatgatttcttaaatatcagcaatccagttatgcgttactttaaagatgacgacatgaaaaaagctggcgaggattttggcaaagtagctgtaagcagtagattacctgaaaatgttggtacattagccgatgcagtagccgaatatttggctatttttagtaggacgctacctgaaaatatcggaatgactaaagaaggcacaaaagaaatcacagatttatttggtagcaaaatatttaccttccccaagcctagtcaattgattaaatttttagtttcaataagttcaaagagtaatgacctaatcctagacttcttcgcaggcagcggcacaaccgcccacgccgtgatgcagcttaacgccgaaggacaaaacggtaaccgccgctatatctgtgtacagcttcccgaaaaaaccgctgaaaaatccgaagcccgtaaagcaggctacccgaccatcttcgacatcaccaaagcccgcatagaaaaagccgccgccaaaatccgcgtcgaacatcccgattacacgggcgattcgggcttcaaaatctttcaaacggcagacaatttcaggcagcatccggacaaggatttttcgcccgaacaaccggatttgccgcttaacgatgaattaagcgaagaacagctgcaaacgcttctgaccacctggacgctgtatgacggggcggcactgaccacgccggttgagcctgtgcggttaggggcttacacggcgtatctgtgcgaaaaacggctgtatctgatgaatgccggttttacttccgccgatttgttggcgtttatccgcaagctggacgacgatgcggatttcaatcccaaccgcgtgattgtattcggcagcaatatggcaagcgccatgcagcacgaacttgaccaggcggttcgcggttatgccaataaaaaagagattgagttgaatgtggttatcagggtttga

SEQ ID NO: 44112 - DNA, 297 bp, Neisseria meningitidis
  misc_feature 8, 9, 10, 11, 12: 'n' is a, c, g or t
gtgtgtgnnnnnggttacggcgatgaaaccgacagcacggttttggaactgacgcacaactgggatacggaacgatacgacttgggcaacgcctacggacacatcgcggttgaagtggacgatgcctacgaagcctgcgaacgtgtgaagcggcagggcggaaacgtcgtccgcgaagccggcccgatgaaacacggcacaaccgtgatagcgttcgtcgaagaccccgacggatacaaaatcgagttcattcaaaagaaaagcggcgacgattcggttgcctatcaaactgcctga

SEQ ID NO: 44113 - DNA, 870 bp, Neisseria meningitidis
gtgaaggcttcctcgcccgaaaccatcttggaaaaaacagttgccgaagtccaaacaccggaagagttgcacgatttcctgaaagtgtacgaaaccgatgccgtcgcggaaactgcgcctgaaacgcccgatttcaacgccgccgcagacgatttgtccgcattgcttcaacctgccgaagcaccgtccgttgaggaaaatataacggaaaccgttgccgaaacacccgacttcaacgccaccgcagacgatttgtccgcattacttcaaccttctaaagtacctgccgttgaggaaaatgcagcggaaaccgttgccgatgatttgtccgcactgttgcaacctgctgaagcaccggccgttgaggaaaatgtaacggaaaccgttgccgaaacacccgatttcaacgccaccgcagacgatttgtccgcattacttcaaccttctgaagcacctgccgttgaggaaaatgcagcggaaaccgttgccgatgatttgtccgcactgttgcaacctgctgaagcaccggccgttgaggaaaatgcagcggaaatcactttggaaacgcctgattccaacacctctgaggcagacgctttgcccgacttcctgaaagacggcgaggaggaaacggtagattggagcatctacctctcggaagaaaatatcccaaataatgcagataccagtttcccttcggaatctgtaggttctgacgcgccttccgaagcgaaatacgaccttgccgaaatgtatctcgaaatcggcgaccgcgatgccgctgccgagacagtgcagaaattgctggaagaagcggaaggcgacgtactcaaacgtgcccaagcattggcgcaggaattgggtatttga

SEQ ID NO: 44114 - DNA, 3834 bp, Neisseria meningitidis
atgaccacgactaccgcccctcagcgtattcgggaaattccctacaactatacttcctacaccgaccgcgaaatcgtcatccgcctactgggcgatgaggcgtggcaaatcctgcaagacttgcgcggacagcgcaaaaccgggcgttcggcgcggatgctgtttgaagtgttgggcgatatttgggtggtcgtgcgcaatccgtatctggtcgatgacttgctggagcacccaaaacgccgcgccgcgctggtacgtgaaatgcgccaccgcttaaatgaaatccgcaaacgccgcgacgataatcggcaagtggatgtgttggttgccgcagcagaaaaagcagtcgagcgttttgatagcagttttgatgaaaccagccaaaaacggcggcagattttggagcgtttgagcaaaatcaccaagccgcacaatattatgttcgacgggctggcgcgggtaacgcacgttaccgatgcaaccgactggcgcgtggagtatccgtttgtcgtcgtcaatcccgacacggaggcggaagtcgcgcctttggtgcgcgctttaatcgaattggacttggttattatcccgcgcggcggcggcacgggttataccggaggcgcgattcctttggacgcaatgagcgcggtcatcaataccgaaaagctcgacaagcatcgcggcgtggaatacgttgagctggcaggattggacggcaagcatccgattatccggtgcggcgcgggcgtggttacgcggcgggtggaagaaaccgcgcatcaggcaggtttggtgttcgccgtcgatccgacttctgccgatgcgtcctgcgtgggcggcaatgtggcgatgaacgcgggcggcaaaaaagccgtgttgtgggggacggcgttggacaacctcgcctactggcagatggtcaaccctcaaggcgaatggctgcgtatcgagcgcgtgcgccacaatttcggcaaaatccacgatgaagaaaccgccgtgtttgacgtacatacgctggattcagacggcctcaatatcgttaaaaccgaacgtttggaaattcccggccacaaatttcgcaaagtcggtttgggcaaagacgttaccgacaaattcttgagcggcctgcccggcgtacagaaagaaggcacggacggcatcatcaccggcgttgctttcgtgttgcacaaaatgccgaaatacacgcgcactgtgtgtatggagtttttcggcacggtcgccaccgctacgccttctatcgtcgaaatccgcgatttcctgctcgcccacgacagcgttcggctggcaggtttggaacatttggactggcgttacgtccgcgccgtcggctacgcaaccaaagcggcgggcaagggacggccgaaaatggtcttgctggcggacgtggtttccgacgacgaagccgccgtagaggcagccgccgaacacatttgcgaacttgcccgcgcccgcgatggcgaaggctttatcgccgtgtctcccgaagcgcgcaaaaccttttggctcgaccgcagccgcaccgccgccatcgccaagcacaccaacgcctttaaaattaacgaagacgtggtcatcccgctcgaaaggctcggcgagtattcggacggcatcgaacgcatcaacattgagctttccatccaaaacaagctcaaactctgtgccgccttggagcaatatctttcgggcaaactccccatcgacaaaatgggcactgacctgccgaccgccgaacttttgggcgaacgcggcaaacacgccttggcccacgttgccgccgtcaaagaacgttgggactggttgctcgccaatttggacacgccgcttgccgactacaaagcccgctacggtgcagccgtccacgccgcgcccgaagccaaagacaatgaaagctgctttaccgcattccgcgatttccgcctgcgcgtgtctgtcaaagcagacgtaatgaaaccactcgccgaaatcttcagcggcaaaaccgataccaagattatccaaggcttgggcaaaatccacgccaaaaccgtacgcggcagagtctttgtcgccctgcatatgcacgccggcgacggcaatgtccacaccaatattccggtcaactcagacgatgccgaaatgcttcagacagcctaccgttcggtcgaacgcattatgaaaatcgcccgttcgctcggcggcgtaatttccggcgaacacggcatcggcatcaccaagctcgaatttttaagcgatgaagaaatgcagccgttttgggactacaaaaaccaagtcgatcccaaacacaccttcaaccgccacaaactgatgaaaggctcggacttacgcaacgcctacacgccgtctttcgagcttttgggcgcggaatcgctgattatggaaaaatcagacctcggcacgattgccgattccgtcaaagactgcctgcgctgcggcaaatgcaaacccgtctgctctactcacgttccgcgtgccaacctgctgtacagtccgcgcaacaaaatcctcggcgtgggcttgctgaccgaagccttcttatacgaagaacaaacccgccgcggcgtttccgtcaaacactttgaagaactcatggacatcggcgaccactgcaccgtgtgccaccgctgcgtcaaaccctgccccgtcaacatcgacttcggcgacgtaaccgtagccgtccgcaactaccttgccgattccggccacaaacgatttgcgcctgccgcagctatgggtatggcgtttttgaacgccaccggcccgaaaaccatcaaagcccttcgcgccgccatgatacagaccggcttcccagcgcaaaactttgcctacaaaatcggcaagcttcttccgatcggcacgaaaaagcaaaaagccgaacccaaggcaaccgtcggcaaagccccaattaaagaacaggttatccatttcatcaaccgtcctttgccgaaaagcgtacccgccaaaacaccgcgctccttattgggcatcgaagacggcaaaagcatccccatcatccgcaaccccgccgcgcccgaagatgccgaagccgtgttctacttcccgggttgcggttcggaacgcctgttcagccaaatcggacttgccgttcaagccatgctctggcacgtcggcgtacaaaccgtcctgccgcccggctatatgtgttgcggctatccgcaagacgcgggcggcaacaaggctaaagccgaagaaatgagcaccaacaaccgcgtggctttccaccgtatggcaaacaccctcaactacctcgacattaagaccgtcgttgtcagttgcggcacttgttacgaccagctcgaaaaataccgctttgaagaaatcttccccggctgccgcatcatcgacatccacgaatacctgctcgaaaaaggcgtgaaactcgacggcgtgcaaggtcagcaatacctctaccacgacccctgccacacccccatcaaaaccatgaacgccacccaaatggccagcagcctgatggggcagaaagtcgtcttaagcgaccgctgctgcggcgagtccggtatgttcgccgtcaaacgacccgatatcgccacccaagtcaaattccgcaaacaagaggaaatcgagaaaaacctcaaagagctgccgcagggtgaacccgtcaaaatgcttacttcctgcccagcctgcctgcaaggcttgagccgctacaccgacgacaacaatatgcctgccgactacatcgtcatcgaaatggcgaaacacatcctcggcgaaaactggctagacgagtttgtgaaaaaagccaacaacggcggcgtggaaaaagtattgctgtaa

SEQ ID NO: 44115 - DNA, 720 bp, Neisseria meningitidis
atggcgacactgtccgacaaaaccatcttagttaccggcgcatcgcaaggtctgggcgaacaggtcgccaaagcctatgcggcggcaggcgcaaccgtgattctggtggcacgccatcagaaaaaactggaaaaagtctatgacgcgattgtcgaagccggataccccgaaccattcgccatctgctttgaccttattagcgcggaagaaaaagaatttgaacatttcgccgccaccattgccgaagccacgcaaggcaaactggacggcatcgtccactgcgccggctatttttacgccctctcgccgctggatttccaaaccgtcgccgaatgggtcaaccaataccgcatcaacaccgtcgcacctatggggctgacccgcgccctgttcccgctgctgaagcagtcgcccgacgcgtccgtcatcttcgtcggcgaaagccacggcgaaacacccaaagcctactggggcggcttcggcgcgtccaaagccgcgttgaactacctgtgcaaagtcgccgccgacgaatgggaacgcttcggcaacctgcgcgccaacgtcctcgtccccggacccatcaattccccgcaacgcatcaaatcccatccgggcgaagccaaaagcgaacgcaaaagctacggggacgtgctgcccgcatttgtctggtgggcaagtaccgaaagcaaagggcggagcggcgaaatcgtttacctctaa

SEQ ID NO: 44116 - DNA, 1134 bp, Neisseria meningitidis
atgagcacccccgccctcctcgtcctcgctgacggcagcgtattccacggcacatcaatcggttacgaaggttcgacttccggcgaagtcgtgttcaatacttcgatgactggctatcaggaaatcctgaccgacccgtcctactgcaaacaaatcgttaccctcacctacccacacatcggcaacaccggcaccaacgccgaagatgaagaaagccgcagcgtttatgccgccggcctgattatccgcgacctgccgctcttgcacagcaacttccgcgcctccgaaagcctgcacgactatctggtacgcaacaaaaccgtcgccatcgccgacatcgatacccgccgcctgaccacgctgttgcgcgaaaaaggcgcgcaaggcggcgcgattctgaccggtgcggatgccacaatcgaaaaagcgcaagaactcatcgccgcgttcggcagtatggtcggcaaagacttggcaaaagaagtttcctgcacggaaacttacgaatggacggaaggcgaatgggaattgggcaagggtttcgttacccctgacgaacagccttaccacgtcgtcgcctacgatttcggcgtgaaaaccaacatcctgcgtatgctcgcctcgcgcggctgccgcctgaccgtcgtccccgcccaaacgagcgcacaagacgtgttggcactcaatcccgacggcgtgttcctgtccaacggccccggcgaccccgagccttgcacctacgccatcgaagccgtgcaaaaactgatggaaagcggcaaaccgattttcggcatctgcttgggacaccagctcatcagcctcgctatcggcgcgaaaaccctgaaaatgcgcttcagccaccacggtgcgaaccaccctgtgcaagatttggacagcggcaaagtcgtcatcaccagccaaaaccacggttttgccgttgatgccgacaccctgcccgctaacgcacgcattacccacaaatccttgtttgacaacactttgcaaggcatcgagctgaccgacaaacctgtgttctgcttccaaggccaccccgaagccagccccggtccgcaagatgtcggctatttgtttgacaaattcattggcaatatgaaagcggcaaaacgggcataa

SEQ ID NO: 44117 - DNA, 912 bp, Neisseria meningitidis
atggttcatattatgtttaatcaggcagcacaagaattgacgactatccgcgatattttacgttttgcagtcagccgttttaatgaggcagggctcttttttggtcatggaacagataatgcgcatgatgaagcggcttatttgattctgcatactttgaatttgcctttggatatgcttgccccatatcttgatgcaaaactcttggaagctgaaaaagaggaagtgctggcggttattgagcgtcgtgctgtcgaacacattccagccgcttatttgacacaccaggcatggcagggagagtttgatttctatgtggatgagcgcgtaatcatacctcgttcttttatttatgaattgttgggtaacggacttcgtccttggatagaatacgatgagctggtgcataatgctttggatctttgcaccggaagcggttgccttgccattcagatggcgcatcattatcctgatgcccaaattgatgcggttgatgtgagcttggatgctttggaagtggcagggattaatgtcgaagattatggtttggaagaacgcatccggcttattcatacggatttgtttgaaggattggaaggcacttatgatttgattgtttccaatccgccttatgtggatgcggaatcggttgagttattgcctgaagagtatttgcacgaaccggaattggcattgggcagcggggcggacgggttggatgccaccaggcagattcttctgaatgcggcaaagtttctgaatcccaaaggtgtattgctggtggaaatcgggcataacagggatgtattggaagcagcgtatccggagttgccttttacttggttggaaaccagcgggggcgacggttttgttttcctcttgacgcgcgagcagttattgggtgaagagtga

SEQ ID NO: 44118 - DNA, 750 bp, Neisseria meningitidis; identical to SEQ ID NO: 38184

SEQ ID NO: 44119 - DNA, 969 bp, Neisseria meningitidis
atgactgccaaacctttttccctcaacctgaccaacctgctgctgctggcggtgttgtttgccgtcagcctgtcggtgggcgttgccgatttccgctggtctgatgtgttttcactgtccgacagccagcaggtcatgttcatcagccgcctgccgcgcacgtttgcgattgtgctgacgggcgcgtcgatggcggtggcggggatgattatgcagattttgatgcgtaaccgttttgtcgagccttctatggcgggcgcgggtcagagtgcggctttgggtttgcttctgatgtccctgctgctgcctgccgcgccgctgccggtcaaaatgtcggttgccgccgttgccgcgttaatcgggatgttggtgtttatgatgcttatccgccgcctgccgccgacggcgcaactgatggtgcctttggtcgggattattttcggcggcgtggttgaggcggtggccacctttattgcgtatgaaaacgaaatgctgcaaatgctgggcgtgtggcaacagggcgatttttccggcgtgttgctcggacggtatgaactgttgtgggcaacggggattttggctttgtttgcctatttgattgccgaccggctgacgattttgggtttgggcgaaacggtaagcgtgaacttggggctgaaccggacggcgattctgtggtcggggctgattattgtggctttgattacgtcgctggtcatcgttacggtcggcaatattccgtttgtcgggctggtcgtgccgaacatcatcagccgcctgataggcgacaggctgcgccaaagcctgcctgcggtggctttgttgggcgcgtctttggtgttgctgtgcgacattatcggacgcgtgattgtgtttccgtttgaaattccggtctctacggtttttggtgtattgggtacggctttgtttttgtggcttttgttgaggaaacccgcctatgccgtctga

SEQ ID NO: 44120 - DNA, 1128 bp, Neisseria meningitidis
atgaacacctcgcaacgcaaccgcctcgtcagccgctggctcaactcctacgaacgctaccgctaccgccgcctcatccacgccgtccggctcggcggggccgtcctgttcgccaccgcactcgcccggctgctccacctccaacacggcgaatggataggcatgaccgtcttcgtcgtcctcggcatgctccagtttcaaggggcgatttactccaaggcggtggaacgtatgctcggcacggtcatcgggctgggcgcgggtttgggcgttttatggctgaaccagcattatttccacggcaacctcctcttctacctcaccgtcggcacggcaagcgcactggccggctgggcggcggtcggcaaaaacggctacgtccctatgctggcggggctgacgatgtgcatgctcatcggcgacaacggcagcgaatggttcgacagcggcctgatgcgcgccatgaacgtcctcatcggcgcggccatcgccattgccgccgccaaactgctgccgctgaaatccacactgatgtggcgtttcatgcttgccgacaacctgaccgactgcagcaaaatgattgccgaaatcagcaacggcaggcgcatgacccgcgaacgcctcgaagagaacatggcgaaaatgcgccaaatcaacgcacgcatggtcaaaagccgcagccacctcgccgccacatcgggcgaaagccgcatcagccccgccatgatggaagccatgcagcacgcccaccgtaaaattgtcaacaccaccgagctgctcctgaccactgccgccaagctgcaatctcccaaactcaacggcagcgaaatccggctgctcgaccgccacttcacactgctccaaaccgacctgcaacaaaccgtcgcccttatcaacggcagacacgcccgccgcatccgcatcgacaccgccatcaaccccgaactggaagccctcgccgaacacctccactaccaatggcagggcttcctctggctcagcaccaatatgcgtcaggaaatttccgccctcgtcatcctgctgcaacgcacccgccgcaaatggctggatgcccacgaacgccaacacctgcgccaaagcctgcttgaaacacgggaacacggctga

SEQ ID NO: 44121 - DNA, 738 bp, Neisseria meningitidis; identical to SEQ ID NO: 42917

SEQ ID NO: 44122 - DNA, 1149 bp, Neisseria meningitidis
atgcccctccccctcccctctcccgaagcacggcaattctcgctcaaactgcaaaccctcattgccgaagaaatcggcaaacacggcaactggattccattttcacgttttatggaattggttttatacgctccgcaatacggctactacaccggcggcagccataaaatcggcaataccggggattttattaccgcaccgaccctcacctctctgtttgcacagacactggcacgccaacttcaagaacttctatcccaaacggcgggcaatatctatgaattcggcgcgggaaccggacagcttgccgccgatttgttgggcagcatttcggacggcatcagccgttactatattattgaaatatcgccggagctggcagcacgtcagaaaaacctgattcaagcacgcgcaccggaagcatctcaaaaagttgtccacttgaccgcacttcccgaagcgtttgacggcatcatcatcggcaacgaagtactcgatgccatgcctgtcgaaatcgtccgtaaaaatgaaggcggctcattcgagcatgtcggcgtttgcctagataatgaccgttttacctattcggcacgaccgctgcacgacttacagctatctgccttggcttccctctattttcctcaaacagattatccctacaccagcgaactacatccgcaacaatatgcctttatccgcacccttgcctcaaggcttgaacgcgggggtatgatattcatcgactacggttttgatgcagcgcagtattaccaccctcaacgcaatcaaggtactctgatcggacactaccgacatcacgttatccacaatccttttgacttcatcgggttggccgacctgaccgcgcatgtcaactttaccgacattgcccaagccggtacggatgcaggactggatttgacaggctatctgccccagtcccattttctgctgaatctgggcataaccgaactgttggcacaagtgggaaaaacagactcgcccgcctacatccgtgaagctgctgccgttcagaaactgattgaccagcatgaaatgggagaattgtttaaagtcatcgcattcggtaaaaatatcggcgtcgactgggcaggattccgcttcggcgacatctgccacaaactctaa

SEQ ID NO: 44123 - DNA, 438 bp, Neisseria meningitidis; identical to SEQ ID NO: 38425

SEQ ID NO: 44124 - DNA, 1047 bp, Neisseria meningitidis; identical to SEQ ID NO: 43592

SEQ ID NO: 44125 - DNA, 474 bp, Neisseria meningitidis; identical to SEQ ID NO: 38731

SEQ ID NO: 44126 - DNA, 246 bp, Neisseria meningitidis
atgtttcaagcaaatattcatcaggcaaaaaccaatttgagtcaattgattcaaagagcagaagcaggggaaatcgttattattgcgaaagcaggtaagccttgcgtccaactaaccggtattgaaaaaccggcacgaaatgcaggaaggttgaaaaaattcagtcatatgggaaatacggatatttcacgtattcttgaggatgacaatgaaacggcagctttatttgaggagtcggctctgtga

SEQ ID NO: 44127 - DNA, 618 bp, Neisseria meningitidis; identical to SEQ ID NO: 38819

SEQ ID NO: 44128 - DNA, 1008 bp, Neisseria meningitidis
atgagcaccttcttccggcaaaccgcccaagccatgattgccaagcacatcgactgcttcccactattgaagttggaccaggtgattgattggcaaccaatcgaacaatacctgaaccgtcaaaaaacccgttaccttagagaccaccgcggccgtcccgcctacccgctgttgtccatgttcaaagccgtcctgctcggacaatggcacagcctctccgatcccgaactcgaacacagcctcatcacccgcatcgatttcaacctgttttgccgtttcgacgaactgagcatccccgattacagcaccttatgccgttaccgcaactggctggcgcaagacgacaccctgtccgaattgctggaactgattaaccgccaactgaccgaaaaaggcctaaaaatagagaaagcatccgccgtcgtcgttgacgccaccattattcagaccgccggcagcaaacagcgccaggccatagaagtcgatgaagaaggacaagtcagcggccaaaccacaccgagtaaggacagcgatgcccgttggataaagaaaaacggcctctacaaactcggttacaaacaacatacccgcaccgatgcggaaggctatatcgagaaactgcacatcacccccgccaatgcccatgagtgcaaacacctgccgccgttgttggaagggttacccgaaggtacgaccgtctatgccgacaaaggctatgacagtgcggaaaaccggcaacatctggaagaacatcagttgcaggacggcattatgcgcaaagcctgccgcaaccgtccgctgacggaagtgcaaaccaaacgcaaccggtatttatcgaagacccgttatgtggtcgaacaaagcttcggtacgctgcaccgtaaattccgctatgcgcggtcaacctatttcggactgattaaagtgagtgcgcaaagccatctgaaggcgatgtgtttgaacctgttgaaagccgccaacaggctaagtgcgcccgctgccgcctaa

SEQ ID NO: 44129 - DNA, 453 bp, Neisseria meningitidis; identical to SEQ ID NO: 42167

SEQ ID NO: 44130 - DNA, 183 bp, Neisseria meningitidis
atgccgacaccgcctgccgcattgatggtcgcgccggtacgcccaaatccgccgaaagacggcaagacggccacgctgttggaacacgccgccgagtttggcggctatgtggcggagttggaaaatcaaaatcaggcttggcgcgactgggcgggcaatcactcccgcaaagtcggaaactga

SEQ ID NO: 44131 - DNA, 360 bp, Neisseria meningitidis
atgccacgcgtaaaacgcggtgttaccgcccgtgcccgtcaccaaaaaatcttcgcgttagccaaaggctaccgcggtcgtcgtaaaaacgtttaccgcgttgccaagcaggcggtaatgaaagccggccaatacgcataccgcgaccgccgccaacgcaaacgccaattccgtcaattgtggattgtccgtatcaatgcaggtgcgcgtgaaaacgggttgtcttacagcaaatttatgaacggtctgaaacgcgcctctattgaaatcgaccgcaaagtattggctgatttggccgtgttcgataaagccgcttttgcacaattggttgaaaaagccaaatctgctttggctgcttaa

SEQ ID NO: 44132 - DNA, 324 bp, Neisseria meningitidis; identical to SEQ ID NO: 36328

SEQ ID NO: 44133 - DNA, 120 bp, Neisseria meningitidis; identical to SEQ ID NO: 39028

SEQ ID NO: 44134 - DNA, 822 bp, Neisseria meningitidis
atgtctttgcaaaacatcatcgaaaccgcctttgaaaaccgcgcggacattaccccgaccaccgttactcccgaagtcaaagaagccgtgttggaaaccatccgccaactcgattccggcaaactgcgcgttgccgaacgcttgggcgtgggtgagtggaaagtcaacgaatgggcgaaaaaagccgtgttgctgtccttccgcatccaagacaacgaagtcctcaacgacggcgtgaacaaatacttcgacaaagtgccgaccaagtttgccgactggtctgaagacgagttcaaaaacgcaggcttccgcgccgttccgggtgcggttgcccgacgcggcagctttgtggcgaaaaatgtcgtgctgatgccgtcttacgtcaacatcggcgcatacgtcgacgaaggcgcgatggttgatacttgggcgactgtcggctcttgcgcgcaaatcggtaaaaacgtgcacttgagtggcggcgtcggtatcggcggcgtactcgaacccctgcaggccgcccccaccatcattgaagacaactgcttcatcggtgcgcgttctgaaatcgttgagggcgtgattgtcgaagaaggcagcgtgatttcgatgggcgtgttcatcggtcaatccaccaaaatcttcgaccgcaccaccggcgaaatctaccaaggccgcgtaccgacaggttcggtcgtcgtgtccggcagtatgccttccaaagacggcagccacagcctttactgcgccgtcatcgtcaaacgcgtggacgcgcaaacccgtgcgaaaaccagcgtgaacgaattgttgcgcggcatctga

SEQ ID NO: 44135 - DNA, 807 bp, Neisseria meningitidis
atgaatccagcccccaaaaaccttctcttctcttctcttctcttctcttctcttctcttctcttccgcagcgcaggcggcaagtgaagacagcagccgcagcccgtattatgtgcaggcggatttagcctatgccgccgaacgcattacccacgattatccgaaaccaaccgatgcaaacaacacaagcacagtaagcgattatttcagaaacatccgtgcgcattccatccaccctcgtgtgtcggtcggctacgacttcggcggctggagaatagcggcagattatgccggttacagaaaatggaacgacaataaatattccgtcaacacaaaagaggtgctaagaaacaatagcactggcactgaaaactggcaagaactgaagacggaaaatcaggaaaacggcagcttccacgccgcttcttctctcggcttatccgccatttacgatttcaaactcaacgataaattcgataaattcaaaccctatatcggcgcgcgcgtcgcctacggacacgttaaacatcaggttcattcggtggaaacagaaaccacgactgttttcagtaaaccaaaaggcactacagtgccaggcattatctcagaaaaaccgattagcaaacctccctatcacgaaagcaacagcatcagcagcttgggtcttggtgtcatcgccggtgtcggtttcgacatcacgcccaagctgaccttggacaccggataccgttaccacaactggggacgcttggaaaacacccgcttcaaaacccacgaagtctcattgggcatgcgctaccgcttctga

SEQ ID NO: 44136 - DNA, 1002 bp, Neisseria meningitidis
atgcagtttccttaccgcaatgttccggcttcgcgtatgcgccgtatgcgcagggacgatttttcacgccgcctgatgcgcgaacacacgctgaccgccgatgatttgatttatccggtgttcgtattggaggggtcggcgcgcgaggaggatgtgccttctatgccgggtgtgaagcgtcaaagtttggacaggctgctgtttacggcggaagaggcggtaaagctcggtattccgatgttggcactgttccccgtggttacggcaaacaaaaccgagcgtgcgcaggaggcgtacaatcccgaaggactcgtgccgtcaactgtccgcgccttgcgcgagaggtttcccgaactgggcattatgacggatgtcgcgctcgatccttatacggttcacggtcaggacgggctgacggacgaaaacggttatgtgatgaacgatgaaaccgtagaggttttggtcaagcaggctttgtgccacgctgaagcgggcgcgcaggtggttgctccgtcggatatgatggacgggcgtatcggtgcgattcgcgaggcgttggaggatgccggacatatccacacgcggattatggcatattccgccaaatatgcttctgcattctatggccctttccgtgatgcggtaggcagttcgggcaatttgggcaaggcagataaaaagacctatcagatggatcccgcaaacaccgatgaggcgctgcatgaagtagcgctcgatattcaggaaggtgcggatatggtgatggtgaagcccggtttgccgtatttggacgttgtccgccgcgtgaaggacgagttcggtgtgccgacttatgcctatcaggtttcgggcgaatatgcgatgctgcaggcggcggttgccaacggatggctggacggcgataaagtggttttggaaagcctgctggcattcaaacgtgcgggcgcggatgggattttgacctattatgccattgaggcggccaagatgctgaagcgttga

SEQ ID NO: 44137 - DNA, 1644 bp, Neisseria meningitidis
atgaatgcttttacccgtgcatggcatgcgctcgaacgccattatcaggatacgcgtcatgtccttttgcgcgaccgctttgcctgcgaacccgaccgttttgagcgtatgcacgagcgtttggacgggatgttgttcgattacagcaaaaaccgtttgggcgaagatacgctgcaactgctctgcaatcttgccgatgcggcggatttggaagggaaaatgcgtgctttgcggacgggtgcgaaggtcaacaacagtgaggggcgtgccgcgctgcatacggctttgcgcctgcccgacggtgcgggtgccgtttatgcggacggcagggacgtgttgcccgaaatccgccgcgagttaaatcgtgcgttgaagtttgcacacagtttggacgacggttcgtatcaggggacaaccggaaaacggattacggattttgtccacatcggcataggcggatccgacctcgggccggcaatgtgcgtgcaggcacttgagccgttcagacggcatatcgccgtccattttgccgccaacgccgatcctgcctgcctggatgcggttttatgccgtctgaaccccgaaacgacagtgttttgcgttgccagcaagtccttcaaaacaccagaaaccctgctcaatgcacaggcagtcaaggcgtggtatcgcggtgcggggttctcggaatctgaaacggcgtgccatttttgcgcggtgtctgccgacactgcggcagctgcggcttttggtatcgcggcggaacgcgtgtttgcgatgtacgactgggtgggcggacgctattccgtctggtcgcccgtcggtttgcccgtgatggttgcggtcggcggggcgcgtttccgcgagttgttggcgggggcgcacgcgatggacagccattttttccacacgccgccgcgccgcaacattcccgttctgatggcactgattgccgtgtggtataacaatttccagcacgcggacgggcagaccgccgttccgtacagccacaacctgcgcctgctgccggcgtggctgaaccagctcgatatggagagtttgggcaaaagccgcgcttcagacggcagtcccgccgtgtgcaaaacgggcggcatcgtgttcggcggtgaaggggtcaactgccagcacgcctatttccaactgcttcatcaaggcacgcgcctgattccctgcgactttatcgtcccgatgacggcgcagggcgtggaggaaggacgcagccgttttaccgttgccaacgcctttgcacaggctgaagccctgatgaaaggcaaaaccttggacgaagcacgcgccgaattggcagatttgcccgaagcggaacgcgaacgcctcgcgccgcacaaagagttccccggcaaccgccccagtaacagcatcctgctcgaccgcctcacgccctacaatctgggtatgctgatggcggcttacgaacacaaaaccttcgtccaaggcacgatatggaacgtcaaccccttcgatcagtggggtgtggaatacggcaaacagttggcaaaaaccatcatcggcgaactggaaggcggaacgtccgtacacgatgcctcgaccgaagggctgatggcgttttaccgcgaatgccgtctgaaaggcggcggcgcggcataa

SEQ ID NO: 44138 - DNA, 840 bp, Neisseria meningitidis
atgaccgccacagccgccgccatagaccgcctgcttccccaaacccaatgccgcgaatgcggctacgacggctgcctgccctatgcacaggcagtcgcaacaggcgaagcgtacaacctctgcgccccgggcggagaaaccgtcattcgggacatttccgccctgctcggcaaaccccttgtcgcacctgccaaaacccaagccaaagcactcgcccggatagacgaaaccgcctgtatcggctgcaccgcctgcatccgcgcctgccctgccgatgccattatgggcgcgggcaaacttatgcacaccgtcatcgccgacgaatgcaccggctgcggactctgcgtcgccccctgccccgtcgactgcatccatatgcagcccgttgccgacaccgtcctgccccgcgcgcgtcgcttcagcctgtccgccgacagccgttttgccgccgccgaacacgcgcgcgcgcgctacctcaaacgcaacgaacgcaaacagcgcgaagccgacgaacgcaaggccatgcttgccgaacgcgaagccgccgtccgcaacgcgcgtccgcaaacacccgacacaccgaaaaaaccggcgtttaaccctgccgacctcatcgccaaagccatggcaaaagcgcaaacccaacaagaccgcctcgccgccgccgacaaccgcaaagactatcaggcgaaacagatagccgaagcccgcgaacgcgccgagttgcgccgcgcccaacgcgatatgaaatacggcagcgacagcgaaaaagccgccgccctcgaatacctcaaacaatacaaagccaagcaggatgccgcacaaaacaccgcctcctga

SEQ ID NO: 44139 - DNA, 837 bp, Neisseria meningitidis
atggataaagaacgaattttaacccccgcagtcgtgttttccgtcgcactgctgcatttggcaatggtggcattgctctggcaggcgcacaagctgcccgtgatagagtcaggaaatgttatcgaatttgtcgatttgggtgattttggcggaggggacggtgcacccgaaggcgcaggtgcgcctgctgcgcctgagccgcaacctgagcctgagccgcccaaacctgtcgagccgcccaagccggttttgaagccggtggttacgaaaaaggcggatgcggatattcagcagcctaaggaagagccgaaacctgaagaaaagccgaaacccgaagaaaaaccgaaaccagagcctaagccggaagcgaagcctgtcccgaaaccggcggaaaaaccggtcgagaagccgtctgaaaaacctgccgaacatcccagcaatgcttctgccaaagcagacagcgagcagggtaatggggaagaaaccggtaccaaaggagacggaacggggcgcggagaaggcagcggtaaaggtagcggcggtgtcaaaggcgaacacggggaaggagccggcagcagcaaaggcaatcctttacgcgccaacggcagcattccgcgcccggcttatcccacgctttctatggagaatgacgagcagggtacggttgttttgagcgttttggtttctccgggcggtcatgtcgagtccgttaaaatcgtgaaaagcagtggtttttctcggttggacaatgcggcacgcaaggcggcgcaaaacgggcattttcaagccaatgcctggacggagtttaaagtccccgtcaagtttgaattgaattag

SEQ ID NO: 44140 - DNA, 1104 bp, Neisseria meningitidis
atgaatacgacagcaaacccttccaatatcatcgtcgggctctccggcggtgtcgattcttccgtaaccgccgccctgctcaagcagcagggttatcaagtgcgcggtgtgttcatgcagaactgggaagacgacgacaacgacgaatattgcagcatcaaacaggattcgttcgatgccatcgccgttgccgatattatcggcatcgatatcgacatcgttaatttcgccgcgcaatataaagacaaagtctttgcttattttcttcaggaatacagtgcggggcgcacgccgaatccggatgtgttgtgcaacgccgaaatcaaattcaaatgctttttggactacgccgtagggcagggcgcggataccatcgccaccggccactatgcgcgcaaagaagttcgcaacggcgtgcattacctgctcaaaggtttggatcgaaacaaagaccaaagctatttcctctaccgcctcaagcctttccaactcgagcgcgcgatttttccgttgggcggtttggaaaaacctgaagtccgccgccttgccgccgaatttaatttgccgaccgccgccaaaaaagacagcacgggcatctgcttcatcggcgaacgcccgtttcgcgagtttctgcaaaaatacctgccgaccgacaacggtaaaatggttacgcccgaagggaaaaccgtcggcgaacacgtcgggctgatgttctacacgctcggacagcgcaaaggtttgggcatcggcggcgcgggcgaaccgtggtttgttgcggctaaagatttgacgaaaaacgaactgattgtcgtgcaaggacacgaccatccgctgctctatacccgcagccttgtgatgaacgatttgagtttcacgctgcccgaacgcccgaaggcaggacgctatacctgcaaaacgcgttaccgtatggcggacgcgccttgtgagttgcgctatttggatgaagaaaccgccgagctggtgtttgacgaaccgcaatgggcggttacgccgggccagtctgccgtgctgtacgacggcgatatctgtttgggcggcggcatcatccaaacgaccgacaaacccgtcatcatcacgcgataa

SEQ ID NO: 44141 - DNA, 1284 bp, Neisseria meningitidis
atgtccaaatcaatcaaactcaacgtaccgggtcaggcaggtttggagctgccggtattggaagccagcatcgggcacgatgtggttgacattcgggggctgacaaaaaatacaggtttgttttccttcgaccccggatttgtttcaaccgcaagctgtgagtctaaaattacttacatcgacggcgatcaaggcttgctttattatcgcggataccccatcgagcagctggccgaaaagtccgattatttggaagtctgctacctgttgatttacggcgaactgccgactcccgagcaaaaggcagaatttgacaataccgtccgccgccacacgatggtgcatgaacagctgacttggttcttccgggggttccgccgcgacgcgcatccgatggcgatgatggtcggcgtggtcggcgcactgtctgcgttctaccaagacagcttggacattagcaatcccgaacaccgcaaaatcgcgatttaccgcctgatttctaaaatcccgaccattgcggcaatgtgctaccgctattcaaacggtctgccgttcaattatccgaagaataatctttcttattccgaaaacttccttcatatgatgttcgccacgccgtgtgaagactacaaacccaatcccgttttggcacgcgcgctcgaccgcatctttattttgcatgccgaccacgagcaaaacgcctcaacttcaaccgtccgtctggcagggtcttcgggtgcgaacccgtttgcctgtattgctgccggtatcgcctgcctgtggggtgcttcgcacggcggtgcgaacgaagccgtgttgaaaatgttggacgaaatcggcgatgtgtctaatgttgccgcatacatggaaggtgtgaaacaacgcaaataccgtctgatgggcttcggtcaccgcgtgtaccgcaatatggatccgcgtgccagcattatgcgtgaaacctgctatgaagttttgaaggaattgggcttggaagacagtccgaaattcaaactggcgatggaattggaacagattgcgctgaaagacccgttctttatcgaacgcaaactgtatccaaacgtcgatttctattccggcatcgtcctgtccgcgctgggcatcccgaccgaaatgtttaccgtcatcttcgccctgtcgcgcagcgtgggctggatttcgcactggcacgagatgattagcgatccttcgctgaaaatcggccgcccgcgccagctttataccggttcggaacgccgcgattatgtgccgccaggcgagaggtaa

SEQ ID NO: 44142 - DNA, 864 bp, Neisseria meningitidis
atgagtgagattggtttggtaaagatctattttggaaaagtgcgcgatttatatgaaatcgacgataaacgtatgctgatggtcgcttccgaccgcctgtctgcattcgatgtgattttggacgacccgattccgagcaaaggggagattctgacgcagatttccaatttttggtttaaaaaactggtgcatattatgcccaaccactttaccggtcaaacggtttacgatgttttgcctgaaaacgaagccaaagctttagagaaacgcgccgtcgtggctaaaaagctcactccggtgaaagtagaggcgattgtgcgtggttatctggcaggcagcggttggaaagattatcaaaaaaccggctcggtttgcggtattcaactgcctgaaggtatgcaggaagcgcaacaactgcctgaagtgatttttacgccctcaaccaaagccgcagtcggcgatcacgatgaaaacatcagctttgaagaatgcgaacgcattatcggaaaagaattggcggcggaagtgcgcgccaaagcgattcagctttatacagaagcggcggaatatgccaaatcgcgcggcatcatcatttgcgataccaaatttgaattcggtttggatacaaacggtacgctgacgctgatggatgaggtattgacccccgattcgagccgcttctggcctgccgaccaatataaagtcggcacaaatccgccgtcttttgacaaacaatttgtccgcgactggctggaacaaagcggttggaacaaaaaagcccctgcgcctaaagtgcctgccaatgtgattcaaaaaacagtcgaaaaatatcaggaagcattgactttgctgactcaggattga

SEQ ID NO: 44143 - DNA, 588 bp, Neisseria meningitidis; identical to SEQ ID NO: 39526

SEQ ID NO: 44144 - DNA, 786 bp, Neisseria meningitidis
gtgagacacatcagttcgaccaataatgaacacatccggcacctgcaccgcctgttgtcgcaaggaaagttcagacggcaatacgcccaaaccgttttggagggcgtgcacctgcttcaggttttcctgcaatccggcgggatgccggtcggggtatatattcccgagggcaaaatgccgtctgaagaaatccgcaggctgagggcggttgtgccggaaggcaggattttttccgtttcagacggcatattgaaaaaaatcagtagcttgagttgtgcagacgatatacttgcactgattgatatcccattgggcggaaccttgccggacaaaggcgactgtgtggttttggacggcgtgcaagatccgggcaatgtcggcaccgtcttacggagtgcggcggcggcaggggtaggtacggtcgttttgggcaggggttgcgcggacgcgtggtcgcccaaggtattgcgcgcggggatgggcgcgcatttcttgtcgggcatttatccgcaggcggatttggaaatatggttggcgcgctataaaggccgtgtgtttgccaccgccttgcgcgaggaaaagcaggcggttttgtacggcgaagatttgtgcggaccgacagcctgggtgtttggcaacgaaggcgcgggggtcggtaaagcggttttggacagggcggacaagtgtgtcaggattccgatgcacgatgcaaccgagtctttaaatgtcgcgatggcggcgacaatctgcctgtttgaacagatgcggcagcggtcggcgtattga

SEQ ID NO: 44145 - DNA, 339 bp, Neisseria meningitidis
atgaaaaaaatcgaggcgattgtcaaaccgttcaaactcgacgacgtgcgcgaggcgttgacggaaatcggcattacggggatgaccgtcagcgaggtcaaagggttcggcaggcagaaggggcatacggaaatctatcgcggtgcggaatacgccgtcgatttcctgcccaaggtcaaaatcgagctggtgttggcggatgacgccgtggaacgcgcgattgacgtgattgtcgaggtggcgcgttcgggcaaaatcggcgacggcaagatttttgtgctgccggtcgaggaggcaatccgtatccgcacgggcgaacgtgcggacgcggcggtttga

SEQ ID NO: 44146 - DNA, 357 bp, Neisseria meningitidis; identical to SEQ ID NO: 39132

SEQ ID NO: 44147 - DNA, 291 bp, Neisseria meningitidis
atgccaagattgattgtcgcattgttcatggcattggtgccgatgcttaaagacttgttttttaaaattctcgcaggtcttggcgcgtcgtttgtctcatatgaggcgttaagcctttcaaccgatgccattttgaaatattttcaaaacgcctatgggaatataccgcccgatattttaaatatgtttgcactggcaggcattcccgaagcattaaacatcatattcggcggtttctcgttctcgttcggcatatggtcttcctaccgcgttttaaaattcctaaaatga

SEQ ID NO: 44148 - DNA, 483 bp, Neisseria meningitidis
atgagcctgctgacactgttacgccccgccaccgtgcaagactgcaaagacatcttcaaagtccacctgcactccgtccaatacacctgcatcctcagctacaacgaacacgccctaaaagtatgggaaggcttgctaaacacagaaagctacctgccgaccatttccgatcccgacaaagcactttgggttgccgaatacaaaggcaacatacagggatttttccaaatcgactgccaagaagcacaactcgatgcactttacgtccaccccctgttccacaacctcggactgggcactgccctacttcatcaggcggaaaccatcgcccacaaatccggtttgagctttctgaaactctacgcatcgctcaactccgtcccgttttaccttctcaaccgctacgaatcgctcggttcggcagtattgcagcttgaccccagcatcaaaatcaaatgcgaactgatgcggaaacacctctga

SEQ ID NO: 44149 - DNA, 1575 bp, Neisseria meningitidis; identical to SEQ ID NO: 38934

SEQ ID NO: 44150 - DNA, 204 bp, Neisseria meningitidis; identical to SEQ ID NO: 37144

SEQ ID NO: 44151 - DNA, 1473 bp, Neisseria meningitidis
atgaaccagacaagccgcgatctgacccgcatcagccacaacaccaaaatcgtcgccacccttgggccgggcagcaacaacgtcgaactgttggaagatatgatccgcgtcggcggcctgaacgtcgtccgcttcaacttcagccacggcacgcccgaattccatcaggaaaacgcccgcatcgtgcgcgaagcggcaaaacgcgccggacaggaaatcgccatcattgccgacctgcaagggccgaaaatccgcgtgggcaaaatcgccggcggcggcatcgaattgaacaaaggcgaaacgctgctactggatgccgcgcttgaaggcgaaggcacgcgcgaggcggtcggtttggactaccgcgacctgcccgatgacgttgccgcaggcgatgtcttgtggctggacgacggcctgctgaccctgaccgtggaatccgtcgaaggcagcaggattatcacaagggtggaaaacagccacgtcctgaaaagcaacaagggcatcaacaaacgcggcggcggtctgtccgcaggcgcgttgaccgaaaaagacttccgcgacctgaaaaccgcgattgccatcggttgcgactacctcgccatcagctttgtgaaatccgccgaagatttgcatatcgcgcgcgccaaagtcgaagaagaaatgaaaggcagcacggccgtgcgccccggtttggtttccaaaatcgaacgcgtagaagcgattgaaaacttggacgaaatcatcctcgccggcgacggcattatggttgcgcgcggcgacttggcggtcgaagtcggacacgccgccgtccccgccctgcaaaaacggatgatccgccgcgcccgcgagttgcgccgcttcagcattacggcgacgcaaatgatggaatcgatgattaccaaccccgtaccgacccgcgcggaagtcagcgatgtggcaaacgcggtattggacggtaccgatgcggtgatgtgttccgccgaaaccgccgtcggcgcgtatccgtttgaaaccgtcagccaaatggcgattatctgcgcggctgcggaaaaagagcaggattcgctcaacggcgttgccgaacaggtcgagtatcccgaagcggtcagcaccaacctggcggttgccggcggtgcggtcagcgtggcgcgcgcggttcacgccaaagccatcgtcgccctgaccgaaagcggttcgaccgcctttgaaatcagccgccacaacatcaccctgccgattttcgcgctgaccccgagcgtttccgcccaacgccgtatggcgatgtaccggggcgtgcgcccgctgattttggcaaccagcaccgaccacgacacggcgttaaacgaagtcgaaaccatgctggtggaacacaacatcctgcattccggcgaccaatacatcattaccagcggctcgcaaatgcgcgaatccggttcgaccaacacactggaagtgctgcgcgtcaaataa

SEQ ID NO: 44152 - DNA, 1002 bp, Neisseria meningitidis
atgaaacggaaaatttggctgctgccgctgctggcggtttcggcatacctgcaggcgcagacggaagtcaggctggcggtgcataagtcgttcagcctgcccaaagggctgattgcgcgcttcgagcgggcaaacgatgcgaaggtgtcgattattcaggcgggcggcgcgaacgaaatgctcaacaaactgattttgagccgcgccaacccgattgccgacgcggtgtacggtttggacaacgccaatatcggcaaggcgcgggaaatgggcattttggcggcagcgcaacccgaatccgcccccgtcgcggtcgggctgccttcggctttggcggtcgattacggctatgtgtccatcaattacgacaaaaaatggtttgaaggcaaaaagctgcccctgccgcaaaccctgcaggatttgacccgccccgaatataaaaacctattggtcgtgccgtctcccgccacgtcgtccccggggctgggcttcctgatggcgaacatcagcggtctgggcgaagaaggcgcgttcaaatggtgggcacagatgcggcagaacggcgtgaaggtcgccaaaggctggagcgaggcgtattacaccgacttttcgcacaacggcggcgcgtatccgctggtggtcggttatgccgccagcccggcggcggaagtgtatttttccaaaggcaaatacagcgagccgccgacgggcaacctgtttttaaaaggcggcgtattccgccaggtcgaaggcgcggcggtcttgaagggcgcgaaacagccggaattggcggcaaaactggtgcaatggctgcaaagtcgggaagtgcagcaggcggttccgtccgaaatgtgggtttaccccgccgtcaaaaacacgcgcctgcccgacgtgttccgcttcgcccaagccccgacgcacaccaccgcccccgcgcagcgcgatattgatgcgaaccagcgcggatgggtttcccgttggattagaacggttttgaaataa

SEQ ID NO: 44153 - DNA, 2391 bp, Neisseria meningitidis
atgactgaacaaaaacacgaagaatacggcgccgacagcattcaggtgctcgaaggcttggaagcggtacgcaaacgccccggcatgtacatcggcgacacgcaggacggcagcggcctgcaccatatggtgttcgaagtattggacaacgccattgacgaagcactcgccggacattgcgacaaaatcacggtaacgatacacgccgaccattccgtcagcgtcgccgacaacgggcgcggtatgcccaccggcatccacccgaaagaaggacgctccgccgccgaagtcatcatgaccgtattgcacgcgggcggtaaattcgacaacaacagctacaaaatctccggcggcctgcacggcgtgggcgtgtccgtcgtcaacgcgctgtccgactgggtaacgctgaccatctaccgcgacggcaaagaacacttcgtccgcttcgtgcgcggcgaaaccgaagagccgctgaacgttgtcggcgattccgataaaaaaggcacgaccgtgcgcttcctcgccagtacggaaaccttcggcaacgtcgaatacagcttcgacatccttgccaaacgcatccgcgaactttcgttcctgaacaacggcgtggacatcgaattgaccgacgagcgcgacggcaaacacgaaagcttcgccctttccggcggcgtggctggattcgtgcaatacatgaaccgcaaaaaaacgcccttgcacgaaaaaatcttctacgcgttcggcgagaaagacggcatgagcgtcgaatgcgcaatgcaatggaacgacagctatcaggaaagcgtgcagtgcttcaccaacaacatccctcagcgcgacggcggtacgcacctgaccgcgttgcgccaagtgatgacgcgcaccatcaacagctacatcgaagccaacgaagtcgccaaaaaagccaaagtggaaaccgccggcgacgatatgcgcgaaggtttgacctgcgtgttgtccgtcaaactgcccgaccccaaattttcgtcccaaaccaaagacaaactggtttccggcgaaatcggtcccgtcgtcaacgaagtcatcagccaagccctgaccgacttcctcgaagaaaaccctgccgaagccaaaatcatcaccggcaaaatcgtcgatgccgcccgcgcgcgcgaagccgcccgcaaagcccgcgaaatcacccgccgcaaaggcgtgatggacggtttgggcctgccgggcaaactcgccgactgccaagaaaaagaccccgcattgtcagaactttatctggtcgagggcgattctgcaggcggttccgccatgcaggggcgcgaccgcaaattccaagcgattttgccgcttaagggcaagattttgaacgttgaaaaggcgcgctttgaaaaaatgctcgccagtcaggaagtagccgctttgattaccgcgttgggcgcgggcatcggcaaggaagaattcaatgccgagaagctgcgttaccaccgcatcattatcatgaccgatgccgacgtggacggcgcgcacatccgcaccctacttttgaccttcttctaccgccaaatgcccgaactggtcgagcgcggctacatctatatcgcccagccgcctttgtataaagcgaaatacggcaaacaggagcgttacctcaaagacgaactggaaaaagaccaatggctgctcggtttagccttggaaaaagccaaaatcgtttcagacagccgcaccatcgaaggcgaagagcttgccaataccgccaaacaattcctgttggccaaaaccgtcatcgaacaggaaagccgcttcgtagacgaactcgtcctgcgcgccatgctacacgcgtcgcccattgatttgacgtcgtctgaaaacgccgataaagccgttgccgaactttccggtctgcttgacgaaaaagaagtcgccctcgaacgcatcgaaggtcatgaaggacaccgattcatcaaaatcacgcgcaagctgcacggcaacgtcatggtcagctacatcgaacccaagttcctcaacagcaaagcctaccaaaccctcacccaaaccgccgccgcgctcaaaggcatggtcggcgagggtgccaagctttacaaaggcgaaaacgggtacgacgcggacagctttgaaaccgctttggacatcttgatgagcgttgcccaaaaaggtatgtccatccaacgatacaaaggcttgggcgagatgaaccccgaacagctgtgggaaaccacgatggatcccgccgtgcgccgcctgttgaaagtgcgcatcgaagacgccatcgccgccgacgaagtgttcgttacgctgatgggcgacgaggtcgagccgcgccgtgcctttatcgaaaacaacgcgctgattgcccaaaatatcgacgcataa

SEQ ID NO: 44154 - DNA, 753 bp, Neisseria meningitidis; identical to SEQ ID NO: 38815

SEQ ID NO: 44155 - DNA, 396 bp, Neisseria meningitidis
atgccgtctgatgttggaatacggcttcagacggcatttaaacggaagttaaaaatgaaaaaaatattttattttctgatggttgttttttctacaagcgtatgggccggggatgcggaagacaatctgctcagcatccaatccggttatcgtgccttactgcaaaaacaaaacaatctggacggaaaaatcatcgggatgcagtcggatttggaagatgcgcgcagacggttgcaggcggctcaggcagacatcgcccgtttggaagcggaaattcctgcagcaatggcgcaaaaagcccggcaggctgaagagctgaggcaaatcggagtgcgtttggaccatgcttggaatgcggtttacggcgcagggggaacgaaagcgtcggggaattga

SEQ ID NO: 44156 - DNA, 480 bp, Neisseria meningitidis
atgagtaaacagacctatccggtaacacctgccgtacgcgttttgcgtgaaaacggcatcaagttcgaacctttcatctatccctacgaggaacacggcggtacggcccaatttgcgcacctgttcggcaaagacgaacacttggttattaaaaccattgttttgcaagatgaaaacggtaaggggctgattgtcttgatgcacggcgacaaacagatttcaacccgcaatctggcgcggcatttgggtgcgaaacacatcgaacccgccacgcccgcacaggcaaacaagtggacgggctatctggtcggcggcacaacgccgttcggcatccggacaaaattggatatttacgtcgaacagtcggtgatggatttggaaaccatctatatcaacggcggaaaacgcgggttcattatcggcatccgtcccggagatttaaatattttgaacccgaaaacaatacaggcagcggtttga

SEQ ID NO: 44157 - DNA, 660 bp, Neisseria meningitidis
atggacacttggcacgatgcactcggcggcgaaaaacagcagccgtattttcaggaaattttaaatgcagtcaggcaggaacgtttgtcgggacaaatcatctatccgccggcggcggatgtgttcaacgcattccgcctgacagcgttcgaccgggtcaaagccgtcattctcggacaagatccgtatcacggggcagggcaggcgcacggtttggcattttccgtccggcagggtatccgcataccgccgtctttactcaatatctacaaggagttggaaaccgacatcgaaggcttttccattcccgcgcacggctgtctgacagcgtgggcggagcagggcgtattgcttctgaacacggttttgacggtgcgtgcaggacaggcgcattcgcacgcccttttaggctgggaacgctttaccgataccgtcatcaggcagcttgcgacacaccgcaagcaccttgtcttcatgttgtggggtgggtatgcacaacaaaaagggaggctgatagacagtcaaaatcatttgatattgaccgcaccgcatccgtctcctctgtcggcatatcgcggttttttcggctgccgccatttttcacaggcaaacagctatttgagccggcacggtatcgatccgataaactggaagctgtga

SEQ ID NO: 44158 - DNA, 1416 bp, Neisseria meningitidis
atgaacctgcatgcaaaggacaaaacccagcatcccgaaaacgtcgagctgctcagtgcgcagaagccgattaccgactttaagggcctgctgaccaccattatttccgccgtcgtctgtttcggcatttaccacatcctgccttacagccccgatgccaataaaggtatcgcgttgctgattttcgttgccgcactttggtttaccgaagccgtccacattaccgtaaccgcactgatggtgccgattctcgccgtcgtactcggtttccccgacatggacatcaaaaaggcgatggctgatttttccaacccgattatctacatttttttcggcggcttcgcgcttgccaccgccctgcatatgcagcggctggaccgtaaaatcgccgtcgccctgctgcggctgtcgcgcggcagtatgaaggccgccgtgctgatgttgttcctcgttaccgcctttctgtccatgtggatcagcaacaccgccaccgccgcgatgatgctgcctctggcaatgggtatgctgagccacctcgaccgggaaaaagaacgcaaaacctacgtcttcgtcctgctcggcatcgcctattgcgccagcatcggcggcttgggcacgctcgtcggctcgccgcccaacctgattgccgccaaagccctaaatctggacttcgtcggctggatgaagctcggcctgccgatgatgctgttgattctgcccttgatgctgctctccctgtacgtcatcctcaaacctaatttgaacgaacgcgtggaaatcaaagccgaatccatcccttggacgctgcaccgcgtgatcgcgctgttgattttccttgccacagccgccgcgtggatattcagctccaaaatcaaaaccgccttcggcatttccaatcccgacaccgttatcgccctgagtgccgccgtcgccgtcgtcgtcttcggcgtggcgcaatggaaggaagtcgcccgcaataccgactggggcgtgttgatgctcttcggcggcggcatcagcctgagcacgctgttgaaaacatccggcgcgtccgaagccttgggacagcaggttgccgccaccttttccagcgcgcccgcatttttggtgatactcatcgtcgccgccttcattatttttctgaccgagttcaccagcaacaccgcctccgccgcattgcttgtaccgattttctccggcatcgctatgcagatggggctgcccgaacaagtcttggtattcgtcatcggcatcggcgcatcttgtgccttcatgctgccggttgccacaccgcctaacgcgattgtgttcggcacgggcttaatcaagcaacgcgaaatgatgaatgtcggcatactgctgaacatcctctgcgtagtattggttgctctgtgggcttatgctgtactgatgtaa

SEQ ID NO: 44159 - DNA, 246 bp, Neisseria meningitidis; identical to SEQ ID NO: 38743

SEQ ID NO: 44160 - DNA, 735 bp, Neisseria meningitidis
atgaaaattttcaaacctgctttatggaaaattccgccgattgaaaatggcagtgaaacggctttggcggaaaaaacggaaaccctcaaacaacgcctgcaccggattgccggcagccaccgggatgcacggtttgccagcagccttgctgcggaagatatggtaattaccgaccttatcgccggagaaaacctcaatatcggtatttttactttggatacggggctgctgcacgcggaaactttaaacctgttggataggattgaacgtgtttatccgcatatgcaaatcaagcgtttccaaccgatacgggaagatgccctgcattatgtggaaagcaaaggcaggtttgccttttacgacagcgttgaagcgcgccgcgaatgctgccgcatccgaaaaaccgaaccgctcgaccgcgccattgccggggcggatgcttggcttaccgggcaacgccgcgaacagtccgccacacgcacggaactgccgtttgccgaatatgatgccgggcgcggcatcgataaatacaacccgattttcgactggtcggaacacgacgtgtgggcatacatccttgccaacaatgtgccttacaacgatttgtaccggcaaggctttcccagtataggctgcgacccctgcacccgccccgtcaaggccggcgaagacatccgcgccgggcggtggtggtgggaagataaaaacagcaaagaatgcgggctgcacaaataa

SEQ ID NO: 44161 - DNA, 2277 bp, Neisseria meningitidis
atggcacaaactacactcaaacccattgttttatcaattcttttaatcaacacacccctcctcgcccaagcgcatgaaactgagcaatcggtggatttggaaacggtcagcgtcgtcggcaaaagccgtccgcgcgccacgtcggggctgttgcacacttcgaccgcctccgacaaaatcatctccggcgataccttgcgccaaaaagccgtcaacttgggcgacgctttagacggcgtaccgggcatccacgcttcgcaatacggcggcggcgcgtctgctcccgtcattcgcggtcaaacaggcaggcggattaaagtgttgaaccatcacggcgaaacgggcgacatggcggacttctctccagaccatgcaatcatggtggacagcgccttgtcgcaacaggtcgaaatcctgcgcggtccggttacgctcttgtacagctcgggcaatgtggcggggctggtcgatgttgccgatggcaaaatccccgaaaaaatgcctgaaaacggcgtatcgggcgaactcggattgcgtttgagcagcggcaatctggaaaaactcacgtccggcggcatcaatatcggtttgggcaaaaactttgtattgcacacggaaggcttgtaccgcaaatcgggcgattacgccgtaccgcgttaccgcaatctgaaacgcctgcccgacagccacgccgattcgcaaacgggcagcatcgggctgtcttgggttggcgaaaaaggctttatcggcgcagcatacagcgaccgtcgcgaccaatatggtctgcctgcccacagccacgaatacgatgattgccacgccgacatcatctggcaaaagagtttgattaacaaacgctatttgcagctttatccgcacctgttgaccgaagaagacatcgattacgacaatccgggcttgagctgcggctttcacgacgacgatgatgcacacgcccatgcccacaacggcaaaccttggatagacctgcgcaacaaacgctacgaactccgcgccgaatggaagcagccattccccggttttgaagccctgcgcgtacacctgaaccgcaacgactaccaccacgacgaaaaagcaggcgatgcagtcgaaaacttttttaacaaccaaacgcaaaacgcccgtatcgagttgcgccaccaacccataggccgtctgaaaggcagctggggcgtgcaatatttgggacaaaaatccagcgcgctttccgccattcccgaaaccgtcaaacaaccgatgttgattgacaacaatgtacgccattacagctttttcggtgtagaacaggcaaactgggacaacttcacgcttgaaggcggcgtacgcgtggaaaaacaaaaagcctccatccagtacgacaaagcattgattgatcgggaaaactactacaaccaacccctgcccgacctcggcgcgcaccgccaaaccgcccgctcgttcgcactttcgggcaactggtatttcacgccacaacacaaactcagtctgaccgcctcccatcaggaacgcctgccgtcaacgcaagagctgtacgcacacggcaagcacgtcgccaccaacacttttgaagtcggcaacaaacacctcaataaagagcgttccaacaacatcgaactcgcgctgggctacgaaggcgaccgctggcaatacaatctggcactctaccgcaaccgtttcggcaactacatttacgcccaaaccttaaacgacggacgcggccccaaatccatcgaagacgacagcgaaatgaagctcgtgcgctacaaccaatccggtgcggacttctacggtgcagaaggcgaaatctacttcaagcccacaccgcgctaccgcatcggcgtttccggcgactatgtacaaggccgtctgaaaaacctgccatccctacccggcagggaagatgcttacggcaaccgtcctttcattgcacaggacgaccaaaacgcgcctcgcgttccggctgcgcgcctcggcatccacctgaaagcctcgctgaccgaccgtatcgatgccaatttggactactaccgcgtgttcgcccaaaacaaactcgcccgctacgaaacgcgcacgcccggacaccatatgctcaacctcggcgcaaactaccgccgcaatacgcgctatggcgagtggaattggtacgtcaaagccgacaacctgctcaaccaatccgtttacgcccacagcagcttcctctctgatacgccgcaaatgggccgcagctttaccggcggcgtgaacgtgaagttttaa

SEQ ID NO: 44162 - DNA, 1221 bp, Neisseria meningitidis
atggctgtcaacctgactgaaaaaaccgccgaacaactgcccgacatcgacggcattgccctctacaccgcccaagcaggcgtgaagaagcccgggcataccgacctgacactgattgccgtagccgccggcagcaccgtcggtgcagtcttcacgaccaaccgtttctgtgccgcgcccgtccacatcgccaaatcgcaccttttcgacgaagacggcgtgcgcgccctcatcatcaacacgggcaacgccaacgcgggtacgggcgcacagggcagaatcgatgctttggcagtgtgtgccgccgccgcccggcaaatcggctgcaaaccgaaccaggtgctgcccttctccaccggcgtgattctcgaaccgctgcccgcagacaaaatcatcgccgcgctgcccaaaatgcagcctgccttctggaacgaagcggcacgcgccatcatgaccaccgacaccgtgcccaaagccgcctcgcgcgaaggcaaggtcggcgacaaacacaccgtccgcgccacgggcatcgccaaaggctcgggcatgattcatcccaatatggcgaccatgctcggtttcatcgccaccgatgccaaagtttcccaacccgtcctccaactgatgacgcaggaaatcgccgacgaaaccttcaacaccatcaccgttgacggcgacaccagcaccaacgacagcttcgtcatcatcgccaccggcaaaaacagccaaagcgaaatcgacaacatcgccgacccgcgttacgcccaactcaaagaattgttgtgcagcctcgcgctcgaactcgcccaagccatcgtccgcgacggcgaaggtgcgaccaagttcatcaccgtccgcgtcgaaaacgccaaaacccgcgacgaagcccgccaagccgcctacgccgtggcacgttcgccgctggtcaaaaccgcctttttcgcctccgaccccaacctcggcaggctgctcgccgccatcggttatgccggcgttgtcgacctcgatactgacctcgtggaaatgtatctcgacgatattttggttgccgaacacggtggacgcgccgcaagctacaccgaagcacaagggcaggcggtgatgtcgaaggccgaaatcaccgtccgcatcaagctgcatcgcggacaaagtgccgccaccgtctatacctgcgacctgtcgcacggatacgtttccatcaacgccgactaccgttcctga

SEQ ID NO: 44163 - DNA, 741 bp, Neisseria meningitidis; identical to SEQ ID NO: 39171

SEQ ID NO: 44164 - DNA, 669 bp, Neisseria meningitidis
atgacgacccatctgtccaatgtcgcccccgacctgcaaaactatttgaacgccatcggcgaacctgaacatcccgttttgatgcggctgcgcgagaagaccgggcatcaccgtatgggcaaaatggcgattgcgcgcgaacaggcggcggttttggtttggctggcaaagctgatccgtgcggaaaaatatctggaagtcggcgtgtttactggatacagcagcaccgcgcttgcattggcgttgcccgaacacgggcggattaccgcctgcgacatcaatgtaagctttaccgatacggcgcgtcaggtttggaacgaggcaggtgtggcacataaaatcagcctgcacctgcaacccgcattgctgacattggatgatttgattgtacagggtgaagccggaagctacgatttggcactgatagacgcagacaaaccgcccacgccgcaatatttcgagcgttgcctcaaactcgtccggcaaggcggcatcattgccattgacaatattttgttgaacggaagggtgatgcgcgaagcggcttccgacgcgccgcccagtgtcggcatcctcaaagatttcaatcaaaacctgccgaacgacccgcgcatcgtccccatcaccctgcccgtcggcgacggtttgaccctgcttctgaaaaaataa

SEQ ID NO: 44165 - DNA, 771 bp, Neisseria meningitidis
atggaacccgaacgcctgcaaaaagtgcttgccgcgtccggcgtcggctcgcgccgcgaaatggaagaatggattaccaacggctggataacggtcaacggcaaaaccgcgcaactgggcgacaaagttacccccgacgaccacgttaccgtcaaaggcagcatcatcaagctcaaatgggcggaccgcctgccgcgcatcatcctgtattacaaacaagaaggcgaaatcgtttcccgtgacgacccgcaaggccgcgtcagcatattcgaccgcctgccgcaggccgccagcagccgctgggtcgccatcggacgcttggacatcaacaccagcggacttctgattcttaccacctccggcgaactcgtccaacgtttcgcccaccccagcttcgaagtcgaacgcgaatacgccgtgcgcgtcttgggcgggctgaccggcgaacaaatgcgcgtcctcaccgaagaaggcgtgatgctcgaagacggcttggcaaaagtcgaacgcatccgcgaacaaggcggcgaaggcgcgaacaaatggtacaacgtcgtgattaaagaaggccgcaaccgcgaagtgcgccgcatttttgaaagccaaggactcaccgtcagccgcctcgtgcgcgtcggcttcggtcccatcggactgcccaaccgcctcaaacgcgggcagttctacgaactcaaccccgccgaagtcgccaacatcctcaaatgggcggaaatgctgctgccgggcgaataccgccgcaaaaaagcctaa

SEQ ID NO: 44166 - DNA, 1008 bp, Neisseria meningitidis
atgtatccacttgcccgccgcatcctgtttgcactcgatgccgagaaagcccaccacttcacgctcgacgcgctctacacggtttataaattgggtctgattcccgtaaccggcaaccgtaccaaacctgtaaaattgatgggtatggatttgcccaaccctgtcggacttgccgctggactcgacaaaaacggcgaatacatcgacgcattgggcgcgctcggctttggtttcatcgaaatcggcacggtaacgcccaaaccgcagcccggcaacccgcagccgcgcctcttccgcgttcccgaacaccaaggcatcatcaaccgcatgggtttcaacaaccacggtatcgacaccatgatacgcaacatcgaaaaaagtaaattcagtggcgtattgggcatcaacatcggtaaaaacgcggttacacccatcgaaaacgctgccgatgattatttaatctgccttgaaaaagcctacgcacacgcaagttacattaccgtcaacatttcctcgcccaacaccaaaaacctccgcgcgctgcaaggtggcgacgagttgagcgcattgcttgaggctttgaaaaacaaacaggcacagcttgcctctgtatacgggaaatacgttccgctcgccgtcaaaatcgcccccgatttggatgaagcacaaatcgaagacatcgcccacgttgtcaaatccgtcgaaatggacggcatcatcgctaccaataccaccatcgacaaatcaagtctcggcagccatccgctcgcaggcgagcagggcggtttgagcgggcggcccgttcatgaaaaaagtaatcgggtgttgaagctgttggcagaccacatagacggcaagctgccgattatcggcgtaggcggcattatggaaggcagggacgcggcagataaaatccgcttgggcgcaactgccgtccaggtgtacagcggattgatatacaaaggtccggcattggtcaaagaatgtttgaaggctttggcgcgatga

SEQ ID NO: 44167 - DNA, 519 bp, Neisseria meningitidis; identical to SEQ ID NO: 38951

SEQ ID NO: 44168 - DNA, 1311 bp, Neisseria meningitidis
atgtacgctaaaaaaggcggtttgggactggttaaaagccgccgtttcgcacctcttttcgctacgcagtttctcggcgcgttcaacgacaatgtgttcaaaaccgcgctgtttgtgatgattgggttttacggtttggggcaaaacggcttcctgcctgccggacagatgttgaacttgggcgcgttgctgtttattttgccgtatttcctgttttcctcgctgtcggggcagttgggtaacaaattcgacaaggccgttttggcgcgttgggtcaaggtgctggaaatgatcattatggcggtggcggcatacgggttttatatccggtctgccccgctgcttttggcgtgtctgttttgcatgggcgcgcaatcgacgctgttcgggccgctgaaatacgccatcctgcccgattatctcgacgacaaagagttgatgatgggcaacagcctgattgaatcgggtacgtttgtcgccatcctgttcggtcagattttgggaacggcggtggcaggtgtaccgccttatattgtcgggatactggttttgctggtcgccgtcggaggcacggtcggcagcctgtttatgccgtccgtccccgccaaggctgccgatacccaaattgagtggaatattgtccgtggcacaaaatccctgcttcgtgaaacggtgcggtacaaacccgtctttaccgctattatcggtatttcgtggttttggtttgtcggcgcggtttataccacgcaactgccgacctttacccaaatccatctgggcggcaacgacaatgttttcaacctgatgcttgccctgttttccatcggtattgccgccggttcggtactgtgtgccaagttcagcagggaacgcctgatgttggcttgggtaacggttggtgcgttgggtttgacggtttgcggcctggttttggtgtggctgacgcacggacaccgttttgaagggctgaacggcattttttggtttttatcgcaaggatgggcatatcccgtgatggcggtgatgacgctgatcggctttttcggcggatttttctccgttccgctctatacctggctgcaaaccgccagtagcgagactttccgcgcccgcgccgttgccgccaacaatatcgttaacggtatttttatggtttccgccgccgttttgagcgcggtgttgctgtttttgtttgacagcatttccttgttgtatctgattgtcgctttgggcaatattccgttgtcggtatttttgattaagcgcgaaaggcggtttttaggcgcggcggcaatcaggaaaaaaccttga

SEQ ID NO: 44169 - DNA, 1170 bp, Neisseria meningitidis
atgccgcaaattaaaatccccgccgtttactaccgcggtggcacatcaaaaggcgtgtttttcaaacgttccgacctgcccgaggcggcgcgggaagcgggcagcgcacgcgacaaaatcctcttgcgcgtactcggcagcccggacccctacggcaagcagatagacggtttgggcaacgccagttcgtccaccagcaaagccgtgattttggacaagtccgaacgcgccgatcacgatgtcgattaccttttcgggcaagtttccatcgacaaaccttttgtcgattggagtggcaactgcggcaacctcaccgccgccgtaggcgcatttgccatcgaacaaggtttggtcgataaatccaaaatcccttcagacggtatctgcacggtgaaaatctggcagaaaaacattggcaaaaccattattgcccatgttccgatgcaacacggcgcagttttggaaacgggcgattttgagcttgacggcgtaacgttcccggcagccgaagtacaaatcgaatttttagatccggccgacggcgaaggcagtatgttcccaaccggcaatttggtcgatgaaattgatgtgccgaatataggccgtctgaaagccacgcttatcaatgccggtattccaaccattttcctgaatgccgtagatttgggctacacaggcaaagagttgcaagacgacatcaacaacgatgccgcggctttggaaaaattcgagaaaatccgcgcttacggtgcgctgaaaatgggtctgatcagcgacgtatccgaagctgccgcccgcgcgcacacgccgaaagtcgccttcgtcgcgcccgccgccgattacaccgcctccagtggcaaaaccgtgaacgccgccgacatcgatttgctggtacgcgccctgagcatgggcaaattgcaccacgcgatgatgggtaccgcctctgttgccattgcgaccgccgccgccgtgcccggtacgctggtcaaccttgccgcaggcggcggaacgcgtaaagaagtgcgcttcgggcatccttccggcacattgcgcgtcggtgcagccgccgaatgtcaggacggacaatggacggccaccaaagcggttatgagccgcagcgcacgcgtgatgatggaaggttgggtcagggtgccggaagattgtttttaa

SEQ ID NO: 44170 - DNA, 168 bp, Neisseria meningitidis; identical to SEQ ID NO: 38803

SEQ ID NO: 44171 - DNA, 867 bp, Neisseria meningitidis
atgaaagcaaaaatcctgacttccgttgcactgcttgcctgttccggcagcctgtttgcccaaacgctggcaaccgtcaacggtcagaaaatcgacagttccgtcatcgatgcgcaggttgccgcattccgtgcggaaaacagccgtgccgaagacacgccgcaactgcgccaatccctgctggaaaacgaagtggtcaacaccgtggtcgcacaggaagtgaaacgtctgaaactcgaccggtcggcagagtttaaaaatgcgcttgccaaattgcgtgccgaagcgaaaaagtcgggcgacgacaagaaaccgtccttcaaaaccgtttggcaggcggtaaaatatggcttgaacggcgaggcatacgcgctgcatatcgccaaaacccaaccggtttccgagcaggaagtaaaagccgcatatgacaatatcagcggtttttacaaaggtacgcaggaagtccagttgggcgaaatcctgaccgacaaggaagaaaatgcaaaaaaagcggttgccgacttgaaggcgaaaaaaggtttcgatgccgtcttgaaacaatattccctcaacgaccgtaccaaacagaccggcgcgccggtcggatatgtgccgctgaaagatttggaacagggtgttccgccgctttatcaggcaattaaggacttgaaaaaaggcgaatttacggcaacgccgctgaaaaacggcgatttctacggcgtttattatgtcaacgacagccgcgaggtgaaagtgccttcttttgatgaaatgaaaggacagattgccggcaaccttcaggcggaacggattgaccgtgccgtcggtgcactgttgggcaaggcaaacatcaaacctgcaaaataa

SEQ ID NO: 44172 - DNA, 582 bp, Neisseria meningitidis
atgaaacacaccgtatccgcatcggtcatcctgcttttgaccgcttgcgcgcaattacctcaaaataacgaaaacctgtggcagccgtccgaacacacccgcagtttcacggcggaagggcggttggcagtgaaagcggaagggaaaggttcgtatgcaaatttcgattggacataccaaccgcccgtggaaaccatcaatatcaatacccctttgggcagtacgctcgggcagttgtgtcaagacagggacggcgcattggcagtggacggcaaaggaaatgtctatcaggcggaaagtgcggaagaattgagcaggcagctggtcggtttcaaactgccaatccaatatctgcatatctgggcagatggcaggcgtgtggcgggcgcgccttaccgcatcctgccggacggcatattggaacaatacggttggactgtcggcagaaccgccgacagtggggggcaagtccgaacgttgcaactgaataacggaaatttgaacatcaggctggttttcaccgaaatcggtatgccgtctgaaaccgaaaccccggaacgctgtgcggcgcgcacgagataa

SEQ ID NO: 44173 - DNA, 486 bp, Neisseria meningitidis; identical to SEQ ID NO: 41484

SEQ ID NO: 44174 - DNA, 195 bp, Neisseria meningitidis
atgaacatcatcttaaacggcggacccgccgaacttcacggcacaagcgttgccgacctcatcgcccaaaccgcgccgcaacagccctttgccgtggcggtcaacaccgttttcatccccaaaggcgcgtatgcggaaacggttttgaacgaaaacgacaaaatcgatatcgtccgccccgtcgtcggcggctag

SEQ ID NO: 44175 - DNA, 630 bp, Neisseria meningitidis
atgaacagacacatccgccaagaaattttcgaacgcttccgcgccgccaacccccatccgaccaccgagctgaatttcaactcccctttcgagcttttaattgccgttctgctttcggcgcaggcgaccgatgtcggcgtaaacaaggcgacggcgaagctgtttccggttgccgatacgccgcaggcgatgctggatttgggtttggacggcgtgatggaatacacgaaaaccatcgggctgtataaaaccaagtccaagcacatcatgcaaacctgccgcatcctgctggaaaaatacaacggcgaagtgccggaagaccgcgaggctttggaatcgttgcctggcgtggggcgcaaaacggcaaacgtggtattgaacacagcgttcggacaccccgttatggcggtcgatacgcatattttccgcgtgtccaaccgaaccaaaatcgcccccgggaaagatgtgcgcgaagtcgaagacaaactgatgcgcttcattcctaaagaatttctgatggacgcgcaccactggctgattttgcacggacgctacacctgcaaggcactcaaaccgcaatgccaaacctgcatcatcaacgatttgtgcgaatatcccgccaaagcctga

SEQ ID NO: 44176 - DNA, 2559 bp, Neisseria meningitidis
atgcctgcaaacctgtcttcagcactggaaaccttcaaacagcagcgcgatgccgccgaagcgcattatttgaaagccaaccgcgtgtcggtatttttcagagaatacacggcggcagtcgaaaccttactggcggcattgtgggcagagtattttcaaaacagcgcgttatgcctgatggcggtaggcggcttcgggcgcggcgaactgtatccctgttcggacgtggatttggcggttgtctcccctgccccgctttcagacggcattcaggaacagattgcccggtttgtccaaaccctgtgggactgcaaactgatgccgtctgtaaaaagcggcagcgttgatgaactatgtgaaagcgtgcgcaatgatattacgggggacacagcgtttttagaggctaggtttttgtttggcaaccgccaaacggtggataaactggcggaaaaaatgaacgcgcagcgcaatgtggcggcgtttgtcgaggcaaaactggtggagatggaacaccgccacgccaaatcgcaaggttcgggggcagtattggagccgaatatcaaaagctgtccgggcggtctgcgcgacatccacaccctgctttggatagcgaaggcgcaaggcttggcgaccgacctgcccgacctgctcaaacagcggattttgacgcgtgccgaagccggtatgctttcgcacggctaccgccgcctcgcccacatccgcatccatctgcatttaaacgccaatcgcgccgaagaccgcctgctgttcgatttgcagccgcaagtcgccgaaagcatgggttatgaaggcttgaacctccgccgccaaagcgaagaactgatgcgcgtgttttaccgcgcgattaaaaccgtcaaacaactgggcggcatcctcacgcctatgctgcaaagccgcgtttcctccaccccgttgcgcgttaccctgcggattgacgacgactacatccaagtcaacaaccaaatcgccgcgcggcacaccgatatttttttcagacggcccgaacacattttcaaaatcgtcgaaatcatgcagcagcgcaacgatattaccgcgctcgaaccgcaaaccctgcgcgcatggtggggcgcgacgcgcaaaatcaaccgcagcttctaccaaaattctgaaaaccgccaccgcttcgccggctttttccgcaacggcaacggactgacccaaaccctgcgcttcctcaacctctacggcgtattgggacgctacctgcccgcgtgggaaaaaatcgtcggcctgctccagcacgacctgttccacatctatcccgtggacgaccacatcctcaccgtcgtccgcaacgtccgccgccttgccttggatatgcacagccacgagctgccctacgcctctgcactgatgcagtcctttgaaaaacaagacatcctctaccttgccgcctttttccatgacatcgccaaaggacgcggcggcgaccatgccatacaaggcatcgcagacgcgcgccaatttgccgccgaccacttcctgaccggagaagaaagcgacctgctcgcctggctggtcgaaaaccacctgctgatgtctgccgtcgcccaaaaagaagacatccaagaccccgacgtactcgatgctttctgcaaacgcgtccaaacccacgaacgcctcagcgcgctctaccttctgaccatttccgacatacgcggcaccaatcccaagctgtggaacgcatggcgcgccagcctgctggaaagcctcttccatgccgccggacgctaccttacaggcaacggcggcaacccgcacaccctcttcggccgccgccggcaggaagccgccgacttactcacccgcgccgccgtccccgaaaaacagcagaaaaaactatggaacgcgctcggttccgcctacttcgcccgccaccagtcccgcgaaatcctgtggcacgccgccaacctcgtacacgattttgaaacccccatcgtccgcagccgcatcctgccccaaagcgacagctttcaagtcatggtttttatgcccaacggcccgcgcctgttcgcccgcctctgccgtatcttcagccgccacggcttcgacattctcgccgcccgcgcctttattaccgaacacgactacatcctcgacaccttcatcgtgcaaatcccctcgcagcacgctcccgaagactaccccgacatccaaagcgcgctcgaagccgaactcaacagctttatccacggacacaccgttgccgaaatctccagccatagccgccgcatcagccgccgcagccgctacatgccgatcgcgccaagcatcaccattacccccgaagaagactaccccgactggtactccgtcgaaattaccgccgtcaaccgccccttcctgctcgccgatatggcggaaatctttttcgcccacaacgtcagcctgcgctatgccaaaatctccacactggatgaacgcgccgaagacagttttaccgtttttagccccgacctgaaaaacccaaaaatccagtcctcattgaagcagacgctgctggaacaattatcataa

SEQ ID NO: 44177 - DNA, 987 bp, Neisseria meningitidis
atgaatttgcctattcaaaaattcatgatgctgtttgcagcagcaatatcgttgctgcaaatccccattagtcatgcgaacggtttggatgcccgtttgcgcgatgatatgcaggcaaaacactacgaaccgggtggtaaataccatctgtttggtaatgctcgcggcagtgttaaaaagcgggtttacgccgtccagacatttgatgcaactgcggtcagtcctgtactgcctattacacacgaacggacagggtttgaaggtgttatcggttatgaaacccatttttcagggcacggacatgaagtacacagtccgttcgatcatcatgattcaaaaagcacttctgatttcagcggcggtgtagacggcggttttactgtttaccaacttcatcgaacagggtcggaaattcatccggaggatggatatgacggaccgcaaggcagcgattatccgccccccggaggagcaagggatatatacagttaccatatcaaaggaacttcaacaaaaacaaagataaacactgttccgcaagccccgttttcagaccgctggctaaaagaaaatgccggtgccgcttccggttttctcagccgtgcggatgaagcaggaaaactgatatgggaaaacgaccccaatcaaaattggtggggtaaccgtatggatgatgttcgcggcatcatccaaggtgcagccaatccttttctaacgggttttcagggattgggagttggggcaattacagacagtgcggtaaacccggtaacctatgcggcagcacggaaaactttacagggtattcacaatttaggaaatttaagtccggaagcacaacttgcggccgcaaccgcattacaagacagtgcttttgcggtaaaagacggtatcaactctgccaaacaatgggctgatgcccatccgaacattacagctactgcccaaaccgcccttgccatagcagaggccgcaactacggtttga

SEQ ID NO: 44178 - DNA, 387 bp, Neisseria meningitidis
atggcatacagcgataaagtaatcgaccactacgaaaatccccgcaacgtcggtactttcgacaaaaacgacgaatctgtcggcaccggcatggtcggcgcaccggcctgcggcgacgtgatgcgcctgcaaatcaaagtgaacgatgaaggcatcatcgaagatgcgaaattcaaaacttacggctgcggttccgccatcgcttcgtccagcctgattaccgagtgggtcaaaggcaaaagtctggatgacgcgctggcaatcaaaaacagcgaaatcgccgaagagttggaattgccgccggtaaaaatccactgctccatcttggctgaagatgcggtaaaagcggccgttgccgactaccgcaaacgtcaggaaaacagataa

SEQ ID NO: 44179 - DNA, 1116 bp, Neisseria meningitidis; identical to SEQ ID NO: 39732

SEQ ID NO: 44180 - DNA, 2157 bp, Neisseria meningitidis
atgcccgccccccaactttccgccccttatgatcccctgaccgccgaagcgcgtgccctgcttttccataccgcctcctacctcaagcccgaggaacaggcggagcttgaaaaagctgtcgcctatgcgtttcgcgcccacgacgggcaaacccgcaaaagcggggagccctacatcacgcatccgattgccgttgcgacgcagctcgccctttggcatatggacatacagggtctttgtgcaggcgtgatgcacgacgtattggaagatacgggcgtgacaaaaggggaaatggcggcggtgttcggcaatacggttgccgagatggtggacgggctgtccaaactcgaaaaactcaaatttgaagatcatgcggaacatcaggcggagagtttccgcaaactgattttggcgatgaccaaagatgtgcgcgtgattgtcgttaaacttgccgaccgtctgcataatatgcggacgctcggttcgatgcgcccggacaaacgccgccggattgcaagggaaacccttgaaatctatgcacagattgccaaccgtataggtttgaataacgcatatcaagagcttcaggatttatcgttccaaaacctgcatcccaaccgctacgagactttaaaaaaagcgatggacaagagccggaagaaccggcaggacgttgtcggcaaagtcttgcgcgcattcggccagcggctggtaggcgcgaatatagaggccaaaatcaaaggcagggaaaaaaacctgtacggcatccatcagaaaatgatggcgaaaaagctgcgctttgccgaggttatggatatttacggtttccgcgtcattgtcaacagcattccagcctgttatgccgcactcggcgcattgcacaccctctatcagcccaagcccgggcggttcaaagactatatcgccattccgaaaagcaacgggtatcaaagtctgcatacgactttggtcggcccttacggcttgccgattgaagttcagatacgtaccaaggaaatggatgctgttgccgaaggtggaatcgccggacattggagctataaatcatattctaagacggtcgatcaggcggtgcttcacacaaaccggtggctgaaaaatatcttagatttgcaggcaagcagtgccaatgccattgagtttctcgaacacgtcaaagtcgatttgtttccgaacgaaatctacatccttacgccaaaaggaaaaatcctaactttgcccaaaggggcaacgcctgtcgattttgcttatgcggtgcataccgatatcgggcacaaaaccgttgccgcacgtatcaacaatatcatgatgccgttgcgtacgaagctcaaaaccggtgattctgttgaaattatcacatccgaacacgccaaacccaatcccgcgtggttgaatttcgccgtgtccggcagggcgcgcagtgccatacgccaatatattaaaaaccttaaccggcacgatgcggtcgttttgggagagagcctcttacaaaaagccctgtccagtttgctgcccaaagatgtcctgctttcagacggcatcaaggaaaaatatcttgccgatctcaacgacaagcagacatcgtttgaagaagtgctgtacaacgtagggatggggcataccctgcctgtttatgtcgccatgcacattgctgagttggcaggggagcatttcggcagcgaggtcaggctcagttccattaaagtcgatggtcaggaaagcgggcatattcattttgcagagtgctgccaccctgttcccggcgattccatccgtttgctgttggttaagggaaaaggcatgattatccatagggatagctgcccgacgttgttgaagtccgatcccgaacagcagctggatgcagactgggaaaatatgaacgggcagaactaccgtgtcgggcttcaagtccaatcggaagacagccacggcctgttggcattaatggcgcaagcgatttccgattccggtgcggacatcgagtcggtcgaaacaccgtctaaatcccagtcgggaacggaaggttttgtcgaattcaaattcttattgaaagtcaagaatttggatcagttgaatcagattattcaaaatctgcatagtattccatatatccgcaaagtcatcagaagttga

SEQ ID NO: 44181 - DNA, 975 bp, Neisseria meningitidis
atggacacactgacccgattcctccccgaacacctgcaacaaaaccagctgcccgaagcactcggcggcgttttactgtccgttgtttccgcctgcaccgaaatcaacgccaaagtccgcctcggcgcactggccggcgtattgggtatggcgggcacgggcaatattcagggcgaagaccaaaaaaaactggatgttatcgccaacaacatcatgattgacacactcaaagccaaccctgccgttgccggtttggcaagcgaggaagaagactctttcgtaagtgccggtgaaaacggacgctatctcgtcctattcgaccctttagacggatcgtccaatattgatgtcaacatttccgtcggtacaattttctccatccttgaaaaacccgaaggcgcattggcaaccgaatcattccttcaaacgggcagacagcagcttgccgctggttacgttctttacgggcctcaaacccagctcgtattcacattcggacacggcgtatatatgttcacgctcaatgccgaaaacgaatttgtgctgacaaaagaaaaaccgaaagtacccgaaagtaccaaagaatttgccatcaatatgtccaaccgccgccactggctgccccccgtccaacaatacatcgacgagctcttggcgggcgaaaccggcacgcgcggcaaaaactacaatatgcgctgggtagccagcatggttgccgaaatccaccgcatactgatgcgcgggggcgtgttcatgtatccgcaagacaaacgcgacccgtccaaacccggcaaactgcgcctgatgtatgaagccaatcctatggccctgatactcgaacaagccggcgcatcggcaagcaacgcccgtcaggacatactcggcatccgtcccgaaagcctgcaccagcgcgtcgccgtcattatgggcagcagcgaagaagtggattacctcaaccgcctgcattcaaaataa

SEQ ID NO: 44182 - DNA, 738 bp, Neisseria meningitidis
atgctgctgatacccgccatcgatttgaaagaaggacgctgcgtccgcctgagacaagggctgatggaagaggcgaccgtcttttccgattcgcccgccgaaaccgcgctgcactggttcgaacaaggcgcgcgccgcctgcatctggtagatttgaacggcgcgtttgccggcgttccgcaaaacctgcccgccatcaaagacatccttgccgccgtcgccaaagacatccccgtacagctcggcggcggcatacgcgatttgaaaaccatcggacaatatttggatttgggcttaaacgacgtgattatcggcacggcggcggtcaaaaaccccgacttcgtgcgcgaggcgtgcaaagccttccccggcaggattattgtcgggctggatgccaaagacggtatggccgccatcgacggctgggcaaccgtaaccgggcatcatgtaattgatttggcaaaacgctttgaagacgacggcgtcaacagcatcatctacaccgacatcgggcgcgacggtatgatgagcggcgtgaacatcgacgcgacggtcaaactcgcccaagccgtccgcattcccgtcatcgcctccggcggactgaccggcttggacgacatccgcgccctgtgtgccgccgaaaaacatggcgtagcaggcgcgattaccggccgcgcgatttacgagggcagcatcgattttgcccaagcgcagcaactggcagattccctcgactaa

SEQ ID NO: 44183 - DNA, 1311 bp, Neisseria meningitidis
atgagcgtaactgttgaaactttagaaaatctggaacgcaaagtagtgttgtccctgccttggtccgaaatcaacgcagaaaccgataaaaaactgaaacaaacccagcgccgtgcaaaaatcgacggtttccgcccgggtaaagcacctttaaaaatgattgcccaaatgtacggtgcgagcgcgcaaaacgacgtgatcaacgagctggtgcaacgccgcttccacgatgttgccgttgcccaagagttgaaagtggcaggcttcccccgttttgaaggcgttgaagaacaagacgataaagaatctttcaaagttgccgccatttttgaagtgttccccgaagtcgttatcggcgatttgtctgcacaagaagttgaaaaagtaaccgcttccgtcggtgatgccgaagtggaccaaaccgtagaaatcctgcgcaaacaacgcacccgcttcaaccatgtcgaacgcgaagcccgaaacagcgaccgcgtcatcattgactttgaaggcaaaatcgacggcgaaccttttgcaggcggcgcatccaaaaactacgccttcgtattgggcgcaggtcaaatgctgcctgaatttgaagccggcgtagtcggcatgaaggctggcgaaagtaaagacgttaccgtcaacttccctgaagaataccacggcaaagacgttgccggtaaaactgccgtgttcaccattacgctgaacaacgtttccgaagcgactctgcctgaagtcgatgcagattttgcaaaagccttgggtattgcggatggcgacgttgccaaaatgcgcgaagaagtgcagaaaaacgtaagccgcgaagtggaacgccgcgtaaacgaacaaaccaaagaatccgtaatgaacgcgctgctcaaagccgtagagctgaaagcacctgttgctttggtcaatgaagaagccgcacgcttggcaaacgaaatgaaacaaaattttgttaaccaaggtatggctgatgctgccaacttggatctgcctttggatatattcaaagaacaagccgaacgccgcgtatctttgggtctgattttggccaaactggttgatgaaaacaaactggaaccgactgaggagcaagtcaaagccgttgtcgccaacttcgcagaaagctacgaagatcctcaagaagtaatcgactggtactacgcagagccttcccgcctgcaagccccgacttctttggcgatagaaagcaacgtcgttgatttcgttttgggtaaagccaaagtaaacgaaaaagctttgtcttttgacgaagtgatgggcgcgcaagcctga

SEQ ID NO: 44184 - DNA, 648 bp, Neisseria meningitidis
atggcttctaaatcatctaaaaccaacttggatctcaacaaccttcacctgctcaaccttcctgccaggctttttatcgccctgctggccgttgccgccgtgctggggctcggttatgccggattgttcaaaagccagatggaatcccttgaggaatacgaagcaaaagaaaccgaactgaaaaacacctacaaacagaaaagtatcgacgcggccagcctgaacaacctgagggacgaacttgcctcaatccgctctgccttcgatatcatgttgaaacagctgccgacagatgcagaaattcccaatctggttcaagagcttcatcaggcaggttcgagcaacggcctgcgcttggacagcgttatgccccaacctcccgtagatgacggccccatcaaaagattaccctattccatttccattaccagaaattacgaacagatcagccaatttacccgcgatgtcggcagcctctcccgaatcattacccttgagtcgctgaaaatcgcccaatctccggaaaacggcggcaatcctgacggcaagagcagcatcctgaacctcagtgccattgccaccacctaccaagcaaaatccgtagaagagcttgccgcagaagcggcacaaaatgccgagcaaaaataa

SEQ ID NO: 44185 - DNA, 810 bp, Neisseria meningitidis; identical to SEQ ID NO: 39637

SEQ ID NO: 44186 - DNA, 366 bp, Neisseria meningitidis; identical to SEQ ID NO: 37248

SEQ ID NO: 44187 - DNA, 1428 bp, Neisseria meningitidis
atgaacgagaactttaccgaatggctgcacggctgggtcggcgccatcaacgatccgatgtggtcatacttggtttatatgcttttgggtacggggcttttcttcaccgtaaccacgggctttgtccaattccgcctgttcgggcgcagcatcaaagaaatgctcggcggccgcaaacagggggacgaccctcacggcatcacgccgtttcaggcatttgtaaccggccttgccagccgcgtgggcgtgggcaatatcgcgggcgtggcaatcgccatcaaagtcggcggaccgggcgcggtgttttggatgtgggtaaccgccttaatcggtatgagttcggcgtttgtcgaatcttcgctggcgcagctctttaaagtccgcgactacgacaaccaccatttccggggcggccctgcctactacatcactcaagggctggggcagaaatggctgggcgtgttgttcgccctgagcctgattttctgtttcggctttgtgtttgaagcggttcagaccaataccatcgccgataccgtcaaagcggcatggggttgggagcctcattatgtcggcgtcgccctggtgattttaaccgcgccgattatcttcggcggcatcaggcgcatatctaaagcggcggaaatcgtcgtccccctgatggcggttttgtacctctttatcgcgcttttcatcattttgaccaatattccgatgattccagacgtgttcggtcagattttttcgggcgcgttcaaattcgacgcggcagcaggcggcttactcggcggtctgatttcacaaacgatgatgatgggcatcaaacgcggcctgtattccaacgaggcgggtatgggttccgcgccgaacgccgctgccgccgccgaagtgaaacaccctgtttcgcaaggtatgattcaaatgctgggcgtgtttgtcgataccatcatcgtttgttcttgcaccgccttcatcatcttgatttaccaacagccttacggcgatttgagcggtgcggcgttgacgcaggcggcgattgtcagccaagtggggcaatggggcgcgggcttcctcgccgtcatcctgtttatgtttgccttttccaccgttatcggcaactatgcctatgccgagtccaacgtccaattcatcaaaagccattggctgattaccgccgttttccgtatgctggttttggcgtgggtctatttcggcgcggttgccaatgtgcctttggtctgggatatggcggatatggcgatgggcattatggcgtggatcaaccttgtcgccatcctgctgctctcgccactggcgtttatgctgctgcgcgattacaccgccaagctgaaaatgggcaaagaccccgagttcaaactttccgaacatccgggcctgaaacgccgtatcaaatccgacgtttggtaa

SEQ ID NO: 44188 - DNA, 471 bp, Neisseria meningitidis
ttgaacatcaccgttttggcagtcggcaccaaaatgccgcgctgggttgatgaggccgtcgccgaatacgccaaacgcttcggacgcgacgtcgcctacgtactcaaagaaatcaaacccgaaaaacgcggcgcgggcgtgaatgccgcccaaggaatggcggcggaagaaaaacgcatcctcgaagccataccgcaaggcgcgttcctcgtcgtccttgacgaacgcggcaaagcaccgacctccgtcgagctggcggaacacctcaaaacttggcagcaaaacggcgaacacgtctgcttcgtcatcggcggcgcggacggcatgaccgaccgcctcaaacagcaggcccgcatgatgatgcgcctgtccagcctgaccctgccgcacgggatggtgcgcgtccttctgaccgaacaactctaccgcgccgcctccatcctgcacaaccacccctaccatcgggaataa

SEQ ID NO: 44189 - DNA, 1593 bp, Neisseria meningitidis
gtggggcttttgggtacaatcgcaacatcagtgtttcaagtggggaaggcgatggatggacggcgttgggcggtatggggtgcttttgccctgctgccttcggcttttttggcggcaatggtcgttgcgcctttgtgggcggtggcggcgtatgacggtttggcgtggcgcgcggtgctgtcggatgcctatatgctcaaacgtttggcgtggacggtatttcaggcagcggcaacctgtgtgctggtgctgcctttgggcgtgcctgtcgcgtgggtgctggcgcggctggcgtttccggggcgggctttggtgctgcgcctgctgatgctgccgtttgtgatgcccacgttggtggcgggcgtgggcgtgctggctctgttcggggcggacggtctgttgtggcgcggctggcaggatacgccgtatctgttgttgtacggcaatgtgttttttaacctgcccgtgctggtcagggcggcgtatcaggggtttgtgcaagtgcctgcggcacggcttcagacggcacggacgttgggcgcgggggcgtggcggcggttttgggacattgaaatgcccgttttgcgcccgtggcttgccggcggcgtgtgccttgtctttttgtattgtttttccgggttcgggctggcattgctgctgggcggcagccgttatgccacagtcgaagtggaaatttaccagttggtcatgttcgaactcgatatggcggttgcttcggtgctggtgtggctggtgttgggggtaacggcggcggcagggttgctgtatgcgtggttcggcagacgcgcgtgttcggataaggcagtttctcctgtgatgccgtctgaaccgcagtcggtcggggaatatgtgctgctggcgtttgcggcggcggtgttgtctgtgtgctgcctgtttcctttgttggcaattgttgtgaaagcgtggtcggccggcgaatcgtggcgtgtgttaatggaaagtgaaacgtggcaggcggtgtggaatactttgcgcttctcggcggcggcggtgtttgcggcggcggttttgggtgtggtgtatgcggcggcggcgcggcggtcggcgtggatgcgcgggctgatgtttttgccgtttatggtgtcgccggtttgtgtttcggcgggcgtgctgctgctttatccgcagtggacggcttcgttgccgttgctgctggcgatgtatgcgctgctggcgtatccgtttgtggcaaaagatgttttgtcggcttgggacgcactgccgccggattacggcagggcggcggcgggtttgggcgcaaacggctttcagacggcatgccgcatcacgttccccctcttgaaaccagcgttgcggcgcggtctgactttggcggcggcaacctgcgtgggcgaatttgcggcaaccttgttcctgtcgcgtcccgagtggcagacgctgacgactttgatttatgcctatttgggacgcgcgggtgaggataattacgcgcgggcgatggtgctgacattgctgttggcggcgttcgcgctgggtattttcctgctgttggacggcggcgaaggcggaaaacggacggaaacgttataa

SEQ ID NO: 44190 - DNA, 720 bp, Neisseria meningitidis
ttgactttaacccgaaaaacccttttccttctcaccgccgcattcggcacacactcccttcagacggcatccgccgacgcagtggtcaaggcagaaaaactgcacgcctccgccaaccgcagctacaaagtcgccggaaaacgctacacgccgaaaaaccaagtcgccgaattcacgcaaaccggcaacgcctcgtggtacggcggcaggtttcacgggcgcaaaacttccggcggagaacgatacgatatgaacgcctttaccgccgcccacaaaaccctgcccatccccagctatgtgcgcgtaaccaataccaaaaacggcaaaagcgtcatcgtccgcgtcaacgaccgcggtcccttccacggcaaccgcatcatcgacgtatccaaagccgccgcgcaaaaattgggctttgtcagccaagggacggcgcacgtcaaaatcgaacaaatcgtcccgggccaatccgcactggttgccgaaaacaaagacatcttcatcgacttgaaatctttcggtacggaacacgaagcacaagcctatctgaaccaagccgcccaaaacctggcttcatcggcatcaaacccgaacctatcggttgaaaaacgccattacgaatatgtcgtcaaaatggggccgttttcctcgcaggaacgcgccgccgaagccgaagctcaggcgcgcggtatggttcgggcggtattgactgccggctga

SEQ ID NO: 44191 - DNA, 1647 bp, Neisseria meningitidis
atgaaacaatccgcccgaataaaaaatatggatcagacattaaaaaatacattgggcatttgcgcgcttttagccttttgttttggcgcggccatcgcatcaggttatcacttggaatatgaatacggctaccgttattctgccgtgggtgctttggcttcggttgtatttttattattattggcacgcggtttcccgcgcgtttcttcagttgttttactgatttacgtcggcacaaccgccctatatttgccggtcggctggttgtatggtgcgccgtcttatcagatagtcggttcgatattggaaagcaatcctgccgaggcgcgtgaatttgtcggcaatcttcccgggtcgctttattttgtgcaggcattatttttcatttttggcttgacagtttggagatattgtgtatcggggggggtatttgctgacgtaaaaaactataaacgccgcagcaaaatatggctgactatattattgactttgattttgtcctgcgcggtgatggataaaatcgccagcgataaagatttgcgagaacctgatgccggcctgttgttgaatattttcgacctgtattacgatttggcttccgcgccggcacaatatgccgccaagcgcgcccacattttggaagcagcaaaaaaagcgtcaacatggcatatccgtcatgttgcgcccaagtataaaaattatgttgtggttatcggtgagagcgcacgttcggattatatgaatgtttacggtttcccattgcccgatacgccttttttgagtcagaccaaagggctgttgataaacggttaccaatcgaccgcccacgcgacgaatctttcgctgccgcagactttggggctgccgggagaaccgaacaataacatcgtcagcttggcgaagcaggcgggttttcggacggcgtggctgtctaatcaaggaatgttggggcattttgccaacgaaatttccacctatgccctacgcagcgattatccgtggtttacccaaaggggtgattatggcaaaagcgcggggttgagcgaccgccttttgttgccggcgttcaaacgggttttgataggaaatgcaggcacgaagcctcggctgattgtgatgcacctgatgggttcgcacagtgatttttgcacacgtttggataaggatgcgcggcggtttcagtatcaaactgaaaaaatatcctgctatgtttccaccatcgcgcaaaccgataaatttttagaagatacagttaagatattgaatgaaaataaagaaagctggtctttggtttacttttccgaccacggtttgatgcatgtcggtaaaggcggcgagcgaacgttgacacatggtgcgtggaagcgtcaaagctacggcgtgccgctggttaaaatttcgtccgatgacacgcggcgcgaaatgattaaagtgaggcgcagcgcgtttaattttttacgcggattcggcagttggacgggtatcgaaaccgacgagttgcccgatgacggctatgatttttgggggaatgttcccgatgtgcagggcgaaggcaataaccttgcctttatcgacggactgcccgacgaccccgcgccgtggtatgcgggaaaaggcaaatcgactaaaaatacgtctaaaaaatga

SEQ ID NO: 44192 - DNA, 465 bp, Neisseria meningitidis; identical to SEQ ID NO: 39709

SEQ ID NO: 44193 - DNA, 1545 bp, Neisseria meningitidis
atgtgcggcgtattaggtttggtcagtcatgaacccgtgaaccagcttctgtacgacggtttgcagatgttgcagcacaggggacaggatgcggcgggcattgtaacggccgaaggcggtaccttccatatgcacaaaggcaaagggatggtgcgcgaagtgttccgcacgcgcaatatgcgtgatttgaccggcaacgccggcatcgcccacgtccgttatcccacggcgggcaacgccggcagcagcgcggaggcgcagcctttctacgtcagctcgccgttcggcatcgttttggcgcacaacggcaacctcaccaacactgccgaactttatgaaaacgtgtgcaacaaacacctacgccacgtcaacaccagctccgattccgaagtcttgctcaacgtattcgcgcacgaattgcgccgcgaagtctctaaaaacgccgacccgcaccggctcaatgccgacaatattttcaacgccgttgccgaagtccaccgcctggtgcgcggcgcatacggcgtggttgccatgattgcgggctacggtatgcttgccttccgcgacccttacggcatccgcccgctggtattgggttcgcaaaccgacagcgaaggcagaaaatcctatgccgtcgcctccgaatccgtcgccttcaacgcgcttacctacgatttggaacgcgacatccggccgggcgaagcggtatttgtcggctttgacggcacaatgattgcccgccaatgcagcgaccgtgccaaactcagcccctgcctttttgaatatgtttattttgcccgccccgactctgtgattgacggcgtatccgtttaccaatcgcgcttggatatgggcgtgtcgctggcggaaaaaatcaaacgcgagctgcccgtggacggcatcgatgtcgtgatgcccatccccgacaccagccgccccagcgcgatggagcttgccgtccatctcgacaaaccctaccgcgagggtttgattaaaaaccgctatatcggccgcacctttattatgcccggacaggcgacgcgcaaaaaatccgtgcgccaaaaactcagcccgatggaaaccgaatttgcaggcaaaagcgtgttgctggtggacgactccatcgtgcgcgggacgaccagccgcgaaatcgtcgaaatggtacgcgcggcgggcgcgcgcaaagtctatatcgcctccgccgcgcccgaagtgcgctatcccaatgtgtacggcattgatatgcccacgcgcgaagagttgattgccaacgagcgcagcgcggcggaaatcgccgccgaaatcggcgcagacggcatcgtgttccaaaatttgagcgatttggaagccgtcgtcaaagcactcaatccgaaaatcgaatccttcgattcgtcctgtttcaacggcatttatcagaccggcgacatcgatgatgcctacctcgaccgcctgtctgccgagaaatccggctgcggcggtctgaaaatccacccgagcaggatggaacacagcatcagcatcagcgatgcgggcgacgaagaataa

SEQ ID NO: 44194 - DNA, 1437 bp, Neisseria meningitidis
atgccgttgctgtctgtcgagttcgcactgttctttctcgctttcctgccgatttactggggcttggcgaaatacccgtccgcccaaaacctgctgcttctggctgccggtatgggctggctctaccatatcggccccgtatttgcggcaatcatcgtcctttattcctcctgcgtgtaccttttgggcgaactgctccgttccgatcgcgaaaatacgcgccgcttttggctggggtgcggcattgccgcctcgctgaccgtcttgggctttttcaaatatttcgactttttccggccgctgattgcccaatatgccggaaaaggcggcgcaatcgacatcctgatgccgctggggctttcgtattacaccttccagtcgctcgcctatcttgtttactgcttccgcgccccgcacgccgcgcgtttcagctggcacgagctgctgctgcacctgagttttttccccaccgttacctccggcccgattatccgcgccgccgcattcaaaagcgcagacggcgagcaggcaggcgcattggcgcaaatccgtacccgccaaccgcgctcacccgtccgccccgcactcgccgtttccctgattctgctgggtattgccaaaaaatggtggctggcggggatgctcgcagaaaactgggtgtcgcccgtgtttgaaaaccccgcccaattcaacggctggggcgtgttggcgggcgtgtacggctataccttccaactcttcctggacttttccggatattccgatttggttatcggcatggcgatgctgctgggcttccgactgcccaaaaacttctccgcaccgcttcgtgccgcgaatatccgtgcattttgggacaaatggcacatcagcctttccacctggatacgcgactacatctacatccccttgggcggcagcaaaaaaggctttttgcggacacagctcaacctgatggcggcaatggtactctcaggcatctggcacggctacggctggaacttcctcatttggggcgcgctgcacggcacggcgctggtgctgctcaacacgggcgatcgctatttcggacgcaacgcgctatgccgtctgaaataccttgcgccgctctcgtggtttgttaccttccatttcgtctgccttagctttgttgtcttcaataccgcaagccccgacgatgcaggcgcagttttcaatgccctctttgccaatgccaacggctggaatgcgccgcaacaggcaaacatgctgctgcttgcctcgtttgcatccgtgatgctgctctacccttacctgcaacgcgctttcgacggcgcggtcaaaggtttggaaaaaatcccgatgtggctgtggtttatcccgatttccatcatcctgctgctgattatcgtccttgccccctcggggatacccggttttatttatgccaatttttaa

SEQ ID NO: 44195 - DNA, 774 bp, Neisseria meningitidis
atgaaaccgaaaatccaaaggcacggagagattttaagccttgtccgccggcatcagtttatgtcggtggacgagcttgccgccgcattggacgttaccccgcagacgatacgccgcgacatccgcgagttggaggaggccggcagcctgaaacgccatcacggcggcgcatcttcgggcggaaacttgccggagggcctgcccgccgaccgccaaacccggtgtcaaaacgaaaaaaacgccattgcccggctgattgcggaacacatccccgacggttcgtcgctgtttgtcagtatcggcacgacgatggaggccgtggtgtcggagctggtcaggcggcgcggcagcctgagggtgattaccaacaatatccacgccgcctcgattgcttcggcgcggacggattatacggtcattatcacttctggagtcgtccgtcctttggacggcggtattaccggcgtggcaaccgtcgattttatcaaccagttcaaagtcgattatgccgtgatgagtacgcacggcgtggaaagcgacggttcgcttttggacgacgactacaaagaagtcagcgtgatgcaggcgatgattgccaatgcgcgcgtccgcttcctcggcgtggaccacagtaaattccgcagcaacgcgctggtcaggctcggcgacattacggcgtttgacaaagtatttaccgaccggctgcccgataccgcgatgcagaagatgctgaaagaggcgggggtggaatgcctgattgccgatgccgtctga

SEQ ID NO: 44196 - DNA, 2433 bp, Neisseria meningitidis
atgcccatccccttcaaacccgtattggctgccgccgccatcgcccaagcgtttcccgcctttgcggcagaccccgcgccgcagtccgcccaaacgctgaacgaaatcaccgttaccggcacgcacaaaacccaaaaactcggcgaagaaaaaatccgccgcaaaactttagacaagctcttggtcaacgacgaacacgacctggtgcgctacgaccccggcatttccgtcgtcgaaggcggcagggcgggttctaacggctttaccatacgcggcgtggacaaagaccgcgtcgccatcaacgttgacgggctggcgcaggcggaaagccgctcttccgaagccttccaagaattgttcggcgcgtacggcaacttcaacgccaaccgcaacacttccgagccggaaaacttttccgaagtaaccatcaccaaaggcgcggactcgctcaaatccggcagcggcgcattgggcggcgcagtcaattaccaaaccaaatccgcaagcgattatgtttccgaagacaagccctaccatttggggataaagggcggcagcgtcggcaaaaacagccaaaaattcagcagcatcaccgccgccggcaggctctttggtttggatgccttattggtttatacccgccgcttcggcaaagaaaccaaaaaccgctcgaccgagggcgatatcgaaattaaaaacgacggatatgtctataacccgaccgatacaggcggacccagcaagtacctgacctatgtagccacaggggttgcgcgctcccaacccgacccgcaagaatgggtaaacaaaagcaccctgttcaagctgggctacaacttcaacgatcaaaaccgtatcggctggatttttgaagactcgcgcaccgaccgttttaccaacgagctgtctaatttgtggacgggtacgaccacgtctgccgcaacgggcgactaccgccaccgccaagacgtgagctaccgccgccgctccggtgtcgaatacaaaaacgaattggaacacggcccgtgggacagcctcaagctgcgctacgacaagcagcgcatcgatatgaacacttggacttgggacatcccgaaaaattacgatttgcgcggcatcaacggcgaggtttaccattcgttccggcatatccgccaaaacaccgcgcaatggactgccgattttgaaaaacaactcgacttttccaaagccgtttgggcggcgcaatacggcttgggcggcggcagaggggacaatgccaactcggattacagctatttcgcaaaactgtacgcccccaaaatcctcgcttccaaccaagccaaaatcacaatgctgatcgaaaaccggtcgaaatataaatttgcctattggaacaatgcgtttcacttgggcggcaacgaccgcttccgcctgaacgcgggcatacgctacgacaaaaacagcagcagcgcgaaagacgatccgaaatacaccaccgccatccgggggcagattccccatttgggttcggaacgcgcgcacgcgggcttcagctacggcacggggttcgactggcggtttaccaagcatctgcacttgttggcaaaatacagcaccggcttccgcgcaccgacttcggacgaaacctggctgctgttcccacaccccgatttctacttgaaagccaacccaaacctgaaagcggaaaaagccaaaaactgggaattgggtctggcgggcagcggcaaagcgggcaacttcaagctctcgggcttcaaaaccaaataccgcgactttatcgaattgacgtatatgggcgtttcgtcagacgataaaaacaaccccagatacgccccgctttcagacggtacggcattggtcagctcgcccgtttggcaaaaccaaaaccgctccgccgcctgggtgaaaggcatagagtttaacggcacgtggaacctcgacagtatcggtttgcccaaagggctgcacaccggcctcaacgtcagctacatcaagggcaaggcaacgcaaaacaacggcaaagaaacgcccatcaacgcgctttcgccgtggacggcggtttacagcctgggctacgacgctccttccaaacgttggggcatcaacgcctacgccacgcgcaccgccgccaaaaagccgtccgacaccgtccacagcaacgacgacttgaacaacccgtggccttatgccaaacacagcaaggcctatacgctgttcgacctttccgcctacctcaacatcggcaaacaggttacgctccgcgccgccgcgtacaacattaccaacaagcagtactacacttgggaatctttacgcagcatccgcgagttcggcacggtcaaccgcgttgacaacaaaacccacgccggcatccaacgctttacctcgccgggcaggagctacaatttcaccatcgaagcgaagttctaa

SEQ ID NO: 44197 - DNA, 627 bp, Neisseria meningitidis; identical to SEQ ID NO: 39768

SEQ ID NO: 44198 - DNA, 1839 bp, Neisseria meningitidis
atgttacccgcccgtttcaccattttatctgtgctcgcggcagccctgcttgccgggcaggcgtatgccgccggcgcggcggatgcgaagccgccgaaggaagtcggaaaggttttcagaaagcagcagcgttacagcgaggaagaaatcaaaaacgaacgcgcacggcttgcggcagtgggcgagcgggttaatcagatatttacgttgctgggaggggaaaccgccttgcaaaaggggcaggcgggaacggctctggcaacctatatgctgatgttggaacgcacaaaatcccccgaagtcgccgaacgcgccttggaaatggccgtgtcgctgaacgcgtttgaacaggcggaaatgatttatcagaaatggcggcagattgagcctataccgggtaaggcgcaaaaacgggcggggtggctgcggaacgtgctgagggaaagaggaaatcagcatctagacggactggaagaagtgctggctcaggcggacgaaggacagaaccgcagggtgtttttattgttggcacaagccgccgtgcaacaggacgggttggcgcaaaaagcatcgaaagcggttcgccgcgcggcgttgagatatgaacatctgcccgaagcggcggttgccgatgtggtgttcagcgtacagggacgcgaaaaggaaaaggcaatcggagctttgcagcgtttggcgaagctcgatacggaaatattgccccccactttaatgacgttgcgtctgactgcacgcaaatatcccgaaatactcgacggctttttcgagcagacagacacccaaaacctttcggccgtctggcaggaaatggaaattatgaatctggtttccctgcacaggctggatgatgcctatgcgcgtttgaacgtgctgttggaacgcaatccgaatgcagacctgtatattcaggcagcgatattggcggcaaaccgaaaagaaggtgcttccgttatcgacggctacgccgaaaaggcatacggcagggggacgggggaacagcggggcagggcggcaatgacggcggcgatgatatatgccgaccgaagggattacaccaaagtcaggcagtggttgaaaaaagtgtccgctccggaatacctgttcgacaaaggtgtgctggcggctgcggcggctgtcgagttggacggcggcagggcggctttgcggcagatcggcagggtgcggaaacttcccgaacagcaggggcggtattttacggcagacaatttgtccaaaatacagatgttcgccctgtcgaagctgcccgacaaacgggaggctttgagggggttggacaagattatcgaaaaaccgcctgccggcagtaatacagagttacaggcagaggcattggtacagcggtcagttgtttacgatcggcttggcaagcggaaaaaaatgatttcagatcttgaaagggcgttcaggcttgcacccgataacgctcagattatgaataatctgggctacagcctgctttccgattccaaacgtttggacgaaggcttcgccctgcttcagacggcataccaaatcaacccggacgataccgctgtcaacgacagcataggctgggcgtattacctgaaaggcgacgcggaaagcgcgctgccgtatctgcggtattcgtttgaaaacgaccccgagcccgaagttgccgcccatttgggcgaagtgttgtgggcattgggcgaacgcgatcaggcggttgacgtatggacgcaggcggcacaccttacgggagacaagaaaatatggcgggaaacgctcaaacgtcacggcatcgcattgccccaaccttcccgcaaaccccggaaataa

SEQ ID NO: 44199 - DNA, 3216 bp, Neisseria meningitidis; identical to SEQ ID NO: 36551

SEQ ID NO: 44200 - DNA, 1914 bp, Neisseria meningitidis
atgaacccaagccccctactcgacctgattgacagcccgcaagatttgcgccgtctggacaaaaaacagctgccgcgccttgccggcgagttgcgcgcctttctgctggaatccgtcggtcaaaccggcggtcatttcgccagcaacttaggtgcggtcgagctgaccatcgccctgcactatgtgtacaacacgcccgaagacaagctggtgtgggatgtcggacaccaaagctatccgcacaaaatccttaccggacgcaaaaaccagatgcacaccatgcgccaatacggcggtttggcgggttttccgaaacgttgcgagtccgagtacgacgcgttcggcgtggggcattcctccacctccatcggcgcggcgttgggcatggcggcggcagacaaactcttgggcagcgaccgccgcagcgtcgccatcatcggcgacggcgcgatgacggcggggcaggcgtttgaagccttgaattgcgcaggcgatatggatgtggatttgctggtcgtcctcaacgacaacgaaatgtcgatttcccccaacgtcggcgcgctgccgaaataccttgccagcaacgtcgtgcgcgatatgcacggcctgttgagtaccgtcaaagcgcaaacgggcaaggtattagacaaaatacccggcgcgatggagtttgcccaaaaagtcgaacacaaaatcaaaacccttgccgaagaagccgaacacgccaaacagtcactgtctttgtttgaaaacttcggcttccgctataccggccccgtggacggacacaacgtcgaaaatctggtcgatgtattggaagacctgcgcggacgcaaaggcccgcagcttctgcacgtcatcaccaaaaagggcaacggctacaaactcgccgaaaacgatcccgtcaaataccacgccgtcgccaacctgcctaaagaaagcgcggcgcaaatgccgtctgaaaaagaacccaagcccgccgccaaaccgacctatacccaagtgttcggcaaatggctgtgcgaccgggcggcggcagattcccgactggttgcgattacccccgccatgcgcgagggcagcggcttggttgagtttgaacaacgattccccgaccgctatttcgatgtcggtattgccgagcagcacgccgttacctttgccggcggtttggcttgcgaagggatgaagcccgtcgtggcgatttattccacctttttacaacgcgcctacgaccaactggtgcacgacatcgccctgcaaaacctacccgttttgtttgccgtcgaccgcgcgggcatcgtcggcgcggacggcccgacccatgccggtctgtacgatttgagctttttgcgctgcgtgccgaacatgattgtcgccgcgccgagcgatgaaaacgaatgccgcctgctgctttcgacctgctatcaggcagacgcgcccgccgccgtccgctatccgcgcggcacgggtacgggcgtgccggtttcagacggcatggaaaccgtggaaatcggcaagggcattatccgccgcgaaggtgggaaaaccgcattcattgccttcggcagtatggtcgcccccgcattggcggttgccgaaaaactgaacgccaccgtcgccgatatgcgcttcgtcaaaccgatagacgaagagttgattgtccgccttgcccgaagccacgaccgcatcgttacccttgaagaaaacgccgaacagggcggcgcaggcggcgcggtgctggaagtattggcgaaacacggcatctgcaaacccgttttgcttttgggcgttgccgataccgtaaccggacacggcgatccgaaaaaacttttagacgatttgggcttgagtgccgaagcggtggaacggcgtgtgcgcgcgtggttgtcggatcgggatgcggcaaattaa

SEQ ID NO: 44201 - DNA, 939 bp, Neisseria meningitidis
atggatgcctaccccgaagccgaagccccgccgcaaagcatcgtcgagctggttcccgtattgattgccgttaccgacggcggcctgcgggtgttgaccgtcgcccaaggcacgctcctgcccaacggcccgctctcccctctgcgcaattccctgcaggcgggcgtgaagctgtgggttgccaagcaaacttcgcagcctatgggctatgtggaacagctttacacctttgtcgatacccaccgccgcaacgaacacggcatgcccgtcttgtacgtcagctatttggggctggtgcgcgaggcagccgacagcatcctgcatcccgatgcgaaatggcaggactgctacggctatttcccgtgggaagacttgcgcaccgacggcgggcagcgcgacgccgtcgtcggccgcctgcgcatttgggcaaactcggcggacacggaggaagtccgccaaaagcggctcaagcgcattcatttgtgttggggcgtcgaaccggaaaactggtcggaagaatacgttttgcaacgctatgaaatgttgtatgaaagcggcctgatagaggaagccgccgagccgcaggcaaacttcgacttcgcgcttacggggcagcccatgcgccacgaccaccgccgcgtactggcgaccgccctgtcccgcctgcgcgccaaaatcaaataccgccccgtgattttcgaactgatgccgcccgaattcacgttgctgcaactgcaaaacagcgtcgaagccatcagcggcagattgctgcacaagcaaaacttccgccgccagattcagcagcaaaaccttatcgagccgtcggataccggcgtatcgggcagcaaaggccgtcccgcgcagctttgccgcttccgcgacgacgtcctgcccgacaggctgatttcggacatcggattgccgctgggcagccgttag

SEQ ID NO: 44202 - DNA, 2397 bp, Neisseria meningitidis; identical to SEQ ID NO: 39059

SEQ ID NO: 44203 - DNA, 1410 bp, Neisseria meningitidis
atgacagcacaaaccctctacgacaaactttggaacagccacgtcgtccgcgaagaagaagacggcaccgtcctgctctacatcgaccgccatttggtgcacgaagttaccagccctcaggcatttgaaggcttgaaaatggcggggcgcaagctgtggcgcatcgacagcgtcgtctccaccgccgaccacaacaccccgaccggcgattgggacaaaggcatccaagacccgatttccaagctgcaagtcgatactttggacaaaaacattaaagagtttggcgcactcgcctattttccgtttatggacaaaggtcagggcatcgtacacgttatgggccccgaacaaggcgcgaccctgcccggtatgaccgtcgtctgcggcgactcgcacacttccacccacggcgcattcggcgcactggcgcacggcatcggcacttccgaagtcgagcacaccatggcgacccaatgtattaccgcgaaaaaatccaaatccatgctgattgccgttgacggcaaattaaaagcgggcgttaccgccaaagacgtggcgctctacatcatcgggcaaatcggcacggcaggcggtacaggctacgccatcgagtttggcggcgaagccatccgcagcctttctatggaaggccgcatgactttatgcaatatggcgattgaggcaggcgcgcgctcaggcatggttgccgtcgaccaaaccaccatcgactacgtaaaagataaacccttcgcacccgaaggcgaagcgtgggacaaagccgtcgagtactggcgtacgctggtgtctgacgaaggtgcggtattcgacaaagaataccgtttcaaagccgaagacatcgaaccgcaagtcacttggggcacttcgcctgaaatggttttagacatcagcagcaaagtgccgaatcctgccgaagaaaccgatccggtcaaacgcagcggtatggaacgcgcccttgaatacatgggcttggaagccggtacgccattaaacgaaatccccgtcgacatcgtattcatcggctcttgcaccaacagccgcatcgaagacttgcgcgaagccgccgccatcgccaaagaccgcaaaaaagccgccaacgtacagcgcgtgttaatcgtccccggctccggtttggttaaagaacaagccgaaaaagaaggcttggacaaaattttcattgaagccggttttgaatggcgcgaaccgggctgttcaatgtgtctcgccatgaacgccgaccgcctcgcaccggggcaacgctgcgcctccacctccaaccgcaattttgaaggccgtcaaggcaacggcggacgtacccacctcgtcagccctgccatggcagccgcagccgcagtgaccggtcgctttaccgacatccgcatgatggcgtaa

SEQ ID NO: 44204 - DNA, 702 bp, Neisseria meningitidis
atgttccgcatcgtcaaatggctgattgccctgcccgtcggcatctttatctttttcaatgcctatgtgtacggcaacatcattacctaccgcgccgtcgcgccccatcggactgcctttatgtcgatgcggatgaagcagtttgaacaggaaggtcgcgatgtcgcactggattaccgctgggtgccctacaaccgcatctcggtcaacctgaaaaaagccctgattgcttccgaagatgcccattttgccgggcacggcggcttcgattggggcggcattcaaaacgccatcaggcgcaaccggaacagcggcaaagtgaaggcgggcggctcgaccatcagccagcagcttgccaaaaacctgtttttaaacgaaagccgcagctatatccgcaaaggcgaagaagcggcgattaccgcgatgatggaagccgttaccgacaaagacaggatttttgaactgtatttaaactcaatcgaatggcactacggcgttttcggcgcggaagccgcgtcccggtatttttatcaaatacccgccgccaagctgaccaaacagcaggcggcgaaactgactgcccgcgtccccgccccgctctactacgccgaccatccgaaaagcaaacggctccgcaacaaaaccaatatcgtgctcagacgcatgggttcggcagagttgcctgaaagcgacacggactga

SEQ ID NO: 44205 - DNA, 2382 bp, Neisseria meningitidis
atgaaaccattacaaatgctccctatcgccgcgctggtcggcagtattttcggcaatccggtctttgcggcagatgaagctgcaactgaaaccacacccgttaaggcagaggtaaaagcagtgcgcgttaaaggccagcgcaatgcgcctgcggctgtggaacgcgtcaaccttaaccgtatcaaacaagaaatgatacgcgacaacaaagacttggtgcgctattccaccgatgtcggcttgagcgacagcggccgccatcaaaaaggctttgctgttcgcggcgtggaaggcaaccgtgtcggcgtgagcatagacggcgtaaacctgcctgattccgaagaaaactcgctgtacgcccgttatggcaacttcaacagctcgcgtctgtctatcgaccccgaactcgtgcgcaacatcgacatcgtaaaaggggcggactctttcaataccggcagcggcgccttgggcggcggtgtgaattaccaaaccctgcaaggacgtgacttactgttgcctgaacggcagttcggcgtgatgatgaaaaacggttacagcacgcgtaaccgtgaatggacaaataccctcggtttcggcgtgagcaacgaccgcgtggatgccgctttgctgtattcgcaacggcgcggccatgaaactgaaagcgcaggcaagcgtggttatccggtagagggtgctggtagcggagcgaatatccgtggttctgcgcgcggtattcctgatccgtcccaacacaaataccacagcttcttgggtaagattgcttatcaaatcaacgacaaccaccgcatcggcgcatcgctcaacggtcagcaggggcataattacacggttgaagagtcttacaacctgcttgcttcttattggcgtgaagctgacgatgtcaacagacggcgtaacaccaacctcttttacgaatggacgccggaatccgaccggttgtctatggtaaaagcggatgtcgattatcaaaaaaccaaagtatctgcggtcaactacaaaggttcgttcccgatagaggattcttccaccttgacacgtaactacaatcaaaaggacttggatgaaatctacaaccgcagtatggatacccgcttcaaacgcattaccctgcgtttggacagccatccgttgcaactcggggggggggggcgacaccgcctgtcgtttaaaactttcgccagccgccgtgattttgaaaacctaaaccgcgacgattattacttcagcggccgtgttgttcgaaccaccagcagtatccagcatccggtgaaaaccaccaactacggtttctcactgtctgaccaaattcaatggaacgacgtgttcagtagccgcgcaggtatccgttacgatcataccaaaatgacgcctcaggaattgaatgccgagtgtcatgcttgtgacaaaacaccgcctgcagccaacacttataaaggctggagcggttttgtcggcttggcggcgcaactgaatcaggcttggcgtgtcggttacgacattacttccggctaccgtgtccccaatgcgtccgaagtgtatttcacttacaaccacggttcgggtaattggctgcccaatcccaacctgaaagccgagcgcagcaccacccacaccctctctctgcaaggccgcagcgaaaaaggtactttggatgccaacctgtatcaaagcaattaccgcaatttcctgtctgaagagcagaagctgaccaccagcggcgatgtcagctgtactcagatgaattactactacggtatgtgtagcaatccttattccgaaaaactggaatggcagatgcaaaatatcgacaaggccagaatccgcggtatcgagctgacgggccgtctgaatgtggacaaagtagcgtcttttgttcctgagggctggaaactgttcggctcgctgggttatgcgaaaagcaaactgtcgggcgacaacagcctgctgtccacccagccgttgaaagtgattgccggtatcgactatgaaagtccgagcgaaaaatggggcgtgttctcccgcctgacctatctgggcgcgaaaaaggtcaaagacgcgcaatacaccgtttatgaaaacaagggctggggtacgcctttgcagaaaaaggtaaaagattacccgtggctgaacaagtcggcttatgtgttcgatatgtacggcttctacaaaccggtgaaaaacctgactttgcgtgcaggcgtatataatgtgttcaaccgcaaatacaccacttgggattccctgcgcggcctgtatagctacagcaccaccaactcggtcgaccgcgatggcaaaggcttagaccgctaccgcgccccaagccgtaattacgccgtatcgctggaatggaagttttaa

SEQ ID NO: 44206 - DNA, 477 bp, Neisseria meningitidis
atgccgatagaaatcgaacgccgttttttgattggaaacgacaactggcggcaatacgccgacgaaccgctgctgttgaggcagggttatctgtctgttgaaaaagaacgcaccgtccgtgtccgcattgccggacaacgggcgtggctgacgctgaaaggctatatttcggaaatcagccgcagtgagtttgaatacgaaatcccgcttgccgatgcggaaaagatgatggaaacgatgtgcccgtttaaaatggaaaaatggcgttatccggtcagatggggcggcagcctgtttgaaatcgatgtttttcttggcgataatgcgcctttggtcgtcgcggaaatcgagttgcccgacgagaatgccgattttgaccgtccggactggctgggacgggaaatcactgccgacggtatgtttaccaatgcttatttgagcaaacatccgttctcaagctggaaaaatgccgtctga

SEQ ID NO: 44207 - DNA, 912 bp, Neisseria meningitidis
atggacaccctgttcagcctcaaggttttccgccaagtcgtccaaagcggcggcttcacccgcgccgccggcgcgctcggcatctccaccgcaatggcaagcaaacacgtcagccacttggaaaacaccgtccaagccaaactcctgcaccgcaacagccgcaacctcagcctgaccgaagccggggaagaatactaccggcaatgcagttacgcgctcgacacgctcgacgatgccgcgcaaaaagccgccggggggacggaaaaaccgcaggggctgctgcgcgtaacgatgccactgtggtttgccggcagccagatatgcaactggctggcggaataccgcgaacgttatcccgaagtgacattagaactgattttggacaaccgccacgtcgatttgattgccgaaggcgtggatttggcgttgcgcgtttcccaaaccctgtccccgtcgctgattgcgcgcccactggcggaaatcgaatttgccctgctcgcctcgcccgatttcctgaggcgcaacggcgtgccggaaacgccggaagaagtggcggggctgcccgccgtcctgccgacctacaccaaccagcagaaactcgacctcacccgcaaatcggacggcaaaaaataccggcttgaactgacccccgtcatccgtaccgacaacacgctgatgatgcgcgaaatgattaaggcgggcgcgtgcatcggttatcagccgctttgggcggcggaacacgatttgcgctgcggctcgctggtgaggctgctgcccgaatataccgtcccgaccgaccgcctgaatgccgtttatgcggacagggcgttcttaagcgcgaaagtccgcagcttcatcgattttctgaacgaaaaaatcgccagcaggaaaggctaccgaaatgccgtctga

SEQ ID NO: 44208 - DNA, 507 bp, Neisseria meningitidis; identical to SEQ ID NO: 38809

SEQ ID NO: 44209 - DNA, 1380 bp, Neisseria meningitidis
atgtttgctttcaaatccttactcgatatgccgcgcggtgaggcacttgccgtcgtcgtcgctctgattgccgcgatgggctataccatcatttcattggagtggctgccgcatatgtccattattgccgccatcgtcgtgctgattttgtacggcttggcgcgcggtttgaaatacaacgatatgcagcagggcatgataggcgcgttgaatcagggtatgggcgcgatttacctgtttttcttcatcgggctgatggtcagcgcactgatgatgagcggtgcgattccgacgctgatgtattacggtttcgggctgatttctccgacttatttttatttttccgccttcgcgctgtgttccgtcatcggcgtgtccatcggcagcagcctgaccacctgcgccactgtcggcgttgcctttatggggatggcggcggcgtttcaggccgatatggcgatgacggcgggcgcgattgtttcgggcgcattttttggcgacaaaatgtccccgctttcggatacgacgggtatttccgcgtccatcgtcggcatcgacttgtttgagcacatcaaaaatatgatgtacaccaccatccccgcgtggctcattagtgcggcactgatgctttggcttttgccgaatgtcgccgcgcaggatttgaacagcgtcgaatccttccgcagccagcttgaagccacgggattggtgcacggctattcgctgattccgtttgcgctgttggtcattttggcattgatgcgcatcaacgccgtcgtcgccatgctctttaccgtcatggttgccgttgctgtaacgtatctgcacagcacgcccgatctgcgtcagctcggtgcgtggttttacggcggctacaaactcgaaggcgaagcgtttaaagatgttgtcaaactgatttcgcgcggcggtttggaaagtatgtttttcacgcaaaccatcgtgattctcgggatgagtttgggcggactgttgtttgcgctcggtgtgattccttccctgttggaggccatccgtaccttcttgacgaatgccggacgcgcgacgttcagcgttgccatgacttcggtcggggttaatttcctgattggcgaacaatatttgagcatcctgctttctggagaaacgtttaaacccgtttacgacaggctcggactacattcccgcaatctgtcgcggacgctggaagatgcggggacggtgattaacccgctcgtaccgtggagcgtatgcggcgtgttcatcagccacgcgctgggcgtgccggtttgggaatatctgccgtatgcctttttctgctatttgagtttggctttgaccctgttattcggttggacggggctgactttgagcaaaaaataa

SEQ ID NO: 44210 - DNA, 483 bp, Neisseria meningitidis
atggctatcgtgaaaaattccgtggtttcgctgcattatgagatgtatgatgccaacaatcagcttttggacaaaaccgaagaaccgattgcgtatctgcacggcggttacgacggcattttccctttggtggaagaggcgttgcacggtaaggatgccggcgatacggtcgatgtggcgctgtcgcccgacgatgcgttcggcgagcaggatccggagttggtccgtattgaagatgcgggcgtgttccctgttgaagtcgaagtcggcatgatgtttgaagccgacgatcctgaaaccggcgatgttgtcgtctatcgtgtaaccgatgttgccgacggcaaggcggtggtggacggcaaccatcctttggcaggcatgaaaatccgctttaaggctacggttgaaagcgtgcgcgatgcatccgatgaggaaatcgcacacggtcatgtccacggcccgcacggtcatcaccaccactga

SEQ ID NO: 44211 - DNA, 300 bp, Neisseria meningitidis
atgaagaaaatgttcgtgctgttctgtatgctgttctcctgcgccttctcccttgcggcggtaaacatcaatgcggcttcgcagcaggagttggaggcgctgccgggcataggccctgcgaaggcgaaggccattgcggaataccgtgcgcaaaacggtgcgttcaagtctgtggacgatttgaccaaggtaaagggcatcggccctgcggtgctggcgaagctgaaggatcaggcttctgtcggcgcgcccgcaccaaaaggcccagccaaaccggctataccggccgctaaaaaatag

SEQ ID NO: 44212 - DNA, 735 bp, Neisseria meningitidis
atggcttcgcataatactacacatcagatgaaaacgctgtgttcttcctgttctttgcgggaactctgcctgcctgtcgggctgctgcccaacgagctcagccaactcgatgccgtcatccgtcaaagccgccgcctgaaaaagggcgaatacctgttctgtgtcggcgaagcctttacctcgctctttgccatccgttcgggcttcttcaaaacaaccgtcgccagtcaggacggccgcgatcaggtaacgggtttctttatgtcgggcgaactcatcggcatggacggcatctgttcccatgtgcacagttgcgacgcggtcgccttggaagacagcgaagtgtgcgaactgccgtttacccacatcgaagaactggggcagaatatccccagcctgcgtacctactttttccgcatgatgagtcgtgaaatcgtgcgcgaccaaggtgttatgctgctgttgggcaatatgcgcgccgaagagcggattgccgcctttctgttgaacctttcccaacgcctttattcccgaggttttgctgccaacgacttcatcttaagaatgtcccgcgaagaaatcggcagttatctcgggctgaaacttgaaaccgtcagccgcacattatctaaatttcatcaggaaggattgatttccgtcgaacacaaacacatcaagatcctcaatctgcaggtgttgaagaagatggtatccggttgttcgcacgccatttga

SEQ ID NO: 44213 - DNA, 825 bp, Neisseria meningitidis
atgaaatggctcttcacccttttggcggtactcaatattgccgtattcggcggcacggtgggctataaattggccgttaaagcgacgggcggcgtgccggaaaaccgggccgtcgaaaacacgccccccgcaacgcccgccgccgacaatgcggcggcatccgtggaggatacggcggcactgctcaaaccgggcgacatcctgaccgaagagcaggccgagcagttgcgcttgaaaaaggaagcggaacagaaaaaactgagggagaaaaaacagcgcgaggaaaaagcccgccgcgaaaaactcgccgccgaaaaggcgcaggcggaacgcgaaaacggcgcggcggatgccttatgcgccgcgcaggcaagcctcacgatggacgaagacgactaccaccgcatcaaagggcttttgggcaaatggtcgcacgttgccagcaggagcgtcgaaaaacgcaccgccaaagccaaacctgccgacaaaacctaccgcgtcgtcctgcccgtttccgccgatgccgaaaatcaggcggcggagctgtctgccaaaggtttcaaccccataccgtttgacggcgcattgagtttgggtgtcggcaacagccgggaaaacgcccaagccctgcaaaaccggcttgccggcgccggattcggcggggcgcatattgtcgaacactttgccgaagccgacaggcaggacgattctttgagcgtgtcgcgtatgacggttttgtttaccggcgtgaatgctgccgatgcggacgaaattcgtaaaatcacgtccctatacggcaaactgaacctcaagtcttgcaaatag

SEQ ID NO: 44214 - DNA, 948 bp, Neisseria meningitidis
atggaatttttcattatcttgttggtagccgttgccgttttcggcttcaaatcctttgtcgtcatcccacagcaggaagtccacgttgtcgaaaggcttggacgtttccatcgcgccttgacggccggtttgaatattttgattccctttatcgaccgcgtcgcctaccgtcattcgctgaaagaaatccctttagacgtacccagccaggtctgcatcacgcgcgacaacacccagctgacggttgacggcatcatctatttccaagtaaccgatcccaaactcgcctcatacggttcgagcaactacattatggcgattacccagcttgcccaaacgacgctgcgttccgttatcgggcgtatggagttggacaaaacgtttgaagaacgcgacgaaatcaacagcaccgtcgtctccgccctcgatgaagccgccggagcttggggcgtgaaggttttgcgttatgagattaaagacttggttccgccgcaagaaatccttcgctcaatgcaggcgcaaattactgccgaacgcgaaaaacgcgcccgtatcgccgaatccgaaggtcgtaaaatcgaacaaatcaaccttgccagtggtcagcgcgaagccgaaatccaacaatccgaaggcgaggctcaggctgcggtcaatgcgtcaaatgccgaaaaaatcgcccgcatcaaccgcgccaaaggtgaagcggaatccttgcgccttgttgccgaagccaatgccgaagccatccgtcaaattgccgccgcccttcaaacccaaggcggcgcggatgcggtcaatctgaagattgcggaacaatacgtcgctgcgttcaacaatcttgccaaagaaagcaatacgctgattatgcccgccaatgttgccgacatcggcagcctgatttctgccggtatgaaaattatcgacagcagcaaaaccgccaaataa

SEQ ID NO: 44215 - DNA, 1524 bp, Neisseria meningitidis
atgaccgtcatcaaacaggaagactttatccaaagcatttgcgatgccttccaattcatcagctactaccatccgaaagactacatcgacgcgctttataaggcgtggcagaaggaagaaaaccccgccgccaaagacgcgatgacgcagattttggtcaacagccgcatgtgtgccgaaaacaaccgccccatctgccaagataccggtatcgcgaccgtcttcctcaaagtcggtatggatgtgcagtgggatgcggacatgagcgtcgaagaaatggttaacgaaggcgtgcgccgcgcctacacttgggaaggcaacaccctgcgcgcctctgtcctcgccgatccggccggcaaacgtcaaaacaccaaagacaacacccccgccgtcatccatatgagcatcgtgccgggcggtaaagtcgaagtaacctgcgcggcaaaaggcggcggctctgaaaacaaatccaaactcgccatgctcaatccttccgacaacatcgtcgattgggtattgaaaagcatcccaaccatgggcgcaggctggtgtcctcccggcatcttgggcatcggcatcggcggcacgcccgaaaaagccgtgctgatggcaaaagagtccctgatgagccacatcgacattcaagagttgcaggaaaaagcagcgtcaggtgcagaattgtccaccaccgaagccctgcgcctcgaactctttgaaaaagtcaacgcgctaggcatcggcgcgcaaggcttgggcggtctgaccaccgtgttggacgtgaaaatcctcgattacccgacccacgccgcctccaaaccgattgccatgattccgaactgcgccgccacccgccacgtcgaatttgaattggacggctcaggccctgtcgaactcacgccgccgcgcgtcgaagactggcccgatttgacttacagccccgacaacggcaaacgcgtcgatgtcgacaagctgaccaaagaagaagtggcaagctggaaaaccggcgacgtattgctgttgaacggcaaaatcctcaccggccgcgatgccgcacacaaacgcctcgtcgatatgctcaacaaaggcgaagaattgcccgtcgatttcaccaaccgcctgatttactacgtcggccccgtcgatccggtcggcgatgaagtcgtcggtccggcaggtccgaccacagccacccgcatggacaaattcacccgccaaatgctcgaacaaaccggcctcttgggcatgatcggcaaatccgagcgcggcgtggccacctgcgaagccatcgccgacaacaaagccgtgtacctcatggcagtcggcggcgcggcgtatctcgtggcaaaagccatcaaatcttccaaagtcttggcgttccccgaattgggcatggaagccatttacgaatttgaagtcaaagacatgcccgtaaccgtcgccgtagatagcaaaggcgaatccatccacgccaccgccccgcgcaaatggcaggcgaaaatcggcatcatccccgtcgaatcttga

SEQ ID NO: 44216 - DNA, 753 bp, Neisseria meningitidis
atggatttggatttgttaagtgaagaagcccgccgcgaaatgctggcgtgtgctgaagaagccgtaccgtctgaaatgtgcggggttttggttttcagttatgaaggctatgagtttctgcctttgtccaattgcgccgaaaatccgcatgaaacctttgagatttccgctgacgactggatggcggcggagcgcgtcggcgagattgtggcagtcgtgcattcccatccgcgcggcgagccgtttttatcgggtgcagacagatggatgcaggtcgaaacgggcttgccttggattttggttacacaaggccgtctgaaactgttccgccccgttccgcatttgcgcgggcgtgtattcgaatacggcaagacggattgcggcgcgctggtgcgcgatgccttcatgctgatggggctggtttttcccgaccatccacgcggtgatatggatgaggacgcagcggcgggcttttgggaaaagcatttggaaaactgcgggttttcccgtgtttcagacggcctttgcgccggcgatgtggtcttgacggcaacgggcgggcatgcgtcccatgccgtcctgtatttgggcaacgactggatgctgcaccatgcctacaatcaattgagctgccgtgtaccttatacccgctattgggcggatgttacgcacagcgtttggcggcatcccgatttcgagccggccatgatgcaggcacttgagaacgattttacccatatggagcaagcatga

SEQ ID NO: 44217 - DNA, 1434 bp, Neisseria meningitidis
atgtctcaatatgatgtagtagtgattggtgcaggtccgggcggatacgttgccgccatccgtgccgcacaactgggtttcaaaactgcctgtgtcgatgcaggcgttaacaaagcaggcaatgcccctgccttgggcggtacttgcttgaacgtaggttgtatcccttctaaagccctgttgcaatccagcgaacatttccacgctgcgcaacacgattttgccgaacacggtatcactgtcggtgacgtaaaattcgacgcggccaaaatgattgagcgcaaagatgccatcgtgaccaaactgaccggcggcgtgaaattcctgttccaaaaaaataaagtaaccagtctgttcggtacggcttcctttgccggtaaaaatggcgatgcttaccaaatcgaagtcgataacaaaggagagaaaaccgttatcgaagccaaacacgtcatcgtagcgaccggttccgtaccgcgtccgctgccacaagtcgctatcgacaatgtgaacgtattggacaacgaaggcgcattgaacctgactgaagtacctgccaaactcggcgtgatcggttccggtgtgattggtttggaaatgggttccgtatggaaccgcgtgggtgcggaagttaccattcttgaagccgcgccgaccttcctggctgccgccgaccaacaaatcgccaaagaagccttcaaatacttcaccaaagagcaaggtctgagcatcgaattgggcgtgaaaatcggcgacatcaagtctgaaggcaaaggtgtttccgttgcttacgaaactgctgctggcgaagccaaaaccgaagtattcgacaaactgatcgttgccatcggccgtattccaaacaccaaaggcctgaacgcggaagccgtaggcttggaaaaagacgagcgcggctttatcaaagtagatggcgaatgccgtaccaacctgcctaacgtatgggcaatcggcgacgtggttcgcggcccgatgttggcacacaaagccagcgacgaaggcgttgccgttgccgaacgcattgccggtcaaaaaccgcatatcgacttcaacaacgtaccgttcgtgatttacaccgatcctgaaatcgcttgggtgggtaaaaccgaagagcagctcaaagccgaaggcgtggagtacaaaaaaggtacttcaggttttggtgcgaatggtcgcgcattggcaatgggcaaagccaaaggtacggttaaagtgttggcagacgccaaaaccgaccgcatcttgggcgtacacatgattggtccggttgtcagcgaattggttaccgaaggcgtgactgcgctcgaattcttcgccagcagcgaagacatcgcccgcattatccatgcccacccaaccttgtccgaagtggttcacgaagctgcattggcggccgacaaacgcgctttgcacggttga

SEQ ID NO: 44218 - DNA, 717 bp, Neisseria meningitidis; identical to SEQ ID NO: 39244

SEQ ID NO: 44219 - DNA, 1251 bp, Neisseria meningitidis
atgtttgttccgctggcaatgcttgcaggtatgttttcctactacgaaaccttccacgaaacggaagcgttgcaggacgacctgctccgtcaggcggcattgtacgtcgcccccgattccaaacccgaaactttgcccgagggcgacggcgatacgcgtattttggtacagatgccgcagcaggaagaccctgttgtcagcctgcctgcgcatctggcggacggtctgcacacgcttcaggcggacggggacgacgattattaccgcgtctatatccgcacgaccgaacagggacggattgccgttatgcaggaaaacgaataccgtgaagatttggcggcggatgcggcacggcaaagcgtgttgcccctgctggcggcactgccgctgatgatactgctgaccgtgtggattacgcacaaagccatgcgccccgtccgcaaattgtcgcaaagtctcgaacaacgccgaatcaatgacctgtctgccttgagtgtggacaatattcccagtgaaatcagagggttcgtaaccgccatcaacttgcttttgaaacgtgcggatgaagacatccgccaccgtcagcggtttgtcgccgacgcggcacacgaattgcgtacgccgatgacagccctttcccttcaggcggaacggctcaacaatatgtcgctcccacccgatgcagcgcggcagcctgccgttttgcagcagagcatcaggcgcaacaaacacctgctcgaacagcttttggcactggcgcgttcgcagtcggacgaaacccctctgacgaaaacgacattcggtctgcaaagccgtttccgccaagtgttgcaggaactgatgccgctggctttggaaaaacgtcaggacatcggtgtggcggtcagaggcgatgtcgaagtgtctgccgacgaaacagaaatctatacgctgattaaaacctttgccgataacgcggtacgttacacgccgcctgaaggcaggatagatttgggtttcacggacgaagggaaatatcttgccgtgtgggtggaagataacgggaacggcattcccgaatccgaacgcgcccgcgtcctcgatccgttttaccgtattttgggaatggagcagcaggggacggggctggggctgtccatcgccgacacgcttgccacagaatacggcagatatttggaattgtccgacagccgccggtttgggcgcgggctgctgatacgcgccttgttggacaaggaatccctgaaatag

SEQ ID NO: 44220 - DNA, 1422 bp, Neisseria meningitidis; identical to SEQ ID NO: 38326

SEQ ID NO: 44221 - DNA, 1212 bp, Neisseria meningitidis; identical to SEQ ID NO: 39492

SEQ ID NO: 44222 - DNA, 1065 bp, Neisseria meningitidis; identical to SEQ ID NO: 39469

SEQ ID NO: 44223 - DNA, 1518 bp, Neisseria meningitidis
atgttgtatttcagatacggctttttggttgtttggtgtgcggcaggtgtttctgccgcctatggggcggatgcgcccgcgattttggatgacaaggcattgttgcaggtgcagcggtcggtgtcggataagtgggcggaatcagattggaaagttgaaaatgatgccccgcgcgtggttgacggggattttttgttggcacatccgaaaatgttggaacatagtttgcgcgacgcgctcaacggcaatcaggcggatttaatcgcttcgttggcggatttgtatgccaagctgccggattatgacgcggttttgtacggcagggcgcgggctttgctggcgaaattggcgggaaggccggcggaggcggtggcgcggtatcgggaactgcacggggaaaatgcggcagacgagcggattttgctggatttggcggcggcggagtttgacgatttccgactgaagtcggcagaaaggcattttgcggaggcggcaaaattggatttgccggcaccggttttggaaaatgtggggcgttttcggaaaaaaacggaggggctgacgggctggcgtttttcgggcggcatcagtccggcggtcaatagaaatgccaataatgccgcgccgcagtattgccggcaaaacggaggccggcagatatgcagtgtcagccgggcggagcgggcggcagggttgaattatgaaatcgaggcggaaaaactgacggcgttggcagataatcattatttgttgttccgttccaatatcggcggcacgagctattatttcagtaaaaaatcagcttatgacgacgggttcggcagggcgtatttgggttggcagtataaaaatgcacggcagacggcggggattttgccgttttatcaggtgcagttgtcgggcagcgacggctttgatgcgaaaacaaaacgggtaaacaaccgccgcctgccgccgtatatgctggcgcacggagtcggcgtgcagctgtcccatacttaccgaccaaacccgggatggcaattttcggtcgcgctggaacattaccgccaacgctaccgcgaacaggatagggcggaatacaataacggcaggcaggacgggttttatgtttcgtcggcaaaacgtttgggcgaatcggcaactgtgttcggcggctggcagtttgtgcggtttgtgccgaaacgcgaaacggtgggcggcgcggtcaataatgccgcctaccggcgcaacggtgtttatgccggctgggcgcaggagtggcggcagttgggcggtttgaatagtcgggtttccgcgtcttatgcccgccgcaactataagggcgttgcggctttctcgacagaggcgcaacgcaaccgcgaatggaatgtctcgctggctttgagccacgacaagttgtcgtacaaaggtatcgtgcccgcgttgaattatcgtttcggcaggacggaaagtaatgtgccgtatgcgaaacgccgcaacagcgaggtgtttgtgtcggcggattggcggttttga

SEQ ID NO: 44224 - DNA, 597 bp, Neisseria meningitidis; identical to SEQ ID NO: 38176

SEQ ID NO: 44225 - DNA, 153 bp, Neisseria meningitidis; identical to SEQ ID NO: 38893

SEQ ID NO: 44226 - DNA, 1356 bp, Neisseria meningitidis
atgaaagcacccgaactcttattgcccgccggcggattggaaagaatgcgcgccgcctacgattacggcgcagatgccgtttacgccggcagcccgcgttactccctgcgcgcccgcaacaacgaatttgccaaacttgatgttttagaacaaggcattaaagaagcgcacgatcgcaacaaaaaattctttttgaccgtcaacaccctgccgcacaattccaaactcaaaacctttgtttccgatatggaacccttgattgccatgaaacccgacgcgctgattatggcggatccgggtttgatcatgaccgtgcgcgaaaaatggccggaaatgccgatccacctgtccgtacaagccaacaccaccaactactggggcgtgaaattctggcagaatatcggcgtcgaacgcatcatcctgtcgcgcgaattgagtatggaagaaatcgccgaaatccgccaacaatgccccgacatcgaactcgaagtcttcattcacggcgcattgtgcatcgcctactccggccgttgcctactctccggctacttcaaccaccgcgaccccaatcaaggcacctgcaccaactcctgccgttgggactacaaagtccacaacgctacggaaagcgatgcgggcgatgcccagcttctgcaaggtttcaactttgaaaaagcccaagaagaagccaaccaaaactttgaaggcatcaacggtcaaaaacgccatccctacgccgacaaggttttcctgattgaagaatccaaccgtccgggcgagatgatgccgattatggaagacgaacacggcacctacatcatgaactccaaagaccttcgtggcattgaagtggttgagaaactcgccaaaatcggcgtggacagcctcaaagtcgaaggccgcaccaagtcgctctattatgtcgcacgcgtggctcaatcctaccgcaaagcgattgacgatgccgtcgcaggccgtccgtttgattacagcctgttgagcgaactcgaaggccttgccaaccgcggctacaccagcggcttcctcgaacgccaccacactcaggattatcaaaactacctgaccggccattccaccgccaaacaaagccaatacgtcggacacgttaccgaaatcgacaaaaacggctgggcaacagtggaagtcaaaaaccgcttcgccgtcggcgattcactcgaaatcatccacccgggcggcaaccaaaccatcaaattggaacaaatgacccgcaaaggccagcctgtcgatgtcgcacccggcaacggcattcaggtcaaaatccccaatatgcaaggtaaagaaaaagccctcatcgcacgcgtattgaacccctaa

SEQ ID NO: 44227 - DNA, 126 bp, Neisseria meningitidis; identical to SEQ ID NO: 42488

SEQ ID NO: 44228 - DNA, 429 bp, Neisseria meningitidis; identical to SEQ ID NO: 38929

SEQ ID NO: 44229 - DNA, 2664 bp, Neisseria meningitidis
atgtccacccaattacacgatgttgaccctatcgaaacccaagagtggctggacgcgttaagctccgtcctcgaatatgaaggcggcgaacgcgcgcaatacctcttggaaaacctggtcaaatactgccgcgacaagggcgtacgtatgccacacggcacgaccacaccgtatttgaataccgtttcggttgaaaacgaaaaaggcattccgggcgaccaaaacatcgaacaccgcatccgcgcattcgtgcgctggaacgccgccgccatcgtattgcgcgccggcaagaaagatttggaactgggtgggcacatcgcatctttccaatctgccgccaccatgtacgaagtcggtttcaaccacttttggaaagccaaaggcgaaggcgaagaaggcgatttggtcttcttccaaggtcacgtcgccccgggcatctatgcacgcgcattcgtcgagggccgtctgaccgaagaccagctgaacaacttccgccaagaagtggacggacacggtctgccttcctatccgcacccccacctcttgcccgacttttggcagttcccgaccgtatccatgggcttggggcccatcatggcgatttatcaggcgcgtttcctgaaatacttggaatcgcgtggtttggcaaaaaccaaaggccgtaaagtatggtgtttctgcggcgacggcgaaatggacgaacccgaatctcaaggtgcaatcgcactggctgcacgcgaaggcttggacaacctgattttcgtcatcaactgcaatctgcaacgcttggacggtccggtacgcggcaacggcaaaatcatccaagaattggaaggcaactttgccggcgccggctggaatgtcgtcaaagtcatttggggccgccgctgggaccgcctcttggcgaaagacaaagacggtatcctgcgccaacgtatggaagaatgtttggacggtgactaccaaacttacaaatccaaagacggcgcgtatgtgcgcgaacacttcttcaatacgcccgaactgaaagcattggttgccgatatgaccgatgagcaactctgggcattgaaccgcggcggccacgacccgcaaaaagtgtacaacgcctacgaccgcgcagcgaaccatgccgacggcaaacctaccgtcatcttggcgaaaaccattaaaggttacggtatgggcgcatccggcgaaggtcagaacgttgcccaccaagccaaaaaaatggacaaagcgtccctgaaacaattccgcgaccgctttgacattccggttaccgacgaacaaatcgaaagcggcgatctgccttacctgacttttgcccccgatacggaagaatacaaatacctgcacgcacgccgcgatgctttgggcggctacctgccgcaacgcaaaccgacgcaggaagtattggaagtgcccgagctgtcagcattcgacgcacaactcaaatccagcggtgaacgcgagttctcgaccacgatggcattcgtccgcatcctgtccactttgctgaaagacaaaaaaatcggcaaacgcgtcgtacctatcgttcccgacgaaagccgtactttcggcatggaaggtatgttccgccaatacggtatttggaatccgaaaggtcagcaatatacccctcaagacaaagaccaactgatgttctataaagaatccgttgacggtcaaatcttgcaagaaggtattaacgaaccgggcgcgatggccgactggattgcggctgcaaccagctacgccaacagcaacttcgcgatgattccgttctacatttactattctatgttcggtttccaacgtatcggcgacttggcttgggcggcgggcgatatgcacgcgcgcggcttcctgctgggcggtactgccggccgtacgacgctgaacggcgagggcctgcaacacgaagacggccacagccacatccaggccgacctgattccgaactgcgtatcttatgacccgactttccaatacgaagtcgccgtcatcgtacaagacggtctgcgccgtatgtatgccaataatgaagacgtgttctactacatcaccctgatgaacgagaactacacccatccggatatgcccgaaggcgcagaacaagacatcttgaaaggtatgtacctgctgaaagccggcggcaaaggcgataagaaagttcaattgatgggctccggtaccatcctgcaagaagtcattgccggtgccgaattgctgaaagccgacttcggcgtggaagcagacatttggtcttgcccgtccttcaacctgctgcaccgcgacgctgtcgaggtagaacgcttcaaccgcctgcatccgctggaagccgaaaaagtacctttcgttacttccaaattgcaaggtcatgacggtccggttattgccgctaccgactatatccgcagctatgctgaccgtatccgcgcctacatcccgaacgactaccacgtcttgggtactgacggcttcggccgctccgacagccgcgccaacctgcgccgcttctttgaagtggatcgctacaacgttgccgtggcagcattgagcgcattggcggaacaaggcaaagtcagcaaagaaaccgttcaacaagccattgagaaatacggcatcaaagccgattcagctcctagctggaaacgctga

SEQ ID NO: 44230 - DNA, 186 bp, Neisseria meningitidis; identical to SEQ ID NO: 38247

SEQ ID NO: 44231 - DNA, 627 bp, Neisseria meningitidis
atgaacgttaatgttatcaaccatccgctcgtccgccacaaattaaccctgatgagggaggcggattgcagcacctacaaattccggacgcttgccatcgagctggcgcgcctgatggcatacgaggcaagccgtgattttgaaatcgaaaaataccttatcgacggatggtgcggtcagattgaaggcgatcgcatcaagggcaaaacattgaccgtcgttcccatcctgcgtgcaggtttgggtatgcttgacggcgtactcgacctgattccgactgccaaaatcagcgtagtcggactgcagcgcgacgaggaaacgctgaaacccgtttcctacttcgagaaattcgtggacagcatggacgaacgtcctgccctgattatcgacccgatgctggcgacgggcggttcgatggttgccaccatcgacctgttgaaagccaagggctgcaaaaacatcaaggcactggtgctggttgccgcgcccgagggtgtgaaggcggtcaacgacgcgcatcccgacgttacgatttacaccgccgcgctcgacagccacttgaacgagaacggctacatcatccccggcttgggcgatgcgggcgacaagattttcggcacgcgctaa

SEQ ID NO: 44232 - DNA, 825 bp, Neisseria meningitidis
atgattaagaagacaatcggcggcatcataccgatttttacggcggttttcatccctgcatcagcaggcgcggcggatttgatgctggcgcaggaatacaaagggcaggacattgcaggctgggcgatgagcgagaaactcgacggcgtgcgcgcgtattgggacggtaaacatttagtcagccggcaaggatatgtatttacaccgcccaaaggctttaccgcgcagtttccgccttatcctttggacggcgaattgtatagcggacgcggtcagttcgagcagatttccgctaccgtgcgttctgcttcttcagactggcgcggtatccgcctgcacgttttcgatgtacccaaggcgcagggcaatctctaccaacgtttggcagtcgcaacgcagtggctgaaaacgcatccgaacgcgccgattaccatcatcccacaaatcaaagtgcgcgaccggcagcacgcgatggactttttaaaacaaatcgaagcgcagggcggcgaaggcgtgatgctgcgtcagcccgaatcccgttacagcggcggcaggagcagccaattattgaagctgaaaagccaatacgacgacgaatgcacggtaacgcggcactatgagggcaaagggcgaaacgccggacggttgggcgcggtcggctgcaaaaaccggtacggcgaattccgcattggcagcggcttcaaagataaagaccgagacaacccgcccaaaatcggcacactgattacctaccgctaccgtggctttacgcagaaaggcacgccgaaattcgccacgtttgtgcgcgtgcgtaccgaccgctga

SEQ ID NO: 44233 - DNA, 537 bp, Neisseria meningitidis
atgcaggcaatttctcccgaattacaggcgcgcgccgccaaaatcaaactgttgatcctggatgtggacggcgttttgaccgacgggcgcatctttatccgcgataacggcgaagaaatcaaatcgtttcacacactggacggacacggtctgaaaatgcttcaggcaagcggcgtgcagactgcgattatcacaggtcgggacgcgccctccgtcggcatccgcgtcaaacagttgggcataaattactacttcaaaggcatttcggacaaacgcgccgcgtatgaagagctgcgcgctcaggtcggcgtggaagaagccgagtgtgcctttgtcggcgacgacgtggtcgatttgccggtgatggtgcgttgcggattgccggttgccgttcccgacgcgcattggtttacgctgcaacacgccgcctatattgccaaacgccccggcggtgcgggcgcggtgcgcgaagtgtgcgacctgattatgcaggcgcaagggactttgggcgcggctttgaacgagtacatcaaatga

SEQ ID NO: 44234 - DNA, 1203 bp, Neisseria meningitidis
atgaagaactaccacgcgcccgacgagaagggctttttcggcgaacacggcgggctgttcgtgtccgagaccctgattccggctttgcaagagctggcggatgcctataaggcagcgaaaaacgatcctgaattttgggaagcgttccgccatgatttgaaacattatgtcggcaggcccagccccgtttaccacgccgcgcggttgtccgaacatctgggcggtgcgcaaatctggttgaagcgcgaagacttgaaccacaccggcgcgcacaaagtcaacaacaccatcggtcaggcactgttggcaaaacgcatgggtaaaaaacgcgtcatcgccgaaaccggcgcgggtcagcacggcgtggcgagtgccaccgttgccgcacgcttcggtatgacttgcgacgtgtatatgggcgcggacgacatccaacgccaaatgcccaacgtgttccgtatgaaattattgggtgcgaacgtggttggtgtagaaagcggcagccgcacgctgaaagacgcgatgaacgaagccatgcgcgaatgggtcgcccgcgtggacgacacgttctacatcatcggtaccgccgccggccccgcgccgtatcccgaaatggtgcgcgatttccaatgcgtgattggcaacgaagctaaagcgcagatgcaggaagccatcggcagacagcccgacgttgccgttgcctgcgtgggcggcggatcgaacgccatcggtttgttccacccgtatatcggcgaagaaaacgtgcgcctcgtcggcgtggaggctggcggtttgggcgtgaacacccccgatcacgccgcgccgattacttcgggcgcaccgattggcgtattgcacggtttccgcagctatctgatgcaggacgaaaacggtcaggttttgggtacgcactctgtttccgcaggcttggattaccccggcatcggcccggaacacagccatctgcacgacatcaagcgcgtcgaatacactgttgccaaagacgacgaagcactcgaagcctttgacttgctctgccgcttcgagggcatcatccccgcgctcgaatccagccacgccgttgcttgggcggtgaaaaacgcgccgaaaatgggcaaagaccaagtgattctggtcaacctatccggtcgtggcgacaaagacatcaataccgtcgcgaagctcaaagggattaaactgtaa

SEQ ID NO: 44235 - DNA, 687 bp, Neisseria meningitidis
atggaaacctttaaagacagactggtttttttatggaaaagcgaagcgaagcaggcaaaaatcgcatccgatattgaaatgacgattgcgggcttcagcaggatatggaatgaaggcggtctgccgaagtctgaaacattaaaaaaaatcaagcagttgaaggggtgtagtatcgattggctgctgaccggggagggtaatccgtttccggatgaagccccaaaaaaatcccttgcttacgataccttgggaaatgaagtcgatacggacgagtttgtctttgtgccgagatatgatattcgggcggctgcgggatacgggcagtttgtcgatcatgaggaaccggtatttacaatggcgttcagacggcattggattgagaattatgttacccgcaatacgaaaaacctgtctgtaatttccgtcaagggggattcgatggagggggttttgaatgacggcgattcgattttggtcaaccatagcgagaatacgccgagggacggactgtatgtgttgcggattaatgaaaatctgctggttaaacgtttacagattgtaccgggcgggataatcaacgttatttccgccaacgaggcttaccctgcttttgaaattaatttgaatcatcctgccgatgatgtggaaatcatcgggcgggtcgagtggttcggcaggacgatttga

SEQ ID NO: 44236 - DNA, 639 bp, Neisseria meningitidis; identical to SEQ ID NO: 39626

SEQ ID NO: 44237 - DNA, 240 bp, Neisseria meningitidis
atgggtctaaaaatgaacaaacgacgagcagaaataatatttgtaaacggcaaatggctggttaattgttattcatacggaatttttgtaacagaagccgaatttgatacgctttttttggctttgggttctgcccgccaatatatcgaatcgggcgaaattgtttctttgtccgtttgcgatgtttttttagctttgggcagtcgagaatcacgccgctcgttcggcttgtgtaactga

SEQ ID NO: 44238 - DNA, 171 bp, Neisseria meningitidis; identical to SEQ ID NO: 37387

SEQ ID NO: 44239 - DNA, 390 bp, Neisseria meningitidis
atgacgggtttcaagattggggtgttgtcgggaatgacgaatccatccatacggaaacctgcaccacgtcattcccacgaaagtgggaatctagaatctcgggggtttcagtcatttccgatagattcccgccgcgtcaggggtctggattcccgcctgcgcgggaatgacgaatttcgagattgcggtattgtcgggaatggcgggtttcaagattgcggtattgtcgggaatgacgggtttcaagattacggtgttgtcgggaatgacggttcgggtatttccacgcccgccccgcgtttgtcaacggcaggtgcatcaaaaatgccgtctgaaggttcagacggcatcggtatcggggaatcagaagcggtagcgcatgcccaatga

SEQ ID NO: 44240 - DNA, 1836 bp, Neisseria meningitidis
gtgaacactactcctatccactccaaactcgccgaaatcaccgggcgcattattgaacgcagccgtccgacgcgtgaaaaatatctggcgaagatccgcagtgccaaacaaatgggacgcttagagcgcaaccagctcggctgcagcaacttggcacacggctatgctgccatgcctaaaagtatcaaaatcgaaatgcttcaggaaaccgtccccaacttaggcatcatcaccgcctacaacgacatggtttccgcacaccagccgtttaaagacttccctgaccaaatcaaagacgaagcgcagaaaaacggcgcgaccgcccaagtcgccggcggcacgcccgccatgtgcgacggcatcacgcaaggctacgccggcatggaactgtcgctgttctcccgcgacgtgattgccatgagtaccgccgtcgggctgtcgcatcaaatgtttgacggcagcctgtttatgggcgtatgcgacaaaatcgttccgggtttgatgataggcgcgctttcgttcggtcatattccgggtatcttcgtccccgcaggcccgatgtccagcggtatcggcaacaaagaaaaagcccgcacccgccagcttttcgccgaaggcaaggtcggacgcaacgaacttttgaaaagcgaaatgggttcttaccacagcccgggcacctgcactttctacggcacggcaaactccaaccaaatgatgatggaaatgatgggcgtgcacctgcctgccgccgccttcgtccacccttacaccgacctgcgcgaagcgctgactcgctacgccgccggacacctcgcgcgcggcatcaaaaacggcacgattaaacctttgggcgaaatgttgaccgaaaaatcctttatcaacgccttgattggcctgatggcaaccggcggttcgaccaaccacaccatgcacctcgtcgctatggcgcgtgcggccggcgtgattttgaactgggacgacttcgacgaaatttcctccatcatcccactactcatccgcgtttatccgaacggcaaggccgacgtgaatcactttaccgcagcgggcggactgcctttcgttatccgcgaattgctgaatgcaggcctgttgcacgacgatgtcgataccgtcgtcggacacggtatgcgccactacaccaaagagcctttcctcatcgacggcaaactcgaatggcgcgaagcccccgaaaccagcggcaacgacgacatcctgcgtaaagctgacaacccgttctcccccgacggcggtctgcgcctgatgaaaggcaacatcggacgtggcgtgattaaagtgtccgccgtgcgcgaaggctgccgcattattgaagcgcctgccatcgtgttcaacgaccaacgcgaagtgttggctgcgtttgaacgcggcgagttggaacgcgattttgtgtgcgtcgtccgctaccaaggcccgcgtgccaacggtatgcccgaattgcacaaactgaccccgcctttgggcatcctgcaagaccgcggcttcaaagtggcactgctgaccgacggtcgtatgtccggcgcatccggcaaagttccggcctccatccacatgacgcccgaagccctgatgggcggcaacatcgccaaaatccgtaccggcgacctgatccgcttcgactccgttagcggcgaactcaacgtcctgattaacgaaaccgaatggaatgcccgcgaagtcgaaagcatcgacttgggcgcgaaccaacaaggctgcggccgcgaacttttcgccaacttccgcagcatgaccagcagcgccgaaaccggcgcgatgagcttcggcggcgaatttgcctga

SEQ ID NO: 44241 - DNA, 648 bp, Neisseria meningitidis
atgaaaacaaaattttacaatcatcaaggcggacatttaatcctgtattttgcaggttggggaacgccgcccgatgctgtaaatcatttgattttgccggaaaatcacgatttattgatttgctacgattatcaagatttaaatttggattttgatttttccgcctatcggcacatccgtttggtggcgtggtcaatgggcgtttgggcggcagagagggcattgcaaggaataagattaaaatccgcaacggcagtgaatggcacaggtttgccttgcgatgataatttcggtatcccttgcgccgtttttaaaggcacattggagaacctcacggaaaacacccgtttaaaatttgaacgcagaatgtgtggcgataaagtatcttttgaagattaccaacaatttcccgcacgcccgtttgacgaaattcatcaagaacttaccgcactttttgagatgatcgggcaagataggcgcgcagatttgattcgctggacaaatgccttggtcggatcaggcgataaaatttttatgcctgccaatcagcaccgatattggacaccgcgttgcaccgttcgggaaattgacggcggacattacctgttttcaagattcacccattggtcggcactatggaatcactga

SEQ ID NO: 44242 - DNA, 729 bp, Neisseria meningitidis
atgtctcaaattactatgcgtcagatgattgaagccggtgtccacttcggccaccaaacccgtttctggaacccgaaaatggctcaatacattttcggtgcgcgcaacaaaatccatatcgtcaacctggaaaaaaccctgccgatgttccaagacgcgcaagaagccgtacgtcgtctggttgccaacaaaggtacagtattgttcgtaggtaccaaacgccaagcccgcgacatcatccgcgaagaagcgacccgcgccggcatgcctttcgtcgatcaccgttggttgggcggtatgctgaccaactacaaaaccgttaagcaatccatcaaacgcctggaagaaaaaaccgcagccttggaaaatgctgccgaaagcggtttcagcaaaaaagaaattctggaaatgcaacgcgatgttgaaaaactggaacgttctttgggcggtatcaaaaacatgaaaggcctgcccgacgcgattttcgttatcgataccggctaccaaaaaggtactctggtcgaggctgaaaaactgggcatccccgttatcgccgtagtcgataccaacaacagccctgacggcgtgaaatacgtcatccccggcaacgacgactccgccaaagccatccgcctgtactgccgcggcatcgctgacgcagttttggaaggcaaaaaccaagcgctgcaagaaaccgtagccgctgcccaagaagccgctgccgagtaa

SEQ ID NO: 44243 - DNA, 123 bp, Neisseria meningitidis; identical to SEQ ID NO: 38734

SEQ ID NO: 44244 - DNA, 2016 bp, Neisseria meningitidis; identical to SEQ ID NO: 39431

SEQ ID NO: 44245 - DNA, 324 bp, Neisseria meningitidis; identical to SEQ ID NO: 38645

SEQ ID NO: 44246 - DNA, 978 bp, Neisseria meningitidis
atgcaagaaaacccgaccgtgtggctgttcgacctcgacaacacgctgcacaatgccgatgccggcatcttcacactcatcaaccgcgccatgacacgctatatggcacgccgcctcaaactctccgaatctgccgcgtccgacctgcgtcaagactattggcaccgctacggcgcaacgctcgccggactgcaaatccaccatcccgaaatcgacatcgccgaatttttgcgcgaaagccatccgatcgatgcaatcctgaccaggctgcacggcatgcctgaaacacaaaacaccctgagccgcctaaaagggcgcaaggcggttttttccaacggcccgtcgttttacgtccgtgccgttgtcaacgcactcggtttggaaaaccgtttcgacgcgcttttcggcacggatgatttcgggctgctgtacaaacccaatccgcaagcgtatctcaatgtctgccgcctgttggacgtaccgcccgaatgctgcattatggtggacgacagcgcggacaacctgcatcaggcaaaggcgctgggtatgaaaaccgtccggttcggtgcaaaatcccacgcgctgccctttatcgatgcctccgtaagcgatatggcgcaactggctcggtatgcagaaactttgtcagaacaccgccaaaatcattacaataccccctaccccccgaaaatacgaaagaatgttatgcgtaaaaccttccttatcctgatgactgccgccgcccttttgtcgggctgcgcgtgggaaacttatcaagacggcaacggcaagaccgccgtccgtcaaaaatatcccgccggcacgcccgtttattaccaagacggcagctactcgaaaaatatgaactacaaccaataccgccccgaacgccatgccgtgctgcccgaccaaaccgacggttccgaacaagacgtacgcggacagaactggcaaaagcccaaatttcaaaaccgataa

SEQ ID NO: 44247 - DNA, 660 bp, Neisseria meningitidis
atgaaaaccgccattttgattgacggtgcattttttattaagcgggtacggtcattaggcctgtctcaaaatccacacgatgcaaaaagaattgctgatttggctttccgatattcgatgctgcatctgaaagataaaatcaacggcacagatcaaatggatgatttatatagaattttcttttacgactgcgtgccgtttgaaaagaaaatgcacaatcccgtatctcatcgtgccatagatttttcaaagactccggaagccatatttcgttgcaatctgcataccgaattgaagaagaagcgtaaattagcgttacgtttaggcaagctgtcggacaatacagcatggatattaaaaccccaagtcatgaaaaatcttctgaaaaacccgtcaactcaaattacggaaaacgatgtcgtgctcgatgttaaacaaaaaggtgtagatatgcgtataggcttggatatttcatctattaccttaaaaaaacaagccgataaaatcatcttgttttctggtgattccgattttgtcccagcagccaaattagccagacgggaaggtatcgattttattcttgatcctatgtggaatcatgtcccacctgacttaatggaacacatcgacggattgaagacaaaatgtccgaaaccgtaa

SEQ ID NO: 44248 - DNA, 1554 bp, Neisseria meningitidis
atgaaccggacttatgccaatttctacgaaatgctcgccgccgcctgccgcaaaaacggcaacggcacggcagtgttcgacggcaaggaaaaaaccgcctaccgcgcgctcaagcaggaggccgaagccgtcgcggcgtatctgcaaaatatcggcgtgaagttcggcgacacggtcgcgctggcggtttccaattccacagaatttattaccgcctatttcgccgtctccgccatcggcgcggtcgccgtaccgatgaacacatttttgaaaaacagcgaatacgcgtatatcctgaacgactgcaaggcgcgcttcctgttcgcctcggcgggcctgtcaaaagagttggcgggcttgaaggcgcaaacgcccgtcgaaaaaatcatttggacggacaaaagccgtccggccggcgaaatggcagaaggcgatgccttttttgaagacgtgcgccgcttccccgaaaaacccgacttgggccgccaaccccggataaatgatttggcacacatcatctacacctccggcacgacggggcatcccaaaggcgcgctaatcagttacgccaacctgttcgccaacctgaacggcatcgaacgcatctttaaaatctccaagcgcgaccgctttatcgttttcctgccgatgttccacagcttcacgctgacggctatggtgctgctgccgatttatatggcgtgttcgattattttggtcaaatccgttttcccgttttccaacgttttgaaacaggccctgctcaaacgcgcgaccgtgtttttgggcatacccgcgatttacaccgcaatgagcaaggcgaaaatcccttggtatttcagatggttcaaccgcattcgcctgtttatcagcggcggtgcgcctttggcggaacaaaccatcctcgatttcaaagccaagttcccccgcgccaaattgctggaaggctacggactgagcgaagcctctcccgtcgtcgccgtcaatacgcccgagaggcaaaaagcccgcagcgtcggcatccccctgcccggtttggaagccaaagccgtcgatgaagaattggtcgaagtgccgcgcggcgaagtgggcgaactgatcgtcaggggcggttcggtgatgcggggctacctcaatatgcctgccgccaccgatgaaaccatcgtcaacggctggttgaaaacgggcgatttcgttaccatagacgaagacggctttatctttatcgtcgaccgcaaaaaagatttgattatttccaaaggtcaaaacgtctatccgcgcgaaatcgaagaagaaatctacaaactcgatgccgtcgaagccgctgccgtcatcggcgtgaaagaccgttatgccgacgaggaaatcgtcgccttcgtccaattgaaggaaggtatggatttgggcgagaacgaaatccgccgccacctgcgtaccgtgctggcaaatttcaaaatccccaaacaaatccactttaaagacgggctgccgcgcaacgctacgggcaaggtattgaaacgggtgttgaaggagcagtttgacggaaacaaatga

SEQ ID NO: 44249 - DNA, 318 bp, Neisseria meningitidis; identical to SEQ ID NO: 39139

SEQ ID NO: 44250 - DNA, 1335 bp, Neisseria meningitidis
atggcaaaaaaatatttcggcacggacggcgtgcgcggcgaagtggggcaatttccgattacgcccgatttcgtattgaaactcggctatgcggcggggcaggttttggtgcagcacgacaccgaccagaaaccgaccgtcctcatcggcaaagacacgcgcatttccggctatatgctggaagccgctttggtggccggttttacggcggcgggtgtgaatgtggtacagaccggaccgctgcccacgcccggcgtggcttatctgacccgcgcgttgcgcctgtccgccggcgtgatgatttccgcgtcgcacaacgcctattccgacaacggcatcaaattcttcgccgaaggcggcgtgaaactttccgatgaagtcgagttggaaatcgaagccaaaatcgacggcgaaatgaaaacccaaccgtccgcccgtctcggtcgcgcacgccgcatcagcggtgcggacgaccgctatatcgaattttgcaaatccacctttcccagccattccgaccttcggggtttgaagttggttgtcgataccgccaacggcgcggggtacggtgtcgcccccaaggtgtttcacgaactgggcgcacaggtcgtcagcatcggcaacgaacccaacggctacaacatcaacgaaaaatgcggtgcgacttataccaagacactccaggccgccgttttacagcatgaagccgactacggcatcgccttagacggcgacggcgaccgcctgatgatggtcgataaaaacgggcaggtttacgacggcgacagcctgatttacgtcattgccaaagcccgcgcccgagaaggtatcaacatcggcggcgtggtcggcacggtcatgaccaatatggcgatggaaatcgccctgaaagagcagggcgtggatttctgccgcgccaaagtcggcgaccgctatgtgttggcacagctgaaccaacgcagctggctcatcggcggcgaagccagcggccatattttgtgcatggacaaacacaacaccggcgacggcattatttccgcgctgcaagttttggcggcactgcaaacgctgaaccaagacctcgccaccgtttgcgccgattggcagccgtatccgcaaacgatgattaacgtgcgcatccaaaaaggtcagaaatggcaggaagcctcaaaagacgtgttggcggaagtggaaaaagaactcgaaggcaaagggcgtgtcgtgttgcgcgcttcgggaaccgaacccgtcgtgcgtgtgatggtggaggcgcggcaggcggattgggcgcgcgacggtgcggaacgtattgcttccgccatcggcagcctttag

SEQ ID NO: 44251 - DNA, 255 bp, Neisseria meningitidis
ttgtcggctcaaaactacgcccgcgaactggaacaggcgcgcgcggaagcgaaaaaatatgaagtcaaggcgcacgccgtcggcatggctttggcgaaaaaacaggcggaagtcagccgtctgaaaacggaaaataaaaaggaaatcgaaaatgtccttactcaagaccgtaaaaatgcaggcgacggttgtattgacggctttggccatcacggcttgcagctctacaagcgcgccctcggctacggaaattaa

SEQ ID NO: 44252 - DNA, 2058 bp, Neisseria meningitidis
atgcccgaacaaaaccgcatcctctgccgcgaactaagcctgctggcattcaaccgccgcgtgttggcacaggcggaagacaaaaacgtcccccttttggaacgcctgcgcttcctgtgcatcgtgtcgtccaatcttgacgagtttttcgaagtccgcatggcgtggctcaagcgtgaaaacaagctgcacccccggcgcaggctggacaacggcaaaatgccgtctgaaaccatcgccgacgttaccgaagcggcgcgctccctgatacggcatcagtacgacctgttcaacaacgtccttcagcccgagttggcgcgggaaagcatccatttttaccgccgccgcaactggacgggcacgcagaaaaaatggatcgaagactatttcgaccgcgaactgctgccgatcctgacccccatcggactcgacccgtcccaccccttcccgcgaccgctgaacaaatcgctcaacttcgccgtcgaactcgacggcacggacgcattcggcaggccttcggggatggcgattgtgcaggcaccgcgcatcctgccgcgcgtcgttcccctgccgtccgaactgtgtggcggcggacacggcttcgtcttcctgtcgtccatcctccacgcccacgtcggcaaactcttcccgggcatgaacgtcaaaggctgccaccagttccgcctgacgcgcgacagcgacttgaccgttgacgaagaagacctgcaaaacctccgcgccgccatccaaaacgaactgcacgaccgcgaatacggcgacggcgtgcggctcgaagtcgccgacacctgtcccgcctacatccgcgactttctgctcgcgcaattcaaactgaccgccgccgaactctatcaggtcaaaggcccggtcaacctcgtgcgcctcaacgccgtccccgacctagtcaaccgccccgatttgaaatttcccacacacacgccgggcagactgaaagccttgggcaaaaccgcgtccatattcgatttggtgcgccaatcgcccatcctgctgcaccacccctaccaatcgttcgaccccgttgtcgaaatgatgcgcgaagctgccgccgaccccgacgtgcttgccgtcaaaatgacgatttaccgcaccggcacgcgttccgaactcgtccgcgccctgatgaaggcggcactcgccggcaaacaagtaaccgtcgtcgtcgaactgatggcgcgttttgacgaagccaacaacgtcaactgggcgaagcagctcgaagaggcgggcgcgcacgtcgtgtacggcgtgttcggctacaaagtccacgccaagatggcactggtcatccgccgcgaagacggcgtactcaagcgttacgcccacctcggcacgggtaactaccaccaaggcacatcgcgcatctacaccgacttcggcatcattaccgccgacgaacaaatcaccgccgatgtgaacacattgtttatggaaatcacaggcttgggcaaacccgggcggctgaacaaactctaccaaagcccgtttaccctgcacaaaatggttatcgaccgcatcgcacgcgaaaccgaacacgcaaaagccggcaaaccggcgcggattaccgccaagatgaattcgctcatcgaaccgaccgtcatcgaagccctgtatcgggcaagcgcggcaggcgtacaaatcgatttgattgtgcgcggtatgtgcaccttgcgcccgggtgtaaaaggcttgtccgaaaacatccgcgtccgctccatcatcggcaggcagctcgaacacgcgcgcgtgtattgcttccacaacaacggcgcggacgatacctttatctccagcgcggattggatggggcgcaacttcttccgccgcatcgaaaccgccgcgccgattgccgcgcccgaactcaaaaaacgcgtcatccgcgaaggtttggaaatggcactggcagacaatacgcacgcgtggctgatgcagcccgacggcggctatatccgcgccgcgcctgccgagggcgaaagcgaagccgacctgcaaaacgatttgtggacactgctcggaggctga

SEQ ID NO: 44253 - DNA, 1257 bp, Neisseria meningitidis
gtggccaataaattaagaaactacaccatcaacttcggcccgcaacaccctgcggcgcacggcgtattgcgtatgattttggagttggagggcgaaaccatcgtccgtgccgatccgcacatcggcctcctgcaccgaggtactgaaaaactggcggaaaccaaaacctatctgcaagccctgccctatatggatcgcttggactatgtttccatgatggtcaacgagcaggcgtattgcttggcagtagaaaaacttgccggtatcgatgtacctatccgcgcccaatatatccgcgtgatgtttgccgaagtaacgcgcatcctcaatcacttgatgggcatcggttcgcacgccttcgacatcggcgcgatgaccgccatcctttacgccttccgcgaccgcgaagagctgatggacttgtacgaagccgtgtccggcgcacgtatgcacgcagcctacttccgtcccggcggcgtttaccgcgacctgcccgacttcatgcccaaatacgagagcagcaaattccgcaatgccaaagtattgaagcagctcaacgaatcccgtgaaggcactatgctcgactttatcgacgccttctgcgagcgtttcccgaaaaacatcgacacactcgaaaccctcttgaccgacaaccgtatttggaaacagcgtaccgtcggcatcggcgtcgtctcccccgaacgtgccatgcaaaaaggctttaccggcgtgatgttgcgcggttcgggcgtggaatgggacgtgcgtaagacacagccttacgaagtgtacgacaaaatggatttcgacatccctgtcggcgtgaacggcgactgctacgaccgctacctctgccgtatggaagaaatgcgtcaatccgtacgcatcatcaaacaatgttccgagtggttgcgtgtcaatccgggtccggtcattaccacaaaccacaaattcgctccgcccaaacgtaccgaaatgaaaacaggtatggaagacctgattcaccatttcaaactctttaccgagggtatgcacgttcccgagggcgagacctacaccgctgtcgaacatccgaaaggcgagttcggcgtttacatcatttcagacggcgcaaacaaaccctaccgcctgaaaatccgcgcacccggcttcgcccatctgcaaggcatggacgaaatggcaaaaggccacatgctcgccgacgtcgttgccatcatcggtacgcaggacatcgtattcggggaggttgaccgataa

SEQ ID NO: 44254 - DNA, 933 bp, Neisseria meningitidis; identical to SEQ ID NO: 38585

SEQ ID NO: 44255 - DNA, 1056 bp, Neisseria meningitidis
atgacacaccattaccccactgacgatattaagattaaagaagttaaagaactgctgccgccgattgcccatctttacgagctgccgatttccaaagaggcttcgggcttggttcaccgcacccgtcaggaaatttccgatttggttcacggcagggacaagcggctgttggttattatcgggccgtgttcgattcacgatccgaaagcggcgttggaatatgcggagcgtttgttgaaactccgcaagcagtatgaaaacgagcttttgattgtgatgcgcgtttatttcgagaagccgaggacgacggtgggttggaaaggtttgattaacgacccgcatttggacggtacgttcgatatcaatttcggtttgcgtcaggcgcgcagcctgttgttgtcgctgaacaatatgggtatgcctgcctctaccgagtttttggatatgattacgccgcaatattatgcggacttgatttcttggggggcaatcggtgcgcggacgaccgaaagccaagttcaccgcgaattggcaagcgggctgtcctgccccgtcggctttaaaaacggtacggacggcaatttgaagattgccatcgacgcaatcggtgcggcgagccattcgcatcatttcttgtctgtaaccaaggccggacattccgccattgtccataccggcggcaatcccgactgtcatgtcattttgcgcggcggaaaagagccgaattatgatgcgggacacgtcagcgaggcggcggaacaactgcgtgcggcaggggtaaccgataagctgatgatagattgcagccacgccaacagccgcaaggattacacccggcagatggaagtggcacaagatattgctgcccaattggaacaggacgggagcaatattatgggcgtgatggtggaaagccatttggtcgaaggcagacaggataagccggaagtgtacggcaaaagcattaccgatgcgtgtatcggttggggcgcgactgaagaactgttggcattgttggcaggtgcaaacaaaaaacgtatggcgcgcgccggttga

SEQ ID NO: 44256 - DNA, 729 bp, Neisseria meningitidis; identical to SEQ ID NO: 39334

SEQ ID NO: 44257 - DNA, 384 bp, Neisseria meningitidis; identical to SEQ ID NO: 38800

SEQ ID NO: 44258 - DNA, 606 bp, Neisseria meningitidis; identical to SEQ ID NO: 38535

SEQ ID NO: 44259 - DNA, 1170 bp, Neisseria meningitidis
atgagcaaaaaactccatccgcaaacgctcgccatacgcggcggcaaagaacaaaccgaataccgcgaacacaatcaggccttgttcctgaccagcagcttcatgtgggacaacgcccaacacgccgccgatttgttttcaaaaaaaatcaaaggcttcacttatacccgtaccgccaacccgaccacagccgcctttgaaaaacgcatcgccgctttggaaggtgcggaacgcgcggttgccacttcgaccggcatgtccgcgattcaggcggcgtttttcacctttttgcaggcgggcgaccatgtggtttccagccgcagcctgttcggcacgaccgtcggctttatcaataacatcgttaccaaattcggcatcgaagtgagccacgtgtcgccgactgatataaacgaatggaaagccgccgtcaaagccaataccaaactgctgtttttggaaacgccgtccaaccccttgggcgaagtggccaacttggaggcattggcggaattggcgcacggcatcggcgcgattttggtggtggacaacagcctgctgtcgcccatcggctctcagcctttgaagcacggcgcagatatttccgtttcttccgcaaccaaagccatagacggacacggacgcgtgatgggcggcgtgttggcgggttcggaagaactgatggcgcaggccgccgtttactgcaactcttgcgggctggcgatgtcgccgtttaacgcgtggcagttgttgagcggcgtggaaaccctgtcgctgcgtatggaaaaacagttcgacaacgccctgaaaatcgcacaatggctgcaagcgcagccgcaggttcaagccgtgtactacaccggattgcccgaccatccgcaggcggcgcttatccgcaaacagcaaaacggcggcggcatcgtcatcggctttgaagtcgccgaccaagcagccgcgtggaaagtcgtggacggcgtggaactcttttcccgtaccgccaacctcggcgacgtgcgctcgaccatcacccatccgtggacaaccacgcacggcaggatgcagcccgaagaaaaactcgccgccaacatccgccccggattggtgcgcctgtcggtcggtttggaatatgttggcgatttgattgacgatttgaaacaggcactcgcacgctga

SEQ ID NO: 44260 - DNA, 1848 bp, Neisseria meningitidis; identical to SEQ ID NO: 41875

SEQ ID NO: 44261 - DNA, 1218 bp, Neisseria meningitidis
atggcgttaatcgtacataaatacggcggcacatccgtaggctcgcccgaacgcattaaaaacgtggccaaacgtgtcgccaaagcccgcgccgaaggacacgacatcgtcgtcgtcgtatccgccatgagcggtgaaaccaaccgcctggtcgcgttggcgcacgaaatgcaggagcatcccgatccgcgcgaattggacgtggttttgtccaccggcgaacaagtaaccatcggccttttggcgatggcattgaaagacatcggcgtggaagccaaaagctacaccggctggcaggtcgccctcaaaaccgataccgcccacaccaaagcccgcatcgaaagcattgatgacgaaaaaatgcgtgccgaccttgccgccggcaaagtcgtcatcgtcgccggtttccaaggcatcagcagcgaaggcgacatttccacgctcggacgcggcggctccgacacctccgccgttgcgctcgccgcagccctcaaagcagacgaatgccaaatctataccgacgtggacggcgtttacaccaccgacccccgcgtcgtacccgaagcgcgccgcatggatacggtaacgtttgaagagatgattgagctggccagccttggctcgaaagttttgcaaatccgttcagtagaatttgccggaaaatacaaagtgcgcctgcgcgtactgagcagcctgcaagacggcggcaacggcaccttaattacctttgaagaggacgacaatatggaaagagctgccgtaaccggtatcgcattcgacaaaaaccaagcccgcatcaacgtgcgcggcgtacccgacaaacccggcgtcgcctatcagattttaggcgcggttgccgatgccaacatcgaagtcgatatgattatccaaaatgtcggcagcgaaggcacaaccgatttttcctttaccgtaccgcgcggcgattacaagcagactttggaaatcctgtcggaacgtcaagacagtatcggcgcggcttctatcgacggcgacgacaccgtgtgcaaagtctccgcagtcggtttgggtatgcgttcgcacgtcggtgtagccgccaaaatcttccgcacgctcgccgaagagggtatcaacatccaaatgatttccacctccgaaatcaaagtttccgtattgattgatgaaaaatacatggaactggcaaccagggtattgcataaagcctttaatttgggctga

SEQ ID NO: 44262 - DNA, 861 bp, Neisseria meningitidis; identical to SEQ ID NO: 38865

SEQ ID NO: 44263 - DNA, 1341 bp, Neisseria meningitidis
ttgcacacccttctagcttttatcttcgccatcctgattttggtcagcctgcacgagttcggacactacatcgttgccagattgtgcggcgtcaaagtcgtacgcttttccgtcggcttcggcaaaccgtttttcacccgaaagcgcggcgacaccgaatggtgcctcgccccgattccgttgggcggttacgtcaaaatggtcgatacgcgcgaaggcgaagtatcagaagccgatttaccctacgcttttgacaaacaacaccccgccaaacgcatcgccatcgtcgccgccggcccgctgaccaatctcgcactggcggttttgctgtacggactgagcttttccttcggcgtaaccgaactgcgcccctatgtcggcacagtcgaacccgacaccattgccgcccgcgccggcttccaaagcggcgacaaaatacaatccgtcaacggcacacccgttgcagattggggcagcgcgcaaaccgaaatcgtcctcaacctcgaagccggcaaagtcgccgtcggcgttcagacggcatcaggcgcgcaaaccgtccgcaccatcgatgccgcaggcacgccggaagccgataaaatcgcaaaaaaccaaggctacatcggactgatgccctttaaaatcacaaccgttgccggtggcgtggaaaaaggcagccccgccgaaaaagcaggcctgaaaccgggcgacaggctgactgccgccgacggcaaacccatcgcctcatggcaagaatgggcaaacctgacccgccaaagccccggcaaaaaaatcaccctgacctacgaacgcgccggacaaacccataccgccgacatccgccccgatactgtcgaacagcccgaccacaccctaatcgggcgcgtcggcctccgtccgcagccggacagggcgtgggacgcgcaaatccgccgcagctaccgtccgtctgttgtccgcgcattcggcatgggctgggaaaaaaccgtttcccactcgtggacaaccctcaaatttttcggcaaactaatcagcggcaacgcctccgtcagccatatttccggtccgctgaccattgccgatattgccggacagtccgccgaactcggcttgcaaagttatttggaatttttggcactggtcagcatcagcctcggcgtgctgaacctgctgcccgtccccgttttggacggcggccacctcgtgttttatactgccgaatggatacgcggcaaacctttgggcgaacgcgtccaaaacatcggtttgcgcttcgggctcgccctgatgatgctgatgatggcggtcgccttcttcaacgacgttacccggctgctcggttag

SEQ ID NO: 44264 - DNA, 300 bp, Neisseria meningitidis
atgaagaaaatgttcgtgctgttctgtatgctgttctcctgcgccttctcccttgcggcggtaaacatcaatgcggcttcgcagcaggagttggaggcgctgccgggcataggccctgcgaaggcgaaggccattgcggaataccgtgcgcaaaacggtgcgttcaagtctgtggacgatttgaccaaggtaaagggcatcggccctgcggtgctggcgaagctgaaggatcaggcttctgtcggcgcgcccgcaccaaaaggcccagccaaaccggctctgcccgcagctaaaaaatag

SEQ ID NO: 44265 - DNA, 2298 bp, Neisseria meningitidis
atgcttgcacccgaattggaacagattttgcagcagctttaccgcgaggcgcgtaaggctcattatgaatttatcagcctcgagcatctgcttttggtactcatcgaagaagatgcctccgtgccgaacgtcttaaaactatgcggcgcggatttgaaagtggtgtccgaacagctcgccgccagcgttgccgaaaacacccccctgattcccgaacaccttttagacacggtcgaaacacggcccacgctcggcttccaacgcgtgatgcaacgggcgatggtgcatacccagtctgccggaaaagccgcagtcgaaccgttggacgttttggtcgcgctgatgagcgaaaccgacagccacaccgtctatttcctcaagctgcaatcggttacgcgttttgaagttttgcgctgtattgcccacggctctcccgatgaagatgaagatgaagacgatggcaactattcttcagacggcatggacgacgataatgaaaaccgcgccaaaccgggcaaaaaccctttatcggcgtacaccgtcaacctcaacgccgaagtcaaagccggccgtatcgaccctttgattggtcgcaaacacgaaatggaacggctggtgcaaatcctatgccgccgccgcaaaaacaatccgcttttggtcggcgaagcgggcgtgggcaaaaccgcgctggcggaaggtttggcacatcaaatcgtcaacggcggcattccagacgcgctcaaagatgccgaagtgtacgcgctggatatgggctcgctgttggcgggcacgaaataccgcggcgactttgaagcgcgggtcaaatccgtcttgaaacagctcgaaaaaatcccgcacgccattttgtttatcgacgaaatccacaccatcatcggcgcgggcagcaccagcggcggcaccatggacgcgtccaacctgctcaaacccgcgctggcaaaaggttcgctgcgctgcatcggcgcgaccacctacgacgaataccgcaccattttcgacaaagaccatgccttaagccgccgcttccaaaaaatcgacgtggtcgaacccaccgtttccgaaaccgttcaaatcctgcgcggcttgaaaccgatgtttgaagccttccaccaagtccgctacactcaaggcgcactcgaagccgccgccgaactctccgcacgctacatcaacgagcgtttcctgcccgacaaagccatcgacgtaatggatgaagcaggcgcggcgcaacggattctgcccaaatccaaacagaaaaaagtcatcggcaaagcacaaatcgaaaccgtcatcgccaaagtttcgcggattcccgaaaaaaccgtgtcgcacgacgacaaacaagtgctgcaattcctcggtcgcgatttgaaaaacatggtttacggtcaagaaaacgccatcgacgcgctggttgccgccgtcaaaatgtcgcgttccggccttgccctgcccgacaaaccgataggcagcttcctcttctccggcccgaccggcgtgggcaaaaccgaagccgccaaacagcttgcctactcgctgggcgtaccgctgcaacgctttgatatgtccgaatacatggaacgccatgccgtatcgcgcctcatcggcgcgccaccgggctacgtcggctttgaacaaggcggccttttgaccgaagccgtcaacaaacagccgcattgcgtattgctcttggacgaaatcgaaaaagcccaccccgacattttcaacgtcctcctgcaagtcatggacgcaggcaaactgaccgacaacaacggcaagagtgccgatttccgcaacgtcatcctgattatgaccaccaacgcaggcgcggaaagcctcagccgccccagcctcggctttaccgccaagcgcgaacgcggcgacgaaatgcaggcaatcaacaagctcttcacgcccgagttccgcaaccgcttggacgcgattatcccgtttgcacccttgtccgaacccatcatcgtcaaagtcgtggacaaattcctgctccagctcgaacaccagctcctcgacaaaaaagtcgaagccgaattcacgtcggcattgcacaaatatctggcggaaaaaggtttcgacccgcaaatgggcgcgcgcccgatgcaccgcctgattcaggaaaaaatccgcaaaccgctcgccgacgaactcctgttcggcaaactatccgacggcggcttcgtgcggatagactgggatgcggcaaaagaagaagccgtgttgaagtttaagaaaagcaaggtcaaaataaaaaccgcctccgcgtaa

SEQ ID NO: 44266 - DNA, 360 bp, Neisseria meningitidis; identical to SEQ ID NO: 39367

SEQ ID NO: 44267 - DNA, 684 bp, Neisseria meningitidis
atgcaacacgacgtttacgactacaccgcgcatacggtttctaaaaacaccgtcctgcagaaaacctaccgcctgctcggattttcattcattccggcagccgcaggcgcggcacttgccgccaatgccggtttcaatttttacgccgccttcggttcgcgctggatagggtttgccgtcgtgttggcgtttttctacggtatgatccacttcatcgagaaaaaccgttacagcaataccggcgttaccctgctgatggtattcacattcggtatgggcgtattgatcggccccgtgctgcaatacgcgctccatattgccgacggtgcgaaaatcgtcggcattgccgccgcgatgaccgccgccgtctttttaacgatgtccgccttggcgcgccgaacccggctcgatatgaacgcgctcggacgcttcctgaccgtaggtgcggtcattctgatggtcgccgtggttgccaatctgtttttgggtattcccgcactcgccctgaccatttccgccggttttgtcttgttcagttccttaatgattatgtggcaggtacgcaccgtcatcgacggcggcgaaggcagccacatcagcgcggcactgacactgtttatctcgctttacaacatcttcagcagcctgctgaacatcctgttgtctttaaacggcgaggattga

SEQ ID NO: 44268 - DNA, 921 bp, Neisseria meningitidis
atgaccttaaccgaattgcggtacatcgtcgcagtcgcccaagaacgtcatttcggcagggcggcgcggcgttgttttgtcagccagcccactttgtctattgccattaagaaattggaagaagagcttgccgtctctttgtttgaccggagcagcaacgatattattacgaccgaggcgggggaacgtatcgttgcacaggcgcgtaaggtgttggaagaggcagagcttatcaggcatttggcaaatgaagaacaaaacgagctggagggtgcgttcaaactcgggctgatttttacggttgcgccgtacctgctgccgaaactgattgtctcgttgcgccgtactgcaccgaaaatgcctttgatgttggaagagaattacacgcatactttgaccgagtcgctcaaacgcggggacgttgatgcgattatcgttgccgaaccgtttcaagagccgggcattgttaccgaacccttgtatgacgaaccgtttttcgtgattgtcccgaaagggcattcatttgaggaactggatgccgtttcgccccggatgctgggtgaggagcaggttttgctgctgacggaaggcaactgtatgcgggatcaggtactctcaagctgttccgaattggcggcgaaacaacgtatacaggggttgaccaatacattgcagggcagctcgattaatacaatccgccatatggttgccagcggtttggcaatcagcgtgttgccggcaaccgcactgaccgaaaacgatcatatgctgttcagcattattccgtttgagggtacgccgccaagccggcgggtcgtattggcgtaccgccgcaattttgtccgtccgaaggcgttgtcggcgatgaaggcggcgattatgcagtcgcagcttcacggggtaagttttatccgcgactag

SEQ ID NO: 44269 - DNA, 177 bp, Neisseria meningitidis; identical to SEQ ID NO: 38772

SEQ ID NO: 44270 - DNA, 300 bp, Neisseria meningitidis; identical to SEQ ID NO: 38838

SEQ ID NO: 44271 - DNA, 285 bp, Neisseria meningitidis
atgttcggcggtcgtctgaaaaacgctccatccattaccgccaaacactttttgaaggaaaatatcatgaaatttattaacacctgccgtaaatacggcgcaaaactggctgttgtaacagctgctcccctggctttggccgcacatgcaaatgcaacgttgcccgatacagcaaaaaacgctttggaagccgcaaaagcggacggtatggaagccggttggattgtcgttggcgttttcgccgcgctttttgtattttccatcgttaagagagtgatgaagtaa

SEQ ID NO: 44272 - DNA, 1074 bp, Neisseria meningitidis
atgcgcccgttttgcgtcggcgcgacagtgcttgccatactcggcgcgttggtgtttttcatcagccccggtgtcgtcgtcctgcaccgccaaatcttcttagaactcatgctgcctgcagcatatggtggtttcctgactgcggctttgttggactggacgggtttttcgggcaacctgaaacctgccactactttgatggcggtgttgttgcttgttgcggctgttttattgccgtttttaccgcaacttgccgcattctttgtagcggcttattggctggttttattgctgttctgcgcttggttgatttggctggcccgcaacacggataacttcgccctgctgatgctgcttgccgcgttcaccgtttttcagacggcatacgcggcaaccggcgacttgaacctgttgcgcgcgcaagtgcatttaaatatggctgcggtgatgtttgtttccatacgtgtgagtgttttgctgggcgcggaagcccttaaagaatgccgtctgaaagaccctgtttttattccaaatatcgtttataaaaacatcgccattactttcctgctcttgcacgccgccgccgaactttggctgcccgcgcaaaccgccggttttaccgcgctcgccgtcggctttatcctgcttgccaaactgcgcgaactgcaccatcacgaactcctgcgcaaacactacgtccgcacttattacctgctccagctctttgccgccgcaggctatttgtggacaggcgcggcgaaactgcaaaacttacctgcctccgcgcccctgcacctgattaccctcggaggcatgatgggcggcgtgatgatggtgtggctgaccgccggactgtggcacagcggctttaccaagctcgactaccccaaactctgccgcatcgccgtccccatccttttcgccgctgccgtttcgcgcactgttttaatgaacgtgaacccgatattcttcatcaccgtccccgcgattctgaccgtcgccgtgtttgtgctttatctctttacgttcgtaccgatctttcaggcaaatgcgtttacgggcgatccggaataa

SEQ ID NO: 44273 - DNA, 1296 bp, Neisseria meningitidis
atgttagacatccaattgctccgcagcaacaccgccgccgttgccgaacggcttgcacggcgcggttatgactttgataccgcacgttttgacgcactggaagaacgacgcaagtccgttcaggtgaaaaccgaagaattacaagcctcgcgtaacagcatttccaagcaaatcggcgcactgaaaggtcagggcaaacacgaagaggcacaggcggccatggatcaagtcgcccaaatcaaaaccgatttggaacaggcagccgccgatttggaagccgtgcaaaaggaactggacgcatggctgttgagcattccgaacctgccgcatgaggacgtgcctttcggtaaggatgaaaccgaaaacgtcgaagtccgcaaagtcggcaccccgcgcgaatttgactttgaaatcaaagaccatgtcgatttgggcgaacctttgggtttggatttcgaaggtggcgcgaaactttccggcgcacgatttaccgtgatgcgcggacaaatcgcccgtctgcaccgcgccttggcacagttcatgctggatacgcacacgctgcaacacggctacaccgagcattacacgccttatatcgttgacgatacgacgctgcaaggtacgggccaactaccaaaatttgcggaagatctgttccacgttacccgtggcggcgacgaaaccaaaaccacccaatacctgattccgacagccgaagttaccctgaccaataccgttgccgacagcattatcccgtccgaacaactgccgctgaagctgaccgcgcattcgccctgtttccgcagcgaggcgggttcgtacggcaaagacacgcgcggtctgattcgccagcaccagttcgacaaagtagaaatggtacaaatcgttcatcccgaaaaatcatacgaagcactggaagaaatggtcggccatgccgaaaacatcctgaaggctttggaactgccctaccgcgtgattaccctgtgtaccggcgacatgggcttcggcgcaaccaaaacgtatgacttggaagtttgggttcccgcgcaaaatacctaccgcgaaatctcaagctgctccaactgcgaagatttccaagcccgccgcatgaaggcgcgtttcaaagacgaaaacggcaaaaaccgcttggtacatactttgaacggctccggcttggctgtcggcagaacgctggtcgccgtattggaaaaccatcaaaacgccgacggcagcatcaacatccctgccgcactgcaaccgtatatgggcggcgttgccaagttggaagtgaaataa

SEQ ID NO: 44274 - DNA, 1311 bp, Neisseria meningitidis
atgatcgtgcccgacctctttgtcgcccacttccgcgaagccgtcccctacatccgccaaatgcgcggcaaaacgctggtcgccggcatagacgaccgcctgctcgaaggtgataccttaaacaagctcgccgccgacatcgggctgttgtcgcaactgggcatcaggctcgtcctcatccacggcgcgcgccacttcctcgaccgccacgccgccgcgcaaggccgcacgccgcattattgccggggcttgcgcgttaccgacgaaacctcgctcgaacaggcgcagcagtttgccggcaccgtccgcagccgttttgaagccgcattgtgcggcagcgtttccgggttcgcgcgcgcgccttccgtcccgctcgtatcgggcaacttcctgaccgcccgtccgataggtgtgattgacggaaccgatatggaatacgcgggcgttatccgcaaaaccgacaccgccgccctccgtttccaactcgacgcgggcaatatcgtctggctgccgccgctcggacattcctacagcggcaagaccttctatctcgatatgcttcaaaccgccgcctccgccgccgtctcgcttcaggccgaaaaactcgtttacctgaccctttcagacggcatttcccgccccgacggcacgctcgccgaaaccctctcggcacaggaagcgcaatcgctggcggaacacgccggcggcgaaacgcgacggctgatttcgtccgccgttgccgcgctcgaaggcggcgtgcatcgcgtccaaatcctcaacggtgcctccgacggcagcctgctgcaagaactcttcactcgcaacggcatcggcacgtccattgccaaagaagccttcgtctccatccggcaggcgcacagcggcgacatcccgcacattgccgccctcatccgcccgctggaagaacagggcatcctgctgcaccgcagccgcgaatacctcgaaaaccacatttccgaattttccatcctcgaacacgacggcaacctgtacggttgcgccgccctaaaaacctttaccgaagccgattgcggcgaaatcgcctgccttgccgtctcgccgcaggcacaggacggcggctacggcgaacgcctgcttgcccacattatcgataaggcgcgcggcataggcataagcaggctgttcgcactgtccacaaataccggcgaatggtttgccgaacgcggctttcagacggcatcggaagacgagttgcccgaaacgcggcgcaaagactaccgcagcaacggacggaactcgcatattctggtgcgtcgcctgcaccgctga

SEQ ID NO: 44275 - DNA, 1467 bp, Neisseria meningitidis; identical to SEQ ID NO: 38295

SEQ ID NO: 44276 - DNA, 2853 bp, Neisseria meningitidis
atgtgcaaccatcatccccaacattcgcacgacaacgacaccatccgcatacgcggcgcgcgcacgcataatttgaaaaacgtcgatttagacattccgcgccacaagctggtggtggtaacaggattgtcaggcagcggcaaatcatcgctggcgttcgacacgctgtatgccgaaggacagcggcgttatgtcgagagcctgtccgcctatgcgcggcagtttttgcagatgatggacaaacccgatgtcgatttgatcgaaggcctgtcgcccgcgatttccatcgagcagaaatccaccagccacaatccgcgttccaccgtcggcacggttacggaaatccacgactatctgcgccttttgtacgcacgcgtcggcacaccctactgccccgaacacaagctgccgctatccagccaaaccgtatctcaaatggttgatgccgtcttaaaactgccggaagacacgcgcgtgatgattctggcgccggcggtacgagagcgtaagggcgagtttgtcgacttctttgccgacttgcaggcgcaaggctttgcccgtgtgcgcgtggacggcgaagtttatcagcttgacgaagtgccgaagctggagaaaaacatcaagcacaatatcgacgtggtcatcgaccgcgtgaaagtgaaggcggacatcaagcagcggctggcggaaagttttgaaaccgcactgcgccacggcaacgagcgcgcgctggcgatggaaatggaaagcggcgaagaacattggttttccgcgcgtttcgcctgtcccgtatgttcatacagcctgcccgaattagagccgcgcctgttttcgttcaacaacccgatgggctcctgcccaacttgcgacggcttgggcaacaccaacttcttcgatcccgaaaaagtggtcgcgcatcccgaattgtcgctggcaacgggcgcgattgacggctgggataagcgcaaccagttctatttccaaatgattcagtcgctggcgcggcattacggtttcgatgtgcaggctgcttgggaaacgctgcctgaaaaagtcaaaaaagtcgtgctgcacggctcgggcaaggaagtcattgatttcacctacctatccgaacgcggcaccaccttcaaccgcagccacgccttcgaaggcatcatccccaatctcgaacgccgctaccgcgaaaccgacagcgaaaccgtgcgcgaaaaactgcgcgaataccaaaaccaccgcgcctgcccgagctgcggcggcgcacgtttgcgcaaagaagcccgctacgtttacgtcagcggtgagccgttgcacgaagtttccgcctggccgctcaccaaaacccaccaattctttgaaacactggatttagacggcaacaaaaaacaaatcgccgaaaaaatcctcaaagaaatcaccgaacgcctcggcttcctgattaacgtcgggctggattacctgaatctctcccgttccgccgaaaccctttccggcggcgaagcccagcgcatccgcctcgccagccaaatcggcagcggcctgaccggcgtgatgtacgttttggacgaaccctccatcggcctgcaccagcgcgacaacgaccgcctgcttgccaccctcaaacgcctgcgcgatttgggcaacagcgtcatcgtggtcgaacacgacgaagacgccatccgcgaagccgatttcgtcgtcgatatgggcccgggcgcaggcgaacacggcggcaacgtattgattgccgacacgcccgaaaacgtcgccaaatgcgaaaactccgttaccggacaatatctcagcggcaaaaaatccattgccgtgccgtctgaacgcacgcccgtcaatcccgaacgaatgctcgtcctcaaaggcgcgcgcggcaacaacctcaaaaatgttaccctcgaactgccgctcggtttaattacctgcatcaccggcgtatccggcagcggcaaatccaccctgattaacgacaccctcgccaaaatcactgcccgcgaactcaaccgcgcccaagaagaacccgccccatacgacgacatccgcggcctcgaacacctcgacaaagtcatcaacgtcgaccaatcccccatcggccgcaccccacgctccaatcccgccacctacaccggcctgttcacccccatccgcgaactcttcgccggcgtacccctctcgcgcgaacgcggctacaatgtcggcagattctccttcaacgtcaaaggcggccgctgcgaagcctgccaaggcgacggcgtcatcaaagtcgaaatgcacttcctgcccgacgtgtatgttccctgcgaagtctgccacggcaaacgctacaaccgcgaaacgctcgaaatccaatacaaaggcaaaaacatcagccaagtcctcgacatgaccgttgaagaagcccgcgaatttttcgacgccgtccccaccgtatcgcgcaaactgcaaaccttgatggacgtaggcttaggctacatccgtctcggccaatccgccaccaccctctccggcggcgaagcccagcgcgtcaaactcgccttggaactctccaaacgcgacaccggcagaacgctctacatcctcgacgaacccaccaccggcctacacttcgccgacatcgccctgctgctggaagtcatagaccgtctgaaaggcaaaggcaactcgatagtgattatcgagcataatcttgacgttataaaaacggctgattatattgtggacttagggccggaaggtggtgatggcggggggaggattattgcggaaggcagtcccgagcaggtggcgaaggttaaggggagttataccgggaagtatttggaagttatgttaaaatattag

SEQ ID NO: 44277 - DNA, 1407 bp, Neisseria meningitidis
atgaccgccgctcctgatatcctataccgtcaagccgccgcccttttggaacaatccaataccgcccaagccctgcccctgctgcaacaggccgcagagcagggatatacggaagctgcttttgtattgggcgaccatctgctgcaaaacggtcatccggagcaggcacttccatggttggaagccgccgcggcccaacgccatcccaaagcactcttctccctgctgcaacaacgcgaacacaacggcaccccgaccggacagcttctcaacgactatgcctggctgggtgagcaggggcactcagaagcccaattaatcctcatgcgttaccacgcgcaacgcaacgatccacaatcgctctactgggcggaacttgctgccgcccgatatgccgcacctgcgtattaccatctggcacgccatcatcaacgccaaggcgacgttgaaacagccatcgaacaatacgaaaaagcggcagcactcggcgtaactgccgcctgctggcaacttggtcaaatctacttctacggtacaggtgtcagcctcaaccacgcacaagccgaacactatctcgaaccagccgcacaagccggccacatcgccgcacaaacgctgctggctgaccttcttgccgcccaacgcaaacctgaagccttggaatggtatcgtcgtgccgccgataaggaacaagcggaagcacagtctaagctggcccaatacgccctgaccggcgaactttccgaacgcgatccgttccaagcggcacgatatgccaaagccgctgccgagaaaaaccatcctgaagccctgaaaatcatgggcgacctctaccgctacggtctcggtatcaaagccgacaaccatatcgcgcaagattactaccaccgtgccgccgcgctgggttctgccgccgcagcacaaaaactcatcagcgacgccgcgctgtaccatccgcaacaatacgaacaaatcaaaactgccgccctgcaacaacaacaaaccgaaaccatctaccgtttggcggaagcacaagcctgcgccatcggccgtcccgccgactacaatgccgcgcgaaaaaattacatggaagctgccgggttccaccataaaaacgcagcggcagccttaggccgcatctaccattacggcctcggtacggcgcaagatcctcgggcggctgcacactggtacgccattgctgccgaacaaaaccacccttccgcccaataccacctcgcctgtttttactatcacggacaaggtatcggctgtcatgttccgaccgcctgctactggctgcaggccgccatcagcaacggccacacttcggccgaatcattaatatccctattagaacaatggcgacgcgaagcacaccatgccatcggacaaaaggccgtctga

SEQ ID NO: 44278 - DNA, 210 bp, Neisseria meningitidis
atgaactacttcggcatggtagagtttctgcgcctgatggcaatagtgcggccgccatttgtcttcttctccggcacccgcagcgaactgcctgcttatcttgacctcgtggcagaactgcgcctgaccggatgggagcgttttgcaggcagccaaaccttgactgtgagcagcacatcaacagcaattcaagctacgacgaccacctga

SEQ ID NO: 44279 - DNA, 777 bp, Neisseria meningitidis
atggcagcattcaatacccaaaaagtattgtccgtacaccactggacagacgcatattttacctttacctgcacccgcgacgaatcgttgcgctttgaaaacggacagttcgttatggtcggattgatggtggacggcaagccgctgatgcgcgcatacagcgtcgcctccgccaactgggaagaacacctcgaatttttcagcattaaagtccaagacggcccgctgaccagccgcctgcaacacctcaaagtcggcgacgacgtgttaatcagcaaaaaaccgaccggaactctggttgccggcgacctgaatccgggcaaacacctttacttgttgagcaccggtaccggcatcgcccctttcttgagcatcaccaaagaccccgagatttacgagcaatttgaaaaaatcatcctcgtacacggcgtgcgctacaaaaaagatttggcgtactacgaccgctttaccaaagaattgcccgaacacgaatacctcggcgacttggttaaagaaaaactgatttactacccgattgtttcccgagaagaattcgaacaccacggccgtctgaccgacctgatggtaagcggcaaactgtttgaagacatcggcctgcccaaaatcaacccgcaagacgaccgcgcgatgctgtgcggcagccccgcgatgctgaaagatacctgcaaagttttggacgatttcggtctgaccgtctctccgaaaaccggcgtgcgcggcgattacctgattgagcgcgcgtttgtggatcaataa

SEQ ID NO: 44280 - DNA, 1098 bp, Neisseria meningitidis
atgaaccagacatttaccttgcccgatacgcgcccgtatccccaaaatccgattaaaaaccacctgctgctcaatgcctaccagttggcgcataattcttcccaggcttcgcgcaaactctcgtccggccaacttcaaaccgaaatcagggggatgcttgagcaaaaccactatatcaacctttccctcgcgctgacgatgtcgcccgatgccggaacttatgccgcgctgctttccagtgtgaacgcggtactcgattgcgagaaagaaggcgaagtgcagtggttcgccctgccggtcgtgctggtgtccggctgcaagaaagaacgggcaatcgagatgaagctgccgacggagggattgtttgcctgtttgcaaaactatccgcacctgcgcgcgttgacgcaagagacgcaatggctgccttatcttgtacattcctccgatttgagtgcggtcgcgccggatgagtggtggcgtgccaaacaaaataccgaagcggcggcgcaacacttacgccgtttcgccccgcgccctttgcttttgcccgaagggcagtccgtccacgtcgtttacgcgctgggtttcggcagcggcaaagttcagacggcattgggtcagaaccttcttcaggcaggtctgcccttgatgcaggtatggcaggaaaatcttgcatcggaaggcgttacgctgtttgccaatccgctttccccggattctccggtacgcgcgctttccgacggcagccacacgcgccagcgcatggcgatggatgtgtttgcggcaaacgcgatacgcgccgtccgtatgcagagtccgcgcgtcggcgtggtcgcagcggcaaaggcgggcggacagattttattcgggtttaatgcgaccgacggcgcgtttgaagtcgtgccgcaggtgttttcgtggcagctttcctttaccgacaatattggcgttattcagcaaaattttttggatttaatggcagaatgccgtgtagaacacgtttacctgttgcacaatcccttgggcgaacaggaaagcatcccgagctatgcggaagcattgaaacgggaagggcacaatccgtttttcagcgcatag

SEQ ID NO: 44281 - DNA, 1026 bp, Neisseria meningitidis
atggattatcagggtaagaaagaccgattggaagaagttatcggtctttccgaagaccccgaactttggaacgacccgaaacgcgcccaagaaatcggcaaagagcgcaaaatcctcgaaggcatcgtgttgacgctcgacaacatcgcttcgggcatcgaagacaaccgcatgctgattgaaatgaccgtcgaagaaaacgacgaagaaggttttgccgccgtgcaggaagatgtggcggggctggaaaaacagatggcggatttggagttcaaacggatgttcaaccagcccgccgacccgaacaactgctttatcgacatcaccgcaggcgcgggcggtacggaagcggaagactgggcgggtatgctgttccgcatgtacagccgctacgccgagcgcaaaggcttcaaaatcgaaatcctcgaagaagacgacggcgaaatcgcgggcatcaaccgcgcgactatccgagtggaaggcgaatacgcctatggtttgctgcgtaccgaaactggcgttcaccgcttggtgcgctattcaccgtttgactcgaacaacaaacgccatacttcgtttgcctccgtgttcgtttaccctgaaatcgatgattccatcgaaatcgaaatcaaccccgccgatttgcgtatcgacacctatcgcgcatcgggcgcgggcggtcagcacatcaacaaaaccgactccgccgtgcgtattacccacgagccgacggggattgtggtgcaatgtcaaaacgaccgttcgcaacacgccaacaaagccgccgcgatggaaatgttgaagtccaaactgtatgaattggaaatgcgcaaacgcaatgaagagaaacaggcgttggaagaaggtaaatccgatgtaggttggggtagccaaatccgttcgtatgttttggattcctcacgtatcaaagacttgcgtacaggctacgaagtcggcaacaccaaagccgtattggatggcgatttggacggctttatcgaagccagcctgaaacagggcgtgtag

SEQ ID NO: 44282 - DNA, 1098 bp, Neisseria meningitidis; identical to SEQ ID NO: 39446

SEQ ID NO: 44283 - DNA, 1233 bp, Neisseria meningitidis; identical to SEQ ID NO: 39021

SEQ ID NO: 44284 - DNA, 606 bp, Neisseria meningitidis
atgattttgctgcatttggattttttgtctgccttactgtatgcggcggtttttctgtttctgatattccgcgcaggaatgttgcaatggttttgggcgagtattatgctgtggctgggcatatcggttttgggggcaaagctgatgcccggcatatggggaatgacccgcgccgcgcccttgttcatcccccatttttacctgactttgggcagcatattttttttcatcgggcattggaaccggaaaacggatggaaacggatggcaggcagaccccgaacatccgctgctcgggctgtttgccgtcagtaatgtatcgatgacgcttgcttttgtcggaatatgtgcgttggtgcattattgcttttcgggaacggttcaagtgtttgtgtttgcggcactgctcaaactttatgcgctgaagccggtttattggttcgtgttgcagtttgtgctgatggcggttgcctatgtccaccgctgcggtatagaccggcagccgccgtcaacgttcggcggctcgcagctgcgactcggcgggttgacggcagcgttgatgcaggtctcggtactggtgctgctgctttcagaaattggaagataa

SEQ ID NO: 44285 - DNA, 483 bp, Neisseria meningitidis; identical to SEQ ID NO: 36693

SEQ ID NO: 44286 - DNA, 1248 bp, Neisseria meningitidis
atgagtcagagaagagtagtcattacaggcttaggtcaggtttcccctgtcggcaacactgtcgcagaggcttgggacaccctgctcaccggcaaaagcggcatcggcgcgattacccgctttgacgcatccgacatcaacagccgtgtcgccggcgaggtgcgcggtttcgacatcggacaatacatcagcgcgaaagaagcgcgccggatggacgtattcatccactacggcattgccgccgcattgcaggcaatcgccgattcgggtttggacgatgtggaaaacctcgacaaagaccgcatcggcgtgaacatcggttccggcatcggcggactgcccggcatcgaggtcaccggcaaagccgtaatcgaaggcggcgcgcgcaaaatcaaccctttctttatccccggttctctgattaatctgatttccggacacgttaccatcctcaaaggctaccgcggcccgagctacgggatggtttccgcctgcaccaccggcgcgcacgccatcggcgattccctccgtatgattaaatacggcgacgcggacataatggttgccggcggcgcggaaggcgcaatcagcactttgggcgtgggcggttttgccgcgatgaaagccctctccacccgcaacgacgaccccgccaccgcttcccgtccgtgggacaaaggccgcgacggcttcgttatcggcgaaggcgcgggcatattggtgttggaagaattggaacacgccaaaaaacgcggcgcgaaaatctacgccgaaatcgtcggcttcggcatgagttccgatgcttaccatatcaccgcgccgaacgaagaaggccccgcccttgccgttacccgcgcgctgaaagatgccggcatcaatcccgaagacgtggattacgtcaacgcgcacggcacgtccacccccttgggcgatgccaacgaaaccaaagccctcaaacgcgcgttcggcgaacacgcctacaaaaccgtcgtcagctcgaccaaatccatgaccggccacctgctcggcgcggcgggcggcgtggaggccgtgtacagcattttggcgatacacgacggcaaaatcccgccgaccatcaacatttttgaacaagacgttgaagccggctgcgatttggactactgcgccaacgaagcgcgcgacgcggaaatcgacgttgccatttccaactccttcggcttcggcggcaccaacggcacgctggtcttcaaacgcttcaaaggctga

SEQ ID NO: 44287 - DNA, 510 bp, Neisseria meningitidis
atggatattttattgaaatactggaagccggtaggcgtattgctgctaatcgtcctgatttttaccgcatggcatttcgaccgtgccgaaaaataccgcatgggacgggaggctgctgctgccgaaatttcgaatcgtctgaaagacggctatatcgagcaggcaaagcaggcgcgttctgccgagcagaaggccgctgccgcgtttgccgaacgacaaaccaaattagaagaggaaaaacaaaatgctgaaaaaactgttgccgctatgcgtcttgagcttaaccgcctgcgccactacgccgccgcccaaaatcgcaacagaaacctgcccgcaaccactaccgccgccaccgcatctgatggcgcgtcagattcccaaggctggctattattcggacagtgcgctgaaaaatatgcaggactggcagaaacagccgacggacatgcagccgatttaagggaatggcaggcatatggtcatgcagtaagcagtcagcgtgccgaataa

SEQ ID NO: 44288 - DNA, 657 bp, Neisseria meningitidis
atgttaccctcgaaatatgaagataacacactgcaaattaaagaaaaaagtacagaaagaactgctccgttttttgtgctggaagttaccgcccgttctgccgccgatattttgggtatccatcccaattcggcagcactgttctaccgtaaaatccgcatggttatcaaccatcatttggccttggctgccgatgaggtttttgagggccctgtcgagccggacgaaagcgatttcggcggacggcgtaaaggcagacgtggtcgcggtgcagcaggaaaagtggttgttttcggcattctgaaacgcaacggacgggtctataccgttgtggtggataatgccaagtctgaaacgttactccctgtcatcaaaaagaaaatcatgccggatagtattgtttataccgatagtctgagcagctacgacaagttggacgtgagcggttttatccattaccgcatcaaccattccaaggaatttgcagaccgtcaaaaccacattaacggcattgagaacttttggaatcaggcaaaacgcgtcttgcgaaaatacaacggaatcgatcgtaaatctttcccgctgttcttgaaagaatgcgaatttcgatttaacttcggcacaccgtctcaacagcttaaaatcctgcaaaaatga

SEQ ID NO: 44289 - DNA, 1581 bp, Neisseria meningitidis
atgccttccatcaaacgcgccctgatcagcctgtccgacaagacgggcgcagtcgaatttgcccaaaccctgaccaagctcggtgtcgaaatcctctctaccggcggcacggcgaagctgcttgccgatgcgggcgttcccgtgattgaagttgccgactacaccggtttccccgaaatgctcgacggccgcgtgaaaaccctgcatccgaaaatccacggcggtattctcggtcgtcgcgatttggacgaacacgtcgccaagatggaagaacacggcatcggcaatatcgacctcgtgtgcgtcaacctctaccccttcgctgccaccatcgccaaaccaaactgcacgctggaagacgcgattgaaaacatcgacatcggcggcccgaccatggtgcgctctgccgcgaaaaactggaaacacgtcgccatcgttaccgacaccgccgatttcccggccatagctgccgaactcgaagccaacaacggcgcattgagcgacaaaacccgtttcaacctctcgcgcaaagcattcagccataccgcccaatacgacggtatgatttccaattacctgacctcgctttcagacgacgtcttgagcggcacgcccgaaatcgccggattccccggccggttcaatcaaagctggattaaagtgcaagacatgcgctacggcgaaaacccgcatcagcgcgccgcgttctaccgcgatattgaccccgccgcaggcagcctcgctgcatacaaacaactgcaaggcaaagaattgtcttacaacaacatcgccgatgccgatgccgcatgggaagccgtcaaatccttcgacgtgcccgcctgcgtgattgtgaaacacgccaatccgtgcggcgtagccatcgcctccaataccttggatgcctacaaactcgcctacgccaccgacaccaccagcgcgttcggcggcatcatcgctttcaaccgcgaagttgacggcgcaaccgtcaaacaaattaccgacaaccagtttatggaagtcctcatggcgcctaagttcaccgccgaagccctcgaaatcgccgccgccaagaaaaacgtgcgcgtattggaagtgccgcttgaggcaggcgcaaaccgcttcgaactcaaacgcgtcggcggcggactgttggtgcaaacgcccgacatccaccgcatcagccgcgccgatttgaaagtcgtctccaaacgccaaccgaccgagcaggaatggaacgatttgctgttcgtctggaacgtcgccaaatacgtcaaatccaacgccatcgtattcggcaaaggcggtcaaacctacggcatcggcgcaggccaaatgagccgcgtggacagcacccgcatcgccgcccgcaaagcgcaagatgccaatctcgacctcaacggcgcatgtgccgcttccgatgctttcttccccttccgcgacggcgtggacgtgattgccgagcagggcatcaaagccatcatccatccggcaggttcgatgcgcgatcaggaagtcttcgacgcagcggacgaacacggcatcgccatggtcgtaaccgacgtgcgccacttccgccattaa

SEQ ID NO: 44290 - DNA, 780 bp, Neisseria meningitidis; identical to SEQ ID NO: 38783

SEQ ID NO: 44291 - DNA, 450 bp, Neisseria meningitidis
atggaacaggtaaaaatagccatatccgaacaaatcaaaaaacaaacggataataaccattaccgcaatcttcaaaccatcccgagcataggcaaagacaccgcatcagttctttatgcgcaacttacagaaaaacattttaaaaccgcaaaccagtttgtatcctatgccggattaagtcccgccatcatacaatcagggacaagcgtaagaggtcggggcagattgagccgatacggaaacagacgattaaaaagtacgctgtatatgcccgccctttgtgcttaccgttttaacgcatttccgaaattaataaataatctgaaaaaagcgggtaagccaaagatggtaatcatcgttgccatcatgcgcaaactggcgaagctcgcctattacattgttaaaaccggccagccttacgatgcggaaagacaccgattgaatcaataa

SEQ ID NO: 44292 - DNA, 702 bp, Neisseria meningitidis
atgagcgcgcgcgaaaatattttggcaaaactgaaaaaagccgacgcattgccgatggaagaacctgcggtttttgattattaccgtgaaatgggtgtttcttggggcagcgaagttgagcgtctgaaacattgggctgccgctatgcgtgcggtcaaaaccgaaatttattgggtgacgaaaagcaattggatgcaggttttccgcgaagcggcagaaggcaagggtttgaaaaacatcctgctgcccttggcgaccgaacacggacaaattgcccgtgccgcattggcggacagcaatatcgaaccgattgccttcgagcgcgaaatcgatacttggaaaaccgagtttttcacgaacatcgatgcgggcttcagcggcgcgcaatgcggcatcgcccgcaccggcacgctgatgctgttttccagccccgaagaaccgcgtactttgagtctcgttccgcccgtgcatttctgcctgttcgatacgtccaagatgtacaacgagtttcataatgccgtcgaaggcgaaaaactggtggaaaacggtatgccgaccaatgtattcctgatttccggcccgtccaaaaccgcagacatccaactgacgcttgcttacggcgcgcacggcccgcgcgatttggtcatcctcgccatcctgcccgaccacatttcccctgccgatttggaggaaaacgcatga

SEQ ID NO: 44293 - DNA, 2226 bp, Neisseria meningitidis
atgactcaaaaatccaccattgtttatacccataccgacgaagcacccgcgctggcgacccaatcgctgctgccgattgtgcaggcttttgcccgccacgccgatattgatgtcaaaaccagcgacatttctctctccggccgtattttggcggcgtttcccgaatacctgaccgaagcgcaacgcgtacctgatgcgcttgccgaattgggcgaactggtgaaacaacccgatgcaaacgtaatcaaactgccgaacatcagcgcgtccgtaccgcaactgactgccgcgattaaagaattgcaatctaaaggctttgccgttcccgactatcccgccgacccgcaaaccgatgaagaaaaagccgtacgcgaacgctacgaccgcatcaaaggcagcgcggtaaaccctgtcctgcgtgaaggcaactccgaccgtcgcgcccctaaagcagtgaaaaactttgcgaaaaaaaatccgcacagcatgggcgcatggaccaaagactccaaaacccacgttgccaccatgcaaagcggcgacttttttcataacgaacaatctgttatcgtacctgaagcgacttccgtatccatcgtattcaccgacaaacaaggcaacaaaaaagagctgcgcgagcccgtcgccctgaaagccggcgaaatcatcgacgcgaccgtgatgagtaaaaaagccctgctcgccttccttgccgaacaagtaaaagatgcgaaagcaaaaggcgtgttgttctcgctgcacatgaaagccactatgatgaaagtgtccgacccgattatcttcggacacgccgtcaaagtattcttcgcgcctgtttttgaaaaattcggcgacaaactggctgccgcaggtgtcaacgtcaacaacggcttcggcaacctgcttgccaatctggacaaactggatgcggacacccgcaccgccgtcgaagccgaaatcgccgccgtttacgctgccaaccccgatttggcgatggttgattccgacaaaggcatcaccaacctgcacgttcccagcgatgtcatcgtcgatgcctctatgcctgcgatgattcgcaattccggccgtatgtgggacaaaaacggcaaagcgcaagacaccaaagccgtgattcccgacagcagctatgccggcgtttaccaagcaaccatcgacttctgccgcgaacacggcgcatttgacccgacaaccatgggtactgtgcccaacgtcggactgatggcgcaagcggcggaagaatacggctcgcacaacaaaacctttgaaatcgaagccgacggtcaggttcaagtcattgatgcggaaggaaaagtcctgatgcagcacgacgttgaagcaggcgacatctggcgtatgtgccaaaccaaagacgctccggtcaaagactgggtgcaactcgccgtcaaccgcgcccgcctgagcaacacgcctgccgtgttctggctcgatgaaaaccgtccgcacgacaagagcctgctcgccaaggttaaagcctaccttgccgaactggataccaatggcctcgacatccgcgtcctcgctcctgaagaagccgccaagttcagcttgggtcgtctgaaaaacggcgaagacaccatctccgtaaccggtaatgtcttgcgcgactacctgaccgacttgttcccaattttggaactcggcacaagcgcgaaaatgctgtctatcgttccattaatgaacggcggcggtatgtttgaaaccggcgcgggcggttctgcaccgaaacacgttcaacagttcctcgaagaaaaccacctgcgttgggactctttgggcgaattcctcgcactcgccgtatcgtttgaacatttggcgcaaaaaaccggcaatgccaaagcccaagtcctcgctgacactttggatgccgccaccgaaaaactgctgttgaacggcaaatcgcctaaacgtaaagccggcgaactcgacaaccggggcagccatttctaccttaccctctactgggcgcaagaattggcggagcaagacaaagatgccgaactgaaagccgcatttacgccattggcagccgctttgaccgccgacgaagcgaaaatcgttgccgagctttccgccgtacaaggcaaagcggtcgacatcggcggctactacgcagccaatcctgaaaaagcggcacaagtgatgcgtccgagcgtaacctttaatcaggcactaaacgccttataa

SEQ ID NO: 44294 - DNA, 279 bp, Neisseria meningitidis
atgtactaccaagtcggaaataaatgtcttgagaagcaccaggctgaaaacctttatttcagcttggtagtaccaagaatcaaagaaaacggacagattgtcaggccgaaatataacggcagcctgtggaagatgtcggacggtcagccgctaaggcttttattggcggaatgcagtctgaaagacaacctgcaaagcggccttgaaacaggctggatagtattcggcatcctcgcgtccgtttactttgtttccctgctgaaaaaggttttgaaatga

SEQ ID NO: 44295 - DNA, 474 bp, Neisseria meningitidis
atgactgatttttccgtttgggagaccgccccctttggtgcaaccgtcgatcatatcctgcaacgctaccacaatgtccaccgcgcacaatttgaagaattggtgccgctggctcagaaagtggcccaagtccatgccgatacctttccggcggaaattgccgggctgcttgcctatatgcagaacgaactgctgatgcatatgatgaaagaggaaaggatgctgtttccgatgattaatcagggtgtcggacgcggtgcggcaatgcccatcagcgtgatgatgcacgaacacgaagaacacgaccgcgccatcgcacggctcaaagagctgaccgacaatttccaaccgccagaaggggcttgcggaagctggacgcggctttacgcgctggcgaaagaaatggtggaggatttgaacgaccacattcatttggaaaacgatattctgtttgcccgcgtactcgattcttaa

SEQ ID NO: 44296 - DNA, 1347 bp, Neisseria meningitidis; identical to SEQ ID NO: 38402

SEQ ID NO: 44297 - DNA, 657 bp, Neisseria meningitidis
gtggcttcagtatttttagaaggagaagcagtcgaggtcggcaatattttctgtatcggcaggaactatgccgcacatattgaagagttaaaaaacgaaataccttccgaacctgtggtgtttatgaagccgtcaggcagcattttgaatagcggcggtacaatcttgctgcccgagtttagtagggatgtgcagtttgagtgcgaactcgtgttgctggtcggtaaggattcagacggcatgggagagggtgaagatattttgggatgtgtggcggggtacggcgtgggtttggatttgaccgcgcgagacatccaatgccatctgaaggcgcaggggctgccctggctgaaggcaaaagggttcaggcattccgcgtgcgtgtcggattttgcggcggcagacagaatcggcaatcccgagaaggtgttgttttcattaaaacaaaacggcgtattgaaacagcgcggggataccggtttgatgatttacccgattcgggaaattttacacaaactggcggcggattacggtttggggaaaggggatttggtgtttaccggaacgccctccggcgtgggcgcaatcggtgcgggggacaatttggcattggagctggacggcttggtgcgcgcctctttcacggtagggtgttaa

SEQ ID NO: 44298 - DNA, 990 bp, Neisseria meningitidis
atgacggtttttgacatatcagatttaaatttaaaagaccctgaccaacaggatgccgatgatttgggtatgacgctggcggattataagaagatgattcaggaggataacgattacggcaggatttggcagaaaatccaattaaaaaaggcagaacaattacaaaaagaaaaagaggaagcggtaaagaggaagcggaaaaggaagattttttcagattatagggggcatagattcaagtctgtcaaagaactctgttatgacgtttacaagggtttgacttatggacgtgggtggaacggcagttaccagcatatcgaagtaaaaggcgttgattccggtttgtatgagaataatgcggaattggggagatgtaacgctgtttggccagatggcaaagttgcccatactttagattattccgtcttgtatgaagatatacccgaaggggaaaagcccgaagaagaaaaaaaagaacccgaaaaagaccatccgaagcccgtagaaaagcccgattcgtccaatcccaagccgtctgaaaacccgaacgttgggacactggggggcggtgcttcccccgctgtcggaaatgcgccgggtggcggaagcctcggagcatccgacggcggaggaagcacaggcgcggggaacggcggtaataacggttcaacggcacaaggaagcggcaaaggcaaaggggacggcgaagacagtgaaaaaatgcccgatgttcccaagtatggcgagcctgattggggaagccttaaaagtgacggacggtttggaagttatgcaactgcaaccgcgttctcaacgggagggcattgcataaatgatataaggttggatatgggacagttcggcagccacacgcttcaaatgggctttctgtgcgatgtattgaaaaagctgagatatgtttttatagccatggcttacctctattccgcaatcttggtttttaaaaccgtaaacagtttgaaaggttaa

SEQ ID NO: 44299 - DNA, 270 bp, Neisseria meningitidis; identical to SEQ ID NO: 36672

SEQ ID NO: 44300 - DNA, 1104 bp, Neisseria meningitidis
atggatgcaaagggaaatttaaaggttgttcccttaaggcgtggcaaaggcgattccgcatttatagacacaatcagctttacgtttcatgaaagttctgttgcaaagttttttttaataacaagggaattttttccgattaaaggcgtatcagatagggatgtattagttcgtttttcagacattcttgaatggatattcggtttcggaatttcgtcgcatcaacctgtcggcaaaggtcggttttatgagtcgcgctggcagatggaaagagacggagttttgtacggtcaggtttacatcggtggacaacaggaaaccatacttgtagagatgacgggtaaaggttgtgcagttgcggaggaaggctgggaagaacgtttgtataggtttttaacggcggatacgacttataacgcaaaaataacccgttgcgacgttgcaaaagacttttacgaaaatgaaatctcgcctgataccgcttgggaaatgtacgaacagggcaagtttgataaacgcgggaaacgtccgcttgtcggcaagctcggggatgactggcttaaccctactgaaaaaggcaaaacccttaccatcggttctaaacattcttcggttttttgccgtatctatgacaaagcaaaagaacagggagatacaagcggcgttttttggtgccgttttgaacagcagtatatgggcagaaactgttatttgagtttagatattttgttatcgccggggtctttttggggcggcgcgtttgagatttgcgcttcattgcaacaaaaaggcgtgacggagcataggtgtgtaagtgccaaaaaaagattggaattgagcattgaacgctctaagcaggttgcatcgcaacaggtcgggcgcgccataaatatgatggtttttatgggtatgtctgattacgaaatcgttgattatctgcgccggaaagatggtgcaatgccccatcgtttaaatcccgcatcattcatgattaaagaaaaacgcgcttgcgaatatatccatgattatgaaaaagaaattgaaattattaaatttgatgagtacggaatggttttagacagtttgggagatttaaatgattag

SEQ ID NO: 44301 - DNA, 1773 bp, Neisseria meningitidis
atgattccatccgacttcattgacgaacttctggccaaaaccgatattgtcgacatcatcgacgaacaggttccgctgaaaaaaggcggggcgaactatatggcgtgttgcccgttccacaaggaaaaaacgccgtcgttttcggtcagtccgaccaagcagttttaccactgtttcagttgcggggcgcacggttcggcgattggttttgtgatggaacatcaggggctgtcgtttccggaggcagtgcagttccttgccgaccgcgtgggtatgattgtgcctaaagtgcgcgggcagaacgataatcccgaagtccgtgccgaacgtaagaaaaagcagcagacgctggaagaaacgacagcggcggcggctgatttttatgcgcaacagttgaaattcaatccgacggcgaaggcttatttggacaagcgcggcttgagcgcggaagtcatcgcgcattatggtttgggctacgcgcccgacggctggcagcctttggcgcaagtattccaaccgtacccgaataccgcgttggtggatacgggtatggtgattgacaatgaggggcggtattacgaccgattccgtcatcggattatgttccccatccgcaatccgcgcgggcaggtcatcggtttcggcggcagggtactggacgactccaaacccaaatatctaaactctcccgatacgcctttgtttgataaggggaaaaacctttacggcttgtatgaggggcgtgccgctgtcaaggaagcggagcggattctggtggtcgaaggctatatggacgtggtcgcgctggcacagttcggcgtgggctacggtgtggcggccttgggcacggcaacaacagctgaacacgtcaaaatcctaatgcgtcaggcggacagtatttatttctgtttcgacggcgacagcgcggggcgcaaagcggcttggcgcgcgctggaaaacgcgctgccgcagttgaaggacgacaaatcgctgcattttttgttcctgccggaagaacacgaccccgacagttacatccgtgcctacggcaaagcgcaatttgaagacgcgcttctgaatcaaagcaagcccttgtcggagtatttctgggaacacctttcagacggcattcatctcaatacgcaggaaggcaaggcggaattggtaaaaaccagttcgccgcttttggcgcagattaccgcgccggcattggcttatttgttaaaacaacggcttagcgaactggtcggcatcgaccccgacaacctcgcgcaactgctgggacaggaagcgccgaagcggcacgtcaaacaaaaaaactacaaactgccgccgatttccgtcaaacagcccgttatgccgacattggtgcaacggcaaatccgcagcctcttgataaatccggattgggctgcatatatagacctgcccgattatctggcgttggacggcgatttcgcctgccttgccaacctcgccgaaaccattaaaaaccatccttccgtgccggcaaccgcacaggttttggaacatatgcgcggttcgccctacgaagaaacaatcaaccgcatcttccggtcggcccttcaatcggaagaaatggaaggcggcggcgaagaagattgcgaaaacttccaaatcggcatcaaaaaactgctcaatgagttaaaatacagccaaatcgaaacattaaaacaaaaaagcctgcaatccggcttaaatgaaagcgagaaaaaacttttgctgtcgctgctgaccgcaaaacaaaattga

SEQ ID NO: 44302 - DNA, 354 bp, Neisseria meningitidis; identical to SEQ ID NO: 37509

SEQ ID NO: 44303 - DNA, 1185 bp, Neisseria meningitidis
atgagtttacacagcgacatcctcgtcgtcggcgcaggcccggcgggtttaagttttgcagccgaacttgccggcagcggtttgaaagttaccctgatcgaacgcagcccactgactgttctgcaaaatcctccatatgacggacgcgaaatcgccctgacccatttttcccgcgaaatcatgcagcgtttgggtatgtgggacaaaattcccgaaaacgaaatctaccctttgcgcgatgccaaagtgctgaacggacgttccgactaccagctccactttccccaaccgactgaagcgcgcggcgaacctgccgactgtttgggctatctgatttccaaccacaatatccgccgcgccgcctatgaagtcgtatcacaactcgacaatgtcagcattctgaccgatacggttgtcaaagaagtcaaaacatctgacaacgaagcacaagtcattttggaaaacggcaaaatcctgactgcacgcctgcttttggcggcagacagccgcttctcgcaaacccgtcgacaactcggtatctcctccgatatgcacgattacagccgaaccatgttcgtctgccgtatgaaacataccctttccaaccaacataccgcttacgaatgcttccattacggacgcaccatcgcactgctgccgctggaagagcacctgaccaataccgtcattaccgtcgataccgataaaatcaacagcgttcaaaacctttcgcccgaagaattggcggcaagcgtaaaagaacaactcaagggtaggcttggcgacatggaactggtcagcagcatccaccattacccccttgtcggtatgattgccaaacgtttctacggcaaacgcagcgcgctgatcggcgatgcggctgtcggtatgcaccccgttaccgcacacggtttcaacttgggtctgtccagcgcagatattttggcaaaactgatactcgaagccgagcagcgcggtcaggacatcggcgcatcttccttgttggaaaaatacagcaacaaacatatgctgcacgcccatccgctttatcacggaaccaatatgatgctgaaactgtttaccaacgaaaccgcgccggcaaaactgctgcgcggtttggtattgcgtgccggcaacaacttcccgccgctgaaaaagctgattaccaaacaactgaccggttga

SEQ ID NO: 44304 - DNA, 1578 bp, Neisseria meningitidis
atgcgcaccaaccccaaaacacaggcaatgccgtctgaaaccatatccctgatgaaaacacgcagcctaatttcccttttatgcctccttctctgttcatgttcttcatggttgcccccactggaagaacggacggaaagccgtcatttcaatacttccaaacccgtccgcctggacaacatcctgcaaatccggcacacccctcataccaacgggctatccgatatctatctgttgaacgacccccacgaagcctttgccgcccgcgccgcccttatcgaatctgccgaacacagcctcgatttgcaatactacatctggcgcaacgacatttccggccgactgctgttcaacctcgtgtaccttgccgcagaacgcggtgtgcgcgtacgcctgctgttggacgacaacaacacgcgcggattggacgacctcctgctcgccctcgacagccatcccaatatcgaagtgcgcctgttcaaccccttcgtcttacgaaaatggcgcgcactcggctacctgaccgacttcccccgcctcaaccgccgcatgcacaacaaatcctttaccgccgacaaccgcgccaccatactcggcggacgcaatatcggcgacgaatacttcaaagtcggtgaggacaccgttttcgccgacctggacatcctcgccaccggcagcgtcgtcggcgaagtatcgcacgacttcgaccgctactgggcaagccattccgcccacaacgccacgcgcatcatccgcagcggcaacatcggcaagggtcttcaagcactcggatacaacgacgaaacgtccagacacgcgctcctgcgctaccgcgaaaccgtcgaacagtcgcccctctaccaaaaaatacagacaggacgcatcgactggcagagcgtccaaacccgcctcatcagcgacgaccctgcaaaaggactcgaccgcgaccgccgcaaaccgccgattgccgggcggctgcaagacgcgctcaaacagcccgaaaaaagcgtctatctggtttcaccctatttcgtccccacaaaatccggcacagacgcactggcaaaactggtgcaggacggcatagacgttaccgtcctgaccaactcgctacaggcgaccgacgttgccgccgtccattccggctatgtcaaataccgaaaaccgctgctcaaagccggcatcaaactctacgagctgcaacccaaccatgccgtccctgccacaaaagacaaaggcctgaccggcagctccgtaaccagcctgcatgccaaaaccttcattgtggacggcaaacgcatcttcatcggctcattcaacctcgacccccgttccgcacggctcaatactgaaatgggcgttgttatcgaaagccccaaaatcgcagaacagatggagcgcacccttgccgataccacacccaaatacgcctaccgcgttaccctcgacaggcacaaccgcctgcaatggcacgatcccgccacccgaaaaacctacccgaacgaacccgaagccaaactttggaaacgcatcgccgcaaaaatcctatccctgctgcccatagaaggtttattatag

SEQ ID NO: 44305 - DNA, 1773 bp, Neisseria meningitidis
atgatactgccagcccgtttttcagacggcatcagcctttccctacgcctgaaactcctgaccggagtgtgggtcgggttggcggcattgtctgtcgttttgacactgctgctctctttgcgtctggaaaacgcggcctccgtcatcgaagaggcgggcaacttgagaatgcaggcataccgtctggcatacatggcgggtgaaggatctccccgctcccaaatagacaatcaggttgacgaatttgaaaaaagcctgaatcgtatttcacaaagtgatgccatccatccgctgattccttcggacacccctcttgcttatgatttgatacaatccatgctgattatagattggcaggcacacatcctccccccgctccagtcctaccggcgaccgactcaggtcgatctctaccgctttgccggaaacatcgaactgtttttgcaggcattggaaaatgccaacgaaaaaaacacatggtggctcaggcgttttcaatgggcaattatgttgatgacgctggtgtcgtctgtactgatgctgttttggcaccagatttgggttatccggccgctgcaggcgttaagggaaggtgcggaacgcatcggacggaggtgtttcgatattccggttcccgaaggcggtacgccggaattcaaacaggtcgggcgttgtttcaatcaaatgggcggcaggttgaaaattttatatgatgatttggaaggacaagtcgccgagcagacacgcagtctcgaaaaacaaaatcaaaacctgaccctgctgtaccaaactacacgggacctgcaccaatcctacataccgcaacaggctgcagaacattttctaaaccgtatcctgcccgccgtaggagcagattccggcagagtttgtttggacggcgaatccgatgtttatgtttccattcatcatgcggattgcggcacagcagcttcggatttggggaagtaccatgaggaaatcttccccattgagtaccagaacgaaacattgggcaggctgttgctcagcttttcagacggcatttccctcaccggagacgaccgcacgctgcttcaaaccctgattcggcaattgggcgtatcgctcgctagcgcgaagcaggaagaagaaaaacgcctgcttgcagtattgcaggaacgcaacctgattgcgcaaggattacatgacagcatcgcacaagcattaacgttcctaaacctacaggtacagatgctggaaaccgcctttgccgaaaacaaacgggaggaagccgcagaaaacatcagcttcatcaaaacaggcgtgcaggaatgttatgaagatgtccgcgaactgctgctcaacttccgtaccaaaatcagcaataaagaatttcccgaagccgttgccgacctattcgcccgctttacgcaacaaaccgggataacggtcgaaaccgcctgggaaaacggttcgttcctgccgcctcaggaagcgcagctccaaatgatttttatcctgcaggaaagcctgtccaacatccgcaaacacgcccgcgccacccatgtaaaattcaccctttccgaacacggcggacgctttaccatgaccatccaagacaacggacaaggtttcgacacggagaaaataggagaacccacgggcagccatgtcggactgcacatcatgcaggagcgtgccaaacgcatccatgccgttttagaaatccgttcccaagctcaacagggaaccaccgtctcattgacggttgcatctgaagaaagcttgaaatga

SEQ ID NO: 44306 - DNA, 2082 bp, Neisseria meningitidis
atgaaatcactcaaaaccttcctcatttggggcatagtggtactggtcggcttagcatcctttaccactctggccctcagccgaggcgaacaggtcagcgcggtatggatggttaccgccgccatatccgtttactgcatcgcctaccgtttttacagcctctacatcgccaaccgcgtaatgcggctcgatcctaaccgcctgactccggcagaacgccacaacgacggcttggactacgttccgacgcacaaaggcgtattgttcggacaccactttgccgcgattgcgggcgcgggccctttggtcggcccggttttggcggcgcaaatgggttacctgcccggtactttgtggattatcttcggcgtggtgtttgccggcgcggtacaggatatgatggtactgtttgtttctatgcgccgtgacggtaagtctttgggcgatattgtgaaacaggaactcggcactgtccccggcgtgattgcatccatcggtattttgatgattatggtcatcattatggcggtgttggcattgatcgttgtgaaagcattggttcacagcccttggggtacgtttaccatcgccgccactatgccgattgccctgtttatgggtatttacacgcgctatatccgtccgggcaaaatcggcgagatttccatcgtcggctttattttgctgatgctggcggtaatttacggcgaagatgtggcgaaaagttccatcggacattggttcgaccttgacggcatccagctcacttgggcgattatgatttacggctttgtcgcctccgtattgcccgtatggttgctgctcactccgcgcgactatctctctaccttcctgaaaatcggtacgattgcggccttggctttgggtatcgtcatcgtcaatcccgctttgcaaatgcctgcggttacccactttatcgacggttcgggtccggtattctcaggcgcattgttcccgttcttgttcattaccatcgcctgcggtgcggtttcgggcttccacgcgctgatttcctccggcaccacgccgaaaatgctggaaaacgaaacccacgtccgtatgattggttacggcggtatgttgatggaaagtttcgtagccattatggcgcttgccgccgccgcatcgcttgatcccggcgtgtacttcgccatgaacagccctgccgccctgatcggtacggatgccaacaccgccgccgaagtgattaccaccaagctgcaattccctgtcgatgcggcaaccctgttgcataccgctaaggaagtgggcgaaaacaccatcctttcccgtgcaggcggtgcgccaaccctcgcagtcggtatggcgcacattatgagccgcctgattccgggcgaggcgatgatggcgttctggtatcacttcgccctattgtttgaagccttgttcatcctgaccgccgtcgatgccggtacgcgcgtcgcacgttttatgattcaagacttgggcagcatcttctacaaacctttcggcaacaccgactccatccccgccaacctgattgcgaccttcttcgccgtggcattgtggggctacttcctctacaccggcgtaaccgacccgctgggcggcatcaactcgctctggcctttgttcggcatcgccaaccaaatgctggcaggcgtggccttgattatgtgcgccgtggtgctgattaagatgaaacgcgaccgttatgtttgggtggtactcgttcccgccgtcggcgtactgttcgtaacctgctacgccggcctgcaaaaactgttccacagcgacccgcgcatcagcttccttgcccacgccggcaaatacagcgacgcattggctaaaaacgaagtccttgcgcctgccaaagacatcggcgaaatggcgcaaatcatcttcaacgacaagattaatgccggtctgaccatcctcttcttgtcggttgtcgtgattgtcgccgcgtacggtttgcgtaccgccctcaaagcacgcaaagtcggctggccgaccgccaaagaaatcccggcggtgtaccgcgacagcaaacagccggaggcacaaagtgaagcataa

SEQ ID NO: 44307 - DNA, 585 bp, Neisseria meningitidis
atgcacatactgaccgccggcgtggacgaggcaggacgcggaccttttgtcggcagcgtgtttgccgccgccgtcatccttccggaaacattcgacctgcccggactgaccgactccaaaaaactcagcgagaaaaaacgcgacgcgcttgccgaaatgataaaaaatcaggcggccgcgtggcacgtcgccgccgccacgcccgaagaaatcgccagcctcaacatcctgcacgctaccatgctcgccatgaaacgcgccgttgacggtttggctgtgcgtcccgaaagaatattcatcgacggcaaccgcattccagaacatttaggtatccctgccgaagccgtcgtcaaaggcgacagcaaaatcatcgaaatctccgccgcatccgttttggcaaagaccgcacgcgatgcggaaatgtacgcactggcgcaacgccatccccaatacggtttcgacaaacacaaaggttacggcacgaagcagcatctggaagccctcaaacaatacggcgtgctgcccgaacatcgccgcgacttcgcccccgtcagaaacctgctcgcgcagcagacgctgttttaa

SEQ ID NO: 44308 - DNA, 855 bp, Neisseria meningitidis
atgaaaatcgtcctgattagcgggttgtccggttcgggcaaatccgtcgcactgcgccaaatggaagattcgggttatttctgcgtggacaacctgcccttggaaatgttgcccgcgctggtgtcgtatcatatcgagcgtgcggacgaaaccgaattggcggtcagcgtcgatgtgcgttccggcatagacatcggacaggcgcgggaacagattgcctctctgcgcggactggggcacagggttgaagttttgtttgtcgaggcggaagaggccgtgctggtccgccggttttccgaaaccaggcgaggccaccctctgagtaatcaggatatgaccttgttggaaagcttaaagaaagaacgggaatggctgttcccgcttaaagaaatcgcctattgtatcgacacttccaagatgaatgcccaacagctccgccatgcagtccggcagtggctgaaggtcgaacgtaccgggctgctggtgattttggagtccttcgggttcaaatacggtgtgccaaacaacgcggattttatgttcgatatgcgcagtctgcccaacccgtattacgatcccgagttgaggccttacaccggtatggacaagcccgtttgggattatttggacggacagccgcttgtgcaggaaatggttgacgacatcgaaaggtttgttacgcattggctgccgcgtttggaggatgaaagcaggagctacgttaccgtcgccatcggctgtaccggcgggcagcaccgttccgtctatgttgtcgaaaaactcgcccgaaggttgaaagggcgttatgaattgctgatacggcacagacaggcgcaaaacctgtcagaccgctaa

SEQ ID NO: 44309 - DNA, 756 bp, Neisseria meningitidis
atggattcttttttcaaaccggcagtttgggcggttttgtggctgatgtttgccgtccgccccgcccttgccgacgagttgaccaacctgctcagcagccgcgagcagattctcagacagtttgccgaagacgaacagcccgttttacccatcaaccgagcccccgcccggcgggcgggcaatgccgacgaactcatcggcagcgcgatggggcttaacgaacagcccgttttacccgtcaaccgagtccccgcccggcgggcgggcaatgccgacgaactcatcggcaacgcgatggggcttaacgaacagcccgttttacccgtcaaccgagcccccgcccggcgggcgggcaatgccgacgaactcatcggcaacgcgatggggcttttgggtattgcctaccgctacggcggcacatcgatttctaccggttttgactgcagcggcttcatgcagcacatcttcaaacgcgccatgggcatcaacctgccgcgcacgtcggcagaacaggcgcggatgggtacgccggttgcccgaagcgaattgcagcccggggatatggtgtttttccgcacgctcggcggcagccgcatttcccatgtcggactttatatcggcaacaaccgcttcatccacgcgccgcgcacggggaaaaatatcgaaatcaccagcctgagccacaaatattggagcggcaaatacgcgttcgcccgccgggtcaagaaaaacgacccgtcccgctttctgaactga

SEQ ID NO: 44310 - DNA, 1842 bp, Neisseria meningitidis
atgcagacaaattatttgtctgaaacggattcgattatgaaaaaactgatttgcctgttcgccgtatttttgatgttgtgcggacgagctttcgcgctggatgcgaacgatctgctgccgccggaaaaggcattcgtgccggagcttgccgttgccgacgacggtgtgaacgtccgtttcaggattgccgacggatactatatgtatcaggcgaaaatcgtcggcaagaccaatccggcggatttgttgggacagccttctttcagcaagggcgaagagaaggaagacgagtttttcggcaggcagacggtttaccatcacgaagcgcaggttgcctttccttatgcaaaggctgtcggcgaaccgtataaattggttttgacctatcagggctgtgccgaagtcggcgtgtgctatccgcccgtggataccgagtttgatatttccggcaacggcacttaccatccgcaaaccgacgaaccggcatccgccaaagaccgctttttgcagccttcctctcaaaacggcagcggggcgctgccgcccccgaagggggatgagggcggcgacagccgtttcaagctgtcttgggatacgctcaacgccaatcttttggcgttttttctcgccggtttgggtctgagttttaccgcctgtatgtatcccctgttgccgattgtttccagtattgtggtcggcgacaaaaaggcgggcaaggcgcgggcgtttgtgctgtccgtcgtttatgttcagggtttggctctgacttatacgctggtcggcattgttgccggactgacgggcgcgctgctgaccgtatggttgcagcaggcttgggtcgtgttggcggcatcggctttgatggtcgtcttggcactgtctatgttcgggctgttcaacatccagcttcccaacgccgtgcagtcgtattttcagaatcaaagcagcaggctttcaggcggtaaaatcgtttccgtctttattatgggcatattgtccgcgctgattgtcgggccgtgcgtcgccccgccgctggcatttgctttgggctacatcggtcagacgggcgatgcggttttaggcggtttggcactttacactttggcgttgggcaccggcgttccgctgattgccatcggcacgttcggcgggcatatcctgcctaaggcaggcgattggatgaatgccgtcaaatacgctttcggctttatcctgcttgccgtcgccgtttacctcgccacgccgcacttgccctattatctcgtcgtcgcgctgtacacgctgctgatgctggttcctgcctgtatgctgctggtcaacggacgcaggcagaaacgccgtccgaaagctgtggcattcgcattgggcggcatattgctgataggcggcgcgtggttcggctggcagggcgcaaacggcaaaacgaccgcgctgcaccatttcctgaccctcaatccgccggccgaagcaggcaaatcttcggaacacggaaaaatgtttgccgatactgccgcgctgaaggcagcgatggatacggcgttgaaagaacatcccgacaaacccgtcgttttggatttttatgccgactggtgcatttcctgcaaagaaatggcggcttacacgctcaatcagccggaagtgcatcaggcagtcgatatggaacgctttttccaaatcgacgtaaccgccaacaagcccgaacatcaggcgttgttgaaagaatacggtctgttcgggccgccgggcgtgtttgtcgtccgctccgacggcagccgcagcgagccgctgctgggttttgtcaaagcagacaagtttatcgagtggtatgaacaaaaccgctga

SEQ ID NO: 44311 - DNA, 516 bp, Neisseria meningitidis
atgaaacgcaccaaaaaataccctttcttaacgttgcagcggcaacgtttccatttgaactttgaaaacgcctcttccgccgccggcatcccagccgaacgcgatttctaccgctgggcgtggtctgccttgaaaaatgaataccgccgcgccgacatcagcctgattcttctggacgaagaagaagcccgagcctacaaccgcgactaccgcggcaaagattacgccaccaatgtattgagtttcgcgctcaacgaaggcgaaatcctgccctgccaagtttcggaaaaactgtacggcgatttgattatctgcccgcaagtggttttgaaagaagccgccgaacagggcaaaacgcccgaacggcattttgcccacctgaccatacacggcgttttgcacctgatgggctacgaccacatcgaagacgatgaagccgaaataatggaagccgaagaaatccgcctgatgctggcggcaggcttccccaacccctaccaagaggacgaatattaa

SEQ ID NO: 44312 - DNA, 237 bp, Neisseria meningitidis
gtgcaggcggatttagcctatgccgccgaacgcattacccacaattatccggaaccaaccggtgcagacaaagacaaaataagcacagtaagcgattatttcagaaacatccgtgcgcattccatccaccctcgggtgtcggtcggctacgacttcggcgactggagaatagcggcagattatgccagttacagaaaatggaaagaaagtaattcttctactagggcgtgtccctaa

SEQ ID NO: 44313 - DNA, 1035 bp, Neisseria meningitidis
ttggaagacgaagattttattcgcgccgcgtccatgctcgccgaagaagttttcggtttctgtatctacaaagaatccaaaggctcgggcggtcgtttctatgagcgctgttggttgatgggttcggaagacgtcctatacggtcgcgtccattttggcggacaaaacaataccatccttttcgaactgaccggcaccggttgcggcgtcgcaaaagaaggctgggaatcacgacttttcgcattcctgactaatgcaatccgcccaaaaatcacacgcgttgacatcgcaaaagactttttcaacggcgaatacagcccgaaccaagcccgtgaagaccgaaataaaggtatgtttacctgtcatcacgtcaaaccaaaaggcgaatgtttggggtcagattgggaagaagacgatgaagccaaaatgaccaaaggcaagacctatggtatcggctcccgtgaatcgtccaaatatgtccgcgtctatgaaaaaggcaagcagttgggcgataaaacaagcacatggacgcgctttgaaattgaattcaaagcaaaagacatcgttatccctttcgaagttttgcagaatccgggcgaatatttcggcggcgcatatccgatttgcgaacgattcgcccaaaaggcaacgcgcatacacgcggttaaggaagataaggtcatttcagccgaccgctaccttgaatgggtaaaaaaacagttcggacgtgcggcaaacggtctgaaattcatttttcccgaattggacaaagccaaactgtttgaactgattgagccgagtcatcacaagctgcccaagtctttggctcccgaagcctacgactgcgcctttttgaaagctcaagccattcatgaacagcccgcattcaaaccgtacaaagacccttactatatgtacgaatattacgagaatcttgaaaaacagcttgaacagcaaaaacacgtcaacaatgaagaaagctataacaacttcatttacgacaaattcgcaagactaccgatttcatgggcttaa

SEQ ID NO: 44314 - DNA, 618 bp, Neisseria meningitidis; identical to SEQ ID NO: 36899

SEQ ID NO: 44315 - DNA, 987 bp, Neisseria meningitidis
atgtcttctacgccgaataaacaagccggatatccccgactggtcgccgatatcggcgggacgaatgcacgctttgcgctggaaaccgcgccgcgcgtcattgaaaaagccgccgtgcttccgtgtaaagactacgatacggttaccgatgcggtgcgtgcctatctgaatcaaagcggtgcaacagccgtacggcacgcggcatttgccatcgccaacccgattttgggcgactgggtgcagatgaccaaccaccattgggcgttttccatcgaaaccacccgtcagactttggggctggacaccctcatccttttgaacgactttaccgcgcaggcattggcggtaacgcagacttcaagcaaagacctgatgcaggtaggcgggcaaaagcctgtcgaatttgcccccaaagccgttatcggccccggtaccggcctgggcgtgagcggattggtgcacagccacgcaggctgggtggctttggcgggcgagggcgggcataccagtttcccgccgtttgacgatatggaagtgctgatttggcagtacgccaaaaacaaatacggccatgtttccgccgaacgctttttgagtggcgcgggcttgagcttggtttacgaggctttggctgcaaaacagaaagccaaacccgccaaactgatgccgtctgaaatcacggaaaaggctttgagcggcgcgtcgcctttgtgccgtcagactttggacatcttctgcgccatgctcggcacggttgcttccaacctcgccctgacgctgggcgcgcgcggcggcgtgtacctgtgcggcggcattattccccgcgtgttggaatatttcaaaacttccccgttccgcagccgtttcgagaacaagggcaggtttgaagcatatcttgccgcgattcccgtgtatgtcgtcttgagcgagttccccggaatttccggtgcggctgcggctctcgacaaccatttgagaaacgtttaa

SEQ ID NO: 44316 - DNA, 534 bp, Neisseria meningitidis
atggcagagttcgcaacgattgccagaccttatgcaaaggcattgttcggtctggctcaggaaaaaagccaaattgagtcttggttgggcggactggaaaaacttgcggcggttgttcaggaagggaaggtggcttcattgattgaccgtcctgaaacgaatgcttcagaaaaagcagatatcctcatcgatttggtcggtttgaaagacaaggagttgaaaaactttgttatcgtcttggccgggcagaaacgtttgtcgatattgccggaagtatatgctcaatatcaagacttgaccttatcattcaaccatatcaaatctgccgtcatttacagtgcctatccgttgaccgacaaacaggtcggcgagttggcgcaaatgctgaataagcgtttcgacagcgagctgaaaatctctgtcgaaatcgaaccggagctgattggcggcataaaagttgaagtgggtgatcaggttttggatttgtctgtacaaggcaaattgagtgccttgtacacgactatgacgaattag

SEQ ID NO: 44317 - DNA, 771 bp, Neisseria meningitidis; identical to SEQ ID NO: 37153

SEQ ID NO: 44318 - DNA, 324 bp, Neisseria meningitidis
atgaacgcatttgcacaagcactttcctcggcactcgaccgctgtatcgccaccaacaccgtcgccaaacaaaaccggcccgtcggcttcctctaccgcgaagcccccgtttttgaaaacgacagcggctggcgtttcttcagcggcgacgagaccgacgaatacaccgacgatcccgacaacttcagcatcgtcagcctcgccgacatcgccaaaaccaaccctgaaaccgccgtactgctttcccaacctgaaggcagcgcgtgggaattggcagaagacggcacattccaaaccgtcgccgactggcaaccgcaagactga

SEQ ID NO: 44319 - DNA, 546 bp, Neisseria meningitidis; identical to SEQ ID NO: 39790

SEQ ID NO: 44320 - DNA, 1170 bp, Neisseria meningitidis; identical to SEQ ID NO: 39478

SEQ ID NO: 44321 - DNA, 1143 bp, Neisseria meningitidis; identical to SEQ ID NO: 39151

SEQ ID NO: 44322 - DNA, 1692 bp, Neisseria meningitidis; identical to SEQ ID NO: 39144

SEQ ID NO: 44323 - DNA, 441 bp, Neisseria meningitidis; identical to SEQ ID NO: 39177

SEQ ID NO: 44324 - DNA, 840 bp, Neisseria meningitidis; identical to SEQ ID NO: 38805

SEQ ID NO: 44325 - DNA, 630 bp, Neisseria meningitidis; identical to SEQ ID NO: 40769

SEQ ID NO: 44326 - DNA, 2526 bp, Neisseria meningitidis
atgaatccaaactcaaaacataacactaactttaccaatcttcttaaaccgtctgatagtgatataaaacaatttgccgcacaacacatccgccacctcaccgacctgctcaaccgctatgcctacgaatactacaccctcgacgcgcccagcgtacccgatgccgaatacgacaaattattccgcgagctcgaagcgttggaattaaaccatcccgagctcaaactgcccgacagtccgacccagcgcgtcggcggcgagcctttagcgggatttgccgaagtgcgccacgaagtgccgatgctgtcgctgaccaacgctttttccccgcaagatgaaaacggcgtgttcgaccatgccgaaatgtacgctttcgaccaacgcgtgcgcgacggtttggacggcggcaaacccgaatacgttatcgaacccaaattcgacggcctcgccatcagcctgctctaccgcgacggcgtattggtacaggcggcaacgcgcggcgacggcacaacgggcgaagacgttacccaaaacatcaaaaccgtcgccaacatccccctgcggctgcacggcgaaaatacgcccgaactcatcgaagtacgcggcgaagtactaatgcaaaaagccgattttgccgccctcaataaaagacaagccgaaaacgggcaaaaaccctttgccaatccgcgcaacgccgctgccggcagcctgcgccaactcgattcgcgcatcactgcgcaacgcaaactgcactttttcccctactccgtcgcccgccagcaaggcggtttcgtcgcggaagaacacatccaagaactcgcctatttccaagcactcggcttcagtctgccaaatggcaatttcggctgtttcaaaaatatcgacgaagtattggcgttttacgaacaaatgcagcaaaaacgccccgaactgccctacgaaatcgacggtatggtggtcaaagtcaacagcttggcgcaacagcgcgaactcggcttcatctcacgcgcgccacgctgggcgattgcccacaaattccctgccgaagaagccctgaccattgtcgaagcgattgacgtgcaaatcggcaggacgggcgcggtaacgccggttgcccgattacaacccgtattcgtcggcggcgtaaccgttaccaacgccaccctgcacaatcaggacgaagtatcgcgtaaagacgtgcgcgtcggcgataccgtcgtcgtgcgccgcgccggagacgtgattcccgaagttgtgcgcgtgatttttgaacgccgcccgatgcgggaaaccgccgttgccgtttcagacggcatcgggcatcggcaggacgatttgtttgccgaaacaccgtccgccaatcaaacccaatccgttccgctccacaagccctaccgcctgccgacccactgccccatctgccgcagcgaaatcgaacgcgaagaaggcgaagccgtcgcccgatgcagcggcggtatgctttgtcaggcacaacgcgcgcaaggcttaatccacttcgcctcgcgcaaagcgatggacatcgacggcttgggtgaaaaacaaatcgaacagcttgtcgcgcaagacctcgtccgccacttcgccgatctctaccgcctcgacatcccgaccttgcaaaaaatgaaggaaacagcggacaaaaccgttgccgaatcggatcaaatgccgtctgaaggcagttcggtcggcgcgtcgggcaaacataaaaaacaaccagtcaagtgggcggaaaacatcctcgcaggcatagaagccagcaaaacgcccgaactcgcccgcttcctgttcgcgctcggcatccgccacgtcggcgaacgcaccgccaaaacgctggcacaggcattcggcacattggaacgcgtccgccgcgcccccgaacccgtcctcgcctgcctgcccgacatcggtacggtagtggcgcgttccattgcccacttcttcgcccaagccgaacagcaggcgatgatagacgaactgctcgccgcaggcgttgccccgcaaacccaagccgttaccatcccgcccgcccgccacgccgaaccgcaacgctggatcgcccgcctgcccggtttcaaaatcagcgaaaacaaagcccaagccttatgggaactcgccggcaaaaacatagaagggctgcaaaccgacaaagccctccccaccgactggcaggcgtggcgcagcgaaccacaaaacgccgccctgctcgaaaacctgaaaaccttcttcgcgcaaatgccgtctgaagacgaggcggcgcaaggttcagacggcatcaataaagccgtggcgggcaaaaccttcgtgttaaccggcaccctgcccaccctcaaacgcgaccaagcccaatccctaatcgaagccgcaggcggcaaagtttccggcagcgtgtccaaaaaaaccgattacgtcgtcgccggagaagccgcgggcagcaagctggaaaaagccaatgccttgggcgtttccgtcctcagcgaagccgaactgcttaccctgctcggctga

SEQ ID NO: 44327 - DNA, 846 bp, Neisseria meningitidis
atgaaaaacaaaacctcatcacttctcttatggcttgccgcaatgatgctgaccgcgtgttccccgagcaaagaagataaaacgaaagaaaacggcgcatccgccgcctcgtccacggcatccgccgcttcgtcttccgcgccccaaaccgatttgcaaccggccgcatccgcccctgataacgtcaagcaggcagaaagcgtgccgccgtcaaattgcaccgacctgcaccccgccaccggcattgacgatctcatgcagcaaatcgccgaacacattgactcggactgtctgtttgccctttcccatcacgaactggaaacccgtttcggcttacccggcggcggctatgacaacatacagcggctgctgtttcccgacatccgccctgaagatcccgactaccatcagaaaatcatactggcaattgaagacttgcgttacggaaagcgcacgatcagccggcaggcacaagatgccttgatggaacaggaacgccgcctccgagaagcgacgctgttgctgatacagggcagtcaagaaacccgcggacaaggcgaggagccgaaacgcacgcgttattttgaagtttcggcaacccctgcctattcgagccggcacaacaacggacttggcggcaatttccaatacatcggccaattgcccggctatctgaaaatacacggagaaatgcttgaaaaccaatcactcttccggctgtccaaccgtgaacgcaatcccgacaaaccgtttttagacatccattttgacgaaaatggcaaaatcacgcgtattgtcgtttacgaaaaaaacatctacttcaatccaaacttggggcgaagataa

SEQ ID NO: 44328 - DNA, 2838 bp, Neisseria meningitidis
atgttagacaaatacaatccagccgaaatcgaatcaaaacattatcaaaactgggaagagcagggctatttccagcctgatatggatttgacgaaaccgtctttctccatccaactgccgccgcccaacgtaaccggcacgctgcacatgggccatgccttcaaccaaaccatcatggacggcctgacccgctactaccgcatgaaaggctgcaacactgcctggattcccggcaccgaccacgcgggtatcgccacgcaaatcgtggtcgagcgtcagcttgccgcgcaaaacgtgtcccgtcatgacttaggccgcgagaaattcttggaaaaagtgtgggaatggaaagaagtttccggtggcacgattacccaacaaatgcgccgcgtgggctgctctgccgactggacgcgcgagtatttcacgatggacgacgtgcgcgccgaaaccgtaaccgaagtgttcgtgcgcctgtttgagcaaggtttgatttaccgtggcaaacgcttggtgaactgggatccggttttgggtacggcagtatcggatttggaagtggaaagcgtggaagaacaaggctctatgtggcacatccgctatccgctggcggacaatcctgccgaagccgtgattgtggcgaccacccgccccgaaacgctgctgggcgacgttgccgttgccgtcaatcccgaagacgaacgttatacccatttgattggcaaggaattaatcctgccgctgaccggccgcaccattcccgtgattgccgacgaatacgtcgaaaaagacttcggcacaggctgcgtaaaaatcacgcccgcgcacgacttcaacgactacgaagtcggcaaacgccacgacacgcgcctgattaatgtgttcgacttggaagccaaagtgctggcaaacgccgaagtgttcaacttcaaaggcgaagcgcaaccaggctttgccctgcctgaaaaatacgcaggcttggaccgctttgccgcgcgcaaacaaatggttgccgatttgcaggaacaaggcttgttggtcgaaatcaaagcgcacacgctgatgacgccgaaaggcgaccgaacaggctcagtgattgagccgatgctgaccagccaatggtttgtcgccatgtccgccacaccgaacggcggcgagcctgacagcgaattcaaaggcttgagcctcgccgacaaagccaaaaaagccgtcgacagcggcacggtacgctttatccccgaaaactgggtcaacacttacaaccaatggatgaacaacatccaagactggtgtatctcgcgccaactgtggtggggccatcaaattcctgcgtggtatgacgaagcaggcaatgtttacgtcgcccgcaatcaggcggaagccgaaaaacaagccggcaaaaccggtttgacccgcgaagaagacgtattagacacatggttctcctccgcgctcgtgccgttctccacgctcggctggccgtctgaaaccgacgaactcaaagccttcctgccgtccaacgtcttggtaacaggctacgaaatcatcttcttctgggtggcgcgtatgattatgatgaccacccacttcaccggcaaagtaccgtttaaagacgtgtacatccacggcatcgtgcgcgaccacgaaggcaaaaaaatgtccaaatccgaaggcaacgtcatcgaccccgtcgatttgattgacggtatcgacttggacaaactgctggtgaaacgtaccaccggcctgcgcaaacccgaaactgcgccgaaagtggaagaagccacgaaaaaactcttccccgaaggcatccccagcatgggtgcggacgctttgcgcttcactatggcgagctacgccagcttggggcgttcggtcaacttcgacttcaaacgcgccgaaggctaccgcaacttctgcaacaaaatctggaacgccaccaacttcgtcttgatgaacaccgaaaaccaagactgcggctacggcgcaaccgctgccgaaccgcgcggctattccttccccgatatgtggattgtaggccgtctgaatcagaccatcgagcaggttacgcaagcctacgaaacctaccgctttgatttggcggcagaaaccctgtacagcttcgtatggaacgactattgcgactggtatttggaacttgccaaagtgcagcttcaaaccggctgcgccagccgccaacgcgccacacgccataccttgttgcgcgtactcgaagccgccctgcgcctgctgcacccgattatcccgttcatcaccgaagaattgtggcaaaccgtcgctcctatgtgcgacgcgaaaaccgccgacagcatcatgctcgcccgcttccccgaagccgacggcggcgatattgttcagacggcattcgagcaaatgaccgtgttgcaggatttgattggcgcagtccgcaacctgcgcggcgaaatgggcatccagcccaatgtgaaagccccgctgtttgtcgaaagcgcagacgacttggcggactacctcaaatacctgccgatgatgacccgcctgatcgaagcacagcaagtcgccgccctacccgaaagcgaagacgcgcccgtcgccgtctgcaacggcgcgcgcctgatgttgaaagtcgaaatcgacaaagctgcggaaaccgcccgtttgagcaaagaagccgagaagctgcaaaaagccttggacaaactcaacgccaaactctccaaacccggctacaccgaaaaagccccagcgcatttggtggaaaaagacaaagccgatttggcggaattggaagacaaaatggcaaaagtgcaaactcagttgtcgaagttgaaagactga

SEQ ID NO: 44329 - DNA, 642 bp, Neisseria meningitidis; identical to SEQ ID NO: 38780

SEQ ID NO: 44330 - DNA, 660 bp, Neisseria meningitidis
atgataaaaaatatttctaaattaataaaccatgcggttttaattggctttatcccaaatattgtttttgcttaccctatatttgctgaaaaccccgcttcttaccaaaacatccatgtacggagttggaaagcacggcgagattccggcatagtaaaacaagatttggatttttcttgcggcgcggcttcgattgccacgttactgaataatttttatggcagacattattctgaagcggaaatcttggacaaaatggataaaacccaaatgcgtgcttcttttgatgatatgcaacgcataatgcccgaactgggttttgaagcacaaggttatgctttgccatttgaacagttggtacaactaaaaattcctgtaattgtgtatttaaaataccgtaaaaacaaccatttttcggtattgaacggtattaacggagaaactgttttgctggctgatccatcgctggggcacgtctcaatgagcaaatcacaattcttgagcgcatggaaaacacgtgatggcgaaatggaaggaaaaattttagccatcgtgccaaaaaatactgattttgttagaaatcagatgttttttaataagaatcccgttcgtcaaacacgttttacggtagaacaaatccaaatgcggcaaaaacgataa

SEQ ID NO: 44331 - DNA, 642 bp, Neisseria meningitidis
atgaaactgtatatttacgaccattgcccgttttgtgtgcgtgcgcggatggctgccgggctgtttggcgcggacgttgaagaagccgtgctggcaaacgacgacgaggcaacgccgatcggtatgatcggtgcgaaacaagtgcccgtcctgcaaaaagaagacggttcgtttatgggcgagagtttggacattgtgcggcatttcgaccgcgaagaccgtctgaaagacgaagtccgccccgagatacgggcgtggctggacaaggtgggcggatacaacgacaaactggtgcagccgcgcgtgatcaaaatcgggctgcccgaatttgcaacgccggaagcggtaaaatattttacagacaaaaaagagaaaagcatcggcagcttttccgccaatttgaataaaaccgcccaatatctcgaacgcataaacgcagatttgcaagagttggagaatttgatggacggtgcttcagacggcatcaacggcggaatcggcatggaggatattttggttttccccgttttgaggaatctgaccgtggtgcgcggtatcgaatggcctcaaaaggtgatgggttatttgatgatgatgagtgaaaaatcgggcgtgccgctttattttgacagggcattgtaa

SEQ ID NO: 44332 - DNA, 942 bp, Neisseria meningitidis
atgagtgcgaccgaaatcaaaaaatctaaagcgaagattactgcctattcaaaactggttgccggcactgcgtctgccgttgtaggcggggatgtgaatacagcggcgaatgcggcacagatagcggtggagaataatactttgtatcctagatgcgttggtgcaaagtgtgatgaatttcaaaaggaacaacaaaaatggatacgtgaaaatcctgaagaatatcgagaagttttgcttcttcagacaggatttattccaattatcggtgatatacagagttttgtacaagcacagaccgctgccgatcacctgtttgctttgctgggtgtggttccgggtatcggtgaatcgatacaggcctataaagtagcgaaagcggcaaaaaatttacaaggcatgaaaaaagccttggacaaggcagcaaccgttgccactgcacagggctatgtcagtaaaaccaaaatcaaaatcggtcaaattgaattaagggttactgcagcaactgacaaacaattgctgaaagctattggcgaaggaagggacacgacaggtaaaatgaccgagcagttatttgactctttagctaaacaaaatggcttcagagtgctttcgggcggcaaatacggcggaaataacggttttgatcatgtatggcaggctgccgatggtagtgttgttttgattgtagaaagtaagcagattaggaacggtacggtacagctgaatccgaatggtgcgggtggatatacgcagatgagtcgtgaatggattaaacaagttgtaaaaagtttacctgatggtagtcctgctaaggcagttgtcttaaaagcaaatcagaacggcaaattaaaaacggcaatagcaggcgttgatcgtcaaacaggtaaggccgttattctttctgtcaaagttccttctaaaaccaatataaggagataa

SEQ ID NO: 44333 - DNA, 972 bp, Neisseria meningitidis; identical to SEQ ID NO: 39558

SEQ ID NO: 44334 - DNA, 2115 bp, Neisseria meningitidis; identical to SEQ ID NO: 43515

SEQ ID NO: 44335 - DNA, 1401 bp, Neisseria meningitidis
atgaccccttccgcactgaaaaaaaccgtcctgctgctcggcactgcctttgccgccgcatccgtccacgcatccggctaccacttcggcacacagtcggtcaacgcgcaaagtacggcaaatgccgccgccgccgaagccgccgatgcctcaaccattttctacaatccggccggtttgagcaaaatcgacagcagccaaatttccgtcaacgccaacatcgtgctgcccagcattcattatgaggcggattccgccaccgactttaccgggcttcccgtccaaggttcgaaaagcggcaaaatcaccaaaaccacggtcgcgccccacatctacggcgcatacaaagtcaacgacaatctgaccgtgggcttgggcgtgtacgtccccttcggctctgccaccgaatacgaaaaagattccgtgttgcgccacaacatcaacaaactcggtctgaccagcatcgccgtcgaacctgtcgccgcatggaaactcaacgaccgccattccttcggcgcaggcatcatcgcccaacatacttccgccgaactgcgcaaatatgccgactgggggattaagagtaaagcagagatattgacggcaaaaccgcccaaacctaacggtgtagccgaagctgcaaaaattcaggccgacggacacgccgatgtcaaaggcagcgattggggcttcggctaccaactggcgtggatgtgggacatcaacgaccgcgcgcgcgtgggcgtgaactaccgttccaaagtctcgcacacgctcaaaggcgatgccgaatgggcggcagacggcgcggcggcgaaagcaatgtggagtacgatgcttgcagcaaacggctacacggcgaatgaaaaagcccgcgttaaaatcgttacgcctgagtctttgtccgtacacggtatgtacaaagtgtccgataaagccgacctgttcggcgacgtaacttggacgcgccacagccgcttcgataaggcggaactggtttttgaaaaagaaaaaaccgtcgtcaaaggcaaatccgaccgcaccaccatcacccccaactggcgcaacacctacaaagtcggcttcggcggttcttatcaaatcagcgaaccgctgcaactgcgcgccggcatcgcttttgacaaatcgcccgtccgcaacgccgactaccgcatgaacagcctgcccgacggcaaccgcatctggttctccgccggtatgaaataccatatcggcaaaaaccacgtcgtcgatgccgcctacacccacatccacatcaacgacaccagctaccgcacggcgaaggcaagcggcaacgatgtggacagcaaaggcgcgtcttccgcacgtttcaaaaaccacgccgacatcatcggcctgcaatacacctacaaattcaaataa

SEQ ID NO: 44336 - DNA, 1278 bp, Neisseria meningitidis
atgcgtagcagcgatattttaattgtagacgacgaaatcggcatccgcgacctgctgtcggaaatcctgcaggacgaaggttattcggtcgcattggcggaaaacgccgaagaggcgcgcaagctgcgccatcaggtacgcccggcgatggtgttgctggatatttggatgcccgattgcgacggcatcacccttttgaaggagtgggcgaaaaacgggcagctcaatatgccggtggtgatgatgagcgggcatgccagcatcgataccgccgtagaagcgaccaaaatcggcgcgctcgactttttggaaaaaccgatttccctgcaaaagctgctgtctgccgtcgaaaacgcgttgaaacacggtgcggcgaaaatcgaaacgggaccggtgttcgacaagctgggcaacagtgcggcgattcaggaaatgaaccgtgaggtaggggctgcggtgaaacgtgcctctcccgtacttttgacgggcgaggcgggttcgccgtttgaaacggtggcacgctatttccataaaaacggtacgccgtgggtcagcccggcaagggtcgaatatctgatcgatatgccgatggaactgttgcagaaggcggagggcggcgttttgtatgtcggcgacatcgcccagtacagccgcaacatccaagccggtattgcctttattgtcggcaaggcggaacaccgccgcgtcagggtggtcgcatcgggcagcagggcggcaggttcagacggcatagcctgcgaggaaaagctggcggaactgctgtcggagtcggtcgtccgcattccgccgctgcgtatgcagcatgaagatattcccttcctgatacaggggattgcctgcaatgtggcggaaagtcaaaagattgcgcccgccgcattcagtgaagaggcacttgccgcattgacccgttacgactggccgggaaatttcgaccaactgcaaagcgtcgttgcaacgctgttgttggaggcggacggacaggaaatcggcgcggcggcggtttcttcccttttggggcagaatgtgcctgccgagggagcggaagatatggtgggcgggtttaatttcaacctgcccctgcgcgaattgagggaggaggtggagcggcgttatttcgagtaccacatcgcccaagaaggtcagaatatgagcaaagtggcgcagaaggtcggtttggaacgcacgcacctttaccgcaaactcaaacagctcggcatcggcgtttcgcgccgggcgggggaaaaaaccgaagaatag

SEQ ID NO: 44337 - DNA, 519 bp, Neisseria meningitidis; identical to SEQ ID NO: 37482

SEQ ID NO: 44338 - DNA, 1389 bp, Neisseria meningitidis
atgaacacccgcaccgaacacgacaccatgggcaatgtcgaagtcccgtccgaagcctattggggcgcgcagacccagcgcagccgcaacaatttcaaaatcggcggcgaaaccctgccgcagccgctgatttatgctttggcgctggtgaaaaaagccgctgccgcgaccaatgtttccctcggcaggattaagccggaacaggcggatttgattacgcaggcggcggatgatgtgttgaacggcaggcttgacggacagtttcctttagtggtttggcagaccggctccggcacgcagtccaatatgaacatgaacgaagtgctggcgaaccgcgccaacgaaatcgccggtacgggtttggcggcgtatcagcccgtccatcccaacgaccatgtgaaccacgcgcaatcgaccaacgacgcattcccgaccgccatccacgttgccgccgcgattgaaatcaaccgccacctcatccccgccgtaaaagccctgcgcgacaccttggacaaaaaagcccaagccttcgcccccatcgtcaaaatcggccgcacccacttgcaggacgcgacgccgctgactttaggccaagaattttccggctacgtttcccagctcgaccacggcttaggccgtctgaatgacgcgcttaaagacttgtataaacttgctttgggcggtacggcggtcggcacgggtttgaacagccatcccgaatacgccgaaaaagccgccgccaaactcgccgaattgtccggcttgccgtttgtcagcgcgccgaacaaatttgaagccttgggcggacgcgatgccgccgttgccgcttcgggcgcattgaaaacgctggcggcaagcctgaataaaatcgccaacgacatccgctggctggcaagcggcccgcgctgcggtttgggcgaaatcaaaatccccgaaaacgagccgggttcgtccatcatgccgggcaaagtcaacccgacccaatgcgaagcgatgaccatggtgtgctgccaagtgttcggcaacgacgttaccatcggcatggcgggcgcgtcgggcaatttcgagctgaacgtctatatgcccgttatcgcctacaacctcttgcaatccatccgcctgttgggcgacgcgtgcaacagcttcaacgaacactgcgccgtcggcatcgaacccgtaccggaaaaaatcgactatttcctgcaccattccctgatgctggttactgcgttaaaccgtaaaatcggctacgaaaacgccgccaaagtcgccaaaaccgcctacaaaaacaacaaatcgttgcgcgaaaccgccgttgagttgggcttgctgacgggcgaagaatttgacgaactggtcgttcctgccgatatggttcatccgcgctaa

SEQ ID NO: 44339 - DNA, 1305 bp, Neisseria meningitidis
atgaaaaaacacatatgggcggcatctttgctgccggcatccctatcggcagaacctttaaactggtggaagccttattccgccgtcaattcgggcgataccgcctgggtgatgactgcggctgccttggtactgttgatgacgcttcccgggctggctttattctacggcggtatggtgcggaaaaaaaacctgctctcgacgatgatgcacagcttttccatcgcgacattggtgggcattctttgggtcgccgtcggctattctttagcgttcacgccgggaaatgcctttatcggcggtttggggcgtgtatttttaagcgggatgcagatagacgctaccgcacagatgctgaccgtgtcgcccaatgcgccgactgttcccgaaccggtatttatgttttttcagatgacgtttgccattatttcgaccgccattattaccggcgcgtttgccgaacggatgaaatattcggcaatgatgctgttttcgggcatatggtttttattggtttatgtgccgggcgcgcattgggtgtggggcggcggctttatgagcaagggcggcgtattggattatgccggcggtacggtggtgcacatcaatgccggtatcgcgggactcgtcgccgccttggttttgggcaggcgcataggctacgggcgcgaggcgatgcctccgcacaatatggcgatgacactgatcggcgcggcaatgttgtggttcggctggttcggctttaacgccggatcggcgcttgcggcagacgcggcggcgggtatggcgatggcggtaacgcaggtgtcggccgtattcggcgcggcaggctggcttgcctgcgaaaaaatagcgggacacaaaccttccgctttggggctggcttccggcgcggtttccggtctggtcggcatcacccctgccgccggctttaccggcccgtcgggcgcggccgccatcggtatattgactgccgccgcgtgctttgtgtccgtcaccgtcgtcaaacacaaattgcgttacgatgattctttggacgctttcggcatacacggattcggcgggctggtgggcggaatattgaccggcatctttttcgacaaccgcattttcggcggggatgcggcagtttggcagcagttgtggatacaggtaaaagacgggttcgttatggcggcatacagcgggctgatgagttgggcgattttgaaggtcgtggggaaaatctgcggcggcctgcgcgtcggcaaggatgtcgaacgcgaaggtttggatctgaatatccacggcgaacgcgtggaataa

SEQ ID NO: 44340 - DNA, 813 bp, Neisseria meningitidis
atggaaaatatcggcaggcagcgacccatcggcgtttttgactcgggaatcggcggtttgaccaatgtgcgagcgctgatggaacggctgccgatggagaacatcatttatttcggcgacacggcgcgcgtgccttacgggacgaaatctaaggcgaccatcgaaaatttctcgatgcagattgtcgattttttattggaacacgatgtcaaggcgatggttatcgcgtgcaatacgattgcggcggtggcggggcagaaaatccgtcaaaaaaccggcaatatgcccgttttggacgtgatttccgccggcgcgaaagccgcgctggcaacgacgcgcaacaataaaatcggcattatcgccaccaatacgacagtcaacagcaacgcctatgcgcgcgccatccacaggaacaaccccgatacgctcgtccgcacgcaggccgcgccgctgctcgtccctttggtggaggaaggttggttggaacatgaagttacccgcctgaccgtatgcgaatacctcaaaccattgcttgcggacggcatcgatacgctggtgttgggctgcacgcactttcccttgctcaaacccttaatcggcagggaggcgcacaatgtcgcactggtcgattccgtgattacgactgccgaagaaaccgcacgcgtccttgcgcaggagggattactcaataccgacaacaacaatcccgactaccgtttttatgtcagcgatattcctttgaaattcagaaccatcggcgagcgttttctgggcaggacgatggagcagattgaaatggtgtctttgggttag

SEQ ID NO: 44341 - DNA, 621 bp, Neisseria meningitidis; identical to SEQ ID NO: 38571

SEQ ID NO: 44342 - DNA, 3138 bp, Neisseria meningitidis
atgcaaaatatgaaaaaccaagtacgcggatcaggcatggatgcccgatccaacccggccaatgtttcagacgacctgcaaaacagttcgggccatatcggtgtcaacacgcgttaccgcctgaccaaactcggcgaacaaatggcgcgcctgcccatcgacccgaaaatcgcgcgcattttgctggcggcgaagaaacacgactgcatggcggaaatattggtgatagcgtccgcgctgtcgattcaagacccgcgcgagcggccgttggaagcgcgcgatgccgccgccaaggcacacgagcgttttaccgacaagcaatccgacttccttgcctatctgaacatttgggacagcttccagcgcgagcgcgacaaaggtttgtccaacaagcagctggtgcagtggtgccgtcaatatttcctgtcgcacctgaggatgcgcgagtggcgcgagctgcaccaccagcttgcccaaaccgcgattgaaatgggtttgaccacgaaagaagccgctttcagacggcctcccgaaggcaggcagcttacgtcgtctgaaaatgcgggtgaccaagacttatccgccaagctcaaacaaaaacaactggataaaaagcaacaccgcgcccaaatccgcaccgccaaagaagcgggctacgaacaaatccaccgcgccctgctcaccggccttatcgccaacgtcggcatgaaatcgcccgacggcaacgactacaccggcgcgcgcggcagccgcttccaccttttccccgcctccgccctgttcaaagccaagcccaaatgggtgatggcggcagaattggttgaaaccacgcgcctttacgcgcgcgacgtcgccgttatccagcccgaatggatagagcaggaagcgccgcacctcgtccgctatcattatttcgagccgcattgggaacaaaaacgcggcgaagtcgtcgccagcgaacgcgtgacgctttacggtctgaccgtattgccgcgccgccccgtgtcttacggcaaagttgcccccgaagaagcgcgcgaaatctttatccgcagcgcgttggtggcgcaggaatgcgatttgaaagcggatttttttgtccacaacaaaaagctgattaaagaaattaccgaactcgaacacaaatcgcgcaagcaagacgtgctggtcgatgacgaagccctgtttgcgttttataacgaacggctgcccgatttttatacggcggatgcggtttcagacgacctgcatcctacaaatccgcagcaaactgccccctcctacgcgagggaagaacggagagagggcaaaacagttgccgcacaaaccaacttctccgcaaccgcagcaaaccctctccctaaccctctcccacaggagagggagcagagtgccgcagcttcagcggtttcaaacgacctgcatcctgcaaatccccaacaaaccgccccctcccccgtgggggagggtcggggagagggcaaaacagttgcctctcaaaccaacttctccgcaaccacagcaaaccctctccctaaccctctccctaaccctctcccacaggagggggaacagagtgccgcagcttcagcggtttcaaacgaccctcaaccccaaaagcagccagcaccccaaaaagaccgtctgaaacccctccccctcgccgacatccgcaccttccaagtctggctcaaaaccgccgaacgcgagaacccgcgcctgctgttcctcagccgcgacgatttgatgcaacacgccgccgcacacattaccgaagagcaattccccaaattctggcaaaccgcagacggcaagttcaaactttcctaccgcttcgagccgcaccatccgctcgacggcgttaccctcaccctaccgctgaccgtcctcaaccgcctgcacgcgccgtcgctcgaatggctggtgcccggtatgttgcgcgaaaaaatccagctgctgattaaagctctgccgaagcaaatccgccgcatttgcgtgcccgtacccgatttcatcacccaatttttaagccaaaaccctgatcgcaacgcccccatcctgccccaacttgcccaagccatcgccaaaaccgcaggcgacatccgcatactcgagcaaatcaaccaagacgaatgggccgcgttcaggctgcccgaacactgctatttcaacctccgcattatcgacgacggcggacaagagcttgccggcggccgcaaactgcatgaattgcaacaacagctcggccaagccgccgccgttaccttccgcgacaacacccaagaattcgagcgcgacaacgtgaccacatgggacattggcaccctgcccgaatccatcaaattcgcacgcggcaaacaacagctcaccggctacctcggtctgcaaaaagaaaaagacggccgcatcgccctgcgcctgtgtgacaccaccgaagctgccgaacaggcacaccgtcaaggcgtaatcgaattgatgaagctgcaattaaaagagcaggtaaaagatctgaacaaaggcattcaaggctttacccaagccgccatgctgctcaaacacatcaacgccgacaccctgtgcgacgacctcacccaagccgtctgcgaccgcgcctttatcggcgaagacgagctgccgcgcaacgaaaaagcctttaaagagcaaatcaaacgcgcccgcagccgcctgcctgccgtcaaagaagccctcagccgctacctgcaggaaaccgcagccgcctacgccgaactcaacagcaaactcggcaaacacccattgacccacctcctacgccaacgcctgcaaaccctgctcgccgccggcttcgccacccgcaccccgtgggcacaatggccgcgcctccccatctacctcaaagccatgaccctgcgcctcgaaaaatacagcagcaaccccgcccgcgacgcagcccgcgaagccgatatccaagagctggaacaaatgtggcaggaaaaaacagacagcctgattaaacaaggtctccccatttcagacggcctcgccgcgtttaaatggatgattgaagaattgagggtgtcgctgttcgcgcaggaattgaagacaccgtatccggtgtcggtgaagcggttgttgaagatgtgggaggatcttaattaa

SEQ ID NO: 44343 - DNA, 885 bp, Neisseria meningitidis
atgagcagcggaaatatccacatccacagcatgaccggatttgccaacgcggcggcagagtgcggcagcaaacgcatcaatctcgacctgcgtgcggtcaaccaccgttttctagatattcaaatcaggatgcccgacgatttgcgctatttggaaagcggtatccgcgagaaaatttcatcccatatcgcacgcggcaaagtcgaatgcaaaatccaaattcaagatgcggaaaacggcagtcagtccttggaactgaatcgcgacttggtcggacagcttgccgaaatcaacaaagacctccgcaagcatcacgatttggcaaaactgggcgttgccgacatcctgcgtttccccggcgtattggcaagccaaagggaaaatacggaagaattggcaaaaagcattaccgaactgaccgaaaaagcgttaaaagactttactgccgcacgcaagcgggaaggtaagaaattaggcgagcacctgctgcaacgccttgaggctatggaagaaatcatagatgcattaagcgaactctttcctaccctgttggaaacacataaagaaaaaatccgcgcccgcctcgtcgaagcggtcggcagcatcgacaacgaccgcctgcaacaggaatttgccctctttatccaaaaatccgacatcgacgaagagttcagccgcctacgcacccacattgccgaagtgcgccgtatcgttaccgaacacaaaggcagcagcggcaaacggctggacttcctgatgcaggaattaaaccgcgaagccaacactttgggcagcaaatccatcgctaccgaatgcacccaagcctcggtcgagctgaaagtcctgatcgaacagatgcgcgaacaagtgcagaatatcgaataa

SEQ ID NO: 44344 - DNA, 870 bp, Neisseria meningitidis
atgaaacccatacggaaagccgttttccccgtcgcagggatgggaacacgcttcctgcccgccaccaaggcaagcccgaaagaaatgctgcccatcgtcgacaagccgctgatccaatacgccgtagaagaagccgtggaagccggctgcacggaaatggtgtttgttaccggacgcaacaaacgcagcatcgaagaccatttcgacaaggcatacgaactcgaaaccgagttggaaatgcgccataaagacaaattgttggaacacgtccgcaacatcctgccgccgaacattacctgcctctacatccgtcaggcggaagcactgggcttgggacacgccgtcttgtgcgcccgcgccgccatcggagacgaaccctttgccgttatccttgccgacgacctgattgatgcccccaaaggcgcgctcaaacaaatggtcgaagtgtacgggcgcagcggcaacagcattttgggcgtagaaaccgttgaagcatcgcaaaccggctcatacggcatcgtcgaaaccgaacagctcaaacagttccaacgcattatcggcattgtcgaaaaacccaagcccgaagacgcgccctccaaccttgccgtcgtcggacgctacatccttaccccgcgcattttcgacttactgaccggactgccgcgcggcgcgggcaacgaaatccagcttacagacggcatcgccaagctgctcgatcacgaatttgtcctggcgcacccctttgaaggcacgcgctacgactgcggcagcaaactgggctacctcgaagccaccgtcgcctacggcctgaaacaccccgaaaccggcgaacccttccgccgccttttggaaaaataccgcaccgaataa

SEQ ID NO: 44345 - DNA, 2298 bp, Neisseria meningitidis
atgatcagtcagctgaccgaaaaaggcgttcgcgtccccggcggctttgccaccacagccgatgcctaccgcgcattcctcgcacacaacggtctgagcgaacgcatttccgccgcactggcaaaattagatgtcgaagacgttgccgaactggcacgcgtcggcaaagaaatccgccaatggattttggacacgcccttccccgaacagctcgatgccgaaatcgaagcggcatggaacaaaatggttgccgatgccggcggtgcggacatttccgttgccgtacgctcttccgcaaccgccgaagacctgcccgacgcatcatttgccggccaacaggaaaccttcttgaacatcaacggattggaaaacgttaaagaagcgatgcaccatgtattcgcctccctgtacaacgaccgcgccatttcctaccgcgtccacaaaggcttcgaacacgatatcgtcgccctttccgccggcgttcaacgcatggtgcgttccgacagcggcgcatccggcgtgatgttcactctcgacaccgaatccggctacgatcaagtcgtctttgttacctcctcttacggtctaggtgaaaacgtcgtccaaggcgcggtcaaccccgacgaattctatgtattcaaacccacactgaaagcaggcaaacccgccatcctgcgtaaaaccatgggttcaaaacacatcaaaatgatttttaccgacaaagcagaagccggcaaatcggtaaccaacgtcgatgtccccgaagaagaccgcaaccgcttctccattaccgacgaagaaatcaccgagttggcgcattacgcactgaccatcgaaaaacactacggccgcccgatggatatcgaatggggacgcgacggcttggacggcaaactctacatcctgcaagcccgtcccgaaaccgtaaaatcccaagaagagggcaaccgcaacctgcgccgcttcgccatcaacggcgacaaaaccgtattatgcgaaggccgcgccatcggtcagaaagtcggtcagggcaaggtgcgcctgattaaagatgcttccgagatggattccgtcgaagccggcgacgtactcgttaccgacatgaccgacccagattgggaaccggtgatgaaacgtgcttccgccatcgtgaccaaccgcggcggccgtacctgccacgccgccatcatcgcgcgcgaactgggcattcctgccgttgtcggctgcggcaatgcaaccgaattgctgaaaaacggtcaagaagttaccgtatcctgtgccgaaggcgataccggcttcatctatgccggcctgttggacgtacagattaccgatgtcgccttggacaatatgcccaaagcacccgtcaaagtcatgatgaacgtcggcaaccccgaactcgcattcagcttcgccaacctgcccagcgaaggcatcggcttggcgcgtatggaatttatcatcaaccgccaaatcggtatccacccgaaagccttgttggaatttgacaaacaagacgacgaattaaaagcggaaattacccgccgtatcgccggttacgcgtcccctgtcgacttctacgtcgataaaatcgccgaaggcgtggcgacattggccgcatcggtttatccgcgtaaaaccatcgtccgtatgtccgacttcaaatccaacgaatacgccaacctagtcggcggcaacgtatacgaaccgcatgaagaaaacccgatgttgggcttccggggcgcggcgcgttatgtcgccgacaacttcaaagactgtttcgccttggaatgcaaagccttgaaacgcgttcgtgacgaaatgggtctgaccaacgttgaaatcatgattccgttcgtccgcactttgggcgaagccgaagccgttgtcaaagccctgaaagaaaacggcttggaacgcggcaaaaacggcctgcgcctgattatgatgtgcgagctgccgagcaacgcggtattggcggaacaattcctgcaatacttcgacggcttctccatcggctcgaacgacatgacccaactgaccctcggtctcgaccgcgacagcggcttggtatccgaatcgtttgacgaacgcaaccctgccgtcaaagtgatgctgcatcttgccatctccgcctgccgcaagcagaacaaatatgtcggcatctgcggtcaaggcccgtccgaccatccggacttcgccaaatggctggttgaggaaggcattgaaagcgtttccctgaacccggataccgtcatcgaaacttggctatatttggcgaatgaattgaacaaataa

SEQ ID NO: 44346 - DNA, 774 bp, Neisseria meningitidis
atgaacactattgcagacgtgcaatccagccgagatttgcgcaatctgccgatcaatcaggtcggtatcaaagacctgcgctttccgattaccctgcaaactgcagaaggcatccagtccacagttgcccgtctgaccatgacggtttacctgcccgccgagcagaagggtacgcatatgtcgcgctttgtcgcattgatggagcaacatgccgaagccttggattttgcacaattgcgcaggctgactgctgaaatggtcgcgcttttggattcccgcgccggcaaaatcagcgtttctttcccatttttccgcaagaaaaccgccccggtttccggtattcagtctttactggattatgatgtcagcctcacgggcgaaatgaaagacggtgcatacggccacagtatgaaggtcatgattcccgtaacctcgctttgcccgtgttccaaagaaatttcccaatacggcgcgcacaaccagcgttcgcacgttaccgtcagcctgactgccgatgccgaagtcggtatcgaggaagtcatcgattatgtggaggcgcaggcgagctgccaactctacggcctgctcaaacgccccgatgaaaaatacgttaccgaaaaggcctacgaaaacccgaaattcgtggaagatatggtgcgcgatgtcgctacttcgctgattgccgacaaacgcatcaagagtttcgtcgtcgagagtgagaatttcgaatctatccacaaccattcggcttatgcctatatcgcctacccgtag

SEQ ID NO: 44347 - DNA, 822 bp, Neisseria meningitidis
atgagcagtccgcgccatgtgttttacatttccgaccgtaccggtctgactgccgagaatatcggcgaggctttgctgaaccagtttggcaatctgtcgttcaaacgccatacgcatccgtttgtcgatacgccggaaaaggcgcgcgcggtggtggagaaggtcaatcggagccggcaggaaaacggtcagcgtccgattgcgtttgtcagtgtggttgatgacgaaatccgtcggattatcaaaggggcggatgcttttcagattaatttctttgagacttttttgggactgttggagaaagaactcaataccgaagccacggcatccgagcaggggcatcacagtatcggtaatacgaagcgttacgatgcgcgtatggaggcggtaaatttctcattgaaccacgatgacggggtcagcgataagaaccttcaggaagcggatgtaatcttgatgggtgtatcgcgttcgggcaaaacgccgacctgcctttacctcgccctgcaatacggcatccgtgcggcaaactatccgctgattcctgacgatttggaatcggccgatctgccgcgtatggtcaagccttatagggataagctgttcgggttgaccatccagccggaacgtttgcaggccatccgccaagagcgccgcccgaattcaacttatgccaaaatcgatacatgccgcagcgaggtggcagacgcgcagagtatgttcagacggcatgggattccgtttgcgaatacgacggataaatcagtggaagagcttgccgtacacatccttcaggcgtgcaagctcaaacgcaggttttga

SEQ ID NO: 44348 - DNA, 324 bp, Neisseria meningitidis; identical to SEQ ID NO: 38284

SEQ ID NO: 44349 - DNA, 540 bp, Neisseria meningitidis; identical to SEQ ID NO: 38423

SEQ ID NO: 44350 - DNA, 1893 bp, Neisseria meningitidis; identical to SEQ ID NO: 38453

SEQ ID NO: 44351 - DNA, 639 bp, Neisseria meningitidis
atgcaaatcgccattatcgattacggtatgggcaacctgcattccgtattgaaatccgtctggacggcggggcagcttgccggaaaaaataccgaaatctttttaagcggcgaccccgaccgcgtgtcccgcgccgacaaagtcatttttcccggtcagggcgcgatgcccgactgtattgcggcactgacgcgcggcggcttggacgaggcagtcaaagatgccttaaaaaacaaaccctttttcggaatctgcgtcggcgcgcaacttttattcgaccacagcgaagaaggaaacaccgacggcttgggctggttcggcggcaaagtcagacgctttgagcgcgacctccgcgacccgcagggatgccgtctgaaagtcccgcatatgggctggaacaccgtgcgccaaacccaaaaccacccgctttttcaaggcatcccccaagacacgcgtttttacttcgtccacagctactatttcgcccccgaaaatcccgaaaccatattgggcgaaagcgactacccgtccccgtttgcctgcatcgtcggcaaagacaacgtattcgccacgcaatttcacaccgaaaaaagccacgatgccgggctgacgatgttgaaaaactttttaaactggtaa

SEQ ID NO: 44352 - DNA, 474 bp, Neisseria meningitidis
atgtcccgcaataccgaagagctgcaaggcatctcgcttttgggtaatcaaaaaacccgatatccgaccggctacgcgcctgaaattctcgaagcattcgacaacaaacatcccgacaacgactatttcgtcaaattcgtctgcccagagttcaccagcctctgccccatgaccgggcagcccgacttcgccaccatctacatccgctacattccgcacatcaaaatggtggaaagcaaatccctgaaactctacctcttcagcttccgcaaccacggcgattttcatgaagactgcgtcaacatcatcatgaaagacctcattgccctgatggatccgaaatacatcgaagtattcggcgagttcacaccgcgcggcggcatcgccattcatcctttcgccaattacggcaaagcaggcaccgagttcgaaacattggcgcgtaaacgcttgttcgaacacgacagccaataa

SEQ ID NO: 44353 - DNA, 675 bp, Neisseria meningitidis
gtgcaggcggatttagcttatgccgccgaacgtattacccacgattatccgaaagcaaccggtgcaaacaacacaagcacagtaagcgattatttcagaaacatccgtgcgcattccatccacccccgggtgtcggtcggctacgatttcggcgactggagaatagcggcagattatgccagttacagaaaatggaacaacaataaatattccgtcaacacaaaagagttggaaaacaagcataacaataagaaagacctgaagacggaaaatcaggaaaacggtacattccacgccgcttcttctctcggcttatccgccatttacgatttcaaactcaacgataaattcaaaccctatatcggtgcgcgcgtcgcctacggacacgtcagacacagcatcgattcgaccaaaaaaacaacagaggttgttacctccacccatggtggtgctgacacaaaacctacgatttataatggggaaagtacgcaaaacgcctatcacgaaagccacagcatccgccgcttgggtcttggtgtcgtcgccggtgtcggtttcgacatcacgcccaagctgaccctggacaccggataccgttaccacaactggggacgcttggaaaacacccgcttcaaaacccacgaagtctcattgggcatgcgctaccacttctga

SEQ ID NO: 44354 - DNA, 1428 bp, Neisseria meningitidis; identical to SEQ ID NO: 39120

SEQ ID NO: 44355 - DNA, 1386 bp, Neisseria meningitidis
atgatggcaagagacaaccgcatccaaatgtttccgcacgaatggcgcgccagtacgacgctttccggcgtgtacgcgctgcgtatgctgggtatgttcctcgtgctgcccgtattggcggtgtatgccgcctcgctgcccggcgcggaaggcaacaaaacgctggtcgggctggcaatgggcatttacgggctgacacaggctctgctgcaactgcctttgggcatcgcttccgacaagttcgggcgcaagaaaaccatttatgtcgggctgattgtgtttgcagcgggcagcttccttgccgccgccgccgatacgctgcccatgctgatcgccgcacgcgccatacagggtgcgggagcggttagtgcggcggttaccgcgctgctggcggatttgacgcgcgacggcgtacgtacccgcgcaatggcgatgatcggtttgagtatcggtctgacgttttcggtcagcctcgtcgttgcccctgtgattgccgacgcggtgggcgtacgcggcttgtttctgctgaccggtattttgaccgttgccagtatcggcgtggtggcgtggatgactcccgacccggaggtttccaagctgcacgaagatacgcaggcgcagccttcgcgcataggcgaagttttgaaaaaccgtaggctgctgacgctcgatttcggcattttcgccctgcacgccgcgcaaatggcattgtttaccgcgctgcctttcgcgatgacccagctcggtttggaaaaaatacagcattggaaagtctatctgccctcgaccattacgggcttggtggtgatggttccgctgattatcgtcggcgagacgcgcaacaagctcaaacaggtttttgttttgggtatcgtctgtattgcggcggcgcagctcggtttgctgtccggtatgcgctcggtaggcttgattaccgcttatttggttgtttactttatcggttttaatgtgttggaagcgagcctgccgtctatggtttccaaaatcgcgccgtccgacctgaagggtacggcgatgggcgtgtacaacacgatgcagtcgctcggactgtttgccggcggcgcggcaggcggtttgctgtttcaaaaatacggcttttccggcgtgtttgccttttgcagtatattgatgctgctgtggctggtaattgccgttttatcgcctgcgcccaagcccgtcaaaaacctcagttaccctgtcggcggcgtgtggcagggcaatcaggaagggttataccgcgccttgtcggagcttgagggtgtggaagacatcggtttcagtttcgacgggcagaccgtctatctcaaagtgttgcagaagggtttcgatcaggctgccgctgaaaaaatcatcacaggagtttaa

SEQ ID NO: 44356 - DNA, 888 bp, Neisseria meningitidis
atgcagaaatccaaattatcttggttcttgaaactgatgttggcactgtcgctggcgtttctgtatatcccgctggttgttttggtcatctattcgtttaacgaatccaagctggtaaccgtttggggcggcttttcgaccaagtggtacggcgcattgctggaaaacgacaccatcttggaagccgcttggctgtcgctgcggattgccgttgtgtcttcgcttgccgccgtcgttttgggcacgctggcaggctatgcgatggcgcggattaaacgttttcgcggcagtaccttgttcgccggtatgatttccgcacctatggtgatgcccgacgtgattaccggtctgtctatgctgctgctgattattcaggtacagatatttttgcagggcagtgaatggttacaacatctctacttcgatcgtggctttttcactattttcttaggacatacgacgctgtgcatggcatacattaccgttgttatccgttcgcgtctggttgagcttgaccaatcgctcgaagaagccgcaatggatttgggcgcgcgtccgctgaaaatcttttttgtcatcactttgcctttgattgcccctgccatcgcttcaggctttctgctcggcattaccctgtctttggatgatttggtgattacctcattcctctccggccccggttcatccacattgccgcaggtgattttctccaaaatcaagctgggtcttgatccgcagatgaacgttttggcaaccatcctgatcggcatcatcggaacattggtcatcatcgtcaattattggatgatgaggcaggcaaccaagcgtgaccgagaagcggcagaagcctaccgccaagaaaaattggctgccgagaaagcaaattaa

SEQ ID NO: 44357 - DNA, 987 bp, Neisseria meningitidis; identical to SEQ ID NO: 38304

SEQ ID NO: 44358 - DNA, 837 bp, Neisseria meningitidis
atgttaccgctcaaaacgcccggcgtactgcccggcttcaaactcagccttggtctgaccgtattgtgcctgtcgctgcttgtggtcttgccgtttgcgatgatggcggcgaaggcggcggaaatcggctggggcggcttttggaacacgattgccgagccgaacgcgttggcggcggtgtggctgagtttgcggatgtcgttttatgcgatgctgaccaatgtcgtgttcggcacgctggtggcgtgggtattggtgcgctatgaatttccgggcaagggcttggcgaacgcgctggttgatttgccgtttgcgctgccgacggcggttacgggtatcgcgttggcaaccctgtatgcgcctaacggttggataggccgttttttcgagcctttgggcatcaaaatcgcgtttacgcccgtcggcatttggattgcgctggtcgtcgtcagcctgccctttatcgtccgcgccgtgcagccggtgttggaggaattatcgggcgaatatgaggaagcggcggcgactttgggcgcaaaccgctttacgacgttccgccgcgtgctgctgccggaaatcacgccggcactcttgaccggcgcgggaatgatgttcgcgcgggcaacgggggaatacggctcggtgatttttatcgcgggcaatattccgatggtttctgaaatcctgccgctgattattacgggcaagctggaacagttcgacgtgcagggcgcgtcggcggtggcgttgtttatgctgctggtttcgtttgtgattctgtttgcgctgaacgtgatgcagtgggcgttgggcaggcgttcgggcgcgaagggttga

SEQ ID NO: 44359 - DNA, 936 bp, Neisseria meningitidis
atggggcacaatatgatgaccacccaaaaatggtatgaacatattactaatgtaatcataggcaatactgctaatttcaatagcggttgccccgaatctatagattatgtagatgaaagaaaaggcgttccgcttgcagcgatgaaatacattttaatgtacactgaagctgcggcttcccatgcctatctatttgaacatgatcttaagaaattcaagcaatatgcttatgttgcaggaaagttgggtattttgcagagtgtagatgatgaagaccccgaacccttcttctttccctgcgacatgctcaacattcaagatccgatgtttctgatgctgatgagcgacagcccgcagctgcgcgagtttttggtgcgcaatatcgacaacatcgccaacgatacagaagccttcgtaaaccgatacgacctcaaccgtcatatgatttacaatactctgctgatggtggagggtaagcagcttgatcggttgaaacaacgtagcgagaaagtcttggcgcatcccacccctagcaaatggctgcaaaagcggttgtacgattaccgcttcttcctcgctttcgccgaacaggatgccgaggcgatgaaggccgccttagagccgcttttcgataaaaaaaccgcgcgtatggctgccaaagaaacattgtcctatttcgatttctacctgcagccgcaaatcgttacctacgccaaaatcgcatccatgcacggtttcgatttgggcatagatcaagaaatcgcaccgagggatttgattgtttacgatccgctgccggcagacgaatatcaagacatcttcgattttatgaaacagtatgacttgtcttacccgtatgaatatctgcaggattggatagattactatacgttcaaaaccgataagctggtatttggtaacgcgaagcgagagtga

SEQ ID NO: 44360 - DNA, 1197 bp, Neisseria meningitidis
atgtcccaaaaattgatcttggttttgaactgcggcagctcgtccctcaaaggcgcggtcctggataacggcagcggcgaagtcctgctcagctgccttgccgaaaaactcaacctgcccgatgcctacatcacattcaaagtaaacggcgaaaaacacaaagtcgatctgtccgcacatcccgaccacaccggcgcggtcgaagccctgatggaagaactcaaagcccacggcctcgacagccgcatcggcgccatcggccaccgcgtcgtcagcggcggcgaactgtacagcgaatccatcctcgttgacgacgaagtcattgccggcatcgaaaaatgcatcccgctcgcccccctgcacaaccccgcccacctcttgggcctgcgtgccgcgcaaagcattttcaaaggcctgcccaacgtcgtcgtattcgatacctccttccaccaaaccatgcccgaagtcgcctacaaatacgccgttccgcaggagttgtatgaaaaatacggcctgcgccgttacggcgcgcacggtaccagctaccgcttcgtcgccgacgaaaccgcgcgcttcctcggcaaagacaaaaaagacctgcgtatggtcattgcccacttgggcaacggcgcgtccatcaccgccgtcgccaacggcgaatcgcgcgacaccagtatgggcctgaccccgctggaagggctggtaatgggtacgcgcagcggcgacatcgatccttccgtattcggcttcctcgccgaaaacgccaatatgaccatcgcccaaatcactgaaatgctgaataaaaaatccggtctgctcggcatttccggcctgtccaacgactgccgcaccattgaagaagaagccgccaaggggcataaaggcgcgaaattggccttggatatgtttatctaccgccttgccaaatacatcggcagtatggcggttgccgcaggcggtttggacgcactggtctttaccggcggcatcggcgaaaactccgacatcatccgcgaacgcgtgatcggctacttgggcttcctcggtctgaacatcgaccaagaagccaacctgaaagcccgcttcggcaacgctgccgtgattaccactgccgacagcaaagccgttgccgtggtcattccgactaacgaagagctgatgattgcccacgacactgcccgtttgagcggtctgtaa

SEQ ID NO: 44361 - DNA, 1620 bp, Neisseria meningitidis
atggacaatctcgtatgggacggcgttcccgacatccgcacactcgaccaaaccatccgcaaacacgcacacccgctcaacctgattgtctgcctccccgataatcagattcccgattttcaaaccgcacaagatgcttcggacgcggaatgccgtctgaagcaccgtttggatcaggcaacgcagtgcctccagttcgacagcatcaacctcatcgaacacatcctgcccgatgtccgcttctggctggttcccccttcacgcacccgccgcctgcgcgaacacttccaccacatttcctggcagaccgaagccatcccgcaaaccgaaagtaagcccgacaaaccctggtttgcacttccacaaacatccgaacggcaaaaaccggaacacatcctcgttatcggcgcgggcatatccggcgcggcaaccgcccacgccttagcatcgcacggcatttccgttaccgtattggaagcccgaaaagccgcccaagccgccagcggcaaccgccaagggctgctctacgccaaaatctcgccgcacgacaccgaacagaccgaacttttgcttgccggctacggctacaccaaacgcctgctcggacacatcctgcccgaatccgaaacctggggcggcaacggcatcatccacctcaattacagccgcaccgaacaacaacgcaatcacgaattgggtttgcaaaaacaccataaccacctctaccgcagcatcacgcaggcagaagccgaaaaaatcgccggtatcccactgtccgtcccatacgaccacccttcatgcggactctactggcaacacggcgtatggctcaatccacccgcattcgtccgcaccctcctcaaccatccgctcattggactacacgaagacacaccgttaaccgacatttcccacgacggggaaaagtggattgcaagcacgccaaacggcatattttccgccacacacatcatctactgcaccggcgcgcacagcccccgcctgcccgaaaccaacctcgccgccctgcctctcaggcaaatacgcggacaaaccggcctcacaccgtccaccccgttttccgaacaactgcgttgcgccgtttcaggcgaaagctacatcagcccgtcgtggcacggactgcactgctacggcgcgagttttattcccaacagcagccataccggatggaacgaagccgaagaagcctcaaaccgccaagcattggcacaccttaaccccgccctttccgaatcattgtttgccgccaacccaaacccccaaaaacaccaagggcacgccgccatacgctgcgacagccccgaccaccttcccctagtcggcgcactcggcgacattgccgctatgcaacaaacttacgccaaactcgcgctggacaaaaactatcgcatcgatgccccatgcccatatctgcctaatgcctacgccaacaccgcccacggcacacgcgggcttgccaccgcccccatctgcgccgccgccgttgcagcccaaatcctaggcttgccccatcccttttcacaacgcctgcgccacgccctacaccccaaccgcaccatcatccgcgccatcgtcagaaggaaggatctaaccccttaa

SEQ ID NO: 44362 - DNA, 411 bp, Neisseria meningitidis
gtggaaggctatatcgagaaactgcacattacccccgccaatgcccatgagtgcaaacacctgccgcctttgctggaagggatagctgaaggtacgaccgtctatgccgacaaaggctatgacagtgcggaaaaccggcaacatctggaagagcgtcagttgttagacggcattatgcgcaaagcctgccgcaaccgtccgctgtcggaagcgcaaaccaaacgcaaccgatatttgtcgaagacccgttatgtggtcgaacaaagcttcggtacgctgcaccgtaaattccgctatgcgcggtcaacctatttcggactgattaaagtgagtgcgcaaagccacctgaaggcgatgtgtttgaacctgttgaaagccgccaacaggctaagtgcgcccgctgccgcctaa

SEQ ID NO: 44363 - DNA, 876 bp, Neisseria meningitidis; identical to SEQ ID NO: 38442

SEQ ID NO: 44364 - DNA, 1059 bp, Neisseria meningitidis; identical to SEQ ID NO: 38958

SEQ ID NO: 44365 - DNA, 1443 bp, Neisseria meningitidis
atgcatccgacctattccgccgtacaggcgcggctgctcgaagccaaccgcctttcccccgaactgctcgccaaaagcctgtgcatcatcggcgcgcaccacgtcgattacgccgacatctactgccagcgcaccgcttatgaaagctggcatttggaagagggcatcgtcaaatcgggcagcttccaaatcaatcagggcgtgggcgtgcgcgccgtttcgggcgacaaaaccgcctttgcctacgccgacagcctgtgcatcgattcgataaaccgttccgcccgcgccgtccgcgcgattggggcggcaggcggcaaggtgtccgccaaaatgccgtctgaaacgcgcggcaagccggtttgttccgcgtccgaccccattgccggcctcgattccgccgccaaagtcgcgctgttgaacaaagtggaagcaatcgccaaagccgccgatccgcgcatcgtgcaagtgatggccggtttgacctgcgaatacgatatggtttacctcgcccgtctggacggcaaacacgccgccgacatccgcccgatggtgcgcctgaacgttaccgtcatcgccaaacagggcgaacgccgcgaacagggcagcgcgggcggcggcggacgctacgacttggcttatttcgatgaaaacttggtgcggcagtttgtcgatgccgccgtcaaacaggcactcaccaacctcgaatcccgccccgcgcccgccggcgaaatgaccgtcgttttgggcaacggctggccgggcgtgttgctgcacgaagcggtcggacacggtttggaaggcgatttcaaccgcaaggggaccagcgtcttttccggcagaataggcgagcgcgtcgccgccaaaggcgttaccgtcgtcgatcagggcgatattgccggccggcgcggttcgctcaacatcgacgacgaaggcaacgaaacccgccgcaccgtattgattgaagacggcattttagtcggctatatgcaggacgaaaccaatgcccgcctgacgggtacgcaatccaccggcaacggccgccgcgaaagctacgcctccgtcccgatgccgcgcatgaccaatacctttatggaaaatggcagctatgagccggaagaaatcatcgcgtccatcgacaaaggcatttacgccgtcaactttggcggcggacaggtggacattaccagcggcaaatttgtgttcagcgcgtccgaagcatggtgggtggaaggcggcaggctgcaataccccgtcaaaggcgcgaccattatcggcaacgggcccgaagtgctgaaacacgtttcgatgataggcaacgataccgcgttggacagcggtgtcggcgtgtgcggcaaagaagggcagagcgtccccgtcggcgtggggcagccgaccctgcgtatcgatgccgggctgaccgtcggcggcagcgcaatctga

SEQ ID NO: 44366 - DNA, 654 bp, Neisseria meningitidis
atgaagataacacactgcaaattaaagaaaaaagtacagaaagagctgctccgtttttttgtactcgaagttaccgcccgttctgctgccgatattttgggtatccatcccaattcggcagtcctgttctaccgcaaaatccgtatggtcatcagccattatccggccttggctgccgatgaggtttttgagggctctgtcgagttggacgaaagctatttcggcggacggcgtaaaggcagacgcggtcgcggtgcggcaggaaaagtggttgtcttcggcattctgaaacgcaacggacgggtctataccgttgttgtagataatgccaggtctgaaacgttactccctgtcatcaaaaggaaaatcatgccggacagtattgtttataccgatagtctgagcagctatgacaagctgcacgtaagcggttttatccatcaccgcatcaaccattctaaggagtttgcagaccgtcagaaccacattaacggcattgaaaacttttggaatcaggcgaaacgcgccttgcgcaaatacaacgaaattgatcgtaaatctttcccgctgttcttgaaagaatgcaaatttcggtttaacttcggcacaccgtcccgacagctaaaaattttgcgggattggtgtggaatttag

SEQ ID NO: 44367 - DNA, 459 bp, Neisseria meningitidis
atggaaaccccgaaactcagtgtcgaagccattgaaaaaggtacggttatcgaccatattcccgccggcagggggctgaccatcctgcgccagttcaaacttttgcactacggcaacgcggtaaccgtgggcttcaacctgcccagcaaaacccaaggcagcaaagacatcatcaaaatcaaaggcgtgtgcttggacgacaaagccgccgaccgcctcgccctgttcgcccccgaagcggtggtcaataccatcgacaatttcaaggtcgtgcagaagcggcatttgaacctgcccgatgaaattgccgaagtgttccgttgcccgaacacgaattgcgccggccacggcgagccggtcaaaagccggttttatgttaaaaaacacaacgggcagacgcggctgaaatgccattactgcgaaaaaacctacagccgggattcggtggcggaagcctga

SEQ ID NO: 44368 - DNA, 423 bp, Neisseria meningitidis; identical to SEQ ID NO: 36840

SEQ ID NO: 44369 - DNA, 648 bp, Neisseria meningitidis
atgaaacctttgattttagggcttgccgccgtgttggcgctgtctgcctgccaagttcaaaaagcgcccgatttcgactacacgtcattcaaggaaagcaaaccggcttcaattttggtggttccgccgctgaacgaatcgcccgatgtcaacggaacatggggtgtactggcttcgaccgccgcgccgctttccgaagccggctattacgtcttccccgccgcagtcgtggaggaaaccttcaaacaaaacggcttgaccaatgccgccgatattcacgccgtccggccggaaaaactgcatcagattttcggcaatgatgcggttttgtacattacggttaccgaatacggcacttcatatcaaattttagacagcgtgacgaccgtatccgccaaagcacggctggtcgattcccgcaacggaaaagagttgtggtcgggttcggccagcatccgcgaaggcagcaacaacagcaacagcggcctgttgggggctttggtcagcgcagtggtcaatcagattgccaacagcctgaccgaccgcggttatcaggtttccaaaaccgccgcatacaacctgctgtcgccctattctcacaacggcatcttgaaaggtccgagattcgtcgaagagcagcccaaataa

SEQ ID NO: 44370 - DNA, 1116 bp, Neisseria meningitidis
atgcttaaatttaccttacacaaaaaagacggatacgcccgacgcggcacgctggagttgaaccacggcaaaatcgaaacgccggtatttatgcctgtcggtacttacggctcggttaaggcgatgaacccgcaaaacctgcacgacatcaaggcgcaaattattttgggcaacacttatcatttgtggctgcgtccgggcttggaggtcgtcgaacagtttggagggcttcacggctttatcggctgggacaaaccgattctgaccgactcgggcggttttcaggttttttctttgtcggatatgcgcaagctgacggaagaaggctgtacgttcaaaagcccgatcaacggcgacaagctgtttttatcgcctgaaatttccatgaaaatccaaacggttttgaactcggacatcgcgatgcagctggacgaatgcacgccgggcgaagcaacgcgcgaacaggcgaaaaaatcgctgcaaatgagcctgcgctgggcggaacggagcaaaaaagcctttgaagatttgaaaaacccgaacgcgctgttcggcatcgtgcaaggcgcgatgtatgaggatttgcgcgaagaatcgctgcgcggtttggaacagtttgattttcccggccttgccgtcggcggtttgtccgtcggcgaacccaagcccgaaatgtaccgtatgctgcgcgccgtcggtccgattctgccggaacacaagccgcattacctgatgggcgtaggcacgccggaagacctcgtgtacggcgtggcacacggcatcgatatgttcgactgcgtgatgcccacccgcaatgcacgcaacggctggctgtttacccgtttcggcgatttgaaaatcaaaaacgccaaacacaagctcgacaagcgtccgatagacgaaagctgcacctgctacgcctgccaaaacttcagccgcgcctacctgcaccatctgcaccgcaccggcgaaatcttgggcgcacagttgaacaccatccacaatctgcatttctaccaagtcattatggcggaaatgcgcgaagccgtcgaacaaggcaaatttgccgactggcaggcgcgattccacgaaaaccgcgcacgcggcacagactga

SEQ ID NO: 44371 - DNA, 804 bp, Neisseria meningitidis; identical to SEQ ID NO: 38447

SEQ ID NO: 44372 - DNA, 777 bp, Neisseria meningitidis
atggctaagaaattcgataaagacagcttcagcggcacgctgattgtcgtgttggcggtcagcctgatttgctcggtcatcgttgccggtgcggtcgtcggcttgaaacccatccaagagaaacaaaaactccaagacaaacaaggctatatcttgagcgtagccggtttgatggataaggacaccgacatcggcaaaacctttgccgagcgtatcgagcaacgtgttgtcgatttggcgaccggcgaatacgtcgccgatgcgcctaaagacttcagcgcgcgcatcgcaggcaaagaccctgcccaaagcatccgcatcaaacccgaagacgatttggcaggcatcaaaagccgtgccaaatacaccgaggtttatttggtaaaaggcgaagacggcaaaatcgggcaaatcatcctgcctatgcacggtaacggtttgtggtcggtcatgtacggctttgtcgccatccagcccgacggcaacaccatcaacggcattacctactacgaacaaggcgaaaccccgggcttgggcggcgaaatcggcaatccgttgtggcagcaaaaattcgtcggcaaaaaactgtttgacggacaaggcaaactcgccctgcacgtcggcaaaggcgcgggttcggacaaagaacacggcgtagatgccctctccggcgcatcgctgacatccaaaggcgtgcaaggttcgttcgcctactggttcggcgaaaacggctatatcccctacctgaacaaattgaaatcagcaggagcgcaataa

SEQ ID NO: 44373 - DNA, 447 bp, Neisseria meningitidis
atgaaagcaatccaaaaaggtttcaccctgatcgagctgatgatcgtcatcgccatcgtcggtatcttggcagccgtcgccctgcccgcataccaagactacaccgcgcgcgcccaaatgtccgaagccctgactttggcagaaggtcaaaaatccgcagtggtcgagtattattccgacaacggcacattcccgaacagcaatacttccgcaggtattgctgcctctaacgagattaaaggtaagtatgtggcatcggttaaggttgaaggtaatgcctctgttgcttctattaccgctaccatgaactctagtaatgtgaataaggacatcaaaggtaaaaccttggtactcgtcggcaaacaaaactccggctcgttctcttgggaatgtaaaaaaggttctgtggacgaaaaattcttgccatctacctgccgcaccaaataa

SEQ ID NO: 44374 - DNA, 1368 bp, Neisseria meningitidis
atgcctgaccttcataccgaattttcccgactcctgccggcagatgaaattgccgaactttctccgacgcttttaaaagaccagcgcaaccgctttacgtctgcaccagacatcattttgcagccgcgcagcgttgaaagcgtgcaaaccattatgcgtttttgttacgaacaccgtattccggttacgccgcaaggcggcaataccggtttgtgcggcgcggcagtatcggaaaacggcgtattgctgaacctttccaaactcaaccgcatccgcagcatcaatttgtcagacaactgcataaccgtcgaagcaggttccgtactccaaaccgtccaacaggcagccgaagcctcaaacaggctgttcccactcagtctcgccagcgaaggctcctgtcaaatcggcggcaacatcgcctgcaatgccggaggtttgaacgtattgcgttacggcacgatgcgcgacctgattatcggtttggaagtcgtcctccccaacggcgagctggtttcccatctccatcccctgcataaaaacaccaccggctacgacctgcgccatctgtttatcggcagcgaaggcacactgggcatcatcactgccgccacactcaagctttttgcccgtccctcggacaaggcaacggcatgggtcggcatacccgacatcgaatccgccgtccgcctgctgaccgaaacccaagctcactttgccgaacgcctatgcagttttgagctgatcggccgttttgccgccgagttgtcttccgaattcagcaaattccccctgccgacacattcagaatggcatattttacttgagttgaccgactcattacccgacagcaatcttgatgatcggctcgtcgaatttctttataaaaaaggatttaccgacagcgtattggcacaaagcgaacaagaacgtatccatatgtgggcattgcgcgaaaacatctccgcctcccaacgcaaactgggcaccagcatcaaacacgatattgccgttcctatcggacgcgttgccgactttgtccgccggtgcgccaaagatttggaacagaattttaaaggcatacaaatcgtctgcttcggacatcttggcgacggcagcctgcactacaatactttcctgcccgaaatcctcagcaatgaagtctatcgttacgaaaacgacatcaacgacgcagtttatcgcaacgttcttgcctgcaacggcacgattgccgccgaacacggcataggtatcatcaaaaaacagtggctggacaaagtacgcacgcctgccgaaatcgccctgatgaaaagcatcaaacaacaccttgatccatataacattatgaatccgggcaaactgcttccgtaa

SEQ ID NO: 44375 - DNA, 186 bp, Neisseria meningitidis; identical to SEQ ID NO: 38793

SEQ ID NO: 44376 - DNA, 651 bp, Neisseria meningitidis; identical to SEQ ID NO: 38345

SEQ ID NO: 44377 - DNA, 798 bp, Neisseria meningitidis
atgaaagccttgcataaaacatcattttgggaatctttagccattcaaaggcgcgtaatcggtgcgcttttgatgcgggaaattatcacccgttacggtcgcaataatattggctttttatggctgtttgttgagccgttgctgatgacattcgttatcgtcttgatgtggaaatttttaaaggcagaccgatattcaactttgaatattgtcgcatttgcgattactggctatccgatgttgatgatgtggcgtaatgcctcaaaacgggcagttgggtcgatttcttcaaatgccagcttgctttatcaccgcaatgtaagagttttggataccatcttggcgcgcatgattttggaaattgctggtgcaaccattgcgcagattgtgattatggcggtattgattgcgattggctggattgaaatgccggcagatatgttttatatgctgatggcttggcttttgatggctttttttgcgattggtttgggtttggtgatttgttcgattgcctttaatttcgagccgtttggcaagatttggggcacattgacttttgtgatgatgccgttatcgggtgcattcttttttgtacataatttgcctccgaaagtgcaagagtatgcattgatgatcccgatggtgcatggcacagaaatgttccgtgccggatattttggcagcgatgtaattacctatgaaaatccttggtatatcgtattgtgcaatctggtgttgttgttgtttggcttggcgatggtcagtaaattcagtaaaggagtcgagccgcaatga

SEQ ID NO: 44378 - DNA, 2586 bp, Neisseria meningitidis
atgttagaagcctatcgtaaagccgccgccgagcgcgccgccctcggcattcccgccctccctttgaacgcgcagcaaaccgccgatttggttgagctgctgaaaagcccgcccgcaggcgaaggcgagttcttggtcgaactgcttgcccaccgtgttccgcccggtgtggacgatgccgccaaagtcaaagcctcattcctggctgccgttgccgaaggcagcgcgtccagcccgctgatctcccccgaatatgcgaccgaactcttaggtacgatgctcggcggttacaatatccacgccttaatcgaactcttggacgacgacaaactcgcgcccattgccgccaaaggcttgaaacatacgcttctgatgttcgattccttccacgacgttcaggaaaaagccgaaaaaggcaacaaatacgcgcaagaagttttgcaatcttgggcagatgccgaatggtttacctcacgcgccaaagttcccgaaaaaatcaccgttaccgttttcaaagttgacggcgaaaccaatacagacgacctctcccccgcgcccgacgcgtggagtcgtcccgatattccgctgcacgcgctggccatgctgaaaaacccgcgcgacggcatcacgcccgacaaaccgggcgaagtcggtccgattaaattgttggaagaactcaaagccaaaggccatccggttgcttacgtcggcgacgtggtcggtactggttcttcacgcaaatccgcgaccaactccgtcatttggcataccggcgaagacattccgttcgtgccgaacaaacgcttcggcggcgtgtgcttgggcggcaaaatcgcgccgattttcttcaatacccaagaagactccggcgcgctgccgattgaagtcgatgtttccgctctaaaaatgggcgatgtcgtcgatatcctgccttatgaaggcaaaatcgtgaaaaacggcgagactgttgccgagtttgaattgaaatcacaagtattgctggacgaagtgcaagccggcggccgtatcaacctgattatcggccgaggtctgaccgccaaagcgcgcgaagccctgaaactgcctgcctctactgcattccgcctgccgcaagcgcctgccgaaagcaaagccggtttcaccttggcgcaaaaaatggtcggccgcgcctgcggtcttcccgaaggacaaggcgtgcgtccgggtacttactgcgaaccgcgtatgacgacggtcggctcgcaagacacgaccggcccgatgacccgcgacgagttgaaagacttggcttgtttgggcttctccgccgatatggtgatgcagtctttctgccacaccgccgcctatccgaaacctgtcgatgtaaaaacccataaagaactgcccgcctttatttccacccgtggcggcgtgtccctgcgtccgggcgacggcgtcatccactcgtggctcaaccgcctgctgctgcccgataccgtcggcaccggcggcgacagccacacccgtttccccatcggtatttccttccccgccggctctggcttggttgcctttgccgccgcaacaggcgtaatgccgctcgatatgcccgagtctgtattggtacgcttcagcggcaaactgcaaccgggtgtaaccctgcgcgatttggtgaacgccattccgctgtacgcaatcaaacaaggtttgctgaccgttgccaaagccggtaagaaaaacatcttctccggccgcatcctcgaaatcgaaggcctgcctgatttgaaagtggaacaagcctttgaattgaccgacgcatccgccgaacgctccgccgccggctgtaccgtgaagctcaacaaagagccgattatcgagtacatgaaatccaacgtcgtgttgatgaaaaacatgattgccgacggctatcaagacccgcgtactttggaacgccgcatcaaagccatggaaaaatggctggcaaatcccgagttgctcgaagcggataaagatgccgaatacgccgccgtgattgaaatcaacatggacgacatcaaagagccgattatcgcctgcccgaacgacccggacgacgtgtgcttcatgtccgaacgctccggcaccaaaatcgacgaagtattcatcggttcgtgtatgaccaacatcggccacttccgcgccgcctccaaacttttggaaggcaaggcagacacccccgtccgcctgtggattgcgccgccgaccaaaatggacgcgaaacaattgtccgacgaaggacactacggcgtactcggacgtgccggcgcgcgtatggaaatgccgggttgctccttatgtatgggtaatcaggcgcaagtacgcgaaggtgcgaccgttatgtccacctccacccgcaactttccgaaccgtttgggtaaaaacacctttgtttacctcggttcggcggaattggcagcgatttgctccaaactgggtaaaatcccgaccgttgaagaatatcaagccaatatcggcatcatcaacgaacagggcgataaaatctaccgctatatgaacttcaacgaaatcgacagctacaacgaagtagccgagaccgtgaacgtttaa

SEQ ID NO: 44379 - DNA, 735 bp, Neisseria meningitidis
atgttgttccgtaaaacgaccgccgccgttttggcggcaaccttgatgctgaacggctgtacgttgatgttgtggggaatgaacaacccggtcagcgaaacaatcacccgcaaacacgttgacaaagaccaaatccgcgccttcggtgtggttgccgaagacaatgcccaattggaaaagggcagcctggtgatgatgggcggaaaatactggttcgtcgtcaatcctgaagattcggcgaagctgacgggcattttgaaggccgggctggacaagcccttccaaatagttgaggataccccgagctatgcccgccaccaagccctgccggtcaaactcgaatcgcccggcagccagaatttcagtaccgacggcctttgcctgcgctacgataccgacaggcctgacgacatcgccaagctgaaacagcttgagtttgaagcggtcgaactcgacaaacagactatttacacgcgctgcgtctctgccaaaggcaaatactacgccacgccgcaaaaactgaacgccgattatcattttgagcaaagtgtgcctgccgatatttattacacggttactgaaaaacataccgacaaatccaagctgtttgcaaatatcttatatacgccccccctttttgatactggatgcggcgggcgcggtactggctttgcctgcggcggctctgggtgcggtcgtggatgccgcccgcaaatgaacagcaatgccgtctga

SEQ ID NO: 44380 - DNA, 471 bp, Neisseria meningitidis
atgaccgatacggatacccaagccgaccgcttcgagcagatgatgtggcaggcggtggacaaactttttgaacggcatgacggcaaactcgaaagcatggacgggtgggaacaggagctggttttaatttggcgggcagaagccgatatcggcaacggcggcatactgcaatttgtctgcaactggggtttccccgccgccgaaaagacttgttccgttctgaaaaaaatcggcgcggtacacagcgcaatgctgatccatcgggcggcagacgcattgagaaaagaaatccgccacctccaatcggaaggtaaaaacctgaaagaaatgtgggatataacaaaacatctcgacaacaaaaccgcctcactgccgaacagtctggatgaacaatattggcaagaccccgacaaactgtatctgccgggatggcaatactattccggcaaccctgttcagacgctgttttaa

SEQ ID NO: 44381 - DNA, 870 bp, Neisseria meningitidis
atgaagcgcatctttttgcccgccttgcccgccatcctgcctttatccacttatgccgacctgcccttgacgattgaagacataatgaccgacaagggcaaatggaaactggaaacttcccttacctacctgaacagcgaaaacagccgcgccgaacttgccgcaccggtttacattcaaaccggcgcaacctcgtttatccccattccgaccgaaattcaagaaaacggcagcaataccgatatgctcgccggcacgctcggtttgcgctacggactgaccggcaataccgacatttacggcagcggcagctatctgtggcacgaagaacgcaaactcgacggcaacggcaaaacccgcaacaaacggatgtccgacatatccgccggcatcagccacaccttcctcaaagacgacaaaaaccccgccctaatcggctttcttgaaagcacggtttacgaaaaatcgcgcaacaaagcctcgtcgggaaaatcgtggctcatcggtgccaccacctacaaagccatcgaccccgtcgtcctctcattgactgctgcctaccgtatcaacggcagcaaaaccctttcaagcaacaccaaatacaaagcaggcaattactggatgctgaatcccaatatatccttcgccgccaacgacagaatcagcctcacgggcggcatccaatggctgggcaagcagcccgaccgtctggacggcaaaaaagaatccgcaagaaacacatccacctatgcccatttcggcgcaggtttcggtttcaccaaaaccacggctttaaacgcatccgcacgtttcaacgtttcagggcaaagcagttccgaactgaaatttggcgtacagcatacattttaa

SEQ ID NO: 44382 - DNA, 855 bp, Neisseria meningitidis
atgccgcccatccctgccccatctgcaccatccgagcacactgtcgcatgggtattcggccaacccgttaccgatttgccccaggatttgtttattccgcccgatgcattgaaagtcgtattgggcagcttccaaggccctttggatctactgctgtatctgatccgcaaacagaatatcgacgtactggatattccgatggtgaagattaccgagcagtatctgcactacatcgcccaaatagaaacctatcagtttgatttggcggcggaatatcttttgatggcagcaatgctgattgaaatcaaatcgcgcctgctgctgccgcgtaccgaaaccgtcgaagacgaagaagccgacccgcgtgccgagttggtgcgccgcctgctggcttacgaacagatgaagctggcggcgcagggtttggacgcgctgccccgagccggacgggatttcgcgtgggcttacctgccgctggaaattgccgtcgaagccaagctgcccgaagtctatattaccgacttgacgcaagcgtggctgggtattttgtctcgggcaaaacacacgcgcagccacgaagtaatcaaagaaaccatctccgtgcgcgcgcaaatgacggcaatcctgcgccgtttgaacggacacgggatatgcaggtttcacgacctgttcaatcccgaacagggcgcggcttacgtggtcgtcaacttcatcgcactgttggagcttgccaaagaaggtttggtcggaatcgtacaggaagtcggtttcggagaaatccgaatcagcctcaatcatgagggggcacattcagacggcattttcggtacacagggcaaatgtgatgtgttctaa

SEQ ID NO: 44383 - DNA, 2118 bp, Neisseria meningitidis
atgcgccgttttctaccgatcgcagccatatgcgccgtcgtcctgttgtacggactgacggcggcaaccggcagcaccagttcgctggcggattatttctggtggatagttgcgttcagcgcaatgctgctgctggtgttgtccgccgttttggcacgttatgtcatattgctgttgaaagacaggcgcgacggcgtattcggttcgcagattgccaaacgcctttctgggatgtttacgctggttgccgtactgcccggcgtgtttctgttcggcgtttccgcacagttcatcaacggtacgattaattcgtggttcggcaacgatacccacgaggcgcttgaacgcagcctcaatttgagcaagtccgcattgaatctggcggcagacaacgcccttggcaacgccatccccgtgcagatagacctcatcagcaccgcctccctatccggcaatatgggcagggtgctggaacattatgccaacgggtttacacagttgtccctttacaatgccgcaagcggcaaaatcgaaaaaagcatcaacccgcacaagctcgatcagccgtttccaggtaaggcgcgttgggaaaaaatccaacaggcgggttcggtcagggatttggaaagcataggcggcgtattgtacgcgcagggctggctgctggtgggtacatacaacggacgcgattacgcgctgttttttcgtcagcccattcccaaaggcgtggcagaggatgccgtcttaatcgaaaaggcaagggcgaaatatgctgagttgagttacagcaaaaaaggtttgcagacctttttcctggcaaccctgctgattgcctcgctgctgtcgatttttcttgcactggtcatggcactgtatttcgcccgccgtttcgtcgaacccgtcctatcgcttgccgagggggcaaaggcggtggcgcaaggcgatttcagccagacgcgccccgtgttgcgcaacgacgagttcggacgcttgaccaagttgttcaaccacatgaccgagcagctttccatcgccaaagaagcagacgagcgcaacaggaggcgcgaagaagccgccagacattatcttgaatgcgtgttggaggggctgaccacgggcgtggtggtgtttgacgaacaaggctgtctgaaaaccttcaacaaagcggcggaacagattttggggatgccgcttacccccctgtggggcagcagccggcacggttggcacggcgtttcggcgcagcagtccctgcttgccgaagtgtttgccgccatcggcgcggcggcaggtacggacaaaccggtccatgtgaaatatgccgcgccggacgatgccaaaatcctgctgggcaaggcaaccgtcctgcccgaagacaacggcaacggcgtggtaatggtgattgacgacatcaccgttttgatacacgcgcaaaaagaagccgcgtggggcgaagtggccaaacggctggcacacgaaatccgcaatccgctcacgcccatccagctttccgccgaacggctggcgtggaaattgggcgggaagctggatgagcaggatgcgcaaatcctgacgcgttcgaccgacaccatcgtcaaacaggtggcggcattgaaggaaatggtcgaagcattccgcaattatgcgcgttccccttcgctcaaattggaaaatcaggatttgaacgccttaatcggcgatgtgttggcattgtatgaagccggtccgtgccggtttgcggcggagcttgccggcgaaccgctgatggtggcggcggatacgaccgccatgcggcaggtgctgcacaatattttcaaaaatgccgccgaagcggcggaagaagccgatgtacccgaagtcagggtaaaatcggaagcggggcaggacggtcggattgtcctgacggtttgcgacaacggcaaagggttcggcagggaaatgctgcacaacgccttcgagccgtatgtaacggacaaaccggcgggaacgggattgggtctgcctgtggtgaaaaaaatcattgaagaacacggtggccgcatcagcctgagcaatcaggatgcgggtggggcgtgtgtcagaatcatcttgccaaaaacggtaaaaacttatgcgtag

SEQ ID NO: 44384 - DNA, 264 bp, Neisseria meningitidis; identical to SEQ ID NO: 39198

SEQ ID NO: 44385 - DNA, 948 bp, Neisseria meningitidis
atgaccgacatcacaccgtttgccaaccgcttgggcaaaaacatcaaacaccttatgaaatgggcgaaacgcaacggcattgaagcctggcgcatttacgaccgcgacatcccccaattcccctttgccgccgatgtttacggcgatcgaatccaccttcaggaatacgataccggctggctgatgcggcccgaagaatacgaagcgtggcttgccgaagtcttggaagccgtcgctttcgttaccggttttgaacccgaacaaatccgcctcaaacgccgcgaacgccaaaaaggtttgcagcaatacgaaaaaaccggcaaggcgggcgacgatttcgtcatcaccgaaaacggccgcaagttttgggtcaaccttgataagtatttggatacggggctttttttggatcatcgaaacacgcgcaaaaaagtcggcgaaacggcggcgggcaaacgttttttaaacctgttttcctacaccggcagcttcactgtctatgccgccaccggcggcgcggcatccagcgaaactgtcgatttgtctaacacttatctcgattgggcgagacgcaattttgaattgaacggcatcgatacggaacggcataaaatcgtccgcgccgacgtgttccaatatcttcagacggcatatggggaaggcaggcggttcgacctcattgtgatggacccgcccagtttttccaacagcaagaaaatgtccgacatcctcgacatccagcgcgaccacaaaaagctgattgacggcgcggtgaagctgctcgcttcagacggcattttgtacttttccaacaacctgcgcagcttcgtcttagacgacttggtatcggaacaatacgccgtcaaagacatttccaaacaatccgttcccgaagatttccgcaacaaaaaaatccataggtgctgggaaatccgccacaaatcttaa

SEQ ID NO: 44386 - DNA, 210 bp, Neisseria meningitidis
atgtggcacattgtcgccatcggctatctttttgttgccgtgatgttttccgccgcgcagccgagtattgcgcgcaccttgatttatttggttttttgggcggtgctgcccaccgtgttcacggtctttgtcgtgaccatccgccgccgcaaccgcctgatgaagcaacaggaacaggcagaattcgaacagcagcgtgcacaacggtaa

SEQ ID NO: 44387 - DNA, 225 bp, Neisseria meningitidis
atggacgcggttcaagagttggaacaccgcatcacagagctggaaatccaatccgcgcttcaggaggacgtaatcgccggcctgaacgcgatggtggcggaattgcggcagacgctggatttgcagcaggctcagttgaggctgctgtatcaaaaaatgcaggacaggaatcccgacgcgcaagagccgtattccctgcgcgacgagattccgccgcattattga

SEQ ID NO: 44388 - DNA, 861 bp, Neisseria meningitidis
atggcaaaagtaaaaggcggattggggcgcggtttggattcgctgctcgccaacggcgcagacaacagcagcggcgaccgattgaccacggttgcggttaaagatatccggcccggccgctatcaggcgcgtgttcaaatcgatgacgaagccttgcaggagctggcggattcgattaaggcgcaaggcgtgatacagcccgtcatcgtgcgcgaacacggactgtcccgatatgaactgattgcgggggagcggcgttggcgtgccgcacagattgccggcctgaccgaaatccctgccgttatcaaaaccatcagcgacgaaaccgcattggcaatgggtttgatcgaaaacctccagcgcgaaaacctcaaccccatcgaagaagcacaaggcttgaaacgccttgccgacgagttcggactgacccacgaaaccatcgcccaagccgtcggtaaaagccgaagcgcgatttccaacagcctgcgccttttaagcctgcccgaacccgtgcaggaaatgctttaccaacgccgcctcgaaatggggcacgcccgcgcactgctgaccctgcccgtcgtcgaacagctcgaattggcgcaaaaggccgtcaaaaacggctggtcggtgcgcgaagtcgaacgccgcagccaagccgcccttcaaaacaaacgtcccgagcccaaaaagactgccgccgccgacatcggccgcctgaatgatttgctgactgaaaaactgggtgtcaacgccgaaatcaaaaccgccaaccataaaaaaggcaaaatcatcctgcatttcgacacgcccgaaaccttcgaccatatcttgaagcaattgggcatagattaccgaccttaa

SEQ ID NO: 44389 - DNA, 369 bp, Neisseria meningitidis; identical to SEQ ID NO: 39395

SEQ ID NO: 44390 - DNA, 1101 bp, Neisseria meningitidis; identical to SEQ ID NO: 37731

SEQ ID NO: 44391 - DNA, 1230 bp, Neisseria meningitidis; identical to SEQ ID NO: 40266

SEQ ID NO: 44392 - DNA, 1251 bp, Neisseria meningitidis
atgttttcaaaaagcgttaccctcgcacaatatgaccccgatttggcagcagccattgcccaagaagaccaacgccagcaagaccacgtcgagctgattgcctctgaaaactacgtcagctgcgccgtaatggaagcgcaaggttcccagctgaccaacaaatacgccgaaggctaccccggcaaacgctactacggcggctgcgaatacgtcgatattgtcgaacaattggcaatcgaccgcgtcaaaaaactgttcggcgcgcaatacgccaacgttcaaccgcactccggctcgcaagccaaccaagccgtgtacgcttccgttttaaaaccgggcgacaccattttgggtatgtctttggcgcacggcggccacctgacccacggcgcgagcgttaatatttccggcaaactctacaatgccgttacttatggtttggatgaaaacgaagtgctcgattatgccgaagtggaacgcttggctctcgaacacaaacccaaaatgattgtggcgggtgcgtctgcctacgcgttgcaaatcgactgggcaaaattccgcgaaatcgccgataaagtcggcgcatacctctttgtcgacatggcgcactacgccggactgattgccggtggcgaatatcccaaccccgtgccattctgcgacttcgtgaccaccaccacccacaaaaccctgcgcggccctcgcggcggcgtgattctgtgccgcgacaatacccacgaaaaagcactgaactcttccatcttcccaagcctgcaaggcggtccgctgatgcacgtcatcgccgccaaagccgtagcgtttaaagaagcgttgcaacccgagttcaaacaatacgcaaaacaagtgaaaatcaatgctgccgccatggcggaagaactggtcaaacgcggtttgcgcatcgtttccggccgcaccgaaagccacgttttcctcgtcgacctgcaaccgatgaaaatcaccggcaaagccgccgaagccgctttgggcaaagcgcacatcaccgtcaacaaaaacgccattccgaacgatccggaaaaacccttcgttacctccggcatccgcatcggctccgccgccatgaccacacgcggttttaacgaagccgacgcacgcgtattggcgaacttggttgccgacgtattgtctaaccccgaagacgaagcgaatctggaaaacgtccgcaaacagattaccgccctctgcgacaaataccccgtttacggcgcgtaa

SEQ ID NO: 44393 - DNA, 558 bp, Neisseria meningitidis
atggatgctttaaaattattgacgaaccgccgatcttccaaaaagctgaagccccccgcccccgatgcggcggagttggaacaaatatttcaggcggcaacccaagttcccgatcacggcaatatgcgccccttccgttttatcgtgattcaaggcgaggtaggattgcaacgttttcgcgatgtgttaaagcaaacggttgccgaattgaatttcggcgacgatgcgatgaaaaaggcggaaaaagtgggcaatatgtcgccgatggttatcggggtaacgtttgcgccgaaccgcgatgtgcctaagccgaaaccggaatgggagcagatgctgacggcgggttgtgcggcgtatgcgctgcaactggcggcaacggcgcaaggtttcgacaatgtctggattacggggatgtgggtcaacagccccctgttgcgtgaggctttcggatgtgcggataaggataaaatcatcgggctgatgatggtcggcacgccgacagaggaagtgcataagcccaagaataccgatgtggaagcgtttgtcagtcattggtaa

SEQ ID NO: 44394 - DNA, 318 bp, Neisseria meningitidis; identical to SEQ ID NO: 39119

SEQ ID NO: 44395 - DNA, 2790 bp, Neisseria meningitidis
atgaccgattacagcaaaaccgtaaacctgctcgaaagcccgtttccgatgcgcggcaatcttgccaagcgcgagcctgcatggctgaaaagctggtacgagcaaaaacgctaccaaaaactgcgcgaaatcgccaaaggtcgtccgaagttcatcctgcacgacggcccgccgtatgccaacggcgacatccacatcggtcacgccgtcaacaaaattctcaaagacatcattatccgcagcaaaacccaagccggttttgacgcgccttatgtgccgggttgggactgtcacggtttgcctatcgaagtgatggtagaaaagctgcacggcaaagacatgcccaaagcgcgtttccgcgaattgtgccgcgaatatgccgccgaacaagttgcctgccagaaaaaagacttcatccgtctgggcgtgttgggcgactgggacaagccctacctgaccatggattttaaaaccgaagccgataccgtgcgtatgctcggcgaaatctacaaatccggctatctctaccgcggcgcgaaaccggttcagttctgcttggactgcggctcttcattggccgaagccgaagtggaatacaaagacaaagtatcgcctgcgattgacgtgggctatccgtttaaagacaccgctgcgcttgccgctgcattcggtttggcaggcatcgagggcaaagcgtttgccgtcatctggacgaccacgccttggacgctgccagcgagccaagccgtgtctgccggtgcggacgtggtgtatcaattaatcgatacgcccaaaggcaaattggtgctggcgaaagatttggcagaagacgcgctcaaacgttacggtttttcagacggcattgctattcttgccgaaaccaccggcgacaagctggaaaacctgcacatgaatcatccgttcctcgaacgcgatattcccatgctcaacggcgaccacgttaccaccgacgccggtaccggtttggtgcatactgcgcctgctcatggtttggaagactacgccgtctgcaataaatacggcatcgagctttacaaccccgtcaacgccgaaggcaaatacatcagtgaaacgccgcgcgttgccggcatgagcgtttgggaggccaatcccgttatcctgcaatggttggaagaaaccggcaacctcttggcaagcagcaaaatcgaacacagctacgcgcactgctggcgtcacaaaacgccgttgatttaccgtgcgaccggccaatggtttgtcggtatggataaagcaggtgccgatggtaaaaccctgcgcgataaagccatcaaagccgttgatgacactgaatttttcccatcatggggtcgtgcgcgtttggaagccatgattgaaggccgccccgactgggtggtttcgcgccaacgctattggggcacgccgatgactttctttgttcacaaagaaacgggcgagctgcatccgaactctgccgaacttttggaaaaagtcgcgcaacgcatcgaagaaaaaggcatcgaggcttggttctccctcgataagggcgaattgttgagcgcggaagattgcgaacattacgacaaactctccgacacgatggacgtatggttcgactccggttcgacccattattccgttgtgaaacagcgcgaagaattggactggcctgctgacttgtacctcgaaggcagcgatcaacaccggggctggtttcagtcgtccatgctgaccggctgcgcctcatcaatgggtcgcgcgccgtataaacagctgctgacccatggtttcgttgtcgacggcgaaggcaaaaaaatgtcgaaatccatcggcaacgtcgttgcaccgcaagaggtttataacgaattcggcgcagacatcctgcgcctgtgggcggcatctaccgattacagcggcgaattggcgatttccaaagaaatcctcaaacgcgtaaccgaaagctaccgccgtatccgcaataccttgagctttttgtttgccaacttgagcgactttaatccgattgaagatgccgtgcaacaggcggatatggtggaaatcgaccgctacgccgtggtattggcacgtcagctgcaagagcgtctggcaggcgattactatccgcgttatgccttccactttgccgtaaaagacattgtttctttctgctcggaagacttgggtgcgttctacctcgacatcctgaaagaccgcctctacaccaccaaagccgacagccatgcacgccgcagcgcacaaactgccctgtatcacatcacacgcagtttggttctcttgattgcaccgattttgtgcttcaccggcgaagaagcgtgggacatcatcggcggcggcgaagaagacagcgtcctcttccatacttggcacgagttcccgaccatcaacgaaaaaaccgaagccgaactggtgaaaaaatggacggcaatccgcgaagcccgcgaagcggtaaccgccgccatcgagcctttgcgcgccgacaaaaccgtcggttcgtccttgcaagccgaagccgaaattaccgcgccggaagaaatggccggctatctgaatgctttgggcgaagaattgcgctttgctttgctggtgtctaaagcagaagtgaaagtaggcagcgaacttgccgttgccgctaaagccagtgatggtgaaaaatgcgaacgctgctggcactacacccgcgatgtgggcgcggttgcaggctatgaaaccgtctgcaaacgctgtgcagagaatgtcggcggagaaggcgaaacgcgccattacgcctga

SEQ ID NO: 44396 - DNA, 1224 bp, Neisseria meningitidis; identical to SEQ ID NO: 39212

SEQ ID NO: 44397 - DNA, 132 bp, Neisseria meningitidis; identical to SEQ ID NO: 38518

SEQ ID NO: 44398 - DNA, 180 bp, Neisseria meningitidis
atgtcctttgatggttcggcttcaaaaatcgaattttcagaccttaatgagaaaaatgataaacaaaccctttgctttcaatcattatgggaatttaacgatgaatgcgaaaaaaaagaatctaattctatatattatatagacctacccgaaaacaatcccaaagacataaaacaataa

SEQ ID NO: 44399 - DNA, 549 bp, Neisseria meningitidis; identical to SEQ ID NO: 39055

SEQ ID NO: 44400 - DNA, 456 bp, Neisseria meningitidis
  misc_feature 6, 7, 8, 9, 10: 'n' is a, c, g or t
gtgtgnnnnncgcaattcacacgccaaaccatcggcggcgtggatattgtcagattccccgacggcacaatgatacagaccggcagctacaggttcacacgaagcggcggccccatcgaaaacgaagtcgtcttccccgtcgcctttgccgacggcaacgtcaaatgcttcgtatccgaacgccattcgggacgcgttaccggcgatcgaaggcaacacaactggctgtttatccgcgcaaaaaaccacgccgccgccattattaccaactggtacgaaggcagttgcgactggatggccatcggcaaagccgcctcgggaaacgccgccagctccccgataggccccgaaatacctgaaaccaacgaagaaccgcaaagagagagtggaagaacatcaaccggaccccgaaaccgccgccgccgagacggcttgctcgaggcactgcaagactag

SEQ ID NO: 44401 - DNA, 495 bp, Neisseria meningitidis
atgaaaaagaacatattggaattttgggtcggactgttcgtcctgattggcgcggcggcggttgcctttctcgctttccgcgtggcgggcggtgcggcgttcggcggttcggacaaaacttacgccgtttatgccgatttcggcgacatcggcggtttgaaggtcaatgcccccgtcaaatccgcaggcgtattggtcgggcgcgtcggcgctatcggacttgacccgaaatcctatcaggcgagggtgcgcctcgatttggacggcaagtatcagttcagcagcgacgtttccgcgcaaatcctgacttcgggacttttgggcgagcagtacatcgggctgcagcagggcggcgacacggaaaaccttgctgccggcgacaccatctccgtaaccagttctgcaatggttctggaaaaccttatcggcaaattcatgacgagttttgccgagaaaaatgccgacggcggcaatgcggaaaaagccgccgaataa

SEQ ID NO: 44402 - DNA, 660 bp, Neisseria meningitidis
atgtcaaaccaaaaagccttggtcatcttttcgggcggtcaggattcgaccacctgcctgattcaggcaatccaaatctacgggcgcgaaaacgtccaagccattactttccaatacgggcaacgccatgccgtcgagctggaacgtgcccgctggattgcgcaggatttgggcgtcaaacaaaccgtactcgacttgagcctgatgcggcagattacgcacaatgccctgatggacgacaccgccgccatcgaaactgccgaaaacggcgttccgaatacctttgtagacggccgcaacgcgcttttcctgctctatgccgcgatttacgccaaagggcaggggatacggcacatcatcgcgggcgtgtgcgaaaccgacttctccggctatcctgactgccgcgacgtgttcgtcaaatccatgaacgttacccttaatttggcgatggactatgatttccaaatccacacgccgctgatgtatctgaccaaggcgcaaacgtgggcgttggcggacgaaatgggcgtgctggactatatccgcgagcaaacccacacctgctataacggcatcgtcggcggctgccgcgaatgcccgagctgtatcttgcgcgaacgcgggctggcggaatatctggaaagtaaaaaggccgtctga

SEQ ID NO: 44403 - DNA, 780 bp, Neisseria meningitidis
atgcatatcatcgattcgcactgccacctcaattttgaaggtttgaaagaacgcctgcccgaagttttgtccaacatggaagcaaacggcgtggggcaggcgctcgccatcagcgtcagcagggaaagcttctccgaagtctttgccatcgccgaagcgcacgaacacatctattgcaccataggcgtacatcccgacagcaaggaagccgaagaattttctattgcggaaatggttgccgcagccgcccatccgaaagtggtcggcattggcgagacgggcttggattattactggtgcaaaggcgatttgtcctggcagcacaaacgctttgcagaccacatcgaagcagccaatcaaaccggactgcccgttatcgtccatacgcgtgatgcggcggcggacaccttgtctatcctgaaagaatgccgggttaattcgggcgttatccactgtttttccgaagacatcggttttgcccgtgcagcaatggatttggggctttatatttctttctcgggaatcgttacctttaaaaacgcacccttggttcaggaggcggcgaaatacgttccggacgaccgcattttagtggaaaccgatgcgccgttcctcgcccccgtacccaagcgcggcaggcagaacgaaccggctttcgtgcgttatactgccgaacatatcgccaaattgcggaaccaaaccttggaacaggttgcggcatacacgacggaaaacttttaccggctgtttcaaaaagtacccgatatgcggaccgtctga

SEQ ID NO: 44404 - DNA, 438 bp, Neisseria meningitidis
gtgtgggcgatgatgttttcttggttcaagctgtttcacttgttttttgtcatttcgtggtttgcagggctgttttacctgccgaggattttcgtcaatatggcgatgattgatgtgccgcgcggcaatcccgagtatgtgcgtctgtcgggcatggcggtgcggctgtaccgttttatgtcgccgttgggcttcggcgcggtcgtgttcggcgcggcgataccgtttgccgccggctggtggggcagcggctgggtacacgtcaaactgtgtttgggcttgatgctcttggcttaccagttgtattgcggcgtgctgctgcgccgttttcaggattacagcaatgctttttcacaccgctggtaccgcgtgttcaacgaaatccccgtgctgctgatggttgccgcgctgtatctggtcgtgttcaaaccgttttga

SEQ ID NO: 44405 - DNA, 1116 bp, Neisseria meningitidis
atgggcttgaaaaaggcttgtttgaccgtgttgtgtttgattgttttttgtttcgggatattttatacatttgaccgggtaaatcagggggaaaggaatgcggtttccctgctgaaggacaaactcttcaatgaagagggggaaccggtcaatctgattttctgctataccatattgcagatgaaggtggcggaaaggattatggcgcagcatccgggggagcggttttatgtggtgctgatgtctgaaaacaggaatgaaaaatacgattattatttcaatcagataaaggataaggcggagcgggcgtattttttccacctgccctacggtttgaacaaatcgtttaatttcattccgacgatggcggagctgaaggtaaagtcgatgctgctgccgaaagtcaagcggatttatttggcaagtttggaaaaagtcagcattgccgcctttttgagcacttacccggatgcggaaatcaaaacctttgacgacgggacaggcaatttaattcaaagcagcagctatttgggcgatgagttttctgtaaacgggacgatcaagcggaattttgcccggatgatgatcggagattggagcatcgccaaaacccgcaatgcttccgacgagcattacacgatattcaagggtttgaaaaacattatggacgacggccgccgcaagatgacttacctgccgctgttcgatgcgtccgaactgaagacgggggacgaaacgggcggcacggtgcggatacttttgggttcacccgacaaagagatgaaggaaatttcggaaaaggcggcaaaagatttcaacatacaatatgtcgcgccgcacccccgccaaacctacgggctttccggcgtaaccacattaaattcgccctatgtcatcgaagactatattttgcgcgaaattaagaaaaacccgcatacgaggtatgaaatttatacctttttcagcggcgcggcgttgacgatgaaggattttcccaatgtgcacgtttacgcattgaaaccggcttcccttccagaagattattggctcaagccggtgtatgccctgtttacccaatccggcatcccgattttgacatttgacgataaaaattaa

SEQ ID NO: 44406 - DNA, 330 bp, Neisseria meningitidis
atgggcagcctgattattgaagatttgcaggaaagcttcggaaaagaagcagttaaaggcaaagagattaccgtgcattacacaggttggctggaagacggcaccaaattcgactccagcctcgaccgccgccagccgctgaccatcacgctcggcgtcggacaagtcatcaaaggctgggacgaaggcttcggcggaatgaaggagggcggcaaacgcaagctgaccatcccttcggaaatgggctacggcgcacacggcgccggcggcgtgattcccccgcacgccactttgatatttgaagtcgagctgctgaaagtgtacgaataa

SEQ ID NO: 44407 - DNA, 216 bp, Neisseria meningitidis; identical to SEQ ID NO: 38246

SEQ ID NO: 44408 - DNA, 1332 bp, Neisseria meningitidis
atgctgttcaaccacaccgcttccgaacttctcgacctctgccgccgcacgctcgacttggcaaaagcagcgggcgcgaccgccgccgaagccgatttcagcgaatccatcggacaaagcgtcagcgtgcggctgggcgaaatcgaacaaatcgagttccagcaggacaagtcgctggacattaccgtttacgtcggcaaacgcaaaggccgcgctggcaccgccgatttctccgaacaagccctgcgcgacaccgtccgcgccgccgccgacatcgcccgccacaccgccgaagacggttgcgccggacttgccgaccccgagttgatggcgcaacacatcggcgaccccgacctttaccacgaatgggatttggatacggaagccgccgtcggctttgcaaaacaatgcgaacaagccgccctgaacgaggatgagcgcatcgaaaactccgaaggcgcggcggtgcaaaccggccattaccaatacgtttacggcaacacccacggttttgccgcacaccggcaaggcacgcaccacagcatttcctgcagcgtcgttgccgccgacgaaaacgggatgcagcgcgactactggtacgattccgcctgccgccatccggatatggacagccccgaaaccatcggtcaaaccgccgcccgccgcactttgcgccgactcggcagccgcagcatcccgacaggcagctaccccgtcctcttcgataccaccgtttcgggcggccttatcggacacctcgtcggcgcactctccggcggcgcgctctaccgccaaagcagtttcctgatcgacagcatcggcaaaaaagtcctgcccgatttcctcaacctgcgcgaagaaccgcacatcccccgctctttccgcagcagctattttgatgcggaaggcgttgccaccgcaccgcgcttcgtgattcaaaacggcattgtcgaaggctatttcctcagcagttacagcgcgcgcaaactcggtatgcagaccacgggcaacgccggcggcgcgcacaacctgtatttgaaccatacgcacgaaacgcaatccgacctgctgaaagaaatggggacgggattattggttaccgaactgatgggacagggcgcgaacaccattaccggtgactactcgcgcggcgcggcgggtttttgggtggaaaacggcgtgattgcctaccccgtccacgagattaccgtagccggacgcttgcaggatatgtaccgcgacattgtcggcgtggcggatgacgctttgcggcgttcgtccaacaaaatcggctcgattctgattgcggggatgacggttgccggaagctga

SEQ ID NO: 44409 - DNA, 891 bp, Neisseria meningitidis
atgaacagcccttttcacaacatcggcatcgtaacccgccccaacacgcccgacatccaagacaccgcacacacgctgattacctttttgaagcagcacggctttaccgtctatctcgacgaagtcggcataaaggaaggctgcatctatacccaagacaccgtcggctgccatatcgtcaacaagaccgaactggggcaatactgcgacctggtcgccgttttaggcggagacggcacctttctctccgtcgcccgcgaaatcgccctgcgcgccgttccgattatcggcatcaaccaagggcatttgggcttcctgacccaaattccccgcgaatatatgacggacaagctattgcccgttttagaagggaaataccttgccgaagagcgcatcctgattgaggccgcactcatccgcgaaggcaaaaccgccgaacgcgccatcgccctcaacgatgccgtcctctcccgtggcggtgccggacagatgattgagtttgaagtcttcgtcaatcgggaattcgtctatacccagcgttcggacgggctgattgtctccacccccaccggatcgaccgcctattcgcttgccgccggcggccccatcatgcaggcaggattacacgccttcacgctcgtccccatctgcccgcaatccatgaccaaccgccccatcgccattccagacacgtccgaaatcgaaatcctcgttacccaaggcggcgacgcgcgcgtccatttcgacggtcaaacccatatcgacgtgcaaaacctcgaccgcatcaccatccgccgctaccgaaatcccttacgcattttgcacccgaccgactaccaatatttcaaaaccctgcgccaaaaactgcactggggcgagcaattagtctaa

SEQ ID NO: 44410 - DNA, 591 bp, Neisseria meningitidis; identical to SEQ ID NO: 38840

SEQ ID NO: 44411 - DNA, 1677 bp, Neisseria meningitidis
atgagcgtaggtttgctgaggattctggttcaaaaccaggtggttactgttgagcaggccgagcattactgcaatgagtcgcaggcgggtaaggaagtgttgccgatgctgttttcagacggtgtcatttcgcccaagtcgcttgcggcattgattgcgagggtgttcagttattcgattcttgatttgcgtcattatccgcgccacagggtgctgatgggggtgttgacggaggagcagatggtggagttccactgtgtgccggttttccgtcggggcgacaaagtattttttgcggtttccgatccgacacagatgccgcaaattcagaaaaccgtttctgccgcagggattgaggttgagttggtcattgtcgaggatgaccagttggcgggtttgctcgattgggtgggttcgcgttcgacatcgctgcttcaggagcttggggaggggcaggaggaagaggaaagccacaccctgtatatcgacaacgaggaggcagaagacggccctgttccgaggtttatccataagactttgtcggatgccttgcgcagcggggcatcggacatccatttcgagttttacgaacacaatgcccgtatccgtttccgtgtggacgggcagctccgcgaggtggttcagccgcccattgcggtaagggggcagcttgcttcccggattaaggtaatgtcgcgtttggacatttccgaaaaacggataccgcaggacggcaggatgcagctgacctttcaaaagggcggcaagcctgtcgatttccgtgtcagcacattgccgacgctgtttggcgaaaaggtcgtgatgcggattttgaattccgatgccgcgtctttgaacatcgaccagctcggttttgagccgtttcagaaaaaattgttgttggaagcgattcaccgtccctacgggatggtgctggtaaccggtccgacgggttcgggtaagacggtgtcgctctatacctgtttgaatattttgaatacggagtcggtaaatattgcaacggcggaagaccctgccgagattaacctgccgggcatcaatcaggttaacgtcaatgataagcagggtctgacttttgccgctgctttgaagtctttcctgcgtcaggacccggacatcattatggtcggtgagattcgtgatttggaaactgccgatattgcgattaaggcggcacaaacagggcatatggtgttttccaccctgcacaccaataatgcgccggcgacgttgtcgcgtatgctgaatatgggtgtcgcgccgtttaatattgccagttcggtcagcctgattatggcgcagcgtcttttacgcaggctgtgttcgagctgcaaacaggaagtggaacgcccgtctgcctctgctttgaaggaagtcggcttcaccgatgaggaccttgcaaaagattggaaactttaccgcgccgtcggttgcgaccgttgccgggggcagggttataaggggcgtgcgggcgtgtatgaggttatgcccatcagcgaagaaatgcagcgtgtgattatgaacaacggtacggaagtggatattttggacgttgcctataaggagggtatggtggatttgcgccgggccggtattttgaaagttatgcagggcattacttcattggaagaggtaacggcaaataccaacgattag

SEQ ID NO: 44412 - DNA, 744 bp, Neisseria meningitidis
atgttaagcgcgcgctacctccacctgcacgaagccttgggcttgggcccgatgtggttgaagcggggagccgtcgtcctgccgcccgcaacattgccggaaagcccgacacaaatccgcccgcaaaagcaaaccgtcctcagcattccgcagcgtccgtccgaacagcataccggtcaggcacggctcaaaaccatgaaagtgttggaaacaaccgccgtacatacgcgcaaacccgcgcctgaaaccgaaacgcctctgtccggcctttcagacggcatcgcccccgtttccgccgcttcgggcataaccaaacttgccgtcgtcagcctttgcccaccgattgaggatgcggtttacgggcaactgttctacggcaaagcgggtgttctgcttgacaacatactcaaagccgtaggactggatgccgcctatgtccacaaaacctgttgggtgaaaaccgccgccgtcggcaacccgatgccgtctgaagcggcaatcgaaaccgcgacggtttccgtcatgcaggaactcgacggctgccgcgcccccgccgtcctattcctcggacaggcttttgtccagcctgaacggcaaacgatgattgaaactttgtgcggcagccgtcccttcttcatcatcgaccatcccgcccggctgttgcgccaacccgaacttaaagcccgcgcctggcaggtgttgaaacagttgaaacgcgccttgcggcaaggcggcggcagttga

SEQ ID NO: 44413 - DNA, 669 bp, Neisseria meningitidis
atgaaccacgacatcactttcctcaccctgttcctactcggtttcttcggcggaacgcactgcatcggtatgtgcggcggattaagcagcgcgtttgcgctccaactccccccgcatatcaaccgcttttggctgatcctgctgcttaacacaggacgggtaagcagctatacggcaatcggcctgatactcggattaatcggacaggtcggcgtttcactcgaccaaacccgcgtcctgcagaatattttatacacagccgccaacctcctgctgctctttttaggcttatacttgagcggtatttcttccttggcggcaaaaatcgagaaaatcggcaaaccgatatggcggaacctgaacccgatactcaaccggctgttacccataaaatccatacccgcctgccttgcggtcggaatattatggggctggctgccgtgcggactggtttacagcgcgtcgctttacgcgctgggaagcggtagtgcggcaacgggcgggttatatatgcttgcctttgcactgggtacgctgcccaatcttttggcaatcggcattttttccctgcaactgaaaaaaatcatgcaaaaccgatatatccgcctgtgtacgggattatccgtatcattatgggcattatggaaacttgccgtcctgtggctgtaa

SEQ ID NO: 44414 - DNA, 279 bp, Neisseria meningitidis; identical to SEQ ID NO: 38216

SEQ ID NO: 44415 - DNA, 1170 bp, Neisseria meningitidis
atgacagcacataaaatcctgcccgtcctgctttccatcatcttaggcatttctcacgcaacggccgcatcgcccgcgcccaacaaaccggcggtacacgccgcccccacgttccaaacacccgaaaccctcacagcggcacacatcgttatcgaccttcaaagcaaacagattttatccgccaaaaacatcaatacccctgtcgaaccggcggcactaacccaactgatgaccgcatatctggttttcaaaaacatgaaatcgggaaatatccgatctgaagaaaacttaaaaatacccgaatccgcatgggcttcagaaggaagcagaatgtttgtacgtcccggcgatacggtcagcaccgacaaactcttaaaaggcatgattgcactatccgcaaacgatgccgccctaacccttgccggccgactgggcaacggctcgattgaaaattttgtgcaacaaatgaacaaagaagcccgacgcttgggcatgaagaacactgtattcaaaaacccgacaggcttgagtagagaaggacaggtttccaccgccaaagaccttgccctgctgtctgaagcattgatgcgcgactttccggaatattacccgctgttttccatcaaatctttcaaattcaaaaatatagaacaaaacaaccgcaatatccttttatatagggacaacaatgtaaacggtctgaaagccggacacacagaaagcggcggctacaaccttgccgtgtcatactccggcaacggcaggcacatccttgtcatcacattgggttcggaatcggcggaaacacgcgcatcagacaacagcaagctgctgaactgggcattgcaagccttcgatacgcccaaaatatatccgaaaggcaaaaccgttgcccaaatccaaatttccggaggcagcaaaaaaaccgtccgcgcaggcttcctcaaagaagcctacatcactctgccacataaggaagcgaaaacaaccgaacaaattttggaaaccatacagccgattcccgccccagtaaaaaaagggcaaattttaggaaaaatcaaaatcagacaaaacggatacaccattgccgaaaaagaaatcgtcgcactggaaaatgtaaaaaaaagaagccggtggcaaaggctttgggcgtgtctgacagggcagtaa

SEQ ID NO: 44416 - DNA, 1470 bp, Neisseria meningitidis; identical to SEQ ID NO: 38653

SEQ ID NO: 44417 - DNA, 1419 bp, Neisseria meningitidis
atgaatattcacgccctgctctccaaacaatggacgctgccgccattcctgccgaaacggctgctgctgtccctgctgatactgctggcccccaatgcgatgttttgggttttggcactgctgaccgccaccgcccgcccgattgtcaatttggactaccttcccgccgcgctgctgatcaccctgccttggcgtttcgtcaaaattgccggcgtattggcgttttggctggcagttttgtttgacgggctgatgatggtgatccagcttttcccttttatggacctcatcggtgccatcaacctcgtccccttcatcctgaccgcccccgccccttatcagataatgaccgggctgttgctgctgtatatgctggcgatgccgtttgtgttgcagaaagccgccgccaaaaccgacttccggcacattgccgtctgcgccgccgttgtggcggcagccggctatttcatcggccatttgagttactacgaccggggtcggatggccaatatcttcggcgcaaacaacttctactacgccaaaagtcaggcgatgctctacaccgtcagccagaatgccgactttattaccgccggcctggtcgatcccgtcttcctccccttgggcaatcaacagcgtgccgccacgcatctgaacgagccgaaatctcaaaaaatcctctttatcgtcgccgaatcttgggggctgccggccaatcccgaacttcaaaacgccacttttgccaaactgctggcgcaaaaagaccgtttttcggtttgggaaagcggcagttttccctttatcggcgcgacggtcgaaggcgaaatgcgcgaactgtgcgcctacggcggtttgcgcgggttcgcactgcgccgcgcgcccgacgaaaaatttgcccgctgcctccccaaccgtttgaaacaagaaggttacgccacctttgcgatgcacggcgcgggcagttcgctttacgaccgcttcagctggtatccgagggcgggctttcaagaaatcaaaaccgccgaaaacctgatcggtaaaaaaacctgcgccattttcggcggcgtgtgcgacagcgagctgttcggcgaagtgtcggcatttttcaaaaaacacgacaagggactgttttactggatgacgctgaccagccacgccgactatcccgaatccgacattttcaaccacaggctcaaatgcaccgaatacggcctgcccgccgaaaccgacctctgccgcaacttcagcctgcacacccaattcttcgaccaactggcggatttgatccaacgccccgaaatgaaaggcacggaagtcatcatcgtcggcgaccatccgccgcccgtcggcaacctcaatgaaaccttccgctacctcaaacaggggcacgtcgcctggctgcacttcaaaatcaaataa

SEQ ID NO: 44418 - DNA, 396 bp, Neisseria meningitidis; identical to SEQ ID NO: 39569

SEQ ID NO: 44419 - DNA, 2151 bp, Neisseria meningitidis
atgaaaaccccacccctcaagcctctgctcattacctcgcttcccgttttcgccagtgtttttaccgccgcctccatcgtctggcagctaggcgaacccaagctcgccatgcccttcgtactcggcatcatcgccggcgggctggtcgatttggacaaccgcctgaccggacggctgaaaaacatcatcgccaccgtcgccctattcaccctctcctcacttgttgcacaaagcacgctcggcacaggcctgcccttcatcctcgccatgaccctgatgacctttggcttcaccattttaggcgcggtcgggctgaaataccgcaccttcgccttcggcgcactcgccgtcgccacctacaccacacttacctacacccccgaaacctactggctgaccaaccccttcatgattttatgcggcaccgtactgtacagcaccgccatcatcctgttccaaatcatcctgccccaccgccccgtccaagaaagcgtcgccaacgcctacgacgcactcggcggctacctcgaagccaaagccgacttcttcgaccccgatgaggcagcctggataggcaaccgccacatcgacctcgccatgagcaacaccggcgtcatcaccgccttcaaccaatgccgttccgccctgttttaccgtttgcgcggcaaacaccgccacccgcgcaccgccaaaatgctgcgctactacttcgccgcccaagacatccacgaacgcatcagctccgcccacgtcgattatcaggaaatgtccgaaaaattcaaaaacaccgacatcatcttccgcatccaccgcctgctcgaaatgcagggacaagcctgccgcaacaccgcccaagccctgcgcgcaagcaaagactacgtttacagcaaacgcctcggccgcgccatcgaaggctgccgccaatcgctgcgcctcctttcagacggcaacgacaatcccgacatccgccacctcggccgcctgctcgacaacctcggcagcgtcgaccaacaattccgccaactccagcacaacggcctgcaggcggaaaacgaccgcatgggcgacacccgcatcgccgccatagagaccggcagcctcaaaaacacctggcaggcaatccgtcctcagctaaacctcgaatcaggcgtattccgccatgccgtccgcctgtccctcgtcgttgccgccgcctgcaccatcgtcgaagccctcaacctcaacctcggctactggatactactgaccgcccttttcgtctgccaacccaactacaccgccaccaaaagccgcgtccgccagcgcatcgccggcaccgtactcggcgtaatcgtcggctcgctcgtcccctacttcaccccgtctgtcgaaaccaaactctggattgtcatcgccagtaccaccctctttttcatgacccgcacctacaaatacagtttctccaccttcttcattaccattcaagccctgaccagcctctccctcgcaggtttggacgtatacgccgccatgcccgtacgcatcatcgacaccattatcggcgcatcccttgcctgggcggcagtcagctacctgtggccagactggaaatacctcacgctcgaacgcaccgccgcccttgccgtatgcagcaacggtgcctatctcgaaaaaatcaccgaacgcctcaaaagcggcgaaaccggcgacgacgtcgaataccgcgccacccgccgccgcgcccacgaacacaccgccgccctcagcagcaccctttccgacatgagcagcgaacccgcaaaattcgccgacagcctgcaacccggctttaccctgctcaaaaccggctacgccctgaccggctacatctccgccctcggcgcataccgcagcgaaatgcacgaagaatgcagccccgactttaccgcacagttccacctcgccgccgaacacaccgcccacatcttccaacacctgcccgaaaccgaacccgacgactttcagacagcactggatacactgcgcggcgaactcgacaccctccgcacccacagcagcggaacacaaagccacatcctcctccaacagctccaactcatcgctcggcagctcgaaccctactaccgcgcctaccgacaaattccgcacaggcagccccaaaacgcagcctga

SEQ ID NO: 44420 - DNA, 897 bp, Neisseria meningitidis
ttgaatccgacgaatgatttgaaagcgtggcaacagagggcgcaggcacagacagagctgctgctggaacgctttttgccgtctgaaaacgaaatcccgcacacgctgcacgaagcgatgcgttatgcggctttggacggcggtaagcgtctgcggccgatgctggttctggcagcttcggaattaggcgaagccgtgcatgaagcagtagaacaggcaatggcggcaatcgaaatgatccacgtctattctttggttcacgacgatatgccggcgatggacaacgacagcctgcggcgcggcaaaccgacttgccatatacaatacgacgaagccaccgcgctactggtcggcgacgctttgcaaacccaagccttcgacgtgttaagccgtccgacagaactgcccgcagcacgccagttggcaatgttgtcggtgttggcgaaagcgggcggcagcgcgggcatggcgggcggtcaggcaatcgatttggcgaatgtcggcaaacaaatggttcaagccgatttggaacagatgcacagcctgaaaacgggtgcgctaatccgtgcggcggttttattgggggcgatgtcctgcccgaatctgtctgaagacagtctggcggtattggacgattatgcggcaaaactggggctggcgttccaagtcattgacgatgtgttggattgtgaagcggacacggcgactttaggcaaaacggcgggcaaagacgcagacaacgacaagccgacttatgtgaaactgatgggcttggaagcggcgcgctcatacgcacacaaactggttgccgaagcggtcgcgctgctcgaacccttcggcgacaaagccctgcgcctgcggcagttggcagaatttgcagtcgcccgcaaatattaa

SEQ ID NO: 44421 - DNA, 753 bp, Neisseria meningitidis; identical to SEQ ID NO: 39622

SEQ ID NO: 44422 - DNA, 453 bp, Neisseria meningitidis
atgcaaattattctgttagaaaaaatcggcggtctgggcaacttgggcgatatcgtaaccgttaaaaacggctacgcccgcaactttctaattcccgcaggtaaggcaaaacgtgcgaccgaagcgaatatgaaagagtttgaagtacgccgcgccgaattggaagccaaacaggctgaaattttggcagatgcccgagtccgtcaggaaaaattggacggtcaaaccgttaccgttgctcaaaaagccggtgtggacggtcgcctgttcggttccgttaccaatgccgacattgctgctgcaatcgttgctgccggcatcgaagccgtgaaagcaaatgtacgtctgccgaacggtcctctgaaagccgttggcgagtacgaagtggaagtggctttgcacactgatgccgttgctaaaattaccgttgccgtcgttgccgcaaccgagtaa

SEQ ID NO: 44423 - DNA, 999 bp, Neisseria meningitidis
atgtccgaaaacaaacaaaacgaagtcctgagcggttacgaacaactcaaacggcgcaaccgccgccgcctcgtaacggcaagttgcctggttgccgcctcctgcatcctgctggcagccgccctcagttccggccctgccgaacagactgccggcgaaacaaacggcgtagaaaacaaagcggcaggtgcggcacaaacccctgccttgaaatccgccgccgacaaaccgcaggacttggcaggcgaagacaagccttctgccgccgacagcgaaatcagcgagcctgaaaacgtaggcgcgccgctggtgctgattaacgaccgcctcgaagacagcaacatcaaaggtttggaagcatccgagaaactgcaacaggcagaaaccgccaaaaccgcaccgaagcaggcaaaacaacgcgctgccgaaaaagtgccggcaactgccgacagtacggatacggtagcggttgaaaaaccgaaacgcactgccgaaacaaaaccgcaaaaagcggaacgcactgccaaagccaagcccaaagccaaagaaaccaaaaccgccgaaaaagttgccgacaaaccgaaaactgccgccgaaaaaaccaaaccggatacggcaaaatccgacagcgcggtaaaagaaacgaaaaaagccgacaaggctgaaagcaaaaaaacagccgaaaaagaccgttcggacggcaaaaaacacgaaacggcacaaaaaaccgacaaagcggacaagaccaaaaccgccgagaaggaaaaatccggtaaaaaagccgccattcaggcaggttatgccgaaaaagaacgcgccttaagcctccagcgcaaaatgaaagcggcgggtatcgattcgaccatcaccgaaattatgaccgacaacggcaaagtttaccgcgtcaaatcaagcaactataaaaacgcaagggatgccgaacgcgatttgaacaaattgcgcgtacacggtatcgccggtcaggtaacgaatgaataa

SEQ ID NO: 44424 - DNA, 348 bp, Neisseria meningitidis; identical to SEQ ID NO: 38212

SEQ ID NO: 44425 - DNA, 1056 bp, Neisseria meningitidis
atgccgtctgaaacacgcctgccgaactttatccgcgtcttgatatttgccctgggtttcatcttcctgaacgcctgttcggaacaaaccgcgcaaaccgttaccctgcaaggcgaaacgatgggcacgacctataccgtcaaatacctttcaaataatcgggacaaactcccctcacctgccgaaatacaaaagcgcatcgatgacgcgcttaaagaagtcaaccggcagatgtccacctatcagcccgactccgaaatcagccggttcaaccaacacacagccggcaagcccctccgcatttcaagcgacttcgcacacgttactgccgaagccgtccgcctgaaccgcctgacacacggcgcgctggacgtaaccgtcggccccttggtcaacctttggggattcggccccgacaaatccgttacccgtgaaccgtcgccggaacaaatcaaacaagcagcatcttatacgggcatagacaaaatcattttgaaacaaggcaaagattacgcttccttgagcaaaacccaccccaaggcctatttggatttatcttcgattgccaaaggcttcggcgttgataaagttgcgggcgaactggaaaaatacggcattcaaaattatctggtcgaaatcggcggcgagttgcacggcaaaggcaaaaacgcgcgcggcgaaccttggcgcatcggcatcgaacagcccaacatcgtccaaggcggcaatacgcagattatcgtcccgctgaacaaccgttcgcttgccacttccggcgattaccgtattttccacgtcgataaaagcggcaaacgcctctcccatatcattaatccgaacaacaaacgacccatcagccacaacctcgcctccatcagcgtggtcgcagacagtgcgatgacggcggacggcttgtccacaggattattcgtattgggcgaaaccgaagccttaaagctggcagagcgcgaaaaactcgctgttttcctgattgtcagggatacaggcggctaccgcaccgccatgtcttccgaatttgaaaaactgctccgctaa

SEQ ID NO: 44426 - DNA, 1419 bp, Neisseria meningitidis
atgtctattaaaaacgccgtaaaattgattgaagaaagcgaagcccgctttgtcgatttgcgctttaccgataccaaaggcaagcagcaccactttaccgtgcctgcgcgcatcgtgttggaagaccccgaagagtggttcgaaaacggtcaggcgtttgacggttcgtctatcggcggctggaaaggcattcaggcttccgatatgcagttgcgtcccgatgcgtctacagccttcgtcgatcctttttatgatgatgttaccgtcgtcattacctgcgacgtcatcgaccctgccgacggtcagggttacgaccgcgacccgcgctccatcgcccgccgcgccgaagcctatttgaaatcttccggcatcggcgacacggcatacttcggccccgaacccgaattcttcgtcttcgacggcgtagaatttgaaaccgacatgcacaaaacccgttacgaaatcacgtccgaaagcggcgcgtgggcaagcggcctgcatatggacggtcaaaacaccggccaccgtcccgccgtcaaaggcggctacgcgcccgtcgcgccgattgactgcggtcaggatttgcgttccgcgatggtaaacattttggaaggactcggcatcgaagtcgaagtccaccacagtgaagtcggtaccggcagccaaatggaaatcggcacgcgtttcgccaccttggtcaaacgcgccgaccaaacccaagacatgaaatatgtgattcaaaacgttgcccacaacttcggcaaaacagccacctttatgcccaaaccgattatgggcgacaacggcagcggtatgcacgttcaccaatccatttggaaagacggtcaaaacctgttcgcaggcgacggctatgccggcttgagcgacaccgcgctctactacatcggcggcatcatcaaacacgccaaagccctgaacgcaattaccaatccgtccaccaactcctacaaacgcctcgtgccgcactttgaagcaccgaccaaactggcatattccgccaaaaaccgttccgcttccatccgcattccgtccgtgaacagcagcaaggcgcgccgcatcgaagcgcgtttccccgatccgaccgccaacccgtatttggcatttgccgccctgttgatggcgggtttggacggtattcaaaacaaaatccatccgggcgatcctgccgataaaaacctgtacgacctgccgccggaagaagacgcgctcgtcccgaccgtttgcgcctctttggaagaagccctcgccgccctcaaagccgaccacgaattcctcctgcgcggcggcgtgttcagcaaagactggatcgacagctatatcgcctttaaagaggaagatgtccgccgcatccgcatggcaccgcatccgctggaatttgaaatgtattacagcctgtaa

SEQ ID NO: 44427 - DNA, 2691 bp, Neisseria meningitidis
atgtccgacaaccgcctcgacaccgcccgccgccattccctcttcctcgcccgccagctcgacaacggcaaactcaagcccgaaattttcctgcctatgctggacaaggttttgaccgaagcggatttccaagcctttgccgactgggacaaaatccgtgcggaagaaaacgaggaagaattggcgcggcagttgcgcgggttgcgccgttatgtggtgtcgcagattatcgtgcgcgatataaaccgcatcagcgatttgaacgaagtaacccgcacgattacgctgtttgccgattttgccgtcaataccgcgctggattttgcctacgcctattatcgggacatgtacggcacgccgatcgggcgttataccaaatcgccgcagcatttgagcgtggtggcgatgggcaaggcgggcggctatgagttgaacgtgtcttccgacatcgatttgattttcgtctatcccgaatcgggcgacaccgacggcaggcgcgaacgcggcaatcaggagtttttcaccaaagtcgggcagaaactgattgcgttgctgaacgacattaccgccgacgggcaagtgttccgcgtcgatatgcggctgcggccggacggtgattcgggcgcgttggtattgagcgaaaccgcgctggagcaatatttgattacacaggggcgagaatgggaacgctacgcgtggtgcaaaggtcgcgtggttacgccgtatccgaacgacatcaaagcactggtgcgcccctttgtgttccgcaaatatctggattacggcgcgtatgaggcgatgcgtaagctgcaccgccaaatccgcagcgaagtcagcaaaaaaggcatggcggacaacatcaaactcggcgcgggcggcatccgcgaagtcgaatttatcgcccagattttccagatgatacgcggcggccaaatgcgtgcgctgcaactgaaaggcacgcaggaaacgctgaagaaacttgccgaaaccgggatcatgccgtctgaaaacgtcgaaaccctgcttgccgcctaccgcttcctgcgcgacgtcgaacaccgcctgcaatactgggacgaccaacaaacccaaaccctgcccacttcgcctgaacagcggcaactgctcgctgaaagcatgggtttcgacagttattccgctttttcagacggtctcaatgttcatcggaacaaagtcaatcagttgttcaacgaaattttgagcgaacccgaagagcaaacgcaagacaacagcgaatggcaatgggcatggcaggacaaacccgacgaagaagggcggcgatgccgtctgaaggcgcacgggttcgatgccgaaaccgtcgccgcaaggctcgaccaaatccgccacggccataaataccgccatctttccgcacacgcccagccgcgtttcgatgcggttgtgccgctgttcgtacaggcggcggcagcgcaaagcaacccgaccgatacattgatgcggctgttggattttctcgaaaacatcagccgccgatccgcctatctcgccttcctcaacgaacatccgcaaaccttggcgcaactggcgcagattatgggccaaagttcttgggtggcggcgtatctgaacaaatatccgattttgttggacgaactcatcagcgcgcagcttttggataccgcgtttgattggcaggcgctcgccgccgccctttcagacgacctcaaagcctgcggcggcgatactgaagcgcaaatggacaccctgcgccgcttccagcacgcccaagtcttccgtctcgccgtccaagacctcgccggactgtggacggtagaatccctctccgaccaactctccgccctcgccgacaccatcctcgccgccgccctgctgtgcgcatgggcggacatgcccaaaaaacaccgcgacacaccgcaattcgccgtcgtcggctacggcaaactcggcggtaaagaactcggctacgcctccgacctcgacctcgtctacctctacgacgatccccaccccgacgcaggcgacgtgtacagccgcctcgcccgtcgcctgaccaactggctttccgccgccactggcgcaggcagcctctacgaaaccgacctgcgcctgcgccctaatggcgacgccggtttcctcgcccacagcatcgccgcctttgaaaaataccagcgcgaaaacgcctggacgtgggaacaccaatcccttacccgcgcccgcttcatctgcggcacgtccgaaattcagacggccttcgaccgcatccgcaccgaaatcctcaccgccgaacgcgaccaaaccgccttggcaggcgaaatcatcgaaatgcgcgaaaaaatgttccccacccacccgcctgccgacagcaacgtcaaatacgcgcgcggtggcgtggtcgatgtcgaatttatcgtccaatatctgatacttgcccatgcccgccagtatccgcaactcttggacaactacggcaacatcgccctcttaaacatctccgccgactgcggtttgattgacaaaaccctcgccggacaaagccgcaccgcctatcgcttctaccgccggcagcagcacaacaccaaactgcgcgacgcggcaaaaaccgaagtaaccggcgaactgttggcacattacggcaatgtcaggaaattgtggcgggaagtgttcggcgaagaagcggcaaccgcctga

SEQ ID NO: 44428 - DNA, 1407 bp, Neisseria meningitidis
atgaacgattacgcagccatgccgtctgaagaccgtgaggtcggcgcattgtcgcttccgccgcactcaatggaggcggaacaatccgttttgggcgggttgatgctggaaaatccggcatgggacaggattgccgatgtggtttcgggagaggatttctaccggcatgaacaccgcctgattttccgttccattgccaaattaatcaatgagagccgtcccgcagatgtgattacggttcaggaagatttgcagcggaacgaagaattggaagcggcaggcggattcgaatacctgattacgctggcgcaaaacaccccgtctgccgccaacatccgccgctacgccgaaatcgtgcgcgagcgttccattatgcgccaactcgccgaagtggggacggaaatcgcccgcagcgcctacaatccgcaaggcagggacgcggggcagcttttagacgaggcggaaaacaaagtattccaaatcgccgaaagcaccgccaaatccaagcagggctttttggagatgcccgatttgctgaaagaagtcgtacagcgcatcgatatgctctactcgcgcgacaatcccgatgaagttaccggcgtgccgacagggttcatcgacctcgacaaaaaaacctcgggtctgcaacccggcgacctgattatcgttgccggtcgtccgtctatgggtaagaccgccttttccatcaatatcgccgaacacgttgccgtagaaggcaagctgccggttgccgtcttctcaatggagatgggcggtgcgcaactggtcatgcgtatgctcggctcggtcggacgcttggatcaaagcgtcctgaaaaccggcaggctcgaagacgaacactggggtcgtctgaacgaagcagtcgtcaaactctccgacgcgcccgtgtacatcgacgagaccccgggtttgactgcgctcgaactgcgcgcccgcgcccgccgtctcgcccgtcaatttaacaataagctgggattgatcgtcatcgactacctgcaactgatggcgggatccggccgttccgacaaccgagcttcagagctgggagagatttcacgttcgctcaaagcgttggcgaaagaattgcaagtccccatcatcgccctgtcgcaactgagccgcacggtcgaatcgcgtaccgacaaacgcccgatgatgtccgacctccgcgaatccggtgctatcgagcaggatgccgacctgattatgtttatgtaccgcgacgaatactacaaccaagactcgcccatgaaaggccttgccgaatgtatcatcggcaaacaccgcaacggtcccgtcggtaaaatcttcctcacatggacgggacaattcaccaaattcgacaatgctgcctatattcccgaggaggcaaagatagaagattaa

SEQ ID NO: 44429 - DNA, 1746 bp, Neisseria meningitidis
atggaacggcagacagatgaatttgcccaagcggcggcaagggcggcaatctggtttttggcacgctatgcgggttcaggcagcgaagtgcttgcaaactgcaccgaacgcctgtttcaggcattgcaaaacggtcattcgtttatccgtttgagcggtggcgaggctgacgcgctgtcggcactcgcacccgtggtcggaacatccgccgcgcctttgattttggaaggcagaaggctgtttttgggcaggatgtggcagttggaatacgatttggctgccgagataaaacgcttggcggcagccgacacgtccgcccccgacgcggcaggcgcgcggcaaaacctcgcaaaatggtttcaaggcacgggcagcgaagggcagcgcgatgccgccgccttggcactgttgcagccttttatggtgattaccggcggacccgggacgggtaaaacgacgacggttgccaaactgctggcgctgatttgcggtgaagacgaaaatcttcccaacatcgcgcttgccgcaccgacgggcaaagcggcggcacatatggcgcgcgcgctgcaccgtgcaatcaacggttttgacgcgccggaggccgtccgccgccatttgctcaaactggaagggcaaaccgtccaccgactgctgaagctgcgcccgcccaaaatgcaggcggcgttcgaccctgtttacccgctgccgtttgacgtattggttatcgatgaagcctctatgctggatacggcattgatgctgcaacttttaaaagcggtcaaaaccggcgcgcgcgtgattctgctgggggatgaaaaccagctcccgtccgtcggaatcggggcggtgctgtccgttttgtcgcaaaaaaccgttttggacggagaagcgcaccaaaggctggccggcttccttccggaacacggtttcagcgtcagcgcaaatccgcccgtgttggcgcaaaacaccgcccatctgtcgttcagccaccgtttcggcgacaacagcggcatcggctgccttgcccgtgccgccgtatcgggcgatgagggggcgtgggcattgtttgaccggtttccggatgaactggaacattcggaatgcagtccgaacgctcgagtcgaaaggttgtaccgggcgcacaaagcctattggcaggcggtaaaagacggcaatatcgaagccgcatacgcaggcatctcggatatcgtggtcctggcagcttggcggcaggatgcggaagacttcaacaaagcctattgcagccatgtacgccgcaaaatgaacataccggaacatctggcctatttcgccggagagccgattatgatcaggcagaacgactacgcgcttgaactgttcaacggcgacatcggactgattatggaagatgtcggacggcagggcagccttgccgcctattttgccgatgcggacggatttaaaaaggtagcggtaagctgcctgcccgatttcgaacccgcattcgccatgaccgtccacaaaagccaaggttcggaatatcgggaagtctggctgctgccgccttccgccgcaccttcggacgaaggggacgatgcattgtccggattgagtaaggagctgttatataccgccattacccgcgcgagggagaagttcgtattcttcggcggagaagaaaccttccggcaagctgccgccactgtcaaaacgcgtcagacggcattgggcagtatgctcgagcgggtattttcacaagaataa

SEQ ID NO: 44430 - DNA, 582 bp, Neisseria meningitidis; identical to SEQ ID NO: 38841

SEQ ID NO: 44431 - DNA, 660 bp, Neisseria meningitidis
atggatatgttggaaattttgttccgccatcaagacttcgtcgccatcaacaaaccgggcggcatatccgtccaccaagacagcggcgagaccggactggcccgaacactcgccatacagttgggcgtagagcgtgtgtggctgctgcaccgattggacaaacagaccagcggcattttactgtttgccctcaacagagaaagcgcgtccgcccttagcggacagtttgccggcaaaagcatcaaaaaaacctatttggcactatccgaccgcaaaccgtccaaaaagcagggttggattaaaggcggaatggaaaaatccagacgcggaatgtggaagttgacgcgcaatacagaaaatatcgccgttacccgattccacagcatcagtatcgccgaaaaactgcggctgttcatcctggaaccgcatacgggcaaaacgcaccaattgagagtggcgatgaaaagtttgggcagtccgattctgggtgacagcttatacggcggaacagaatccgaaaccatgtttctgtatgcatggaaaatacaatttgcctaccaaaaccgacaaatcgaaattgttgcacccttaaaaaacgaatggcagactgaaaatatctctcatgcgctggaagaattttatatggcaaaagcaggttaa

SEQ ID NO: 44432 - DNA, 975 bp, Neisseria meningitidis
atgccgtctgaaaaaaatatcggttttatggcaggaagcagccgcccgttgtgggtcgcctttgcgctgttgctggtttcctgcgtcctgtttatgacgctcaacgtcaaaggcgattgggattttgttttgcaactgcggctgaccaaacttgccgcgctgctgatggtcgcctatgcggtcggcgtgtccacgcaactcttccaaacgctgaccaataatccgattctgaccccttcaattttgggtttcgattcgctgtatgtgtttttgcagaccttgctggtgtttacgttcggcggcgtgggctatgcttccctgccgttgacgggcaaattcggctttgaactggtcgtcatgatgggcggctcgctgctgctgttctacacgctcatcaaacagggcggacgcgatttgtcgcgcatgattttaatcggcgtgattttcgggattttgttccgcagcctgtcgtcgctgctttcgcgcatgatcgatcccgaagaatttaccgccgcgcaggcgaatatgtttgccggattcaataccgtccacagcgagcttttgggcataggcgcgctgattctgctcgtcagcgcggcggtcgtttggcgcgaacgctaccgcttggacgtttaccttttggggcgtgaccaagccgtcaatttgggcatcagctacacgcgcaacaccttatggatactgctttggattgccgcattggtggcgacggcgaccgccgtggtcggccccgtaagctttttcgggcttctcgccgcctcgcttgccaaccacttttccccgtcggtcaaacattccgtccgcctgccgatgacggtttgtatcggcggcatcctcttggtcggcggacagaccgtgttcgaacacctgctcggtatgcaggcagtgttgagcgtagtagtagaatttgccggcggactcgttttcctctatctcgttttaaaacacaaaaaatga

SEQ ID NO: 44433 - DNA, 1647 bp, Neisseria meningitidis; identical to SEQ ID NO: 39359

SEQ ID NO: 44434 - DNA, 525 bp, Neisseria meningitidis; identical to SEQ ID NO: 39459

SEQ ID NO: 44435 - DNA, 294 bp, Neisseria meningitidis
atgtcgaacattaaaattgtcgcactggttaccgtcaaaccggaatacacagaaacactggtagcacagtttaaagaactggtcaaagccagccgtgcagaagagggcaacatcagctacgatctccatcaggaaatcggtaaaccgaaccgttttgttttcgtggaaaattggaaatcccaagcagctattgacgaacataacgccagcgcgcatttccaagccttcgtccagtccgtcgacggcaaaaccgaagcgttggaaatcgtattgatgaatgaagttgccgcttaa

SEQ ID NO: 44436 - DNA, 264 bp, Neisseria meningitidis
atggcaaacagcgcacaagcacgcaaacgtgcccgccagtccgtcaaacaacgcgcccacaacgctagcctgcgtaccgcattccgcactgcagtgaaaaaagtattgaaagcagtcgaagcaggcgataaagctgccgcacaagcggtttaccaagagtccgtcaaagtcatcgaccgcatcgccgacaagggcgtgttccataaaaacaaagcggctcgccacaaaagccgtttgtctgcaaaagtaaaagcactggcttga

SEQ ID NO: 44437 - DNA, 1005 bp, Neisseria meningitidis
atgagcattaaagtagcgattaacggtttcggccgcatcggccgcctcgcattgcgtcaaattgaaaaagcccacgacatcgaagtcgtcgccgtcaacgacctgacccctgccgaaatgctgctgcaccttttcaaatacgacagcacgcaaggccgtttccaaggtactgccgaattaaaagacgatgccatcgtggtaaacggcaaagaaatcaaagttttcgccaatccgaatcccgaagaattgccttggggcgagttgggtgtggatgtcgtcctcgaatgtaccggcttctttaccaataaaaccaaagccgaagcccacatccgtgccggcgcgcgcaaagtcgtgatttccgcacctagcggcaatgatgtgaaaaccgtcgtatatggcgtaaaccaagacattttggacggcagcgaaaccgttatctccgctgcttcctgcaccaccaactgccttgccccgatggcggcagtcctgcaaaaggaattcggcgtagtcgaaggcctgatgaccaccatccacgcctacaccggcgaccaaaacacccttgacgcgccgcaccgcaaaggcgatttgcgccgcgcccgcgccgccgcgctcaacatcgtgcccaacagcaccggtgccgccaaggccatcggtctggttatccctgaattgaacggcaaactcgacggctccgcccaacgcgtccctgttgccaccggctcgctgaccgaattggtttccgtcctcgaacgccctgtaaccaaagaagaaatcaacgccgcgatgaaagccgccgccagcgaatcttacggctacaacgaagatcaaattgtttcttccgacgttgtcggcatcgaatacggttcgctcttcgatgcgacccaaacccgcgtgatgaccgtgggcggcaaacaattggtgaaaactgttgcctggtacgacaacgaaatgtcctacacctgccaactcgtccgcactttggaatacttcgcaggcaaaatctaa

SEQ ID NO: 44438 - DNA, 900 bp, Neisseria meningitidis
atgtggttcaagcagattagtttttatccgctcaacaaagaaaagctgcctgaggcggacgtacttgccgacaaacttgctgaagctgaatttacccattgccaaggcttagactggttcagcgaaggctttaccgcaccggtttcattctccccggaactcgtttttcctgccgactttaccttgcgcgtcgccctgaaaaaagaggaaaaagtcctgcctgccggcgtcatccgcgatattttggaagagaaggtagcggaaatccaaaacaatgaagcccgcaatgtcggtcgcaaagaaaaacaagagcttaaagagcaaattacagacgacctgctgccccgagcgtttacccgcagcagccgtacagaagcggtgtttaacacccgccacggctacctgctcgtcaataacgcggcttccgccaaagcagaaaacatcctgaccaagctgcgcgaagctttgggcggtttggaagcctcactgccgaataccaaacaatcgccctcttccctgatgaccggctggctgttgcaagggcattgcgaaggcggttttgaattggacagcgattgcgaactcaaaggcacgggcgatattgttcccgtcgtcaaagtatccaaacaagatttaaccgccgacgaagtggttcaacacgtcaaaaacggtaaaaccgtaacccagctcggtttggtttggcgcgaacaaatcgcctttatcctcactcaagacttcacactcaagcgcatccaatacctcgacgtattgcaggaagaagccgaaagcaacggcgacgatgccgccggtctcgccttcgcctcgcaaatcctgatggcggaatccgtcagcatcatgttggaagagctggtttcctatttgggcggctggcaagattga

SEQ ID NO: 44439 - DNA, 615 bp, Neisseria meningitidis; identical to SEQ ID NO: 36682

SEQ ID NO: 44440 - DNA, 723 bp, Neisseria meningitidis; identical to SEQ ID NO: 38771

SEQ ID NO: 44441 - DNA, 1338 bp, Neisseria meningitidis
atgactttccaaaaccaaaaaatcctcgtcgccggactcggcggtacgggcatttccatgattgcctacctgcgcaaaaacggcgcggaggttgccgcgtatgatgcggagctgaaaccggagcgcgtgtcgcaaatcggtaagatgtttgacgggctggtgttttatacaggccgtctgaaagatgcgctggacaacggtttcgatattctggcactcagccccggcatcagcgagcggcagccggatatcgaggcgttcaagcaaaacggcgggcgcgtgttgggcgacatcgaattgctggcggacattgtgaaccgccgaggcgacaaggtgattgcgattaccggcagcaacggcaaaaccacggtaacaagcctggtcggctatctctgcatcaagtgcgggctggataccgttatcgcgggtaatatcggcacgccggttttggaggcggaatggcagcgcgaaggcaaaaaggcggacgtgtgggtgttggagctttccagcttccaactggaaaacaccgaaagcctgcgcccgactgcggcgacggtgctgaacatttccgaagaccatctcgaccgctacgacgacttgctcgactacgcgcataccaaagccaagattttccgtggcgatggcgtgcaggttttgaatgcggacgacgtgttctgccgcgccatgaagcgcgccgggcgcgaggtgaaatggttttcgttggaacacgaagccgatttttggttggaacgcgagacaggccgcctgaaacaaggcaatgaagatttgattgccacgcaagatattccgttgcaaggcttgcacaacgctaccaacgtgatggctgccgttgccttgtgcgaagccgtcggtttgccgcgcgaagcattgctcgaacacgtcaaaacctttcaaggcctgccgcaccgcgtggaaaaaatcggcgagaaaaacggcgtggtgttcatcgacgacagcaaaggcacgaacgtcggcgcgactgccgccgcgattgccggtttgcaaaatccgctcttcgtgattttaggcggcatgggcaaagggcaggacttcacgcccctgcgcgacgcgcttgtcggcaaggcaaaaggcgtgttcctgatcggtgtcgatgcgccgcaaatccgccgcgatttggacggctgcgatctgaatatgaccgactgcgccactttggaagaagcggttcagacggcatacgcccaagccgaagcgggcgacatcgtgttgctcagccccgcctgcgcaagcttcgatatgtttaaaggctatgcgcaccgttcggaagtgtttatcggggcgtttaaggctttgtga

SEQ ID NO: 44442 - DNA, 963 bp, Neisseria meningitidis
atgcccagtatctctgtccgccgactgtttgacgacaaccaatacaaactgcaactcgcctgggccgccggcaattcgggtgcggacaaccgtatcggcgtagaggcggacaagcccgtcctcgctttggtcggacacctgaatttcatccaccccaaccaaatccaagtggtcggtttggcggagtcggaatatctgaaccgcctcgaatcgggggaaacgggttatcagttcggaaacctgttcgacatttctatgtctttggtcattgtggcaaacggcttgccggtttccccgggactgcgcgactactgccacaaaaacgatattccactgctgacttccaaactcgaaagcccctatctgatggacgtgttgcggatttacctgcaacgcaccctggcggcatcgtccgtcaaacacggcgtatttctcgatgtgtttgaaatcggcgtgctgattaccggacattcgggtttgggtaagagcgaattggcgttggagctgatttcgcgcggccacagcctgattgccgacgatgcggtcgagctgttccgcatcggcccggaaacgctggaagggcggtgttcgcctatgctgcgcgattttttggaagtgcgcggcttggggatactcaatatccgccatattttcggcgaaacttccatccgccccaaaaaaatcctgcaactcattatcaatttggtcgaggcggacgacgagtatatgaagcagctcgaccgtttgagtatccgtaccgaaaccgaatccatcctcaacgtcaacgtccgttcggtaacgctgcctgtcgcggtcggacgcaaccttgccgtattggttgaagcggcggtgcgcaattatattcttcagttgcgcggtaaggatagtacgcgcgaatttttggaacgccatcagacgcagcttaaagaaaacgaacagaatcatgaaaatcgtcctgattag

SEQ ID NO: 44443 - DNA, 435 bp, Neisseria meningitidis; identical to SEQ ID NO: 42997

SEQ ID NO: 44444 - DNA, 645 bp, Neisseria meningitidis
atgaagctcaaacatctgttgccgctgctgctgtcggcagtgttgtccgcgcaggcatatgccctgacggaaggggaagactatcttgtgttggataaacccattcctcaaaaacagtcgggcaaaattgaggttttggaatttttcggctatttctgcgtacattgccatcatttcgatcctttgttattgaaattgggcaaggcattgccgtctgatgcctatttaaggacggagcacgtggtctggcagcctgaaatgctcggtctagcaagaatggctgctgcggtcaagctgtcaggtttgaaatatcaggcaaaccctgccgtgtttaaagcagtttacgaacaaaaaatccgcttggaaaacaggtcggttgccgaaaaatgggctttgtctcaaaaaggctttgacggcaaaaaactgatgcgcgcctacgactctcctgcggcagcggctgctgcatcaaaaatgcagcaattgacggaacagtaccgcatcgacagtacgccgaccgttgtcgtcggcggaaaataccgcgttatcttcaataatggctttgacggcggtgttcatacgattaaagaattggttgccaaagtcagggaagaacgcaagcgtcagacccctgctgtacagaaatag

SEQ ID NO: 44445 - DNA, 1422 bp, Neisseria meningitidis
atggacacaaaagaaatcctcggctacgcggcaggctcgatcggcagcgcggttttagccgtcatcatcctgccgctgctgtcgtggtatttccccgccgacgacatcgggcgcatcgtgctgatgcagacggcggcgggactgacggtgtcggtattgtgcctcgggctggatcaggcatacgtccgcgaatactatgccgccgccgacaaagacaccttgttcaaaaccctgttcctgccgccgctgctgtctgccgccgcgatagccgccctgctgctttcccgcccgtccctgccgtctgaaatcctgttttcgctcgacgatgccgccgccggcatcgggctggtgctgtttgaactgagcttcctgcccatccgctttctcttactggttttgcgtatggaagggcgcgcccttgccttttcgtccgcgcaactcgtgcccaagctcgccatcctgctgctgctgccgctgacggtcgggctgctgcactttccggcgaacaccgccgtcctgaccgccgtttacgcgctggcaaaccttgccgccgccgcctttttgctgtttcaaaaccgatgccgtctgaaggccgtccggcacgcaccgttttcgcccgccgtcctgcaccgggggctgcgctacggcataccgatcgcactgagcagcatcgcctattgggggctggcatccgccgaccgtttgttcctgaaaaaatatgccggtctggaacagctcggcgtttattcgatgggtatttcgttcggcggggcggcattattgttccaaagcatcttttcaacggtctggacaccgtatattttccgcgcaatcgaagaaaacgccccgcccgcccgcctctcggcaacggcagaatccgccgccgccctgcttgcctccgccctctgcctgaccggcattttctcgcccctcgcctccctcctgctgccggaaaactacgctgccgtccggtttatcgtcgtatcgtgtatgctgccgccgctgttttgcacgctggtagaaatcagcggcatcggtttgaacgtcgtccgaaaaacacgcccgatcgcgctcgccaccttgggcgcgctggcggcaaacctgctgctgctggggcttgccgtaccgtccggcggcgcgcgcggcgcggcggttgcctgtgccacctcattctggttgttttttgttttcaagacagaaagctcctgtcgcctgtggcagccgctcaaacgcctgccgctttatacgcacacattgctctgcctgacctcctcggcggcctacacctgcttcggcacaccggcaaactaccccctgtttgccggcgtatgggcggtatatctggcaggctgcatcctgcgccactggaaagatttgcacaaactgtttcattatttgaaaaaacaagggtttccattatga

SEQ ID NO: 44446 - DNA, 354 bp, Neisseria meningitidis
gtgaacagacaaaccgcttacttccttgcctccttcagcctgatcgcactgataatcctgtccctttcttgggaactgtggattgcaccgttacgcccgggcggctcgtggctcgcgctcaaagccctccccctctgtctgccgctttcaggcatcttgaaaaagaaaatctatacctaccaatacagctccatgctggttctgatttattttgccgaagccgtcatgcgcctgttcgacgcctatccggcagaacaaatttgcgccgcgctttccgcagtattcagcatcatcttcttcatatcctgcctgtcgttcgtcaaacaatacaaggaaacaaacaatgcccgctga

SEQ ID NO: 44447 - DNA, 837 bp, Neisseria meningitidis
atgcaaatcatacataccattcgagaactgcgcgcctggcgtaaaaatgcgggaaaggtggcatttgtgccgaccatgggcaatctgcatgaaggacatcttgctctcgttcgcgaagccaaaaaacgcgccgacaacgttgttgtcagcatattcgtcaaccgcctgcaattcggtcagggcgaggatttcgacaaatatccgcgtactttgcaacaggatgcggacaagctggaagccgagggtgttgccgttgttttcgcgcccgatgagaaagaactctatccgaacgtggaacagcgttacaacgtcgaaccgcccaacctgcaaaatgagttgtgcggcaagtttcgtccgggacatttccgcggggtggcaacggtagtgtccaagctgttcaatattgtcgcgccggatgttgcctgtttcggcaaaaaagactatcagcagcttgccgtgattaaaggtttgaccgaggatttgaattttgatgttgaaatagtgcctgtcgatacggggcgcgcggaagacggtttggcactctccagccgcaaccagtatttgagtgcggcggaacgcgacgaagcaccgcgcctgtcccgcgaattaaaggctgttgccgaatccttggcgcagggcagtttggattatgcaggtttggagcggcaggctgccgaccatttgaccgctgcgggctgggtggtcgattatgtcgaaatccgccgcgccgatacgctcgaagtggcgcgggcgggagataagaaactggtggtcttggccgccgcccgtctggggacgacgcgcctgattgacaatttggaaataaaactcccttaa

SEQ ID NO: 44448 - DNA, 858 bp, Neisseria meningitidis; identical to SEQ ID NO: 38769

SEQ ID NO: 44449 - DNA, 1002 bp, Neisseria meningitidis
atgaaaagcattggtttttttaataacaaaggaggagtgggcaaaaccactctattgtgcaatttagcagcatcattatctatccactttagtaaaaaagttttagtaattgatgcggatccacagtgtaatgcttcagcttatttactaccagaaaatatgcttgaagatatattaatgaacgatactgaaagtagtattgataaattttatgagcctattagaaaaggccaaggctttcctgaaaaaaatcccaaaattgtaagaagtgatcgtttccaaattgatttaatagttggaaatccaaagttagcaatcagggaagattttatcgcaacagactggaatgacacaaaaaatggagaggctcgtggatttcaaacaacttttgcaatggctgagctatttagcagaatgagtgactacgattttattttgattgatatgggaccatcactaggtgccttaaataggtcaattttactaagctctgattattttttaatgccgatttctgctgatatttttagtatgatggcaatctcaaatatacaaatttcttttgatggatggaaagaggatttgataaatgcactcgaaaggtataataaacgagaaggtaaaaaatttaccatctccaatgatattccatttgaatggaaattagatttcttaggatatgttagacaacaatacaaagccaaatactcaggtggggagagacagcctgttgcagcttttgaaagaattattaatcaacaagacgaagaattaaaaaaactatgcctatcatttaaacatgaagatatcaatagcagaaaaattggagaaatacatacattaagtagtgttataccactatcacagcaggcacatgctcctatatttgaactagctgcatctgatggtattgtagggggacattattcaagagttgcggaggcagaagagtattttaaaaaaatcgctgagcgatttttggaaaatataggtattgattaa

SEQ ID NO: 44450 - DNA, 273 bp, Neisseria meningitidis
ttgaatgtattcggattttcggcggacgatttttcagaaaaggagaccacttttggcgtatggccgtgcaactggcaggcggtgcaactgtttattggagtatcgacgcagtggcgtatcggaatgtcgggtgcgacggggttggattattccgcagtcgcagcagttatggaatgcggcaatatcaagtcgaagaaacggaaagcactgttggagaaagtccgcctgatggagcttgaagtgttgtcaatgtgggcaggcgaacatgaataa

SEQ ID NO: 44451 - DNA, 303 bp, Neisseria meningitidis; identical to SEQ ID NO: 39071

SEQ ID NO: 44452 - DNA, 219 bp, Neisseria meningitidis
gtggtcgaacagagcttcggtacgctgcaccgcaaattccgctacgcccgggcagcctatttcggactgattaaagtgagtgcgcaaagccacctgaaggcgatgtgtttgaaccttttgaaagcggccaacaggctaagtgcgcccgctgccgcccaaaaggcgaccggatgcctgattatcgggtatccggggaggattaagggggtatttgggtag

SEQ ID NO: 44453 - DNA, 321 bp, Neisseria meningitidis
atgattacccttaccgagaatgccgcaaaacacatcaatgactatctcgccaaacgcggcaaaggcttgggcgtacgcttgggtgtgaaaaccagcggctgctcggggatggcgtacaaccttgaatttgtcgatgaagccgatggcgacgacctgattttcgaaggacacggcgcgcgcatttatatcgatccgaaaagcctggtttatctggacggcacgcaagtcgattacaccaaagaaggtttgcaggaaggtttcaaatttgaaaaccccaatgtcaaagactcctgcggctgcggcgaaagcttccacgtttaa

SEQ ID NO: 44454 - DNA, 1044 bp, Neisseria meningitidis
atgagtaaaaaaatcaaagtcggcattgtcggcgcgacgggctacaccggcgtggaactgctgcgcctgcttgccgcccatcccgatgtcgaagtcgccgccgtaaccagccgcagcgaagcgggaaccgcagttgccgattactttccgagtttgcgcggcgtgtacggcctcgccttccaaacgcccgacgaggcaggtttggaacaatgcgacatcgtcttcttcgccacgcccaacggcatcgccatgaaagacgcgccgcgcctgattgaacagggcgtgcgcgtcatcgacctttccgccgacttccgcatatgggacattccgacctgggaacactggtacggcatgccccacgccgcccccggcctcgtttcccaagccgtgtacggattgagcgaactcaaccgcgaagccgtcgcacaggcgcgcctcgtcgccaaccccggctgctacccgacctgcgtatccctgccgctcgtgccgctgttgcggcaatgccgtctgaagcccggtatgccgctgattgccgactgcaaatccggcgtgtccggcgcgggcaggaaaggcaatgtcggttcgctgttgtgcgaagtcggcgacaacttcaaagcctacggcatagccggacaccgccacctgcccgaaatcaggcagaccatcgccgggcttcaggacggcatcgccgaaggattcgtgttcacgccgcacctcgcgccgatgatacgcggtatgcacgccaccgtttacctccacctttcagacggcatctgccccgaaaccatcctgcgcgactattaccgcgacagcctgttcgtggacatcctgcccgccggttcgacaccagaaacccgcagcgtgcgcggcgcaaacctctgccgcatcagcatccaacaggcggcgcaatccgatgtgtgggtcgtcctttccgtcatcgacaacctcgtcaaaggcgcggcgggtcaggcggtgcaaaatatgaacatcatgttcggactgaaagaaacacacggcttgggcgcaatccccctgctcccctga

SEQ ID NO: 44455 - DNA, 291 bp, Neisseria meningitidis
atggcactgacacttgccgacgtagacaaaatcgcccgactctcccgactgcacctgactgcggcagaaaaagaaaaatcgcttcaagaattaaacgacattttcgctatggtcgaacagatgcaaaccatcaacacagacggcatcgaaccgatggcgcatccgcacgaggccgccctgcgcctgcgcgaagacgaagtaaccgaaaccgaccgcgccgccgaatatcaggcggttgctccggaagtacgcaaccgtctgtatatcgtaccgcaagttatcgaagaataa

SEQ ID NO: 44456 - DNA, 819 bp, Neisseria meningitidis; identical to SEQ ID NO: 37653

SEQ ID NO: 44457 - DNA, 489 bp, Neisseria meningitidis; identical to SEQ ID NO: 38994

SEQ ID NO: 44458 - DNA, 2364 bp, Neisseria meningitidis
atgcaattctcctactcatggctgaaaacccaagccgataccgaactttccgccgataagctggaacacctgttaacgatgtccggcttggaagtggaagaagccgagactgccgcgcctgcgtttacgggtgtggtaattgccgaagtgaaatccgttgaaaaacatcctgatgccgaccgtttgaacgttacccaagtcgatgcgggtacgggtgggttggttcagatcgtgtgcggtgcgccgaatgtgaaagcgggcatcaaagtgccgtgttcgctgccgggtgccgttttgccgggtaatttcaaaatcaagccgaccaaaatgcgcggcgtggtgtcggacgggatgttgtgttccaccgacgaactcggtctgcccgacgacggtgtgaacggcctgcacattctgcctgaagatgcgcccgtcggtaccaatatccgcgaatacttggatttggacgatacgctgtttacgttgaaaattacgcctaaccgcgccgactgcttgagcatcaaaggcattgcgcgcgaagtgtccgcattgacggggtgcgcgttcaggcagcccgaaatccataccgcgccgatcacgggcagtcgaaaacagcccgtgcagattaacgcgcctgccgattgcggccgttttatcagccgcgttattgaaaatgtcaatgcgaaagcggctactcccgattggatgaaacaacgtttggagcgcagcggcatccgcagtatttccgcgctggtggacatcggcaattatgtgatgctggaaatcggtcagccgatgcacgtttttgatgccgacaaactttccggcagcctgcacatccgccgcgcgcgcgaaggggaaacgctggaatgcctgaacgagaaaaccgtttccctgtctgaaaacacgctggtcgtggcggacgaaaaaggcgtgttgagtttggcgggcttaatgggcggcgcggcgagcgcggtttcagacggcacgcaaaatatcgtgctggaagcggcttggtttgcgcccgaaatcatcgccggcaaatcgcgccaatacggtttcggttcggattcgtcgttccgcttcgagcgcggcgtggattaccgtttgcaggcggatgccatggaacgtgctaccgaattggtgttgcagatttgcggcggtgcggcaggcgagatggtggaagcgcaaggcgaattgcccgaagccaagcaggtcggactgcgtttggaccgtctgaaaaccgtgttgggcgtggacattcctgccgaacaggtggaaaccattttgcaacacttgggcctgcagcccgagaaaacggcggaaggcttccgcgttaccgcgccgagcttccgttttgacatcgaaattgaggccgatttgattgaagaaatcggacgcgtttacggctatgaaaacatccccgacgattacacgtcaggccgtctgaaaatgctggaactgcccgaaacacgccgcccgcgttttgccgtttacaacgaaatggcggcgcacggctaccgcgaagtggtcagctatgccttcgttgacgagcagtgggaacaagattttgccgccaacgccgaccccatccgcctgcaaaacccgctggcggcgcaatatgccgtgatgcgttccacactcatcggcggcttggtggaaattttgcaaaacaacctgaaccgcaaacaaaaccgcgtgcgcgtgtttgaaatcgcccgcgtgttcggcaaaggttcagacggccggtttgtccaaaacgaacgcatcggcggtctgtggtacggcgcggcaatgcccgaacaatggggtgggaaaacgcgcaatgcggatttttacgacattaaggcagatgtggaaaatctgttgaaaaacaaagcagtcgagttcgttaaaaccggacatcccgccctgcatcccggacgtgccgccaatatcgtttcagacggcaaagtcatcggctttgtcggcgaactgcatccgaaatggctgcaaaaatacgacctgccgcaagcgccgctggtatttgaaatcgatatggcggccgtgttggaatgcgggaaaacgcgctatcgggccgtatcgaaattccagccggtgcgccgcgatttggcgtttgtgatgccggaagctatgagccatgatgatttgctgcttgtcttgaaaggcgcggcaaacaagttggtacaggaaatcagcgtgtttgacgtgtatcgcggcacgggactgcccgaagggatgaagagcgtggcggtcaaagtgattttgcaggatatggaaaacacgctgacggatgaggcggtcgagccgcttatcggaaaactgattggcgcggcaacggcggcaggggcgcggcttcgcagttaa

SEQ ID NO: 44459 - DNA, 306 bp, Neisseria meningitidis; identical to SEQ ID NO: 43025

SEQ ID NO: 44460 - DNA, 627 bp, Neisseria meningitidis
atgacacaagaacatttcccatcattcttcaaccaagccccgaccattaccgtccaagacgcattggccgaattcctcggcgcggccgaaaacggcatcctcacttaccgctacgccgatgccgtgcgcctgtgcggacattcctgcccgaccgtcgcgggcgcgtacctgatggttatcaaaggtctgaaagcactttacggcgaagagctgcccgaacgcggcggcatcgaagcctttatgcagggcgcgcgcgacgaaggcacggtcggcgtaaccgcgtccgtcgtccaactcctcaccggcgcagcccccgaaaccggctttggcggcatcggaatgcagggacgctttgcccgccgccacctcttatcctttggtgtaggcgaaatcaacggcacactgaccctgcgccgcaaagacaacggcaaaaccgtcgccgtcagcctcaacgccgccctgcaaccctttgcacccgaaatgcgcgaacttatgcccaaagccgtcggcggcagcgcaagcgccgacgaacttaaacaattcggcgaactctggcaagaacgcgtccgtgccttcctgattgaccaagccgacaaccccgaatttgttaccgtcagcgaaatctaa

SEQ ID NO: 44461 - DNA, 1005 bp, Neisseria meningitidis
atgcaacggcaaaccgaactgaaaaattggcttcagaccatctatcccgaacgggacttcgatctgtccttcgcggcggcggatgctgatttccgccgctatttccgtgcaacgttttcagacggcagcagtgtcgtctgcatggatgcaccgcccgacaagatgagtgtcgcaccttatttgaaagtgcagaaactgtttgacatggtcaatgtaccgcaggtattgcacgcggacacggatttggggtttgtggtattgaacgacttgggcaatacgacgtttttgaccgcgatgcttcaggagcagggcgaagcggcgcacaaagccctgcttttggaggcaatcggcgagctggtcgaattgcagaaggcaagccgtgaaggggttttgcccgaatatgaccgtgaaacgatgctgcgcgaaatcaacctgttcccggaatggtttgtcgcaaaagaattggggcgcgaattaacattcaaacaacgccaactttggcagcaaaccgtcgatacgctgctgccgcccctgttggcgcagcccaaagtctatgtgcaccgcgactttatcgtccgcaacctgatgctgacgcgcggcagaccgggcgttttagacttccaagacgcgctttacggcccgatttcctacgatttggtgtcgctgttgcgcgatgcctttatcgaatgggaagaagaatttgtcttggacttggttatccgctactgggaaaaggcgcgggctgccggcttgcccgtccccgaagcgtttgacgagttttaccgctggttcgaatggatgggcgtgcagcggcacttgaaggttgcaggcatcttcgcacgcctgtactaccgtgacggcaaagacaaataccgtcccgaaatcccgcgtttcctcaattacctgcgccgcgtatcgcgccgttatgccgaactcgccccgctctacgcgctcttggtcgaactggtcggcgatgaagaactggaaacgggctttacgttttaa

SEQ ID NO: 44462 - DNA, 2751 bp, Neisseria meningitidis
atgctgacaaacattgccaagaaaatcttcggcagccgcaacgaccgcttgctgaaacaataccgtaaatccgttgccagaatcaacgcgctcgaagaacagatgcaagccctaagcgatgctgatctgcaagccaaaactgccgaattcaaacaacgcctcgccgacggtcagactttggacggcattttgcccgaagccttcgccgtctgccgcgaagcgtcccgccgcaccctcggtatgcgccacttcgacgtgcagcttatcggcggtatggtgctgcatgacggcaaaatcgccgaaatgcgtaccggcgaaggcaaaaccctggtcgccaccctcgccgtctatctcaacgcgctggccggcaaaggcgtacacgtcgttaccgtcaacgactacctcgcctcacgcgatgcgggcattatggagccgctctataatttcctcggccttaccgtgggcgtgattatttcagatatgcagccgttcgaccgtcaaaacgcctatgccgccgatatcacctacggcaccaataatgaattcggcttcgactacctgcgcgacaatatggttaccgaccaatacgacaaagtgcagcgcgaattgaattttgccgttgtcgatgaagtggattccatcttgattgacgaagcgcgcactccgctgattatctccggccaggcagacgacaacatccagttgtaccaaatcatgaacaccgtcccgccccacctcgtccgccaagagacagaagaaggcgaaggcgactactgggtagatgaaaaggcgcaccaggtcatcctgagcgaagccggccacgaacacgccgagcagattctgacccaaatgggattgctggcagaaaacgactcgctctattctgccgccaacatcgccctgatgcaccaccttatggcggcattgcgcgcgcatacgttattccacaaagaccaacattacgttatccaagacggcgaaatcgtcatcgttgacgaatttacaggccgtctgatgtccggccgccgctggtccgaaggcctgcatcaagccgtggaagccaaagaaggcgtggaaatcaaacgcgaaaaccaaaccctcgcctccatcaccttccaaaactatttccgcctgtacaccaagctctccggcatgaccggcacagccgataccgaagccttcgagttccaaagcatctacaacctcgaaaccgtcatcatcccgaccaaccgccccatacaacgcaaagacttcaacgaccagattttccgttccgccgaagaaaaattcgaagccgtcgtcaaagacatcgaagaatgccacaaacgtgggcagcccgtcctcgtcggcacaaccagcatcgaaaactccgaactggtctcccatcttttgcaaaaagccggtctaccgcacaacgtcctcaacgccaaagaacacgaacgcgaagccctgattgtcgcccaagctggcaaagtcggcgcgattaccgttgccaccaatatggcgggacgcggtacggacatcgttttaggcggcaacctgaagcaccaaaccgatgccatccgtgccgacgaaaccttgagcgacgaagagaaacaggcacaaatcgccgcactcgaaaacggctggcaggcagaacacgataaagtaatggaagcaggcggcctgcacatcatcggtacggaacgccacgaaagccgccgtatcgacaaccaattgcgcggacgttccggccgtcagggcgaccccggatccagccgtttctacctttcgtttgaagacccgctgctgcgcttattcgcactcgaccgcgccgccgccatcctcaaccgtctcgcccccgaacgcggcgttgccatcgaacacaacctgctgacgcgccaaatcgaaggggcgcaacgcaaagtcgaaggcagaaacttcgatatgcgcaaacaggttttggaatacgacgacgttgccaacgaacagcgcaaagtcatttacagccagcgcaacgaaattctgaccagcaaagacatcagcgacctgatgcaggaaatccgttctgatgtcgtcagcgacctcgtggatacctatatgccgcccgacagcatggaagaacaatgggacatcccgactttggagaaccgtctggctgccgaattcagactgcacgaagacatccaatcctggctgaaggcggacaatgcgattgacggtcaagacatcaaagaacgcctgatcgaacgcatcgaaaacgaatatgccgccaaaaccgaactggtcggcaagcaggcaatggccgatttcgagcgcaacgtgatgttgcaggtcatcgacaaccaatggcgcgaacacctcgccgctatggactacctgcgacaaggcatacacctgcgcagctatgcccaaaaaaatccgaagcaggaatataaacgtgaagcctttaccatgttccaagacctgtggaacggcatcaaattccatattgcctccctgcttacctcggttcaaatcgaacaaaaccctgtcgcggtggttgaagagcaacccatcggcaacatccagtccatccattccgaatcgcccgatatggaagaacttttgggtcagtcgcaaaccgatctggttaccgaagcctttaatcccgatgggacggatttcagccccgaagccttggaagcgcggggacaaatcgtccaccgcaacgacccctgcccctgcggcagcggtttgaaatacaaacaatgccacggcaaactggcttga

SEQ ID NO: 44463 - DNA, 1284 bp, Neisseria meningitidis
atgaaccgtaacgaaattttattcgaccgcgccaaagccatcatccccggcggcgtgaattcccccgtccgcgcattcggcagcgtcggcggcgtgccgcgcttcatcaaaaaagccgaaggcgcgtatgtttgggacgaaaacggcacgcgttataccgactatgtcggctcttgggggcctgcgattgtcggacacgcgcaccccgaagtcgtcgaagccgtgcgcgaagccgcgttgggcggtttgtcgttcggcgcgcccaccgaaggcgaaatcgccattgccgaacaaatcgccaaaatcatgccgtccgtcgaacggctgcgccttgtcagctccggtaccgaagccactatgaccgccatccgtctggcacgcggttttaccggccgcgacaaaatcatcaaatttgaaggctgctaccacggccattccgacagcctgttggtgaaagccggcagcggtctgctgacgttcggcaacccgtcttccgccggcgtgcctgccgactttaccaaacacactttagtcctcgagtacaacaatatcgcccaactggaagaagcctttgctcaaagcggcaatgacattgcctgtgtgattttggagccttttgtcggcaatatgaatctggttaggccgtctgaagcctttgtcaaagccttgcgcgaattgaccgaaaaacacggcgcggtgttgatttacgacgaagtgatgaccggtttccgcgtcgcgctcggcggcgcacaatcgctgcacggcatcacgcccgacctgaccacgatgggcaaagtcatcggcggcggtatgccgcttgccgcgttcggcgggcgcaaagacattatggaatgtatttccccactgggcggcgtgtatcaggcaggtacattatcaggcaacccgattgccgtcgccgccggtttgaaaacgctggaaatcatccgccgcgaagggttttatgaaaacctgacggcgcgtaccgaacagttggttcaaggttttcagacggcagcggatgcggcgggcatcgagttcgccgccgacagcgtgggcgggatgttcggcctgtattttgccagccatacgccgcgaaactatgccgatatggcgcgttccaatattgacgctttcaaacgcttcttccacggtatgctcgaccgcggcattgccttcggcccgtccgcttatgaagcaggtttcgtttctgccgcgcatacgcccgagctgattgacgaaacggttgcggttgcggttgaagtgttcaaggcgatggctgcatga

SEQ ID NO: 44464 - DNA, 1497 bp, Neisseria meningitidis
atgttttccaactacctactcagcttggcaatatggatacccatcgccgcaggtgtgctggttttggcaacggggtcggacagccgtgcgccgctggcgcgtgtgcttgccttcatgggtgcgcttgccggtttcttggtaacgctgcccctgtttaccggtttcgaccgtttgagcggcggctatcaatttaccgagttccacgagtggattccgctgctgaaaatcaactatgcattgggcgtggacggtatttcagtgctctttatcatcttgaatgcgtttattacgctgttggtggtattggccggttgggaagttattcagaaacgtccggcgcagtatatggcggcattcctgatgatgtcgggtttgattaacggcgcgtttgccgcacaggatgcgattctgttttatgtgttcttcgagggtatgctgattccgctgtacctgattatcggtgtatggggtggcccgcgccgcgtttatgcgtcggtcaagctgttcctctatacgctgatgggttcgcttttgatgctggttgccatggtttacctgtactatcagacaggcagcttctctattgtcgatttccaaaacatcaagcagattccattgggcgtacaacagcttttgtttgtggcattcttcctgtcatttgccgtaaaagtgccgatgttccctgtgcacacttggttgccggatgcccacgttgaagcgccgaccggcggttcgatggtgttggcggcaattacgctgaaactgggtgcgtatggtttcttgcgttttatcctgccgattatgccggatgcggcacgctattttgcccctgtgatcatcgtattgagcctgattgccgtgatttatatcggtatggtggctttggtgcaaaccgatatgaaaaaactggtggcgtattcgtctatcagccatatgggttttgtaacgcttgggatgtttttgtttgttgacgggcagttggacgactgggcgttgaaaggcgcaatcattcaaatgatttcgcacggtttcgtgtcggcggcgatgtttatgtgtatcggcgtgatgtacgaccgcctgcatacccgcaatattgctgactatggcggcgtggtcaatgtgatgcctaagtttgcggcgtttatgatgttgttcggtatggccaatgccggtctgcctgcgacttccggcttcgtgggcgagtttatggtgattatgggcgcggttaaagtgaatttctgggtaggcgcgttggcggctatgacgctgatttacggcgcgtcttataccctgtggatgtacaagcgcgtgatttacggcgcgatccacaatccgcacgttgccgaaatgaaagacatcaactgtcgcgagtttgcgattctggcggttttggcggttgcggtattgggtatgggcttgtatccgaacgcgtttatcgaagtggtgcatcaggcggcaaacgatttgattgcccatgtggcacaaagcaagatttga

SEQ ID NO: 44465 - DNA, 591 bp, Neisseria meningitidis
atgaaaaaatcctccctcatcagcgcattgggcatcggtattttgagcatcggcatggcatttgccgcccctgccgacgcggtaagccaaatccgtcaaaacgccactcaagtattgagcatcttaaaaaacggcgatgccaacaccgcccgccaaaaagccgaagcctatgcgattccctatttcgatttccaacgtatgaccgcattggcggtcggcaacccttggcgcaccgcgtccgacgcgcaaaaacaagcgttggccaaagaatttcaaaccctgctgatccgcacctattccggcacgatgctgaaattaaaaaacgccaacgtcaacgtcaaagacaatcccatcgtcaataaaggcggcaaagaaatcatcgtccgcgccgaagtcggcgtacccgggcaaaaacccgtcaacatggacttcaccacctaccaaagcggcggtaaataccgtacctacaacgtcgccatcgaaggcgcgagcctggttaccgtgtaccgcaaccaattcggcgaaattatcaaagcgaaaggcgtggacggactgattgccgagttgaaggctaaaaacggcagcaagtaa

SEQ ID NO: 44466 - DNA, 231 bp, Neisseria meningitidis
atgaacatcgttaaaaaatacgctgtaaaagcagccttggcagccggtatcttcacaccggccattgttatggcagatacctttgatgcatccgcgattggtacgcaagtagcgaatgtaatcatgggtttcgtgtcaatggtttccgccgtgggtatggcggccattaccgtgattcttgcaatccaaggcttcaaaatggcttggagcatgattaaatctgtcagataa

SEQ ID NO: 44467 - DNA, 402 bp, Neisseria meningitidis; identical to SEQ ID NO: 36186

SEQ ID NO: 44468 - DNA, 1776 bp, Neisseria meningitidis; identical to SEQ ID NO: 39929

SEQ ID NO: 44469 - DNA, 483 bp, Neisseria meningitidis
atgaaatacttgaatcttgccgcaatcgcccttgccgccacatttgccgcacataccgcctcggcagacgaacttgccggatggaaagacggtaccgcgcaaagcctgcaatcgctcaaagcccccgtacgcatcgtcaacctgtgggcgacttggtgcggcccgtgccgaaaagagatgcccgccatgtccaaatggtacaaagcgcagaaaaaaggcagcgtcgatatggtcggcatcgcgctcgacacatccgacaatatcggcaacttcctcaaacaaactcctgtttcctacccgatttggcgttacaccggggcgaacagccgaaactttatgaaaacctacggaaacactgtcggcgtactgccctttaccgtcgtcgaagcaccgaaatgcggatacaggcagaccattaccggggaagtgaacgaaaaaagcctgaccgaagccgtcaaactcgcccattcaaaatgccgttaa

SEQ ID NO: 44470 - DNA, 789 bp, Neisseria meningitidis
atgaatcctaaaatcgtgtttttcgacattgacgatacgctgtaccgcaaatatacggataccttgcgcccttccgtgaaaacggcggtggcggctttgtgcggcaaaggtatattgacggcgttggcaacggggcggtctttggcgacgattcccgaaaaggtcagggacatgatggcggaaacgggtatggatgccgtggtaacgataaacggacagtttgcgctgctgcacggaaaaactgtgcacgaagtaccgatggatgccggtttgatgggcagggtttgcgcgcatttggatggcttgggcatggattatgcgtttgtcggcggagaggggatcgccgtgtccgcgctgtcggaatgcgtgtgccgcgccttgcagcatatcgccagcgatttttttgccgataaggattatttttcaagcaaaccggtgtatcagatgctggtgtttgcggaggaaaacgaaatgccgctctggtcggatattgtggaacaggaaggcttgaaaacggtgcgctggcacgaggaagcggtcgatttgctgcctgcgggtgcgtcgaaaacagacggcatcagaagcgtggttgaagcattgggtttggaaatggcggacgtgatggcgttcggagacggtttgaacgatgtggaaatgctgtcagaagtcgggttcggcgtggcaatgggcaacggggaacaggcggcgaaagaagcggcgaaatatgtttgccccggcgttgatgaagacggcgtgttgaggggcttgcaagatttgggcgtgatttga

SEQ ID NO: 44471 - DNA, 783 bp, Neisseria meningitidis
atgaccgacatcctcaataaaatccttaccgccaaggcacaggaagttgccgctcaaaaagccgccgtcaacgccgaacacatccgcgcacttgccgcagaagccgcgcccgtccgcagcttcatcggttcgatacgcggcaaacaccgcctaaacctgcccgccgtcattgccgaaatcaaaaaggcaagcccgagcaaaggcctgatccgtccggacttccgaccggccgagattgcacgcgcctatgaaaacgccggggcggcgtgtttgtccgtactgaccgacgaaccctatttccaaggttcgcccgaatacctcaaacaggcgcgcgaagccgtatcgctgcccgtgctgcgcaaagacttcatcatcgacgaatatcaggtttatcaggcgcgcgcatggggggcggatgccgtcctgctgattgccgcagcactggaacaggaacaattggaacgctttgaagcggtggcgcacgaattgggcatgaccgtcctgctcgagctgcacgatgaaagcgaattggaaaaatgccgcaacctgaccacgccgttgtggggtgtaaacaaccgcaacctgaggacttttgaagtctccctcgaccaaaccctgtcgctgctgcccgcgctggaaggcaaaaccgtcgttaccgaaagcggcattacaggcaaggcggatgtggaatttatgcaatcgcgcggcgtgcataccttcctgatcggcgaaacgtttatgcgtgccgacaatattgaggcggaagtaggcaaactcttctaa

SEQ ID NO: 44472 - DNA, 537 bp, Neisseria meningitidis
atgtcgtctgaaagcgctagcttcaacgaagttaaaaaccttaaacaacaagccattccttctccaacgctcaaaccaaaaacaaaaatcctatggcgcgttatcgcagaaacttcattgccggcggcacattctttttcaccgtcaaactcgccgatccaaaatcgcgcctgcttgtcgaacatatcgacttcgcgggcggcttatatggatgtgcaaaaacaatattcctttgaaaccgtcgccgtatgcgtgctgccgaaccatatccacgccatttggacgctgccacccgacgatgcggattattccctgcgctggcggctgattaaaaccaaattctccgcacatttccctcatgccgaaaacctgtctgccagcaaacagcggcggcacgaacgcggtatttggcaacggtgtttttacgaacacaccgtgcgcgatgaaacggatttgcagcatcgtgcggactacatccattccaatcctatcaaacaaagaatgtcgcgtgctaaaacagaatcccgcaaaaaataa

SEQ ID NO: 44473 - DNA, 261 bp, Neisseria meningitidis; identical to SEQ ID NO: 39662

SEQ ID NO: 44474 - DNA, 1197 bp, Neisseria meningitidis
atgcaaaactatctgacccccaatttcgcctttgccccgatgattcccgaacgcgcttcaggcagccgcgtttgggatacgaaagggcgtgaatatattgatttttcaggcggtatcgccgtcaatgcgctgggacactgccaccctgcccttgtcgatgctttaaacgcgcagatgcacaagctgtggcacatttccaatatctatacgacgcgtccggcgcaggaattggcgcaaaaattggttgcaaacagttttgccgacaaggtttttttctgcaactcgggcgcggaagcgaatgaggcggcgttgaagctggcgaggaaatacgcccgcgaccgtttcggcggaggaaaaagcgaaatcgtcgcctgtatcaacagttttcacggacgcacgctgtttaccgtgtccgtcggcggtcagccgaaatacagcaaggattatgcacccctgccgcaaggcattacgcacgttccgttcaacgatattgccgcgctggaagctgccgtcggcgaacagacctgcgcggtcatcatcgagccgatacagggcgaaagcggcatcctgcccgccactgcggaatatttgcaaaccgcgcgccgtctgtgcgaccggcacaatgcgttgttgattttggacgaagttcaaaccgggatggggcatacgggcaggctgtttgcctatgaacattacggcattgttcccgatattttgagttcggcaaaagccttgggctgcggctttccgatcggcgcgatgctggcgacagaaaagattgccgccgccttccaaccgggcacgcacggctcgactttcggcggcaacccgatggcgtgtgcggtcggcagccgcgcattcgacatcatcaatacgcccgaaactttaaaccatgtccgtgaacaggggcagaaacttcagacggcattgctggatttgggcaggaaaacgggcttgttctcacaagttcgcgggatggggctgctactcggctgcgtgttggacgaagcctatcgcggacgcgcatccgaaatcaccgccgccgccttgaaacacggcgtgatgattttggttgcgggtgcggacgtattgcgtttcgcgccttcgctactgttgaacgatgaggatatggcggaaggtttgcgacgtttggaacacgcgctgacggaatttgccgcgacatcagacaatccgtaa

SEQ ID NO: 44475 - DNA, 279 bp, Neisseria meningitidis; identical to SEQ ID NO: 44294

SEQ ID NO: 44476 - DNA, 801 bp, Neisseria meningitidis
atgaaaaagaccatttttaacattaccaaaatggactgcccgtccgaagaacagctcattcgcatgcgtttaaaagatgtgtctgatatttatgaattacagtttgatattgctgggcggtgcttaaccgtctatcacgataatcaagatacaacgattttacaagtacttgaaccgcttaattttgatagtcatatcatttccaccgaagtgattgttgataagatagtgtttaacaagcctgatgagcacttagaaaaaagattattatatcaagtgctcatgattaactttgtgttttttatcatagagtgttcggttggtatttttgctaattctatggggctgattgctgatagtctagatatgctggcggacagctttgtctatatattggcgctatcagccattggtatgacgctggcgtataaaaaacgtgtggcatttttggcggggataacgcagataatattggcgttatttggggtgatagaagtgattaggcgttttatcggtgctgagcagctgcccaattatcaactgatgattggcacggcatttttggcattgattgcaaactggctgtgcttatatctactgagcaaaaatcaaaataaagaaatccatatcaaagccagcatgatttttacatccaatgacattatcatcaatatcggtgtgatagcggcgggagcattgacgttattgactcattctagctatcctgatttaatcattggcatgattgtctttgtcattgtactatttggtgctagaaatattttaaaattggcaaaataa

SEQ ID NO: 44477 - DNA, 552 bp, Neisseria meningitidis
atgaaagcgtatctggctctgatttctgccgccgttatcggtttggctgcctgctctcaagaacctgccgcgcctgctgccgaggcaactcctgctgctgaagcacccgcttccgaagcgcctgccgccgaagctgctcctgcagatgctgccgaagcccctgctgccggcaattgtgcggcaactgtcgaatccaacgacaatatgcagttcaacaccaaagacatccaagtcagcaaagcatgtaaagagttcaccatcactctgaaacataccggtacgcaacccaaagccagcatgggtcacaaccttgtgattgccaaagctgaagacatggacggcgtatttaaagacggcgtaggtgctgccgataccgactatgtcaaacctgacgatgcgcgcgttgttgcccacaccaaactgatcggcggcggcgaagagtcttccctgactttggatcctgccaaactggctgacggcgaatacaaattcgcttgtaccttcccaggtcacggtgctttgatgaacggcaaagtgactttggtcgattaa

SEQ ID NO: 44478 - DNA, 1014 bp, Neisseria meningitidis
atgcaagtctattacgataaagatgccgatctgtccctaatcaaaggcaaaaccgttgccatcatcggttacggttcgcaaggtcatgcccatgctgccaacctgaaagattcgggtgtaaacgtggtgatcggtctgcgccaaggttcttcttggaaaaaagccgaagcagccggccatgtcgtcaaaaccgttgctgaagcgaccaaagaagccgatgtcgttatgctgctgctgcctgacgaaaccatgcctgccgtctatcacgccgaagttacagccaatttgaaagaaggcgcaacgctggcatttgcacacggcttcaacgtgcactacaaccaaatcgttccgcgtgccgacttggacgtgattatggttgcccccaaaggtccgggtcataccgtacgcagtgaatacaaacgcggcggcggcgtgccttctctgattgccgtttaccaagacaattccggcaaagccaaagacatcgccctgtcttatgcggctgccaacggcggcaccaaaggcggtgtgattgaaaccactttccgcgaagaaaccgaaaccgatctgtttggcgaacaagccgtattgtgcggcggcgtggtcgagttgatcaaggcgggttttgaaaccctgaccgaagccggttacgcgcctgaaatggcttacttcgaatgtctgcacgaaatgaaactgattgttgacctgattttcgaaggcggtattgccaatatgaactactccatttccaacaatgcggagtacggcgaatacgttaccggccctgaagtggtcaatgcttccagcaaagaagccatgcgcaatgccctgaaacgcattcaaaccggcgaatacgcaaaaatgtttatccaagagggtaatgtcaactacgcgtctatgactgcccgccgccgtctgaatgccgaccaccaagttgaaaaagtcggcgcacaactgcgtgccatgatgccttggattactgccaacaaattggttgaccaagacaaaaactga

SEQ ID NO: 44479 - DNA, 1299 bp, Neisseria meningitidis
atggctaaaaatgttgtagtaatcggcgcacagtggggcgacgagggtaaaggtaaaatcgttgactggctggcggaagaagccggcggcgtggtgcgcttccaaggcggccacaatgcgggtcatactttggtcgtcggcggcaaaaaaaccattttgcgcctgattccgagcggcatcctgcatgaaagtctggactgcttcatcggttcgggcgttgtcgtctcccccgaagccctgttgggcgaaatcgacgagttaaacgctgcaggcgtgaaaaacgtcgaaggccgtctgaaaatcgcgccgacctgcccgctgatcctgccttaccacatcgcgctcgaccaagcccgcgaagcatcgcgcggcaaaggcaaaatcggcacgaccggccgcggcatcggccctgcctacgaagacaaagtggcacgccgcgccattcgcgccgccgatttgctgcatcctgaaaaactgcgtgaaaaactggatgccatccttgcctattacaatgtccaactgcaacatctgcacaatgccgagccggttaaagcggaagacgtgatggcggttatcgaaaaagtcgcgctgcgcattgcgccgatgattaccgacgtgtcccgcgtgttgaacgagaaaaacaaaaacggcgaaaaactgctgtttgaaggcgcgcaaggtgcgttgttggacatcgactacggcacttatcccttcgttacctcgtccaactgtctggcgggagccgcttccgcaggcgcgggcgtaggccctcaaatgctggattatgttttgggcatcgtcaaagcctataccacgcgcgtcggttcaggcccgttcccgaccgaattgttcgacgaagtaggcgcaggtttggcggaacgcggacacgaattcggctcggtaaccggccgcgcacgccgctgcggctggtttgatgccgccgccctgaaacgctccatccaaatcaacggcatttccggtatgtgcattaccaaactcgatgtaatggacggcgttgaaaccatcaatatctgcgtcggctacgaattgcccgacggcggcaaaaccgatatcctgccttgcggttccgatgcggtggaaacctgcaagccgatttacgaaaccatgcccggctggcgtgaatccactttcggcgtgaaaagctacgacgcattacctgccaatgccaaagcatatttgaaacggattgaagaagtctgcggtgcgccggtcgccatcgtctccaccggccccgaccgagaagaaacgattgtgctgcatcatccgttcgcataa

SEQ ID NO: 44480 - DNA, 891 bp, Neisseria meningitidis
atgtttcccgtttttcatctttcaggcgagagccgccgccggatgcttcagacggcattgcgttttccctatgttttcaaagcccgtgcggaagattcgcacaaagggactttcggcacgctcgccgtagtcggcggatcggcagggatgagcggtgcgcccgtattggcggcatcggcggcgatgtatctcggctgcggcaaggtgtgggcgggtttcaatcaggatgcgctaccttttgccgttattgccggttttcccgagattatgctggatacggcagacggtttgagcaagcgtcaagatataaacgcctgggttgtcggttgtggattgggtacaggtagggcggcggtcggaacgcttgccggaattttgacggaacacacggacaagcccgtccttttggatgcggacgcgctgaacatattatcaaccgatgccgaaacccgaaatctggcacgcgggtgtaaaaacctgattttaacgccacaccccgccgaagccgcgcgcctgcttggaacgacggttgcacaggttcaggcggatcggacggcggcagtgaggaagataggggcaattttcggcgcaaccgtggttttaaaggggcacaaaacattggttgccgcgtccgatacggaaatctatgtcaacgaaagtggcaacgcgggattggcaacggcgggcagtggcgacgtattgggcggcatcatcggcagtctgctcgcacagggcgtgccggtttttgaagccgcctgcgcgggcgcgtggctgcacggcgcggcggcggatgtcataaaagaatcggcaggcattgcggcagggctgttggctggcgaaatcgccccggcggcaaggtggctgcgtaaccggataactgaaagtatgtaa

SEQ ID NO: 44481 - DNA, 966 bp, Neisseria meningitidis; identical to SEQ ID NO: 39761

SEQ ID NO: 44482 - DNA, 228 bp, Neisseria meningitidis
atggaaacttgggttcaaaactacacggcaatcggcggcagcctgtatctgactgccgccgccgcactcttacccatcgtctttttctttgccgcgctgaccgtcctgaagctgaaaggctatcaggcggggctttatacgctgctgattgcgcttgccgttgccgtattcggcttcgggatgccggcgggtatggcggtttcttccctgccgccgcagccgcactga

SEQ ID NO: 44483 - DNA, 1008 bp, Neisseria meningitidis
atgagcaccttcttccagcaaaccgcccaagccatgattgccaaacacatcgaccgcttcccgctattgaagttggaccaggtgattgattggcagccgatcgaacagtacctgaatcgtcaaagaacccgttaccttcgagaccaccgaggccgtcccgcctatcccctgttatccatgttcaaagccgtcctgctcggacaatggcacagcctttccgatcccgaactcgaacacagcctcatcacccgcatcgatttcaacctgttttgtcgttttgacgaactgagcatccccgattacagcaccttatgccgctaccgtaactggctggcgcaagacaacaccctgtccgaattgctggaactgatcaaccgccaactgaccgaaaaaggtttaaaaatagagaaagcatccgctgccgttgttgacgccaccattattcagaccgccggcagcaaacagcgtcagaccatagaagttgacgaagaaggacaagtcagcggccaaaccacaccgagtaaggacagcgatgctcgttggatcaagaaaaacggcctctacaaactcggttacaaacaacatacccgtaccgatggggaaggctatatcgagaaactgcacattacccccgccaatgcccatgagtgcaaacacctgtcgcctttgctggaagggatagccgaaggtacgaccgtctatgccgacaaaggctacgacagtgcggaaaaccggcaacatctggaagaacatcagttgttggacggcattatgcgcaaagcctgccgcaaccgcccgctgtcggaagtgcaaaccaagcgtaaccgatatttatcgaagacccgttatgtggtcgaacaaagcttcggtacgctgcaccgtaaattccgctacgcccgggcagcctatttcggactgattaaagtgagtgcgcaaagccacctgaaagcgatgtgtttgaacctgttgaaagccgccaacaggctaagtgcgcccgctgccgcctaa

SEQ ID NO: 44484 - DNA, 267 bp, Neisseria meningitidis; identical to SEQ ID NO: 39635

SEQ ID NO: 44485 - DNA, 282 bp, Neisseria meningitidis
atgattcacgaagaaatctgcgccatgcctatgggctatgaaaccttgatcggcgatatgggcagcgcactgtcaggcggacaaaaacaacgcatcgtattggcgcgggccttatattgcgaaccgaaaatcctatttttagatgcagcgaccagccatttggatattgccaatgaaaaagcagtcaatgcaaacttgaatggcttgtctatcataaaaattatggcggcacacagaaaggaaacggtggaatcagcagataggaaaatgtctttaggataa

SEQ ID NO: 44486 - DNA, 1497 bp, Neisseria meningitidis; identical to SEQ ID NO: 38911

SEQ ID NO: 44487 - DNA, 165 bp, Neisseria meningitidis; identical to SEQ ID NO: 38385

SEQ ID NO: 44488 - DNA, 417 bp, Neisseria meningitidis
atgcttaaacatctcgcattcctactgcccgccatgatgttcgccctccccgccgcgtccgccgttctgacttcctatcaagaacccggctgcacctacgaaggcgatgtcggcaaagacggtaaacccgccggcaaaggcacatggcgctgccaagacgggcgcaactataccggttcgtttaaaaatggcaaattcgacggacaaggcgtttataccgttgccgccaaccgcgaaatatttatcgaaccgttcaattccgacagtaccaaattccgcaacatggtactctcgggcacattcaaaaaaggcttggcacacggcagatttaccgtctcgcaaaacggcgaaaccctcttcattatgaaatgcgaaaacggcatgattaaagaagtgaagctgcccaaaaacaaataa

SEQ ID NO: 44489 - DNA, 600 bp, Neisseria meningitidis; identical to SEQ ID NO: 39827

SEQ ID NO: 44490 - DNA, 1326 bp, Neisseria meningitidis
atgaaaaaatacctgttccgcgccgccctgtgcggcatcgccgccgccatcctcgccgcctgccaaagcaagagcatccaaacctttccgcaacccgacacatccgtcatcaacggcccggaccggccggtcggtatccccgcccccgccggaacgacggttgccggcggcggggccgtttataccgttgtgccgcacctgtccctgccccactgggcggcgcaggatttcgccaaaagcctgcaatccttccgcctcggctgcgccaatttgaaaaaccgccaaggctggcaggatgtgtgtgcccaagcctttcaaacccccgtccattcctttcaggcaaaacagttttttgaacgctatttcacgccgtggcaggttgcaggcaacggaagccttgccggcacggttaccggctattacgagccggtgctgaagggcgacgacaggcggacggcacaagcccgcttcccgatttacggtattcccgacgattttatctccgtccccctgcctgccggtttgcggagcggaaaagcccttgtccgcatcaggcagacaggaaaaaacagcggcacaatcgacaataccggcggcacacataccgccgacctctcccaattccccatcactgcgcgcacaacggcaatcaaaggcaggtttgaaggaagccgcttcctcccctaccacacgcgcaaccaaatcaacggcggcgcgcttgacggcaaagcaccgatactcggttacgccgaagaccctgtcgaacttttttttatgcacatccaaggctcgggccgtctgaaaaccccgtccggcaaatacatccgcatcggctatgccgacaaaaacgagcatccgtatgtttccatcggaaaatacatggcggataagggctacctcaaactcggacaaacctccatgcagggcattaagtcttatatgcggcaaaatccgcaacgcctcgccgaagttttgggtcaaaaccccagctatatctttttccgcgagcttaccggaagcggcaatgacggccctgtcggcgcactgggcacgccgctgatgggggaatatgccggcgcagtcgaccggcactacattaccttgggtgcgcccttatttgtcgccaccgcccatccggttacccgcaaagccctcaaccgcctgattatggcgcaggataccggcagcgcgattaaaggcgcggtgcgcgtggattatttttggggttacggcgacgaagccggcgaacttgccggcaaacagaaaaccacgggatatgtctggcagcttctgcccaacggtatgaagcccgaataccgcccgtaa

SEQ ID NO: 44491 - DNA, 1296 bp, Neisseria meningitidis
atgagcgtcatccaagacctgcaatcgcgcggcctaatcgcgcaaaccaccgacatcgaagccttagacgctttgttgaacgaacaaaaaatttccctttattgcggcttcgacccgaccgccgacagcctgcacatcggacacctgctgcccgtattggcattgcgccgcttccaacaggcggggcatacgccgattgcactggtgggcggtgcgaccggtatgatcggcgaccccagcttcaaagccgccgaacgcagcttgaattccgccgaaaccgttgccggctgggtggaaagcatccgcagccaattaacccctttcttgagctttgaaggcggaaacgccgccattatggcgaacaacgccgactggttcggcaaaatgaactgcctcgacttcctgcgcgacatcggcaagcatttctccgtcaacgccatgctgaacaaagaatccgtcaaacagcgcatcgaccgcgacggcgcaggcatttccttcaccgagttcgcctattccctgctgcaaggttacgacttcgccgagttgaacaaacgccacggcgcggttttggaaatcggcggctccgaccaatggggtaacatcactgccggtatcgacctgacccgccgcctgtaccaaaaacaagtgttcggactgactctgcctttggttaccaaatcagacggcaccaaattcggcaaaaccgaaggcggcgcggtgtggctgaacgcgaaaaaaacctcgccctatcagttctaccaattctggctgaaagtcgccgatgccgatgtgtataaattcctgaaatactttaccttcctgtccatcgaagaaatcgacgctatcgaagcgaaagataaagccagcggcagcaagcccgaagcgcaacgcatcctcgccgaagaaatgacccgcctgattcacggcgaagaagcccttgccgccgcgcagcgcatttccgaaagcctgtttgccgaagaccaaagcagcctgaccgaaagcgacttcgagcagctcgccctcgacggcctgcctgcatttgaagtttcagacggcatcaatgtcgtcgaagccttggtcaaaaccggtttggcatcctccaataaagaagcgcgcggctttgtgaacagcaaagcggttttgctcaacggcaaacctgccgaagccaacaaccccaaccacgccgccgaacgccccgacgatgcctgcctgctgaacggcgaacacaaacgtttcggcaaatacaccatccttcggcgcggcaaacgcaaccacgcgcttttggtttggaaataa

SEQ ID NO: 44492 - DNA, 930 bp, Neisseria meningitidis
ttgggcaaaactcgctaccgttttattaaatccgttatctacgaacatatgaagaatggtgcgtcgttagtctataaccatattaacaacgagccgttttcagatcatatttcccgtcaagtcgcccgccttgccggcgcacatactattgttagtgggtatcttgcttttggcagcgacgaatcttataaaaaccattgggacacccgcgatgtgtatgccatccagcttttcggcaagaaacgttggcaacttactgcccctgatttccctatgccattgtatatgcaacagactaaagatactgatatttccattcctgaacatatcgatatggatattatccttgaagcaggtgatgtcctctacatcccgcgcggttggtggcacagacctatcccgctcggctgtgaaaccttccacctcgctgtcggtacctttccgcccaacggctataattacctcgagtggctaatgaagaaattccccaccatagaaagtctgcgccacagtttctcagactgggagcaagataggacgcgtatcaacgatactgccgcacaaattgctgccatgattgccgaccccgtcaattatgaagccttcagtgaagactttctcggcaaagaacgtaccgataccgcttttcatctcgaacagttcgcgaatcccaacgctactccgctttcagacgacgtcaggttgagattaaatgccaataatttggatacgttggaaaagggatatttgattgggaatgggatgaagataagcgtagatgagttggggaaaaaagttttagaacacatcggtaagaatgaaccgttattgttgaaaaatctactggttaacttcaatcagggaaaatatgaagaagttaggaagttgatttatcagttgatagagttagattttctggaaattttgtga

SEQ ID NO: 44493 - DNA, 1260 bp, Neisseria meningitidis
atgcacgtctccgaattacaaaccctgcacatttccaaactcttagaattggcggaagaacacggcatcgaaaacgccaaccgattccgcaaacaagacctcgtatttgccatcgtccgccagatgatgaaaaaaggcgagggtttcacctgctccggcacgcttgaaatcctgcccgacggcttcggcttcctccgcagcgcggacacgtcctatcttgccggccccgacgacatctatgtctcgcccacccaaatccgccgcttcaacctgcatacgggcgacaccatcgaaggcagcgtccgcgtcccaaaagacaacgaacgctattttgccctggtcaggcttgataccatcaacggcgaccacccggaagtatgccgccataaaatcctgtttgaaaacctgaccccgctgtttccgaccgaacagttgaagctggaacgcgacttaaagtccgaagaaaacctgaccggacgcgccatcgacctgatttcccccatcggcaaaggtcagcgcgccctcttggttgccccgcccaaaagcggtaaaaccgtgatgctgcaaaacattgcccacgccgttaccgcaaactatcccgaagtcgaactcatcgtcctcttgattgacgaacgtcccgaagaagtaaccgaaatgagccgctccgtccgtggcgaagtggtttcctccacctttgacgagccggctcaacgccatgtccaagttgccgaaatggtgcttgaaaaagccaagcgtatggtggaacacaaaaaagacgtggtcatcctgctggattcgattacccgccttgcccgcgcctacaataccgtcgtccccacctcgggcaaaatcctgaccggcggtgtcgatgccaacgcgctgcaccgccccaaacgtttcttcggtgcggcgcgcaacgtggaagaaggcggttcgctgaccattatcgccaccgcattggttgaaaccggcagccgtatggacgatgtgatttacgaagaattcaaaggcaccggcaatatggaattgcaccttgatcgccgtatggcggaaaaacgcctcttccccgccatcaacatcaacaaatccggcacgcgccgcgaagagctgcttgtgccgaacgaccagttgcaacgtatgtggctcttacgcaagttcctgcacccgatggatgaaatcgaagctaccgagttcttaaacgggaaaatcaaagcctctaaaaacaacgacgatttctttgaactgatgcgcggcaaataa

SEQ ID NO: 44494 - DNA, 651 bp, Neisseria meningitidis
atgatccgtttcgaacaagtttccaaaacctatcccggcggttttgaagccctgaaaaacgtcagcttccaaatcaacaaaggcgagatgatttttatcgcaggacactccggttcaggcaaatccaccgtcctcaagctgatttcgggcattaccaaaccaagcaggggcaaagtccacttcaacaaccaagacctcggcacactgaccgacaaccaaatcggctttatgcgccaacacatcggcatcgtgttccaagaccacaaaatcctctacgaccgcaacgtcctgcaaaacgtcatcctgccgcttcggattatcggctatccgccgcgcaaagccgaagaacgcgcccgcatcgccatcgaaaaagtcggcctgaaaggacgagaattggacgatcccgtaaccctctccggcggtgaacaacaacgcctgtgcatcgcccgcgccgtcgttcaccagcccggcctgctgattgccgacgaaccctccgccaacctcgaccgcgcctacgcgctcgacatcatggaattgttcaaaaccttccacgaagcgggaacaaccgtcatcgttgccgcccatgacgaaaccctgatggcggactacggacaccgcatcctgcgcctctcgaaaggacgactcgcatga

SEQ ID NO: 44495 - DNA, 1194 bp, Neisseria meningitidis
atgttcttcaagcacatcgaagccgcccccgccgatccgattctcggtttgggcgaagcattcaaagccgaaacccgccccgaaaaagtcaacctcggcatcggcgtttataaagacgcatccggcgcgacacccctcgtcaaagccgtcaaagaagccgaaaaacgcctgttggaaagcgaaaccaccaaaaactacctcaccatcgacggcgttgccgactacaacgcgcaaacccaaatcctgctgttcggcaaagaccacgaaatcatcgccagccgtcgcgccaaaacagcgcaaagcctcggcggtacgggcgcattgcgtattgcggccgagtttgccaaacgccagttgaacgcgcaaaccatctggatttccaatccgacttggcccaaccacaacgccatcgccaaagcggtcggtatccaagacaaaccttatcgttactatgatgccgccaaacacggtttggattgggacggcatgattgaggacttgagccaagcgcaaaaaggcgacatcgtcctgctgcacggctgctgccacaatcctaccggcatcgaccctacgcccgaacaatgggaaactttggcaaaactttctgccgaaaaaggctggttgccgctgtttgactttgcctaccaaggcttcggcaacggtctggaagaagatgcctacggcttgcgcgtgttcttgaaacacaatacagaattgctgattgccagctcttattccaaaaacttcggtatgtacaacgagcgcgtgggcgcgttcactttggtggccgaagatgaagcaaccgccgcccgcgcccacagccaagtcaaaaccatcatccgtaccttgtattccaatccggcttcacacggcgcgaacactattgcgctggtgttgaaaaatgatgatttgaaagcacaatggattgccgaactcgatgaaatgcgcggccgcatcaaagccatgcgccaaaaatttgtcgagttgctcaaagccaaaggtgcaagccaagactttgatttcattatcgaacaaaacggtatgttctctttcagcggtctgactcccgaacaagttgaccgtttgaaaaacgagtttgccatttatgccgtccgctccggccgcatcaacgttgccggcattaccgacgacaacatcgattatctgtgcgaaagcatcgtgaaagtactgtaa

SEQ ID NO: 44496 - DNA, 477 bp, Neisseria meningitidis
atgccggcagtctgccaatccggcagcgcacctaaaaacgcgcacacggcatccgccggcacaccggccggagaatcatgcaaagtcatccgggacgacaccgcaggaagcggcaaaaacatcatttaccgttgcagcaacggtcaggcggcaataaatgcagccattgcagacggcgtattggaatcagggattcccgtcagcttcggcggcgggggcgtaccggttgcaaacggcaggaatctggttacacggcaagcagcaaacggcgttggcaaatccgactccgaggcctgcgaacacgccctaatcaatgccgcccgcaaattccagcagaccgcaggcaaactcggcgggcgcagtgttaccggcttccacagctacttcgacaagcagccgctgcaaggcgggcaatacgactgtcagacaggttcgttccacgtccgcgtggtcatgcgcgccaatgtcgtccgttaa

SEQ ID NO: 44497 - DNA, 1485 bp, Neisseria meningitidis
atgtcgaaacctgtttttaagaaaatcgcactttatactttgggtgcaatcagcggcgtggccgtcagtctggcggtgcagggttttgccgccgagaaggaccggcgggataacgaagtcctgccggtgcaatccatccgcacaatggcggaggtttacggtcaaatcaaggcaaactactatcaggacaaacccgatgccgatttgtttgaaggtgcgatgaagggtatggtggccggtttggatccgcattccgaatatatggataaaaaaggttatgccgagataaaggagtccaccagcggcgaatttggcggcttggggatggaaatcgggcaggaagacggatttgtcaaagtggtttcgccgattgaggacacgcctgcggaacaggcgggggtgaaaagcggcgatttcattgtgaaaatcgataatgtttcgacacgcggcatgacggtcagcgaagcggtgaagaaaatgcggggcaagccgggtacgaagattactttgacgctgtcgcgcaaaaatgccgacaagccgatagtcgtcaacctgacccgtgccattattaaagtgaaaagcgtccgccatcacctgatcgaacccgattacggctatatccgcgtgtcgcagttccaagagcggacggtcgaaagcgtcaataccgccgcaaaagagctggtaaaggaaaataaaggaaaaccgctcaaggggctggtgttggatttgcgcgacgaccccggcgggcttttgaacggcgcggtcggcgtgtcggcggcgtttttgccgcctgaagcagtcgtcgtcagcaccaagggacgcgacggcaaagaccgcatggtactgaaagccgttcctgaggattatgtgtacgggatgggcggcgatccgttggcgggcattcctgccgagttgaaaaccgttccgatgacggtgttgattaattccggttcggcttccgcgtcggagattgtcgcaggtgcattgcaggatcacaaacgcgcggtcatcgtcggtacgcagagcttcggcaaaggttcggttcagactttgattcctttgtccaacggcagcgcggtcaagctgacaacggcactgtattatacgccgaacgaccgttctattcaggcgcaggggattgttcccgatgtcgaagtaaaagataaggaacgcatttttgaaagccgcgaggcggatttggtcggacacatcggcaatcctttgggcggcgaggatgtgaacagtgaaacccttgccgtgccgcttgaaaaagatgcggataagcccgctgtaaaagaaaaaggtaaaaagaaaaaggacgaggatttgtcttcaaggcggattcccaaccctgccaaagacgaccagttgcggaaagctttggatttagtcaagtcgcccgagcagtggcagaagtctttggggctggcggcgaaaaagccggtttcaaataaagataagaaagataaaaaagataagaagtag

SEQ ID NO: 44498 - DNA, 1788 bp, Neisseria meningitidis
atgagcttagttgaattgaaagtgcccgacattggcggacacgaaaatgtagatattatcgcggttgaagtgaatgtgggcgataccatcgccgttgacgacaccctgattaccttggaaaccgacaaagcgacgatggacgtgcctgccgaagttgcgggcgtggtcaaagaagtgaaagtcaaagtcggcgacaaaatctccgaaggcggcttgattgtagtcgttgaagccgaaggcgcggctgcctctcctaaagccgaagcacctgttgctgcccctgcgcaagaagcacccaaagctgccgctcccgctccgcaagccgcgcaattcggcggttctgccgatgccgagtacgacgtggtcgtattgggcggcggtcccggcggttactccgctgcatttgctgctgccgatgaaggcttgaaagtcgccatcgtcgaacgttataaaaccttgggcggcgtttgcctgaacgtcggctgtatcccttccaaagccctgttgcacaatgccgccgttatcgacgaagtgcgccacttggctgccaacggtatcaaataccccgagcctgaactcgacatcgatatgctgcgcgcctacaaaaacggcgtggtttcccgcctcaccggcggtttggcaggtatggcgaaaggccgtaaagtggatgttatccaaggcgacggccaattcttagattcgcaccacttggaggtatcgctgactgccggcgacgcgtacgaactggcagcccctaccggcgagaaaaaaatcgttgccttcaaaaactgtatcattgcagcaggcagccgcgttaccaaactgcctttcattcctgaagatccgcgcatcatcgattccagcggcgcattggctctgaaagaagtaccgggcaaactgctgattatcggcggcggtattatcggtctcgagatgggtacggtttacagcacgctgggttcgcgtttggatgtggttgaaatgatggacggcctgatgcaaggcgcagaccgcgatttggtaaaagtatggcaaaaacaaaacgaataccgttttgacaacattatggtcaacaccaaaaccgttgcagtcgagccgaaagaagacggcgtttacgttacctttgaaggtgcaaatgcgcctaaagagccgcaacgctacgatgccgtattggttgccgccggccgcgcgcccaacggcaaactcatcagcgcggaaaaagcaggcgttgccgtaaccgatcgcggcttcatcgaagtggacaaacaaatgcgtaccaatgtgccgcacatctacgccatcggcgacatcgtcggtcagccgatgttggcgcacaaagccgttcacgaaggccacgttgccgccgaaaactgcgccggccacaaagcctacttcgacgcgcgcgtgattccgggcgttgcctacacttcccccgaagtggcgtgggtgggcgaaaccgagttgtccgccaaagcatccggccgcaaaatcaccaaagccaacttcccgtgggcggcttccggccgtgcgattgccaacggttgcgacaacggctttaccaagctgattttcgatgccgaaaccggccgcatcatcggcggcggcattgtcggtccgaacggtggcgacatgatcggcgaagtctgccttgccatcgaaatgggctgcgacgcggcagacatcggcaaaaccatccacccgcacccgaccttgggcgaatccatcggtatggctgcggaagtggcattgggtacttgtaccgacctgcctccgcaaaagaaaaaataa

SEQ ID NO: 44499 - DNA, 138 bp, Neisseria meningitidis; identical to SEQ ID NO: 36823

SEQ ID NO: 44500 - DNA, 426 bp, Neisseria meningitidis; identical to SEQ ID NO: 39901

SEQ ID NO: 44501 - DNA, 876 bp, Neisseria meningitidis; identical to SEQ ID NO: 38647

SEQ ID NO: 44502 - DNA, 1284 bp, Neisseria meningitidis; identical to SEQ ID NO: 38643

SEQ ID NO: 44503 - DNA, 273 bp, Neisseria meningitidis
atgcccatcgaggacatccctttttatatttttgacttggcggattttgatgggggaattgccgatattgacaatattgtaggttttgtttcgagttacagcctatcaaaatcgaaaaaaaatgccttgacaggcattgccttcttaagggggatagatgtctatgatccgcctatttcaaaagaaaaagcattaaaagccttaaagaaacatcctgaaatttatcagaagtttcagcatttctttccgtttgtagaactgcccccgctttaa

SEQ ID NO: 44504 - DNA, 1158 bp, Neisseria meningitidis
atgaaattcgccacccaagccatccattccggctacgattgcgacgaacacaaccgcgcgctgatgccgccgatttatcaaaacagtatgtttgcgctgcacgaaatcggcgaaaatgtgccttaccgctattcacgtctgagcaacccgacccgtcaggtattggaagataccgttgccgatttggaacacggtgcggcaggttttgcgttttccagcggtatggcagggattgatgccgtatggcgcaccttcctgcaaccgggcgataccattgtcgccgtcgccgatatttacggcggcgcgtatgatttattggtcgatgtttatcaaaaatggggggtgaacgttgtttttgccgatttgggcaatctggataatttggacaagctgcttaaagcgcacaaggtcaaactggtttggctggaaacgccgtccaatccgcttttgcgcttggtagacatcaaagcgcttgccgcgaaagccaaagcggccggcgcactggtcggcatcgacaacacctttgccacgccgtatctgcaacagcccttggatatgggttgcgattttgtgttccattccgctaccaaatatttgtgcggccattccgacgtgttgatgggcatcgtcgttgccaaaaccaaagagctggcgcagcctttgcacgatatgatggtgcataccggcgcggttgccggcccgatggactgctggctggtgttgcgcggcatcaaaacactggctctgcgcatgaacgcccattgccaaaacgcactcgaaatcgcgcgccgtttggaagcccatcctgccattgaaaaagtgttccatcccggcctgccgtctcacgaacattatgaactcgcccaagcgcaaatgcctaaaggcatcggcggcgtggtgacggtttatctcaaaaacgacacgcgcgaagcggcaaacagcgtgattaaaaacatgaaactggtcaaaatggcttccagcctcggcggcgtggaaagtttggtcaaccattgctattcccagtcccacagcggcgtgccgcataatgtgaaaatggaaatgggcatcaaagtcggcctgctgcgtttctccatcggcatcgaagacgcggacgatatttggaacgatatttccgccgcactcgatacaactttgtaa

SEQ ID NO: 44505 - DNA, 312 bp, Neisseria meningitidis; identical to SEQ ID NO: 39211

SEQ ID NO: 44506 - DNA, 960 bp, Neisseria meningitidis
atgtccaaaaaaaccaaacaagaactcgaaaacaacaaactcagcaaacgcctgcgccacgccgtcggcgacgcgattaacgatttcaatatgatcgagccggacgacaaaatcatggtctgcctctccggcggcaaagacagctatgccctgttagacatcctgcgccagctccaagccagcgcgccgattgattttgaactggtcgccgtcaatctcgaccaaaagcagccgggtttccccgaagaagtattgccgacctatctcgaaagcataggcgtgccgtacaaaatcgtcgaagaagacacctactccaccgtcaaacgcgtattagacgaaggcaaaacgacttgttcgctgtgcagccgcctgcgccgcggcatcctctaccgcaccgcaaaagaattgggctgcaccaaaatcgccttaggacaccaccgtgacgacatccttgccaccatgtttttaaatatgttttacggtggaaaactcaaagccatgccgcccaagctggtgagcgacaacggcgaacacatcgtcatccgtccgctggcgtatgtaaaagaaaaagacttaatcaaatacgccgaattaaaacaattccccatcatcccgtgcaacctctgcggctcgcaacccaacctgcaacgccaagtcatcggcgatatgctgcgcgattgggacaaacgctttcccggccgcatcgaatcgatgttctccgccctgcaaaacgtcgtcccttcccaccttgccgataccgaactcttcgactttgccggattggaacgcggtcaaaccctgaaacacggcggcgatttggcgtttgacagcgaaaaaatgcccgaacgtttttcagacggcagcgaagaagacgaaagcgaaatcaaaatcgcgccgcaaaaagccgaacgcaaagtcatcaacattctggcgaacaagccgaaaacctgcggcgcgtaa

SEQ ID NO: 44507 - DNA, 2037 bp, Neisseria meningitidis
atgactgacaacgcactgctccatttgggcgaagaaccccgttttgatcaaatcaaaaccgaagacatcaaacccgccctgcaaaccgccatcgccgaagcgcgcgaacaaatcgccgccatcaaagcccaaacgcacaccggctgggcaaacactgtcgaacccctgaccggcatcaccgaacgcgtcggcaggatttggggcgtggtgtcgcacctcaactccgtcaccgatacgcccgaactgcgcgccgtctataacgaactgatgcccgaaatcaccgtcttcttcaccgaaatcggacaagacatcgagctgtacaaccgcttcaaaaccatcaaaaattcccccgaattcgacaccctctcccccgcacaaaaaaccaagctcaaccacgacctgcgcgatttcgtccttagcggcgcggaactgccgcccgaacagcaggcagaactggcaaaactgcaaaccgaaggcgcgcaactttccgccaaattctcccaaaacgtcctagacgcgaccgacgcgttcggcatttactttgacgatgccgcaccgcttgccggcattcccaaagactcgctcgccatgtttgccgccgccgcgcaaagcgaaagcaaaacaggctacaaaatcggcttgcagattccgcactacctcgccgtcatccaatacgccgacaaccgcgaactgcgcgaacaaatctaccgcgcctacgttacccgcgccagcgaactgtcagacgacggcaaattcgacaacaccgccaacatcgaccgcacgctcgcaaacgccctgcaaaccgccaaactgctcggcttcaaaaactacgccgaattgtcgctggcaaccaaaatggcggacacgcccgaacaagttttaaacttcctgcacgacctcgcccgccgcgccaaaccctacgccgaaaaagacctcgccgaagtcaaagccttcgcccgcgaaagcctcggtctcgccgatttgcaaccgtgggacttgggctacgccggcgaaaaactgcgcgaagccaaatacgcattcagcgaaaccgaagtcaaaaaatacttccccgtcggcaaagtattaaacggactgttcgcccaaatcaaaaaactctacggcatcggatttaccgaaaaaaccgtccccgtctggcacaaagacgtgcgctattttgaattgcaacaaaacggcgaaaccataggcggcgtttatatggatttgtacgcacgcgaaggcaaacgcggcggcgcatggatgaacgactacaaaggccgccgccgcttcgccgacggcacgctgcaactgcccaccgcctacctcgtctgcaacttcaccccgcccgtcggcggcaaagaagcccgcttgagccatgacgaaatcctcaccctcttccacgaaaccggacacggcctgcaccacctgcttacccaagtggacgaactgggcgtgtccggtatcaacggcgtagaatgggacgcggtcgaactgcccagccagtttatggaaaatttcgtttgggaatacaatgtattggcgcaaatgtccacccacgaagaaaccggcgagcccctgccgaaagaactcttcgacaaaatgctcgccgccaaaaacttccaacgcggcatgttcctcgtccgccagatggagttcgccctcttcgatatgatgatttacagcgaagacgacgaaggccgtctgaaaaactggcaacaggttttagacagcgtgcgcaaagaagtcgccgtcatccaaccgcccgaatacaaccgcttcgccttgagcttcggccacatcttcgcaggcggctattccgcaggctattacagctacgcgtgggcggaagtattgagcgcggacgcatacgccgcctttgaagaaagcgacgatgtcgccgccacaggcaaacgcttttggcaggaaatcctcgccgtcggcggatcgcgcagcgcggcagaatccttcaaagccttccgcggacgcgaaccgcgcatagacgcactcttgcgccacagcggtttcgacaacgcggcttga

SEQ ID NO: 44508 - DNA, 648 bp, Neisseria meningitidis; identical to SEQ ID NO: 36887

SEQ ID NO: 44509 - DNA, 1134 bp, Neisseria meningitidis
atgtttaaaaaattcaaaccggtactgttgtcattttttgcacttgtatttgccttttggctgggaacgggtattgcctatgagattaatccgcgttggtttttgagcgatacggcaactgaagtacctgaaaatccgaatgcttttgtggcgaaacttgcccgcctgttccgaaatgccgacagggcggttgtcatcgtgaaggaatcgatgaggacggaggaaagtcttgccgaaactgtggatgacggtccgttgcagtcggagaaggattatctcgcgctcgctatccggctcagtcgtttgaaagaaaaggcgaaatggtttcacgtaacggagcaggaacatggggaagaggtttggctggattactatatcggcgagggcggtttggttgcggtttcgcttttgcaacgctcgccggaagcgtttgttaatgccgaatatctgtatcggaacgatcgtccgttttctgtaaatgtgtacggcggaacggctcacagggaaaattatgaaacgacaggagaatatcgggttgtttggcaaccggacggttcggtatttgatgcggcagggcgcgggaaaatcggggaagatgtttatgagcattgcctcgggtgttatcagatggcccaggtatatttggcgaaataccgggatgtcgcgaatgatgagcagaaggtttgggacttccgcgaagagagcaaccggattgcatcggactcgcgcgattatgtgttttatcagaatatgcgggaattgatgccccgggggatgaaggcaaacagtcttgtggtcggctatgatgcggatggtctgccgcagaaagtctattggagtttcgacaatggaaaaaaacgccagagtttcgaatattatttgaaaaacggaaatctttttattgcacaatcttcgacggtagcattgaaagcggatggcgtaacggcggatatacagacctatcatgcgcaacagacgtggtatttggatggcgggcggattatccgcgaagagaaacagggagacagactgcctgattttcctttgaacttggaaaatttggaaaaagaggtgcgccgttatgcagaggctgcggcgagacgttcgggcggcaggcgcgacctttctcactga

SEQ ID NO: 44510 - DNA, 360 bp, Neisseria meningitidis
atgaatatcaaacacctgattaccgccgcactcattgcctcagccgcctttgccgcgcaggcagccccgcaaaaacccctatccgccgcccaaaccgcgcaacatccggccgtttggatcgatgtccgttccgaacaggaatttagcgaaggtcatttgcacaacgcggtcaacatccccgtcgaccaaatcgtccgccgcatacacgaagccgcgcccgacaaagacacgccggtcaacctctactgccgcagcggacggcgtgccaaagccgcccttcaggagctgaaaaaagcaggttatacaaatgttgccaatcacggcggttatgaagacctgctcaaaaaagggatgaaatga

SEQ ID NO: 44511 - DNA, 696 bp, Neisseria meningitidis; identical to SEQ ID NO: 38698

SEQ ID NO: 44512 - DNA, 1200 bp, Neisseria meningitidis
atgtccgaccaactcatcctcgttctgaactgcggcagttcatcgctcaaaggcgccgttatcgaccgaaaaagcggcagcgtcgtcctaagctgcctcggcgaacgcctgaccacgcccgaagccgtcattacgttcaacaaagacggcaacaaacgccaagttcccctgagcggccgcaactgccatgccggcgcggtgggtatgctgctgaacgaactggaaaaacacggactgcacgaccgcatcaaagccgtcggccaccgcatcgcccacggcggcgaaaaatacagcgagtctgttttgatcgaccaggccgtaatggacgaactcaatgcctgcattccgcttgcgccgctgcacaaccccgccaacatcagcggcatccttgccgcacaggaacatttccccggcctgcccaatgtcggcgtgatggatacttcgttccaccaaaccatgccggagcgtgcctacacttatgccgtgccgcgcgagttgcgtaaaaaatacgctttccgccgctacggtttccacggcaccagtatgcgttacgttgcccctgaagccgcacgcatcttgggcaaacctctggaagacatccgcatgattattgcccacttaggcaacggcgcatccattaccgccatcaaaaacggcaaatccgtcgataccagtatgggtttcacgccgatcgaaggtttggtaatgggtacacgttgcggcgacatcgatccgggcgtatacagctatctgacttcccacgccgggatggatgttgcccaagtggatgaaatgctgaacaaaaaatcaggtttgctcggtatttccgaactttccaacgactgccgcaccctcgaaatcgccgccgacgaaggccacgaaggcgcgcgcctcgccctcgaagtcatgacctaccgcctcgccaaatacatcgcttcgatggctgtggcctgcggcggcgttgacgcactcgtgttcaccggcggtatcggcgaaaactcgcgtaatatccgtgccaaaaccgtttcctatcttgatttcttgggtctgcacatcgacactaaagccaatatggacaaacgctacggcaattcgggtattatcagcccgaccgattcttctccggctgttttggttgtcccgaccaatgaagaactgatgattgcctgcgacactgccgaacttgccggcatcttgtag

SEQ ID NO: 44513 - DNA, 873 bp, Neisseria meningitidis
atgagctggttagataaaatcctgccacccaaaatcaaaaaccgcagcaaagacggttcttccaatgttcccgagggtttgtggcacaaatgtccgtcttgttcggcaaccgtttattcgaccgagttgcagcagaacaatcaggtttgtccgaaatgcaaccaccacaatccgttgtcggcacgacaacgcctgaatctgcttttggatgaggatggcagagaggaggttgccggaaatgtcaaaccgacagatcctttgaagtttaaagacggcaaaaaatatccggatcgtttgagtgcggcacgcaagctgaccggggaagatgatgctttggtggtaatgaaaggcaagatgaacggtctgcccgttgtggttgctgcgtttgagttccgctttatcggcggttcgatgggttcggttgtgggcgaacgattcgtacagggcgtccgccgggcggttgccgacaattgtccgttcgtctgtgtggcggcttccggcggtgcgcgtatgcaggagggtgtgaactcattgatgcagatgacgaaaaccagtgccgcgctgcatttgctgacggaaaaacgcctgccgtttatatcggtgttgaccgatccgactatgggcggcgtatccgccagcttcgcatttttgggtgatgtcgtattggctgaacccaatgccctaatcggttttgcgggaccgcgcgttattgaacagactgtacgggaaaccttgccggaaggcttccagcgtgctgagtttttactggagaaaggcgcaatcgaccagattgttgaccggcgtgagatgaagcggcgcatcagtgatttgattacgctgttgtgccgtcaggacaaagtttccgccgcttga

SEQ ID NO: 44514 - DNA, 2028 bp, Neisseria meningitidis
atggaagtcatccgataccccgattcccctttcaaactccaccaacccttcccgcccgcaggcgaccagcctaccgctattgccggcttgctcgaagggctttcagacggccttgcctaccaaaccctgctcggcgtaaccggttcgggcaaaacctacaccatggcgaacgtcatcgcccaaagcggccgacccgccatcatcatggcgcacaacaaaacccttgccgcccagctttatgccgaaatgcgcgagtttttccctgaaaacgcggtggaatatttcgtctcctactacgactattaccaacccgaagcctatgtgcccagccgcgacctgttcattgaaaaagacagcgcgatcaacgaacatatcgagcagatgcgcctttccgccaccaagaacctgatgacgcgcgacgacgtgattatcgtcgccaccgtgtccgccatctacggtatcggcgacccgaccgagtatcagcaaatggtgttgtccgttaaagaaggcgacaccattgagcagcgcgacatcatcgccacgctcgtttccatgcagtacgagcgcggcgatttggactttaaacgcggcagcttccgcgtgcgtggcgacgtgattgacgtgtaccccgccgaaagctccgaaaacgccttgcgcatcagcctgtttgacgacgaaatcgaccgcctcgatatgttcgacccgctttcaggcagccttatccagcgcgtcggccgctacaccgtcttcccgtccagccattacgttaccccgcgcgataccgtcttgcgcgcctgcgagtccatcaaagaagaattacgtgaacgcattgatttctttaccaaagaaaaccgtcccgtcgaacaacaacgcatcgaacagcgcacccgctttgacctcgaaatgctctacgaaatgggcttctgcaaaggcatcgaaaattactcccggcacttctccagcaaaaaagaaggcgaaccgccgcccacgctgatggactacctgcctgacaacgccatcatgttcatcgacgaaagccacgttaccgtcacccaaatcggcggcatgtacaaaggcgacgcatcgcgcaagcaaaacctcgtcgactacggcttccgcctgccttccgcccgcgacaaccgcccgctcaaattccatgaatttgaaaaagtcatgccgcaaactgtcttcgtttccgccactccagccaaatacgaagaagaacacgccggacaagtggtcgaacaagtcgtccgccccacagggctggtcgacccccaaatcatcatccgccccgtcgccacccaagtcgacgacttaatgagcgaaatcaacgaccgcatccaaaaaggcgaacgcgttctcgttaccaccctcaccaaacgcatggcggagcaactcaccgactattacagcgaactcggcatcaaagtgcgctacctgcacagcgacattgataccgtagagcgcgttgaaatcattagagatttacggctcggcctgtttgacgtactcgtcggcatcaacctcttgcgcgaaggcctcgatatccccgaagtctccctcgtcgccatcctcgacgccgacaaagaaggcttcctgcgctcacaccgcagcctgattcaaaccataggccgcgccgcgcgcaacgtgaacggcgtcgcgattctgtacgccgacaaaatcaccgactctatgaaagccgccatcgacgaaaccgaacgccgccgtgaaaaacaaattaaattcaacgaagaacacggcatcgtgccgcaacagattaaaaaacaggtcaaagacatcattgacggcgtgtaccacgaagaagacggtggtaaaggccgtagacaaggcaaaaacaaggttaaagtcagcgaaattcacaacgaagaagacgcggttaaagaaatcgccaaactggaaaaagccatgcagcaggcagctagggatttgcagtttgaagaggcggctgtactgagggataggatacgggggattaaggaagggttgttgtttgggagtgagtaa

SEQ ID NO: 44515 - DNA, 1827 bp, Neisseria meningitidis
ttgggcatttcccgcaaaatatcccttattctgtccatactggcagtgtgcctgccgatgcatgcacacgcctcagatttggcaaacgattcttttatccggcaggttctcgaccgtcagcatttcgaacccgacgggaaataccacctattcggcagcaggggggaacttgccgagcgcagcggccatatcggattgggaaacatacaaagccatcagttgggcaacctgatgattcaacaggcggccattaaaggaaatatcggctacattgtccgcttttccgatcacgggcacgaagtccattcccccttcgacaaccatgcctcacattccgattctgatgaagccggtagtcccgttgacggattcagcctttaccgcatccattgggacggatacgaacaccatcccgctgacggctatgacgggccacagggcggcggctatcccgctcccaaaggcgcgagggatatatacagctacgacataaaaggcgttgcccaaaatatccgcctcaacctgaccgacaaccgcagcaccggacaacggcttgccgaccgtttccacaatgccggtagtatgctgacgcaaggagtaggcgacggattcaaacgcgccacccgatacagccccgagctggacagatcgggcaatgccgccgaagccttcaacggcactgcagatatcgttaaaaacatcatcggcgcggcaggagaaattgtcggcgcaggcgatgccgtgcagggcataagcgaaggctcaaacattgctgtcatgcacggcttgggtctgctttccaccgaaaacaagatggcgcgcatcaacgatttggcagatatggcgcaactcaaagactatgccgcagcagccatccgcgattgggcagtccaaaaccccaatgccgcacaaggcatagaagccgtcagcaatatctttatggcagccatccccatcaaagggattggagctgttcggggaaaatacggcttgggcggcatcacggcacatcctatcaagcggtcgcagatgggcgcgatcgcattgccgaaagggaaatccgccgtcagcgacaattttgccgatgcggcatacgccaaatacccgtccccttaccattcccgaaatatccgttcaaacttggagcagcgttacggcaaagaaaacatcacctcctcaaccgtgccgccgtcaaacggcaaaaatgtcaaactggcagaccaacgccacccgaagacaggcgtaccgtttgacggtaaagggtttccgaattttgagaagcacgtgaaatatgatacgaagctcgatattcaagaattatcggggggcggtatacctaaggctaagcctgtgtttgatgcgaaaccgagatgggaggttgataggaagcttaataaattgacaactcgtgagcaggtggagaaaaatgttcaggaaataaggaacggtaataaaaacagtaactttagccaacatgctcaactagagagggaaattaataaactaaaatctgccgatgaaattaattttgcagatggaatgggaaaatttaccgatagcatgaatgacaaggcttttagtaggcttgtgaaatcagttaaagagaatggcttcacaaatccagttgtggagtacgttgaaataaatggaaaagcatatatcgtaagaggaaataatagggtttttgctgcagaataccttggcaggatacatgaattaaaatttaaaaaagttgactttcctgttcctaatactagttggaaaaatcctactgatgtcttgaatgaatcaggtaatgttaagagacctcgttataggagtaaataa

SEQ ID NO: 44516 - DNA, 474 bp, Neisseria meningitidis; identical to SEQ ID NO: 36318

SEQ ID NO: 44517 - DNA, 801 bp, Neisseria meningitidis
atggatttgtccgccctgaaaggacgcaaagccgccctttacgtctccgttatgggcgaccaaggttcgggcaacataagcggcggacgctactctatcgacgcactgatacgcggcggctaccaaaacaatcccgaaagtgccacccaatacagctaccccgcctacgacactaccgccaccaccaaatccgacgcgctctccagcgtaaccacttccacatcgctcttaaacgcccccgccgccgccctgactagaaacagcggacgcaaaggcgaacgctccgccggactgtccgtcaacggcacgggcgactaccgcaacgaaaccctgctcgccaacccccgcgacgtttctttcctgaccaacctcatccaaaccgtcttctacctgcgcggcatcgaagtcgtaccgcccgaatacgccgacaccgacgtattcgtaaccgtcgacgtattcggcaccgtccgcagccgcaccgaactgcacctctacaacgccgaaacccttaaagcccaaaccaagctcgaatatttcgccgttgaccgcgacagccggaaactgctgattgcccctaaaaccgccgcctacgaatcccaataccaagaacaatacgccctctggatgggaccttacagcgtcggcaaaaccgtcaaagcctcagaccgcctgatggtcgatttctccgacattaccccctacggcgacacaaccgcccaaaaccgtcccgacttcaaacaaaacaacggtaaaaaccccgatgtcggcaacgaagtcatccgccgccgcaaaggaggataa

SEQ ID NO: 44518 - DNA, 636 bp, Neisseria meningitidis
atgattgtttccattgatgttgatgcacaaaaaacgtttacgccactgtgtcctgacgaactgcccgtgaacgaggggcatttgattgtcgaggagttgaatgctcaagccgctttggcggatttgcgcgtgatgacgaaagatgcgcatcatatggtagcgaaatggcttgtggataaccctgttgatatgttgaagccgacaggtttgcctgatgcggatttgacttgggtggctcatgcgatggtcggtacgcgcggctatgaattattggacggactgccttctgccaaagaatatgattattgcgtttggaaaggtgttgatcctgaattgcatccttacggcgcgtgttttcacgatattgaggaaaaactaagcacagggctgattgaatggctgcgttgtcaaaatacggatacggttattatcggtgggttagctacggattattgtgttaaaacaacggttttgcagttacttaaaggtggtaattggcaggttatcgtcaatgaagcggcttgtcggggcattgcgccggataccattgaaacggcatggcaggaaatgagttctgccggtgcagtcatcttaaaaaacgctgaagaaattaaaaaatatattaataatcaataa

SEQ ID NO: 44519 - DNA, 1104 bp, Neisseria meningitidis
atgttgattttacaagccgaacgcgacagcctgctcaagccgctgcaagccgttaccggcatcgtcgaacgccgccacaccctgcccatcctgtccaacgtcctgattgagggaaaaggcggtcagaccaaactcttggcaaccgatttggaaatccaaatcgacactgcgggtcccgagggcggcgcggacgacttccgcatcaccaccaatgccaagaaatttcaggacattttgcgcgcgctgcctgccggtgcgctggtgtcgctggattgggacgacagccgtctgacgctgaaggcgggcaaatcgcgttttgccctgcagaccctgcctgccgccgattttccgatgatgaatgtcggcgaggacatcagcgcgactttctcgctggagcaggagcgtttcaaaaccatgctgtcgcaagtgcagtacagcatggcggtgcaggacatccgctattatctcaacggtctgctgatgcaggttgagggcagccagttgcgccttgtggcgaccgacggacaccgccttgcctatgcagcctgcgcgattgatgcggatttgccgcgcgccgaagtgattttgccgcgcaaaacggtgctggaactgttcaaactgttgaacaaccccgacgatccgattcaaatcgagctgctggacaagcaggtgcgtttccaatgcaacggcacgaccatcgtcagcaaggttatcgacggcaaattccccgatttcaaccgcgtcatccctttggacaacgacaagattttcgttttgtcccgtgccgaacttttgggcgcgctggaacgtgtgtccattcttgccaacgaaaaattccgtggcgcgcgcctgttcctgcaatccggcctgttgagcgtcgtgtgcagcaacaacgagcaggaagaagcgcgcgaagaaatcgagattgcctatcagggcggcgaactcgaagtcggtttcaatatcggctatctgatggacgtgttgcgcaacatccattccgacgatatgcagcttgccttcggcgatgccaaccgctcgacgctgtttaccgtgccgaacaatccgaatttcaaatatattgtgatgccgatgcggatttga

SEQ ID NO: 44520 - DNA, 618 bp, Neisseria meningitidis
atgtccgcttatcgaaaaggcaacatctttatcatttcggccgcttccggcacgggcaaaaccacgctggtgtcgcggctgttggcaaaccataacggtttgcgcgtttccgtatcgcacacgacgcgtccgccgcgtgaaggcgaagtaaacggcgtacattatcattttgtttctaaagaagagtttgagtcgcttatcgcgcaggaagcttttttggaatacgcagacgtgttcggcaactattacggcacaagcgcggagggcgtgaatgctttggcggcggcaggctatgacgtaattttggaaatcgacgttcagggcgcggcgcaggttcgcaacgcgctgccggaagccgtcggcatctttatcctgccgccgtctttcgatgtgcttgctgcacgtctgaacggacgcgggacggacagtcgggaagttatccaaaggaggctgtcgaaggcaaggcatgaaatcgaacagtccgtattgttcgattttgtcgtggtcaatgatgacttggcgcgggcggaggaggatttgcgccatattgtgaatgcctgccgtctgaaaaggtcgcggcaactgggatttattgcagatttgttggaaaattcctaa

SEQ ID NO: 44521 - DNA, 1041 bp, Neisseria meningitidis
atggatatttcagattttgattttaccctgcccgaaaagctgattgcccagcatccgcccgaagtgcgcggcagcagccgccttttggttgcgctgccggatatgcccatgcaagaccgggtattcggcgatttgcccgattatgtcgaggcaggcgacgttttggtgttcaacaacaccaaggtaatgaaggcgcggctgtttggtcaaaaagacagcggcggcaggatcgaagccctgatcgagcgtgttttagacagtcataccgcactggcgcacatccgttcgtccaaatcgcccaagcccggtatggggctggtgtttgaaggcggcatccgtgccgtgatggtcgggcgtgagggcgaactgttctgcctgcgttttgaaggcggtcaaaccgtttacgaacttttggaacagaacggccatttgcctctgccgccttatatcgaacgtgccgccgatgcggatgacgacagccgttatcaaaccgtttatgccaaatatcagggtgcggtcgccgcgccgacggcgggtctgcattttacggaagaacttttgcgccgcctgaaagacaaaggcgcagtaaccgcagaagtaaccctgcacgtcggtgcggggacattccaacccgtgcgtgtggaaaaaatcgaagaacacaaaatgcacagcgaatggtttgaagtgccgtctgaaaccgtcgccgccgttgaggcggcaaaagcccgggggaacaaagtctgggcggtcggcacgacttctatgcgcgccctcgagtctgccgcgcgtgcgacgggtcgtctgaaagcggggcagggcgacaccgatattttcatcacgccgggctaccgttttaatgttgccgacaggctggttaccaatttccatctgccgaaatcgacgctgctgatgcttgtcagcgcgttttcgggtatgggtcatatccgcgccgcgtatcgttatgcggtcgaacgtgaataccgtttcttcagctacggcgatgcgatgattttggggcggaacgaaggggtggtacgttag

SEQ ID NO: 44522 - DNA, 309 bp, Neisseria meningitidis; identical to SEQ ID NO: 36432

SEQ ID NO: 44523 - DNA, 480 bp, Neisseria meningitidis; identical to SEQ ID NO: 38443

SEQ ID NO: 44524 - DNA, 4128 bp, Neisseria meningitidis
atgacctaccccatccccaaaccccgtgaaaaatcccgttggcccaatctttcgcaaggctcgctgcccttggctttggcgcgttatctgccgcacaagcggctcaaggtcgtgctgacccaagatgcggaacaggcgttgcgccttcagacggcatggcggtttttccgtccgcacgacacggcggtgttcttgccggactgggaaacgctgccttacgagcgtttttctccgcatcaggatttggtgtcggagcggctctcggcgttgtggcagattaagagcggcgcggcggacgtgttgtttgtgccggttgccacggcgatgcagaagctgccgcccgtgccgtttttggcggggcgcacgttttggctgaaaacaggacagactttggatataggccgtctgaaaaccgatttggtagatgcgggctacaaccatgtttcccatgttgttgcggcgggcgagtttgccgtgcgcggcggcattgtcgatttgttccccatgggcagcgaaatgccctaccgcatcgatttgtttgacgatgaaatcgacagcatcaaaacctttgatacggacacgcagcgcaccatctcccccgtttccgaaatccgcctgctgccggcgcacgaattccccaccgacagcgaggcgcaaaaaatcttccgcagccgcttccgcgaggaagtcgatggtaatccgaacgatgcggctgtatacaaagcagtaagcaacggccacttcggtgcgggcgtggaatattacctgccgctgttttttgaaaacgagctggaaacgctgtttgactatatcggcgaagacgcgctgtttgtctctttgggcgatgttcacgccgaggcaaaccgcttttggagcgacgtcaaatcgcgttacgccatggcgcagggcgacgaaacctatccgcctttgcttccacagcatttgtatctctctgccgatgtttttgcaggccgtctgaaaaactacggacaggtgctgcccgatgtttccggcaaggaacacgccctccccgaccttgccgtcaaccgacaatccgacgagcctttgcaggcattgaaggattttcagacggcgtttgaaggacggattttgctgtgcgccgaaagtttgggacggcgcgaaaccatgctcggcttcttgcagcaaaacggtttaaaagccaaaagcgtgtctgattggcaaggcttcttgtcggcacatgagccgctgatgattacagtggcaccgttggcttacggattcaaactgggcggattgcaatccccgaaccagcagcaaactacttccgcctccgaaggagaaggcgatgcggttaccgaccaaaccgaattttccgcatccgcaacaaaccctctccctagccctctcccacaggagagggaacaaagtgcagccgccgtttcagacagtctgaaagcagccgccgtttcaaccgaaagcagcctgcccctcggtacaagtaatctgcacgggcaaatccgacagcaacctgccccttcccccgtgggggagggttggggagagggcaaagcagttgccgctcaaaccgaatttcccgcatccgcaacaaaccctctccctagccctctcccacaggagagggaacaaagtgcagccgccgtttcagacgacctgaaaaccaaaagcagcctgcatcccgtcgcaaataatctgcacgggcaaatccgacagcaacctactccctcccccgtgggggagggttggggagagggcaaagcagttgccgctcaaaccgaattttccgcagccgcaacaaaacctctccctagccctctcccacaggagagggaacaaagtgcagccgtcgtttcagacagtctgaaagcagccgccgtttcaaccgaaagcagcctgccccccggtaaaagtaatctgcacgggcaaatccaacagcaacctgccccctcccccgtgggggagggttggggagagggcaaagcagttgccgctcaaagtgccatcgccgtcatcaccgaatccgatctctaccaatacgtcgcccgttcgcgcgtccacaaccgccgcaagaaacacgccgccgtttcagacggtctgttgcgcgaccttgccgaaatcaacatcggcgaccccgtcgttcacgaagaacacggcatcgggcggtatatgggcttgatcacaatggatttgggcggcgaaaccaacgaaatgatgttgcttgaatatgcaggcgaagcgcagctttatgtgcctgtttcgcaactgcatttaatcagccgctactccggtcaggcgcatgaaaacgtcgccctgcacaagctcggcagcggcgcgtggaacaaagcgaaacgcaaagccgccgaaaaagcgcgcgataccgccgccgagttgctcaacctctacgcccaacgcgctgcccaatcgggacacaagtttgaaatcaacgagttggactatcaggcgtttgccgacggtttcggctacgaggaaaccgaagaccaggccgccgccatcgccgccgtgattaaagacctgacacaggcgaagccgatggaccgactcgtgtgcggcgatgtcggctttggcaaaaccgaagtcgccctgcgcgccgcgtttgtggcggtgatgggcggcaaacaggtcgccgtactcgccccaaccacgcttctagtcgagcagcacgcgcaaaactttgccgaccgtttcgccgatttccccgtgaaagtcgccagcctttcgcgtttcaacaacagcaaagccaccaaagccgcactggaaggcttggcggacggcacggtcgacatcgttatcggcacgcacaaattggtgcaggacaacatcagattcaaaagcttaggtttagtgattatcgatgaagaacaccgcttcggcgtgcgccagaaagaacagctcaaacgcctgcgcgccaatgtcgatatccttaccatgaccgccacgccgattccgcgcaccctcagcatggcactcgaaggcctgcgcgacttctcgctgattaccaccgcgcccagccgccgcctcgccgtgaaaacctttgtcaaaccgttcagcgaaggcagcgtgcgcgaagccgtgttgcgcgaactcaaacgcggaggacaggtatttttcctgcacaatgaagtagatacgattgaaaatatgcgcgagcggctggaaaccctgctgcccgaagcccgcatcggcgtggcgcacggacaactgcgcgagcgcgagctggaacaagtcatgcgcgactttttacagcaacgattcaacgtgttgctctgttccaccatcatcgaaaccggtatcgacattcccaacgccaacaccatcatcatcaaccgcgccgacaaattcggactggcgcaactgcaccagcttcgcgggcgcgtcggacgcagccaccaccaagcctacgcctacctgctcacgcccgaatacatcaccaaagacgcagaaaaacgcctcgacgccatcgcggcagcagacgaactcggcgcaggtttcaccctcgccatgcaggatttggaaatccgcggcgcaggcgaaatcctcggcgaagggcagtccggcgaaatgatacaggtcggcttcacgctctacaccgaaatgctcaaacaagccgtgcgcgatctcaaaaaaggccgccaacccgacctcgacgcgccgctgggcatcaccaccgaaatcaaactgcacagccccgccctactgcccgaaagctactgccccgacatccacgagcgtctcgtcctctacaaacgcctcgccgtctgcgaaaccgtgcagcaaatcaacgccatacacgaagaactcgtcgaccgcttcggcctgcccgaacaacccgtcaaaacccttatcgaaagccaccacctgcggcttatggcaaaagaattgggtatcgatgccattgatgcggccggcgaagcggtaacggtaaccttcggtaaaaacaataatgtcgatccaaccgaaatcatcctgctgattcagaacgacaaaaaataccgccttgccggcgccgataagctgcggtttaccgcagagatggaaaatatcgaggtcagaatcaacaccgtaaaaaacgttttaaaaaccttgcaaaacagatgcctgcccaaataa

SEQ ID NO: 44525 - DNA, 489 bp, Neisseria meningitidis
atgctcaaaataaccctaattgcggcgtgtgcggaaaacctgtgcatcggggcgggcaatgcgatgccttggcacattcccgaagatttcgcatttttcaaagcctataccttgggcaaacccgtcattatggggcggaaaacgtgggaatccctgcacgtcaaacccctgcccggacggaggaacatcgtcatcagccggcaggcggattattgcgcggcaggcgcggaaacggcggcaagtttggaggcggcattggcattgtgcgcaggcgcggaagaagccgtcattatgggcggcgcgcagatatacggacaagcgatgccattggcgaccgatttgcggataaccgaagtggatttgtctgtggaaggagatgcatttttccccgcaatagaccggacgcattggaaagaagcagagcggacggaacgccgtgtcagcagcaaaggcacgcgctatgcttttgtgcattatttgagatattga

SEQ ID NO: 44526 - DNA, 1125 bp, Neisseria meningitidis
atgaccgcaaccactgcgtcttcagccaaaccttatctgcaaatccaaggcttggtgaaaaagtttggtgacaattacgctgtcgataacatcgacttggacatttatcaacacgaaatcttcgcccttttgggcagttccggcagcggaaaatccacgctgctgcgtatgctggcgggtatggaaagccccaatcaggggaaaattatccttgatggtcaggatattaccaaacttgcaccctatgaccgccccatcaatatgatgttccaaagttacgcgctttttccgcatatgaccgtagaacaaaacattgcctttggtctgaaacaggacaaaatgcctaaaggcgaaatcgccgcgcgcgtcgaagaaatgctccgcctggttcagatgaccaaatttgccaaacgcaaacctcaccagctttctggtggtcagcagcagcgcattgctttggcacgcagtctggcaaaacgtccgaaaattctactgctggatgagcccctcggtgcattggacaaaaaactgcgccaacaaacccagcttgagttggtcaatacgctggaacaagtcggcgtaacctgtattatggttacgcacgaccaagaagaggcgatgacgatggcgacccgcatcgccattatgtctgacggtcagttgcagcaagtcggcacacccagcgacgtgtacgactatcccaacagccgcttcactgccgagtttatcggcgaaaccaacatctttgacggtgtggtgattgaagatcatgccgactatgccgttatcgaatgcgaaggtttggaaaaccacgtccgcatcgatcacggtttgggtggtccgagcgagcaggacctttgggttagtattcgaccagaggatattgatttatataaagaaaaacccgaatatttgggcgactacaactgggcgaaaggcacggtaaaagaaatcgcctatttgggcagctttgccatataccatatcaaactcgccaacgggcgcgtcgtcaaaagccaagttcctgcaccttactggtatgtacgcaacattacaccgccaacttgggacgaaaccgtgtatatcagctggccggaaaaccagcctacgccactgttccgttga

SEQ ID NO: 44527 - DNA, 1383 bp, Neisseria meningitidis
atgaatttgcctattcaaaaattcatgatgctgtttgcagcagcaatatcgttgctgcaaatccccattagtcatgcgaacggtttggatgcccgtttgcgcgatgatatgcaggcaaaacactacgaaccgggtggcaaataccatctgttcggcgatggtcgcggcagtgttaaaaatcgggtttacgccgtccaaacatttgatgcaactgcggtcggccccatactgcctattacacacgaacggacaggatttgaaggtgttatcggctatgaaacccatttttcaggacatggacatgaagtgcacagtccgttcgataatcatgattcaagaagcacttctgatttcagcggcggtgtagacggtggttttactgtttaccaacttcatcggacagggtcggaaatccatccggaggatggatatgacggaccgcaaggcagcgattatccgccccccggaggagcaagggatatatacagctattatgtcaaaggaacttcaacaaaaacaaagactaatattgtccctcaagccccattttcagaccgttggctaaaagaaaatgccggtgccgcctctggttttttcagccgtgcggatgaagcaggaaaactgatatgggaaagcgaccccaataaaaattggtgggctaaccgtatggatgatgttcgcggcatcgtccaaggtgcggttaatccttttttaatgggttttcagggattgggagttggggcaattacagacagtgcggtaaacccggtaacctatgcggcagcacggaaaactttacagggtattcacaatttaggaaatttaagtccggaagcacaacttgcggctgcaaccgcattacaagacagtgcttttgcggtaaaagacggtatcaactctgccaaacaatgggctgatgcccatccgaatataacagcaacagcccaaactgccctttccgtagcagaggccgcaggtacggtttggggcggtaaaaaagtagaacttaacccgactaaatgggattgggttaaaaataccgattataaaacacctgctgcccgacctatgcagactttagatggggaaatggctggtggaaacaagccagttgttaaatctatcagaccaactacgcgagatgaattacgtcaagcattgcaagaacaaggttttagacgtactggttcagatgcggctcaatatgaaacatggaaaggtcctgatggcgtgaaaatagatattcgtccaaatggagaggttataagaacccaaagagtgccgcgaaccgatggtgtacagggaaaatatccgcaacgacaagattatgaaggcaatccattgccaaataatcatcatcattctggatattttgtcaaatga

SEQ ID NO: 44528 - DNA, 483 bp, Neisseria meningitidis; identical to SEQ ID NO: 36360

SEQ ID NO: 44529 - DNA, 438 bp, Neisseria meningitidis
atgttcacgcccttcctgttcggctgggcgcgtccgattcctatcgattcgcgcaacttccgcaacccgcgccttgcctggcgttgcgttgccgcgtccggcccgctgtcgaatctggcgatggctgttctgtggggcgtggttttggtgctgactccgtatgtcggcggggcgtatcagatgccgttggctcaaatggcaaactacggtattctgatcaatgcgattctgttcgcgctcaacatcatccccatcctgccttgggacggcggcattttcatcgacaccttcctgtcggcgaaatattcgcaagcgttccgcaaaatcgaaccttatgggacgtggattatcctgctgcttatgctgaccggggttttgggtgcgtttattgcaccgattgtgcggctggtgattgcgtttgtgcagatgttcgtctga

SEQ ID NO: 44530 - DNA, 426 bp, Neisseria meningitidis; identical to SEQ ID NO: 38777

SEQ ID NO: 44531 - DNA, 183 bp, Neisseria meningitidis; identical to SEQ ID NO: 38667

SEQ ID NO: 44532 - DNA, 942 bp, Neisseria meningitidis; identical to SEQ ID NO: 38350

SEQ ID NO: 44533 - DNA, 1446 bp, Neisseria meningitidis
atgaactggtctgatttgaatttaatgcccgcactgcccgaaatcgcgctgctgtcgctgctggtgttattgttgctggcagacttgtgggtcagtgatgacaaacgccgttggacgcattacggcgcgttggcaacggtggcggttacggctgtggtgcagcttgccgtttgggaacagggcagcacgtcttcgttcaacggcatgtatattgcagacggtatgtcgcgtttggcaaaaatggttttatatgccttgacgtttgccctgtttgtttatgccaagccctacaaccaagtgcgcggtattttcaaaggcgagttttacaccctgtcgctgtttgccctcttgggcatgagcgtgatggtgagcacggggcattttttaactgcctatatcggtttggaactcttgtcgcttgccctttacgccctgattgccctgcgccgcgattccggctttgccgccgaagccgccttgaaatattttgttttgggcgcgctggcatccggcctgctgctctacggtatttctatggtttacggcgcaaccggttcgctggaatttgccggcgtgctcgcctcttccttcaatgaagaagccaacgaatggctgttgaaactgggtttggtgtttatcgtcgtcgccgtcgcgttcaaactcggtgcggtgccgttccatatgtgggtgcccgacgtgtatcacggcgcgcccacttctgttaccgccctggtcggcactgccccgaaagtcgccgccgtcgttttcgctttccgcatcctcgttaccgggctgggaaccgtgcatcatgactggtctctgatgtttgccctgcttgccgccgcctcgctgctggtcggcaaccttgccgccatcatgcagaccaatatcaaacgtatgctcgcctattccaccgtatcgcatatggggtttatcctgctggcgtttatggcgggcgcggtcggctttgcggcgggtctctattacgccattacctacgcgctgatggcggcggcagggttcggcgtgttgatggtgttgtcggatggggacaacgagtgcgaaaacatcagcgatttggcagggctgaaccaacaccgcgtatggcttgcctttttgatgttactggttatgttctctatggcgggcattccgccgctgatgggtttttacgccaaatttggcgtgattatggcgctcttgaaacaaggccatgtttggttgtccgtatttgccgtcgtgatgtcgctgattggtgcgttctactacctgcgcgtggtcaaagtcatgtattttgacgaatccggccgcgcccgtcccaccgtcggcggcaacaatgccgcaaaattccttttgagcgtcaacgcgctgctgttggtgctgtggggcattatgccgcaaaccgttatcgactggtgcgccaaggcgttggaaaacacgctgtaa

SEQ ID NO: 44534 - DNA, 1272 bp, Neisseria meningitidis
atgaaactgctggttatcggtaatggcggtcgcgaacacgcgctggcttggaaattggcgcagtcgcctaaagtggaaacagtatttgttgcgcctggtaatgccggtacagcgattgaacccaagttgcaaaacatcgacttgactgcgcatcaggatttgattgaattctgtcgtaaagaaaatattgtttttaccgtcgtcggccctgaagcgcctttggcggcaggtattgtggatgatttccgtgctgcaggactaaaaatattcggtccgacacaatatgcggcgcagttggaaagttccaaagatttcgccaaagcatttatggcgaaatacaatattccgaccgcgcaatatcaaacctttgaaaacgccgatgccgcacatgattacgtcaatcagaaaggtgcgcctatcgttatcaaagccgatggtttggcggcaggtaaaggcgtgattgtggcgatgactttggatgaagcgcatgctgcgattgatgatatgctgctggacaacaaaatgggcaatgccggcgcgcgtgttgtaattgaagatttcctgcaaggcgaagaagcgagttttatcgtcatggttgatggcaataatgtactgcctatggcaaccagccaagaccacaagcgtcttttagacggcgacaaaggtctgaatacgggcggtatgggtgcgtacagccctgcgcctgtggtaacgcctgttgtgtacgaacgcgcgatgaatgaaattattttgccgaccgtagcagggatgaaagcggaggggcatgagttcaccggtttcctgtacgcaggtttgatgattgatcaaagcggtgcaccctatacgattgagtttaactgccgtttcggcgatcctgaaacccagccgattatgagccgactgaacagcgacttatcggatttggttgaagcggcaatagacggcaaactcgatagcgtaaccgcggaatggagcccgcaaactgccgtgggcgtggtactggcggcgcaaaattaccccgaaacgcccaaaaaaggcgatattatttccggtctggatgctgccaaccaaatcggcaaagttttccatgcaggtacaacggcaaaagagaaaggtgacgtattgaccaacggcggacgcgtattgtgtgttgtgggattgggcgacaatgtggcgcaagcgaaagctaaggcatatggcgcgttggaaaaaatcagtttcgacgggatgcaataccgtaaagacattgccgataaagcgattaaccgttaa

SEQ ID NO: 44535 - DNA, 645 bp, Neisseria meningitidis; identical to SEQ ID NO: 38405

SEQ ID NO: 44536 - DNA, 747 bp, Neisseria meningitidis; identical to SEQ ID NO: 38219

SEQ ID NO: 44537 - DNA, 2076 bp, Neisseria meningitidis; identical to SEQ ID NO: 38829

SEQ ID NO: 44538 - DNA, 762 bp, Neisseria meningitidis
atggatgcgaataaagagccgaattgggaaaaacgtttggaaaacctgcgtcagacgcgccgtatgaaggtagtgccgacttacgcgccgctgtcccgcccttctgaaaccggaacggacgcgtctgtgccgaaactggacgatgcaagccgaaaccgtgtgttaaaggcgtatctgaagaaatggcaggaggagcacaatgccgccgttgccgattgcggggaagaaatcgaaaccgacccgatgatcgtccttcaggaaaactggctcaacgcgcaggcttccctgcaaatgtcggtttcggaaaaacacatcgaatcgcggcggagaatccggtttgataccaaaaaagacagtgtcgaatttgaaaccggacagattgaaggcggggaaaacgccgacgaggcagaatccggcacgaatgagccggcggtttcggaaaacggggaaaacgatgcggaagaaacgttgatgcccgtccaactcaatatcctgaacccgaaagccgtcaaccggcgcgaagtgttctgcctgtccgaacaggagctgaccgaacggctgatcaaacgcctgcgcccccatctgaccgataccgtcaacggcatcatccgaacggcggtgcaaaagcagatggcggttttcacctatcagctccagcagatgctgcacgagcaggcgggggcggtagtcgaagacgtgttggaacacgatgtccgcaaaatcctcaacgacatcaagtacgagttaaaatacaaacgctga

SEQ ID NO: 44539 - DNA, 1017 bp, Neisseria meningitidis
atgtatcggaaactcattgcgctgccgtttgccctgctgcttgccgcttgcggcagggaagaaccgcccaaggcattggaatgcgccaaccccgccgtgttgcaaggcatacgcggcaatattcaggaaacgctcacgcaggaagcgcgttctttcgcgcgcgaagacggcaggcagtttgtcgatgccgacaaaattatcgccgccgcctacggtttggcgttttctttggaacacgcttcggaaacgcaggaaggcgggcgcacgttctgtatcgccgatttgaacattaccgtgccgtctgaaacgcttgccgatgccaaggcaaacagccccctgctgtacggggaaaccgctttgtcggatattgtgcggcagaagacgggcggcaatgtcgagtttaaagacggcgtattgacggcagccgtccgcttcctgcccgtcaaagacggtcagacggcatttgtcgacaacacggtcggtatggcggcgcaaacgctgtctgtcgcgttgctgccttacggcgtgaagagcatcgtgatgatagacggcaaggcggtaaaaaaagaagacgcggtcaggattttgagcggaaaagcccgtgaagaagaaccgtccaaacccacgcccgaagacattttggaacataatgccgccggaggggatgcagacgtaccccaagccgcagaaggcgcgcccgaaccggaaatcctgcatcctgacgacggcgagcgtgccgataccgttaccgtatcacggggagaagtggaagaggcgcgcgtacaaaaccagcgtgcggaatccgaaattaccaaactttggggaggactcgataccgacgtgcaaaaagagttggtcggcgaacaacgcaagtgggcgcaggaaaaaatcagcaactgccgacaagccgccgcgcaggcagaccggcaggaatacgccgaatacctcaaattgcagtgcgacacgcggatgacgcgcgaacggatacagtatcttcgcggctattccatcgattag

SEQ ID NO: 44540 - DNA, 891 bp, Neisseria meningitidis
atgagcgtattgattaataaagacaccaaagtattggttcaaggtttcaccggtaaaaacggtactttccactccgaacaagctctggcttacggcactaaagttgtcggcggcgttaccccgggcaaaggcggtcaaacccacctgaacctgcctgtattcaacaccatgaaagaagcggttaaagaaaccggcgctgacgcatctgtaatttacgttcccgctccgtttgtattggattctatcgttgaagcagttgattcaggcgtaggcttggttgttgtgattaccgaaggcgtgccaactctggacatgcttaaagccaaacgttacttggaaaccaacggcaacggtactcgcttggttggccctaactgcccgggcgtgattactccgggtgagtgcaaaatcggtattatgccgggccacatccacactccgggccgcatcggtattatttcccgttccggtacattgacttacgaagccgtggcacaaaccaccaaactgggcttgggtcaatcaacctgtatcggtatcggcggcgacccgattcctggtatgaaccaaatcgacgcactgaaactcttccaagaagacccagataccgacgccatcatcatgattggtgaaatcggcggtactgcggaagaagaagcagccgaatacatccaatccaacgtaaccaaacctgttgtaggttacattgctggtgttaccgctcctaaaggcaaacgtatgggccacgccggtgcgattatttccggcggtaaaggtactgccgaagaaaaattcgccgctttcgaaaaagccggtatcgcctatactcgcagccctgccgagttgggcactactatgctggaagtgttgaaagcaaaaggtttggcataa

SEQ ID NO: 44541 - DNA, 729 bp, Neisseria meningitidis
atggcaggtcatagcaagtgggcgaatatccagcataaaaaagcccgtcaggatgccaaacgcggcaaaatcttcacccgtttaatcaaagaaatcaccgttgcggcgcgtatgggcggcggcgatcccggcgcaaatccgcgcctgcgcctggctttggaaaaagcagccgaaaacaatatgcccaaagacaatgtgcaacgcgccatcgacaaaggcacgggcaacttggaaggcgtggaatacatcgaattgcgctacgaaggctacggcatcggcggcgcggctttgatggtggactgcctgaccgacaacaaaacccgcaccgttgcggacgtacgccacgcgtttaccaaaaacggcggcaacttgggtaccgacggctgcgtggcgttcaacttcgtgcatcagggctatttggtattcgaacccggcgttgacgaagacgcgctgatggaagcggctttggaagccggtgcggaagacgtggttaccaacgacgacggttccatcgaagtcattaccgcgccaaacgattgggcgggcgtaaaatccgctttggaggcggcaggttacaaatccgttgacggcgacgttacgatgcgcgcccaaaacgaaaccgaactctccggcgacgatgccgtcaaaatgcaaaaactgattgacgcgctggaagacttggacgacgtgcaagacgtttacacttccgccgtattgaatttggactga

SEQ ID NO: 44542 - DNA, 1446 bp, Neisseria meningitidis
atgacccaatacacattgaaacaggcaagcgtcctgttgcagtccaaacagatttccgccgtcgaactggcaagcgcataccttgccgccatcgccgaaaaaaatcccgccctcaacggctacatcaccatcgaccaagataaaacccttgcagaagcccgtgccgccgacgaacgtatcgcgcagggcaacgcctccgcgcttaccggcgtacccgtcgcctacaaggatattttctgccaaaccggctggcgcagcgcgtgcgcttccaaaatgctcgacaacttcatctccccttacaccgccaccgtcgtccaaaacctgctcgacgaaggcatggtaacgctcggccgcaccaatatggatgagttcgctatgggttcgaccaatgaaaactcattctacggcgcggccaaaaatccgtggaatccggaacacgtccccggcggttcgtcaggcggttccgccgccgtcgttgccgcgcgccttgcccctgccgcgctcggttcggataccggcggctctatccgccagcctgcatcgcactgcggcattaccggcatcaaacctacctacggcacggtttcccgcttcggtatggtcgcctacgcctccagcttcgaccaggccggcccgatggcgcaaactgccgaagactgcgcgattctgttgaatgcaataacaggtttcgaccccaaagactccaccagtctcgaacgtgaaaaagaagactacacccgcgatttgaaccaaccgctcaaaggcgtgaaaatcggtctgcccaaagaatatttcggcgaaggcaacagcgccgatgttctgacggcattgcaaaacaccattgatttgctgaaagcccaaggcgcggaattgattgaagtttccctgccgcaaaccaagctgtccatccccgcctactacgtcctcgcctccgcagaagccggcaccaacctttcacgttacgacggcgtacgttacggacaccgtgccgcccaattcgccgatttggaagaaatgtacggcaaaacccgcgccgaaggtttcggcagcgaagtcaaacgccgcatcatgatcggcacttatgtactgtcgcacggctactacgatgcctactatctcaaagcccaaaaactgcgccgcctcgttgccgatgattttcagacggcatttgcacggtgcgacctcatcctcgcgccgaccgcacccactgcagccccaaaaataggagcggatgcttcgccggttgaaacctacttgagcgatatctacaccatcgccgtcaacctcgccggactgcccgcattgaccctgcccgcaggcttcagcggcggcggactgcccgtcggcgttcagcttgtcggcaactacttcgccgaagccaaaatcctcggtgcggcgcatcaaatccaactcaacagcgattggcacggcaaacgacccgaatga

SEQ ID NO: 44543 - DNA, 543 bp, Neisseria meningitidis
gtgcagagttggaaagagaggcgggatttcaatattgtaaagcaggatttggatttttcctgtggggcggcttcggtggcgacgcttttgaacaatttttacgggcaaaagctgacggaagaggacgtgttaaaaaaactggataaggagcagatgcccgcgtcgtttgaggatatgcggcgcattatgcctgatttgggttttgaagcgaaaggctatgccctgtctttcgagcagcttgcacagttgcaaatccccgtcatcgtgtatctgaaataccgcaaggatgatcatttctcggtattgcgcggtatagacggcaatacggttttgcttgccgacccgtcgctgggtcatgtttcaatgagcagggcgcagtttttggatgcttggcaaacccgtgagggaaatttggcaggtaagattttggcggttgtgccgaaagggagggatgccggcggggataaggcgtttttcacacgcagtccgaaacgtcagacggagtttgcggtcggacaggtaaaatggtggcgtgcttattga

SEQ ID NO: 44544 - DNA, 756 bp, Neisseria meningitidis
atgattaaaatccgcaatatccataagaccttcggcgaaagcactattttgcgcggcatcaatttggatgtgggcaaagggcaggtggtcgttatcctcgggccttccggctcaggcaaaacgacgtttctgcgatgcctaaacgcgttggaaatgcccgaagacggacaaatcgagttcgacaacgagcgaccgctgaaaatcgatttttctaaaaaaccaagcaaacacgatattttggcactgcgccgcaaatcaggcatggtgtttcaacaatacaacctctttccgcacaaaaccgccttggaaaacgtaatggaaggaccggttgccgtacagggcaagcctgccgcccaagcgcgcgaagaggctctgaaactgctggaaaaagtcggcttgggcgacaaagtggatttgtatccctaccagctttccggcggtcagcagcagcgcgtcggcattgcccgcgcattggcgattcagcccgagctgatgttgtttgacgaacccacttccgcactcgaccctgaattggtgcaagacgtgttgaacgccatgaaggaattggcgcgggaaggttggacgatggtcgtcgttacccacgaaatcaagttcgcgctggaagttgccacgaccgttgtcgtgatggacggcggcgttatcgtagagcagggcagcccgaaagagttgttcgaccaccccaaacacgaacggacgcggagatttttaagccaaatccaatctaccaagatttga

SEQ ID NO: 44545 - DNA, 876 bp, Neisseria meningitidis
atgccgaccgtccgttttaccgaatccgtcagcaaacacgaccttgatgccctgttcgagtgggcaaaagcaagttacggtgcagaaagttgctggaaaacactgtatctgaacggcctgcctttgggcaacctgtcgccggaatgggcggagcgcgtcaaaaaagactgggaggcaggctgctcggagtcttcagacggcatttttctgaatgcggacggctggtcagatatgggcggccgcttgcagcacctcacccgcacatggaacaaggcggggctgcttcacggatggcgcaacgagtgtttcgacctgaccgacggcggcggcaatatcttgttctcacttgaacgcgccgctttccgcccgttcggactactcagccgcgccgtccatctcaacggtctgaccgaatcggacggccgatggcatttctggataggcaggcgcagtccgcacaaagcagtcgatcccgacaaactcgacaatactgccgccggcggtgtttccagcggtgaattgccgtctgaaaccgtgtgtcgcgaaagcagcgaagaagccggtttggataaaacgctgtttccgctcatccgcccggtatcgcagctgcacagcctgcgccccgtcagctggggtgtgcacaatgaaatcctgtatgtattcgatgccgtcctgcccgaaaccttcctacctgaaaatcaggacggtgaggttgcgtgttttgagaaaatggacatcggcagcttggttgccaccatgttgtcgggaaacatgatgcacgacgcgcaactggttacgctggacgcgttttgccgttacggtctgattgatgccgcccatccgctgtccgagtggctggacggcatacgtttatag

SEQ ID NO: 44546 - DNA, 1434 bp, Neisseria meningitidis; identical to SEQ ID NO: 39392

SEQ ID NO: 44547 - DNA, 369 bp, Neisseria meningitidis; identical to SEQ ID NO: 38555

SEQ ID NO: 44548 - DNA, 255 bp, Neisseria meningitidis; identical to SEQ ID NO: 40075

SEQ ID NO: 44549 - DNA, 1746 bp, Neisseria meningitidis; identical to SEQ ID NO: 43160

SEQ ID NO: 44550 - DNA, 366 bp, Neisseria meningitidis
atgaacctgattcaacagctcgagcaagaagaaattgcccgcctgaacaaagaaatccccgaattcgcaccgggcgacaccgtagtcgtatccgtacgcgtcgtggaaggtacccgcagccgtctgcaagcctacgaaggcgttgtcattgcacgccgcaaccgtggtctgaacagcaacttcatcgtccgtaaaatttccagcggcgaaggtgttgaacgtactttccaactgtactctccgaccgtcgaaaaaatcgaagtcaaacgccgtggcgacgtacgccgtgccaaactgtactacctgcgcggtctgaccggcaaagctgcacgcatcaaagaaaaactgcctgcacgcaaaggttga

SEQ ID NO: 44551 - DNA, 1815 bp, Neisseria meningitidis
atgcccgctgaaacgaccgtatccggcgcgcaccccgccgccaaactgccgatttacatcctgccctgcttcctttggataggcatcgtcccctttacctttgcgctcaggctgcaaccgtcgcccgacttttaccacgatgccgccgccgcagccggcctgattgtcctgttgttcctcacggcaggaaaaaagctgtttgatgtcaaaatcccacctatcagcttccttctgtttgcaatggcggcgttttggtatcttcaggcacgcctgatgaacctgatttaccccggtatgaacgacatcgtctcttggattttcatcttgctcgccgtcagcgcgtgggcctgcaagagtttggtcgcacactacggacaagaacgcatcgttaccctgcttgcctggtcgctgcttatcggctccctgcttcaatcctgcatcgtcgtcatccagtttgccggctgggaagacacccccatgcttcaaaacattattgtttacagcgggcaaggcgtaatcggacacatcggacagcgcaacaacctcggacactacctgatgtggggcatactcgccgccgcctacctcaacggacaacgaaaaatcccgcccgccctcggcgcaatctgcctgattatgcagaccgccgttttaggtttggtcaattcgcgcaccatcttgacctacatagccgccatcgccctcatccttcccttctggtatttccgttcggacaaatccaacaggcggacgatgctcggcatagccgcagccgtattccttaccgcgctgttccaattttccatgaacaccattctggaaacctttaccggcatccgctacgaaactgccgtcgaacgcgttgccaacggcggtttcacagacttgccgcgccaaatcgaatggaataaagcccttgccgccttccagtccgccccgatattcgggcacggctggaacagttttgcccaacaaaccttcctcatcaatgccgaacagcacaacatatacgacaacctcctcagcaacttgttcacccattcccacaacatcgtcctccaactccttgcagagatgggaatcagcggcacgcttctggttgccgcaaccctgctgacgggcattgccgggctgctgaaacgccccctgacccccgcatcgcttttcctaatctgcacgcttgccgtcagtatgtgccacagtatgctcgaatatcctttgtggtatgtctatttcctcatccctttcggactgatgctcttcctgtcccccgcagaggcttcagacggcatcgccttcaaaaaagccgccaatctcggcatactgaccgcctccgccgccatattcgcaggattgctgcacttggactggacatacacccggctggttaacgccttttcccccgcccctgacgacagtgccaaaaccctcaaccggaaaatcaacgagttgcgctatatttccgcaaacagtccgatgctgtccttttatgccgacttctccctcgtaaacttcgccctgccggaataccccgaaacccagacttgggcggaagaagcaaccctcaaatcactaaaataccgcccccactccgccacctaccgcatcgccctctacctgatgcggcaaggcaaagttgcagaagcaaaacaatggatgcgggcgacacagtcctattacccctacctgatgccccgatacgccgacgaaatccgcaaactgcccgtatgggcaccgctgctacccgaactgctcaaagactgcaaagccttcgccgccgcgcccggtcatccggaagcaaaaccctgcaaatga

SEQ ID NO: 44552 - DNA, 513 bp, Neisseria meningitidis
atgctgttgaaggtagtacctgagcgtaccgtttcggcagatgcaaaaaccagagacccgatgtgggacaatgcggctttacagaccagcgaaggcgtaaattttattgctcgtttcctaggattttttagcgatggggaataccgctatgtggatgtcctgcaacccaaccattccgatattattcggtattcaggtaaagattttccgataaatcaaatatttaatcatatacaccccgcccgttatgcggtaacgttcgaaaacaatgtcgattccaagctgcgcaggcactgggtggcaggtgcgaccatacggattatcgaccgccaaactgacgaagtgattgccaagaaaaccatctatgtctttgaaaaaggcttggacggcacgggtggggcgagaatgccgtggaagtttgctatcttgtgcaataaagaaagacttacttcttcagagccgttatcggattttgttcttagcgttttaaaaccttatatattgcgtccctaa

SEQ ID NO: 44553 - DNA, 1713 bp, Neisseria meningitidis
atgaaagccagccaattctttatctctactttaaaagaagcccctgccgaagccgcgcttgccagccacaagctgatgatacgcgccggtctgattaaagccaacgcgtccggcctttatacttggatgccgatggggctgcgcgtgttacgcaaagtcgaaaacgtcgtgcgcgaggaaatggcgcgcgcgggcagcgtggagctgctgatgccggtggtgcagcctgccgagctgtggcaggaatccggccgctgggaattttacggtaaagaactgctgcgcctgaaagaccgccacgaccgcgatttctgcatgggaccgacctgcgaggaagtcatcgccgacatcgtgcgcaaagaaatcaacagctacaaacagctgccgaaaaacttttaccacatccaaaccaaattccgcgatgaagtgcgcccgcgtttcggcgtgatgcgcgcgcgcgagttcgtcatgaaagacgcttattccttccatgccgactacgcctcgcttcagacgacctatgatgccatgtatgacgcttactgccgcatctttacccgtctgggcttggcattccgccccgtcgccgcagacaccggcagcatcggcggtacgggttcgcacgagtttcaagtgttggcggaaagcggcgaagatgttattgcatacagcgacacttccgattacgccgccaatatcgagttggcaccgaccttgccgcttaaaggcgaacgcaccgctgctcaggccgagttgaccaaagtacatacaccaaatgtcaaaaccattgagtctttggttgaattcctgaatattccggttgaacaaaccctcaaatccatcgtggtcgaaagcgaaaacgaaggcgaaatcgtcttattactgttgcgcggcgaccatgagttcaacgacatcaaagccgaaaaactcgcaggcgtgaaatcgccattgacgatggcaagttctgccgcgattgtcgaacagttcggcgcaaacggcggctctcttggtcctgtcggcttcaaaggcaaagtctatgccgatttcgctaccgaaaaaggcgcggactgggtcatcggtgcgaacgaagacggctaccactataccggcttcaacttcggtcgcgatgccgccgagcctgaattcgtcgatttgcgtaatgtggtcgaaggcgacgaaagccccgacgggcaaggccgtctgaaactggcgcgcggcatcgaagtcggacacgtcttccagttgcgcgacaaatacacccaagccatgaacgtgagcttcctcgacaacaacggcaaatcgcaaatcatggaaatgggctgctacggtatcggcatcacccgcgtcgttgccgccgccatcgagcagaacaacgacgaaaaaggcatcatctggacgaaggcgatggcgccgtttgaagtcgttatcgtgccgatgaactacaaaaaatcagacgccgtgcgcgaagccgccgacaaaatctacgccgaactgctggcggcaggcgcagacgtcctcctcgacgaccgcgacgaacgcgcaggcgtgttgctgaacgattccgagctgttgggtattccgcaccgcatcgtcatcggcgaccgcgctttgaaagaaggcaatgtcgaatacgccgaacgccgcaacaacgaagcgcaggcagttgcaatcggagaaattgttgcgcgtgtaacagcttcattaaatgggtaa

SEQ ID NO: 44554 - DNA, 876 bp, Neisseria meningitidis
atggaagaaggtttgatcgacaggctgcttgaaacgctgtggttggacaggcggctcagtcagaatactttaaacggttaccggcgcgatttggaaaaaatcgcccgccgcctgtcccaatcgggcagaatgctgaaggatgcggacgaagcggatttggcggcggcggtttatgttgacggagagcaacggagttcgcaggcgcgcgcattatcggcatgcaaacgcctgtatatatggatggagcgtgaaggcataaggacggacaatcccacccgtttgctgaaaccgcccaaaatcgacaagaatattccgaccctgatcaccgagcagcagatttcccgactgcttgccgccccggataccgacacgccgcacggtttgcgggacaaggccctgctcgaattgatgtacgcgaccggcttgcgcgtcagcgaggcggtcgggctgaacttcagcagtgtggatttggacaggggctgtattaccgcgctgggaaagggtgataagcagaggatggtcccgatggggcaggagtcggcgtattgggtggaacgctattatacggaggcacgcccacttctgctgaaaggcaggaattgcgacgcattgtttgtcagtcagaaaaaaacgggcatttcccgtcagttggcatggatgattgtcaaagaatatgccggcagggcaggtatcgggtacatcagcccgcacagcctgcgccacgcctttgccacgcatctggtgcggcacggcttggatttgcgcgtggttcaggatatgttgggacatgccgatttgaatacgacgcagatttatacccatgttgccaacgtatggttgcagggtgtagtgaaggaacaccattcccgaaactga

SEQ ID NO: 44555 - DNA, 726 bp, Neisseria meningitidis
ttgttagatcacgataatggtttttttgataacagcaatcaaaggccgaaatctgaaacgatcggtacggcttggcggaatgaggacgggagcggcaagacattttatgtaggtcgcaagaaaaattctcgttttgttcgtgtttatgagaaaggcaggcagcttggagataaagaaagcaaatgggtaaggttcgagatccagtttaattatggagatatagaaatacccttggatattttaataaatcagggttcgtatttctgtggagcttttccaatttgtagaaaatttaaaaatatgccggttcccgaaaggtttgatcagagaaagaaaacgcttaatttaactttcgagcataaattgcattacgcgaaaaacgcggttggaaaactggtcaatttcatgattgaaatgggttttgataatagcgaaattgtggaatctttaaaggcagattcgggatttcccaaaggattagaacctgaaaaatatgctctggaaatgttaagggacggtttgaaacacggttttattcatgaacagccggatattgatttggaaattgaacttgatgaattgggggttattgcttttaaaaattctgacaaattcgatagggaaaaaaggctttttagtcctgattatgatgccgagaaagaaaggaaatatcaggattatctagatgaagtttatcatcaaaatgtaaattatgattatttttaa

SEQ ID NO: 44556 - DNA, 660 bp, Neisseria meningitidis
atgaccacgcccaaactcatcatcttcgactgggacggcacgcttgccgatacgacccaacccatcatcgacaccatgcgccgcagcttcgccgaatgcggttttccgccgcccgaagcggaacgcgtccgcagcctgattggctacagcctgcccgaaatcatccgcgacctgctcgaaatgccgtctgaaaccgccgttgccgacatcgcgcgcacttattccgcgcattacctcaatcccaacaaccgcaatatgacgctctttcccgatgccctgccctgtctggacaagctcaaagcacaaggcttccggcttgccgtcgccacgggcaaagggcgggcgggtttggacaacgccatcagccaaaccgccaccggcggctattggctcgccaccgcctgcgcgggggaatatccctccaaaccctcgcccgaaatggtattcggaatctgcggcgaactggggttcgacccgaaagaggcattggtcgtcggcgatacgtcgcatgacctgcatatggcggcaaacgcaggcgcggcggcagtcggcgtggccaccggcgcacattcgcgcgaacagctccttagcgcaccgcatctcgccgtattggacggtttgtccgaactgcccggttttcttgcacgacattacgcctga

SEQ ID NO: 44557 - DNA, 600 bp, Neisseria meningitidis; identical to SEQ ID NO: 38221

SEQ ID NO: 44558 - DNA, 678 bp, Neisseria meningitidis
atgagccgcgtattactcgtagatgacgatgccctgctgaccgaactgctgaccgaatacctgagcgccgaaggtctgaacgtccgcagcgttcccgacggggaagcaggcgtacaggaaatcctgagcgggcagtacgatgtagtcgtattggattccatgatgcccaaaatgaacggcttggatgtcttgaaaaacgtacgcgcccgaagcaccgtccccatcatcatgctgaccgccaaaggcgacgacatcgaccgaatcatcggcttggaaatgggcgcggacgactatgtccccaaaccctgcacaccacgcgaactcttggcacgcatcaatgccatcctgcgccgcgcacaacacagcggcgaacagaacaacgcacccaacagcatctccgtcagcgatgtcgtcctgtaccccgccaaacgccaggcatccgtcaaagacatgccgctcgaactgaccagcaccgaattcaacctgctcgaagtcctgatgcgccatgccggacaggtagtcagcaaagaaaccctgtccgtcgaagcactcgaccgcaagctggcaaaattcgaccgcagtatcgacgtacacatctccagcatccgccacaagttgggcgatgcctctctgattcaaaccgtacgcggcttgggctacctgtttgtcaaaaactga

SEQ ID NO: 44559 - DNA, 759 bp, Neisseria meningitidis; identical to SEQ ID NO: 39453

SEQ ID NO: 44560 - DNA, 252 bp, Neisseria meningitidis
ttggttttagatgattattttcaaagcggcttaattactcggcgtatgtatttctctttggacaaattccatcatataccagtatctggagcggttatttataaggatgaccctatatatttcagacgcttggaaaaagttttaaaagctaatgctaaagaacttgattgttatgcgtatagggttttagcagatggaaggttgtttttagtagataggttaataaccgatttttttgacgaaaggaaatag

SEQ ID NO: 44561 - DNA, 2631 bp, Neisseria meningitidis; identical to SEQ ID NO: 38629

SEQ ID NO: 44562 - DNA, 198 bp, Neisseria meningitidis; identical to SEQ ID NO: 43079

SEQ ID NO: 44563 - DNA, 1479 bp, Neisseria meningitidis
atgttcagcaagttaacccctttggctgaaaccggcatcccgactctgtcgtgtgcaaacgcggcagggcgtttgttgcattcagacagccgccaaatcaaacaaggcgatattttcgttgcctgtccgggcgaatatgccgacggacgcagttatatccccgccgccgttgccaacggcgcggcttttgttttttgggacgacgacggcaaatttgcgtggaatcccgaatggaaagtccccaatcaaggcatcaaagatttgaaacaccgtgccggcatattggcggcgcaagtttacggcaacgtttcagacggtctcaaattctggggcgtaaccggaaccaacggcaaaacctccatcacgcaatggctggcgcaagctgccgatttgttgggcgaaaaaaccgccattgtcggcacggtcggcaacggcttttggggtgcattggaagaaaccacgcataccacacccgcccccgtcgatgtccaaaccctgctctaccgtttccgtcaacaaggcgcaacagtcgccgcgatggaagtctccagccacgggcttgaccagtcgcgcgtcaacggcgtgtcattccgcagcgcaatctttaccaacctcacccgcgaccacctcgactaccacggcacgatggaagcctacggtgccatcaagtcgcgcctgttttactggcacggcttgaaacacgcagtcatcaacgtggatgacgaatacggcgcggaactcgtaggtcgtctgaaaaaagactgtcccgatttggccgtttacagctatggtttcagcgaacacgccgacatccgcattaccgactttaccgcctcttcagacggcatagcagccgtattccaaaccccgtggggcgaagggaaatgccgcacgcgcctgctcggacggttcaacgcgcaaaacctcgccgcctgcatcgccttgctgtgcgccaacggctatccgcttgataaggtattggatgtgctggcaaaaatccgtcccgcttcagggcgcatggactgcatcatgaacagcggcaagcccttggtcgttgtcgattatgcccacacgcccgacgcattggaaaaagcactcgccaccttgcaggaaatcaaaccgcagggtgcggctttgtggtgcgtattcggttgcggcggcaaccgcgatcgcggcaaacgcccgctgatgggcgcggcagccgtacagggcgcggataaagtcgtcgtcaccagcgacaatccgcgtttggaaaatccgcacgacatcatcaacgacatcctgcctgccgttcccgcgcccgaatgcgtcgaagccgaccgtgccgccgccatccgttatgcggttgaacaagccgccgcaaacgacatcatcctgattgccggcaaagggcatgaaaactatcaggatgtacaaggcgtgaagcaccgtttttccgatcttgaaatcgtcggacaggctttgttaactcgtaaataa

SEQ ID NO: 44564 - DNA, 678 bp, Neisseria meningitidis
ttggtcaaaacggcagacggctacaaagccattgcccatattcaagccggagaccgcgtcctttccaaggacgaggcaagcggagaaacgggatacaaacccgttaccgcccgatacggcaatccctatcaagaaaccgtttacattgaaatttcagacggcatcggcaacagtcaaaccctgatttccaaccgcatccatccgttttattcggacggcaaatggattaaggcggaagatttaaaagcgggaagcaggctgtattccgaaagcggcaaaacccaaacagtccgcaacaccgttgtcaaaccaaaaccgctcaaagcctacaatctgaccgttgccgattggcatacttactttgtcaagggcaatcgggcggaaacggaaggggtttgggttcataatgagtgtccgccaagaaaaacaccatctacccccatatatgggaatgattcagaagcatatgcagcagcaaaggaattgggatatagaaaaataaaagaaagaacgagaaatgatgctgctatttttaaaaaaggaaagagttatatatcacgcgatgtagattcacataatggaggtgcttggaaagaggcatcttcacccgaaaaactgaacagaaaagaaacaagaaacggtacatttgataaaaacctaaatcgtattggagattaa

SEQ ID NO: 44565 - DNA, 1110 bp, Neisseria meningitidis
atgagcaactggaaacccgatattccctataacgatttaccacccctgccgccaaaacaggatattgaaagcaaaaccatcctgaaacgttgtataaccgcccgtgcatcccttgcccgtttaaagcaggcggcagaactgataccgaatcaagccatgctgattaacacccttcctgttatggaagcccgtgcaagttcggaaattgaaaacatcgtaaccacaacggataagctgtttcaatccctgcaaatggatacggaacggcaagaccctgccacgaaagaagccctgcaataccgcaccgccctgtttgcaggctatgaatcactgacgagccgccctttatgcacacaaaccgccatcatggtctgcaacgccatcaagcacccctacgaaatggccatccgcaaaacaggcggcacagccctaaaaggaggcaacagcggaaatgttgtctataccccgcccgaaggagaagaaaccatacgcggcaagctggcaaattgggagcggtttattcacgaaagcggcgatttagacccgcttatcatcatggcggcggcacattaccaatttgaagccatccatccgtttacggacggcaacgggcggacggggcgcatattgaacagcctgctattgattgaaaaagggcttttggatttgcctattttgtatttgagccgctacatcatcgaaaacagggcggactattaccgcctgcttttaggcgtaaccgaacggcaggattgggaaagctggataatctacatcttagacggcgtagccgacaccgccgattggacggtatcgaaaatagatgcgatacgccgcctgttcgagcagacacggcaacacatacggacacacgcacaaggaatctacacgcacaaactggtaaatcttctgtttgagcagccatatacacgcattgccaacctagaagcggcagggatagccaaacggcagacggcctctaagtacctgaaagagctttcagacataggtgtgctgcaagaaatcgtcatcggcagggacaaactattcattcatccgcgcctaatggaactattgcggggagagggcaacagctttacttcattctaa

SEQ ID NO: 44566 - DNA, 786 bp, Neisseria meningitidis
atgaatccgtttttgaatacagcctttaaagccgcccgccgtgccggtcagatgatgatacgcgccgcgggcaatctcgatgccgtcaaaaccgacagcaaagcattcaacgattttgtttccgatgttgaccgcaattccgaaatcatcctggttgaggctttgaaagaagcctatccgcaccacaaaatcacttgcgaagaaagcggctcccacggtaaagccgcagccgaatacgaatggattatcgatccgctcgacggcacgaccaacttccttcacggccatccccaatacgccatctctatggcactcctgcacaaaggcgtgttgcaagaagctttggtgtacgcccccgaacgcaacgacgtttacatggcttcgcgcggcaaaggcgcgttgctcaatgaccgccgcatccgcgtttccaaccgcatcgaattgaaccgctgcctgatcggtaccggctttcctgttgtcgatcaaagcatgatggacaagtatctggcgattttgaaagatttcttggcaaaaaccgccggcggccgtcgtgaaggcgcggcttctttggatttgtgtgctgtggcgactggtcgttttgacggctttttcgagttcaacctcaaaccttgggatattgccgcaggcgcattgattgttcaggaagcgggcggtatcgtaaccgatatgacgggtgaagacggctggctggaaagcggcgatattgttgccgccaatcccaaagtgctggcgcaaatgttaaaaatcatttccgcacacgtttaa

SEQ ID NO: 44567 - DNA, 993 bp, Neisseria meningitidis
atgaaaacgcacgaaataagcaaagattcggtcagcttgataggggtcgccgaacatgaggcggggcaacgccttgataactatctgataaaaatcctcaagggcgtgcccaagagccatatccaccgcattatccgcgccggcgaggtgcggttgaacaagaaacgctgcaaacccgacagccgtattgcggagggggatacggtgcggattccgcctgtgcgcgtggcggagaaggaaatgccgtctgaaaggcgtgccgccgtaccggcgcgtgcgtttgacgttgtttacgaagacgatgcgcttttggtcatcgacaaaccgtccggcgttgccgtccacggcggcagcggcgtgagtttcggcgttatcgaacagttgcgccgcgcccgtccggaggcgaagtatttggagttggttcatcgtttggacaaggatacgagcggcttgttgatggtggcgaagaaacgcagcgcgctcgtcaaacttcacgaagccatccgtaacgaccaccccaaaaaaatctaccttgcgctgggggtgggcaaactgccggacgacaatttccatgtcaaactgcccctgttcaaatataccggcgcacaaggcgaaaagatggtgcgcgtcagtgcggacgggcagtcggcgcatacggtgttccgtgtgttaagccgtttttcagacggcattttgcacggtgtcgggctgtcgcacctgactttggtgcgggcgacgttgaaaacggggcgcacgcaccaaatccgcgtccacctgcaatctcaaggctgtccgattgcgggcgacgaacgctacggcgattatcaggcgaaccgtcgtttgcagaagttgggtttgaagcggatgtttttgcacgcgtccgagctgcacttgaaccatccgctcacgggcgagccgctggtgttgaaggcggagctgccgctggatttggcacagtttgcggtgatgttggaaaacgggacgaaaatgtga

SEQ ID NO: 44568 - DNA, 564 bp, Neisseria meningitidis; identical to SEQ ID NO: 36962

SEQ ID NO: 44569 - DNA, 915 bp, Neisseria meningitidis
atgaaacaaatcaatcaagcattgcaacaaaaactggctgaatttaaagaaaaatcgggtatgagccaaacccaactggcacgcggtatcggtacttcgccggcatccgtcagtatgtatctgaacggtacttatgcggaaaaaggcggcaattatgaaaccatcgagccaaaaatcgaggcgtttttggagatgcaggacagcaaagcgaaacgcgaagagctggtgttgggttttgtatcgactaagacgacacgccgaatcgtggaagcgatgcgcaatgcgcacgaaggcggcgagatttccgttatctacggtcaggcgggtttgggcaagacgcaggcggtcaaaaactactgcgagaaaaaccctgcagccatcttgattgaggctaatccgagctttacggctttggtcttgatgcgcaagttggcgacggcggcgaaggtatcggcgatgggcagcttgaatgatttgtttgaatcggtatcggacagattgcgtgattcaggccatctgattgtggtcgatgaagcggaaaacctgccattacgcgcccttgagattatccgccgactgcacgatgagactggctgcggtttggtgttgagcggtatgccccgactggtggcgaatttgcgcggtaagtatggcgagttggtacagcttcacagtcgtgtggcgggtgcgctgaatctaggtgatacgatgcccgacgcagagttggaacagattgcgcgggcaaccctacccgaagccgatgatgaaacgattgcggaactggttaagcatagcaatggtaatacacggcgtatgagcaagttgatgcgcggatcagtacgggtagcgaataaaaacggtattcgaatgcaagcgggaatcgtgaaaaaatattcgacattgattatccgatag

SEQ ID NO: 44570 - DNA, 771 bp, Neisseria meningitidis
atgaccacgaccgaacacgacaacgacgatgcattcctgctgcggtacagccgccacatcctcttggacgaaattggcatcgaagggcagcagaaactttccgccgcgcatattttggtcgtcggctgcggcggtttgggtgccgccgccctgccctatctcgccgcttccggcatcggcacgctgaccatagccgattccgacacggtcgagctgcacaacctgcaacgccaagtcgcatttgacgagggcgatgtcggcaagcccaaagccgaagccttggcagaccgcctgaaacgcatcaaccataacgtcgatgtccgcaccgtcaacgaaaaactcgacggctgccgcctgaccggtttggttcaaaccgccgacatcgttttagactgctgcgacaactacgccacgcgccaagccgtcaaccgtgtctgcgtacaaacgaaaacaccgctggtttcaggagcagcggtgcgctttgaagggcaacttgccgtgtaccgtcccgacttgcccgactcgccgtgttacgcctgcctgtttgacggcggatcggcttcagacggcatctgttccctcttcggcgtattctcgccgctggtcggcatcatcggctgcacgcaggcggcggaggctctgaaaatcctgctagacgtgggcgaaccgtcgcacggcaggctggcggtttaccgtgccttggaagggggctggcaatatttcgacctgccgcgcaaccccgaatgcccgatttgcggcacggaacggtaa

SEQ ID NO: 44571 - DNA, 366 bp, Neisseria meningitidis; identical to SEQ ID NO: 38539

SEQ ID NO: 44572 - DNA, 1479 bp, Neisseria meningitidis
atgaaatacaaagacctgcgcgacttcatcgccatgctcgagcagcagggcaaactcaagcgcgtcgcacaccccatttccccgtatttggaaatgaccgaaatcgccgaccgcgtgctgcgtgccgaagggccggcgttgctgtttgaaaacccgattaagcccgacggtacgcgctacggttatcccgtgttggcaaacctgttcggcacgcccgaacgtgtggcgatgggcatgggcgcggacagcgtgtccaagctgcgtgaaattgggcagacgctggcgtatttgaaagaacccgaaccgcccaaaggcatcaaagatgcgttttccaaactgccgctgctgaaagacatttggagcatggcgccgaacgtggtgaaaaacgcgccgtgtcaggaaatcgtgtgggaaggcgaagacgttgatttgtatcaacttccgattcagcattgctggccggaagacgttgcgccgctggtaacgtggggcttgaccgtcacgcgcgggccgcacaaaaaacgccaaaatctcggcatttaccgccaacaactcatcggcaaaaacaagctgattatgcgttggctgtcgcatcgcggcggcgcgttggattatcaggagttccgcaaactcaatcccgatacgccgtatcccgtcgccgtcgtactcggctgcgaccccgccaccattttgggcgcggtaacgcctgttcccgataccttgagcgaataccagtttgccggactgctgcgcggttcgcggacggagctggtgaaatgtatcggcaacgatttgcaagtgcctgcccgcgcagaaatcgtgttggaaggcgtcatccatccgaacgaaaccgcgttggaaggcccgtacggcgaccacaccggctattacaacgagcaggattatttccctgtgtttacggtcgaacgcatcaccatgcgcgaaaacccgatttaccattcgacctacacgggcaaaccgcccgatgaacccgccgttttgggcgtggcgttgaacgaagtgttcgtaccgcttttgcaaaagcagttccccgaaatcaccgatttctacctgccgcccgaaggctgctcctaccgcatggcggtggtgagcatgaaaaaacagtacgccggacacgccaagcgcgtgatgatgggctgctggtcgttcctgcgccagtttatgtataccaaattcatcatcgtggtggatgacgatgtgaacgtgcgcgactggaaagaagtcatctgggcggtcaccacgcgcatggaccccgtgcgcgacactgttttggtagaaaacacgcccatcgattatctcgacttcgccagccccgtcagcggactcggcggcaaaatgggtttggatgcgaccaacaaatggccgggagaaaccgaccgcgaatggggacgcgtcatcaaaaaagaccctgcggttacggctaagattgatgggatttgggaggaattggggttgtag

SEQ ID NO: 44573 - DNA, 174 bp, Neisseria meningitidis; identical to SEQ ID NO: 38579

SEQ ID NO: 44574 - DNA, 816 bp, Neisseria meningitidis
atgactactctcaaacccgccctgcccgcttatctggacaacatccgcatcatcctcacgcgcaccagccatcccgccaacatcggctctgccgcgcgcgcgatgaaaacaatgggtctgcacaaactgaccatcgtcgccccaaatctgatggcaacgccgatgacggaaaacccgcccgtgtttgacccggagcatcctcaatcgtttaaattaccggaagaaagcttcatcctcgcttccggcgcggcagacgttttggaaaatgccaccattgccgcttctttggacgaagcccttgccgacaccaccatcgcctgcgccctgaccagccgccgccgcgaaattactgcgccgctgcaaaccccgcgcgatttggtatccgaattactgcagaccgcaaaccgaggcgagaaagtggcactggttttcggcaacgagactttcggcttgagcatcgaagaagtccaagcctgcaaccgactgatgaccatcaacggcaatcccgactatttctcgctcaacctcgcccaagccgtgcaggtcgtgtgctacgaaatcttcagccaaaccggttcgcccatgacccatcttcaacaagaagaccacgctgcgacccacgagcaaatcaaaggcatggtcgcccacatggaaagcgtgatgaacgacatcggctttttcaaccgccgcaacggcgagcgtctgatgcgccgtatgcagagcctgttcggacgcgccaacacgcaaaccgaagacatcgatatcctgcgcggttttttcaataccgtcagccatcgtatccataaaaaagactga

SEQ ID NO: 44575 - DNA, 1227 bp, Neisseria meningitidis
atgaataccgataacctgcacgacatcttggacgaaatggttcaagtgtattctcaaaaaaaacaaagccgatccgaaaccccggccgaaatcggcgcacacttccacccgctgctcgaccgcctgtgcgaaaccgcagaagcacaaaacgcgtccgacatccttatcagcaaaggattcccgccctcgttgaaaatcaacagcgcattaaccccgcagccgcaaaaggcgctgacgggcgaggaaaccgccgccatcgccgcatcgacgatgaacgccgaacaatcggaaatattccggcgcgacggcgaaatcaactactccgtccagtcgcgcagcggcacgcgctaccgcgccaacgcctaccacagccaaggcagcgcaggtttggttttgcggcgcatcaaccacgtcatcccgcaaatgcaggaattgggcctgcccgaaaaactcaaagacctcgccgtcgcaccgcgcgggctgctgattatcgtcgggcctaccggttcgggcaaatccaccacgatggcgactatgctcgaacaccgcaacaaaaccctgcccagccatatcgttaccatcgaagacccgattgagtttatctacaaaccgcgccgctgcatctttacccagcgcgaaatcggcgtcgacaccataaactggcagacggcggtacaaaacgctatgcgccagtcccccgacgtggtctgcatcggcgaagtccgcagcagggaaagtatggaatacgcgatgcagctcgcccaaaccggccacctgtgcatttttacgctccacgccaacaccgcgccgcagtcgctcgaacgcatactcaacttctaccccaaagaacagcacaaccaaatactgatcgacatcgccctcaatctgaccggcatcatctgccaacgcctcgccctcaaacaagacaaaacgggcaggacggcggttgtcgacttgctcatcaacacgcccgccatccaagacttcatcctgaagggcgacctgatgaacatcagtaaaatcatggaaaccgccaaaaccgacggaatgcagacgatggatcaaaaccttttcgaactgtaccgtcacggcatcatcagttacgaagaagccctgcgccagtccgtttccgccaacaacctgcgattgcacatccaactgcacaaagaaggcaaaacgcccgaactcctttacgacagggtcaacggtctcaacctcatttcctga

SEQ ID NO: 44576 - DNA, 150 bp, Neisseria meningitidis
atgaagttcggggatagtaagaatttctcaaggttagagaatctcaaatatccgtgcgaagttatggtaacggttgaaatgacttcgactggtaaaggcatggttccttcattaattgattttcaggtggcagaaaagccgaaaggttga

SEQ ID NO: 44577 - DNA, 360 bp, Neisseria meningitidis
atgtattttgttgaccgcaccgccgtcgtcctcaagccgaccgcgcgctttttggaatggctcaaaagcaccgacgaaaatatgcccgacctgaccatagagcagcttcgtgccaactgttccgtcttcctcgttccgcagttcgacgaaccggaagccgtcgtttcctacttcgacgaacgctaccgccagattttcgaggcggagctggcaggttgggacatcaataaggataaatggccgcaagatatggggctgaaggcgttttgggaatttttcgacatcgaaatccacgatatggtgttggacatggaagaagcggaattgaacattacccccgtgttcgacaacatgatgtaa

SEQ ID NO: 44578 - DNA, 819 bp, Neisseria meningitidis; identical to SEQ ID NO: 37573

SEQ ID NO: 44579 - DNA, 789 bp, Neisseria meningitidis
atgaatccgcaggacaaatgctggcaggttcaccgccatctcgccgaatatgccgaccaacgcctgacactcgtccgcaacgcgcccaagtatatcctgcttgccggtgcggatgcggacatcagccgcagcctgctggcgaaacgctatccgcaggcggtatttgaagaatacgattcccgtgcggactttttggcggctgccgctgccgcccgcaaaggcggtttttggcaaaggtttacgggtaagggcgtggtgcaacactgccaatccccgatcgcgccgctgcccgaagcgtgtgctgatatgttgtggtcgaatctcggactgttggcggcggaacaaatccttcctgtgctgcacaactgggcgtgcgccttgaagacggacgggctgctgttttttacctgcttcgggcgcgacacttttaccgaactgaaatgccgtctgaaagaaaacggcattgaaagccgcagcgtgatgtttcccgatatgcacgacttgggcgatatgcttgctgaaaacggcttttacgaccccgttaccgatacggcgaagctggtgttggattacaaaaaggcggaaacgttttgggcggatatggacacgctgggcgtttggcgggcgatggcgtggaacgatgaaaacgccgcgcgttcgtgtgtcgggacaatatttgagcgggaaggcggtttgggcattacgctggaaacggtgtacggacacgccgtgaaaaaactgatgctgccgcaaggggagaacgtggtgcagttttttccgaagagatga

SEQ ID NO: 44580 - DNA, 624 bp, Neisseria meningitidis
atgaaaatcatacataaaggtttggttgaatatctgccgacttttgaggcaatgaaaactttcaacgccaaccgtaccgcctctaccgaagatgaattgtgggtggtagaacatccccccgtgttcacacaggggctggccggcaaacccgaacacctgctgatccgcgacgacattcccatcgtccaaatcgaccggggcgggcagattacctatcacggacccgggcaattggtcgtttatacgatgattgatttcaaacggcgcaaaaccagcgtccgcaacattgtttccgcgcttgaaaacagcatcatcgccacattggcggaatacggcatcgaagcggcggcagatcccaaacgccccggcgtttacgtcggcgaacgcaaaatcgcctcactggggctgcgtatcaaaggaggttccgtctatcacggccttgcgctcaacgtcaatatggatttaagcccgtttacccacatcaacccctgcggctacgccggtatggaaatgacgcaaatcgcggattttgtccaaccctgccccacgccggacgaagtcgccgccaaacttaccgcacaccttgaaacacaattcacaccgaaagcagataacaatgagtga

SEQ ID NO: 44581 - DNA, 393 bp, Neisseria meningitidis
atgcccacttccaccaaaccctacatcctccgcgccctctgcgaatggtgcagcgacaacagcctcacaccgcacatccttgtctgggtcaacgaacacacgcgcgttcctatgcagtatgtccgcgacaacgaaattatgctcaacatcggcgcgaccgccacgcaaaaccttcaaatcgacaacgattggatcagtttttccgcccgcttcggcggacaggcgcacgatatatggatacctgtcggacacgtcctcagccttttcgcacgggagaccggagaaggtatggggtttgaattggaagcgtatcgccccgacacgccgcctgaaaacacctctgccgaaaccgcgccccggcccgccaaaaaaggcttgaaattggtcaaataa

SEQ ID NO: 44582 - DNA, 2043 bp, Neisseria meningitidis
atgatgtcgcccgaaacccagaaacagctcaaaatcaccgatgtttccgccaagaagctcgacaaactcaacctccataccgcgtgggatttggtgttgcacctgccgctgcgttacgaggacgagacgcacattatgccgattaaggacgcgccgattggcgtgccgtgccaggtcgagggcgaggttatccatcaggaagtaacgttcaaaccgcgcaagcagttgattgtccaaatcgccgacggttccggcagcgtcctttttctgcgcttcatccacttttacgccagccatcagaaacagacggcggtcggcaaacgcatccgcgccgtgggcgaaatcaaacacggcttttacggcgacgagatgattcatcccaaaatccgcgatgccgagggcggcggtttggcggaaagcctcacgccggtttacccgaccgtaaacggtttgaaccagcccactttgcgccgtattattcagacggcgttggacgttacgccgctgcacgacacgctgcccgatgccctgctgtgccgtctgaagctgccacacctcgccgaaagcctgcgtcttttgcattcgccgccgccgagtttcacgattcatcagctttcagacggcacgctgcctgcatggcaacggctcaaattcgatgaacttttggcgcaacagctttcgatgcgcttggcgcgacagaagcgtatcggcggcacggcggcggcattgggcggcgacggcacattgacccaagccctgcgccaagccctgccgtttgccctgaccgatgcgcaagaaaaagttgtttccgaaatctgccgcgatatggcgcaaacctacccgatgcaccgcctgctgcagggcgatgtcggcagcggcaaaaccattgtcgccgccttgtccgcgctgaccgccatcgaatccggtgcgcaggtggctgtaatggcgcccactgaaatccttgccgaacaacattttattaaatttaaacaatggctcgaacctttgggcattgaagttgtccgcctttttggcagtttgcgtaaaaaagccaaagacgaagccaaagccaaactcgccgacggcagcgtcaaaatcgccgtcggcacgcacgccctgttttcagacggcgtggcgtttcacaatttgggcttgaccattgtggacgaacagcaccgtttcggcgttgcccaacgcctcgccctcaaaaacaaagggcgcgaagtccatcagctgatgatgtccgccacgcccatcccgcgcacgcttgcgatgagttttttcgccgatttggacgtgtccgtcatcgacgaattgccgcccgggcgcacaccgattaaaacgcgcctcgtcaacaacgtccgccgcgccgaagtcgaaggcttcgtcctcggcacttgccgaaaagggcggcaggcgtattgggtctgcccattgattgaagagagcgaaaccctgcaactgcaaactgctaccgaaaccctagagcagcttcagacggccttacccgaactcaacatcggcttggtacacgggcgcatgaaagccgccgaaaaagccgaagtcatggctcagtttgccgcaggccgtctgaacgtcttggtcgccaccaccgtcatcgaagtcggcgtagatgtgcccaacgccgccctgatggtgatcgaacacgccgagcgcatgggcttggcgcagctgcaccaattacgcggtcgggtagggcgcggcgcggcagaaagcgtgtgcgttctcctgtttgccgagccattgagcgaactcgccaaagcgcggttgaaagtcatctacgaacacaccgacggctttgaaatcgcccgccaagacctcaacatccgcggccccggcgaatttctcggcgcgcgtcaaagcggcgtgcctatgctgcgtttcgccaagctcgaagaagacttacaccttttggaacaagcgcgcgaaatcgccccgatactgattgagcaaaaccccgaaatcgtcgaagcgcatttggcaagatggctttccggcagggaagggtatttgggcgtgtga

SEQ ID NO: 44583 - DNA, 135 bp, Neisseria meningitidis
atgaaacgcacttatcaaccttccgttaccaaacgcaaacgcacccacggcttcctggtgcgctccaaaacacgcggcggccgcgcagtattggctgcacgccgcgccaaaggccgcaaacgcctggcggtataa

SEQ ID NO: 44584 - DNA, 399 bp, Neisseria meningitidis
  misc_feature 8, 9, 10, 11, 12: 'n' is a, c, g or t
gtgtgtgnnnnncacgccgcttcttctctcggcttatccgccatttacgatttcaaactcaacgataaattcaaaccctatatcggcgcgcgcgtcgcctacggacacgttaaacatcaggttcattcagtggaaacaaaaaccacgactgttacctctaaaccgacggcaacctctccacagggaggccctattatacaaactgatcccagcaaacctccctatcacgaaagccacagcatcagcagcttgggtcttggtgtcatcgccggtgtcggtttcgacatcacgcccaagctgaccttggacaccggataccgctaccacaactggggacgcttggaaaacacccgcttcaaaacccacgaagtctcattgggcatgcgctaccacttctga

SEQ ID NO: 44585 - DNA, 561 bp, Neisseria meningitidis; identical to SEQ ID NO: 38271

SEQ ID NO: 44586 - DNA, 1107 bp, Neisseria meningitidis
atgtctctttatccgatttacaatttttccgccggccctgccgtattgcccgaagccgtgttggaaacggcgcggcaggaaatgttggactacaacggtacgggttttcctgtgatggcaatgagccaccgttcggaaatgtttttgagcatcctgcatcatgcggaacaggatttgaggcagcttttgaaagtgcctgacaactataagatattgtttctgcagggcggagcaacaacccaatttaatatggcagccatgaatctggcacacggtttccgcactgccgacgcggtggtaacgggcaactggagccgtatcgcttatgaacagatgagccgtttgaccgatacggaaatccgtttggcggcgcatggcggcgagcagttcgactatctcgacctgccgcctgtggaaacgtgggatgttgcacccgattcggcgtttgtccattttgccgtcaatgaaacggtcaacgggctgcaataccgtgaagtgccgcgcctttcagaaggcatgccgccgctggtgtgcgatatgtccagcgagattttgtcgcgcgagtttgatgttgccgactacggactgatttacgcaggcgcacagaaaaacatcgggccggcaggggttacggtggtgattgtgcgtgaggatttgctcgagcgttgtccgaacgatattcccgatgtgttcaactaccgttcgcatttgaaccgcgaaggtatgtacaacacgccgtcaacttacgcgatttatatgtcggggctggtgttccgctggctgcaggcgcagggcggtgtgaaaaaaattgaagcggtcaatcggctgaaggcgcaaaccttgtatgagacgatagacggcagcggcggtttctatatcaaccgtatccgtccgaatgcgcgttctaaaatgaatgtcgtgttccaaacgggggatgaggagcttgaccgccgttttgtgctggaagccgaattgcagggcttgtgcctgcttaagggctataaaaccgtcggcggtatgcgtgccagcatttataatgcgatgccgcttgaaggcgtgcgggctttggcggattttatgcgcgatttccaacggcgttacggttga

SEQ ID NO: 44587 - DNA, 1227 bp, Neisseria meningitidis
atgacctttttacaacgtttgcaaggtttggcagacaataaaatctgtgcgtttgcatggttcgtcgtccgccgctttgatgaagaacgcgtaccgcaggcggcggcaagcatgacgtttacgacgctgctggcactcgtccccgtgctgaccgtgatggtggcggtcgcttcgattttccccgtgttcgaccgctggtcggattcgttcgtctccttcgtcaaccaaaccattgtgccgcagggcgcggacatggtgttcgactatatcaatgcgttccgcgagcaggcgaaccggctgacggcaatcggcagcgtgatgctggtcgttacctcgctgatgctgattcggacgatagacaatacgttcaaccgcatctggcgggtcaattcccagcgtccgtggatgatgcagtttctcgtctattgggctttactgacgttcgggccgctgtctttgggcgtgggcatttcctttatggtcggctcggtacaggatgccgcgcttgcctcaggtgcgccgcagtggtcgggcgcgttgcgaacggcggcgacgctgaccttcatgacgcttttgctgtgggggctgtaccgcttcgtgccaaaccgcttcgttcccgcgcggcaggcgtttgtcggggctttggcaacagcgttctgtctggaaaccgcacgttccctcttcacttggtatatgggcaacttcgacggctaccgctcgatttacggcgcgtttgccgccgtgccgttttttctgttgtggctgaacctgttgtggacgctggtcttgggcggcgcggtgctgacttcttcactctcctactggcggggagaagcgttccgcaggggcttcgactcgcgcggacggttcgacgacgtgttgaaaatcctgctgcttctggatgcggcgcaaaaaaaaggcaaagccttgcctgttcaggagttcagacggcatatcaatatgggctacgacgagttgggcgagcttttggaaaagctggcgcggcacggctacatctattccggcagacagggttgggtgttgaaaacgggggcggattcgattgagttgaacgaactcttcaagctcttcgtttaccgtccgttgcctgtggaaagggatcatgtgaaccaagctgtcgatgcggtaatgacaccgtgtttgcagactttgaacatgacgctggcggagtttgacgctcaggcgaaaaaacagcagcaatcttga

SEQ ID NO: 44588 - DNA, 201 bp, Neisseria meningitidis; identical to SEQ ID NO: 39739

SEQ ID NO: 44589 - DNA, 1251 bp, Neisseria meningitidis
atgaccaaactgacacgaagacaaatcatccgccgcaccgccggcacactgttcgccctaagccccatcgcatccgccgttgccaaaacggtacgcgccccgcagtttaccgccgtacggatatggccgtcgcacacctacacccgcctgacgctggaaagcacaaccgcgctcaaataccaacacttcacgctcgacaacccgggcaggttggtcgtcgacatacaaaacgcgaacatcaataccgtattgcacggactgtctcagaaggttatggcggacgacccctttatccgcaatatacgcgccggtcagaacacgcccgacaccgtccgcctcgtcatcgatttgaaacagccttcctacgcgcaagttttttccctcccccccgtcggcggctttaaaaaccgcctcgtcgtcgatctctatccgcaagggatggatcccgacgatccgatgatggcgctgcttaacggcagcctgaacaaaacccgtcgcggctcccctgaagccgacctcgctcaaaacactcccgcacaaaccgaacgcggcaaaaacgggcgcagacccgtcattatgatcgaccccggacacggcggcgaagaccccggcgccgtcagcccgggcggtttgcaggaaaaacacgtcgtcctctccatcgcccgcgaaaccaaaaaacaattggaagccttgggttacaacgtctttatgacgcgcaacgaagacgtgttcatcccattgggcgtgcgtgtcgccaaagggcgagcacggcgggcggacgtattcgtctccatccacgccgacgctttcaccagcccctccgcgcgcggaacgggggtctatatgctgaacaccaaaggcgcgaccagctccgccgccaaattcttggaacagacgcaaaacaatgccgacgcggtcggcggcgtaccgaccagcggcaaccgcaacgtcgataccgccctgctcgatatgacccaaaccgccacgctgcgcgacagccgcaaactcggcaaactggtgcttgaagaattgggcaggctcaaccacttgcacaaaggcagggtggacgaagccaatttcgccgttttgcgcgcacccgatatgccgtctatcctggtcgaaaccgccttcctgtccaaccctgctgaagagaagttgctgggcagcgaatccttccgccggcagtgcgcccaatccattgcctcgggtgtccaacgctacatcaatacatccgtattgaagcggggttga

SEQ ID NO: 44590 - DNA, 1146 bp, Neisseria meningitidis
atgaccgaaacccaatccctagaactcgccaaagaattgatttcccgcccatccgttacccccgacgaccaaaattgccaaaaactccttgccgaacgcctgcacaaaatcggttttgcggctgaagaactccatttcggcgacaccaaaaacatctggttgcgacgcggcacgaaagctcccgtcgtctgttttgcagggcataccgacgttgtaccgacaggccctgtcgaaaaatgggattcgcccccgttcgagccggccgagcgcgacggaagattatacgggcgcggtgcggcggacatgaaaaccagcatcgcctgtttcgttaccgcctgcgaacgctttgttgccgaacaccccgatcatcaaggcagcatcgcgctcctgattacttccgacgaagagggcgacgcgctggacggcacgaccaaagtcgtcgatgtgttgaaagcgcgcgacgagcttatcgactactgcatcgtcggcgaaccgacagccgtggacaaattgggcgatatgattaaaaacggccggcgcggctcgctgtcgggcaacctgaccgtcaaaggcaagcaaggccatattgcctatccgcatttggcaatcaatcccgtgcatacttttgccccggccttgttagagctgacgcaggaagtctgggacgaaggcaacaaatacttcccgccgaccagctttcaaatttccaatatcaacggcggtacaggcgcgaccaatgtcattccgggcgagctgagcgtcaaattcaatttccgcttctccaccgagtccaccgaagcagggctgaaacaacgcgttcacgccattttggacaaacacggcgtgcaatacgatttacagtggtcgtgttcggggcagccctttctgacccaagcgggcaaactgaccgacgtggcacgcgcagccattgccgaaacctgcggcattgaggccgaattgtccaccaccggcggcacttcggacggacgcttcatcaaagccattgcaaaagaactcatcgaattaggcccgtccaatgcgaccatccaccaaatcaacgaaaacgtgcggctggacgatattccgaagctgtcggcggtgtatgaggggatattggcgcgcttgttggctggaaatgccgtctga

SEQ ID NO: 44591 - DNA, 1500 bp, Neisseria meningitidis
gtgttcaaaaaataccaatacctcgctttggcagcactgtgtgccgcctcgctggcaggctgcgacaaagccggcagctttttcggtgcggacaaaaaagaagcatctttcgtagaacgcatcgaacacaccaaagacgacggcagcgtcagtatgctgctgcccgactttgtccaactggttcaaagcgaaggcccggcagtcgtcaatattcaggcagcccccgccccgcgcacccaaaacggcagcagcaatgccgaaaccgattccgacccgcttgccgacagcgacccgttctacgaatttttcaaacgcctcgtcccgaacatgcccgaaatcccccaagaagaagcagatgacggcggattgaacttcggttcgggcttcatcatcagcaaagacggctatattctgaccaatacgcacgtcgttaccggcatgggcagtatcaaagtcctgctcaacgacaagcgcgaatataccgccaaactcatcggttcggatgtccaatccgatgtcgcccttctgaaaatcgacgcaacggaagagctgcccgtcgtcaaaatcggcaatcccaaagatttgaaaccaggcgaatgggtcgctgccatcggcgcgcccttcggcttcgacaacagcgtgaccgccggcatcgtgtccgccaaaggcagaagcctgcccaacgaaagctacacacctttcatccaaaccgacgttgccatcaatccgggcaactccggcggcccgctgttcaacttaaaaggacaggtcgtcggcatcaactcgcaaatatacagccgcagcggcggattcatgggcatttccttcgccatcccgattgacgttgccatgaatgtcgccgaacagctgaaaaacaccggcaaagtccaacgcggacaactgggcgtgattattcaagaagtatcctacggtttggcacaatcgttcggtttggacaaagccggcggcgcactgattgccaaaatcctgcccggcagccccgcagaacgtgccggcctgcaggagggcgacatcgtcctcagcctcgacggcggagaaatacgttcttccggcgaccttcccgttatggtcggcgccattacgccgggaaaagaagtcagcctcggcgtatggcgcaaaggcgaagaaatcacaatcaaagtcaagctgggcaacgccgccgagcatatcggcgcatcatccaaaacagatgaagccccctacaccgaacagcaatccggtacgttctcggtcgaatccgcaggcattacccttcagacacataccgacagcagcggcggacacctcgtcgtcgtacgggtttccgacgcggcagaacgcgcaggcttgaggcgcggcgacgaaattcttgccgtcgggcaagtccccgtcaatgacgaagccggtttccgcaaagctatggacaaggcaggcaaaaacgtccccctgctgatcatgcgccgtggcaacacgctgtttatcgcattaaacctgcaataa

SEQ ID NO: 44592 - DNA, 219 bp, Neisseria meningitidis; identical to SEQ ID NO: 37472

SEQ ID NO: 44593 - DNA, 534 bp, Neisseria meningitidis; identical to SEQ ID NO: 39728

SEQ ID NO: 44594 - DNA, 2793 bp, Neisseria meningitidis
atgtccaacagacctacactcctcctcgttgacggctcgtcctacctctaccgtgcgtatcacgcgatggggcaaaacctgaccgcccccgacggcgcgccgacgggtgcgctgtatggcgtattgaatatgttgcgccgtttgcggtcggaatatccgcacgattattgcgcggtggtttttgatgcgaaaggcaaaaatttccgccatcaaatgtttgaagaatacaaggcgacgcgcccgccgatgcccgacgatttgcgcccgcaggcggaagcactgccggatttagtgcgcctgacaggctggccggtattggtgattgggcaggtggaggcggacgatgtgatcggcacgctggcgaaacagggggcggaacatggtttgcgagtcattgtttcgaccggcgataaggacatggcgcagttggtggatgagcgcgttacgctggtgaacacgatgagcggagaaacgctggatattgaaggcgtgaaggcaaaattcggcgtgcgccccgaccaaatccgcgattatctcgcgctgatgggcgacaaggtggacaacgtgccgggcgtggaaaaatgtggcccgaaaacggcagtgaagtggctggaagcctacggctcgttgcaaggcgtgatggaacacgcttcggaaatcaagggcaaagtgggcgagaatctgcgtgccgccctgccgcgcctgccgctgtcgtatgatttggtaacgattaaaaccgatgtggacttgcacgccgagctttcagacggcatcgaaagcctgcgccgtaccgcgccgaaatgggcgcaactggttgtcgatttcaaacgctggggcttccgcacctggctgaaagaagcggaatcaaacatgaataccggctcgaccgatgatgtgttcggcagcgacagcatcggtgagcaggcggctttgaatgcggaaatgccgtctgaaaaacaagctgaaaaagccaccgcccccgaaaggctggattatcaagccgttaccaccgaagcgcagtttgccgctttgttggacaaactgtcgcgggcgaacacaatcggcatcgatacggaaaccacgtcattagacgcgatgaacgcctcgctggtcggcatcagcatcgctttccaagcaggcgaagcggtttacatccccgtaggacacagcctgaccgcagcgcctgaacagcttgatttacaagacgtattaggccgtctgaaaccgcatttgggaaaccccgccctaaaaaaaatcgggcaaaacctcaaatacgaccaacacgttttcgccaactacggcatcgccctgaacggcattgccggcgacgccatgctcgcttcctacatcatcgagagccatctcggacacggcttggacgaattgtccgaacgctggctcggcttggaaaccattacctacgaatcgctgtgcggcaaaggcgcgaagcaaatcggttttgccgatgtcgccatcgggcaggcgaccgaatacgccgcccaagacgccgatttcgccctgcgcctcgaagcgcacctgcgcgcgcaaatggacgaaaaacagcttgaaatgtatgaaaaaatggagctgcccgtcgcgcaggtattgtttgaaatggaacgcaacggcgtgcaaatcgaccgcgccgaactcgcccgccaaagcgcggaactcggcgccgagctgatgaagctcgaacaacaagcctatgccgccgcagaccagccgttcaacctcaattcgcccaaacagctgcaagaaatcctgttcgacaaaatgggcatccccaccaaaggcctgaaaaaaaccgccaaaggcggcatttccaccaacgaagccgtgctcgaacagctcgcgcccgactaccccctgcctaaaatcatcctgcaaaaccgcagcctggcgaagctcaaatccacctacaccgacaaactacccgaaatgatttcccccaaggacggccgcgtgcataccacctacgcccaagccgtcgccattaccggccgcctcgccagcaacaaccccaacctgcaaaacatccccatccgcaccgccgaaggccgccgcgtgcgccgcgcctttaccgcaccgcaaggcagcgtcatcgtttccgccgactattcccaaatcgagctgcgcattatggcgcacctctccggcgacaaaaccctgattgccgcgttccaaaacggcgaagacgtacaccgccgcaccgccgccgaagtgttcggcactgcgcccgaaaacgtctcgtccgagcaacgccgctacgccaaaaccatcaacttcggcttaatttacggtatggggcaatacggtttggcaaaatcattgggcatcgacaacctttccgccaaaaactttatcgaccgctacttcgcccgctaccccggcgtcgccgaatacatgcagcgcaccaaagaacaagccgccgcccaaggctacgtcgaaaccctgttcggcagaaggctctatttgcccgacatccgcaacaaaaacgccaacgcccgcgcaggagccgagcgcgccgccatcaatgcccccatgcaaggcaccgcgtccgacctcatcaaacgcgccatgatagacgtgcgaaactgtctttcagacggcatcggcagcaaactggtcatgcaggtgcatgacgaactggtgctggaagtcgttgaaaccgaactggattttgtcaaagaaaaactgccgcagattatggcgaaagtggacggcggattattggatgtaccgctggtggctgaggttggcgtaggggagaattgggaagaggcacattga

SEQ ID NO: 44595 - DNA, 834 bp, Neisseria meningitidis; identical to SEQ ID NO: 39780

SEQ ID NO: 44596 - DNA, 1914 bp, Neisseria meningitidis
atgttgaacattaccttgccggacggctcagtccgccaatacgaatcccccgttaccgtggctcaaattgctgcgtctatcggtgtcggtttggcgagggcggcggtggcaggcagggtaaacggcaaattggtcgatgcgtgcgacccgattgttgaaaattctgctgttcaaatcattactccgaaagatcaggaaggcatcgaaatcatccgccattcctgcgcccatcttgtcgggcatgccgtcaagcaactctatcctaatgcaaaaatggttatcggccccgtcattgaagagggcttttattacgacatcgccacggaaaaaccgtttacaccggaagatgttgccgccattgaagcgcgtatgaaagaattgattgcccaagactatgatgtggtcaaaatcatgactccgcgtgcggaggcgattaaaatttttcaagagcgcggcgaagaatacaaactgcgcctgattgacgatatgcccgaagtggaagcgatggggatgtatcatcatcaggaatatgtcgatatgtgccgcggaccgcacgttccgaatacccgtttcctgaaaaacttcaaactgaccaagttggcgggcgcatactggcgcggcgacagcaataatgaaatgctgcaacgcatatacggtacggcttgggcgacaaaagacgaattaaaagcctatattcaacgtatcgaagaagccgaaaagcgcgaccaccgcaaacttggcaagcaattggatctgttccatctgcaagacgaagcgccgggcatggtgttttggcatcctaaaggctgggctttgtggcaagtgattgaacagcatatgcgtaaagagctgaacgccgccggttataaagaggtcaaaacgcctcaaattatggataaaaccttttgggaaaaatccggccattgggacaactacaaagacaatatgttcgtgaccagttcagaaaaacgcgaatacgcggtgaaaccgatgaactgtccgggtcatgtgcaaatttttaataacggtttgcgctcatatcgcgatttgccgatgcgtttggccgagttcggttcttgccaccgcaatgaaccaagcggtgcattgcatggtctgatgcgtgttcgcggttttgtgcaagatgatgcgcatattttctgtaccgaagaccaaatcgtcagcgaagcgcgcgcattcaatgaattgttggttcgcatctacaaacagttcggtttccatgatgttgctgtgaagttgtccctccgccctgaacaacgtgcaggttctgacgaagtttgggataaggccgaacaaggcttgcgtgatgcattgaccgcttgtggcgtagagtgggaagagttgcctggcgaaggtgcgttttacgggcctaaaatcgaatatcacgtcaaagatgccttgggtcgttcttggcaatgcggtacattgcaactagatttcgtcttaccggaacgcttggatgcagaatatgtaaccgaaaacaatgaccgcgctcgccctgtaatgttgcaccgcgccattttgggttctttggagcggtttatcggcattctgattgagaaccatgcaggctctttcccgttatggctggcgccggttcaaatggtgattatgaatatcaccgaaaatcaagcggattactgccgtgaagtggctgccaaattgcaggcggcaggattccgcgccgagttggatttgcgtaacgaaaaaatcggttacaaaatccgcgacaacagccaataccgttttccttatcaaatcgttgtcggcgataaagaaaagcaggaaaacaaagtggcggtacgccgcaaagcagaagatttgggttctttggatttggatgatttcattgcgcaattgcagcaagaaatcactgatgccctcgtcaatcattaa

SEQ ID NO: 44597 - DNA, 654 bp, Neisseria meningitidis
gtgtttggttattttgtttttctatttgatttttttgcgtttttgttttttgcaaacgtctttcttgctgtaaatttattatttttagaaaaaaacataaaaaacaaattattgtttttattgccgatttctattattatatggatggtaattcatattagtatgataaatataaaattttataaatttgagcatcaaataaaggaacaaaatatatcctcgattactggggtgataaaaccacatgatagttataattatgtttatgactcaaatggatatgctaaattaaaagataatcatagatatggtagggtaattagagaaacaccttatattgatgtagttgcatctgatgttaaaaataaatccataagattaagcttggtttgtggtattcattcatatgctccatgtgccaattttataaaatttgcaaaaaaacctgttaaaatttatttttataatcaacctcaaggagattttatagataatgtaatatttgaaattaatgatggaaacaaaagtttgtacttgttagataagtataaaacattttttcttattgaaaacagtgtttgtatcgtattaattattttatatttaaaatttaatttgcttttatataggacttacttcaatgagttggaatag

SEQ ID NO: 44598 - DNA, 282 bp, Neisseria meningitidis; identical to SEQ ID NO: 39486

SEQ ID NO: 44599 - DNA, 294 bp, Neisseria meningitidis; identical to SEQ ID NO: 36355

SEQ ID NO: 44600 - DNA, 807 bp, Neisseria meningitidis
atgaaaagctcttttgtgcaaacgcttaccatcgccggttcggattcgggcggcggtgcgggcattcaggcggatttgaaaacgtttcagatgcgcggcgtgttcggaacgtgcgtcatcaccgccgttaccgcgcaaaataccttgggcgtgtcggcggttcatctcgtcccgaccgaaaccatcaccgcacaaatccaagcaatcagggaagactttgacatccgcgcctacaaaataggaatgctcggcacggcggaaatcatcgaatgcgttgccgacaagctgaaacactgcgacttcggcaggcgcgtactcgaccctgtgatgattgccaaaggcggtgcgccgctgttgcaggattccgccgttgcggcactgacgcgcctgctgcttcccgatacggatgtattgacccccaacctgcccgaggcggaagccctgaccggcgtgcatatcgaaaaccgtaaagatgcggaacgtgcggcaaaaatcctgcttgattacggtgtcaaaaatgtcgttatcaaaggcggacatttgaacggcagcacaagcggacgctgcacggattggctgtttacgcaaaatgaaacgctggaattggacagcccgcgctttccaaccgcccacacgcacggcacgggctgcacgttttccgcctgcatcaccgccgagttggcaaaaggctcggacgtttgcaaagccgtacggactgccaagtcctacattacggcggcaatctcaaaccctttggaaatcggcgcgggacacggcccggtcaatcattgggcgtatcgggactag

SEQ ID NO: 44601 - DNA, 2307 bp, Neisseria meningitidis
atggcgaaaaacctattaatcgtcgaatccccgtccaaagccaaaaccctgaaaaaatatttgggcggcgattttgaaatccttgcatcctacggacacgtccgcgacctcgtccccaaaagcggcgcggtcgatcccgacaacggctttgcgatgaaataccaactcatcagccgcaacggcaaacacgtcgatgccatcgtcgccggtgccaaagaagctgaaaacatctacctcgccaccgacccggatagggaaggcgaagccatttcctggcatcttttggaaatcctcaaatccaaacgcggcttgaaaaacatcaagccgcagcgtgtcgtgttccacgaaatcaccaaaaacgccgtgctcgatgccgttgcccatccgcgcgaaatcgaaatggacttggtcgatgcgcaacaagcccgccgtgctttggactatttggtcggctttaacctttcgccattgttatggaaaaaaatccgccgaggtttgagcgcggggcgtgtgcaaagccctgctttgcgcctgatttgtgagcgcgaaaacgagatccgcgcgtttgaagcgcaggaatattggacggtacatcttgacagtcacaaaggacgcagcaagttcaccgccaaactcgcccaatacaacggcgcgaaactcgaacaattcgacctgccgaacgaagccgcgcaagccgacgtgttgaaagaactcgaaggcaaagaggccgtcgttaccgccattgaaaagaaaaagcgcagccgcaatcctgccgcgccgttcaccacttctaccatgcagcaggatgccgtgcgcaaactcggcttcaccaccgaccgcaccatgcgtaccgcccaacagctttatgaaggtatagacgtagggcagggcgcgatcggtctgattacctatatgcgtactgacagcgtgaatttggcggatgaagcgttaaccgaaatccgccattacatcgaaaacaaaatcggcaaagaatatctgccgagtgccgccaaacaatacaaaaccaaatccaaaaacgcccaagaagcgcacgaagccatccgtccgacttccgtgtaccgcacgcccgaaagcgtcaaacccttcctgagcgcagaccagttcaaactctatcaaatgatttggcagcgtaccgtcgcctgtcagatgacgcctgccaaattcgaccaaaccaccgtcgatattaccgtcggcaaaggcgtattccgcgtaaccggacaagtgcaaaccttcgcaggcttcttgagcgtttatgaagaaagcagcgacgatgaagaaggcgaagacagcaaaaaactgcccgaaatgagcgaaggcgataaattgcccgtggacaaactctacggcgaacaacactttaccactccgccgccacgctacaacgaagccacgctggttaaagccctcgaagaatacggcatcggccgcccctcgacctacgccagcatcatctccacgctcaaagaccgcgaatacgttacccttgagcaaaaacgcttcatgcccaccgacacaggcgacatcgtcaacaaattcctgaccgaacacttcgcccaatacgtcgattaccactttaccgccaaactcgaagaccagcttgacgaaatcgccggcggcaaacgccaatggattcccttgatggacaaattctggaaaccgttcatcaaacaagtggaagaaaaagaaggcatcgaacgcgccaaatttaccacgcaggaacttgatgaaacctgcccgaaatgcggcgaacacaaactgcaaatcaagttcggcaaaatgggccgtttcgttgcgtgtgccggctatcccgagtgcagctacacgcgcaatgtcaatgaaaccgccgaagaagccgcagagcgcatcgccaaagccgaagccgaacaggcagaactcgacggacgcgaatgtcctaaatgtggtggacggctggtgtacaaatacagccgtaccggcagtaaattcatcggttgcgccaactaccccaaatgcaaacacgtcgagccgctggaaaaaccgaaagataccggcgtccagtgtccgcaatgtaaaaaaggcaacctcgtcgagcgtaaatcccgctacggcaaactgttttacagttgcagcacctatcccgactgtaactacgccacatggaacccacccgttgcagaaagctgtccaaaatgcgcatggccggttttgaccatcaaaaccaccaaacgctggggtgtagaaaaagtctgcccacaaaaagaatgcggctggaaagaacagattgaaccgcccgcgccgaaggagtaa

SEQ ID NO: 44602 - DNA, 366 bp, Neisseria meningitidis
ttggactaccgcttcggaaggcagtaccgcttgttgaaaacggatgatttttcatccgtttttgcattcagaaaccgccgcagccgcgacctgctgcaagtttcgcgttcaaacggcaacgggctggaccatccccgcatcggtctggtggtcggcaaaaaaaccgccaaacgcgccaacgaacgaaattatatgaagcgcgtcatccgcgactggttcagattgaacaaaaaccggctgccgccgcaggatttcgtcgtgcgcgtccaccgtaaattcgacaggtctaccgcaaaacaggcaagggcggaactggcacaactcatgttcggcaaccccgcaaccggatgcaggaaacaggcatga

SEQ ID NO: 44603 - DNA, 450 bp, Neisseria meningitidis
atgaaaatcggaacaacttggcagacggcatccgctatgctggttttgcgtctgtttgccgcatatgaatttttggaatcgggtttgcaaaaatggaacggggagaattggttttctgaaatcaacgatcaattcccattcccgttcaacttgctgccggacgcgttaaactggaatctcgctatgtatgcggagcttttactgcccgtactgttgcttttgggtttggcaacgcgtctgtcggcattagggctgatggtcgttaccgccgtcgcttgggctgcggttcacgccggttcgggttacaatgtctgcgacaacggttataaaatggctttaatttatatcgtggtattaatcccgctgcttttccagggtgcgggcggatggtcgctggatacgctgctgaaaaaacggttttgcccccaatgccgtctgaagcaagattga

SEQ ID NO: 44604 - DNA, 561 bp, Neisseria meningitidis; identical to SEQ ID NO: 37658

SEQ ID NO: 44605 - DNA, 1269 bp, Neisseria meningitidis
gtgaaaccgctgcgcagactgacaaacctccttgccgcctgcgccgtagcggccgccgccttcggacagcccgccctcgcagcggacttggcgcaagacccgttcattaccgataacgcccaacggcagcactacgaacccggcggcaaataccacctcttcggcgacccgcgcggcagcgtctccgaccgcaccggtcaaatcaacgtcatccaagactatacccaccagatgggcaacctgctcatccaacaggcggcaatccaaggcaatcttggttacaccgtccgcttttccggacacggacacgaagaacacgcccccttcgacaaccacgccgccgacagcgcaagcaaagaacaaggcaacgttgacgaaggctttaccgtgtaccggctcaactgggaaggacacgaacatcatcccgccgatgcctacgacggcccgaagggcggcaattaccccaaacctacgggcgcacgagacgaatacacctatcacgtcaacggcacagcccgcagtatcaaactcaatccgaccgacacccgcagcatccggcaacgcatatccgacaactacaacaacctcggcagcaatttctccgaccgcgccgatgaagccaacagaaaaatgttcgagcacaatgccaagctcgaccgctggggcaacagcatggagtttatcaacggcgtcgccgccggcgcgctcaacccctttatcagcgcgggcgaagccgttgaccagtggatgcaggaaaaccccaatgccgccgaaaccgtcgaagccctggtcaacgtcctgccgtttgccaaagtcaaaaacctgacaaaggcggcaaaaccggggaaggctgcggttagtggggatttctcagactcctacaagcataacactgcttcaagattatctcagtctgtagatggagaaatgtttcaaacccgcaatgttgattttaaagcaaaatctattgggactaaaattcatgatggagctcaagggaaacatatttcaggacatagaaactacattgaaggtaagagtactttaaatcaaaacattaatcctcaagaattgttgaacggaatacattcaggtgcttatccagttatttctaaaggagcaagaggaaatcctgttgttgattttgggtatcctataggcagcgatgggaaatcaggattaagtaccaattttggtacgattcattcaggtaaaaatggagttcacattgttccggctaaccctaaaaccattaaaaaggtgcaatag

SEQ ID NO: 44606 - DNA, 855 bp, Neisseria meningitidis; identical to SEQ ID NO: 39178

SEQ ID NO: 44607 - DNA, 504 bp, Neisseria meningitidis
atggctttattgaatatcttgcaatatcccgacgagcgtctgcacacggtggcaaagcctgtcgaacaagtcgacgagcgcatccggaagctgattgccgatatgtttgaaacgatgtacgaatcgcgcggcatcgggctggcggcgacgcaggtcgatgtgcacgagcgcgtggtcgtgatggatttgaccgaagaccgcagcgaaccgcgcgtgttcatcaaccccgtcatcgttgaaaaagacggcgaaaccacttacgaagagggctgcctgtccgtgccgggcatttacgacaccgtaacccgcgccgaacgcgtcaaggtcgaggctttgaacgaaaaaggcgaaaagttcacgctggaggcggacggcttgctggcgatttgcgtgcagcacgagttggaccacctgatgggcatcgtgtttgtcgaacgcctgtcgcagctcaagcagggacgcatcaaaaccaagctgaaaaaacgtcagaaacatacgatttga

SEQ ID NO: 44608 - DNA, 1404 bp, Neisseria meningitidis
atgaaaaaaattcaagcggatgtcgtcgtaatcggcggcggtactgccggtatgggtgcgtttcgcaatgcccgtttacattcggataatgtttacctgattgaaaacaatgtgttcggcacaacctgcgcgcgcgtgggttgtatgccttccaaactcttgattgccgccgcagaagcgcgccaccacgcattgcataccgacccgttcggcgtgcatttggacaaagacagcatcgtcgtcaacggtgaagaggtcatgcagcgcgttaaatccgagcgtgaccgttttgtcggctttgtcgttgccgatgtggaagagtggcctgccgacaagcgcatcatgggttcggctaaatttatcgacgagcataccgtccaaatcgacgagcatactcaaattacggcaaaaagtttcgtgattgctaccggttcgcgtcccgtcatcctgccgcaatggcagtctttgggcaatcgtttgattatcaacgatgacgttttctcatgggatacgctgcctaagcgcgttgccgtgttcgggccgggtgttatcggtttggaactgggtcaggcattgcaccgtttgggcgtgaaagttgaaattttcggtttgggcggaatcatcggcggcatttccgaccccgtcgtttcagacgaggcgaaagccgtgttcggcgaagaattgaaactgcatctggatgctaaaaccgaggtcaaactagatgcagacggcaatgtagaagtccattgggagcaggacggcgaaaaaggcgtatttgttgccgaatatatgctggcagccgtgggccgccgtccgaacgttgacaatatcggtttggaaaacatcaatatcgaaaaagacgcgcgcggcgtacccgttgccgacccactgaccatgcagaccagcattccgcatatctttattgcgggcgacgcgtccaaccaactgcctctgctgcatgaagctgccgaccaaggcaagattgccggcgataacgcgggccgctacccgaatatcggcggcggtttgcggcgcagcaccatcggcgtggtgtttaccagtccgcaaatcggctttgtcggtctgaaatacgcgcaggttgccgcgcaataccaagccgacgaatttgtcatcggcgaagtatcgttcaaaaaccaaggccgcagccgcgtgatgctggtgaacaaaggccatatgcgcctgtatgccgaaaaagccaccggccgctttatcggcgcggaaatcgtaggccctgccgccgaacatttggcgcacttgctggcatgggcgcatcaaatgaagatgaccgttccgcaaatgctggatatgccgttctaccatcccgttatcgaggaaggtctgcgtaccgcgttgcgcgatgccgatgcgaaattgaaagcctga

SEQ ID NO: 44609 - DNA, 933 bp, Neisseria meningitidis; identical to SEQ ID NO: 36892

SEQ ID NO: 44610 - DNA, 486 bp, Neisseria meningitidis
atggacgcgctgcacaccatcgcccgaaacctgacgaaaaaacgtcaaaccgtaagctgtgccgaatcctgtacgggcggaatgcttgccgccgcattcacaagcgttgcaggcagttcgcaatggttcgatcaaagttttgtaacatacagcaacaaagccaaagaagaccgcttgggcgtgttgcccgaaaccctgctcgaacacggcgcggtcagccgccaaaccgtctatgagatggcgcgcggcgcgaaagccgtggcgcaggcggattacgccgtcggtatttccggcatcgccggaccgggcggcggcagcgaaagcaaacccgtcggcacggtttggttcgggtttgcctttccgggcggaagttgcgaagcaatgcgccgttttgacggcaaccgcgaatccgtccgcgcgcaggcggtcgccttcgcgttggaacggttggcggggctgattgaaaacggcggcgatgccgtctaa

SEQ ID NO: 44611 - DNA, 324 bp, Neisseria meningitidis; identical to SEQ ID NO: 37053

SEQ ID NO: 44612 - DNA, 918 bp, Neisseria meningitidis
atggaaaaagcagaacatttgaacagcagccggttcgtcaatctagtcaaaagcggcggcggcagctatgtggagggcagctaccgtttcgatactttgtccaacggcatttccatccacggcggcacagtaacggcacggtgtgatttttgcagcagccgcctcgccgaaccttatgtgtcgttcgtgctcttgctggaaggcagtttggacttcggcatcaaccgctgccgcttccaaatcgatgcggacggcggcaagattgtcctaattgctgtcggggaagaagtcctgttcagccgctatctttaccgaggcggcaaaacggtcaaaatgaccattaaaggtatggaacaatggctgctgcgtccggaatacgcgcgtttcgcacccctgctttaccgcgaaccggtcaggatatgggatttgcccccgaacctgcgcggcttggcggcatcctgcctgaaagccgtcccaaaggggcatttgggcgaaacattgcgccgcgaggcggacgtgttgcggctgctgtcggacttgtgggacacggtttcagacggcatcgggccggcggcggggcaaacggcggaagcagacgctatgccgtctgaagacttcagccgcaccctgaatgccgcgtttgccggcggcgcacaccaagtcaaccggctgacagacgcgctgaacatcagcgaaaggacgctgcaacgccgtatgcgcgaccatttcggcattaccacaagcgagtggctgcaccacaaacaaatgcagcacgcgctttatctgttgcaaaacgggggcaaaagcataggcgaaaccgcatatttatgcggctaccgccacgtttccagctttactcaggcattcaggcaatatttcggcagcacgcctgcggaaaccaaaaaagaaaaccggtaa

SEQ ID NO: 44613 - DNA, 966 bp, Neisseria meningitidis
atgagctacacgcaactgacccaaggcgaacgataccacatccaatacctgtcccgccactgcaccgtcaccgaaatcgccaaacagcttaaccgccacaaaagcaccatcagccgcgaaatcagacggcaccgcacccaagggcagcaatacagcgccgaaaaagcccagcggcaaagccggactatcaaacagcgtaagcgacaaccctataagctcgattcgcagctgattcagcacatcgacacccttatccgccgcaaactcagtcccgaacaagtatgcgcctacctgtgcaaacaccaccagatcacgctccaccacagcaccatttaccgctaccttcgccaagacaaaagcaacggcagcacgttgtggcaacatctcagaatatgcagcaaaccctaccgcaaacgctacggcagcacatggaccagaggcaaagtccccaaccgtgtcggcatagaaaaccgacccgctatcgtcgaccagaaatcccgtatcggcgattgggaagccgacaccattgtcggcaaaggacagaaaagcgcattattgaccttggtcgaacgcgttacccgctacaccatcatctgcaaattggatagcctcaaagccgaagacactgcccgggcagctgttagggcattaaaggcacataaagacagggtgcacaccattaccatggataacggcaaagagttctaccaacacaccaaaataaccaaagcattgaaagcggagacttatttttgtcgcccttaccattcttgggagaaagggctgaatgagaacaccaacggactcatccggcaatacttccccaaacaaaccgatttccgtaacatcagtgatcgggagatacgcagggttcaagatgagttgaaccaccgaccaagaaaaacacttggctacgaaacgccaagtgttttattcttgaatctgttccaaccactaatacactag

SEQ ID NO: 44614 - DNA, 816 bp, Neisseria meningitidis; identical to SEQ ID NO: 38138

SEQ ID NO: 44615 - DNA, 432 bp, Neisseria meningitidis; identical to SEQ ID NO: 38610

SEQ ID NO: 44616 - DNA, 678 bp, Neisseria meningitidis
atgcctgctgctttgattaaggattttctgctgactcagggtttgaagctgccgcttgacgaggttcgggcggcgtatctgacggcgcagacggtaatggatatggggacggcttcgatagaccgttcggttttgtggcgcagtgatgagggttggaaacttgccgattacctgtcgtgcgacaatgtccgcgaagatgcactgaaacggcttttcatggctttggattcggtgttttcgcgctcgacaggcgtgcagagtgcggcggtctatgccttgatgccatctgaaaaccaggctttccaactgatatgcctgtcccgacagggcgaggttttggaaaacctgtgggatttggatgaagcggcaggcaaggtttcgctggcttgccgttcggcgcaaagcggttggatgaatgttgcctcggatgtacgccgttggttggatttgggggagctttcgggagaacgcaatcatgcttcggcggcgcaaatttccattccggtctgcacggaaagtggcggtgtgttgggcgtggttcatgtggaatttgaatgcgcagagtgtgcggatgaggcagcgcaggcggaatgggtggctcttgccttggctttgtccgaacctttgaaactgctgttgggtatgtctgccggaaaagatgggagtgaagatgtctga

SEQ ID NO: 44617 - DNA, 1002 bp, Neisseria meningitidis
atgattgacggacaaacaaccgaacccaaacaaaaaacccgaatcatccttgcccctatgcagggtctggtcgatgacgtgatgcgcgacctgctgacgcgtattggcggctacgacgaatgcgtcagcgaatttgtacgcattacccataccgtgcattcccgatccatatggttaaaatatgtccccgaaatcgccaacggaaacaaaacgttttccggcacgccctgcaccgtccaacttttgggcagcgatgcggacaatatggcggcgaatgcgctggaagccgtccgcttcggtgcgaacaaaatcgatttgaacttcggctgccccgcgcccaccgtcaacaaacacaaaggcggcgcaatccttttaaaagagccggaactgatattccacatcgtcaaaacgctgcgcggacgtttgcccgcacatattccgctcaccgcaaaaatgcggctcggttacgaagacaaaagccgggctttggaatgcgcctgtgcgattgccgaagggggcgcatgcggactgaccgtacacgcgcgtaccaaagccgagggttacgaaccgccggcgcattgggaatggataaggaaaatccgagacagcgtcaatattcccgttaccgccaacggcgacgttttcagcctgcaagactatatcggcatcaaaacaatcagcggctgcaacagcgtgatgctcggtcgcggcgcggtcatccgccccgatttggcgcggcaaatcaagcaatacgagaacggcgggccggtcaaagacacggattttgccgaagtttctaaatggatacggcagtttttcgagctgtgcctgacaaaagaggcaaacaataaatacccgatcgcccgtcttaagcaatggttgggcatgatgaaaaaaacgttcgacccggcgcaaacgctgtttgaccgcgtccgaacggttaaggatgcggatgaagtccgccgaatcctgaacgcatttgagcatgagataaatgtttga

SEQ ID NO: 44618 - DNA, 558 bp, Neisseria meningitidis
atgaaacccaaattcaaaaccgttttaaccgcgctgcttttggcggtttccctgccgtctatggcggcaacccatgttttgatggaaaccgatatgggcaatatccgtttggttttggacgagtccaaagcccccaagaccgttgctaatttcgtgcgctatgcccgaaaaggcttttacgacgacaccgtttttcaccgcgttatcgacggtttcgttatccagggcggcggatttaccgaagacttggtacaaaaggcaaccgataaggccgttgccaacgaatccggtaacggcttgaaaaacactgccggtaccatcgccatggcgcggacggccaatccggattccgccaccagccaattctttatcaatctggcggacaatgattcactcaactacaaaaacggacaatacggctataccgttttcggcagggtcgaaagcggcatgaacaccgtttccaaaatcgcccgcgtcaaaaccgccacgcacggcctttatcaaaacgtacccgtacagcccgtcaaaatccgtcgcattgttgtcggacagtaa

SEQ ID NO: 44619 - DNA, 411 bp, Neisseria meningitidis; identical to SEQ ID NO: 44362

SEQ ID NO: 44620 - DNA, 888 bp, Neisseria meningitidis; identical to SEQ ID NO: 39159

SEQ ID NO: 44621 - DNA, 423 bp, Neisseria meningitidis
atgcaggttacatcaaaatggatagacggaatgtgctttgtcggcacgacggaaagcgggcacagcgtcgttatggagggttcggcggcagaaggtgcggccaagcgcgggcccagccctttggaaatgctgctgttgggcgtggcgggctgttcgagcatcgatgtggtgatgattgccgaaaaacagcgtcagaaagtgactgactgccgtgcgacggttacggcgaaacgggcggacgatgcgccgcgcgtgtttaccgaaatccacatccatttcaaagtattcgggcatgatttgaaagaatcggccattgagcgcgccgttcagatgtctgccgaaaaatactgttcggcttcgattatgttgggcaaagcggcaaagattacccacagttttgaaattgccggggcagataaatag

SEQ ID NO: 44622 - DNA, 621 bp, Neisseria meningitidis; identical to SEQ ID NO: 37903

SEQ ID NO: 44623 - DNA, 591 bp, Neisseria meningitidis
atgcttttgtttatcgacaattacgacagttttacttacaacatcgtccagtatttcactgaattggggcaggaagttgccgtgcgccgcaacgatgatattacgttggaggaaatcgaggcattgaatccgcaatatctcgttatcggccccggcccgtgttcgcccaaagaagcggggatttccgtggcggcgatgcgccatttcgccggccggctgccgattatgggcgtgtgcctcgggcatcagacgataggcgaggcgttcggcggcaggatagtccgcgccaaaacgctgatgcacggtaaggtgtcgcccgtgtcccattcgggcaagggtatgtttaagggtttgcccaatccggttacctgtactcgttatcacagcctcgttatcgatcggaatacgatgcccgaatgtttggaagtaacggcttggactgaggacggcgagattatgggtgtgcgccataaggaatatgccgtcgagggcgtgcagttccaccccgaagctctgctgaccgaacacggacatgatatgttaaacaattttttagttgaatttcaaaacttcaaaccgcaaaaaatctga

SEQ ID NO: 44624 - DNA, 336 bp, Neisseria meningitidis; identical to SEQ ID NO: 38968

SEQ ID NO: 44625 - DNA, 1512 bp, Neisseria meningitidis
atgaaatggttgaaacgcctgacggttattgtcgggactttttaccgctatcggctggcaggtctgtgcgcttcgctgatgggtagcggttggatatgcgctctgctgaaaatgatgccgcagtcgtccaaattgaaaaacgaaccgcctgccgtccgtctgcgccttgccttggaaagcctggggccgattttcatcaagttcgggcaggttttgtccacacgccctgatttgattccgcacgattacgccgtcgaactggcaaagctgcaagacaaagtgccgccttttgacgcgcggctttcgcgtgaacaaatcgaaaaatcgttgggtcagtccatcgaaaagctgtatgcggaatttgaaaccgagcccgtcgccagcgcgtccatcgcccaagtacacaaagcccgcctgcattcgggcgaacgagtggctgtcaaagttttgcgccccaaccttttgccccttatcgaacaggatttgtcgctgatgcgtttcggcgcggtttgggtggagcgtctgtttgccgacggcaagcgtctgaagccgctcgaagtggtggcggagttcgacaaatacctgcacgacgagttggatttgatgcgcgaagccgccaatgccggacagctcgggcgcaatttccaaaacagcaatatgctgattgtgcccaaggtgttttacgactactgcaccagcgacgtgctgacaatcgaatggatggacggcacgccggttgccgacatcgccaaactcaaagcagacggcatcgatttgcacaaactcgccgattacggcgtggaaatctttttcacgcaggtcttccgcgacggctttttccacgcggatatgcaccccggcaatattttggttgccgccgacaaccgctacatcgccctcgatttcggcatcgtcggcacgctgaccgattacgacaaacgttatctcgccatcaatttcctcgcctttttcaaccgcgattaccggcgcgtcgccaccgcccacatcgaatcgggctgggtgcctgccgacacgcgtgcggaagaattggaagccgccgtccgcgccgtgtgcgaaccggtgttcaacaaaccgatttcgcagatttccttcggcttggtgctgatgcgcctgtttgaagtcagccgccgcttcaatgtcgaaatccaaccgcagcttgtgctgctgcaaaaaacgctgctcaacatcgaaggcttgggccgccagctcgatcccgatttggacttgtggaaaaccgccaaaccgtttttggtgaaatggatgaacgggcaggtcggccctaaagccctttggcgcaacctcaaaaacgaagcccccgactgggcgcaaatcatcccttcattgccgcgcaaaatcagtgcgttgattgatgaaaaccgccagcaggaaatgcgtgatgcctatatccatttggtcaaagtgcagcagcggcaaagcctgtggctggctgtgattgcggttgttttgctgctgattttgcttttgaaatag

SEQ ID NO: 44626 - DNA, 165 bp, Neisseria meningitidis; identical to SEQ ID NO: 38812

SEQ ID NO: 44627 - DNA, 1056 bp, Neisseria meningitidis
atgactattttatcggacgttaaagcattaggacaacaaatctggctggacaacctttcccgctcgctcgtgcaaagcggcgaattggcgcaaatgttgaaacaaggcgtgtgcggcgtaacttccaatcccgccattttccaaaaagccttcgccggcgatgccctgtacgccgatgaagtcgccgcgctcaaacagcaagatctgaccccgaaacaacgctacgaaaccatggcggttgccgatgtgcaagccgcctgtgacgtgtgccttgccgaacacgaatccaccggcggcaaaaccggtttcgtcagcctcgaagtttcgcccgaattgtccaaagacgcgcaaggcacggtagaagaagcgcgccgcctctacgccgccatcgggtgcaaaaacgcgatgattaaagtgcctgccaccgacgcaggcatcgatgcgctcgaaaccctcgtttcagacggcatcagcgtaaacctgaccctgctgttctcacgcgtccaaaccctcaaagcctacgccgcctacgcgcgcggcattgccaaacgcttggcagccggacaaagcgttgcccatatccacgtcgtcgccagcttcttcatctcccgtgtggacggcgcgctggacacaacactgcccgaccacctcaaaggcaaaatcgccatcgcccttgccaaagccgcctaccaagactgggcacaatacttcggcagcccggaatttgccgcactggaaacccaaggcgcaaaccgcgtgcagcttttatgggcatctaccggcgtgaaaaacccggcctatcccgacacactctacgttgacagcctgatcggcgcgcacaccgtcaacaccgttcccgatgccacgctcaaagccttcatcgaccacggcacagccaaagctacgctgaccgaaggcgcggacgaagcacaagctcagctcgccgaaaccgccgcgctcggcatcgatgtcgaaaccttggcggcacgtttgcaggaagacggtttgaaacagtttgaagaagcgtttgaaaaactgctcgcaccgttggtttaa

SEQ ID NO: 44628 - DNA, 3033 bp, Neisseria meningitidis
atgttttggatagttttgatcgttattttgttgcttgcgcttgccggcctgttttttgtccgcgcacaatccgaacgcgagtggatgcgcgaggtttctgcgtggcaggaaaagaaaggggaaaaacaggcggagctgcctgaaatcaaagacggtatgcccgattttcccgaacttgccctgatgcttttccatgccgtcaaaacggcagtgtattggctgttcgtcagtgtcgtccgtttctgccgaaactatctggcgcacgaatccgaaccggataggcctgttccgcctgcttctgcaaaccgtgcggatgttccgaacgcatccgacggatattcagacagtggaaacgggacggaagaagcggaaacggaagcagcagaagctgcggaggaagaggctgccgatacggaagacattgcaactgccgtaatcgacaaccgccgcatcccattcgaccggagtattgctgaagggttgatgccgtctgaaagcgaaatttcgcccgtccgtccggtttttaaggaaatcactttggaagaagcaacgcgtgccttaaacggcgcggctttaagggaaacgaaaaaacgctatatcgatgcatttgagaaaaacgaaacagcggtccccaaagtccgcgtgtccgataccccgatggaagggctgcagattatcggtttggacgaccctgtgcttcaacgcacgtattcccgtatgttcgatgcggacaaagaagcgttttccgagtctgcggattacggatttgagccgtattttgagaagcagcatccgtctgccttttctgcagtcaaagccgaaaatgcacggaatgcgccgttccgccgtcatgcagggcaggcggaggcaaaatccccggatgtttcccaaggacagtccgtttcagacggcacagccgtccgcgatgcccgccgccgcgtttccgtcaatttgaaagaaccgaacaaggcaacggtttctgcggaggcgcggatttcgcgcctgattccggaaagtcggacggttgtcgggaaacgggatgtcgaaatgccgtctgaaaccgaaaatgttttcacggaaaccgtttcgtctgtgggatacggcggtccggtttatgatgaaactgccgatatccatattgaagaacctgccgcgcccgatgcttgggtggtcgaaccacccgaagtgccgaaagttcccatgcccgcaatcgatattccgccgccgcctcccgtatcggaaatctacaaccgtacctatgaaccgccgtcaggattcgagcaggcgcaacgcagccgcattgccgaaaccgaccatcttgccgatgatgttttgaatggaggttggcaggaggaaaccgccgctattgcggatgacggcagtgagggtgcggcagagcggtcaagcgggcaatatctgtcggaaaccgaagcgttcgggcatgacagtcgggcggtttgtccgtttgaagatgtgccgtctgaacgcccgtcctgccgggtatcggatacggaagcggatgaaggggcgttccaatcggaagaaaccgatgcggtatacgaacacctgccgacaaccgacctgcttctgccgccgctgttcaatcccggggcgacgcaaaccgaagaagaactgttggaaaacagcatcaccatcgaagaaaaattggcggagttcaaagtcaaggtcaaggttgtcgattcttattccggccccgtgattacgcgttatgaaatcgaacccgatgtcggcgtgcgcggcaattccgttctgaatctggaaaaagacttggcgcgttcgctcggcgtggcttccatccgcgttgtcgaaaccatccccggcaaaacctgtatgggtttggaacttccgaacccgaaacgccaaatgatacgcctgagcgaaatcttcaattcacccgagtttgccgaatccaaatccaagctgacgctcgcgctcggtcaggacatcaccggacagcccgtcgtaaccgacttgggaaaagcgccgcatttgttggttgccggcacgaccggttcgggcaaatcggtgggtgtcaacgcgatgattctgtctatgcttttcaaagccgcgccggaagacgtgcgtatgattatgatcgatccgaaaatgctggaattgagcatttacgaaggcatcccgcacctgctcgcccctgtcgttaccgatatgaagctggcggcaaacgcgctgaactggtgtgttaacgaaatggaaaaacgctaccgcctgatgagctttatgggcgtgcgcaatcttgcgggtttcaatcaaaaaatcgccgaagccgcagcaaggggggagaaaatcggcaacccgttcagcctcacgcccgacaatcccgaacctttggaaaaattgccgtttatcgtggtcgtggttgatgagtttgccgacctgatgatgacggcaggcaagaaaatcgaagaactgattgcccgcctcgcccaaaaagcccgcgcggcaggcatccatctgattcttgccacacaacgccccagcgtcgatgtgattacagggttgattaaggcgaacatcccgacgcgtatcgcgttccaagtgtccagcaaaatcgacagccgcacgattctcgaccaaatgggcgcggaaaacctgctcggtcagggcgatatgctgttcctgccgccgggtactgcctatccgcagcgcgttcacggcgcgtttgcctcggatgaagaggtgcaccgcgtggtcgaatatttgaaacagtttggcgagccggactatgttgacgatattttgagcggcggcggcagcgaagagctgcccggcatcgggcgcagcggcgacggcgaaaccgatccgatgtatgatgaagccgtatccgttgtcctgaaaacgcgcaaagccagtatttcgggcgtacagcgcaccttgcgcatcggctacaaccgcgccgcgcgtctgattgaccagatggaggcggaaggcattgtgtccgcaccggaacacaacggcaaccgtacgattctcgtccccttggacaatgcttga

SEQ ID NO: 44629 - DNA, 708 bp, Neisseria meningitidis
ttggtcaaaacggcagacggctacaaagccattgcccgtatccgaaccggcgaccgcgtcttcgccaaggacgaggcaagcggaaaaacgggatacaaacccgttaccgcccgatacggcaatccgtatcaagaaaccgtttacattgaaatttcagacggcatcggcaacaaccaaaccctgatttccaataaaatccacccgttttacagtcaaggaaaatggatacaggcaggtcgtctgaaaaaaggcgacaccctgctttccgaaagcggcgcaaaacagacggttcaaaacattaccttcaaacagcagccgctcaaagcctacaatctgaccgtcgccgattggcatacctacttcgtcaagggcagtcaggcggaaacggaaggggtttgggttcataatgattgtccgtatgataaaggcaaccaacgatataaagacgcttcttatcatggcaaaaatgataattctgtgaaaagtagagcaccaacaaacggacaagcagctcttgataattccgttcaagttaaatcaacttctcctcgaagagttggggttgataaagccaataatgaaatcgttgtattagacaaaactcaaacttttaataacggttttgcggaatatcacgggcatgtcagaagttggcaagatttgcataccgatcagaaaaatgctttaaaaaaagcaggattggattag

SEQ ID NO: 44630 - DNA, 1881 bp, Neisseria meningitidis
atgaatattttttacgaagagtccggccaattcaaaatcgccgccatcatccaaaaaaacgacgctacctaccaagtcgatacccaacacggcaagcgcaccaaagtgaaggcaaacaatgtctttgccgagtttgacggcgatatggcggcgtttttggaaaacgcgcaggcacaggcggcggacatcgacaccgatttattgtgggaagtatgcggcgaagaagaattttccgccgaagccatcgccgaagaatatttcggtcatgcgccgaccaaaaccgagctggcggcgaccttgattgcgctttacgccgcgccgatgtatttctacaaaaaagccaaaggcgtgttcaaagccgcgcccgaagaaactttgaaacaagcgcttgccgccatcgaacgcaaaaaacagcaagacgcgcaaatcgacgcttgggcggaagccttaaaacggggcgagatgccgtctgaaatcgcggcggatttgaaaaccatcctgcacgcgcccgacaaacagtcgctgacctacaaagcctttaccaaagccgccgacgcactgaaaatctccgcctacgaattggcgaaaaaaacgggtggcattacgtccattccgcaatacctgcaagacgggtttgaaatcaaatactttcctaaaggcacaggcttccccgaccttgcccttcccgaaatgcccgacctgcccaaggccgacgttaccgccttttccattgacgacgaatcgaccaccgaagtggacgacgctttaagcctgaccgacttggacaacggcacgaagcgtgtcggcatccacatcgccgcgccgtcacttgccgttaaaccgggcgacaaaatggaaaaaaacatcatggaacgcttgagcacggtttatttccccggcggcaaaatcacgatgctgcccgaaaactggattgccgcgttcagccttgatgcaggcgcacaccgccctgccgtcagcatttatttcgatgtggacagcgagttcaacaccggcgaaccgacctgcaaaatcgaagcggtcaacatctccgaaaacctgcgtatccaagccatcgaaccgcatttcaacgccgaagcgggcttggacgaagcgggcgaaatgatgttcgcccaccatcaagacctgatttggttctatcaattcgccatcgccctgcaaaaagcacgcggcaaatacgagcccgaccgtgcgccgcaatacgattacagcatcgaattggatgaggaaggcaacgtatccatcgtccgccgcgaacgcggttcgcccatcgatacgctggtcagcgagatgatgattcttgccaacagcacttgggcgcaaatgttggatgaaaacgacctgcccggccttttccgcgtgcaaccggcaggcaaagtgcgtatgagcaccaaatccgagccgcacatcggaatgggcgtgcagcattacggctggtttacctcgccgctgcgccgcgccgccgactacatcaaccaaaagcaactgatcagcctgatagacgacaccgccgagccgcttttccaacaaagcgatgccgaactcttcgccgcgctgcgcgactttgatgccgcctatacagcctacgccgacttccaacgccaaatggaagcctactggagcctcgtctatctgcaacagcaaggcacgagcgagctgacggccaccatcctcaaagaagacctcgtccgcattgaaggcctgccgctggtaacgcgcgcgaccggtattccgtttgacgcgctgcccaaatcacaggcattgttcaaaatcaccgaattggatgccgagaagcagtttgtctcgctcaactacatcaaggcagtcgcacccgcgggtacaacggcaggcaatgccgtctga

SEQ ID NO: 44631 - DNA, 780 bp, Neisseria meningitidis; identical to SEQ ID NO: 38884

SEQ ID NO: 44632 - DNA, 594 bp, Neisseria meningitidis; identical to SEQ ID NO: 38213

SEQ ID NO: 44633 - DNA, 270 bp, Neisseria meningitidis; identical to SEQ ID NO: 43524

SEQ ID NO: 44634 - DNA, 1173 bp, Neisseria meningitidis
atgaacattaccatcgtcgccccttattgctcgctgccgtccgagccgcatttcaaccgcttctggtatcttgccgagctgttgtcgcagtcgcatgacgtgttgctgattaccagcaacttcaagcactacgacaaatctttcagacggcccgaagatgccgaggccgcctcacaaggccgtctgaaagtcatgctgttggaagaaagcggatacagcaaaaacgtgtctttaggacgcgtgaccagccatcaccgcttcgtcaaacattttgaaaaatggttggaaaactgccgtccgggcgaacaagacgtcgtcttttccgcctatccgctgattgccaccaacctgctgttgggcaaacacaaagcgcgtttgggttacaaactgattgtcgatgtgcaggacgtatggccggagtctttctcctcggtcgtaccgtttttgaaaaaagtaccgcacaagctgctgccctttgcttcacgcgccaaccgggcctaccgctacgccgacgcgctggttgccgtatcgcagacttatctcgaccgcgccaaagaaaccaatccgaacgtacccggcgaagtcatctatattggtgctgactttcccaaactcgatgccgcacctgccaaagattttggcgacgacaaaacccgctttttctacttgggcacgctcagttacagctatgacgtggaaaccgtgtgcaaaggcgttcggaaacttttggacgacggcgaaaatgtagagctgcacatcatgggcggcggccccgatttggacaggctcaaacaatatgcctgcgacggcatcaagttttacggctacattccttacgccgaaatgatgtcggtcgccaagggctgcgacattgccatcaacgccatccagtcctattcaatggcatcgattaccaacaaactctccgactatatggctttgcaaaaaccgattctgaacagccaggtcaacgacgaagttgccgaagtccttaccctgctaccgcatgcggactaccgctccggcgatgtggacggtttcgttcaagccgataaagatattttgaagcgcaaaaacgatcctgttcagtccgaagaaatcgtccgccgcttcaaacgcgacgttgcctatcaaaaaatcgtcaacctgattgaaagattagctcatgaataa

SEQ ID NO: 44635 - DNA, 720 bp, Neisseria meningitidis
atgacacagcaaatcaaatacaaacgcgtattactgaaactctccggcgaatccctgatgggttccgatccgttcggcatcaatcacgataccatcgttcaaactgtcggcgaaattgccgaagtcgttaaaatgggcgtgcaagtcggtattgttgtcggcggcggcaatattttccggggcgtatccgcccaagcaggcagcatggatcgcgccaccgccgactacatgggcatgatggcgaccgtgatgaacgcgttggcactcaaagacgcatttgaaactttaggcatcaaagcgcgcgtacaatccgcactgtctatgcagcaaatcgctgaaacctacgcccgccccaaagccatccaatatttggaagaaggcaaagtcgtgatttttgccgccggtaccggtaacccgttcttcacgaccgacactgccgccgcattgcgcggtgcggaaatgaactgcgacgtgatgctcaaagccaccaacgttgacggcgtgtacaccgcagaccccaaaaaagactcatccgccacgcgctacgaaaccattacttttgacgaagccttgttgaaaaacctcaaagtgatggatgccaccgctttcgccctctgccgcgaacgcaagctcaatattgtcgtattcggcattgctaaagaaggctcgctcaaacgtgtagtaaccggtgaaaacgaaggtacgctggttcactgctga

SEQ ID NO: 44636 - DNA, 3210 bp, Neisseria meningitidis
atgttttatctgtatcaatccaaccgtcttgaaacgctggcggcactgtttgcccgcattcaaaaagtcaaaccgctgaaatcggttttacagcccgaacagattattgtgcagagtcaggggatgcgccgctacctcaatacctgcctcgcccgcgatttgggcgtggcggcgaatttgtcgttcagcctgcccgccggtctgacgtggaagctgatgaaaaaactgattcccggtattccggaactcagcccgtttgcgcctgaagtgatgcgctggcggctgttggatttgttccgcagcgaggcatttcggaatacggcagaatttgaagatgtgaggaatgtgctgcaagactatctaggcagcggcgaatcggcagattatcagcttgcgggacagcttgcggacatattcgaccaataccttgtctatcgtccgcagtggatagacgcgtggcagcagggcaggatactcagtttgggcgacgatgaaatctggcagtccaaactgtggcgttatcttgatgacggcaggcagagcgcgccgcaccgtgttgcgttgtgggaaaagctgttggaatctttgagcagtgataagctgcccgagcgttatttcgtgttcggcatttccacgatggcgccgatgtatttgcagcttttgcacaagctgtccgaacattgcgatgtgttcgtgtttgcactcaatccgagtgggatgtattggggcaacgtcatcgaagcggcgcaaatcctcaaaggcggcggcgatcccgatttaactcaggcagggcatccgctgctcgcctcattgggcaagcaggggcgcgactttttcgactttttgaacgaaatggaaatagaaggagaaacgccggtatttgaagaaggcgggcgcgatacgcttttgcacgccctgcaaaccgatattcaaaacctgaaaatgccgtctgaaaatgtgggaagcgtcggtacggatgacggttcgatacgtatcgtctccgcgcacagccctttgcgcgaattgcagatactcaaagacaagctgttgaaaattctgcatgaacatcccgattggcagccgcatgatatcgccgtattaaccccgaatatcgaatcctatacgccttttatcgaggccgtgttcggacaggcgcagcccggtgcgcaggcattgccgtattccgtttcggacgtgaaaataagccgccgacaaccgctgtttcatgctttgtcatgcctgttcgacttgttggaaagccgatttgaagtcgataaagtgcttgtgcttttagaaaccgcacccgtgttgcgccgtttcggactgactgaggacgatttgccgcttttgcacgacatggttgccgatttgaacgtccgctggggtttggacggagaaatgcgcggcggcacggatcagctgtttacctggaagcaggcggtagaacgcatgatattgggctggatgctgcccgaaggcggcaatccgatgtggcaggatgtcagcgcgtggtatgccgacgtgaatcaaaccgccatgttcggacgttttgccgccttcctcgaaaccctgtcggatattgtacggatatggcggcaacctgcgacggttgatgaatgggtaggacgttgccgaggtttgcttgaaacattgttccaagccgaagccgatgaccaaaaggcagtccaaaacctcgaaaacgaatgggtcaaatggcaggcggaaacagaattggcgcaattttccggacagttgccgcaacaaaccgtcatccgccatatccgacgtttcctcgacagcgaaagcgaggcaggctttttacgcggcggcatcaccttttgcagtatggtgccgatgcggagcctgccgttcaaagtcatctgcctgttgggtttgaacgacggagattttccccgcaataccaaagccgccgtattcgacctgattgccaaacatcccgccaaaggcgaccgagcccgtcgcgatgacgaccgctacctgttccttgaagctctcatcagcgcgcgtgaaatcctgtatttgtcctacatcgggcgcgatatccgcaaagacgaagagcttgccccgtcttcgctgttgggcgaactcatcgacacagttgccgccatgaccggcacaaacagccgccaacttgcacaaaattggatagaacagcatccgctgcaagccttctcgcgccgatatttccaagaaggcggacgttcagacggcatattcggcacgcgtaccgactacgccactgcgctcggacaaacgcccgaaccgccgcaaccctttttcgaccaacccgtagaaaacgccgaacctgttgccgaaatcggacaggacgaatttatccgtttctggcgcaaccccgtcaaagtatggcttcagcagcagcttgcgtggagcgaaccccatatcggcgaagcctgggagcctgccgaacccttcgagccgcaacacgccgatcaaatcgccgaaacctacatcgaagcacggcgcgaaggacgggattttgcccaaaccgccgcccgcatcggggcggaaagcctcctgccgtcgggagagttgggcagactttggcagcagaacttccaaactgctgccaaacaaatcgacacggcggttttaaacagccccaaactgccaccgctttcatatgccataccgtcggacgggcaaatcctgaaaggcagcttgggcaatctgtaccgctgcggacaagtgttttacgcctacggcaaacccaacgcgccgcaacgtatcgcttttctgctggaacacctgatattttgcgccgttatgccgtctgaagccgaaacgcggcaaacctttatcgtccaatccggagaaaccgaaatattggcggaaatcgcgcaagacagggcattgcagctattgtcggaatggatggcgtttttcaatatcgggcaaaaccgcccgctgccgttttttgccaagacctcgcttgccgctgccgaagcgtttgcccaaaaacaagattgggaagccgccctgaaaaaagcccaaaccgcctattacggcaacaaagtcagcaaagggcagaaagactataccgaagtcgccctcgtgttcggcaacgcaagccaaaacccactcgaacaacccctgtttgaaaacctcgcccgcctgcttgccgacacgcttgccgcagcggaaaaaagggaaggggccggagcagcctga

SEQ ID NO: 44637 - DNA, 633 bp, Neisseria meningitidis
atggagaatacaaaccgtgtgccggagcaggcacgttatgatgccgaacgcaggcaggcagacgaagcattggcgggcgtgtttccggcagtcagtatcttcggcagcgcgcgcacgccgcagaatcatgcggattatgcgttcgcctgccgtctggcgcggcggctgtcggattcgggcattgccgtcatttcgggcggcgggccggggattatggaggcggcaaacaagggcgcgtttgcagggaagtcggtttcggtggggctgaacatcgttttgccgcacgagcagaaaccgaatccgtatcaggacatcgccttgcggttttcccgttttgccgaacgcaaggcggtgtttttccgctattcccaagcatatgtcgtgatgccgggcggcttcgggacgctggacgaattgtttgaaatcctgaccttggtgcagacgggcaaagtgccgccgcgtccgattgttttggtcggaaaggcgttttggtcgggcttggcggagtggataaacgcgcagcttttggcgcgcgggctgatttccgaaggggcggtctctttgtttgccatatcggacgatgaagacgaaatcgttgcgtatctgtcggaacacgggcttcagacggcatag

SEQ ID NO: 44638 - DNA, 333 bp, Neisseria meningitidis
atgcagattttatcttttcagccggacattgcggaacgtatgctggaaggtacggaaggcgagtcggtcaacgaaaacgcacaattcgtccgtacggacaacggctattggattgcgtggcatgaaggcgtagcggcactgcttgcgcccgatacgccgccgggcattccctgtttttgggtggaaggcgcggaaagccttgaagagttgtgcgtcatggtggaacgcggcgagtttgacgaagtggaagagtttgacggcgatgacgacgaatggctcgaaacggcacagggttgcgggcaccacggcgacgcttgcgcctgcggacattaa

SEQ ID NO: 44639 - DNA, 666 bp, Neisseria meningitidis; identical to SEQ ID NO: 38448

SEQ ID NO: 44640 - DNA, 390 bp, Neisseria meningitidis; identical to SEQ ID NO: 39791

SEQ ID NO: 44641 - DNA, 1176 bp, Neisseria meningitidis
atgcagaatatttttgaccctttggttattcgtggaaaatcccttacccccatcgtgcaaggcggtatgggggtcggtgtttccgcatcgggtttatccagcgcggtggcgcgtgaaaacggtatcggaacgattgccagtgtggatttgcgccaccttcacgaagacctactcgccgaatcacaaatcaatccgagtgaagagaaatatacatctttgaactgtaccgcattagacagggaaatccaaaaagccaaaagcgcttcagagggaaaaggactgattgcggtcaacgtgatgaaggcggtcaaagaccacgccgcgtatgtccgccaggcttgcgaatcaggggcggatgcggttgtaatgggtgccggcctgcctttagacctgccggaaatgaccgagggctatcataaagatgtcgcgctgctgccgattctgtccgaatcgcgcggtattaatatcgtcttgaaacgttggatgaaaaaaggcatattgcccgatgcgattgtagtcgaacatcctgcccacgcggccggacatttgggtgcatcaaccgttgaaggcgtaaacgatgccaagttcgacttcaaacgcgtgattgaggaaacgtttgaagttttcaaaagtttagggctggaaagcgaaaaaatcccgcttattcttgcgggaggcatggcaaattttgaaaaagtcaaaaccgccctaaagaactggggagcatccgccgttcaaatcggtacggcttttgccgttaccgaagaaggagatgcacaccttaacttcaaaaaaacgctcgccggtgcggaaactgaaaaagtagtcgaatttatgtctgttgccggtttgccggcgcgcggtgtccgcaccaaattcctagacagctacatcaagcgtgaaagcaaacttcagacaaacgccaaagccgacccgcgccgctgtacccaaggtttaaactgcctaaccagttgcggtctgcgcgacgggctttccaaagcaggacagttctgtattgatatccagcttgccgccgcattccgtggagaagtagataaaggcctgttcttcagaggtaaagacccgctgcccttcggcaatgccatccgcaccgtccgcgagacgatacaatatctgctgacggggagcgaacctgttgcaacgctcggacgctga

SEQ ID NO: 44642 - DNA, 711 bp, Neisseria meningitidis; identical to SEQ ID NO: 39348

SEQ ID NO: 44643 - DNA, 1542 bp, Neisseria meningitidis
atgaagtttttagaccgtgaggcaagcattgccaagccgggtttcaaccgttggctcgtaccgcccgcagcattggcggtgcaccttgccatcgggcagatttacgcctattccgtattcaacgcgccgctgaccaaacttatcggcataaccgaatcggcggccggagattggaagctgacgaccgtaggttggatttttagtatcgcactcgcgatgctgggcgcgtcggctgccctgttcggcacatggatggaacgggtaggtccgcgcaaagccatatttgccgccgcctgctgtttcagcctgggcttcttcgtatccgcattcggcgtgcgtacgcacaacctcttcctgctctatttgggcaacggcgtcatcggcggcgtaggcttaggcttaggctacatcgggccggtttccacactgatgaaatggtttcccgacaagccgggtatggcgaccggtttggcgattatgggtttcggcggcggcgcaatgctggcctctccgctttccgtatcactgatgaacgccttttcaaacgccgcttcggtcggggttgccgaaacctttgccgtattgggcctgctttacctcgcactgatgatgttcggcgcgtttaccatccgcgtacctgccgacggctggaaacctgaaggctataccgcgccgaaaacgcaaaacaagctggtcagcagtaatcatgtcaacgtgtcccaagccatgaaaacgccgcagttttggctgttgttctgggtattgtgcctgaacgtaaccgccggcatcggcgtattgggtcaggcatccgtgatgattcaggaactcttttccgaaacctccataggcaggcaggcagcagtcggcgcaggtgcggcggcaggcttcgtcagcctcctgagcctgtttaacatgggcggacgctttttgtggtcgagcgtttccgacaaaatcggacgcaaaaacacctacaccatcttcttcgtacttggctcgctgctgtatttcgccgttccctccatcggcgagggcggcagcaaagccctgttcatcatcggcttttgcgtgattatttccatgtacggcggcggatttgccgccattcccgcctacctgaaagacctgttcggcacctatcaggtcggcgcgattcacgggcgcatcctgctggcctggtcaaccgccgccgtcatcggcccggtactggtcaattacatacgccaaagccaaatcgacagcggcataccggcggcacaggcatacggcgtaaccatgtacatcatggcgtgcctgctgattatcggtttgttgtgcaacctcgccgtcaaatccgtacacgaaaaacaccacgaaaaagacatcaaaaccgccgcacacagcggcaaccccgacgacgaaaccgccatatccgacgcttaccttgtgggcgaaaaagtttccggcggcggcatatcggtctggtggcgttgggcattggccgtcataccactcgcctacggcgtggtgatggtctttgtcaaagcactcgaccttttctcctga

SEQ ID NO: 44644 - DNA, 288 bp, Neisseria meningitidis; identical to SEQ ID NO: 41116

SEQ ID NO: 44645 - DNA, 2595 bp, Neisseria meningitidis
atgtccaaatccgccgtttccccaatgatgcagcaatacctcggcatcaaagcgcaacataccgacaaactggtgttttaccgtatgggcgatttttacgagatgtttttcgacgatgcggtagaagcggcaaaacttttggatattaccctgaccacgcgcggacaggtggatggcgagccggtcaaaatggcaggcgtgccgtttcacgccgccgaacaatatctggcgcgcctggtcaagttgggcaaaagcgtggcgatttgcgaacaggtcggcgaagtcggcgcaggcaaaggaccggtggagcgcaaagtcgtgcgcatcgtaacgcccggcacgctgaccgattccgcattgctggaagacaaggaaaccaaccgcatcgttgccgtgtcccccgacaaaaaatacatcggtttggcgtgggcatcgctgcaaagcggcgaattcaaaaccaagctgacaactgtggataaattggacgacgaactggcgcgcctgcaggcggcggaaattctgttgcctgacagtaaaaacgcaccgcaacttcagacggcatcgggtgttacgcgcctgaacgcgtggcagtttgccgccgacgcgggggaaaaactgctgacggaatatttcggctgccaggatttgcgcggcttcggtttggacggcaaagaacacgccgttgcgattggcgcggcaggtgcactgttgaactatatccgtctgacgcaaaacctgatgccgcaacatttggacggcctgtcgctcgaaaccgacagccaatatatcggtatggatgccgccacgcgccgcaatctcgaaatcacgcaaaccctctccggcaaaaaatcgccgaccctgatgtccacgctcgacctttgcgctacccatatgggcagccgcctcttggctctctggctgcaccaccctttacgcaaccgcgcccacatccgagcgcgccaagaagccgttgccgcgctggaaagccaatacaaacccctccaatgccgtctgaaaaacattgcggacattgaacgcattgctgcccgcatcgccgtcggcaacgcccgcccgcgcgatttggcatctttacgcgacagtctgttcgagttggcacaaatcgacttgtccgcaaacggcagcagcctgttggaaaccctcaaagccgttttccctgaaaacctatccacagccgaacagctccgccaagccattttgcccgaaccttccgtctggctgaaagacggcaatgtcatcaaccacggttttcatcccgaactggacgaattgcgccgcattcaaaaccatggcgacgaatttttgctggatttggaagccaaggaacgcgaacgtaccggtttgtccacactcaaagtcgagttcaaccgcgttcacggcttttacattgaattgtccaaaacccaagccgaacaagcacctgccgactaccaacgccggcaaaccctcaaaaacgccgaacgcttcatcacgccggagttgaaagcctttgaagacaaagtgctgactgctcaagagcaagccctcgccttagaaaaacaactctttgacggcgtattgaaaaaccttcagacggcattgccgcagcttcaaaaagccgccaaagccgccgccgcgctggacgtgttgtccacattttcagccttggcaaaagagcggaacttcgtccgccccgagtttgccgactatccggttatccacatcgaaaacggccgccatcccgttgtcgaacagcaggtacgccacttcaccgccaaccacaccgaccttgaccacaaacaccgcctcatgctgctcaccggccccaatatgggcggcaaatccacctacatgcgccaagtcgcgctgattgttttattggcacacaccggctgttttgtgcctgccgatgccgccacaatcgggcccatcgatcaaatcttcacccgcatcggcgcatcggacgacctcgcctccaaccgctccactttcatggtcgaaatgagcgaaaccgcctacatcctgcatcacgccaccgaacaaagccttgttttaatggacgaagtcggacgtggtacttccactttcgacggcctcgccctcgcgcacgccgttgccgaacacctgctgcaaaaaaacaaatccttcagcctgtttgctacccactatttcgagctgacctacctgcccgaagcccacgccgccgccgtcaatatgcacctttccgcgctcgaacagggacaggacatcgttttcctgcaccaaatccaaccgggtcccgccggcaaaagctacggcatcgccgttgccaaactcgccggcctgcctgtacgcgcattgaaatccgcccaaaagcatttgaacggactggaaaaccaagccgccgcaaaccgtccccaactggatattttcagtaccatgccgtctgaaaaaggagatgaaccgaatgtgggcaactttgtggacaaagcagaggaaaaacattttgaaggtatattggcagcagccttggaaaaactcgatcccgacagcctgaccccgcgcgaagcattgtcagaactgtaccgtctgaaagatttgtgcaaatccgtatcttaa

SEQ ID NO: 44646 - DNA, 801 bp, Neisseria meningitidis; identical to SEQ ID NO: 38785

SEQ ID NO: 44647 - DNA, 438 bp, Neisseria meningitidis; identical to SEQ ID NO: 39000

SEQ ID NO: 44648 - DNA, 717 bp, Neisseria meningitidis; identical to SEQ ID NO: 40339

SEQ ID NO: 44649 - DNA, 792 bp, Neisseria meningitidis
atgaatgtttattttctcggcggcggcaatatggcggctgccgttgcgggcggattggtcaaacaaggcggttaccgcatccatattgccaatcggggtgcggaaaaacgcgaacgtttgggaaaagagttgggggtcgaaacttcggcaaccctgccggagcttcattccgacgatgttttaatccttgccgtcaagccgcaggatatggaagccgcgtgcaaaaatatccgcaccaatggtgcattggtgctttctgtcgcagctggattgtcggttgatacgctcagccgttacctcgggggaacacgccgcattgtccgggttatgccgaatacacccggaaaaatcgggctgggcgtatccggtatgtatgccgaagcggaagtatcggaaacagactgcaagattgccgatcgaatcatgaaatctgtcggtttgaccatttggttggaagatgaagcgcaaatgcacggcattaccggcatcagcggcagcgggccggcttatgtgttttatctgctggacgcattgcaaaatgccgccatccgacaagggtttgatatggcagaagcacgcgcgctcagtctggcaacatttaaaggagcggttgcccttgccgagcagactggtgaagatttcgagaagcttcaaaaaaatgtaacgtcaaaaggcgggacaactcacgaagccgtggaagccttcagacggcatcgtgtcgccgaagccataaatgaaggcgtttgtgcctgtgtgcgccgttcgcaggaaatggaacggcaatatcaataa

SEQ ID NO: 44650 - DNA, 1671 bp, Neisseria meningitidis
atggaaaaaatctggttagacagttacgagaagggcgtcagtgccgaaatcgatatcacgcaatacaattccatcagcgatgtattccgccaaagcgtggaaaaatttgccaggctgcccgcttttcaaaatatgggcaaaacgctgacttatgccgaaaccggcaaactggcgactgatttcgcctcttatctgcaaaacgtcctcaagctgccgcgcggcgaacgtgttgccattatgatgccgaacgtattgcaatacccgatagcccttttcggcattttgcaggcaggtttggtggcggtgaacaccaatccgctctatacgccgcgcgagctggagcatcagctgaaagacagcggcacgaccgccatcatcgttttggaaaatttcgccaacacgctggagctggtgctgccgcgcacgcagatcaaacatgtcatcgtcgcctccgtcggcgaaatgttcgggctgcttaaaggttcgctgatcaatttcatcatccgaaaaatcaagaaaatggttcccgaataccgtattcgggaaaccgtttcctttcagacggcattgaaagagggggcgaagcacgttttccaacctgtcgcattaaaccgcgaagataccgcgctgttgcaatacacgggcggcacgacaggtgttgccaaaggggcggtgctgagtcacggcaacatctgtgccaatatgcttcaggcaaaagaatggattaaaaaccagttgcgcgagggcaaagaaaccgttatcgctgccctgccgctgtaccatattttcgccttaaccgtgaatctgatgatttttgccaatgccggctcaaaaatcatcctgattaccaacccgcgtgatatgaaaggctttatcggagaactgaaaaaacagcggattaatgtatttatcggcgtaaacacactgtttaacgcgatggttaaccgtcctgattttgccgaagtcgatttttcagaattgcggctgactttgggcggcggtatggcgacccaaaaagccgttgccgaaaaatggaaaaaaattaccggtacgcctattgtcgaagcctacggtctgaccgaagccagcccaggcgtgtgctgcaaccccttaaacatcgaatcatacagcggcagcatcggtttgcccgtctcgtccaccgaagtcgaactgcgcgacgcaaacggcaaagaagtccccgtcgggcagccgggcgaattgtgggtaaaaggccctcaagtgatgcaaggctactggaaccgtcccgaagaaaccgctaaagccatagacgcgcgcggtttcttggaaaccggcgatattgccgtcatggacgaaaaaggctggttgaagctggttgaccgtaagaaagacctcattgttgtttccggattcaatgtttatccgaacgaaatcgaagaagtcatcgcgcatcacggcaaagtgatggaagttgcctgtatcggcgttcccgacgaaaaaaccggcgaggcactcaaagtattcgtcgtcagaaaagacccgtctttgacgaaagaagaacttatcgccttttgccgcaccgaattaaccgcatataaagtaccgaaagatatcgaattccgcgacgagttgcccaagtccaacgtcggcaaaatcctgcgccgcgagttgcggcaaagtaccgggaaataa

SEQ ID NO: 44651 - DNA, 273 bp, Neisseria meningitidis; identical to SEQ ID NO: 39724

SEQ ID NO: 44652 - DNA, 240 bp, Neisseria meningitidis; identical to SEQ ID NO: 39582

SEQ ID NO: 44653 - DNA, 825 bp, Neisseria meningitidis
gtgaatcgaactgccttctgctgcctttctctgaccactgccctgattctgaccgcctgcagcagcggagggggcggtgttgccgccgacatcggtgcggggcttgccgatgcactaaccgcaccgctcgaccataaagacaaaggtttgcagtctttgatgctggatcagtccgtcaggaaaaacgagaaactgaagctggcggcacaaggtgcggaaaaaacttatggaaacggcgacagcctcaatacgggcaaattgaagaacgacaaggtcagccgcttcgactttatccgtcaaatcgaagtggacgggaagctcattaccttggagagcggagagttccaagtgtacaaacaaagccattccgccttaaccgcccttcagaccgagcaagtacaagactcggaggattccgggaagatggttgcgaaacgccagttcagaatcggcgacatagcgggcgaacatacatcttttgacaagcttcccaaaggcggcagtgcgacatatcgcgggacggcgttcggttcagacgatgctggcggaaaactgacctatactatagatttcgccgccaagcagggacacggcaaaatcgaacatttgaaatcgcccgaactcaatgtcgagcttgccaccgcctatatcaagccggatgaaaaacaccatgccgtcatcagcggttccgtcctttacaaccaagacgagaaaggcagttactccctcggtatctttggcgggcaagcccaggaagttgccggcagcgcggaagtggaaaccgcaaacggcatacaccatatcggtcttgccgccaagcagtaa

SEQ ID NO: 44654 - DNA, 1428 bp, Neisseria meningitidis
atgatacacaccgaaccgagcgcgcagccgtcaactatggacacggctgcttttttaaagcacatcgaatccgcattccgccgcattttttcagacggtatcgacctgatgcgatacctgcccgaagacaaatggcttgccttgaagcaggcgggtttgctgttgcccttcctcgacaaaagacacggcggccgcaagggcagccagtttgaaattcaggaagtattgcggattgcggggcattacggcgtacccgttacgctgcgtaccggcatcgaaggcgcgctggtgttgcagccactgcaagagttcggcgatgaagcgcaaatcgcacagggtttggacatggttttcaaaggcgagggcggcggtttgggcgttaccgaacccgaaacctccggcgcggcgattgcccgagaaatgcagtcttactacgaatataccgacggacaaaccatttacgtcaacgccgcaaaatactggcagggcaactcgcaaagcgacttcctcctcgttgccgccaaagaacgcaaaaacggcaaactcgccaaagtcatcgacctgctgctcgtccccaaaacatacatccgctgcgaaaccctcgcatccgaaggcttgcgcgccgtccgttacgccgtcaaccgcatcgatgccgaaatgcctgcaaccgccgtgatgaaactctcccagagcgacgccgcaggtttgcgcgcgttccaaaacatctttatccgcagccgcctgcaactgatcggcatgacgcacggcattatggaatacatccttgaaaacctggaacgatacgtccgcaacgacatcagattcgtcgattacgaacgccgcgaaatccggcgccgccatcaggtttccgagattctttaccgctacgtctgccattccgtttcgcccgttgcacccgtcgcccatcagctgatggaggcgaacatcgtcaaaaccctcgccacggaatacacttacgccgccgcgcaaatgttgcaaaaacttttgggcgcgaagggttttgaacgcggacacaccgccggcaatatcgctatcgacatccgtcccttcacgatttttgaaggcccgaacgatatgctttatgccgaaatttacgaccagttcgtccgcgccaccgccgaagaaaaagaagcaggcatgaagttggacaaaaaccaaaccctgctcgaccgcctgcaaaccgatgcccgctttgccgccgtcgcccgcgactacactttgcccgaagacatccgcagcttcctgcaggaacacaccctgaccgacgcctgcgccctgcaaaaagtcttcatcggcaaaatcatcgcccgactctttgtcttcgtacaggcggaacacgaagacaccgcagccttcctgctgaacgacatccgcaaagatatattggactgccgatattgcggatag

SEQ ID NO: 44655 - DNA, 435 bp, Neisseria meningitidis; identical to SEQ ID NO: 38925

SEQ ID NO: 44656 - DNA, 276 bp, Neisseria meningitidis
atgaccgaacaaaaaaacaaaacatccctcatcgaatttccctgcaccttcccattgaaagtaatgggcgcggtgcatcccgagttcgagcaggcggtattggacaccgtccgcctccacgcccccgacacgcaggcgcaccacatcaccacgcgtccgagcagcaaaggcaactataccggcgccaccgtacaagtaaaggttgaaaaccaagaacaacttgacaatatctaccgcgcgctgacttcgcacaaattggtcaaagtggtactttga

SEQ ID NO: 44657 - DNA, 1179 bp, Neisseria meningitidis
atggcaaaaatgatgaaatgggcggctgttgcggcggtcgcggcggcagcggtttggggcggatggtcttatctgaagcccgagccgcaggctgcttatattacggaaacggtcaggcgcggcgacatcagccggacggtttctgcaacaggggagatttcgccgtccaacctggtatcggtcggcgcgcaggcatcggggcagattaagaaactttatgtcaaactcgggcaacaggttaaaaagggcgatttgattgcggaaatcaattcgacctcgcagaccaatacgctcaatacggaaaaatccaaattggaaacgtatcaggcgaagctggtgtcggcacagattgcattgggcagcgcggagaagaaatataagcgtcaggcggcgttatggaaggaaaacgcgacttccaaagaggatttggaaagcgcgcaggatgcgtttgccgccgccaaagccaatgttgccgagctgaaggctttaatcagacagagcaaaatttccatcaataccgccgagtcggaattgggctacacgcgcattaccgcaacgatggacggcacggtggtggcgattctcgtggaagaggggcagactgtgaacgcggcgcagtccgcaccgacgattatccagcttgccaatttggatatgatgttgaacaaaatgcagattgccgagggcgatattaccaaggtgaaggcggggcaggatatttcgtttacgattttgtccgaaccggatacgccgattaaggcgaagctcgacagcgtcgaccccgggctgaccacgatgtcgtcgggcggctacaacagcagtacggatacggcttccaatgcggtctattattatgcccgttcgtttgtgcccaatccggacggcaaactcgccacggggatgacgacgcagaatacggttgaaatcgacggtgtgaaaaatgtgctgattattccgtcgctgaccgtgaaaaatcgcggcggcaaggcgtttgtgcgcgtgttgggtgcggacggcaaggcggcggaacgcgaaatccggaccggtatgagagacagtatgaataccgaagtaaaaagcgggttgaaagagggggacaaagtggtcatctccgaaataaccgccgccgagcagcaggaaagcggcgaacgcgccctaggcggcccgccgcgccgataa

SEQ ID NO: 44658 - DNA, 1173 bp, Neisseria meningitidis
ttgataaccggcacgcccggttcagggaaaacattaaaaatggtttccatgatggcaaacgatgaaatgtttaagccggatgaaaacggcatacgccgtaaagtatttacgaacatcaaaggcttgaagataccgcacacctacatagaaacggacgcgaaaaagctgccgaaatcgacagatgagcagctttcggcgcatgatatgtacgaatggataaagaagcccgaaaatatcgggtctattgtcattgtagatgaagctcaagacgtatggccggcacgctcggcaggttcaaaaatccctgaaaatgtccaatggctgaatacgcacagacatcagggcattgatatatttgttttgactcaaggctctaagcttctagatcaaaatcttagaacgcttgtacggaaacattaccacatcgcttcaaacaagatgggtatgcgtacgcttttagaatggaaaatatgcgcggacgatcccgtaaaaatggcatcaagcgcattctccagtatctatacactggataaaaaagtttatgacttgtacgaatcagcggaagttcataccgtaaataaggtcaagcggtcaaaatggttttatactctgccagtaataatattgctgattcccgtttttgtcggcctgtcctataaaatgttaagtagttatggaaaaaaacaggaagaacccgcagcacaagaatcggcggcaacagaacatcaggcagtatttcaggataaaacagaaggcgagccggtaaacaacggtaaccttaccgcagatatgtttgttccgacattgtccgaaaaacccgaaagcaagccgatttataacggtgtaaggcaggtaagaacctttgaatatatagcaggctgtgtagaaggcggaagaaccggatgcacatgctattcgcatcaagggacggcattgaaagaaattacaaaggaaatgtgcaaggattacgcaagaaacggattgccgtttaacccatataaagaagaaagccaagggcgggatgtccagcaaagtgagcagcaccattcggacagaccgcaagttgccacgttgggcggaaagccgtggcaaaatcttatgtatgataattggcaggagcgcggaaaaccgtttgaaggaatcggcgggggcgtggtcggatcggcaaactga

SEQ ID NO: 44659 - DNA, 1104 bp, Neisseria meningitidis
atgattacattaattacaggcgttcccggttcgggcaaaactttatccgtcgtttcggacttggcgaaaaagataaataatgagtggaaagacaggaagatttttattgaaggcattccggaattaacgatagaaacaacgcccattcccgaaggtcattccattaatgatatgcacgtttggcttcaatatcccgaaaataacggctctgtcgtcatcatagacgaagcgcaaaatgttttcccgccgcgctcccctgccgtaaaagcaccgcctcttgtcgaatggttgcacgttcacaggcattcgggcatagatattatcctgataacgcagatgccccaacgcatagataagcacgtccgcgatttggtaggggcgcattatcatatccataaaaccccgctgggcatttttatgcgttatttttgggactattgtgcgaataatccaaggtcagagttcgccaatgcacgccccgaagtctataagttggataaaaaggcgttcgggctttataaatcagcggaaatccatactaaggtaaaaaccccgaaaagccgcgttttatatatcatccccatcgcattggtattgttcgccctattcttttatttgggctacaagctattattggggctgggtaataaggacggaacagaggaaggagaagctaaaacgcaaacaatcgtttcggaggaacaattagaacaagtcaggggcatggcgtataaggcatcgggcgaagccggaagaaatataggcaatcagttgggctcggacaaagaaaatcagaatttgacgaaagagatgttagaacccacaatagacggtcatcccgaatcaaaaccgatttataacggggtcaggcaggtcagacaaatggagttccccgttgcctgtgtcaaatcgtcaaattcatgcaactgctattcagggcaggcaaccattttaaaagagatagacaaaaaaacctgtatcgattacgtcgataacggaatgccgttcaatccgtataaagaagaacaaagagaaattaagatagataccgacgaacagaaacctttaaaaaaacaagtattagtgatggatgcggcaaaatag

SEQ ID NO: 44660 - DNA, 201 bp, Neisseria meningitidis; identical to SEQ ID NO: 36599

SEQ ID NO: 44661 - DNA, 540 bp, Neisseria meningitidis
gtggcagaatttttttttgatctacgaaaagaaattgacaaagaatgggtattcatcgacggaagttatgtacggtgtcatcaacatgcaagtggagctcggcgtggtttcgatagagcaattggacaaagccgtggcggaaacacgacaaaaatacacctatgtgtggactcgcatggaaatccgctcgattttaaagtcactgggggtaacgtgcacgacggtcaagttgcaaacgacttgatagaagtcatacaagaagcccagtattttatcgctgacaaagggtatgactcgcaagaaatcagagataaagcgatagaacacggtatgaaagctattataccaaagcgtaaaaatgccaagaaacctaaccctgattttgatagctacctttataaattacgccacttagtcgagaatgcatttgcacgattaaagcagtttcgtagtattgctactcgctatgagaaattagctcgtaattttaaatcgatgctttacttggcttgctctattattcatgctaagttaaattga

SEQ ID NO: 44662 - DNA, 183 bp, Neisseria meningitidis; identical to SEQ ID NO: 38993

SEQ ID NO: 44663 - DNA, 612 bp, Neisseria meningitidis
atggccgcccccgccggtgtggccaccgaatgccgccttaccgtacaaggcggcaccgaccgagaaagcgatgcctcactgctggcgcgtctgttgaaaatcatccgccgaccgcccgcaggcggcaaccgttacgactataaaaactgggcgttgagtgttgacggcgtaaccagcgcatatgtttatccgctgcgccgcggcttgggtacggtggatattgccattacctccgccgacggtgtgccatcggaagaaactgtgcgccgcgtacaggcttatatcgacgagatgcgcccggtaacggcaaaaaatgcgctggtactcaagccaaccgtaacggcggtgcctgttaccgtgcaagtcaagctcgacggcatcgacttggacgaggccaagcgccgcatacggacggccctaaaagaatatttcgacaccctgatccccggcgacggcctgactgtgtcgcaaatcgaggcggctatcagcaatgtggatggtgtgatcgaccgccgtctgactgcgccgacggccaaccgtgccgccgatacggttaaccgcatcgagtggtttaaagcgggcgcgattaatgtaacggagatgccgtcatga

SEQ ID NO: 44664 - DNA, 285 bp, Neisseria meningitidis; identical to SEQ ID NO: 37122

SEQ ID NO: 44665 - DNA, 510 bp, Neisseria meningitidis; identical to SEQ ID NO: 42226

SEQ ID NO: 44666 - DNA, 4365 bp, Neisseria meningitidis
atgaaaacaaccgacaaacggacaaccgaaacacaccgcaaagccccgaaaaccggccgcatccgcttctcgcctgcttacttagccatatgcctgtcgttcggcattcttccccaagcttgggcgggacacacttatttcggcatcaactaccaatactatcgcgactttgccgaaaataaaggcaagtttgcagtcggggcgaaagatattgaggtttacaacaaaaaaggggagttggtcggcaaatcaatgacaaaagccccgatgattgatttttctgtggtgtcgcgtaacggcgtggcggcattggtgggcgatcaatatattgtgagcgtggcacataacggcggctataacaacgttgattttggtgcggaaggaagcaatcccgatcaacatcgttttacttataaaattgtgaaacggaataattataaagcagggactaacggccatccttatggcggcgattatcatatgccgcgtttacataaatttgtaaccgatgcagaacctgttgaaatgaccagttatatggatgggcggaaatatatcgatcaaaataattaccctgaccgtgttcgtattggggcaggcaggcaatattggcgatctgatgaagatgagcccaataaccgcgaaagttcatatcatattgcaagtgcgtattcttggctcgttggtggcaatacctttgcacaaaatggatcaggtggtggcacagtcaacttaggtagtgaaaaaattaaacatagcccatatggttttttaccaacaggaggctcatttggcgacagtggctcaccaatgtttatctatgatgcccaaaagcaaaagtggttaattaatggggtattgcaaacgggcaacccctatataggaaaaagcaatggcttccagctggttcgtaaagattggttctatgatgaaatctttgctggagatacccattcagtattctacgaaccacgtcaaaatgggaaatactcttttcacgacaataataatggcacaggaaaaatcgacgccaaacatgaacacaattctctgcctaatagattaaaaacacgaaccgttcaattgtttaatgtttctttatccgagacagcacaagaacctgtttatcatgctgcaggtggtgtcaacagttatcgacccagactgaataatggagaaaatatttcctttattgacgaaggaaaaggcgaattgatacttaccagtaacatcaaccaaggtgctggaggattatatttccaaggagattttacggtctcgcctgaaaacaacgaaacgtggcaaggcgcgggcgttcatatcagtgaagacagtaccgttacttggaaagtcaatggcgtggcaaacgaccgcctgtccaaaatcggcaaaggcacgctgcacgttcaagccaaaggggaaaaccaaggctcgatcagcgtgggcgacggtaaagttattttagatcaacaagcagatgaaaataataaaaaacaagcctttagtgaaatcggcttggtcagcggcaggggtacggtgcaactgaatgccgataatcagttcaaccccgacaaactctatttcggctttcgcggcggacgtttggatttgaacgggcattcactttcgttccaccgtattcaaaataccgatgaaggggcgatgattgtcaaccacaatcaagacaaagaatccaccgttaccattacaggcaataaagatattgctacaaccggcaataacaacagcttggatagcaaaaaagaaattgcctacaacggttggtttggcgagaaagatacgaccaaaacgaacgggcggctcaaccttgtttaccagcccgctgcagaagaccgcaccctgctgctttccggcggaacaaatttaaacggcaacatcacgcaaacaaacggcaaactgtttttcagcggcagaccaacaccgcacgcctacaatcatttaaacgaccattggtcgcaaaaagagggcattcctcgcggggaaatcgtgtgggacaacgactggatcaaccgcacatttaaagcggaaaacttccaaattaaaggcggacaggcggtggtttcccgcaatgttgccaaagtgaaaggcgattggcatttgagcaatcacgcccaagcagtttttggtgtcgcaccgcatcaaagccacacaatctgtacacgttcggactggacgggtctgacaaattgtgtcgaaaaaaccattaccgacgataaagtgattgcttcattgaccaataccgacatcagcggcaatgtcagccttgccgatcacgctcatttaaatctcacagggcttgccacactcaacggcaatcttagtgcaaatggcgatacacgttatacagtcagccacaacgccacccaaaacggcgaccttagcctcgtgggcaatgcccaagcaacatttaatcaagccacattaaacggcaacacatcggcttcgggcaatgcttcatttaatctaagcgaccacgccgtacaaaacggcagtctgacgctttccggcaacgctaaggcaaacgtaagccattccgcactcaacggtaatgtctccctagccgataaggcagtattccattttgaaagcagccgctttaccggacaaatcagcggcagcaaggatacggcattacacttaaaagacagcgaatggacgctgccgtcaggcacggaattaggcaatttaaaccttgacaacgccaccattacactcaattccgcctatcgccacgatgcggcaggggcgcaaaccggcagtgcgacagatgcgccgcgccgccgttcgcgccgttccctattatccgttacacctccggcttcggtagaatcccgtttcaacacgctgacggtaaacggcaaattgaacggtcagggaacattccgctttatgtcggaactcttcggctaccgcagcgacaaattgaagctggcggaaagttccgaaggcacttacaccttggcggtcaacaataccggcaacgaacctgcaagcctcgaacaattgacggtagtggaaggaaaagacaacaaaccgctgtccgaaaaccttaatttcaccctgcaaaacgaacacgtcgatgccggcgcgtggcgttaccaactcatccgcaaagacggcgagttccgcctgcataatccggtcaaagaacaagagctttccgacaaactcggcaaggcagaagccaaaaaacaggcggaaaaagacaacgcgcaaagccttgacgcgctgattgcggccgggcgcgatgccgtcgaaaagacagaaagcgttgccgaaccggcccggcaggcaggcggggaaaatgtcggcattatgcaggcggaggaagagaaaaaacgggtgcaggcggataaagacaccgccttggcgaaacagcgcgaagcggaaacccggccggctaccaccgccttcccccgcgcccgccgcgcccgccgggatttgccgcaactgcaaccccaaccgcagccccaaccgcagcgcgacctgatcagccgttatgccaatagcggtttgagtgaattttccgccacgctcaacagcgttttcgccgtacaggacgaattagaccgcgtatttgccgaagaccgccgcaacgccgtttggacaagcggcatccgggacaccaaacactaccgttcgcaagatttccgcgcctaccgccaacaaaccgacctgcgccaaatcggtatgcagaaaaacctcggcagcgggcgcgtcggcatcctgttttcgcacaaccggaccgaaaacaccttcgacgacggcatcggcaactcggcacggcttgcccacggcgccgttttcgggcaatacggcatcgacaggttctacatcggcatcagcgcgggcgcgggttttagcagcggcagtctttcagacggcatcggaagcaaaatccgccgccgcgtgctgcattacggcattcaggcacgataccgcgccggtttcggcggattcggcatcgaaccgcacatcggcgcaacgcgctatttcgtccaaaaagcggattaccgctacgaaaacgtcaatatcgccacccccggccttgcgttcaaccgctaccgcgcgggcattaaggcagattattcattcaaaccggcgcaacacatttccatcacgccttatttgagcctgtcctataccgatgccgcttcgggcaaagtccgaacgcgcgtcaataccgccgtattggctcaggatttcggcaaaacccgcagtgcggaatggggcgtaaacgccgaaatcaaaggtttcacgctgtccctccacgctgccgccgccaaaggcccgcaactggaagcgcaacacagcgcgggcatcaaattaggctaccgctggtaa

SEQ ID NO: 44667 - DNA, 867 bp, Neisseria meningitidis
atggcaggtgaaaccattaccgctgccgactacatcaagcaccacttgcagagcttgaccagtttgtcggatgttactcagggtcagggactgaaaaacattgctgatttttcgtttattaaccttgatgccgtcttttttgccgtcctgttgggcgtaatcggcagctttctgttgtggcgcggtgcaaaaaaagcgacggcaggcgttcccggacgtttccaggccgccgtggaaatcttgtttgagtttgtggacgatatgtgtaagagcatcattcacaacgaaaagtctagaaaagccgtcgcgccgttgggtctgacgctgtttgtctggattttcctgatgaacgcgatggatatgctgccggtcgatttgctgccgatggtatggcagggcattaccggcaaccatcacgccctgttgcgcgtcgtaccgactgccgatttgaacaccactttggcactcgctgtcggcgtgttgctgatttgtatctattacaacatcaaaatcaaaggattgggcggatggtttcacgagttgttcagcgcgccgttcggtgcaaaactcgcacctgcgaacttcctgctgaatttggtcgagtttctttctaaaaccgtatcccacggtatgcggttgttcggcaatatgtatgcaggcgagttggtattcttgttgatagccttgcttggcggtgcttgggcggctttcggcagcgtcgaagtcatggatccgattctgtttgtattccacattattgccggtttggcatgggcgattttccatattttggtgattaccctgcaggcgtttattttcatggcgttggcgttcgtctatatcggacaggcacatgatgcgcactga

SEQ ID NO: 44668 - DNA, 963 bp, Neisseria meningitidis
atgcaagcacggctgctgatacctattcttttttcagtttttattttatccgcctgcgggacactgacaggtattccatcgcatggcggaggtaaacgctttgcggtcgaacaagaacttgtggccgcttctgccagagctgccgttaaagacatggatttacaggcattacacggacgaaaagttgcattgtacattgcaactatgggcgaccaaggttcaggcagtttgacagggggtcgctactccattgatgcactgattcgtggcgaatacataaacagccctgccgtccgtaccgattacacctatccacgttacgaaaccaccgctgaaacaacatcaggcggtttgacaggtttaaccacttctttatctacacttaatgcccctgcactctctcgcacccaatcagacggtagcggaagtaaaagcagtctgggcttaaatattggcgggatgggggattatcgaaatgaaaccttgacgactaacccgcgcgacactgcctttctttcccacttggtacagaccgtatttttcctgcgcggcatagacgttgtttctcctgccaatgccgatacagatgtgtttattaacatcgacgtattcggaacgatacgcaacagaaccgaaatgcacctatacaatgccgaaacactgaaagcccaaacaaaactggaatatttcgcagtagacagaaccaataaaaaattgctcatcaaacccaaaaccaatgcgtttgaagctgcctataaagaaaattacgcattgtggatggggccgtataaagtaagcaaaggaattaaaccgacggaaggattaatggtcgatttctccgatatccgaccatacggcaatcatacgggtaactccgccccatccgtagagactgataacagtcatgaggggtatggatacagcgatgaagtagtgcgacaacatagacaagggcaaccttga

SEQ ID NO: 44669 - DNA, 1152 bp, Neisseria meningitidis
atgcagacatggcagcttccggaacatatcgccgacgtactgcccacgaacgcgcggcagcttgaaagcgcgagggagcagttgttggcactgttccgcgtacacggttatgaactggtacagcctccgctgatggagtacgcacattccctgctgacgcatatcgatgcggggctttccctgaaaaccattttggtaacggacaggctcagcggcaggcagttgggcatacgcgccgacatcacgccgcaggtggcgcgtatcgatgcccatcttttatccgccaaccaagggattaatcggttgtgttatgccggtccggtgttgcacgcgcagcccgacggtctgctgaatatgcgcgaacccttgcaggcaggggcggaaatgtacggttttgccgacatccgtggcgacatcgagctgatagacctgatgctgaaaagcatgaaaattgccgatatgggcaaagtgctgctttcgctggggcatatcggcatatttcgcgccttgtccgatgcggcgcatttggatgcggggcagtctgcaacgctgcttgccttgatgcaggataaagataccgggacggtcgaagcgcaggtcaaggcttggaagctggacggcatgtgggcaaaagcattctcgctgctgccgcgcctgtacggcgggcgtgaagtgttgtccgacgcgcgcggacggttgccggatttgtcggcggtcggcggcgcgttagacgaattgcaggcggtgtgcgacgcattccccgattgtgaaatccatatcgacttgtccgagctgcgtgtcgacaattaccacacgggcttgctgtatgccgcctatgccgccgatttccacgacgcggtcgcgcgcggcgggcgttatgacggattgggcggatatttcggcagggcgcgcccggcaacgggattcagtttcgacttgcgcagctttatcgggcgtttgcctaccagcgaacggcagcccgccgtgttggtcgatgcggaagatgccgaagcggcgcgcgaagcagtcgaagccttgcgtgaacaagggcagtgtgtcgtgattgactacggtatcggacacaatgtttcggaagagcttgcaggccgtctgaaaaagacggacggcgtttggcaggtcgtgaaacgctaa

SEQ ID NO: 44670 - DNA, 996 bp, Neisseria meningitidis
ttgaaggctgcctatcaaaatattgcaactgtctggcagggcgatttccacaatgccaaacaggtgctttctgcaatgaagaagagggctcgcaaacctgccgccgtccgttccgatgcggatatcgccgcccttttccatgcccaccgtatgaagcaggcgcagcagagccgtattctgaatatgcttgccgttgaaatccgccccggttttgtgttggacaacaaacgcgcgcccgatatacgcgccgccctgctcgacgtgtacggagaggcggacggcaaaccgtttttcctgccgctcaatctgctgctggggtttatgggtgcgcacgagtggcataagaaaggggttgccgttccgcagctgggcggcagcatacacgttcctttcggcgtattctcgccgttgcgcggcgaatacctcgacctgctcgcccatgcgccgtcaacgggttttcagacggcattcgatatcgggacgggctcgggcgtgcttgccgccattttggcgaaacagggcattccttccgtcatcggcacggataccaatccgaaagccgtcgcctgcgcccgtgccaatattgcccgtttgggctttgaaaaacaggttgagatacgggaaaccgatctgtttcccgaagggtttgccgatctgattgtctgcaatccaccctggcttcccgccaagccgacttccgccgtcgaatccgcgttatacgaccccgaatctgcgatgctggctgcgtttttgcgggatgcgccgaaacatctgaatcccgacggagaaatccgcctgattatttccgaccttgcagagcatttggggctgcgccctgccgattttttggaaaaggcatttatccgggcgggtttgcgtgttgccgatatgatgaaaaccaagccgaagcacaaaaaagccgcgaatccgagcgatccgcttgcttttgcgcgaacccgggaaaccactttcctataccgtttgaaaaaggcataa

SEQ ID NO: 44671 - DNA, 318 bp, Neisseria meningitidis
ttggaaatgtttgacggcgaagtagaagcagatgaaagttattttggcggacaacgcaaaggcaaacgcggtcgcggtgctgccggtaaagtcgccgtattcggtcttttgaagcgaaatggtaaggtttatacggttacagtaccgaatactcaaaccgctactttatttcctattatccgtgaacaagtgaaacctgacagtattgtttatacggattgttatcgtagctatgatgtattagatgtgcgcgaatttagccattttagcttcgctgaaacttcgttttcgtatcaatcacagcacacattttgctga

SEQ ID NO: 44672 - DNA, 2061 bp, Neisseria meningitidis
atgacccaaacccttttaatcgaactccttaccgaagaactcccgcccaaagctctgaataatctgggcaaccattttgccgccgccgttgccgaaggcttggaaaaagcgcaactggttgacggtgcagccgaatttacggcttatgcctcgccgcgccgtttggcggttcaagtcaaaaacgtcaaagccgttcaggccgaccaaaaaatcgtgaaaaaaggccctgccgtggcgaatgccatgaaagacggtgcgccgaccaaggctttggaaggtttcgcacgcggtgcgggcgcgaaaatcgaagacttgaccatcgtccacgacggcaaacaggatgtgtacgcctacgaatacgtccaaaccggcaaaccgctgggcgaacttttggaagacattatcaatcaagccgttaagaaactgccgattccgaaagtgatgcgttggggcagcagcacgtttaccttcgtgcgccctgttcacgggctgattgtgctgcacggcggcgacatcgtaaacgtcagcgttttgggtctgcaaagcagcaatcaaaccttgggacaccgcttcttgtccaacggcgaaatcaccattgaaaacgccgacagctacgccgaacaaatgcgcgggcaaggcaaagtcgtcgcttcgtttgccgagcgcaaagccgcgattcagacggcattggaagggcaggcgcgccgtctgaacgcgaccgttgccgccgatgaagcattgctggacgaagtaaccgcgctggtcgaataccccgttgttttggaagccggttttgaggaacacttcctcgccgtgcctcaagaatgcttgattttgacgatgcagcaaaaccaaaaatacttcccgctgctcgaccaaaacggcaagctgatgaaccgcttcctgctggtttccaacctgcaaaccgaagacccgtcgcacatcatccgaggcaacgaacgcgttttgcgcgcgcgcctgtctgatgccgagttcttctacaaacaagaccaaaaagcgactttggaaagccgcctgccgaaattgtccagcgtggtgtaccacaacaaaatcggctcgcaagccgaacgcatcgaacgcctgcaaagcattgccgcccacatcgccaaagcattgggcgcggatgccgccgctgccgaacgcgccgcgcgtctggcaaaagccgacttggtaaccgaaatggtcggcgagttccccgaactgcaaggcacgatgggcaaatactatgcccgcttggacggcgaaaccgaagaaatcgccgaagccgtcgagcaacattaccaaccgcgttttgccggcgacaagctgcccgaaagcaaaattgccgccgccgtggcactggcggacaagctggaaaccctggtcggcatttggggcatcggtctgattccgaccggcgacaaagacccatacgccctgcgccgcgccgccttgggtattttgcggatgctgatgcagtacggtttggacgtgaacgaactgattcagacggccttcgacagcttccccaaaggtttgctcaacgaaaaaacgccgtctgaaaccgccgactttatgcaggcgcgccttgccgtgttgctgcaaaacgattatccgcaagacatcgttgcagccgtattggcgaaacagccgcgccgtttggacgatttaaccgccaaactgcaagccgttgccgcgttcaaacaactgcccgaagccgccgcgctcgccgccgccaacaaacgcgtgcaaaacctgctgaaaaaagccgatgccgagttgggcgcggttaacgaaagcctgttgcaacaggacgaagaaaaagccctctttgctgctgcgcaaggcttgcagccgaaaatcgccgccgccgtcgccgaaggcaatttccaaaccgccttgtccgaactggcttccgtcaagccgcaagtcgatgcattctttgacggcgtgatggtaatggcggaagatgccgccgtgaaacaaaaccgcctgaacctgctgaaccgcttggcagagcaaatgaacgcggtagccgacatcgcgcttttgggcgagtaa

SEQ ID NO: 44673 - DNA, 966 bp, Neisseria meningitidis
atgagctacacgcaactgacccaaggcgaacgataccacatccaatacctgtcccgccactgcaccgtcaccgaaatcgccaaacagctgaaccgccacaaaagcaccatcagccgcgaaatcagacggcaccgcacccaagggcagcaatacagcgccgaaaaagcccagcggcaaagccagactatcaaacagcgtaagcgacaaccctataagctcgattcgcagctgattcagcacatcgacacccttatccgccgcaaactcagtcccgaacaagtatgcgcctacctgtgcaaacaccaccagatcacgctccaccacagcaccatttaccgctaccttcgccaagacaaaagcaacggcagcacgttgtggcaacatctcagaatatgcagcaaaccctaccgcaaacgctacggcagcacatggaccagaggcaaagtccccaaccgtgtcggcatagaaaaccgacccgctatcgtcgaccagaaatcccgtatcggcgattgggaagccgacaccattgtcggcaaaggacagaaaagcgcattattgaccttggtcgaacgcgttacccgctacaccatcatctgcaaattggatagcctcaaagccgaagacactgcccgggcagctgttagggcattaaaggcacataaagacagggtgcacaccattaccatggataacggcaaagagttctaccaacacaccaaaataaccaaagcattgaaagcggagacttatttttgtcgcccttaccattcttgggagaaagggctgaatgagaacaccaacggactcatccggcaatacttccccaaacaaaccgatttccgtaacatcagtgatcgggagatacgcagggttcaagatgagttgaaccaccgaccaagaaaaacacttggctacgaaacgccaagtgttttattcttgaatctgttccaaccactaatacactag

SEQ ID NO: 44674 - DNA, 225 bp, Neisseria meningitidis
atgaacagcgaaactttagacgtaaccggattgaaatgtcccctgccgattttgcgggcgaaaaaggctttggcgcaaatgcagcagggcgacgtgttgaccgttctggcaaccgacggcggcgcaccgggggattttgaggctttttgccgccaaaccggtcatgtgctgttggatgcttccgaacaggagggcgtgttcacgctggtcgtcaagcacaaataa

SEQ ID NO: 44675 - DNA, 447 bp, Neisseria meningitidis
atgagactgaccaccaaagggcgtttcgccgttaccgctatgctggatttggcgatgaacgcgcaaaccggcgccgtcaaactcagtgccatcagcgaacgccaaaacatatccctctcctatctcgagcaattgttcggcaaactccgccgcgccggacttgttgaaagcctgcgcgggcccggcggcggctacatcctcgccgcaccggcggcacgcatcaacatcgcccaaatcatcgccgccgccgaagaccggctggacgcgacccaatgcggcagcaaagccaactgccaccacggcgcgccctgcctgacgcacgacctttgggagaatttaaacaaaaccatcaacgactacctcggcagcgttaccctgcaaagcatcatcgaacagaaaaacaacggcgacggcagccgcgtcgtccaatttacacacatccattaa

SEQ ID NO: 44676 - DNA, 156 bp, Neisseria meningitidis; identical to SEQ ID NO: 38050

SEQ ID NO: 44677 - DNA, 990 bp, Neisseria meningitidis
atgaaacagcctgtttttgccgttacttccggcgagcctgccggcatcggccccgatatttgtttggacttggcgtttgcacgcctgccctgccgctgcgcggtattgggcgacaaaaacctattgcgcgcgcgcgccgaagccttgggcaaaagcgtcgtcttgcgcgacttcgatccggaatcaggcggcgcggcatacggcgagctggaagtgctgcacatccctgccgccgaagcggttgaggcagggcggctcaatcccgccaacgccgcctatgtgctgcaacttttggataccgcgctcgcaggcatttcagacggcattttcgacggcatcgttaccgcgccgctgaacaaaggcatcatcaacgacgcgcgcgcaagcacaggttttttcagcggacacaccgaatatctggcggaaaaaagcggcacggggcaggttgtgatgatgcttgccggcaaaggcctgcgcgtcgccctcgtaacgacccacctgccgctgaaagacgttgccgccgccatcacgcaaccgctgattgaaagcgtcgcacgcattttgcatcacgacttaaaacacaaattcggcatcaaaaatcccaaaatcctagtcgccggactcaacccccacgccggcgaaggcggacacctcggacacgaagaaaccgacaccattatccccgcgctcgaaaacctgcgccgcgaagggataaacctcgccggcccgtatccggcggataccttgttccaaccgtttatgctcgaaggtgcggatgccgtattggcgatgtaccacgaccaagggctgcccgtgttgaaataccacagcttcggacagggcgtgaacatcacgctcggcctgccctttatccgcacctccgtcgatcacggcaccgcgcttgatttggcggcaaccggcagggcggattccggcagcctgataactgccgtggagaccgccgtcgagatggcgcgcggcagcctttaa

SEQ ID NO: 44678 - DNA, 864 bp, Neisseria meningitidis
atgagaatcctattgacaggctcaaaaagccaactggcacgctgcctgcgcgaccgtcttccggaagactgggaaaccattgcgacggattccgcatccctagacattaccgatgccgatgccgtctgcaacatggtcaaaagtttccaacccgacgctattgtcaacacggctgcctatactgccgtcgacaaagcggaaggcaatgcggcagcggcatttgccgtcaatgcttccgccgtttacaaccttgccttggcagcacatcgcgcccatgcccgattcatccacatctcaaccgactatatctttgacggtaaagggaaaaggccctatcaggaaagcgactttaccaatccttccaatgtatacggacaatccaaaaccgcaggcgagctgctcgcactgtctgccaatcccgacagccttatcctgcggacttcttggctgtttagcgaatacggggacaactttgtccgcaccatgctgaaccttgcgcgggaacgttccccgctgtccgccgtccacaaccaaatcggctgcccgacctatgccggcgatttagctgccgccatcatccgccttttgcagcaaacgtcgcccgtgcgcggcatttaccactacgccggcggcaaatccgtatcctggtacgaatttgcccaacatattttccaagcggcatcgcaacagcagacatccttccccgttcccgaattgactgccgtttcagacaaggaatatccgaccgccgcccccaggcccgcatacagcattttggactgccgcaaaatcgaaaacgacttcggcatcaaaccgtcagactggcaaaaagcccttgcacaggtcgtttccaagctgctctga

SEQ ID NO: 44679 - DNA, 171 bp, Neisseria meningitidis; identical to SEQ ID NO: 36504

SEQ ID NO: 44680 - DNA, 798 bp, Neisseria meningitidis
atgaaccgtctttacccccacccgattatcgcccgtgagggctggccgattattggcggcggtttggctttgagcctgctggtgtcgatgtgttgcggctggtggtctttgccgttttgggtgtttaccgtatttgccctgcagtttttccgcgaccctgcgcgtgagattccgcaaaatcctgaagcagtgttgagtccggttgacggccgtatcgtggtggtcgagcgcgcacgcgatccgtatcgtgatgtcgatgctttgaaaatcagtatttttatgaacgtgttcaacgtgcattcgcaaaaatcgcctgccgattgtacggtaacgaaagtggtctataacaaaggcaaattcgtgaatgcggatttggacaaagccagcacggaaaacgaacgtaatgcggtgttggcgactacggcttccggtcgtgaaattacttttgttcaagtggccggtttggtggcgcgccgtattttgtgctacacccaagcaggtgcgaaactgtcccgcggcgaacgttatggctttatccgcttcggttcgcgcgtggatatgtatctgcctgtcgatgcgcaggcgcaagtggcgattggcgataaagtaactggcgttagcactgtattggcgcgtttgccgctgactgcgccgcaaatcgaatccgagcctgagtctgagcctgctttacaaactgctccggttgaaacagcggcaaacccatctgccgaacaacggcaaatcgaggcagcggcggctaagattcaggcggctgtgcaagatgtgttgaaagattaa

SEQ ID NO: 44681 - DNA, 1557 bp, Neisseria meningitidis
atgacattagcagagttttggccgctgtgcctccgccgtcttcacgatatgttgcctcaagggcagtttgcgcaatggattgcgccccttaccgtcggtgaggagggtggcgtatgggtggtgtacggcaagaaccagtttgcctgcaatatgcttaagagccagtttgccgggaaaatagaagcggtgagggaagagttggctgctggccgttccgccttcgtattcaaaccaggagaaggcgtgcgttatgagatggcggcggttgaaggtgctgtcgaacctgccgagccgtccttgcacgcggggtcggaggagatgcctgtgcaggaggttctgttggacgagctgccgtctgaagagcctgtcaaacccgctgcgtcgaaaacggcggcggatattctggcggaacgtatgaaaaacctcccgcatgagccgcgccatactgccgaacctgcttcccgtccggaatcggaggtgcttgcgaaagcgcggacggatgcgcagcgcgatgcggaagaggcacgttacgagcagaccaatctgtcgccggactatacgttcgacacattggtcgaaggcaagggcaaccgccttgcggcggctgcggcgcaggcgattgcggaaagcccggggcagagctacaacccgtttttcctgtacggcagcacgggtttgggcaaaacccacctggtacaggcggtcggcaacgagcttttgaaaaaccgtcccgatgccaaagtgcgctatatgcattcggacgactatatccgcagctttatgaaggcggttcgcaacaatacctatgacgtattcaagcagcaatacaagcaatacgacctgctgattatcgacgatattcagtttattaaaggaaaagaccgtacgatggaagagtttttctatctgtacaaccatttccacaacgagaaaaaacagctgatcctcacttgcgatgttttacccgccaaaatcgaaggcatggacgaccgcctcaaatcccgtttttcatggggactgactttggaactcgagccgcccgaattggaaatgcgcatcgccattttgcagaaaaaggcggaagcggcgggcatcagtattgaagacgaagccgcgctgttcattgccaatctgatccgttccaacgtgcgcgagcttgaaggcgcgtttaaccgtgtcggagcgagcagccgctttatgaaccgtcccgtcatcgacatcgatttggcgcgtaccgctttgcaggacattattgccgagaagcataaggtcattaccgccgatatcattattgatgccgttgccaaatattaccgcatcaaaatcagcgacgtactcggcaaaaaacgcacgcgcaacattgcccgtccgcgccaggtggcgatgagcctgaccaaagaactgaccactttgagcctgccgtctatcggcgattcgttcggtgggcgcgaccatacgaccgttatgcacggcatcagggcagtggcgaaactgcgcgaagaagatccggaattggctcaggattatgaaaagctgctgattctgattcaaaactga

SEQ ID NO: 44682 - DNA, 663 bp, Neisseria meningitidis; identical to SEQ ID NO: 38761

SEQ ID NO: 44683 - DNA, 1458 bp, Neisseria meningitidis
atgtcccggcatcccgcccccaccggagaaaaaacattcttcggccaccccttccagctttccaccctcttccatatcgaattgtgggaacgtttttcattttacggaatgcagggcatcctgctgatttacctctactacaccgccgacaaaggcggcttgggcatagacaaaaccctcgccggcggcattgtcggcgcatacagcggcagcgtgtacctgtccaccattttgggggcgtggtttgccgaccgagtatggggtgcggaaaaaaccctcttcctctcgggcatcgtcgtgatgctcggacacatcgtccttgccgccgccccgggcctgtacggtcttttaatcgggctgatattcatcgcattgggcagcggcggtgtgaaatctacggccagttctatggtgggcgcattatacgaacaggacgaaatgcgcccgctgcgcgatgcgggattttccattttctacatcgccatcaacatcggcggcttcctgggcccgctgctgaccggcctgctgcaggaaaacatcggtttccattatggtttcggcgcggcggcggtcggtatggcattcggcttgtggcgttattccttgggacgtaaaaacctgccccaccccaccgtcccccatccgctttcaaaaggacagggcaaaactgcggccgccgtcggcatcaccctcatcgccgcacttgcaaccgccatcaaaaccgggcttgtcaacctcgacaatttctccggcatcctcttatctaccgtcatccttgccgtcattgcctatttcgcccgcctgctgaccaacccccgcgtcagttccgacaacaaacggcacatcatcgcctacatcccgcttttcctgaccatctgtatgttttgggccgtttggtttcagatttacaccgtagcaaccgtctatttcgacgaaaccgtcaaccgcaccatcggttcgtttaccgtgcccgtcgcctggaaagattctatgcaaagcctgtgggtcatcctgttttccggacttatggcggcaatgtggacaaaaatggggcgcaaacagcccaaaaccccgctgaaattcgctatggcggtatttgttaccggcgcgtcgtttttgggattcatcccctttatttccgccggcacgccgatgcctattgcggttttcgcactgattgtccttgccatcacgataggcgaactgatgatttccccgattgcgctgtccatctccaccaaaatcgcaccgcctttattcaaaacccaaatggtcgcccttaatttccttgccttttcattaggcttcactttgggcggcgtattgtttgaaaaatgctatcaggcgggcgacgaaatcggcttctatcggctgctgttctacatcggcgcagccacaggcttcctgctgctcctgctcgtccccaaattgaacaaaatgctcgaaggcacagactaa

SEQ ID NO: 44684 - DNA, 1065 bp, Neisseria meningitidis
atgactcttttaaaaaacgatactttcctccgcgccctgctcaaacagcccgtcgaatacacgccgatttggatgatgcgtcaggcggggcgttatctgcccgaatacaaagccacacgcgcgaaagcgggcagcttcctcgatttgtgcaaaaacaccgaattggcgaccgaagttaccatccaacctttggaacgcttcgatttggacgcggcgattttgttttccgacatcctgaccgtccccgacgcaatgggcttgggactgtattttgccgaaggcgaaggcccgaaattcaaacgcgccctgcaacacgaagccgatatcgccaagctgcacgttcccgacatggaaaaactgcaatacgttttcgacgcggtaacttccatccgcaaagcattggacggccgcgtaccgctcatcggcttctccggcagcccgtttacgctcgcctgctacatggtcgaaggcggcggcagcaaagaattccgcaccatcaaaaccatgatgtattcgcgccctgatttgctgcacaaaatcctcgacaccaacgcccaagccgttaccgcctacctcaacgcccaaatcgacgcgggcgcacaggctgtgcagattttcgacacttggggcggcgtgttgagcgacgcggcgtttaaagaattcagcctcaaatacatccgccaaatcgttgccggactgaaacgcgaaagcgaaggtcgccgcgtgcctgttatcgtatttgccaaaggcggcgggctgtggctggaaagcatggcagaaatcggcgcagacgcattgggcttggactggacgtgcaacatcggcgaagcacgccgccgcgtcggcaagcaagtcgccctgcaaggcaacttcgacccgtttgccctcttcggtacgcccgaatccatccgcaccgaagccgcacgtatcctggccgactacggacaaggcagcggtcatgtcttcaacctcggacacggcatcaaccagcacgccgatcccgaacacgccaaaatcttagtcgataccgtacacgaattgtcgcggcattatcacggtgggtaa

SEQ ID NO: 44685 - DNA, 747 bp, Neisseria meningitidis
atgaacgttttgatttccaacgacgacggctacctctccgaaggtattgccgttttggcgcgcgttacggcggaatttgccaacgtcagggtggttgcgcccgaacgcgacaggagcggggtcagcaattcgctgacgctggaacgccctttgcagttgaaacaggcgcaaaacgggttctactatgtcaacggcacgccgaccgactgtatccacatcgggcagtctgtattttcggattttcaggccgattttgtcttttcgggcatcaaccggggcgcgaatatgggggacgacacgctttattcggggacggttgcggcggcaaccgaagcctaccttatgggcatacccgctgtggcgttttccttaaacgacgcttccggacgctattgggcaaccgcagaaaaggcactgtggacattgttggcgcattttttcaaaaaccccccgcagtcccctattttgtggaacatcaatatccccgccgtcgagccggaagatgtgcggggcattaaaatcgcccgtttgggcaggaggcatcacggtcagaacgtcatccccgcgcgcaatccgcgcggcgaacagatttattggataggcccggtaggcagggtttccgacaaagaagagggaacggatttcggtgaatgcggcgcaggtttcattaccgtaacgccgctgcaaatcgacctgaccgcctatccggacatggcggaaacagcggcgttctggcatgcggactga

SEQ ID NO: 44686 - DNA, 1194 bp, Neisseria meningitidis; identical to SEQ ID NO: 39147

SEQ ID NO: 44687 - DNA, 159 bp, Neisseria meningitidis
atgaaaccccccctccccatctgcaccctgtcggcactcgccgcctgcaccctttccggacaaggcggcactcaggtttacggcgaaatcaaagcccgagacctttgcgttaccgctcctatcctgctttctgctttctgtcttgcctgctctcgttga

SEQ ID NO: 44688 - DNA, 918 bp, Neisseria meningitidis
atggttttggacgggtttgcggcgcattttgacgcttatttggaaaacatcgtgcgcgagggcaagtcggagcacacggtggcggcataccggcgcgatttggaagaactgtttgcgctgttggcacaaatgccgtctgaagatgcaggcggcgtgccgcaggacttgtcgcggcgcgattttacggcggcgttgcggcggctgtcgcagcgcggtttgaatgcgcggacgctggcgcgcaagctgtcgtcttggcggcagtattgtgtttggctggtggaacgcggtctgctgcataccgacccgaccgccgacatcaaaccgccgaagcagcccgagcgcgtacccaaagcactgccgcaggaatggctgaaccggatgctggatttgcccgtggacggcggcgacccgctggcggtgcgcgaccacgccctgttcgaactgatgtacggcagcggtttgcgcgtgagcgagatacacggcttgaatgcagatgatgtctatttggacgaggcgtgggtacacgttaccggcaaagggcgcaagcagcggcaggtgccgctgaccggcaaaagcgtggaagccctgaaaaactatctgccgctgcgtcagacggcatcggacggcaaagccctgtttaccggcaggaacggcacgcgcctgagccaacgccaaatccaaaaacgtttggcgcaatgggcggcgcaaaacggcgacggcaggcacgtttcgccgcatatgatgcgccacagctacgccggacacctgttgcaggcttcgcgcgacatcagggcggtgcaggagctgctcgggcacagcagcctttcgaccacgcagatttacaccaaactcgatttcgaccacatcgcccgcctgtatgacgaagcccacccgcgcgccaagcggcaggacgaatga

SEQ ID NO: 44689 - DNA, 756 bp, Neisseria meningitidis
atgaagtatgtccggttatttttcctcggcgcggcactcgccggcactcaagcggcggctgccgaaatggttcaaatcgaaggcggcagctaccgcccgctttatctgaaaaaagataccggcctgattaaagtcaaaccgttcaaactggataaatatcccgttaccaatgccgagtttgccgaatttgtcaacagccacccccaatggcaaaaaggcaggatcggttccaaacaggcagaacccgcttacctgaagcattggatgaaaaacggcagccgcagctatgcgccgaaggcgggcgaattaaaacaaccggtaacaaatgtttcctggtttgccgccaacgcctattgcgccgcacaaggcaaacgcctgccgaccattgacgaatgggaatttgccggacttgcttccgccacgcagaaaaacggctcaaacgaacccggctacaaccgcactattctcgattggtatgccgacggcggacggaaaggcctgcacgatgtcggcaaaggccgcccgaactactggggcgtttatgatatgcacgggctgatttgggaatggacggaagatttcaacagcagcctgctttcttccggcaatgccaacgcgcaaatgttttgcagcggcgcgtctatcgggtcgagcgactcgtccaactatgccgccttcctccgctacggcatccgcaccagcctgcaatccaaatatgtcttgcacaacttgggcttccgttgcacaagccgataa

SEQ ID NO: 44690 - DNA, 642 bp, Neisseria meningitidis
atgctgaaacccgaaaccatacacatatccggtcctgccggcattttagaaaccatccatatcccgtccgaacaagtaccggcacgcggtgttgccgtcatcaatcatcccaaccccctccagggcggaacaaacaccaacaaagttatccaaactgccgccaaagccttaagcaaactcggcttccactgctacctgcccaaccttcgcggcgtaggcggcagcggaggcacacatgattacggacgcggcgaaacgcaagactgcctcgccgtcatcgattatgcccgcgcccaacaccccgaagcccccgaatttgccttatccggcttctccttcggcggttatgtcgccacatttgccgcacaagcgcgcatacccgacctgttactgctcatcggcgcggcagtctgccactataccaaccgccccgagccgtccgccgttccctatgttgccaaaacgctgatgatacacggcgcggaagacgaagtcgtcgaaatcgaaaaagccctgaaatgggccgaaccgcaagatttgcccgtcattaccatcgccggttccacgcatttcttccacggcaaactcatcgtcctgcgcgacaccatcctccgcttcgcgcccgtatgcctgaacggataa

SEQ ID NO: 44691 - DNA, 564 bp, Neisseria meningitidis
atgaaactcatcattctcgaccgcgacggcgtcatcaatcaggaccgcgacgacttcgtcaaatccgttgacgagtggatacctgtcgaaggcagcatggatgcggtggcatttctgacgcaggcaggctacaccgtcgccgttgccaccaaccaatccggcatcgggcgcaaatattttaccgttcaaaaccttaccgaaatgcacgccaaaatgcaccgcctcgtccgtcaggcaggcggcgaaatcaacggcatctggttctgcccgcacaccgatgccgacaactgcaactgccgcaagcccaaaccgggtatgattgaagacatcatcggacgcttcaacgcccaagcctcggaaacctggctggtcggcgacagcctgcgcgatttgcaggcaatcgatgccgtcggcggaaaacccgcgctggttctgaccggaaaaggcaaaaaaacgctctcccaacacggacacgaattacccgaacacacacaggttttcgataccttgctcgatttctcacaatacatcatgcaggaaaacaccgcaccgcaagccgactga

SEQ ID NO: 44692 - DNA, 471 bp, Neisseria meningitidis; identical to SEQ ID NO: 36859

SEQ ID NO: 44693 - DNA, 246 bp, Neisseria meningitidis; identical to SEQ ID NO: 38257

SEQ ID NO: 44694 - DNA, 495 bp, Neisseria meningitidis
atgaagaaaaccctgttggcaattgttgccgtttccgccttaagtgcctgccggcaggcggaagaggggccgccgcctttaccccggcagattagcgaccgttcggtcggacactattgcagtatgaacctgaccgaacacaacggccccaaagcccagattttcttgaacggcaaacccgatcagcccgtttggttctccaccatcaagcagatgttcggctataccaagctgcccgaagaacccaaaggcatccgcgtgatttacgttaccgatatgggcaatgttaccgattggacgaatcccaatgccgacacggagtggatggatgcgaaaaaagccttttacgtcatcgacagcggctttatcggcggtatgggtgcggaagacgcgctgccgttcggcaacaaagagcaggctgagaaatttgcaaaggataaaggcggtaaggttgtcggtttcgacgatatgcctgatacctatattttcaagtaa

SEQ ID NO: 44695 - DNA, 1026 bp, Neisseria meningitidis; identical to SEQ ID NO: 39757

SEQ ID NO: 44696 - DNA, 855 bp, Neisseria meningitidis; identical to SEQ ID NO: 38135

SEQ ID NO: 44697 - DNA, 651 bp, Neisseria meningitidis; identical to SEQ ID NO: 38886

SEQ ID NO: 44698 - DNA, 477 bp, Neisseria meningitidis
atgcaaaaaatccccctgaccgtacgcggtgcggaattgctgaaacaggaattgcagcagctcaaaagcgtggcgcgtcccgaagtgatcgaagcgattgccgaagcccgttcgcacggcgatttgtccgaaaacgccgaatacgaagccgccaaagaacgccaaggctttatcgagggccgcatttccgagctggaacacaaactttccgttgcccacatcatcaatccgaccgaaatccacgccgaaggcaaaatcgtgttcggtacgacggttacgctggaagatttggaaacggaagaacacgttacctatcaaattgtcggcgaagacgaagccgacatcaaacagggcaaaatctatgtcggctcaccgattgcccgcgccttaatcggcaaggaagagggcgatacggcggaagtccaagccccgggcggcgtgcgcgaatacgacattatcgaggtccgatatatttga

SEQ ID NO: 44699 - DNA, 624 bp, Neisseria meningitidis; identical to SEQ ID NO: 37310

SEQ ID NO: 44700 - DNA, 621 bp, Neisseria meningitidis
atgctgaaacaggctgtaacaggtatgaccaagcaagagcgcatcacgacgcaagcctacaatgagatgaccaaatccgtggcaggttcaaacagcatagtccttaacgatgtccaaggcgatacgaccatcaacaaccatcatacgcatacgcacaaccacagcgatgccgacggcaaagcactgtcgatgaggctcacaccacgccccctgttgtcagaccgtcaggcggcggctttcgcccgtacaggcaaactcacaggcagtttcgacttgtttgcttcggtggtcgccccctcgcagtacacgtttgccgttgccatgcccgacacgtccatgtcgccggttatcgaaaagggggatttgctggtggtcgagccgcgtatgcgccctgcggacgaagacatcgtactgattgaactgtccgacaagcggctggtcgtcgcgcaccttgttatcgatattgcgggcaggatgctgatttatcagacgggcaggccgtctgaagccctcgacctgcccgaaggcagcgtgattttaggtgtggtgctggaggtcaaaaaacggtttatgtccgccgcacaggcaagaaggcgtgttgattcggattaccgcccctga

SEQ ID NO: 44701 - DNA, 1776 bp, Neisseria meningitidis; identical to SEQ ID NO: 39332

SEQ ID NO: 44702 - DNA, 435 bp, Neisseria meningitidis
  misc_feature 420, 421, 422, 423, 424: 'n' is a, c, g or t
atgaaagaactagataaaatcgatttccgcattcttaagatcctccaacagaatgcccgcatcccgatgacggagcttgccgagaaggtaggcttgtccaccacgcccgttacagagagggtgcgccgtttggagcgggaacattatatttccggctatcacgcccacctcaatccccatctgttgggcaaaccgctattggtttttgtcgagctgaagctgcaatccaaatcgggcaatattttcgaagatttcaaaaaagaagtgctgaaaattccgcaaattatggaatgccacttggtgtcgggcgaatacgactatctgattaaagtacgtttgcccgatatgtctgcctatcgggatatgctaggcaatatcctattgcaactgcctgccgcttcggagagtaggagttatgtnnnnncacacacttaa

SEQ ID NO: 44703 - DNA, 792 bp, Neisseria meningitidis
atgattactgtgaacacactgcaaaaaatgaaggcggcgggcgaaaaaatcgctatgctgaccgcttacgaatccagttttgccgcactgatggacgatgccggcgtggaaatgctgctggtcggcgactctttgggtatggcggttcaagggcggaaatcgacgctgcccgtcagcctgcgcgatatgtgctatcacaccgaatgtgtagcacgcggtgcaaaaaatgcgatgattgtcagcgatttgccgtttggtgcatatcagcagagtaaggagcaggcgtttgccgccgccgccgaactgatggctgccggcgcgcatatggtcaaactcgaaggcggcgtgtggatggcggaaacgaccgaatttctgcaaatgcgcggtattccggtttgcgcgcacatcggtctgacgccgcaatccgtgtttgccttcggcggatataaagttcaggggcgcggcggcaaggcgcaggcgttgcttaacgatgccaaggcgcacgatgaagctggagctgccgtcgtgctgatggagtgtgttcctgcgcaactggcaaaaaaggtaactgaaactgtttcctgtccgaccatcggcattggcgcgggtgtcgattgcgacgggcaggttttggtgatgcacgatatgctcggtatttttccgggcaagacggcgaaattcgtcaaaaactttatgcacgggcaaagcagcattcaggcggcggttcgggcgtatgttgccgaagtcaaagccaaaaccttccctgctgcggaacatatttttgcagactga

SEQ ID NO: 44704 - DNA, 312 bp, Neisseria meningitidis; identical to SEQ ID NO: 39282

SEQ ID NO: 44705 - DNA, 1218 bp, Neisseria meningitidis
atgaaaacggtagtctggatcgtcatcctgtttgccgccgccgtcgggctggcattggctttgggcatttacaccggcgacgtgtatatcgtactcggacagaccatgctcagaatcaacctgcacgcctttgtactggggctgctgattgccgtcgtggtgtggtatttcctgtttaaattcgtcatcggcattttgaatattcccgaaaagatgcagcgtttcagtttggcacgaaaaggacgcaaggccgcgctttacttgaacaaagcgggtttggcgtattttgaagggcgttttgaaaaggcggaactcgaagcctcgcgcgtgttgggcaacaaagaggccggagacaaccggactttggcattgatgctgggcgcgcacgccgcaggacagatgggaaataccgaattacgcgaccggtaccttgcagaaattgcaaagctgcctgaaaaacagcagctttcacgctacctcctgctggcggaatcggcactgaatcgccgggactacgaaacggtggaagccaatcttcatgcggcagccaaaatgaatgccggactgacacggcttgtgcgcctgcaattgcgctatgccttcgagagaggagacgcgcttgaggtgttggcaaaaaccgaaaaactttccaaggctggtgcgttgggtgaatccgaaacgaaacagtatcaaaattgggcataccgccgccagctggcggatgctgccgatgccgccgctttgaaaacctgcctgaagcggattcccgacagcctcaaaaacggggaattgagcgtatcggttgcggaaaagtacgaacgtttgggactgtatgccgatgcggtcaaatgggtcaaacagcattatccgcacaaccgccgacccgaacttttggaagcctttgtcgaaagcgtgcgctttttgggcgaacgcgatcagcagaaagccatcgattttgccgatgcttggctgaaagaacagcccgataacgcgcttctgctgatgtatctcggtcggctcgcctacggccgcaaactttggggcaaggcaaaaggctaccttgaagcgagcattgcattaaagccgagtatttccgcgcgtttggttctggcaaaggtttttgacgaaaccggagaaccgcagaaggcggaggcgcagcgcaacttggttttggcaagcgttgccgaggaaaaccgcccttccgccgaaacctgttga

SEQ ID NO: 44706 - DNA, 879 bp, Neisseria meningitidis
atgaattacgcaaaagaaatcaatgcgttaaataacagcctttccgatttgaaaggcgacatcaacgtttcattcgaatttttcccgccgaaaaacgaacaaatggaaaccatgctgtgggattccatccatcgcctgcaaaccttgcacccgaaatttgtttccgtaacttacggtgcaaactcaggcgagcgcgaccgcacacacggcatcgtcaaacgcatcaaacaggaaaccggcttggaagccgccccgcacctgaccggtattgacgcttctcccgacgaattgcgccaaatcgccaaagactattgggacagcggcatccgccgcattgtcgccctgcgcggcgacgagccgcccggctacgagaaaaaacctttctatgccgaagatttggtcaaactgttgcgctccgttgccgacttcgacatttccgtagcggcctatcctgaggtacacccggaagccaaatccgctcaagccgacttgatcaatctgaaacgcaaaatcgatgcgggcgcgaaccacgtcatcacccaattcttcttcgatgtggaacgctacctgcgcttccgcgaccgctgcgtgatgttgggtatcgatgtggaaatcgtccccggtattttgcctgttaccaacttcaagcagctcggcaaaatggcgcaagtaaccaacgtcaaaatcccaagctggctgtcgcaaatgtatgaaggtttggacgacgaccaaggtacgcgcaatctggtggcggcaagtatcgccatcgatatggtcaaagtcctgtcccgcgaaggcgtgaaagatttccacttctatacgcttaaccgcagcgagctgacttacgccatctgccatattttaggcgtgcgcccttaa

SEQ ID NO: 44707 - DNA, 621 bp, Neisseria meningitidis
atggcacagtttttcgctattcatcccgacaacccccaagaacgcctcatcaagcaggcggtcgaaatcgtcaataaaggcggcgtggtcgtttatccgaccgattcctgttatgccttgggttgcaaactcggcgataaggcggcgatggaacgcatactctccatccgaaaaatcgatttgaaacaccacctgaccctgatgtgcgccgatttgagcgagttgggcacatacgccaaaatcgacaacgtacagtttcgtcagcttaaggccgccacgcccgggccttatacctttatcttgcaggcgacgaaggaagtgccggcgcgcacgctgcacccgaaacgcaaaaccatcgggctgcgtattcccgataatgccattgcacaagccctgctgggggaattgggcgaaccgcttttaagctgcaccctgatgctgcccgaagacggcgaaccattgaccgatccttatgaaatccgcgagcgtttggaacacgccgtcgatttggtgattgacggcggctggtgcggaaccgagccgaccaccgtcatcgacatgaccgacggtacggaattggtgcgccaaggttgcggcgatacggcggtgttcggtttgtag

SEQ ID NO: 44708 - DNA, 423 bp, Neisseria meningitidis
atgaaaaaaatgttcctttctgctgtattgcttctgtcggctgcgacccgaaccgtgtgggcggatacggtgttttcctgtaaaacggacaacaacaaatatatagaagttcaaaaaatcaaccgcaatctttacgaatattcgttcggcagtgcggcaaaaaaagaaattgccatacgcaacagcaaagctgacctgttggggcgttccgacaggtggcaaggtatgggcagcggtcgttgggcaacgatgaaattccaaaacggcgaatttatgtacaccgtagatgcaggcttcgattccgtgacccatgcagtaggcagcggtgtccttgtggagcgtaggggcaaggaaatcgcacggttcgactgtacgtcgaaaaccgcgcaggcgaatttcgacgatgacgattttgcctggtaa

SEQ ID NO: 44709 - DNA, 516 bp, Neisseria meningitidis; identical to SEQ ID NO: 38690

SEQ ID NO: 44710 - DNA, 705 bp, Neisseria meningitidis; identical to SEQ ID NO: 38732

SEQ ID NO: 44711 - DNA, 708 bp, Neisseria meningitidis
ttggtcaaaacggcagacggctacaaagccattgcccatattcaagccggcgaccgcgtcttcgccaaggacgaggcaagcggaaaaacgggatacaaacccgttaccgcccgatacggcaatccgtatcgggaaaccgtttacattgaaatttcagacggcatcggcaacaaccaaaccctgatttccaataaaatccacccgttttacagtcaaggaaaatggatacaggcaggtcgtctgaaaaaaggcgacaccctgctttccgaaagcggtgcaaaacagacggttcaaaacattaccctcaaacagcagccgctcaaagcctacaacctgaccgttgccgactggcatacttacttcgtcaagggtgataaggcggaaacggaaggggtttgggttcataatgagtgtccgtatggagaaaaatataggacagaagttggttcttatactaatactcatgaaagtggtcgaacttattctggaaagggcacaagacaacgttcccaaatctctggagcaagagaagctagggttaataatgaccctcatatagctacagattttactcctgccaaaaataatcgagaggcattcaaagatgaatctagaagaattgacgctcacggtggttccaaaagtaccaataattacaatcgaattgaaagcccggggaaaaaatatcgaaaacaagatggagattaa

SEQ ID NO: 44712 - DNA, 747 bp, Neisseria meningitidis
atgtttcagacgacctttttattagactcaagttcactggcgtgcgtaccacaccttacctgcagatttaatgtgggttacggcttgctgaagataaagttattaaggaatttggcaaatatggaaaagattgagaaatttaaatctgaattattggatgacatctttcagtatattcaatgcatatctatttttgtctataagaaaaagatatattacttgattgattataaggaaaattttgaattaaatgcaaaaatatcttttgatatttatctaagagaaggaattataacaaaagaacaatataattatgattataaaaattaccgtaatggtatctggcagttaactaaggacaattttgaaagctatcttcaatcggattcagtcattgtattaaaaaaggatgaattgaaggaactgatgtttcagggatttacttctgctgaagcggtaaggttatattccgttgtcgagaacaagctgtcgtacaatgatcctatctcagactccggccggcaaagtgatttcttaaaaatcaatcagatttcctcgaggctgcctttattctatgtcaattttgacactgaagtatacttacatatggattgggacagatgtcatgaagattatgtttatgacggctggttttcaaaggcgatggattttgggtatttaataccggacgaattttgttattggaaaattgaaggacgggattattggaaatttggacaattataa

SEQ ID NO: 44713 - DNA, 1215 bp, Neisseria meningitidis
atgaccgtcaaaacccccgtttacctcgactacgccgccaccacccccgttgacaaacgcgttgccgaaaaaatgattccctatctgaccgaaaccttcggcaaccccgcctccaacagccacgcattcggctgggaagcagaagaggccgtcgaaaaagcccgcgccgacatcgctgccctgattaatgccgaccccaaagaaatcgtcttcaccagcggcgcgaccgagtccgacaacctcgccatcaaaggcgcggcaaacttctacaaaaccaaaggcaaacacctcatcaccgtcaaaaccgaacacaaagccgttttagatacaatgcgcgaactcgaacgccaaggttttgaagtaacctacctcggcgttcaagaaaacggtttgattgatttggaagaactcaaagccgccatccgcgacgacaccatcctgatttccgtaatgtgggcaaacaacgaaatcggcgtggtgcaagacattcccgccatcggcgaaatctgccgcgaacgtaaaatcgtcttccacgtcgatgccgcccaagcctgcggcaaagtgcctgtcgatgtcgaagccgccaaaatcgacctgctctcgatgtccgcgcacaaagtgtacggccccaaaggcatcggcgcgctgtacgtccgccgcaaaccgcgcgtccgcctcgaagcccaaatgcacggtggcggccacgaacgcggcttccgcagcggcacattaccgacccaccaaatcgtcggtatgggcgaagccttccgcatcgccaaagaagaactcgaacaagatatggcgcactaccgcaaactgcgcgacatcttcctcaaaggcatcgaaggcatcgaagaagtctatatcaacggcgacctcgaacaccgcgccccgaacaacctgaacgtcagcttcaacttcgtcgaaggcgaaagcctgattatggcagtgaaagaactcgccgtatccagcggctccgcctgcacctccgcctcgctcgaacccagctacgtcctgcgcgcattgggcagaaatgacgaattggcgcactcgtccctgcgcatcaccttcggtcgcatgaccactgaagaagaagtgcaatttgccgccgaactgattaaatccaaaatcggcaaactgcgcgaactgtcgccgttgtgggaaatgttcaaagacgggattgatttgaactcgattgaatgggcggcgcattaa

SEQ ID NO: 44714 - DNA, 1170 bp, Neisseria meningitidis
atggacaacgaattgtggattatcctgctgccgattatccttttgcccgtcttcttcgcgatgggctggtttgccgcccgcgtggatatgaaaaccgtattgaagcaggcaaaaagcatcccttcgggattttataaaagcttggacgctttggtcgaccgcaacagcgggcgcgcggcaagggagttggcggaagtcgtcgacggccggccgcaatcgtatgatttgaacctcaccctcggcaaactttaccgccagcgtggcgaaaacgacaaagccatcaacatacaccggacaatgctcgattctcccgatacggtcggcgaaaagcgtgcgcgcgtcctgtttgaattggcgcaaaactaccaaagtgcggggttggtcgatcgtgccgaacagatttttttggggctgcaagacggtaaaatggcgcgtgaagccagacagcacctgctcaatatctaccaacaggacagggattgggaaaaagcggttgaaaccgcccggctgctcagccatgacgatcagacctatcagtttgaaatcgcccagttttattgcgaacttgcccaagccgcgctgttcaagtccaatttcgatgtcgcgcgtttcaatgtcggcaaggcactcgaagccaacaaaaaatgcacccgcgccaacatgattttgggcgacatcgaacaccgacaaggcaatttccctgccgccgtcgaagcctatgccgccatcgagcagcaaaaccatgcatacttgagcatggtcggcgagaagctttacgaagcctatgccgcgcagggaaaacctgaagaaggcttgaaccgtctgacaggatatatgcagacgtttcccgaacttgacctgatcaatgtcgtgtacgagaaatccctgctgcttaagtgcgagaaagaagccgcgcaaaccgccgtcgagcttgtccgccgcaagcccgaccttaacggcgtgtaccgcctgctcggtttgaaactcagcgatatgaatccggcttggaaagccgatgccgacatgatgcgttcggttatcggacggcagctacagcgcagcgtgatgtaccgttgccgcaactgccacttcaaatcccaagtctttttctggcactgccccgcctgcaacaaatggcagacgtttaccccgaataaaatcgaagtttaa

SEQ ID NO: 44715 - DNA, 366 bp, Neisseria meningitidis; identical to SEQ ID NO: 37025

SEQ ID NO: 44716 - DNA, 894 bp, Neisseria meningitidis
atggtaacgttttcaaaaatcagaccgcttttggcaatcgccgccgccgcgttgcttgccgcctgcggcacggcgggaaataatgccgcccgcaagccggtgcaaaccgccaaacccgccgcagtggtcggtttggcactcggtggcggcgcatctaaaggatttgcccatgtaggtattattaaggttttgaaagaaaacggtattcctgtgaaggtggttaccggcacatcggcaggttcgattgtcggcagcctttttgcatcgggtatgtcgcccgaccgcctcgaattggaagccgaaattttaggcaaaaccgatttagtcgatttaaccttgtccaccagtggttttatcaaaggcgaaaagctgcaaaattacatcaaccgaaaagtcggcggcaggcagattcagcagtttcccatcaaatttgccgctgttgctactgattttgaaaccggcaaggccgtcgctttcaatcaagggaatgccgggcaggctgtgcgcgcttccgccgccattcccaatgtgttccaacccgttatcatcggcaggcatacatatgttgacggcggtctgtcgcagcccgtgcccgtcagtgccgcccggcggcagggggcgaatttcgtgattgccgtcgatatttccgcccgtccgggcaaaaacatcagccaaggcttcttctcttatctcgatcagacgctgaacgtaatgagcgtttccgcgttgcaaaatgagttggggcaggcggatgtggttatcaaaccgcaggttttggatttgggtgcagtcggcggattcgatcagaaaaaacgtgccatccagttgggtgaggaggcagcacgtgccgcattgcctgaaatcaaacgcaaactggcggcataccgttattga

SEQ ID NO: 44717 - DNA, 981 bp, Neisseria meningitidis
gtgcagccggggctttgggcttcagacggcatattttcggaatggcggcattcttgccgtcggcgcggcagccgtatggggaagggaggggatattgtggtcggtaacggcaaaaaatatgccgcaccattgctggtgctgggttgcgtggtgttcggtctgggcagtctgattgtcagatccgtccccgtcggttcgtatgcaatcgcattttggcggttgctgatttcggtgttcgtattttggtttttagcacggtttttcaggcaaaaattcccaaaaaacaggaaaaccgtccgatatgccctgacggcgggcgtgtttctcgctttcgatttggcgttgtggcacgaaagcatacacgcggtcgggccgggtatttccaccctgctcaacagcctgcaaatctttttcttgtcggcaatcggtgttttctttttcggcgagcgtttgagcgggctgaaaaaggcaggcttaatatcggcagttgccggcgtggcgatgattgccggtgcggaattcggctacaacggtaatgcggtttggggattcgtcagcggtttggtatcgggactgatgctcgccctgtcgatggtgttcgtccgcaaaacccatgaaatcgagacggtggcgcttttcccttcaatgatgattttgagtttgggcggcgcggtatcgctggttgttccggcattgctgatggatggcggcgcgctttatccgacgacttggaaagatgcgggtttggtgcttgtgtacggcgtggtgatgcagtgcttcgcgtgggcgatggttgcctatgcgattccgctgctttcgctgtcgctgacggggctgctgcttttgtccgaaccggttgccgccctgttcatcgattatttcgggttgggcaaaccgattgaaggcgtgcagtgggcaggggtggcgctgacgctttcggcaatttacctcggttcgctgaaacagcagtccgagccttga

SEQ ID NO: 44718 - DNA, 201 bp, Neisseria meningitidis
atggcgtctgatttgttatcaaaacagacatcggacaagatattaggttatcagacggaacatagacgagtgcgctatgatatcaataacaatatctatgttttggccaatccaaaaacattcaaaatcaaaacaatgtttaaaccaaacttaggaaagaagtattatgatggagaattcaaaaaagacatgggaaattga

SEQ ID NO: 44719 - DNA, 426 bp, Neisseria meningitidis; identical to SEQ ID NO: 39813

SEQ ID NO: 44720 - DNA, 696 bp, Neisseria meningitidis
atgatgaaggatttgaatttgagcaacagcctgttcaaaggctacaacgacaaacatggcttaatgatttgtggctatgaatggggttggagtaaagccgatgaggctgcttatgtagcaggtgaatacaaactccctgaaaacaaaatcgaccatacatttgcaaacaaatccctctatttcggagagcaggcaaaaaagtggcgttacgataatacgataaaaaattggtttgaaatgtggggacaccccttagacgaaaatggattgggcggtgcatttgaaaaatccctggttcaaaccaactgggctgctacacagggcaacactatcgacaatccagacaagttcacacaacccgagcacatcgataattttctctaccacatcgaaaaactgcgtccgaaagtcatcctcttcatgggcagcaggttggcggattttctgaacaaccaaaatgtactgccacgcttcgagcagttggtcggtaagcagaccaaaccgctggagacggtgcaaaaagaatttgacggtacacgtttcaatgtcaaattccaatcgtttgaagattgcgaagtcgtctgctttccccatcccagtgccagtcgcggtctatcttacgattacatcgccttgtttgcgcctgaaatgaaccggattttatcggactttaaaacaacacgcggattcaaataa

SEQ ID NO: 44721 - DNA, 1455 bp, Neisseria meningitidis
atgagcatcgaacacactcctccgacacacgacggcgaaaccggtcaaaaccatgccgaacgcccttccgctgatttcgaccgtgtccactccctctgcgaaatcctcgaacctgcctttgaacaaatcgaaaacggcacaccgctcgaagacgcgccgctgcgcgacaagctgaccgagctgaccgtcctcttgagcgagctgcaccctgccgacgtggcggcagtgttggaatcgctgccgccgcgcgaacgcaatatcgtctggattctggtcaaatcggaagacgacggcgaagtcttgctggaagtgtccgatgcggtgcgcgaaacgctgatcgagtcgatggacaaagacgaattgttggcggcggtcgatgatttggacgcggacgaattggcggagctggcagacgatttgccgcaccaagtggtttatgaagccttgcagacgcgcgacgaggaagagcgcgcacaagtcaaagcggcaatgtcctacgaagacaaccaagtcggtgcgattatggacttcgagttggtcagcatccgcgccgatgtcgcctgtgaagtggtgctgcgctatctgcgccgcttcgacagcctgcccgaccataccgacaagatttttgtggtcgatgaaaacgacgtactgcaaggcgtgctgcccatccgcaaacttttggtcgccgatcccgaagatttggtggaaaacgtgatggcgaaagatgtcgtgcgtttccgcgccgaagacgacgtggaagaagcagcgcaggcattcgaacgctatgacttggttaccgcgcccgtcgtcgatgaaaacaaaaagctcatcggcagggtgaccgttgacgaaatggtggacgtgatccgcgaagaatccgaagcggatatgttgaacatggcaggtttgcaggaagaggaagacctgttcgcccccgtcttggattccgtcaaaaaccgctggatgtggctcgccgtcaacctctgcaccgccttcctcgccagccgcgtcatcggcgcgtttgaaggcagcatcgaaaaaatcgtcgcactcgccgcgctgatgcccatcgtcgccggcatcggcggcaactcgggcaaccagacgattaccatgattgtccgcgcgatggcgatggggcaactgacaggcatgcaggcaggcaggctgttgaaaaaagaagtcggtgtcgccttggtcaacggcatcatttggggaacggtcatgggcgcagtatcttggctgctttacggcagcctcggcatcgggctggttatgattgccgcgatgacgctcaacctcctgctggcggcaaccgtcggcgtattaattcccgtggtaatggaaaagttcggacgcgatcccgcactgggcagctcggtgctgattaccgccgttaccgactccggcggcttcctgattttcttggggctcgccaccctattcctgctttaa

SEQ ID NO: 44722 - DNA, 783 bp, Neisseria meningitidis
atgaaaaccaagttaatcaaaatcttgaccccctttaccgtcctcccgctgctggcttgcgggcaaacgcccgtttccaatgccaacgccgaacccgccgtcaaagccgagtccgccggcaaatccgttgccgcctctttgaaagcgcgtttggaaaaaacctattccgcccaagatttgaaagtgttgagcgtcagcgaaacaccggtcaaaggcatttacgaagtcgtcgtcagcggcaggcagattatctacaccgatgccgaaggcggctatatgttcgtcggcgaactcatcaacatcgacacgcgcaaaaacctgaccgaagaacgcgccgccgatttgaacaaaatcaacttcgcctccctgcctttggacaaagccatcaaagaagtgcgcggcaacggcaagctgaaagtcgccgtcttctccgaccccgattgtccgttctgcaaacgcttggaacacgagtttgaaaaaatgaccgacgtgacggtttacagctttatgatgcccattgccggcctgcaccccgatgccgcgcgcaaggcgcaaatcttatggtgtcagcccgaccgcgccaaagcgtggacggattggatgcgtaaaggcaaattcccggtcggcggcagcatctgcgacaatcccgtcgcggaaaccacttccttgggcgaacaattcggcttcaacggcacgccgaccctcgtcttccccaacgggcgcagccaaagcggctacagcccgatgccccaactggaggaaatcatccgcaaaaatcaataa

SEQ ID NO: 44723 - DNA, 411 bp, Neisseria meningitidis
atgcctgtctatttccgcaccccaagcaggaaacgcctgcacaaaatgaaccgccgccagcataaaaagctgcatttgggcgagtttcaaacattgattttcggcgttcaaggcagtttgcaccaagctgaggacgatgccgaagcgttcgaccgctttatggacgagctgattgcgtatcttgcggcaaacggcttggaaatggcgggcgggggcgattgcggcgatttttcgtgcctgtttcaaaaatccggctcccgaggcttgggcgaaaccgagaaaaaagccattatctcttggctggcaggtcgcgaagatgtcgccactttgcacgccaccccgctggttgacggtttttacggggatgacggctgggaaaattacagcgaaacctataaacaggcagattaa

SEQ ID NO: 44724 - DNA, 1188 bp, Neisseria meningitidis
atgacagaggacgaacgtttcgcgtggttgcaactggcttttacgccctatatcggtgcggaaagtttcttgctgctgctgcaccatttcggcagtgcgcaaaatgccctgtccgcaccggcggaacaggtggcggcactgatacggcacaaacaggcgcttgaggcttggcgcaatgcggaaaaacgcgccttggcgcggcaggcggcagaagcggcgttggaatgggaaatgcgggacggatgccgtctgatgctgcttcaggatgaagatttccccgaaatgctggcgcaggggctgaccgcgccgccagttttgtttttgcgcggcaacgtgcggctgctgcacaagccttccgccgccatcgtcggcagccgctatgccacgccgcaggcgatgcggattgccaaagatttcggcagggcgttgggtgggaaaggcattcccgtcgtgtcgggtatggcttcgggcatcgacaccgccgcccatcagggcgcgttgcaggcagaaggcggcaccatcgccgtgtgggggacgggcatagaccgcatttatccgccagccaacaaaaaccttgcttatgaaatcgccgaaaaaggactgattgtcagcgagttccccatcggcacgcggccgtatgccggcaattttccgcgccgcaaccgtctgattgctgccctgtcgcaggttacgctggtggttgaagccgcgttggaatccggttcgctgattaccgccggcctggcggcagaaatggggcgcgaagtgatggcggtacccggctcgatagacaatccgcacagcaaaggctgccacaaactgattaaagacggcgcgaaactgacggaatgtttggacgacatcctgaacgaatgcccggggctattgcaaaatacgggtgcttcatcatattctataaataaggatacgcccgacacgggccgccgcgccgttcagacggcatacgccccgccgcctgccgcaaaaatgccgtctgaaggggcggcaggcggcacagccgtcggcggcatactggataaaatgggtttcgaccccatccatcccgacgtgcttgccggacagttggctatgcctgccgcagatttgtatgccgcactgttggaattggaattggacggcagcgttgccgcaatgcccggcggcagataccagcgtatccgaacttga

SEQ ID NO: 44725 - DNA, 210 bp, Neisseria meningitidis; identical to SEQ ID NO: 41321

SEQ ID NO: 44726 - DNA, 621 bp, Neisseria meningitidis
atgctgaccccgaaaagttgcgatttgttcaatatcccgtttttccagtttgcccagcttaaaaaataccggcctgaaagcattccgcaaatcaaagccgactacaaggaaaactggcagatatggcagcagctgattcagcaggttgccgccgaattgggtgcgccgtttgcgccgccgcacatcgaacgctggtgtaacggctggcaggttcgcgcccatttctttgcctatttcaaatacgcccaatacaaaaactctgccgccatcctgtcgatactacttaaccgccgccgtctgagtgtcagcttggattggcactgctacaaagccgacgtgtcgccgattactctgcccgattacaaccgttggttggataattttgatactgaaaaatacgcttctttcgatatgtggcacggcgcggaaagcgaatacgacgactaccgcactgtcgcgcagcaaaatgaatccgaccgaaggttgcaaaacgacgaagatttcttctgcatcggcaaacacatcgaacgcgacgatttgggcaggcaggatgtcgcgaaatggatagcggaaacggtggaagatttgctgccgctttacgaagcgtgtcacggcaaatga

SEQ ID NO: 44727 - DNA, 303 bp, Neisseria meningitidis
atgactctcactaaagcagaactggccgatattttggtagacaaagtcagcaacgtcaccaaaaacgatgccaaagaaatcgtcgaactcttttttgaagaaatccgcagcactttggcaagcggcgaagaaatcaaaatttccggtttcggaaatttccagttgcgcgacaagccgcaacgcccgggtcgtaaccctaaaaccggcgaggaagtgccgattaccgcccgccgcgtggtaactttccatgccagccagaaactcaaaagcatggtggaacactactatgacaaacaacgttga

SEQ ID NO: 44728 - DNA, 747 bp, Neisseria meningitidis
atgaaaagcagcacgcaggccgttttggaacacaccgccattcccaagcatatcgccgtgattatggacggcaacggccgttgggcgaaaaaacgtttcctcccgcgcataatgggacacaaacgcggtttggacgcattggaaaatatggtgaagcattgcgccaaactgggtgtgcaatatctgaccgtgtttgccttttcaaccgaaaactggcgccgccccgaagacgaagtttcgttcctgatggggctgtttttacaggctttgcaaaaacaggtacgccgtctgcacgaaaacaatatgcgcctgaaaatactgggcagccgcgaacgcttcaaccggcagattctgcaaggcatcgaagaagcggaggcgttgacggcaaacaataccggcctgaccctgagcattgccgccgattacggcggccgctgggatattttgcaggcggcaaacaaactgattgccgaaggcgtatccgagattacagaagacacgctggcgaaacacttgatgctgggcgatgcaccggaaccggatttgttcatccgcaccggcggcgaaacgcgcatcagcaatttcctgctctggcagatggcatatgcagaactgtatttcaccgatattttgtggcccgattttgacggcaaggctttggacgatgccgtcgcttcgttccaaaaacgcgaacggcggttcggacgcacctccgagcaactgcctatcgaacagcaaaggaactga

SEQ ID NO: 44729 - DNA, 1179 bp, Neisseria meningitidis
atggaatttgtttacgacgtggcagaatcggcagtcagccctgcggtgattaaagtaatcggcttgggcggcggcggttgcaatgcaatcaataacatggttgccaacaatgtgcgcggtgtggagtttatcagtgccaatacggatgcgcagtctctggcaaaaaaccatgcggcgaagagaatccagttgggtacgaatctgacacgcggtttgggcgcgggcgcgaatcccgatatcggccgtgcggcagcccaggaagaccgggaagccattgaagaagccattcgcggtgcgaatatgctgtttatcacgaccggtatgggcggcggtaccggtaccggttccgcgccggttgttgctgagattgccaagtctttgggcattctgaccgttgccgtggttacccgaccgttcgcatatgaaggtaagcgcgtccatgtcgcacaggcagggttagaacagttgaaagaacacgtcgattcgctgatcatcatcccgaacgacaaactgatgactgcattgggtgaagacgtaacgatgcgcgaagccttccgtgccgccgacaatgtattgcgcgatgcggtcgcaggcatttccgaagtggtaacttgcccgagcgaaatcatcaacctcgactttgccgacgtgaaaaccgtgatgagcaaccgcggtatcgctatgatgggttcgggttatgcccaaggtatcgaccgtgcgcgtatggcgaccgaccaggccatttccagtccgctgctggacgatgtaaccttggacggagcgcgcggtgtgctggtcaatattacgactgctccgggttgcttgaaaatgtccgagttgtccgaagtcatgaaaatcgtcaaccaaagcgcgcatcccgatttggaatgcaaattcggtgcggctgaagacgagaccatgagcgaagatgccatccggattaccattatcgctaccggtctgaaagaaaaaggcgcggtcgattttgttccggcaagggaggtagaagcggttgccccgtccaaacaggagcaaagccacaatgtcgaaggtatgatccgcaccaatcgcggtatccgcacgatgaaccttaccgctgcggatttcgacaatcagtccgtacttgacgactttgaaatccctgcgattttgcgtcgtcaacacaattcagacaaataa

SEQ ID NO: 44730 - DNA, 420 bp, Neisseria meningitidis
atggacaataagaccaaactgcgcttgggcggcctgattttactgaccaccgccgttttaagcctcattatcgtattgattgtcgattcctggccgcttgccatcctgcttgccgccatcatcgtcgccgccgctgcgggcggttttgtttggacatcccgccgacagcaacgccagtttatcgaacgcctgaaaaaattcgacatcgatcccgaaaaaggcagaatcaacgaggcaaacctgcgccgtatgtaccacagcggcggacaacaccagaaagatgcgattaccctgatctgcctgtcgcaaaaatgttcggtggacgaggcgcacgctatgttcaaaaaacgcccgacacgtcaggaaatcaatcaaatggcggcaaaacagtcgcgcggtcagaaacgtccgcaccgttaa

SEQ ID NO: 44731 - DNA, 231 bp, Neisseria meningitidis; identical to SEQ ID NO: 37019

SEQ ID NO: 44732 - DNA, 798 bp, Neisseria meningitidis
atgctgaaacaacgggtgataactgctatgtggctgctgccgctgatgctgggcatgctgttttacgcgccgcaatggttgtgggctgcattttgcggactgattgccctgattgccttgtgggaatatgcccgtatgagcggcttgtgcaaaatcaaaaccaaccattacctcgccgcaaccttggttttcggcgtggttgcctatgcgggcggctggatgctgcctaatttggtttggtatgttgttttggcattttggcttgccatcatgcctttatggttgagattcaaatggaggctcaacggcggttggcaggtttatgccgtcggctggcttttggttatgccgttttggttcgcgctcgtatccctgcgcccgcatcccgatgatgccctgccgctgctcgccgtgatgggtctggtctgggttgccgacgtttgcgcgtatttcagcggcaaggcgttcggcaaacacaaaatcgcgccggcaatcagccccggaaaaagctgggaaggcgcaatcggcggcgcggtttgcgtggccgtgtacatgaccgccgtacgaagtgccggctggctggcattcgatacaggctggttcgataccgtgttaatcggtttggtgttgaccgttgtcagcgtatgcggcgaccttttggaaagctggctcaagcgcgcggcaggcatcaaagacagcagcaagctactgccaggacacggcggcgtgttcgaccgtaccgacagcctgattgccgttatcagcgtctatgcggcgatgatgtcggttttaaattga

SEQ ID NO: 44733 - DNA, 1029 bp, Neisseria meningitidis
atgagcgatacccccgctacccccgctacccccgctacccgcgatttcggcctgatcgacgggcgtgccgtaaccggctatgtgctgtccaatcggcgtggtacgcgtgtctgcgtgctggacttgggcgggattgtgcaggaattttccgttttggcagacggcgtgcgcgaaaacctcgtggtgtcgttcgacgatgcggcttcctatgcggacaatccgtttcagattaacaagcagatagggcgcgtggccggacgcatccgcggtgcggcgttcgacatcaacggcaggacttaccgcgtggaggccaacgaaggcaggaacgcgctgcacggcggttcgcacgggctggccgttacccgtttcaacgcggtggcggcagacggccgttcggtggtgctgcgcagccgcctgcaacagtcggccgacggttatcccaacgatttggatttggatatttcctaccgcttggacgaggacaaccggcttaccgttagctatcgcgccaccgcgctcggcgacacggtgttcgacccgacgctgcacatttactggcggctggacgcgggcctgcacgatgcggttctgcatattccgcagggcggacatattccggccgatgccgaaaaactgcccgtctcaacggtttcagacgacctcgaagtatttgatttcagccggcccaagccgctggatgccgccgttgccgccctgcgccgcgaaacgggtcgggccggttttgacgacgcttaccgcgtgccgtccgatataggccgtcccgccgctgtgttgcaagccggacgccgccgtcgtatcagcatatacagcgaccgcaacggcttggtcatctttaccgccgccccgcaggatttcgcgcggcacgatgcgggcgtttacgacgcgctggcgaccgaggcgcagacgctgcccgacagcctgaattggcccgagttcggcaatattcgtctgaacaagggtgataccagggaggcgacgattgcttacggcatcgaatccctttcttag

SEQ ID NO: 44734 - DNA, 1110 bp, Neisseria meningitidis
atgaaatacaaaagaatcgtatttaaagtcggcacatcttcgattacccattcggacggcagtctctcgcgcggcaaaatccaaaccatcacccgccagcttgccgcattgcatcatgcgggacacgagctggtcttggtgtcttccggcgcggttgcggcagggttcggtgcgctgggtttcaaaaaacgtccggtcaaaatcgccgacaaacaggcttccgccgccgtcgggcaggggctgctgatggaagaatatacggcaaacctgtcttcagacggcatcgtgtccgcacaaatcctgctcagccgcgccgactttgccgacaaacgccgctaccaaaatgccggcggcgcactttccgtgctgctgcaacgccgcgccgtccccatcatcaatgaaaacgatacggtttcggttgaggaattgaaaatcggcgacaacgacacattgagtgcgcaagtggcggcgatgatacaggcagacctcttggtgctgctgaccgacatagacggtctttacacgggcaacccgaacagcaatcccgatgccgtacggctggacaaaatcgaacacatcaaccatgaaatcatcgaaatggcgggcggatcgggttcggcaaacggcacgggcggtatgctgaccaaaatcaaagcggcaaccatcgccgccgaatccggcgtaccggtgtatatctgttcctcgctcaaacccgatgcacttgccgaagctgccgaacatcaggcggacggctcgtttttcgtcccccgtgccaaaggtttgcggacgcagaagcaatggctggcgttctattccgaaagccggggcagcgtttatgtggacgaaggtgcggaacacgctttgtccgaacaggggaaaagcctgctgatgtcgggcattgccggaatcgaagggcatttttcccgtatggacaccgtaaccgtgtacagcaaggcaaccaaacagcccctgggcaaagggcgcgtcctgttcggttctgccgccgccgaagacctgctcaaatcgcgtaaggcgaaaggcgtgttcatccatcgggacgactggatttccatcacgcccgaaatacgcctgcttctgaccgaattttag

SEQ ID NO: 44735 - DNA, 978 bp, Neisseria meningitidis
atgatttatccgtggcataatgagcaatggcggcagattgcggaacattgggagcgccgtcccaatgcttggctgtttgccggcaaaaaaggcatagggaaaaccgagtttgcccgctttgcggcgcaagcattattgtgtgaaaacccaagtccggatcaccgggcttgcggggcttgtgcttcttgtcatttttttgaacaaggcagtcatccggatttttacgaaatcactcccttgtcggacgaatccgaaaacgggcgcaaactgttgcagatcaaaatcgatgccgtcagggaaatcatcgataatgtgtacctgacttcggtacggggcggtttgcgcgtggttctgattcatcctgcggaaagtatgaatatccaggccgccaacagtttgttgaaagtgttggaagagcctccgccacaagtggtctttttgctggtcagccacgcggcggacaaggttttaccgaccattaaaagccgctgccggaagatggttttgcccgcgccttcccatgaagaggcattggcatatctgcgtgaaaggggtgtggcggaacctgaggaacgtctggctttccattccggagcgccgctgtttgatgaggcggacggtgtccgtgcgttgcggattaaactgttggatattttggcagaaccaaggttgttgaagattttggattacgccgcgcttttcgataaggaaaaacttccgctcgccgtatttgtcgggtggatgcagaagtggctggtcgatttgggattgtgcctgcaacacatgaaacccgtctattatcccgcttatgaagacaggctgcttcagacggtatccggtttccgtccgcgcaatgtatttgcggcggaggatatgctcaaacagcttgccccctacgggtttcatactttaaatgtcaaaatgcagatcgagcatctgctcatcaactatttggaattgaagaaagagaacgggtga

SEQ ID NO: 44736 - DNA, 480 bp, Neisseria meningitidis; identical to SEQ ID NO: 39570

SEQ ID NO: 44737 - DNA, 1020 bp, Neisseria meningitidis
atgaacacaatgctaatgtcgggcgcggctgccgcgctgcttgccggcatcatcctttatttcaaaagcgacaaaaagcggcaggaaaacggtgaatggagttccggtctggaatacgcctatatcctgacggcggtcggcgtgtttgccgctttgtccctgtttatgagctttaccgccgttttcctgattttcgttgtattgtgcggtacggcttggggggtatacaaataccgcctgaagactcatcccgaaatctcggaaagcagccacttcggcgattatttcggcagtttcttccctaccgttttggtattgttcctcatccggtcgtttattgccgaaccgttccaaatcccgtccagctcgatgcgcccgggcctgattaagggcgatttcattttggtcggcaaattttcctacggcctgcgcgtacccgttttaaacaatatatttattcctacaggcaaaatcgaacggggcgatgtggtcgtttttaattatcctttgcaaccggagatgacctacatcaagcgtattgtcggcattccgggcgatgtggtcgaatatcggaataaagttttgacggtaaacggaaaacctgcttccgatattcctgacggcacataccgttatcccgacgacaccgacccatccgaaatccacaatacggatatgttccacagcggtttggacggcaaatccttcaatattctgaaaaaagaaggacagcctgccgtttccctgcccgtattgggcaaatatacctccgatattatgtctgaaaacggatattccatagagcaaagcggtttggaacactgccaatatgccgacgacggcagcggtttcgtgtgcaaagttcccgaaggacgctatttcgctatgggcgacaaccgcgacaacagtgccgattcgcgctactggggatttgtggatgacaagctggttgtcggcaaggcaatgttcattttgatgaacttcggcgatttcggcagggccggtacggcaatccgttag

SEQ ID NO: 44738 - DNA, 1569 bp, Neisseria meningitidis
atgaaacaccgtactttcttttccctttgcgccaagttcggctgcctgcttgcgctgggtgcttgttcgcccaaaatcgtcgatgccggagccgcgaccgtgccgcacactttatccactttgaaaactgcggacaaccgccccgccagtgtttacttgaaaaaagacaaaccgacgctgattaaattttgggcgagctggtgtcctttgtgtctgtccgaattgggacagaccgaaaaatgggcgcaagatgcaaaattcagctccgccaacctgattaccgtcgcgtctccgggctttttgcacgagaaaaaagacggcgacttccaaaaatggtatgccggtttgaattatcccaagctgcccgtcgtaaccgacaacggcggcacgatcgcccaaagcctgaatatcagcgtttacccctcgtgggcgttaatcggtaaagacggcgacgtgcagcgcatcgtcaaaggcagcatcaacgaagcgcaggcgttggcgttaatccgcgacccgaatgccgatttgggcagcttgaaacattcgttctacaaacccgacactcagaaaaaggattcaaaaatcatgaacacgcgcaccatttacctcgccggcggctgcttctggggcttggaagcctatttccaacgcatcgacggcgtggttgacgcggtatccggctacgccaacggcaacacgaaaaatccgagctacgaagacgtgtcctaccgccatacggggcacgccgagaccgtcaaagttacctacgatgccgacaaactcagcctcgacgacatcctgcaatatttcttccgcgtcgttgatccgaccagcctcaacaaacagggcaacgacaccggtacgcaataccgcagcggcgtgtactacaccgaccccgccgaaaaagccgtcatcgccgccgccctcaaacgcgagcagcaaaaataccaactgcccctcgttgttgaaaacgagccgctgaaaaacttctacgatgccgaggaataccatcaggactacctgattaaaaaccccaacggctactgccacatcgatatccgcaaagccgacgaaccactgccgggcaaaaccaaagccgccccgcaaggcaaaggcttcgatgcggcaacgtataaaaaacccagtgatgccgaactcaaacgcaccctgaccgaagagcaataccaagtgacccaaaacagcgcgaccgaatacgccttcagccacgaatacgaccatttgttcaaacccggcatttatgtggacgttgtcagcggcgaacctttgttcagctccgccgacaaatatgattccggctgcggctggccgagcttcacgcgcccgattgatgcaaaatccgttaccgaacacgatgatttcagctacaacatgcgccgcaccgaagtgcgcagccacgccgccgattcgcatttgggacacgtcttccccgacggcccgcgcgacaaaggcggactgcgctactgcatcaacggcgcgagcttgaaattcatcccgctggaacaaatggacgcggcaggctacggcgcgttgaagagtaaagtgaaataa

SEQ ID NO: 44739 - DNA, 1068 bp, Neisseria meningitidis
atgagaaaaatccttgttaccggcggcgcgggctttatcggttctgccgttgtccgtcatattatccgaaacacccaagattccgtcgtcaacctcgacaaactgacctacgcgggcaatctggaatcgctggaacctgtgtcccatcatccgcgctatgcgtttgagcaagtcgatatttgcgaccgcgcagcactggatcgtgtgtttgcccaacaccagccggatgcggtgatgcacttggcagcagaaagccatgtcgaccgcagtattgatgggccggcggcatttatcgaaaccaatattgttggtacttacacgcttttggaagcggcgcgtgcttattggcatgatatgccgtctgaaaaaaaagcggctttccgtttccatcatatttcgactgatgaagtgtatggcgatttaagcggcacagacgatttgtttaccgaaaccacgccctacgcgccgtccagcccctactctgcctctaaagcgtccagcgaccacctcgtccgcgcgtggcagcggacttacggtttgccgaccattgtaaccaactgctccaacaactacggtccttaccattttccggaaaaactcattcctttgatgattctgaacgcgcttgacggcaaaccgctgcctgtgtacggcgacggtatgcaaatccgcgactggctgtttgtcgaagaccacgcgcgcgcactgtatcaggttgttaccgaaggtgttgtcggcgaaacctacaatatcggcggccacaatgaaaaagccaatattgaagtcgtcaaaaccatctgcgccctgctggaagaactcgctcccgaaaaaccggccggtgtggcgcgttatgaagatttgattactttcgtacaagaccgccccggccatgacgtacgctacgccgtcgacgcagccaaaatcaggcgggatttgggctggctgcctttggaaaccttcgagtccggcctccgcaaaaccgtgcaatggtatctggacaacaaaacctggtggcaaaatgtattgaacggcagctatcgtttggaacgtttaggtactggaaaatag

SEQ ID NO: 44740 - DNA, 417 bp, Neisseria meningitidis
atggcaaagctgacagaacaagatattttgaattggaatgggccggaagacgattatatgaatgacgaccatttggctttttttcgtgaattgctggttaaaatgcaagatgaactcatcgaaaatgcttccgctacgacagggcatctccaagaacacgaatcagcccccgatcctgccgaccgtgccacacaggaagaagagtacgcattggaactccgtacccgcgatcgggaacgaaaacttctcagtaaaatacaggcgaccatccgcaatattgatgaaggggattatggattctgtgccgatacgggagagcctatcggtctgaagcggctgctggcacgcccgacagccactttatctgttgagtcccaagaacgccgagagaggatgaaaaaacagtttgccgactga

SEQ ID NO: 44741 - DNA, 324 bp, Neisseria meningitidis; identical to SEQ ID NO: 38492

SEQ ID NO: 44742 - DNA, 939 bp, Neisseria meningitidis
atgcttgaactgaacggactctgcaaacgcttcggcaataaaaccgtcgccgacaacatctgcctgactgtcgggcgcggcaaaatactcgccgttttggggcggtcgggatgcggaaaatccaccctgctgaatatgattgcggggattgtccggccggacggtggggaaatatggctgaacggggaaaacattacccgtatgccgcccgaaaaacgccgtatttctctgatgtttcaagattacgcgctgtttccccatatgagtgcgctggaaaatgcggcattcggtttgaaaatgcaaaaaatgccgaaagccgaagccgaacgccttgccatggcggcacttgccgaagtcggactggaaaacgaggcgcaccgcaagcctgaaaaactttccggaggcgagaagcaacggttggcgttggcgcgcgctttggttgtccgcccttccctgctgctgttggacgaatcgttttccagtttggacacgcatttgcgcgaccggctgcgccgcatgactgccgaacgtatccgcaagggcggcatccctgccgttttggtgacgcattcgcccgaagaggcctgcacggcggcggacgaaatcgccgtcatgcacgaggggaaaatccttcaatgcggtacgcccgaaaccttggttcaaacgcctgccggcgtgcaggtcgcccgactgatgggtttgcccaataccgacgatgaccgccatattccgcaacatgcggtgcgtttcgaccaagacggcatggagtgccgcgtattatcccgtacctgtttgcccgaatcgttcagcctgtccgtcctccatccggaacacggcatcctgtggctgaacctcgatatgccgcacgccggtgaaatatcgggaaacgatacggtacgcatccatatcgaagacagggaaatcgtccgcttccgttga

SEQ ID NO: 44743 - DNA, 723 bp, Neisseria meningitidis; identical to SEQ ID NO: 39380

SEQ ID NO: 44744 - DNA, 807 bp, Neisseria meningitidis
atgccgacagttttcatctttttgacggcggtttacgcaggattgggtgcatttgcatggcactgccaacagcaggggcgcggccgggattacccgtggaagacggaattgccggttttgggcgcggcattgaccgtccacggcgcggcactgcttatgccggtcattcaagacaaaatcatcattatgggcttcgggtattccggcagcctgattgtttggatgatgctgtttatttattttgccggcagcttcttttatccgctgcgcggagtgcagttgctgctgtatccttgcgccgcactgatgctgctgtcaggtttggtttttcctggaaaattctcgggatatgaaattaccgaccttccctttatgctgcatatcggaacttcgctgcttgcatacgggctgttcggcatcgcaacattattgtccgttttgaccctgctgctgaatcggagcctgcaccgcaggagcttctccaagctcgcaggattcctgccgtcgctgctcagtttggaaaaactcatgttccaggccatgtgggcaggtttcatcctgctgacctattccgtcgtcagcggcacattcttcgccgaagccgtattcggcaaacccatgacctttacccataaaaccgtattcggcatattgtcatggctgatttacggcggactgctgctcaagcacagcatgaccgcatggcgcggtaaaaaagccgccgtgtggaccatcatcggatttgtcagccttatgattgcctatatgggcagcaagttcgtattggaaatcattctgaaaagataa

SEQ ID NO: 44745 - DNA, 1371 bp, Neisseria meningitidis
atgttagacaatttaaccggccgcttcagcaatgtcttcaaaaacatccgggggcaggccaaactgaccgaagacaatattaaagaggccttgcgcgaagtccgcctcgccctgcttgaggcggatgtcgccctgcctgtcgtcaaagagttcgtcaacaacgtcaaagaaaaggccctcggtcaggaagtggctggcagcctgacgccggatcaggcatttatcggcgtggtcaacaaagccctgaccgaactgatgggcagggaaaacaaaacgctggatttgtcggttgcgccgcccgccgtcgtgttgatggcaggtttgcagggcgcgggcaagacgacgaccgccggcaaactcgcccgcctgctgaaaaacgatcagaagaaaaaggttttggtcgtatctgccgacgtttaccgccctgccgcgattgaacaactgcgcctgttggccgaacaggtcggcgtggactttttcccatccgataccaaccaaaaaccggttgaaattgcaactgccgccgtcgattacgccaaaaaacatttttacgatgttttgatggtcgataccgccggccgtctggcaatcgatgaagagatgatgaacgaaatcaaagcccttcacgcggcggttaacccggtggaaactttgttcgtcatcgatgcgatgctgggtcaggatgcggtgaacactgctcaggcatttaatgaagccctgccgctgaccggagtcgtattgaccaagatggacggcgactcgcgcggcggtgcggcattgtccgtacgccatgtaaccggcaaaccgattaaatttatcggtgtcggcgaaaaaatcaacggcctcgaacctttccaccccgaccgtcttgccagccgtatcctcggcatgggcgacgtattgaccctgattgaagacgttcaaaaaggtattgatgaagaagccgccgccaaaatggcgaaaaagctgcaaaaaggcaaaggcttcgacctcaacgactttaaagaacaaatccagcaaatgcgcaatatgggcggtttggaaaacctgatgtcgaaaatgccgggcgaactgggtcaaatatcgaaacaaatccccgaaggtacggctgaaaaagcgatgggtaaagtagaagccatcatcaactcgatgacccctaaagaacgcgccaaccctgccctgctcaaagccagccgcaaacgccgtattgcaatgggtgcgggcacgaccgtacaggaagtgaacaaattgctcaaacagtttgaacaaatgcaacaaatgatgaagatgttcagcggcaacggcttgggcaaactgatgcgtatggcgaaaggaatgaagggaatgaaaggaatgttcccgggtttgtaa

SEQ ID NO: 44746 - DNA, 747 bp, Neisseria meningitidis
atggattttcgttttgacattatttacgaataccgctggatgtttctttacggcgcactgacgaccttggggctgacggtcgtggcgacggcgggcggttcggtattgggtctgttgttggcgttggcgcgcctgattcacttggaaaaagccggtgcgccgatgcgcgtgttggcgtgggcgttgcgtaaggtttcgctgctgtatgttacgctgttccggggtacgccgctgtttgtgcagattgtgatttgggcgtatgtgtggtttccgtttttcgtccatccttcagacggcattttggtcagcggcgaggcggcaatcgcgctgcgtcgcggatacgggccgctgattgccggttctttggcactgatcgccaactcgggggcgtatatctgtgagattttccgcgcgggcatccagtctatagacaaaggacagatggaggcggcgcgttctttggggctgacctatccgcaggcgatgcgctatgtgattctgccgcaggcattgcgccgcatgctgccgcctttggcgagcgagttcatcacgctcttgaaagacagctcgctgctgtcggtcattgctgtggcggagttggcgtatgttcagaatacgattacgggccggtattcggtttatgaagaaccgctttacaccgtagccctgatttatctgttgatgacgactttcttaggctggatattcctgcgtttggaaaaacgttacaatccgcaacaccgctga

SEQ ID NO: 44747 - DNA, 1749 bp, Neisseria meningitidis
atgattcattataaaataaccccgtcccctctcgaccacgagtggcacatcctgctgacattcacacaagatgatgatcttcctatagaaataagcctgccgaattgggtaccgggcagctatctgattcgggatttttcccgccacatcacttctatccatgcatcctgtaacggcacgtccatgccgctcgaacaaattgcaaaaaaccgctggcacgctgccgccgtacgcggcgagtggcaaatccgctacaccgtatatgcattcgatttgtcggttcgaggttctttcctgacgacagaacgcggtttttttgacggatcgtgcctgtttttgaaagtcgaaggaacggaaacgctgccgcaccgcttggaattgacgggtattccgtccgaatggcgtattgccacaacgctgccggaaacagggaggtttgtctttcaggcggcatcttatgccgaattgattgaccgacctgtcgagatgggcttgattgaatttttagattttgaggcggcaggcattccgcacacaattgccttaagcggcatatatcccgatttcgaccgcaacaggctggtttcggatatcaaaaaaatctgcgaaacagaactggcggtgttttcctcccctgccccgtttcaaaaatatttgttcctgctccacgtcggcgaccatatttacggcggtttggaacacaccgacagcaccgccctgctcgccgaccgccacagccttccgccgtacggtatgaccgatgccgacgatacctacaccacattgctcggacttttctcccacgaatattttcacgcgtggaacgtcaaatccatcaaacctgccgcgttcgtcccttatgacctcgacaaagaaaactataccgaacaactatgggcattcgaaggtattacatcctattacgacgatttgtttttggcacgcagccgcaccatctcgcccgaatcttatttaaacctgctggcacaaggcattacgcgcgtacaacaaacccgcggccgtttgaggcagaccttggcggaatcgagttttaccgcgtggaacaaattttacaaaccggatgaaaacagccccaacgccatcgtcagctactaccagaaaggcgcgcttgccgcattgtgccttgatctgataatacgcaaccgaagcaacggcagacattctctcgatacgttaatggacaaactctatcgggagtggagggacacacactcgggtattccggaaaaacactggcaaatccgctgtcaggaaattaccggcttggatttggaagattttttccaaaaagcgttatacagtaccgaagatttgccgcttgccgaatgcctggcaaccgcaggcgtgggactgaccttcctgccacttccccgacaacacggcggcggatacgcagaacacatctgccccgtcccgccggcaggcgattttggcgcacgtttcaaacaaaacaccgaccacatcgtcctgacccatgtcttcaacagcggcagcgcggaatctgcggcactgtgcccgcaagacaaaatcattgctttagacggttatgcctgcaccgactttaccgcacaatgggcccgataccacgtcaatgcaaaaatcaatatccacttcttccgtgccggcatattgcgtcaaaccgtcttgacggttcaggcagcggcagcggatactgccatcctacatatcacagaccggaacctgttggacaactggttgttcggttaa

SEQ ID NO: 44748 - DNA, 531 bp, Neisseria meningitidis
atgaacgcaatccgaactttccaaaaccgcacgcccgaaatccacgaaagctgtatgatagacgaagcgtgcgtcgtcatcggcgaagtgtcgcttgccgaagacgtttccgtgtggccgtgcgccgtgttgcgcggcgatgtgaacagcatcaccgtcggcgcgcgcagcaatatacaggacggcagcgtcctgcacgtttcccacaaaaccgccgccaaacccgaagggtcgccgctggttatcggcgaagacgttaccgtggggcacaaagtgatgctgcacggctgccgtatcggcaaccgcgtcctggtcggcatggggacgacggttctggacgatgccgtgattgaggacgaagtgatgatcggcgcgggcagcctcgtgcctccgcgcaaacgtttggcgggcggctacctttatgtcggttcgccggtcagacaagtgcgcgtgctgaccgatgaggaaaaagcctttttgaaatattccgccgcgcattatgtgaagctgtcgaaacagtacgggatgtga

SEQ ID NO: 44749 - DNA, 795 bp, Neisseria meningitidis
gtgttacaccgtttgcagaaagtcgtgcgccatatcgcgcaaaccgaaattatgccgcgttttttgaatacgccgtctcaccgcaaggaagacggttcgatgttgagcgaggcggacattgccgcgcagacggcttttgccgccgcgttgccgcttctgatcgattgcccgatgttgggcgaggaaatgtcgcggcaggagcagtcggctttgtgggcggaatattcgggagaaaaggggctgtggattgtcgatccgatagacgggacgaacaattttgtcaacgggctgccgcattttgccgtgtcggtggcgtttgtccgcaacgggcgcgccgaattgggcgtaatctacaacccggtcagcggcgaatgtttttacgccgaacgcgggcagggggcgtttttaaacgggacgcgcctgcccctgcgcctcgtggataaaaaactcaatgaggcaatcgcgggcgtggaaatcaaatatctgcgttcgggcaaactttccagccgcatgagtacgctcgcacctttcggtacggtgcggagtatgggcagcagcacgctggactggtgttatctggcgtgcgggcgttatgatgtttatgtccacggcgggcagaagctgtgggactatgctgcgggtgcgttgattttcgaggaggcgggcggcaggctgacgactttggaaggcgacgggttttggagtggtgaacacgtgttcaaacgctcggtcgttgccgcgctcgaaccgaagctgtttgaacgctgggtcgggtggatacgggaaaaccaatag

SEQ ID NO: 44750 - DNA, 717 bp, Neisseria meningitidis
gtgttcaataatttccttgcttcgctgccgtttatgacggaaacacgcgccgatatgattgtcagcgcgtttttgcctatggtcaaagccggcttcgcggtctctctgcctttggcggcagcttctttcgttatcggtatgatgattgcggtagccgtggctttggtgcggattatgcccgccggcggcatcgtgcggaaaatcctgctgaaattggtggaattttatatttccgtcattcgcggtacgccgctgttggttcagcttgtgattgtgttttacgggctgccttccgtcggtatctatatcgatccgattcccgccgccattatcggcttctcgctcaatgtcggtgcatacgcttccgaaaccatacgcgcggcaattttgtccgtacctaaaggccaatgggaagcaggtttctccatcggtatgacctatatgcagacgttccgccgcatcgtcgcgccgcaggcatttcgcgttgccgtgccgcctttgagcaacgagtttatcggtttgtttaaaaacacctcgctcgcggcagtcgtgacggtaacggaattattccgcgtcgcgcaggaaacggcaaaccgcacttatgactttttgcccgtctatatcgaagccgctttggtttactggtgtttttgcaaggttctgttcctgattcaggcacgtttggaaaaacgtttcgaccgttatgtcgccaaataa

SEQ ID NO: 44751 - DNA, 363 bp, Neisseria meningitidis; identical to SEQ ID NO: 38839

SEQ ID NO: 44752 - DNA, 1677 bp, Neisseria meningitidis
atgagcttcaaaaccgatgccgaaatcgcccaatcctccaccatgcgcccgattggcgaaattgccgccaagctgggtctgaatgccgacaacattgagccttacggtcattacaaggcgaaaatcaatcctgccgaagcgttcaaactgccgcaaaaacagggcaggctgattttggttaccgccattaatccgactccggcgggcgaaggcaaaaccaccgtaaccatcggtttggcggacgcgttgcgccacatcggcaaagatgccgtgattgccctgcgcgaaccttctctggggccggtgttcggcgtgaaaggcggcgcggcaggcggcggctatgcccaagttttgccgatggaagacatcaacctgcacttcaccggagattttcacgccatcggtgcggcaaataatctgcttgccgcgatgctcgacaaccatatctatcagggcaacgagttggacatcgaccccaaacgcgtgctgtggcggcgcgtggtcgatatgaacgaccgccagttgcgcaacatcatcgatggcatgggtaaacccgttgacggtgtgatgcgccccgacggttttgatatcaccgttgcctccgaagtgatggcggtattctgccttgccaaagacatcagcgatttgaaagagcgtttgggcaacatcctcgtcgcctacgccaaagacggcagccccgtttacgccaaagatttgaaggcacacggcgcgatggcggtcctgctcaaagatgcgattaagcccaatttggtgcaaaccatcgaaggcacgcccgccttcgtacacggcggcccgttcgccaacatcgcccacggctgcaactccgtaaccgcaacccgtctggcgaaacaccttgccgattacgccgtaaccgaagcaggcttcggcgcggatttgggcgcggaaaaattctgcgacatcaaatgccgccttgccgatttgaaacctgatgcggcggtcgtcgtggcgactgtccgcgctttgaaatacaacggcggcgtggaacgtgccaacctcggtgaagaaaacctcgaagccttggcaaaaggtttgcccaacctgctgaaacacatttccaacctgaaaaacgtattcggactgcccgtcgtcgttgcgctcaaccgcttcgtgtccgactccgatgccgagttggcgatgattgaaaaagcctgtgccgaacacggcgttgaagtttccttgaccgaagtgtggggcaaaggcggcgtgggcggtgcagacttggcgcgcaaagtcgtcaacgccatcgaaaaccaaccgaacaacttcaatttttcctacgatgttgagctgagtattaaagacaaaatccgtgcgattgcccaaaaagtgtacggcgcggaagatgttgatttcagcgcggaagcgtctgccgaaatcgcctcgctggaaaaactgggcttggacaaaatgccgatttgcatggcgaaaacccaatattctttgagcgacaacgccaaactcttgggctgccctgaaggcttccgcattaccgtgcgcggcattaccgtttcttccggtgctggtttcatcgttgcgttgtgcggcaatatgatgaaaatgccgggtctgcccaaagttcccgccgccgagaaaatcgacgtggacgcagaaggcgtgattcacggcttgttctga

SEQ ID NO: 44753 - DNA, 435 bp, Neisseria meningitidis; identical to SEQ ID NO: 39366

SEQ ID NO: 44754 - DNA, 1197 bp, Neisseria meningitidis; identical to SEQ ID NO: 39690

SEQ ID NO: 44755 - DNA, 1104 bp, Neisseria meningitidis
atgatggaaacacagctttacatcggcatcatgtcgggaaccagcatggacggggcggatgccgtactgatacggatggacggcggcaaatggctgggcgcggaagggcacgcctttaccccctatcccgacaggctgcgccgccaattgctggatttgcaggacacaggcgcagacgaactgcaccgcagcaggattttgtcgcaagaactcagccgcctgtacgcgcaaaccgccgccgaactgctgtgcagtcaaaacctcgcaccatccgacattaccgccctcggctgccacgggcaaaccgtccgacacgcgccggaacacggttacagcatacagcttgccgatttgccgctgctggcggaacggacgcggatttttaccgtcggcgacttccgcagccgcgaccttgcggccggcggacaaggcgcgccactcgtccccgcctttcacgaagccctgttccgcgacaacagggaaacacgcgcggtactgaacatcggcgggattgccaacatcagcgtactcccccccgacgcacccgccttcggcttcgacacagggccgggcaatatgctgatggacgcgtggacgcaggcacactggcagcttccttacgacaaaaacggtgcaaaggcggcacaaggcaacatattgccgcaactgctcgacaggctgctcgcccacccgtatttcgcacgaccccaccccaaaagcacggggcgcgaactgtttgccctaaattggctcgaaacctaccttgacggcggcgaaaaccgatacgacgtattgcggacgctttcccgttttaccgcgcaaaccgttttcgacgccgtctcacacgcagcggcagatacccgtcaaatgtatatttgcggcggcggcatccgcaatcctgttttaatggcggatttggcagaatgtttcggcacacgcgtttccctgcacagcaccgccgaactgaacctcgatcctcaatgggtggaggcagccgcatttgcgtggttggcggcgtgttggattaaccgcattcccggcagcccgcacaaagcaaccggcgcatccaaaccgtgtattctgggcgcgggatattattattga

SEQ ID NO: 44756 - DNA, 591 bp, Neisseria meningitidis; identical to SEQ ID NO: 39124

SEQ ID NO: 44757 - DNA, 1005 bp, Neisseria meningitidis
atgagctatggaatgcaatccgccggtattcaggttttagccgggatagattacgaacccagctgcaaagaaacatatgaagccaatataaatgccaaatttatacaggctgatgtttttgaattgcagcctgaaaccttggaaaaagaactcgggttaaaaaagaatgatgatgatttgattcttataggttgtagtccttgtcaatattggagtgttattcaaacagacaaaagaaaatcggaaaaatccaagagtttgcttttggagtttcagcggtttgtagaatatttcaatcccggatatgttgttgtagagaacgtaccgggaattctgagcagaatgaaagaaagcaggcttgataatttcataaagttattggaagaaaaaggatttaccgtccatttcggtattcacaatacggctgattacggaattccccaaagccgtaaaagatttacgttaattgcaaacagaataaccaaagaaaagctggaaccagtcaagtattcgggcaaacggcttacggtacgcgatgttttgggaatggaaaatggctttcccaaaattattgcaggacaccaagacgaaacggattttatgcatagctgtgcgggattatctgatatcaacttgaaacgattggctttgatacctaaaaacggaggaaaccgtttggcttttgcgcatattcccgaattacagctggaatgttttatcggaaaagacaatagttttaaagacacgtttggtaggctatggtgggataagcccgcacctaccataacgaccaaattctttagtatttccaacgggaggtttgcccatcctgaagaagatagggcgttatcactgcgcgaaggtgcaacattgcaatcgttccctcgtaactatgtctttaaagcgggcagcagggacaagatagcccgtttgattggtaatgccgttcctccgatgtatgcggaaaaaataggcagggcaattgttgataatatcgaatgttag

SEQ ID NO: 44758 - DNA, 561 bp, Neisseria meningitidis; identical to SEQ ID NO: 38782

SEQ ID NO: 44759 - DNA, 126 bp, Neisseria meningitidis; identical to SEQ ID NO: 38379

SEQ ID NO: 44760 - DNA, 822 bp, Neisseria meningitidis
atgatgcggatattttcgacaggaggaaaaatggatacgcaggcagttatcacacatatcgcccgatggttggacgaatacgccgcacgggcaaatgcaaaagggtttgtcgtgggcgtttccggcggcatcgattccgccgtcgtctccgcactcgccgcccgcaccggccgccccacgctgcttctggatatgccgatacgccaacaccccgaccagcttgagcgggcaaggctgcacatccgcaatctgcaacggcaatatgccaatgtaagcgcgcaaacggtcgacctgaccgacaccttccagacctttgaacaaaccgtcggcattcatcagacggcatttgacaatcagccgctttccctcgccaacgccagaagccgcctgcgtatgctgaccctgtactactacgggcagatacacggactgctggttacggggacaggtaataagattgaagatttcggcgtgggcttttttactaaatacggcgacggcggcgtagacatcagcccgattgccgacctgaccaaaacgcaggtttaccggcttgccgaagcattgggcgtggacgaggcgattcaaaaagccccgccgaccgacggcctgtgggatacggaacgcaccgacgaagaacagatgggcgcaagctatcccgaactggagtgggcaatgggcgtgtacggcacgcgcaaacccgaagattttgaagggcggcagcgcgaagttctggaaatctatacgcggcttcaccgcgccatgcagcacaaaatcaacccgattcccgtgtgccgcatcccgcccgaattgttgggctga

SEQ ID NO: 44761 - DNA, 1677 bp, Neisseria meningitidis; identical to SEQ ID NO: 38898

SEQ ID NO: 44762 - DNA, 645 bp, Neisseria meningitidis; identical to SEQ ID NO: 39035

SEQ ID NO: 44763 - DNA, 3012 bp, Neisseria meningitidis; identical to SEQ ID NO: 38110

SEQ ID NO: 44764 - DNA, 303 bp, Neisseria meningitidis; identical to SEQ ID NO: 43912

SEQ ID NO: 44765 - DNA, 840 bp, Neisseria meningitidis
atgaaacaactccgcgacaacaaagcccaaggctctgcactgtttacccttgtgagcggtatcgttattgttattgcagtcctttatttcctgattaagctggcgggcagcggctcgttcggcgatgtcgatgccactacggaagcggcaacgcagacccgtatccagcccgtcggacaattgacgatgggcgacggcatccccgtcggcgaacgccaaggcgaacagattttcggcaaaatctgtatccaatgccacgcggcggacagcaatgtgccgaacgctccgaaactggaacacaacggcgattgggcaccgcgtatcgcgcaaggcttcgataccttgttccaacacgcgctgaacggctttaacgccatgcctgccaaaggcggtgcggcagacctgaccgatcaggaactcaaacgggcgattacttacatggcgaacaaaagcggcggttctttcccgaatcctgatgaggctgcgcctgccgacaatgccgcttcaggaacagcttctgctcctgccgatggtgcagctccggcagaagcgaaggcagaagacaagggtgcggcagcccctgcggtcggcgttgacggtaaaaaagtcttcgaagcaacctgtcaggtgtgccacggcggttcgattcccggtattcccggcataggcaaaaaagacgattgggcaccgcgtatcaaaaaaggcaaagaaaccttgcacaaacacgcccttgaaggctttaacgcgatgcctgccaaaggcggcaatgccggtttgagcgatgacgaagtcaaagcggctgttgattatatggcaaaccaatccggtgcaaaattttaa

SEQ ID NO: 44766 - DNA, 1023 bp, Neisseria meningitidis
atgctgacaaaaaaggagtttgagaagtttttagacgaggtttgcaccgtattgaggcaagaggcaaaaaacgcacctttcaaatcccaagatatttttgaaaacagagttcgtgcgctgtgcattgcaaaaattcccgcttatgctgacatagttatcaatcctgaacctgtgccgcaaattttccccgatgttccaataggggaatatggtgtagaagtcaaattcacgctaaaagatacttggcgcagcgtagcaaacagtatccaagagaaaaacaaagctgacggtgtacagcatatctatgtggtattcggaaaaatggggggcattcccgatgtgaaatggcaactttacgaagatagcgtaattcatgtccgcacatcgcatgttccgcgctttgaggtagaaatagaatctgatcgaccgtctctgtttgagggtttcggtatttcctatgctgaatttgccgatttggatatgcatgaaaaaatggaatatatccgaaaatatgcccgtaacaggctgaaagaaggcgagcggttatggtggatagaagacattgacgcagtagacagccatgatctgcctttggaagtgcgcctttacacttccctgccgcaggaagaaaaaatccgcctccgagctgaagcagcattagtctccccccgtattgtctgctcaggcagggcgaagcacaaatacgataatgccgtcctgtatctgattacctatcgcggtgtgctttgtcatcaggcgcgggacttattcagtgcgggcagcgttgccaactcggcggaagactaccgtggcggaaactatgtagaaaaatctttaaaattgattgagcatgaaattgaaaaagctgctttggaaatggatgatgctctaattgtcgaatattggggagaaagcgtcccgacagaaaaacgcctagagtattggattaagatgttggatgatttggcagatggctggataccttctgaatcgctattcaatggtaggtataaagccaaataa

SEQ ID NO: 44767 - DNA, 2604 bp, Neisseria meningitidis
atgagcaaaaccgtccgttatctgaaagattaccaaacgcctgcctaccgcatccttgaaaccgacctgcattttgatattgccgaaccgcaaactgtcgtgaaatcccgtttgacggtcgagccgcagagggtgggggagccgctggtgttggacggttcgacgaaactcttgtccgtcaaaatcaacggcgtggcggcggattatgtgttggaaggcgagactctgacgattgcagacgtgccgtccgaacgcttcaccgtcgaagtggaaaccgagatcctgccggcggaaaacaaatcgctgatggggctgtatgcttccggtggcaatctgtttacccaatgcgagccggagggcttccgcaaaatcacgttctacatcgaccgtccggatgtgatgtccaaattcacgaccaccatcgttgcggacaaaaaacgctatcccgttttgctctccaacggcaacaaaatcgacggcggcgagtgttcagacggccgccattgggtgaaatgggaagacccgtttgccaaaccgagctatctgtttgctttggtcgcgggcgatttggcggtcacggaagactgtttcaccacgatgggcggcagaaacgtcaaaatcgagttttacactgccgaggcggacaagcctaaggtcggctttgccgtggaatccttgaaaaacgcgatgaagtgggacgaaacgcgcttcggtttggaatacgacttggatattttcatggtcgtcgccgtgggcgatttcaatatgggtgcgatggaaaacaaggggctgaacatttttaataccaagttcgtccttgccgacagccgtaccgccaccgataccgattttgaaggcatcgaatccgtggtcggacacgagtatttccacaactggacaggcaaccgcgttacctgccgcgattggttccagctttcgctgaaagaagggttgaccgtgttccgcgaccaagaattttccggcgaccgcgccagccgcgccgtgcgccgcatcgagaacatccgcctgctgcgccagcaccagttccccgaagacgcaggcccgaccgcccatccggtgcgccccgccagctatgaggagatgaacaatttctacaccatgaccgtttatgaaaaaggcgcggaagtggtgcggatgtatcacaccttgctcggcgaagagggcttccaaaaaggcatgaagctctatttccaacgacacgacgggcaggccgtgacctgcgacgatttccgcgcggcgatggcggacgcgaacggcatcaatctcgaccagttcgccttgtggtacagccaggcgggcacgcccgttttggaagcggaaagccgtctgaaaaacaatattttcgagttgaccattaaacaaaccgtgccgcccacgcccgatatggcggacaagcagccgatgatgattcccgtcaaaatcgggctgctgaaccgcaacggcgaagcggcggcattcgattatcagggcaaacgcgcgaccgaagccgtattgctgctgaccgaagccgaacagatcttcctgctcgaaggcgtaaccgaagccgtcgttccctcgctgctgcgcgggttcagcgcgccggtgcatctgaactatccgtacagcgacgacgacctgctgcttctgctcgcccatgacagcgacgccttcacgcgctgggaagccgcacaaacgctctaccgccgtgccgtcgccgccaaccttgccgcactttcagacggtattgaactgccgaaacacgaaaaactgcttgccgccgtcgaaaaagtcatttcagacgacctcttagacaacgccttcaaagccctgcttttgggcgtgccgtctgaagccgagctgtgggacggcgcggaaaacatcgacccgctgcgctaccatcaggcgcgcgaagccttgttggacacgcttgccgtccgcttcctgccgaaatggcacgaattgaaccgtcaggcggcgaagcaggaaaaccaaagctacgagtacagccccgaagctgccggctggcgcacgctgcgcaacgtctgccgcgccttcgtcctgcgcgccgaccccgcgcacatcgaaaccgttgccgaaaaatacggcgaaatggcgcaaaacatgacccacgaatggggcatcctgtccgccgtcaacggcaacgaaagcgatacgcgcaaccgcctgctggcgcagtttgccgacaagttttcagacgacgcgctggtgatggacaaatatttcgcccttatcggctcaagccgccgcagcgacaccctgcaacaggttcaaaccgccttgcagcatccgaaattcagcctcgaaaaccccaacaaagcccgttcgctcatcggcagcttcagccgcaacgtcccgcatttccacgcagaagacggcagcggctaccgcttcatcgccgacaaagtcatcgaaatcgaccgcttcaacccgcaggtcgccgcccgtttggtgcaggcgttcaacctctgcaacaagctcgagccgcaccgcaaaaacttggtgaaacaagcattgcagcgcattcgggcgcaggaaggattgtcgaaagacgtgggcgaaatcgtcggcaaaattttggattga

SEQ ID NO: 44768 - DNA, 4266 bp, Neisseria meningitidis
atgggcggcaaatcgggcggaggacaacggacaccttatgaagccccaaacagtttatccagcgcccagtcgctgcggattattgatgcggtatccgaaggtgtggtttcggggtttgccaacggcgatgatgcgccgttcaaaagcgtgtattttgatgacactcctgtccaaaattcggacggcagctacaattttaatggagttacgggttatttccagcgtggcgagcaagaccagtcctatgttccgggtttcgatgcttccgagcgcaccgtagccgtttcggctgcggtgaagcagaatcagccgatggttcgcgccgttaccgacgaattggtcagccgtttgcggattacggtcgctgtcgagcggaatgcacaggttgaagacaacggcgacaccgtgcctgctgataccttaatgcgcgttgagttgataaacagcaatggtgtgcaggcatcaaatcaggtgcgtttcaatgaaaaatccagcgggacatattatcaggatgtcgaatttgatgtggtgccgcaagtgccgttcaatatccgcgttttccgaatttcgcctgattccaagaccgacaaggtcagcaacaatacctatttttcgtcctacgttgaaatcgttgatgcgaaattgagctatccgcataccgcgtttgcggcattgtcgattgattcggcgcagttcgggaatcagattccgcgtcgcaattatttgatgaaaggccgcttggtcaaagtgccgtccaattacaatcctgaaacccgccaatatacgggtggaacatgggatggcagtttcaaaaccgcatggacaaacaacccggcatgggttttttacgatgtgctgacccagccgagattttccacgctggcacgtcgtctgaatgtggcagacatagacaaatggagcctgtaccaaatcgggaaatattgcgacgagccggtcgatgacggcttcggcggcaaagagccgcgtttcgtctgcaacgcctacattaccgacctgatgcaggcaggtgaatttttgaacaatcttgccagcgtctttaccggtttaccggtttggaacggacagcaagtatccgtcgtcatggatgccgacgccgatccggtggcgcaatataccaatgccaatgttaaagacggcctgtttaattatgcgggtgcagcgttgaagtccattcatactgctgttcatgtgcagtatatagacaaatacgatggctatcgcgctaaaacagaatatgtagccgacaacgaagccattgcccgctatggtttgaatatcaagcagattactgcgttcggctgcgattcgcgcgggcaggcggcacgtttcggcgcatggacgctgcaaactgagttgcggcagcagaacgccgtaacgtttgaaatcgggcgtgaggggttgaagcatctgccttacgacatcgtgcagattatggacaatcaatacgcaggtgcagagttgtctggacgtgttgccgccatttcgggcaatgtgctgacgctggatcgacctgtatccgatgcggtcggagccttggtgttttattctgaaggcggtagtctgaaatcagcgaagataactgcggcagcaggcaataaggttactttggagcgtgaggtgccgttgcaggctggcgatacgtgggttttatccggcaaagtcaagccgcgcctctaccgtgccatcggcatcaaagagaatacggatgcgggtacttataccgttaccgcgttgctgcatgacccgaaaaaatatgctgccgtggatagttttgcgcattttgaccatgaaattaccacgctgcacaacactgcccctgtgttgaccgatgcggctgtcaataccgacggtgggacagttgtggtgacatgggacaacctggccgcaaacggtcaggttttaacttacgatattaagatttaccgtaacaacagcctataccgccatatccctgatgcacagacagcggaaattcgtttggaaaatctgccgaacggcaattatcgggcggaaatacgcggccgtaatgcacggggtgtactgtccgcaccgttggttaaggcttggagtatcgactataccgttaccggattgaggacgacgccgaaaacactgtctgtgaccgtggattgggtattgccgcaaaccgttgtttccgatttggttttcgagctgtggtatagcaagaccaacaatcttcagacggcaacgaaactcgcgtcgctggcgtatccgcaaaacagttataccttaaccggcgtcggcgttgccgacgtttattatttctgggtgcgcatacgtgatattgcaggaaatacgggggaatttaccgctgccgtacagggtagggcagataacaatcctgcgccgatagtgcagcagattcagggtgcaatcgggaagtctgcattaagcagggagctgatagacacgctgaatcgtgatatggctgcggctgcggggttgaaagtgtctgcagaggcagcggaacgtgctaaagccttacaggaggaagcacgggcgcgaacggcggcaatacaggcggaatcatctgcccgaactgccgagcttgccagaaagtcatccgaaatcggtacgcgtattgccgcaacagaagctgtcaatgagcagcaggcgcagcaaatccaaactgttacgtctgcgcaaggcaataccgccgccgggctggaagccgaaaaaaaagcccgtaccgatggcgacagagccgaggcgcaggcgcgtgaaacactggctgtcagacttggtaatgcagaaagcggtatttcggcattgcgggaaaccgtaacacgtcaggatgctgccaggtcgtctgagatcaacacgttgacggcgaagctggagaatgttgaagtcggcggtcggaattatgccttatcaacaggaacagccggcaaagtgttgaccgctagcgagaataatcagaccaaaaccgtcactatcgacgtttcgtctgctttggatctgaagcaaggcgatagtttgattatctcgtgcgatatcgaactggtaaacgccacatcgcctcatggcaaaccatacccgcgaatcggtgcggaattttccgtaatctatgcggacaactcggtaggttattttgctgcgtggtacggcgaagccgtcagcggtacgaccaaaacgctgaaacagcgtattgtcgccaaacacacggttgccaaagaggttaaagcacttcgaagcttcatcgttcaggcgcggtatcagacatcagaatccatcaaggtttcaaatgtaaaactggagcgcggcacggtagcaactgactggagtcctgcaccggaggacagtaacgccgatacgtctgctttgactaccttgtcggctaaagttcagcaggccagttctgctgttgcagagataggagggaaaatacagtctttgtacacgctgaagactgaggcaatagcaggcggtcgtcgggcagttgcaggggttgcagtgggagccgatggaaagacgggaagtggcgaaatcctcctgatggcagataaagttgcttatgtcgatccgaaagataagacggttacgcccgctttcgttaccgttatcgaaaacggcaaggcgaagcaggctttgaacggcgacctgttcgcgactggttcgatactggcaaagcacatcgctgccaaccagactatcgaagccccaacgctgaatggtgcaaccgtcaatgcaggtctaattaagggtggtacgatacgtggcgcgcgaattgaagccgtggatttggaggccgctaatatcatcggagatgtcgtggcggtcaggacgtttgagctgaagcagtcgccattaggttatcaggaattgatatgccaaatccctgatagccgaaaaacacgccggacggttatcgtgccgccggtttttgctgttgcagaaaatggtgcagttgtcagtctacaactgcacatggatggtgtgattcagcgggaggttacgattcagtcacctgaaaagaggatagcgcgtaacgaaaagttttccgtatgggttcctggccctccgccgctgtatataaggactccgcaggaggtgcctcttagtttttccgtcccattccatctaccaaagacaggcagtatatcttttcagaagggtatcgatggtgcagcacattcgttgcatatcctctgccgcattagcggcaattttgattattcacccttgggcgatttatcgggtattgtctgtcttattgtttaa

SEQ ID NO: 44769 - DNA, 357 bp, Neisseria meningitidis
atggataaaatctttttgcacggcatgaaggcagatacgcttatcggcgtgtacggctgggaacgcgaacggttgcagaccctgattgtcgatttggacatcggcgttcccgagaaagcgggttcggacgacgatattgccaatacggtgcattatgccgaggtatgcgaaacgctgcgccgacatctgaaagaacaggatttcctgcttttggaagcgttggcggaatatattgccgatttggttttgggatatttcggcgcggtgtgggtgcgcgtgaaaatcgtcaagccgggtattttggaaggcgtgcgcgaggttggcgtggaaatcgagcgcggcaagcgtgaagattga

SEQ ID NO: 44770 - DNA, 237 bp, Neisseria meningitidis
atgggtttgattgctatcgcatgtggtttgatcgttgcattgggcgcactgggtgcctctatcggtatcgcaatggtcggttctaaatatttggagtcttctgcccgtcagcccgaactgatcggtccgctgcaaaccaaactgttcctgattgccggtttgattgatgccgcattcttgattggtgtcgccattgcactgctgttcgccttcgttaacccgtttgcaggtgcataa

SEQ ID NO: 44771 - DNA, 1179 bp, Neisseria meningitidis
atgacaggcagaacaggcggcaacggcagtacccaagcgcaacccgaacgcgtcatgctggtgggcgtaatgttggacaaagatggtacgggcagcagtgccacccgtctgaacggttttcagacggcattggcggaagctgtcgagctggtcaaagcggcgggcggcgattccgtgcgcgtggagactgccaaacgcgaccgtccgcacaccgcgctgtttgtcggcacgggcaaggcggcggagctgtcagaagcagttgccgcagacggcatcgatttggtcgtattcaaccacgaactcacgcccacgcaggaacgcaaccttgaaaaagaactgaaatgccgcgtattggacagggtagggctgattctggcgattttcgcccgccgcgcccgcacgcaggaaggcaggctgcaagtcgagttggcgcaattgagccatttggcgggacgcttgatacgcggttacggccatctgcagagccagcgcggcggtatcggcatgaaaggccccggcgaaaccaaactggaaaccgaccgccgattgatcgcccatcggatcaatgccttgaaaaaacagcttgtcaacctcaaaaaacagcgcgccctgcgccgcaagccccgcgaatcgggcacaatcaaaacgtttgcgctggtcggctataccaatgtcggcaaatccagcctgttcaaccggctgaccaagtcgggcatatatgcgaaagaccagcttttcgccacactcgacaccacggcgcggcggctgtacatcagtcccgaatgcagcattatcctgaccgataccgtcggattcgtcagtgatttgccgcacaaactgatttcggcattttccgccacgctggaagaaaccgcgcaagccgatgtgctgctgcacgtcgtcgatgccgccgccccgaacagcggacagcagattgaagacgtggaaaacgtactgcaagaaatccatgccggcgatattccgtgcatcaaggtgtacaacaaaaccgacctgctgccgtctgaagaacaaaacacgggcatatggcgcgacgctgcgggaaaaattgccaccgtccgcatttccgttgctgaaaataccggtatagacgcactgcgcgaagccattgccgagtattgtgccaccgcaccaaacacagacgaaaccgaaatgccatga

SEQ ID NO: 44772 - DNA, 771 bp, Neisseria meningitidis; identical to SEQ ID NO: 39218

SEQ ID NO: 44773 - DNA, 702 bp, Neisseria meningitidis
atgttcagacggcatcggcatttgaaaaatatgcagattaaaaaaatcatgaaatggcttcccgtcgccttgtcgcttttgggtgcgttgggttatacggggtacggcagcgaggcggtgcggacggcggttgccgtactcgacgtactcggcgcggcaggggacgcgggttccgacgcgcccgcccgccgccgagcatcggcgaaatccggtcaccgctacacaggcacggtgtccaaagtctatgacggcgacaccctgcacgttatcgatgttaacggcgcaaagcacaaaatccgtatggcgtatatcgatgcgccggagatgaaacaggcttacggcacgcgttcgcgcgacaacctgcgcgcggcggcggaaggtaggaaagtcagcgtgcgcgtgttcgataccgaccgctaccagcgtgaagtggcgcaggtttctgtcggcaaaaccgatttgaacctgatgcaggtgcaggacggggcggcgtggcattataaaagttatgctaaagaacagcaggataaggcggattttgccgattatgccgacgctcaaattcaggcggaaagggaacgcaaaggcttgtggaaagctaaaaatccgcaagcgccgtgggcgtaccgccgggcaggcaggagcggcaggggcaataaggattggatggatgccgtgggcgaatggttgggcatttggtaa

SEQ ID NO: 44774 - DNA, 162 bp, Neisseria meningitidis; identical to SEQ ID NO: 43409

SEQ ID NO: 44775 - DNA, 513 bp, Neisseria meningitidis
atgttaccgaatacaccgcgccgcgccgtttatgccggcagtttcgatccgcccacattggggcatctgtggatgatacggcaggcgcaatctatgtttgacgaactcatcgtcgccatcggcattaaccccgacaaacgcagcacctataccgtcgctgaaaggcaggatatgttgtgcgatattactaaaatgtttcccaacgtcagaaccgatgtatttgaaaaccgatttctggtgcattatgcccgtgaggtagatgcaggattcatcgtgcgcggcatccgttctgcttcggattacgaatacgaacgttccatgcgccacatcaacagcgacctcgcccccgaaatatccaccgtattcctcatgccgccgcgcgaaatcgccgaagtgtcgtccactatggtcaaaggactggtcgggccggaaggctggacggaaacgatccaccgctacgtgccgcaagctgtgtacgaaaaaatccttgccgaacatcaacacgaaaattga

SEQ ID NO: 44776 - DNA, 672 bp, Neisseria meningitidis
atgactttttccgcgattctgttctatatccttgccgccatcgtcctatacggcgcgctgcgtaccgttacagcgaaaaaccctgtccacgccgctttgcatctggtgttgaccttctgcgtgagcgcgatgctttggatgctgatgcaggctgagtttttgggcgtgacgctggtggtggtttacgtcggcgccgtgatggtgttgttcctgttcgtcgtgatgatgttgaacatcgacattgaagaaatgcgtgccggtttctggcggcacgcgcctgttgccggtgtggtcggcacattgttggcagttgccctgattctgattctggtcaatccgaaaaccgaccttgccgcatttgggctgatgaaagacattcccgccgattacaacaatatccgcgatttgggcagccgtatttataccgattatctgctgccgtttgaattggcggcggtattgctgctgttgggtatggtggccgcgattgcgctggttcaccgtaaaacggttaatccgaaacgtatggatcctgccgaccaagttaaagtacgcgccgaccaaggccgtatgcgcttggtgaaaatggaagccgtgaaaccgcaaaccgaatctgccgaagaaagcgaagtttcagacgacctcaagccgaaagaggagggcaaagcatga

SEQ ID NO: 44777 - DNA, 312 bp, Neisseria meningitidis; identical to SEQ ID NO: 39461

SEQ ID NO: 44778 - DNA, 1176 bp, Neisseria meningitidis
atgctgaacactttcctttccccgtggccctgcttcacccaagaagaagccgatgccgtttccaaagtcctgctgtccaacaaagtcaactactggacgggcaacgaatgccgcgaatttgaaaaagaatttgccgcctttgccggcacgcggtacgccgtcgcccttgccaacggcacgctggcactcgatgtcgcgctcaaagcaatcggcataggcgcgggcaacgatgtgattgttacctcgcgcactttcttggcttccgcttcctgcattgtgaacgcgggcgcaaatcccgtgtttgccgatgtggatttgaacagccaaaacatcagcgccgaaactatcaaagccgcgctgacgtcgaataccaaagccatcatcgtcgtccacctcgccggtatgcccgccgaaatggacggcatcatggacttggcaaaagaacatgatttgtgggtcatcgaagactgcgcccaagcgcacggcgcgaaatacaaaggcaaatccgtcggcagcatcggacacgtcggcgcatggtcgttctgccaagacaaaatcatgaccacgggcggcgaaggcggcatggttacgaccaacgacaaaaccctgtgggaaaaaatgtggtcgtacaaagaccacggcaaaagctacgatgccgtgtaccaccgcgaacacgcgcccggtttccgctggctgcacgaaagtttcggcacaaactggcgtatgatggaaatgcaggcggcaatcgggcgcatccagctcaaacgcctgcccgaatggactgcctgccgtcaagcgcacgccgccaagctggcggaaagcctaggcaaattcaaaagtatccgcttggttgaagtcgccgactacatcggacacgcgcaatataagttctacgctttcgtcaaacccgaacacctcaaagacggctggacgcgcgaccgcatcgtcagcgaactgaacgcgcgcaaagtcccctgctatcaaggcagctgctccgaagtctatttggaaaaatctttcgacgacacgccttggcggccgaaagagcgtttgaaaaatgctgtcgaactgggcgacaccagcctgatgttcttggtgcacccgacgctgaccgacgacgaaatcgcgttctgcaaagaacacatcgaagccgtattggcagaagccacacgataa

SEQ ID NO: 44779 - DNA, 231 bp, Neisseria meningitidis; identical to SEQ ID NO: 39231

SEQ ID NO: 44780 - DNA, 1011 bp, Neisseria meningitidis
atgaaccacaccgttaccctgcccgaccaaaccacctttgccgccggcgacggtgaaaccgttttggccgctgccgcccgtcaaaacctcaatctgccccattcctgcaaaagcggtgtctgcgggcaatgcaaagccgaactggtcagcggcgatattcaaataggcggacactcggaacaggctttatccgaagcagaaaaagcgcaaggcaagattttgatgtgctgcaccactgcgcaaagcgacatcagcctcaacatccccggctacaaagccgatgccctacccgtccgcaccctgcccgcacgcatcgaaagtatggttttcaaacacgatgtcgccctcttgaaacttgccctgcccaaagcccctccgtttgccttctatgctgggcaatacatcgatttactgctgccgggcaacgtcagccgcagctactccatcgccaattcgcccgaccaagaaggcattttggaactacacatccgcaggcgcgaaaacggtgtctgctcggaaatgattttcggcagcgaacccaaagtcaaagaaaaaggcatcgtccgcgttaaaggcccgctcggttcgtttaccctgcaggaagacagcggcaaacccgtcatcctgctggcaaccggcacaggctacgcccccatccgcagcatcctgctcgaccttatccgccaagacagcggccgcgccgtccatttctactggggcgcgcgtcatcaagatgatttgtatgccctcgaagaagcacaagggttggcatgccgtctgaaaaacgcctgcttcacccccgtattgtcccgccccggagagggctggcagggaagaaaagggcacgtacaagacatcgcggcacaagaccaccccgacctgtcggaatacgaagtatttgcctgcggctctccggccatgaccgaacaagcaaaaaatctgtttgtgcaacagcataagctgccggaaaacttgtttttctccgacgcattcacgccgtccgcatcataa

SEQ ID NO: 44781 - DNA, 564 bp, Neisseria meningitidis
atgaaaaaaatcatcttcgccgcactcgcagcggcagccgttggcactgcctccgccgccacctacaaagtggacgaatatcacgccaacgcccgtttcgccatcgaccatttcaacaccagcaccaacgtcggcggtttttacggtctgaccggttccgtcgagttcgaccaagcaaaacgcgacggtaaaatcgacatcaccatccccgttgccaacctgcaaagcggttcgcaacactttaccgaccacctgaaatcagccgacatcttcgatgccgcccaatatccggacatccgctttgtttccaccaaattcaacttcaacggcaaaaaactggtttccgttgacggcaacctgaccatgcacggcaaaaccgcccccgtcaaactcaaagccgaaaaattcaactgctaccaacgcccgatggagaaaaccgaagtttgcggcggcgacttcagcaccaccatcgaccgcaccaaatggggcgtggactacctcgttaacgttggtatgaccaaaagcgtccgcatcgacatccaaatcgaggcagccaaacaataa

SEQ ID NO: 44782 - DNA, 2301 bp, Neisseria meningitidis
atgcaccgaccgaccgccaaacagattctgcacgaagtatttggttatcccgaatttcgcggcaggcaggaggctgtcatcaatactttggcaggcggcgggagtttgacggtgctgatgccgacgggcgggggcaagtctttgtgttaccagattcccgcgctgatgcgcgaaggcgtggcggttgtcgtatcgccgctgattgcgctgatgaacgaccaagtggccagcctgcatgtggccgggattgaagcagcggcagtcaacagcggcacatcggcagatgaggcgcgcgagattgccgacaagcttgcccaaggccgtctgaaactgctttatgtcgcgccggaacgcttggttaccgatcgctttttgcgttttctcgaccaacaaaccgtcagcctgtttgccattgatgaggcgcattgcgtcagccagtggggacacgatttccgccccgaataccaacagctcggcatgcttgccgaacgctatccgaacgtcccgcgcatcgccctgaccgccaccgccgatgccgccacgcgcgccgacatcaagcattatctgcacttggacgatgcgcccgaatttatttccagcttcgaccgcccgaatatttattatcaggttatcgaaaaaaacaacggcaaaaaacaactgcttgaatttatccgcaaagaaatggcggggcaaagcggcattgtgtattgcctaagccgcaaaaaggttgaagatgtggcgcagtttttgcgtgaaaacggattaaacgcgattccgtatcatgctggtttgagcatggacgtgcgcgaggaaaaccaacgccgctttacgcatgaagacaatattatcgtggtggcgaccgtggcgttcggcatgggcatagacaaacccgacgtgcgctttgtcgcccatctcgatatgccccagagtgtcgaacatttctatcaggaatcggggcgtgccggcagggacgggctgcctgccgcgagctggctgtgttacggcttgaacgattgggtgttgctgcgcgaacggattgccgaaggcaacagcgatgaggtgcaaaagcaaatcgaaatgcaaaaactcgatgccatgctttccgtctgcgaaaccgccgcctgccgccgcgtactgttgctcaaacattttggcgaagaatccgaaccctgcggccattgcgacaactgcctgcatccgcctgtgcggtttgacggcacggtgttggtacaaaaattactcagctgcgtgtaccgcgccggacaacgttttgccgccggttacatcaccaaccttttgcgcggtaaaagcgacgattggatacgcggcaaccggcacgaacaactgtctaccttcggcatcggtgcggagttgtccgacaaagaatggcgcagcgtcatccgccagtgcatcagcctcggctacctcaccgtcaacattgcccgatatcaggcattgcaactgaccgaagccgccaaaaaagtcctcaaaggcgaaaccgaagtgatgctgcgtccgctcaagcgcggcaagcccgccgcccgcaccctcaaagacaactggctgcgtaccgaacgcgaagaacgcctgtggcaggcattgcgcgtttggcgtatgaaacaggcagaagccgaaggcatccccgcctatatgattttcggcgacaaaaccctgcgcgaccttgtcgaaaaaatgccgcaaaacctcaacgggctgcacgacatctacggcttgggcgaagccaaaaccgaacgtttcggacacggcatactcgaagtctgccgcaacgccgccggcttcagccgcgacgcggtcatccgtccgcaaaccgaacgcgaacaacaactgcgtcaaaaactcgaggcctggcggtatgaacaggcaagggcggaaaactgcgccctgcatgccgtcctctccgacgaaagccttgccgatatgcttgccgatacgcccgaaaccgaaaccgacctcgaaggcgtacacggcttgggcagcgtacgcgccgccaaatacggacgggacatcctcgccgtctgccgtccgttttcagacggcatcgatgaaaccgccaaacacaaacgccgcctgatgcgcgccctgatccaatggtgcaacgaaacggcaaaacacgaacagtccgaaccctaccgcattctcagcaaagccgccctacgcgccattgccgccaaacagccggaaggtttggcggagcttgccgccgtatatggcgtaggcgaagaaaaagccgcacgttacggtgcggcggtgttggcggtattggaacgaaatgccgtctga

SEQ ID NO: 44783 - DNA, 888 bp, Neisseria meningitidis
atgtacacaggacgtttcgcccccagcccgaccgggctgctccacatcggctcgctgctgaccgccgccgcttcctatgccgatgcacgctcaaacggcggcaaatggctggtccgcatggaagacctcgatccgccgcgcgaaatgccgggggcggcaagccatatcctgcacacgcttgaggcattcggattcgagtgggacggagaagtcgcctatcagagccgccgttacgccctgtatgaagaaaccctatgccgtctgaaaaccgccggactggtctatccctgccattgcagccgcaaagactggcaggctgcggcagtccacggcgcagacggattcgtctataacggacgttgccgcaatccgcagcaacgccctgcaccgcaaggcaaacagcctgcgtggcgcatccgcgtccccgaccgcgacatcggcttttcagacggcatcgtcggcggttacgcccaaaacctcgcccgcgacatcggcgatttcgtcctgcttcgtgcagacggttactgggcataccaactcgccgtcgttgccgacgatgccgaacagggcgttacccacatcgtccgcggacaagacctgctcgtttctacgccgcgccaaatctatttgcagcagtgtttggacgttccgacaccgcaatatgcccacctgccgctgctgaccaacgcacaagggcagaaatggtcgaaacagacgctcgcacccgcattggatttaaaccgccgcgaacaactcctccgccaagtgttccgttacctcaacctgcccgaagcaccggaagccgaccgccctgccgaactgctcgactgggcggtggcacactgggatatggacaaagtgccgaaacacgccattaccaccccctaa

SEQ ID NO: 44784 - DNA, 1293 bp, Neisseria meningitidis
atgcagttttcagcattcggcgaaaaattcacgcaacacagcggcatcctccaactgatggacgacctcggcgacgcgctcaaaagcgacaagcccgtcaacatgctcggcggcggcaacccggcgcgcattccggaaatcgatcaggcgttcgccgacatattctccaaactggcggcagaacacgccgtcgaaaacatcggcaactactccaatccccaaggcgatgccgtgctgattgacgcgctgaccgccttcctcaaccgcgaatacagctggaatctgaccgccgacaatatcgcgctgaccaacggttcgcaaaacgcgtttttctatttattcaacctcttcggcggcaaattcaagctttcagacggcacatccgcagaaaaagccattttgttgccgctcgcgcccgaatacatcggctatgccgacgtgcatgtcgaagggcagcacttcgtttccgtcaagcccaaaatcgaaaacgtcgaacacgaaggcgaagcaggcttcttcaaataccgcgtggactttgacgcactggaaaacctgcccgaactgaaagaaggcaaaatcggcgcgatttgctgttcgcgcccgaccaacccgaccggcaacgtgctgaccgacagcgaaatggcgcggctggacgctttggcgcgtgaacacgggattccgctgattatcgacaacgcctacggaatgccgttccccaacatcatttacagcgacgtgacgctgaattggcacgaaaacatcatcctctgcttcagcctttccaaagtcggcctgccgggcgttcgcaccggcatcatcgtcgccgcgcccgaagtcgtcaaagccgtcagcagcctgaacgcgattgtaaaccttgcccccacacgcttcggcgcggccatcgccgccccgctactggaaagcggcgagatgaaacggcttgccgaccaagtcatccggccgttttaccgcaatcaggcgcaaaccgccgtctcgctgctcaagcgcgagctgggcgcgtacccgatgaaaatccacaaacccgaaggcgcgattttcctgtggctctggtttgaaaacctgcccgtttcttcgcaaaccctgtacgaaatgctcaaagccgaaggtacgctgattattccgggcgaacatttcttcgtcggcatcgacacgcaggattacccgcacgcgggcgagtgcatccgcatgagcatcgcgcaggacgctcaaacgctggaaaaaggcattgccgccatcggcaaaaccgtccgaaaactgtacgacaacgtttaa

SEQ ID NO: 44785 - DNA, 1953 bp, Neisseria meningitidis
atgcgctttgcggtcgctttgctcagtctgctgggtattgcatcggttatcggtacggtgttgcagcaaaaccagccgcagacggattatttggtcaaattcggacctttttgggcgcagatttttggttttctgggactgtatgacgtctatgcttcggcatggtttgtcgttatcatgatgtttttggtggtttctaccagtttgtgcctgattcgcaatgtgccgccgttctggcgcgaaatgaagtcttttcgggaaaaggttaaagaaaaatctctggcggcgatgcgccattcttcgctgttggatgtaaaaattgcccccgaagttgccaaacgttatctggaggtgcagggttttcagggaaaaaccgtcagccgtgagggcgggtcggttctgattgccgccaaaaaaggcacgatgaacaaatggggctatatctttgcccatgttgctttgattgtcatttgcctgggcgggttgatagacagtaacctgctgttgaaactgggtatgctgaccggtcggattgttccggacaatcaggcggtttatgccaaggatttcaagcccgaaagtattttgagtgcgtccaatctctcatttaggggcaacgtcaatatttccgaggggcagagtgcggatgtggttttcctgaatgccgacaacgggatattggttcaggacttgccttttgaagtcaaactgaaaaaattccatatcgatttttacaatacgggtatgccgcgtgatttcgccagcgatattgaagtgacggacaaggcaaccggtgagaaactcgagcgcaccatccgcgtgaaccatcctttgaccttgcacggcatcacgatttatcaggcgagttttgccgacggcggttcggatttgacattcaaggcgtggaatttgggtgatgcttcgcgcgagcctgtcgtgttgaaggcaacatccatacaccagtttccgttggaaattggcaaacacaaatatcgtcttgagttcgatcagttcacttctatgaatgtggaggacatgagcgagggcgcggaacgggaaaaaagcctgaaatccacgctgaacgatgtccgcgccgttactcaggaaggtaaaaaatacaccaatatcggcccttccattgtttaccgtatccgtgatgcggcagggcaggcggtcgaatataaaaactatatgctgccggttttgcaggaacaggattatttttggattaccggcacgcgcagcggcttgcagcagcaataccgctggctgcgtatccccttggacaagcagttgaaagcggacacctttatggcattgcgtgagtttttgaaagatggggaagggcgcaaacgtctggttgccgacgcaaccaaagacgcacctgccgaaatccgcgaacaattcatgctggctgcggaaaacacgctgaacatctttgcacaaaaaggctatttgggattggacgaatttattacgtccaatatcccgaaagagcagcaggataagatgcagggttatttctacgaaatgctttacggcgtgatgaacgctgctttggatgaaaccatacgccggtacggcttgcccgaatggcagcaggatgaagcgcggaaccgtttcctgctgcacagtatggatgcgtacacgggtttgaccgaatatcccgcgcctatgctgctgcaacttgatgggttttccgaggtgcgttcgtcgggtttgcagatgacccgttccccgggtgcgcttttggtctatctcggctcggtgctgttggtattgggtacggtattgatgttttatgtgcgcgaaaaacgggcgtgggtattgttttcagacggcaaaatccgttttgccatgtcttcggcccgcagcgaacgggatttgcagaaggaatttccaaaacacgtcgagagtctgcaacggctcggcaaggacttgaatcatgactga

SEQ ID NO: 44786 - DNA, 1092 bp, Neisseria meningitidis; identical to SEQ ID NO: 38959

SEQ ID NO: 44787 - DNA, 864 bp, Neisseria meningitidis; identical to SEQ ID NO: 39488

SEQ ID NO: 44788 - DNA, 711 bp, Neisseria meningitidis
atgctgtttgaaggcttgccgtgtttggcggtttggtgcaaaaaccggctgtctgccgttttgcctgttggaggattgaacgtgtctgaaaatctgcttgaaatcgaaacccatcccttcgattccgtgttgccgccgaaggctgcggtcatgatgatggggacgtttccgcccaaggaagacaaacgcgcgatgcagtttcattatccgaatttccaaaacgatatgtggcgcgtttacgggctggtgtttttcggcgatgcggattatttcaaagtgccgtccaacggggaggctgcgcactctgaaaaagcgtttgatgccgagaaaatcaaggcgtttttgcacgaacgggggattgcgtcctgtccgaccgttttgaaggcggtacgtcagcacggcaatgcgtccgacaagtttttaaaggtagttgaaaccgtcgatttggcggcggtgttggcaaaaatacccgagtgccgccatatttgtacgacaggcggcaaggcgacggaaatcctgctcgatattcaaggtggcggcatcaaaatgccgaaaacgggcgaaaccgtgccgtttccgtttgccggacgggatttgacgctgacgcgcctgccttcgacttcgcgtgcctatcctttgagtttggcgaaaaaggcggcggcgtatcgggcgtttttcgaaatggcgggtttgtgtgaaaaacagttataa

SEQ ID NO: 44789 - DNA, 1386 bp, Neisseria meningitidis; identical to SEQ ID NO: 39654

SEQ ID NO: 44790 - DNA, 1071 bp, Neisseria meningitidis
atgtatcggaggaaagggcggggcatcaagccgtggatgggtgccggtgcggcgtttgccgccttggtctggctggttttcgcgctcggcgatactttgactccgtttgcggttgcggcggtgctggcgtatgtattggaccctttggtcgaatggttgcagaaaaagggtttgaaccgtgcatccgcttcgatgtctgtgatggtgttttccttgattttgttgttggcattattgttgattattgtccctatgctggtcgggcagttcaacaatttggcatcgcgcctgccccaattaatcggttttatgcagaacacgctgctgccgtggttgaaaaatacaatcggcggatatgtggaaatcgatcaggcatctattattgcgtggcttcaggcgcatacgggcgagttgagcaacgcgcttaaggcgtggtttcccgttttgatgaggcagggcggcaatattgtcagcagtatcggcaacctgctgctgcttcccttgctgctttactatttcctgctggattggcagcggtggtcgtgcggcattgccaaactggttccgaggcgttttgccggtgcttatacgcgcattacaggcaatttgaacgaggtattgggcgaatttttgcgcgggcagcttctggtgatgctgattatgggtttggtttacggcttggggttggtgctggtcgggctggattcggggtttgcaatcggtatggttgccggtattttggtttttgttccctatttgggcgcgtttacaggactgctgctggcaaccgtcgccgccttgctccagttcggttcgtggaacggcatcttggctgtttgggcggtttttgccgtaggacagtttctcgaaagttttttcattacgccgaaaatcgtgggagaccgtatcgggctgtcgccgttttgggttatcttttcgctgatggcgttcgggcagctgatgggctttgtcggaatgttggcaggattgcctttggccgccgtaaccttggtcttgcttcgcgagggcgtgcagaaatattttgccggcagtttttaccggggcaggtag

SEQ ID NO: 44791 - DNA, 1008 bp, Neisseria meningitidis
atgagcaccttcttccggcaaaccgcccaagccatgattgccaaacacatcgaccgtttcccgctattgaagttggaccaggtgattgattggcagccgatcgaacactacctgaaccgtcaaaaaacccgttaccttagagaccaccgcggccgtcccgcctatcccctgttgtccatgttcaaagccgtcctgctcggacaatggcacagcctctccgatcccgaactcgaacacagcctcatcacccgcatcgatttcaacctgttttgccgttttgacgaactgagcatccccgattacagcaccttatgccgctaccgcaactggctggcgcaagacgacaccctgtccgaattgctcaaactgattaaccgacaactgaccgaaaaaggcctaaaaatagagaaagcatccgccgccgtcgttgatgccaccattatccagaccgccggcagcaaacagcgtcaggccatagaagttgacgaagaaggacaaatcagcggtcaaaccacaccgagtaaggacagcgatgcccgttggataaagaaaaacggcctctacaaactcggttacaaacaacatacacgtaccgatgcggaaggctatatcgagaaactgcacatcacccccgccaatgcccatgagtgcaaacacctgtcgccgttgttggaagggttacccgaaggtacgaccgtctatgccgacaaaggctacgacagtgcggaaaaccggcaacatctggaagaacatcagttgttggacggcattatgcgcaaagcctgccgcaaccgcccgctgtcggaagtgcaaaccaaacgcaaccgatatttgtcgaagacccgttatgtggttgaacagagcttcggtacgctgcaccgtaaattccgctacgctcgggcagcctatttcggactgattaaagtgagtgcgcaaagccacctgaaggcgatgtgtttgaacctgttgaaagccgccaacaggctaagtgcgcccgctgccgcctaa

SEQ ID NO: 44792 - DNA, 1209 bp, Neisseria meningitidis
atgaccggcatcatacattcgctgcttgacaccgacctctacaaattcactatgctgcaagtagtcctgcaccagtttccgcagacgcacagcctttacgaattccgatgccgcaacgcctcgaccgtctatccgcttgccgacatcaaagaagacttggaagtcgaactcgacgcgctctgccaactacgcttcacccacgacgaactcgactacctccgcagcctgcgtttcatcaaaagcgactttgtcgattatctcgaactcttccagctccaacgccgctttgtcgaaatcggcacagacgataaagaccgtctgaacatccgcatcgaaggtccgatgatacaggcgatgttttttgaaatcttcatcctcgccattgtcaacgaactttacttccgccgcctggaaacccctgcagtcatagaagaaggcgaacgccggcttcaagccaaagccgcgcgcctcaaagaaatcgccgccgcacaaaaccccgacgaaccgcccttcctgatttccgacttcggcacgcgccgccgctacaagctcgcgtggcaggaacacgtcatccgcaccctgctcgaagccgccccaagcatcgtgcgcggcaccagcaatgtctttctcgccaaaaaactcggcatcacccccatcggcaccatggcgcacgagttcctgcaggcattccaggccctcgacgtacgcctgcggaatttccaaaaggccgcgctcgaaagctgggtgcacgaataccggggcgatttgggcgttgccctgaccgacgtggtcggtatggatgccttcctgcgcgatttcgacctctatttcgccaaactcttcgacgggctgcgccacgacagcggcgacccttacgtttggggcgacaaagcctacgcccactatcaaaagctcaaaatcgacagccgcaccaaaatgctgaccttctccgacgggctggacatcgaacgctcttgggcattgcaccaatatttcaaagaccgcttcaaaaccggcttcggcatcggcaccaacctcaccaacgatatggggcatacacccttgaatatcgtcttgaaactggtcgaatgcaacgggcagtccgtcgccaagctgtccgactctccgggcaaaaccatgaccaacaacagcaccttcctcgcctacctgcgccaagtgttcgacgtacccgaacccgaaacgccgtaa

SEQ ID NO: 44793 - DNA, 1035 bp, Neisseria meningitidis; identical to SEQ ID NO: 38282

SEQ ID NO: 44794 - DNA, 840 bp, Neisseria meningitidis; identical to SEQ ID NO: 39493

SEQ ID NO: 44795 - DNA, 567 bp, Neisseria meningitidis
atgagtctttacgctttgctcttgattgcgctggggatgtcgatggatgcgtttgccgtcgcgctggcaaagggtgcggcggtcaggatgcctccgcgcaaaattgcagcaacagccttggtgttcggcacggttgaggcactcacgccgctggcaggctgggtaggcggtttttatgccaaaccgtttatcagcgaatgggaccattgggcggctttcgtcctgctgggcgggctgggtctgaaaatgatgcgcgaagggctgtccggcaaggcggaagatgtacgcgaaagcaaacgggaaagcctatggatgacggttttgactgcttttggaaccagcatcgactctatgatcgtcggggtgggcttggcgtttatggaggtaaacatcgcctttgccgccgccgtcatcggcatggcgacgacggtgatggttacggtcgggctgacggcgggaagggctttgggcgtattgttcggcaaacgcgccgagtttgccggaggtttggtgttgattgccatcggtacatggacgctcttgtcgcacttggggctgatcgggtaa

SEQ ID NO: 44796 - DNA, 678 bp, Neisseria meningitidis
atgcaagctgatttcaaccgccccgtcctcgccgtcgataccggaacttcctatttgtcgctcgcactgcgtgccgacggcgaaacctgcctgttccatcaggaagtcggcagccgccagtccgcactgattctgccggaaatccgcaccctattccgaaatgcaggcattaccgccgccgatttgggggcgattgtttatgcgaaaggccctggcgcgtttacgggactgcgtatcggcattggcgtggcgcaaggtttggcaacgccgtttgatacccctttaatcggcgtaccctcgctcgatgccgccgcctcgctgccgccgccgcaaagctgtatactcgccgctgcggacgcacgtatgggcgaagtgttttatgcatggttcgacacgctgaaccgccgccgtttgagcgattatcaggtcgggcgggcggcagacattgccctccccgagggatacgtcttttcagacggcataggcaatgcgttcgcgctggaaaaccgtccgcccttctcaggcaaacccgatatgccgactgccgccgattttctcaatctggcggcggatggcggttttcccgccgtcgctgcggcacacgccgagctgctctacgtccgcgacaaaatcgccctgactgccaaagaacaggccgaacggagagcgcgcccgtga

SEQ ID NO: 44797 - DNA, 672 bp, Neisseria meningitidis
atgacgacacaagacgaactcaagcgcatcgctgccgaaaaagcagtcgaattcgtacccgaaaacgaatacatcggcatcggtaccggttcgaccatcaactttttcatcgaagccttgggtaaaagcggtaaaaaaatcaaaggcgcggtatctacttccaaaaaatccagcgaactgcttgcccagtacgacattcccgtcgtttccctgaacgaagtatcgggtttggcggtctatatcgacggtgcggacgaagtgaaccacgccctgcaaatgattaagggcggcggcggcgcgcacctcaacgaaaaaatcgtcgccagcgcatcagaaaaattcatctgcattgcggatgaaagcaaatatgtttcacgtttgggcaaattccctctgcccgtggaagtcgtcgaaagcgcgcgttcccttgtttcgcgcaaactgctcgctatgggcggacagcccgaactgcgtatcggctacaccacgttttacggcaaccaaatcgtcgatgtccacggcttgaatatcgacaaaccgctgacgatggaagacgaaatcaacaaaatcaccggcgtactcgaaaacggaatattcgcccgcgatgccgccgatgtgttgattttggggacggaagagggtgcgaaagtcatctatccctgccaagggtaa

SEQ ID NO: 44798 - DNA, 1035 bp, Neisseria meningitidis; identical to SEQ ID NO: 44313

SEQ ID NO: 44799 - DNA, 1527 bp, Neisseria meningitidis
atgaatcccatgtacattacttttgcaatctatctggttgcagtccttctcatcgggcttgccgcctatttttctacgcgcaatttcgacgattatattttgggcgggcgcagcctaggcccgtttgttaccgcgatgtcggcaggcgcgtccgatatgtccggctggctgctgatgggtctgccgggcgcgatttacctgagcggtttgaatgaggcttggattgccatcggcctcttggtcggcgcgtatttcaactggctcttggtggcgggccgcctgcgcgtgcataccgaatacgccaacaatgcgctgacgctgccggattatttcttccaccgcttcggcgcgggcggacacttgatgaaagtggtttccgcactgattatcctgttcttcttcacgatttattgcgcctcgggcattgtggcgggcgcaaccctgttccaaagcctgtttgaaggtatgacttacaatcaggcaatgtggctgggcgcgggcgcgaccatcgcctataccttcttgggcggcttcttggcggtcagctggacggatacgctgcaggcttctttgatgattttcgccctgattttaacgccggtgatggtctatctgggcttgggcggcgcggaacagatgtctgccgcgattcaaagcgtcgccgcaggcacgggcaaagaatacggcagcctgtttgccggtacgaccgtcatcggcatcatttccaccgccgcatggggcttgggctatttcggacagccgcacattttggcgcgctttatggcggccgaaagcgcgaaatcgctggtatccgcacgccgcatcggcatgacttggatggcgttgtgccttgcgggcgcggtggcggtcggttatttcggcattgcgtatttcggtgcaaatcccgacaaagtttcttctatgagcggcaaccacgaacgcatcttcatcgcgctttccaccctgctgttcaacccttggatcgccggcatcattttgagcgcgattttggcggcggtgatgtccaccctgtcctgccagcttttggtttgctccagcgcgattaccgaagacttctacaaaggctttttgcgtaaaaacgcgcaacagtcggaactggtatgggtcggccgcctgatggtcttggcgattgccgtgatttccatcctgattgcttccgatccgaacagcaaagtattgggactggtgtcttatgcgtgggcaggtttcggtgcggcgttcggcccgattgtgattctgtccgtattgtggaaacgcatcactgcctacggcgcgttgtcgggtatggttgcaggtgccttaaccgtagtcgtatgggcggaatgggtaaaaaaaccggctcaagcggcaggcgaaagcggcttgttgacgatgtacgaaatcgtcccgggctttattgtttgcttaatcgtcgccgtattggtttccctgttcaacaaagaaccttcgcgcgaaacccaagaacgctttgaaaaagccgacgcagattaccgcgccgcccgataa

SEQ ID NO: 44800 - DNA, 3606 bp, Neisseria meningitidis
atgtttcattttgcatttccggcacaaactgccctgcgccaagcgataaccgatgcctaccgccgtaatgaaatcgaagccgtacaggatatgttgcaacgtgcacagatgagcgacgaagagcgcaacgccgcctccgagcttgcccgccgtttggttacccaagtccgcgccggccgcaccaaagccggcggcgtggatgcgctgatgcacgaattctcactctccagcgaagaaggcatcgcactgatgtgtctggcggaagccctgctgcgtatccccgacaacgccacgcgcgaccgcctgattgccgacaagatttcagacggcaactggaaaagccatttgaacaacagcccttccctcttcgtcaatgctgccgcctggggcctgctgattaccggcaaactgaccgccacaaacgacaaacaaatgagttccgcactcagccgcctgatcagcaaaggcggcgcaccgctcatccgccaaggcgtgaattacgccatgcgcctgttgggcaaacagttcgtcaccggacagaccattgaagaagccctgcaaaacggcaaagaacgcgaaaaaatgggctaccgcttctccttcgatatgttgggcgaagccgcctacacccaagccgatgccgaccgctactaccgcgactatgtcgaagccatccacgccatcggcaaagatgcggcaggacaaggcgtttacgaaggcaacggcatttccgtcaaactctccgccatccatccgcgctactcgcgcgcccaacactgccgcgtgatgggcgaactgttgccgcgcctgaaagagctgttccttttgggcaaaaaatacgatatcggtatcaacatcgatgccgaagaagccaaccgcttggagctgtctttggatttgatggaggctttggtttcagaccctgacttggctggctacaaaggtatcggtttcgttgtccaagcctaccaaaaacgttgtccgttcgttatcgactacctgattgacctagcccgccgcaacaaccaaaaactgatgatccgcctcgtcaaaggcgcgtattgggacagcgaaatcaaatgggcgcaagtggacggcttgaacggctatccgacctacacccgcaaagtccacaccgacatctcctacctcgcctgcgcgcgcaaactgctttccgcgcaagacgcggtattcccgcaatttgccacgcacaacgcctacaccttaggcgcaatctaccaaatgggcaaaggcaaagactttgaacaccaatgcctgcacggcatgggcgaaaccctgtacgaccaagtcgtcggcccgcaaaacttaggccgccgcgtgcgcgtgtacgccccggtcggcacacacgaaaccctgctcgcctacttggtgcgccgcctgttggaaaacggcgcgaactcgtctttcgtcaaccaaatcgtcgatgaaaacatcagcatcgacacgctcatccgcagcccgttcgacaccatcgccgaacaaggcatccacctgcacaacgccctgccgctgccgcgcgatttgtacggcaaatgccgtctgaactcgcaaggcgtggacttgagcaacgaaaacgtattgcagcagcttcaagaacagatgaacaaagccgccgcgcaagacttccacgccgcatccatcgtcaacggcaaagcccgcgatgtcggcgaagcgcaaccgattaaaaatcctgccgaccacgacgacatcgtcggcacagtcagttttgccgatgccgcgcttgcccaagaagcggttggcgcagccgttgccgcgttccccgaatggagtgcgacacctgccgccgagcgcgccgcctgcctgcgccgtttcgccgacctgctcgaacagcacacccccgcactgatgatgcttgccgtgcgcgaagcaggcaaaacgctgaacaacgccattgccgaagtgcgcgaagccgtcgatttctgccgctactacgcaaacgaagccgaacataccctgcctcaagacgcaaaagccgtcggcgcgattgtcgccatcagcccgtggaatttcccgctcgctatctttaccggcgaagtcgtttccgcattggcggcaggcaacaccgtcatcgccaaacctgccgaacaaaccagcctgattgccggttacgccgtttccctgatgcacgaagccggcatcccgacttccgccctgcaactcgtcctcggtgcaggcgacgtaggtacggcattgaccaacgatgcccgcatcggcggcgtaattttcacaggctcgaccgaagtggcgcgcctgatcaacaaagcccttgccaaacgcggcgacaatcccgtcctgattgccgaaaccggcggacaaaacgccatgattgtcgattccaccgcacttgccgagcaagtctgcgccgacgtattgaactccgccttcgacagcgcgggacaacgctgctccgccctgcgtatcttgtgcgtccaagaagacgttgccgaccgtatgctcgacatgatcaaaggcgcgatggacgaactcgtcgtcggcaaaccgattcagctcactaccgatgtcggccccgtcatcgatgccgaagcacagcaaaacctgttgaaccacatcaacaaaatgaaaggcgttgccaagtcttaccacgaagtcaaaaccgctgccgatgtcgattccaaaaaatccacgttcgttcgccccatcctgtttgaattgaacaacctcaacgaactgcaacgcgaagtcttcggtcccgtcctgcacgtcgtccgctaccgcgccgacgaactcgacaacgtcatcgaccaaatcaacagcaaaggctacgccctgacccacggcgtacacagccgcatcgaaggcacggtacgccacatccgcagccgcatcgaagccggcaacgtttacgtcaaccgcaacatcgtcggcgcagtcgtcggcgtacagcccttcggcggacacggtctgtccggcacaggccccaaagcaggcggttcattctacctgcaaaaactgacccgcgccggcgaatgggttgccccgaccctgagccaaatcggacaggcggacgaagccgcactcaaacgcctcgaagcactggttcacaaactgccgttcaacgccgaagagaaaaaagccgcagcggccgctttgggacacgcccgcatccgcaccctgcgccgtgccgaaaccgtccttaccggaccgaccggcgagcgcaacagcatctcatggcacgcgcccaaacgcgtttggatacacggcggcaacacggttcaagcctttgccgcactgaccgaacttgccgcctccggcgtacaggcagtggtcgaacccgacagcccgctggcttcctacaccgccgacctggaaggtctgctgctggtcaacgacaaacccgaaaccgccggcatcagccacgttgccgccctgtcgcctttggacagcgcgcgcaaacaggaacttgccgcccacgacggcgcactcatccgcatcctcccttcggaaaacggactcgacatcctgcaagtgtttgaagaaatctcttgcagcgtcaacaccacagccgccggcggcaacgccagcctgatggcggttgccgactga

SEQ ID NO: 44801 - DNA, 3288 bp, Neisseria meningitidis
atgcagagttgggggattccattagcaattgctggagatataattgcagcaacggctattgccacaggagatactggtacgatatctacagaggaattttataattttgacaactggaaaggttttgggtatgagctatttgaagactggtctcgttgggtatacgactggctgcccgacggctggaatctgtggaaagaattggacagaaaccgttcaggccaataccacatctacgaccccctcgccctagacctagacggcgacggcatagaaacagtcgccgccaaaggcttttcaggcagcctcttcgaccataacggcaacggcatccgcaccgccactggctgggtttctgccgatgacggtttactcgtccgcgatttgaacggcaacggcatcatcgacaacggcgcggaactcttcggcgacaataccaaactggcagacggttcttttgccaaacacggctacgcagctttggccgaattggattcaaacggcgacaacatcatcaacgcggcagacgccgcattccaatccctgcgtgtatggcaggatctcaaccaggacggcatttcccaagctaatgaattgcgtacccttgaagaattgggtatccaatctttggatctcgcctataaagatgtaaataaaaatctcggcaacggtaacactttggctcagcaaggcagctacaccaaaacaaacggtacaaccgcaaaaatgggggatttacttttagcagccgacaacctgcacagccgcttcaaagacaaagtggaactcactgccgaacaggcaaaagccgccaatcttgcgggcatcggccgtctgcgcgatttgcgcgaagctgccgcattgtccggcgatttggccaatatgctgaaagcttattctgccgccgaaactaaagaagcacagttggcattgttagataatttgattcacaaatgggcggaaaccgattcgaactggggcaaaaaatcgccaatgcgactttcaaccgattggacgcaaacggctaacgggggtgtggctcttaccccgtctcaagtaacgcgactaaaacagaacgctttagtttctctttccgacaaagccaaagcagctatcgatgccgcccgcgaccgcattgccgtgcttgatgcctacacggggcaggattccagcacactctattacatgagcgaagaagacgcgcttaatatcgtcaaagtaaccaacgatacatacgaccatctcgccaaaaacatctaccaaaacctgttgttccaaacccgtttgcagccatatttgaatcaaatcagtttcaaaatggaaaatgatacgttcactttggattttagtggtcttgttcaagcatttaaccatgtcaaagaaactaatccgcaaaaagcttttgtggatttggccgagatgcttgcatatggcgaacttcgttcttggtatgaaggtcgaagactaatggccgattatgtggaggaggcaaaaaaagcaggtaaatttgaagattaccagaaagtgttgggtcaggagaccgttgcattattagctaaaacatcgggtacgcaagcagatgatatcctgcaaaatgtaggctttggtcataataaaaatgtttctttatatggtaatgacggcaacgacactctaatcggcggcgccggtaatgactatttggagggcggcagcggttcggatacttatgtcttcggcaaaggcttcggtcaggatacggtctataattacgactacgctaccggacgcaaagacatcatccgctttaccgacggtattacagccgatatgctgacttttacccgagagggcaaccatcttcttatcaaggcaaaagacggcagtggacaagtgactgttcagtcctatttccagaacgatggctcaggtgcttaccgtatcgatgagattcatttcgataacggcaaagtactggatgttgccactgtcaaagaactggtacagcaatccaccgacggttcggacagattgtatgcctaccaatccggaagtaccttaaacggcggattgggcgatgactatctgtacggtgccgacggggatgacctgctgaatggtgatgcaggcaacgacagtatctacagtggcaatggcaatgatacgctcaatggaggagaaggcaacgacgccctgtacggctataatggtaacgatgtactgaatggtggcgaaggcaatgatcatttgaacggcgaagacggtaacgacactctaatcggcggtgcaggcaatgattacttggagggcggcagcggttcggatacttatgtcttcggcaaaggcttcggtcaggatacggtctataattacgactacgctaccggacgcaaagacatcatccgctttaccgacggtattacagccgatatgctgacttttacccgagagggcaaccatcttcttatcaaggcaaaagacggcagtggacaagtgactgttcagtcctatttccagaacgatggctcaggtgcttaccgtatcgatgagattcatttcgataacggcaaagtactggatgttgccactgtcaaaaaactggtacagcaatccaccgacggttcggacagattgtatgcctaccaatccggaagtaccttaaacggcggattgggcgatgactatctgtacggtgccgacggggatgacctgctgaatggtgatgcaggcaacgacagtatctacagtggcaatggcaatgatacgctcgatggaggagaaggcaacgacgccctgtacggctataatggtaacgatgtactgaatggtggcgaaggcaatgatcatttgaacggcgaagacggtaacgacactctgatcggcggtgccggtaatgattacttggagggcggcagcggttcggatacttatgtcttcggcaaaggcttcggtcaggatacggtctataattaccatgtggataaaaactctgacactatgcactttaaaggatttaaagcagcagatgttcattttatccgttccggaagtgatttggtgcttagcgcttctgaacaagacaacgtacgtatttccggattcttctatggtgaaaaccatcgtgtagatacatttgtctttgatgatgcagctatcagtaatccagattttgccaagtatattaatgctggcaataatttggtacagtctatgtctgtgttcggttctaatactgctgcgacaggaggaaatgtggatgccaatatacaatccgtacagcagccgttattggtaacgccatctgcataa

SEQ ID NO: 44802 - DNA, 1134 bp, Neisseria meningitidis
atgaaaagaattctttgcattacaggtaccagagccgacttcggcaagctaaaacctttattagcctatattgaaaatcacccagaccttgaattgcatttgattgtaactggtatgcatatgatgaaaacatatggcagaacctgcaaggaagtaactcgagaaaactatcaacatacatatctgttttcaaatcaaatccaaggtgaaccaatgggtgccgttttaggcaataccattacgtttatctctcgtctatctgatgaaattgaacctgatatggtcatgattcacggcgaccgtttagaagcactagcaggcgcaactgtaggtgcattaagcagccgtttagtttgccatatcgaaggtggtgaactatctggtacagtagatgactccattcgtcattctattagtaaactttctcatatccacttggtagcaaatgaacaagctgtcactcgcctagtgcaaatgggagaaaaaagaaagcatattcacatcatcggctcccccgatttagatgttatggcctcttccaccctcccatccttagaagaagtcaaagaatattacggtttaccatacgaaaattatggtatttctatgtttcaccccgtgactacagaagcacatttaatgccacaatatgcggcccaatatttcaaagcattagaattaagtggccaaaatatcattagcatttaccctaacaacgacacgggtactgaaagtattttacaagagttattaaaatgtcaatctgaaaaatttatcgcatttccatctatacgatttgaatactttttagtcttattgaaacatgctaaatttatggtcggcaactcaagtgcaggtattagagaagctcctctctacggtgtcccttcaattgatgttggtacacgccaaagtaaccgccatatgggaaaatctattattcatacagattatgaaactaaaaatatctttgatgcgattcaacaagcatgcagtttaggcaaatttgaagcagatgatacctttaatggcggagatactcgcaccagcacagaaagatttgctgaagtaatcaacaatcctgaaacgtggaatgtttctgctcaaaaacgttttatcgatttgaatctttaa

SEQ ID NO: 44803 - DNA, 1887 bp, Neisseria meningitidis
atgccgtctgaagccgtttttcaaatgattgatatgaatacagaaaaccgttctccggaacaattcgacatcccgctcttcctcaaaaacctgcccaagctgccgggcgtgtaccgtttttttgacgaaggcggcaaagtcttatacgtcggcaaagcggtcaacctcaagcggcgcgtgtccggctatttccaaaaaaacgaccattcgccgcgcatcgcattgatggtaaaacaggttcgccacatcgaaaccaccatcacccgctccgaatccgaagccctgattctcgaaaacaacttcatcaaagccctgtcgcccaaatacaatattcttttccgcgacgacaaaagctatccttatctgatgctcagcggccatcaatatccgcaaatggcgtattaccgcggcacgctgaaaaagcccaaccaatacttcggcccgtatcccaacagcaacgccgtgcgcgacagcatccaagtcctgcaaaaagtctttatgctgcgtacctgcgaagacagcgtgttcgaacaccgcgaccgcccttgcctgctgtaccaaatcaaacgctgtaccgcgccctgcgtcggacacatcagcgaagaagactaccgcgacagcgtgcgtcaagccgccacttttctcaacggcaaaaccgacgaactgacccgcaccctgcaacacaaaatgcaaactgccgccgcgaatctgcaatttgaagaagccgcccgctaccgcgaccaaatccaagcactcggcattatgcagagcaaccagttcatcgacagcaaaaacccgaacaaccccaacgatatcgatttgctcgcgctggcggtttcagacggcatcgtctgcgtacactgggtcagcatacgcggtgggcggcacgtcggcgacaaaagctttttccccgacaccaaaaacgatcccgatccaaacggacaagattacgccgaagccttcgtcgcccaacattatttgggcaaaagcaaacccgacatcattattagcaacttttccgttcccgatgcgctgaaagaggctttggaaggcgaacacggcaagcagatgcaatttgtcaccaaaaccataggcgaacgcaaagtctggttgaaaatggcggaacaaaacgcacaaatggcgattgcacaacgccgcctgcaacaaagcagccagcaacaccgcatcgacgaactcgccaaaatcctcggtatggattcagacggcctcaaccgcctcgaatgtttcgacatcagccacacacaaggcgaagccactattgcgtcctgcgttgtgtacgatgagcaaaacatccagccttcgcaataccgccgctacaacatcacgaccgccaaacccggcgacgactacgccgctatgcgcgaagtgttgacgcgccgttacggcaaaatgcaggaggccgaagccaacggcgagaccgtcaaatggccggatgccgtgttaattgacggcggcaaagggcaaatcggcgtagccgtatcggtatgggaagaactcgggctgcacattcctttggtcggtatcgccaaaggcccggagcgcaaagccggtatggaggagctcatactgccttttaccggcgaagtcttccgcctgcccccgcacagccccgccctgcaccttctgcaaaccgtgcgcgacgaatcacaccgctttgccattacaggccaccgtaaaaaacgcgacaaagcacgcgttacctcgtccctcagcgacatccccggcgtgggcagcaaacgccgccaagccctactcacccgcttcggcggcctgcgcggcgtgattgccgccagccgcgaggacttggaaaaagtggaaggcatcagcaaggcattggcggaaaccatttataatcatctgcattag

SEQ ID NO: 44804 - DNA, 2439 bp, Neisseria meningitidis
atgacagaaaaatcccataaaaaaacagcaaaaggcagggcgggaagcccgtccccaacgtccgcacgcaacaagaaagccgacaacggcgcacggggcaataaagtttccgagcggctcaaggcggtcaaagagttgcagaaaaccgaaaccaaaaaggcgcgtcccgaacatgtcgtcaaccttatcggcgacgcactgtggctgatgggtttggcggcaaccctgtatttggcgatttccctgatcagtttcgatatgggcgatccgtcttggtcgcacagttcgccggttgtggaagatgtcgccaattggggcggactgttcggcgcgtatgttgccgatgtcggctattatcttttcggctggtcgttctggtggtggatagcggctgcctgcgtcatgctgtataaaaattttcgtctgcacgcaaaacagacggaaaacgaggcatacaaccacaaaatcgctgccgccgcgctgtttgtcctgacggtcttcagccccgtcttggagtattttgtgctgggcggaaaatatgccgactccctgcctgtcggagcaggcggtatggtcggcatacgcgtcggcgcagtgtttgcgtggctgctggggaaatcgggcagcctgctgattatcttggttgttctgctgttgtcgttgtccctgctggtgcagatttcatggctggaatttttgaacggtgcgggcagggcggttcaaaaccgcctgagtgccttatccggcaaggtcatggctttaggaaaacgccggccgaatagcaaaacagacggtgtcgatacccaaaatacacggcgcatggtaaaagaagccaagaatattacggccaaacccgttgccttgcccgaaggcagcagcagcaaccgcaaatccgtcgcggtttccgtcgcgccgtcgcccaaaattcaggtttctctgtttgaagatgacgaacctcggcaggcgggcgaataccacaagcctacattgaacctattgcggattcctgacagcgaacccgtcagcatcaatcccgccgaattggagcgcactgccgaactgatcgaatccaaactggcagaattcggcatcggcgtacaagtcgtatccgccacatccggtcccgtcatcacgcgctacgaaatcgaacccgcgcaaggtgttaaaggcagccaaattgttgccttgtcgaaagatttggcacgctctatgtcgctgcaatccgtgcgtatcgtcgaaaccatcgcaggtaaaaacacgatgggcatcgagttgcccaacgacaaacgccaagacgtgatgttgagcgaaatcttgtcctcgcccgtgtttgccgaagccaaatccaagctgaccgtcgcgctgggcaaagacattgccggtacccccgttgtcggcgacttggcgaaaatgccgcaccttttggtcgccggtatgactggttcgggcaagtccgtcggcgtgaacggcatgattatgtctatgcttttcaaagctacgcccgacgaagtccgctttatcatgatagacccgaaaatgcttgagttgagcatttacgacggcattccgcacctgctctgtcccgtcgtgaccgatatgcgcgaagcggggcaggcgttgaactggtgcgtcgccgaaatggaaaaacgctaccgcctgctttcccacgccggtgtacgcaatctggaaggcttcaaccaaaaagtcgaagccgcaaaagcggcaggcaagccgctgctcaatccgttcagtctgaaccccgacagccccgagcctttggaaaaactgccgatgattgtggtcgttatcgacgaacttgccgacctgatgatgaccgaacgcaaagccgtcgagcagcaaatcgcccgtctcgcccaaaaagcgcgcgccgccggtatccatatgattgtcgccacccaacgtcccagtgtcgatgtcgttactggcctgattaaagccaacatcccgacgcgtatggcgtttaccgtgcaaagcaaaatcgacagccgtaccatcctcgaccaaatgggcgcggacgaactgctcaaatatggcgattcgctgttcctccagcccggcagtgccgaaccgacccgcctgcaaggcgcgtttgtttcagacgacgaagtacatcaagtcgtcaactacgtcaaatcgcaagccccagccgactatattgaaggtctgctcagcggcgaggccgcgctggaaactgccaatatcgttaatccgaatgcagacagcgacgaattgttcgatcaggcagtcgcctatgttttggaaagcaaaaaaacctccatttcgtctttgcagcggcagttgcgtatcggctataaccgcgcggcaaacctgatggaggcactggaaaatgcgggtgtcgtttctcccaccgacctcaacggcagccgtaaaattttggcgcacaaggaccatttgtag

SEQ ID NO: 44805 - DNA, 930 bp, Neisseria meningitidis
atggattccatcatcgaactgcgccacctcaagaccctgctggcacttgaagaaaccggcagcgtctcccttgccgccaaacgggttttccttacccaatctgcactttcccaccaaatccgtatgcttgaaaaccactacggcgcaccgttgttcgaacgaaaatccacgcccttgcgctttaccccggttggagaaaggctgttacgcctcgctcacgacctgttgcctcaagttaccgatgcagaacgtgatttggcacgcattatagaaggagaggcaggagaattgcggattgccgtcgaatgccatacctgtttcgactggctcatgcccgcaatgggcgaattccgcccgatatggccccaaatcgaattggatatcgtatcgggattccaagcggaccctatcggactgctgctgcaacaccgtgccgaccttgccattgtttccgaagcggaaaaacaaaacggtatttctttccaaccgctgtttgcctacgaaatggtcggcatttgcgcaccagaccatccgcttgccgccaaaaacgtttggacggcggaagactttatcggggaaaccctgattacttatcccgttcccgacgagatgctggatttgcccaaaaaaatcctgattccgaaaaacatcaacccgccgcgccgacacagcgagctgaccatcgccattatccaactggttgccagcagacgtggcattgccgcccttccctattggacagtcatgccctaccttgaaaaaggctatgtcgttcaccggcagattactgccgacggattgcaaagcaaactgtatgccgccatccgtaccgaagatacggacaagagctatctgaacaatttttgccaaatcatacgcgaacgcggttttgcagatttgcccggactgagcgaactggaaccggtctga

SEQ ID NO: 44806 - DNA, 966 bp, Neisseria meningitidis; identical to SEQ ID NO: 44673

SEQ ID NO: 44807 - DNA, 921 bp, Neisseria meningitidis
atgcctaatccgctttacagacagcatatcatctccatttcggatttgtcgcgcgaacagttggaatgcctgcttcagacggcattgaagctgaaggcgcatccgcgcggcgatttgttggaaggcaaacttatcggttcgtgcttctttgaaccgtccacgcgcacgaggctgtcgtttgaaacggcggtgcagcggctgggcggcaaggtcatcggcttttcggacggcgcgaataccagtgccaaaaaaggcgagacgcttgccgataccgcccgcatcatttccggctacaccgacgcaatcatccaacgccaccccaaagacggcgcggcgcgcgtggcagcggagttttcgcgcgtccccgtcatcaacgccggcgacggcaccaaccagcaccccagccagaccttgttggatctggttaccatttatgaaacgcagggacgtttggacaagctcaaaatcgccatggcgggcgacttgaaatacggacgtaccgtgcattcgctttgtcaggcgttgaaacgctggggctgcgaatttgcctttgtttcgccgcccagcctcgcgatgcccgactacattaccgaagagttggacgaagccggctgccgataccgtatcctcggtagtttggaagaagcggcggaatgggcggacatcctgtatatgacccgtgttcaacgcgaacgtttcgacgaacaggaatttgccaaaatccaaggcaaattcaatctcgacgcatccatgcttgcccgcgccaaaccgaacctgcgcgtgctgcaccctttgccgcgcgtggacgaaatccatcccgatgtcgatgctacgccgcatgcctattatttcgagcaggcgaccaacggcgtttatgcgcgtatggcgatattgtcgctggtgttgaacgaagaagtgtga

SEQ ID NO: 44808 - DNA, 246 bp, Neisseria meningitidis
  misc_feature 223, 224, 225, 226, 227: 'n' is a, c, g or t
atgctgatcgccgcacgcgccatacagggtgcgggagcggttagtgcggcggttaccgcgctgctggcggatttgacgcgcgacggcgtacgtacccgcgcaatggcgatgatcggtttgagtatcggtctgacgttttcggtcagcctcgtcgttgcccctgtgattgccgacgcggtgggcgtacgcggcttgtttctgctgaccggtattttgaccgttnnnnncacacacttaattaattaa

SEQ ID NO: 44809 - DNA, 345 bp, Neisseria meningitidis; identical to SEQ ID NO: 38355

SEQ ID NO: 44810 - DNA, 273 bp, Neisseria meningitidis
atgaataagagaatgaaaatgtgtcctgcttgtcaacaaggctatctctaccattcgaaacctaaatatcttcatgatgaaattattctgtgtgatgaatgcgatgcagtatggctcaaaggtatgaatatattttatggagaatatgaaaaagatttttattcttatgttcctttcatggaatcccaaggtataacgagtgaatgtatttgggaaggagatttgtttgatcatccatattatgaagatgaaaactcaaatgatatggattga

SEQ ID NO: 44811 - DNA, 1281 bp, Neisseria meningitidis
atgaaatccctttttattcggctgctcctgttgggttcggcggcaggcgttttctatcatacccaaaaccaatccctgcccgcgggcgaacttgtctatccgtccgcaccgcaaatcagggacggcggcgatgcgctgcactacctcaaccgcatccgagcccaaatcggtttgcacaagctggcacacgcgccggttttggaaaattccgcccgcaggcacgcacgctatctcacgctcaatcccgaagacggacacggcgaacaccatcccgacaatccgcactacaccgcacaaaagctgaccgaacgcacacgccttgccgggtatctctacaacggcgtgcatgaaaacatcagcacggaagaggaagccgccgaatcgtccgacagcgacatccgcacgcagcaacgccaagtggacggattaatgagcgcaatctaccaccgcctttccctacttgaccgccatacggatgaggcaggagcggcatttgtgcgcgaaaacggtaaaaccgttctcgtattcaatcagggcaacagcaggtttgagcggcattgcgcccaaggcagaaatcagccggaagcaggacggaaatattaccgcaacgcctgccataacggtgcggtcgtgtacaccgacgaagccatgcccgcacaggagctgctctatacagcctatcccgtcggcagcggcgcactgccttatttccacggcgagcgtccagaccccgtgccggaatatgaaatcacgggcaatcctgccagcattgatttttccgaggcggcaggcaaaattacgatgaaaagtttcaagctgtatcagggtaaaaacgaaatccgccccgtcagggttttaaccgccggcaacgaccccaacggcaggctgaccgcgtaccaattcgcgctttttccgctcaagcctttggaatacggcacgctttatacggcggtattcgactatgtccgcaacggacggcgcgcgcaggcgaaatggcagtttagaacccgaaaacccgattacccttattttgaggtaaacggcggcgagacacttgcggttagaaaaggcgaaaaatatttcatccactggcgcggacgctggtgtttggaagcgtgtacccgttatacctaccggcagcgacccggcagccgcctgtccataggaaggcacgaggcgggcggcatcgtcttcagcgttgacggaatggcgggcagccgcatcacgcttgcaccggaaggagaaacggaacgaggcgtaaccctttatttacaggattga

SEQ ID NO: 44812 - DNA, 1566 bp, Neisseria meningitidis; identical to SEQ ID NO: 38156

SEQ ID NO: 44813 - DNA, 1128 bp, Neisseria meningitidis
atgagcaactggaaacccgatattccctataacgatttaccacccctgccgccaaaacaggatattgaaagcaaaaccatcctgaaacgttgtataaccgcccgtgcatcccttgcccgtttaaagcaggcggcagaactgataccgaatcaagccatgctgattaacacccttcctgttatggaagcccgtgcaagttcggaaattgaaaacatcgtaaccacaacggataagctgtttcaatccctgcaaatggatacggaacggcaagaccctgccacgaaagaagccctgcaataccgcaccgccctgtttgcaggctatgaatcactgacgagccgccctttatgcacacaaaccgccatcatggtctgcaacgccatcaagcacccctacgaaatggccatccgcaaaacaggcggcacagccctaaaaggaggcaacagcggaaatgttgtctataccccgcccgaaggagaagaaaccatacgcggcaagctggcaaattgggagcggtttattcacgaaagcggcgatttagacccgcttatcatcatggcggcggcacattaccaatttgaagccatccatccgtttacggacggcaacgggcggacggggcgcatattgaacagcctgctattgattgaaaaagggcttttggatttgcctattttgtatttgagccgctatattatcgaaaacagggcggactattaccgcctgcttttaggcgtaaccgaacggcaggactgggaaagctggataatctacatcttagacggcgtagccgacaccgccgattggacggtagcgaaaatagatgcgatacgccgcctgtttgagcagacacgtcaacacatacggacacacgcacaaggaatctacacgcacgaactggtaaatcttctgtttgagcagccatatacacgcattgccaacctagaagcggcagggatagccaaacggcagacggcctctaagtacctgaaagagctttcagacataggtgtgctgcaagaaatcgccatcggcagggacaaactattcattcatccgcgcctaatggaactattgcggggagagggcaacagctttacctcattccaatccctcgttaaagcatag

SEQ ID NO: 44814 - DNA, 408 bp, Neisseria meningitidis
atgacttatactactgccaaagccgccgaaaaaataggcatctccgcccacaccctacgtttttacgacaaagaaggtttgttgcccaatatcggacgtgatgaatacggtaaccgctgttttaccgataacgatttgcaatggttgggcttattgcaatgcttgaaaaatacgggaatgagcttaaaagacatcaaacgctttgcggaatgtaccgtcattggcgacgataccattgaagaacgcctttccttgtttgaaaatcaaatagaaaatgtgaagtgtcaaattgccgaattaaaacgctatttagatttgcttgaatacaaattggcgttttaccaaaaagcgaaagcattaggttcggtaaaagccgtaaatttgccgcaaattcctgaaacggcttag

SEQ ID NO: 44815 - DNA, 876 bp, Neisseria meningitidis
atgaacctctacgacctgctccttgccccctttgcagaatttgactttatgcgctacgccctcgtatccgtcttctgcctgtccctcagtgccgcacccgtcggcgtattcctcgtcatgcgccgtatgagcctgataggcgacgcattgagccacgccgtcctgcccggtgccgccgtcggctacatgtttgccggcttaagcctgcccgccatgggtttgggcggcgtagccgcaggtatgctgatggcactgcttgccggactcgtcagccgcttcaccaccctgaaagaagatgccaactttgccgccttttatctcagcagcctcgccatcggtgtagtcctcgtcagcaaaaacggcagcagcgtcgatctgctgcatctgcttttcggctctgtacttgccgtcgatattcctgccctgcagctcatcgccgccgtatccagcctcacgctcattacccttgccgtcatctaccgcccgctcgtactcgaaagcatcgaccccctgtttctcaaatctgtcggcggcaaaggcgggctttggcacgtcctctttctcgtcctggtcgtcatgaacctcgtatccggctttcaagccctcggcacactcatgtccgtcggactcatgatgctgccagccattaccgcccgcctgtgggcgaagcacatgggcgcactcatcctcctatccgttctgacagccctgctgtgcggcttgagcgggctgctcatttcctaccacatcgaaatcccttccggccccgccatcatcctctgttgcagcgtcctttatctcttttccgtcatactcggcaaagaaggcggcattctgaccaaatggctcaaaaaccaccgccaccacaccacctga

SEQ ID NO: 44816 - DNA, 291 bp, Neisseria meningitidis
atgaccatccgtcctttacacgaccgcgttgtcgtcaaacgcttggaagctgaagaaaaaaccgcatcgggcatcgttttgccgggtgcggccgccgaaaaacccgacatgggcgaagtcatcgccgtgggcgcgggcaaaatcggtaaagacggcgcgcgccgtccgctggatgtcaaagtcggcgacaaaatcatcttcggcaaatacagcggccaaaccgtaaaagccgacggcgaagagctgttggtaatgcgcgaagaagatattttcggcatcgttgaaaaataa

SEQ ID NO: 44817 - DNA, 969 bp, Neisseria meningitidis
atgaaaattttgcttgtccgtttgtctagtatgggcgatttaattcacactttgcccgcaattgaggatttggcgcgacaatgccctgatgtagaactccattggctgtgtgaagctggatttacagatattgcgcgcctgcatccgtttgtgaaaaaaatccatgtgatgaaatggcggcaatggcgcaaacatctctttcaggctgaaacttggcgggaaatgggtcatctgaaacagactttgcggcaggaagcatttaattttgtattggacagtcaaggtctgattaaaagcgcgtgtttcgctaaaatggcgaaatcccctatttatggtttggataaaaatagcgcgcgcgagggactggctgcgctggcgtatgcgaaaacatacgctgtaccgaaagggaaaaatgctgtttggcgcaatcgtgagctgttcgcccaagtatttgggtatgcgatgcctgaaacgcaggtatttggcttgactgttcctgaggtaggccgtctgaaaaatttagcgcagccgtattatgcggctttgcatgcgaccagtcgggacagtaagttatggcctatggaaaactggcggtcgttgctgcaaaagttgaatgaagaacagcaatgcaatatttacctgccttggggaaatgaagatgaaaaaacgcgtgccaaacagattgcagacggactgccgtttgctattgtgtgcgacaaaataaatttattgcaggcagcgtatctgctgaaatacgcggtcggaattgtcggcgtggataccggtttgctgcatttggcaaatgccttggaaaaacctgtggtcggcatttataccgataccgatccgattaaaacaggcgttcaggtttcgccaattgcaaaaaatttgggcaatatcgggcagattccgaccgcagatttggtttatcaaacgttgatggattgtgttgcagcagacaaaggctaa

SEQ ID NO: 44818 - DNA, 702 bp, Neisseria meningitidis
atgtctttgaaaacagtagccgttatcggcgcaatggaacaagaaatcgagcttttgcgcgagatgatggaaaatgtcaaagccgtctctttcggcaagtttaccgcctatgaaggcgaattagcgggaaaacgcatggtgcttgcattgagcggcatcggcaaggtcaacgcggcggttgcaacggcttggattatccgtgaattcgcagcggactgcgtcatcaacaccggcagcgcgggcggtttgggcaagggtttgaaagtcggcgacgtggtgattggcacggaaaccgcacaccacgatgtcgatgtaaccgcattcggctatgtttggggacaagtgccgcaactgcccgccgtattcgtttcagacgacctcttggtcggcaaggcaaaacgggcggcgcggacgtttgaaggcgcggcggtagaacaaggtctgattgtcagcggcgaccgcttcgtccacagcagcgaaggcgtggcggaaatccgcaagcacttccccgaagttaaggcggtagaaatggaagcggcggcaatcgcccaaacctgtcatcagttggaaacgcctttcgtcatcatccgcgcggtttccgattcggcagatgaaaaagcagacatcagctttgacgaatttttgaaaacggcggcggcaagttctgcaaaaatggtggcagaaatcgtcaaatctttataa

SEQ ID NO: 44819 - DNA, 1035 bp, Neisseria meningitidis
atgccgaattgtttcaaatttcataccgttatcgaacggcattggcaaaaaccttatccggttttgtcttttctgcttaagccgctctccgggctgtttgccaaaattgcggcaaaacggcggacggattttttatcgggaaaacggcaaagcgaaaagctgcccgtgcctgtggtcgtggtcggcaatattcacgcgggtgggacggggaaaacgccgattgttgccgcgctggtgtcgggtttgcaggaaaagggcgtcaaggtcggcatcatcagccggggctacgggcgcaagagcaaggcggttcatgtattgaatgctgagagccgagcggaagatgcgggcgatgagcctttgctgctgttccgcaaaaccggtgcgccgacggcggtgggcagcagccgtgcagaggcaggcagggcgttgctggcggcgcatcccgacatcggactgattgtggcggacgacggtttgcagcattacgccctgcggcgagatgtggaaatcgcggtgtttccgtcggcggatacggggcgcacggatttggatttactgcccaacggcagtttgcgcgaacctttgttgcggctggattcggtggatgcggtcgtcgtcagcggcggcaaggcggatgcgctgtttaggccgtctgaaaatatgtttcacagccgtatcgaagcgggacggatttaccgtttgaacaatccgtccgaaatactggacacaggccgtctgaaaaatcaaaccgtcgtcgccgtggcaggtattgccaagccggcgcgttttttcgattcgttgcggaatatgggcattaccgtgaagcgaaccgtcgcgctgcctgaccacgccgacatttcggcggcagatttgcccgatgcggacgcggtcattattacggagaaagatgcggtcaaattttcagacggcatttgcaccgataatgtttgggtgttgcccgtttgtgcgataatcgaacctgatttggcggcgtttgtgttggagcggttggaagatgtaccgaaggccgtctga

SEQ ID NO: 44820 - DNA, 633 bp, Neisseria meningitidis
atgagaaaaaccaaaaccgaagccttgaaaaccaaagaacacctgatgcttgccgccttggaaaccttttaccgcaaagggattgcgcgcacctcgctcaacgaaatcgcccaagccgccggcgtaacgcgcggcgcgctctattggcatttcaaaaataaggaagacttgttcgacgcgctgttccaacgtatctgcgacgacatcgaaaactgcatcgcgcaagatgccgaagatgccgaaggagggtcttgggcggtattccgccacacgctgctgcactttttcgagcggctgcaaagcaacgacatctactacaaattccacaacatcctgtttttaaaatgcgaacacacggagcaaaacgccgccgttatcgccattgcccgcaagcatcaggcaatctggcgcgagaaaattaccgccgttttgaccgaagcggtggaaaatcaggatttggctgacgatttggacaaggaaacagcggtcatcttcatcaaatcaaccttggacgggctgatttggcggtggttctcttcctgcgaacgtttcgatttgggcaaaaccgccccgcgcatcatcgggataatgatggacaacttggaaaaccatcccgacctgcgccggaaataa

SEQ ID NO: 44821 - DNA, 837 bp, Neisseria meningitidis
atgatagacctgcactgccattccatcgtttccgacggtatgctttcccccgccgaagtcgtgcgcctcgcgcatcaaaacggctgcacgctgctggcgttgaccgaccacgaccacaccggcggcatcgccgaagcgcgtgccgaagccgacaggctcggtttgcgcctgattaacggcgtggaaatctccgtaacgtggcgcgggcgtaccatacacgttgtcggcttagactttgacgaacaagacgaaaacctgcaaaacctgttggcgcaagtgcggcaaggccgtctgaaacgcctcgaagccatcgccgccaagctggaaaaacgcggcatttcgggcgcatacgacggcgcgctcgcgctggcggcaaacaaagaaatggtcagccgcacacacgtcgccgagttcctcattcgggtgggacacgtcaaaaacaagcagcaggcgttcaccaaatacttgggcgacggcaaatcctgcgccgtccgccacgaatgggcgacgctggaagactgcgtctccgccgtcaacggcgcgggcgggttggcggtcatcgcccatccgatgcgttatgatttgtccgccaccgccaagcgcaatctgtttgaagaatttaaaaaactcggcggtgcgggtatcgaagtccacagcggaaactgttgcaaaaacgaccgcctcaactacgcgcttttggcagaacgcttcggattgttggcaagcgcgggcagcgacttccaccgtttaaacgacttcagcggcggcattctcggcgcgtgtcccgaactgccggaaaactgcaaaccggtgtggacgcacttttcccgacattga

SEQ ID NO: 44822 - DNA, 501 bp, Neisseria meningitidis
atgtcaaattaccggagggacttcacgcgcggggcgcactattttttcacattggctttgcaagacaggacgaaggattacctgatacggcatatcgacaggctgcgcctcgcctatcgtgaaacgaaaacacgttatccgtttgaaacggcggcaatttgtattttgccggatcacctgcatttcattatgcggctgccggaaggcgaccacgattacccgatacggattgcatatttgaaaacccggttttcccaactcatccccaaagagtgccgcgcccccaacgggagtaaaacaaaaaaacgcgaagccggcatttggcagcgcaggttttgggaacacctgatccgggacgaacaagatttaaacaaccaccgggattatatttatttcaaccccgtgaaacacgggtatgcggcgagtgtgaaggaatggcgttattcttccttcttcaaagacgttgaaaaaggcatttaccctttggattggggagggtaa

SEQ ID NO: 44823 - DNA, 276 bp, Neisseria meningitidis
atgaaaccgaatattcatcccgacaattaccgaaccgtcctttttttcgatagcagcgccaatgaaggctggttaatccgctcctgtgccgaaacacacggaaaaacgatggtttggacagacggcaaagaatatccgctgttttcgctggatacttcttccgcatcccatcccgtctatactggcaaacagcgcaacgtcaacaccgaaggccgtgccagcaaattcaaccaacgtttccaatccgtaatgtcatcgtttagaaaggacaaataa

SEQ ID NO: 44824 - DNA, 156 bp, Neisseria meningitidis
atgcgcgataaaatcaaactggaatccagtgcaggtactggtcacttctacaccactaccaaaaataaacgcactatgcccggcaaactggaaattaaaaaattcgatccggttgcccgtaaacacgtagtgtacaaagaaaccaaactgaaataa

SEQ ID NO: 44825 - DNA, 207 bp, Neisseria meningitidis; identical to SEQ ID NO: 39219

SEQ ID NO: 44826 - DNA, 120 bp, Neisseria meningitidis
ttgctctttcgtaatttttcacataattatcttcctttgccgtcaaacgctcttttggttacctgctttgtgtcaaaaatgccgtctgaaagccgaatatcatttcagacggcattttga

SEQ ID NO: 44827 - DNA, 273 bp, Neisseria meningitidis
atggcaagtaaaaaagcaggcggcagcacccgcaacggtcgcgattcagaagccaaacgcttgggcgttaaagcctacggcaacgagctgattcccgcaggttccatcatcgtacgccaacgcggtaccaaattccacgcaggcgacaacgtaggcatgggcaaagatcacactttgttcgccaaagttgacggttatgttgaattcaaaaccaaaggtgcgctgaaccgtaaaactgtcagcatccgtccttacaccggttctgaagaataa

SEQ ID NO: 44828 - DNA, 648 bp, Neisseria meningitidis
atgaaaggcgtttacttcgtcagcggcatagacacggacatcggcaaaactgtcgccaccggtatgttggcaaaacaattgttgcagcagggcaaaagcgtgattacgcaaaagcccgtgcaaaccggttgccaagacatcgccgaagacatcgccgttcaccgcaaaatcatgggcatacccatgcaggaagccgacaaacggcggctgactatgcctgaaatcttcagctatcccgcctcgccccatctcgccgcccgtctggacggcagggctttggacttggacaaaatccgtaccgctacgcaagaattggcggcacaatacgaaatagtcttggtcgaaggcgcgggcggtttgatggttccgctgacggaaaagctgttaaccattgattatattcagcaacaggcttatcccgtcatcctcgttaccagcggtcggctcggcagcattaatcacaccctgctcagtttcgccgcgctcaaacaatacggcattcgcttgcacagcctcgtattcaaccatattcatgacagccgcgacgcacacatcgcccaatacagcctgagctacttgaaatgccgtctgaaagccgatttttccgaagcggaatggatggagttggcaaaaacagacgcggtataa

SEQ ID NO: 44829 - DNA, 339 bp, Neisseria meningitidis
atgaacacacgcatcatcgtttcggctgcgttcgttgcgttggcattagcaggttgcggctcaatcaataatgtaaccgtttccgaccagaaacttcaggaacgtgccgcgtttgccttgggcgtcagtccaaatgccgtaaaaatcagcaaccgcagcaatgaaggcatacgcatcaactttaccgcaactgtgggtaagcgcgtgagccaatgctatgttaccagtgtaatcagcacaatcggcgttaccacttccgatgcaatttgtttgggaggcggaacgcacaaaggcaaaagtcaatgcaatgctttgcttaaagcggcaggccgttgctaa

SEQ ID NO: 44830 - DNA, 582 bp, Neisseria meningitidis
atgaggaacgaggaaaaacacgccctgcgccgcgaattacgcgggcggcgttcgcaaatggggtgggacgtgcgggcggcggcaacggtaaaaattaaccgcctgctcaaacgttatatcaagcacggtcggaaaatcggcgtgtattggccgatgggcaaggaattgcgtttggacggctttgtccgcgcggcgcaaaaacgcggcgcaaaactttatctgccttatatcgaaccgcgttcgcggcggatgtggtttacgccgtatcctgaaagcggaatggaacgggagcgcatacggggcagggcgaggttgaacgtgccgcagtttgcagggcgcaaaatccgcgtgcacggtttgtcggtattgctcgttccgcttgtcggcatagaccgcgaaggctaccgtttggggcaggcaggcggctattacgatgcgacgcttgcagcgatgaaataccgtttgcaggcaaaaaccgtgggcgtgggctttgcctgccagttggtggacagactgtcggtcgaggcgcacgacctgccgctggacggttttgtgtcggaggcggggatattgtgtttttag

SEQ ID NO: 44831 - DNA, 762 bp, Neisseria meningitidis; identical to SEQ ID NO: 38716

SEQ ID NO: 44832 - DNA, 1122 bp, Neisseria meningitidis
atgagtaatcaagatttttatgcgacgctgggtgtggcaagaacagctaccgatgatgagattaaaaaagcctaccggaaattggcaatgaaataccatcccgaccgcaatcctgacaataaagaggcggaagagaagtttaaagaagtacaaaaggcgtatgaaactttgtccgacaaggaaaagcgcgctatgtacgaccagtatggtcatgcggcgtttgaaggcggcggacaggggggcttcggagggtttggcggatttggcggtgcgcagggttttgactttggggatattttcagccaaatgtttggaggcggttcggggcgcgcccagcctgattatcagggtgaggacgttcaagtcggtatcgaaatcacgcttgaagaagccgcaaaaggtgtgaagaaacgcatcaatattccgacttatgaagcgtgtgatgtctgtaacggcagtggcgcgaaaccggggacatccccggaaacctgcccgacttgcaaaggttcgggtacggtgcacatccagcaggcgattttccgtatgcagcagacttgtccgacctgccacggtgcgggcaaacacattaaagaaccttgcgtcaaatgccgtggcgcggggcggaataaggcggtcaagacggtggaagtcaatattcccgccggtatcgatgacgggcagcgtatccgtttgagcggcgaaggcgggccgggtatgcacggtgcgcctgccggcgacttgtatgtaaccgtccgcattcgggcgcataagattttccaacgcgacggtctggacttgcattgcgaactgccgatcagttttgccacggctgctttgggcggggagttggaagtgccgaccttggacggaaaggtcaagctcaccgtccccaaagaaacccaaaccggcaggaggatgcgcgtgaagggtaagggtgtcaaatctttacgcagcagcgcgaccggcgatttgtactgccatattgttgtcgaaacgcctgtcaatttgaccgaccgtcaaaaagagcttttggaagaatttgagcggatttctaccggcttggaaaaccaaacaccgcgcaagaaatcgtttttagacaagctgcgcgatttgtttgattga

SEQ ID NO: 44833 - DNA, 246 bp, Neisseria meningitidis
atgctcaaatccatcgaattcaattcccacatccgcaaccgccttgcagcatatctgaaaggcaggggtttggattttcagacggcgatgcgggaggaaaaaggcaacaaagaaatcgccgccatcgtccacagcggtttgcccactctggtccgcaaactgtattccgaacaaaaaatgcagaagtttttttgggaaaagcgggatttgattgccgactacatcagccgccggatgcagggatag

SEQ ID NO: 44834 - DNA, 2208 bp, Neisseria meningitidis
atgtttcccgaccaatccgcccccaacctgctgcaaggcttgaaccctgaacaactttccgccgtaacctggccgccgcaatccgcccttgtgctggcaggcgcgggcagcggcaaaacgcgcgtgctgaccacgcgtatcgcatggcttttgcaaaccggtcaggcaagcgtgcacagcattatggcggtaacgtttaccaacaaagccgccaaagaaatgcaaacccgactcggcgcgatgattcccgtcgacgtccgcgctatgtggctcggcacgttccacggcctctgccaccgctttctacggctgcaccaccgcgatgccggtttgccgtcttcctttcaaatcctcgacggcggcgaccagctttccctcatcaaacgcctgctcaaaagcctcaacatcgccgaagaaatcatcgcgccgcgttcgctgcaaggctttatcaacgcgcaaaaagaatccggtttgcgcgcttccgtcttgagtgcgcccgatccgcacacaagccgcatgattgaatgctacgccgaatacgacaaaatctgccaacgcgaaggcgtggtcgattttgccgaactcatgctccgcagctacgaaatgctgcaaagcaacgaaatcctgcgccagcattaccaaaaccgcttcaaccacattctcgtcgacgagttccaagacaccaacaaactgcaatacgcctggctcaaactcatggcgggcggaaacgcagcggtatttgccgtcggcgacgacgaccaaagcatttaccgtttccgtggcgcaaacgtcggcaacatgaccgcgctgatggaagaattccacatcgacgcgcccgtcaaactcgaacaaaactaccgctccgtcggcaacatccttgccgccgccaatgccgtgattgaaaacaacgacgaacgactcggcaaaaacctgcgcaccgacgccgaagcaggcgacaaaatccgctactactccgcctttaccgacctcgaagaagcccggttcatcttggacgaaaccaaagccctcgaacgcgaaggctgggatttggacgaaatcgccgtcctctaccgtagcaacgcccaatcccgcgttatcgaacaaagcctgttccgcagcggcatcccctacaaaatctacggcggcttgcgcttttacgaacgccaagaaatcaaacacgcgctcgcctacctacgcctcgccgtcaatcccgacgacgacaacgcccttttgcgcgtcatcaacttcccaccgcgcggcatcggcgcacgcaccgtcgagaaccttcagacggcctcaaacgaacaaggcatcaccctttggcaggcagcctgcaacgccggcgcgaaagccgccaaaatcgccgccttcgtccgcctgattgaagcactgcgcaaccaagtcggacaactgcccctgtccgaaatcatcgtcggcatcctcaaagacagcggcctgaccgaacactaccgcacccaaaaaggcgacaaccaagaccgtctcgacaaccttgacgaactcgtcaatgccgccatcgagttcaaacccgaagacagcaacttcgaaatcctgcctgaaaacatttcagacgacccagccttccccatcctcgccttcctaagcaatgccgccctcgaatccggcgaaaaccaagcaggcgcgggcgaaaaagccgtccaactcatgaccgtccacgccgccaaaggcttggaatttaacgccgtcttcctcaccggcatggaagaaggccgtttccccagcgaaatgagccttgccgagcgcggcggcctcgaagaagaacgccgcctcatgtacgtcgccatcacccgcgcccgcaaacgcctctacatcaccatggcgcaacaaagaatgctgcacgggcaaacccaattcggcatcgtctcccgcttcgtcgaagaaatcccgcccgaagtattgcactacctgtccatcaaaaaaaccgcctacgacagctatggcaacacgcgtcaaactgccacgttcaaagacaaaatcatcgacgactacaaacagccgcaaacctacgcaggcttccgcatcggacaaaacgtccgccacgccaaatttggcaccggcgtgattatcgatgccgcagataaaggcgaatccgcccgactgaccatcaatttcggcaaacagggcgtgaaagagttggacaccaagtttgcgaaattggaagagatgtag

SEQ ID NO: 44835 - DNA, 423 bp, Neisseria meningitidis
atgaatttggaacagttgggcaggcgggacgcgctgctttccggacttttgaaacaggcgggacagtggcggcggttggatgccgccgtgaaaaaactgctgcctgccaacctgcacccgcattttcagacggcatgtatcgaagacggcaggcttgtccttttggcggcaaacaatatggcggcatcgcgcttgaaaatgattgcaccgtcggtattgccgcagttggcagggcttgatgcttcgatacgctctgtttcggtcaggctggccccgaaaccggaaaaaccgccgaaaaccaataccctgcatttgagtaaggctgcgctggagagtttcggttcggcggcggtaaagttggaaaaacggcatcccgaattggcggaggcattggcaaacttggttagaaggcatggcgcataa

SEQ ID NO: 44836 - DNA, 624 bp, Neisseria meningitidis
atggtcattgcagccattatggcgatgatagccctccccaatatgagccaatggattgcatcccgccgcattgccagtcacgcggagcggattgccaaccttttgcgtttctccaggggcgaagccgtccggctcaatctccctgtctatatctgtcctgttcaagttaaaaaagacggtgcgcccaacaatagatgtgacttcagcaagaaggggcggggaatgttggctttcggcgacaaaaacggcaataaggcatatgacggcgatgcggcggatgttttcctccgcagcgtggtgttgaatgataccgacgacagccggattaattatgccttcaaccatatcgctttcggttcgtctcagccgaccgccgaccgtgtagtttggacattcaatcaaaacgggacgttcggttatacgaaagaccagcatcttacaagcaaatccagctttttttattccgacggttatatccaaatcgtgctgacagatgcgagagcagttttagatgccgataagaaattccgttcggcggtggttttgattgacagcagcggcagggtcgaagtttgccctaggggtgatcggcgtactcggcgtactatgtgccagtataaataa

SEQ ID NO: 44837 - DNA, 1338 bp, Neisseria meningitidis; identical to SEQ ID NO: 38368

SEQ ID NO: 44838 - DNA, 564 bp, Neisseria meningitidis; identical to SEQ ID NO: 38634

SEQ ID NO: 44839 - DNA, 1245 bp, Neisseria meningitidis
atggaacagcagcaaagatacatcagcgtactggatatcggtacgtctaaagtcctcgcactgatcggggaagttcaagatgacgacaaaatcaacatcgtcggtttggggcaggctccttcacggggcttgcgcgcgggcatggtaaccaatatcgatgccaccgtccaagccatcaggcaggcggtcaatgatgccgagctgatggcggataccaaaattacccacgttaccacaggtatcgcaggcaaccacatccgcagtctcaattcgcaaggtgtggttaaaattaaagacggggaagtcacgcaggcagacatcgaccgcgccattgaaacggcaaaggcaatcaatatcccgcccgatcaaaaaattctcgatgccgtggttcaagactacattatcgacacccaacttggcgtgagggagcccatcggtatgagcggtgtgcgtctggatacgcgggtgcacatcattaccggtgcaagtacggcagtgcagaatgtccaaaaatgtatcgagcggtgcggcttgaaaagcgatcaaatcatgcttcagccgttggcaagcgggcaggcggtgctgactgaagatgaaaaagacctcggcgtatgcgtcatcgacattggtggcggaacgaccgatattgccgtttatatgaacggtgccatccgccatacgtccgtcattccggccggtggtaatctgattaccaaagatttgtccaaatcgttgagaacacctctcgatgccgccgagtacattaaaatccattatggcgtgacatcatgcgatacggaaggcttgggtgagatgattgaagttccgggcgtgggtgaccggacatcgcgtcaggtttccagtaaggttttggcagcaatcatcagtgcacgtattcaggagatttttggcgtagtgctgggcgagctgcaaaaatcgggtttccccaaagaagtgctgaatgcgggtatcgttctgaccggcggtgtgtccatgatgaccgggattgtggaatttgccgaaaaaatcttcgatttgcctgtacgcaccggtgcaccccaagaaatgggcggtttgtccgaccgcgtccgcacaccgcgtttttctaccgccatcgggctgcttcatgcagcatgcaagctggaaggaaacttgccgcagccggaaaacggtgcagtgcaagagagggaagggggcggcggtttgttggcaagattgaaacggtggattgaaaacagcttctga

SEQ ID NO: 44840 - DNA, 237 bp, Neisseria meningitidis; identical to SEQ ID NO: 37424

SEQ ID NO: 44841 - DNA, 768 bp, Neisseria meningitidis
atggcactggcaaaacgcatcatcccctgtctcgacgtaaaagacgggcgcgtcgtcaaaggcgtgaacttcatcggtttgcgcgacgcgggcgaccccgtcgaagccgccaaacgctacaacggcgaaggcgcggacgaattgaccttcctcgacatcaccgcctcatccgacaaccgcgacaccatcctgcacatcatcgaagaagttgccggacaagtcttcatcccgctgaccgtcggcggcggcgtacgcaccgttgccgacatccgccgcctgctcaatgccggcgcggacaaagtcagcatcaacaccgccgccgttacccgtcccgacctgattgacgaagccgccggatttttcggttcgcaagccatcgtcgccgccgtcgatgccaaagccgtcaactccgaaaacacacgctgggaaatctttacccacggcgggcgcaatccgaccggtttggatgcggtggaatgggcgatcgaaatgcaaaaacgcggcgcgggcgaaatcctgcttaccggtatggacagggacggtacgaaacagggtttcaacctgccgctgacccgcgccgttgccgaagccgtcgacatccccgtcatcgcctccggaggggtcggcaatgtccggcacctgattgaaggtataaccgaaggcaaagccgatgccgtacttgccgccggcattttccatttcggggaaatcgccatccgcgaagccaaacgcgctatgcgcgaagccggcatcgaagtgcgcctctga

SEQ ID NO: 44842 - DNA, 198 bp, Neisseria meningitidis; identical to SEQ ID NO: 36305

SEQ ID NO: 44843 - DNA, 1350 bp, Neisseria meningitidis
atggcaaaccaaaccaatagcaaagcaaaagcattgttaggctggatggacgctcgtttccccctgtctaaaatgtggaatgagcatttggctcaatactacgcaccgaaaaactttaatttttggtactacttcggctctttggccctgcttgtcctcgtgattcaaatcgtcagcggcattttcctgaccatgaactacaaacccgacggcaacctgaacgcctaccatctgcctgctgcctttactgcagtcgagtacatcatgcgcgacgtgtccggcggttggattatccgctacatgcattccaccggcgcatctttcttcttcattgttgtttatctgcacatgttccgtggtttgatttacggttcgtacaaaaaaccccgtgagttggtgtggattttcggttctctgattttcttggcattgatggcggaagcctttatgggctacctgctgccttggggtcagatgtccttttggggggcgcaggtaattattaacctgttctccgccatccctgttatcggtccggatttgtccacttggattcgcggcgacttcaacgtttccgacgttaccctgaaccgtttctttgccctgcacgttatcgcggtacctctggtattgctcggcttggttgtggcgcacatcatcgccctgcacgaagtgggttctaacaaccctgacggcgttgaaatcaagaaaaacaaagacgaaaacggtatcccgcgcgacggtatcccattccatccttactataccgttaaagacatcttgggtgtggttgtattcctgattgtcttctgtgccgtattgttcttcgcaccggaaggcggcggctacttcctcgaagcgccgaacttcgatgcggcaaatgcgctgaaaacacccccgcacattgcgccggtatggtatttcacaccgttctacgccattttgcgtgcgattccctcgttcttgggaacgcaggtttggggtgtaatcggtatgggcgcggcggtcgtgttgattgccctgctgccttggctggataggggcgaggtgaaatccgtccgttaccgcggtccgattttcaaaaccgcattggtcttgttcatcatttcctttatcggtttgggtattttgggcgcgatggtggcaaccgatacgcgtactttggtcgcgcgcatcctgtccttcgtctatttcgcattcttcctgggtatgccgttctataccaagctggataaaaacaaaccggttcccgaacgcgtaaccatgagcaccgccaaacaaaaaatcatgttctttgtttacgtcggcattaccgccgtgggtgcttacctgtttgcaaccaacatctga

SEQ ID NO: 44844 - DNA, 1281 bp, Neisseria meningitidis
atggaaaactcattgaaagaagccgccctcaagttccacgaattacccgttccgggcaaaatttccgttaccccgaccaaatctttggcgaccgacaaagatttggcgttggcgtactctccgggcgtagccgctccttgtatggaaatccatgccgatccgcaaaatgcctacaaatacaccgccaaaggcaacttggtcgccgtcatttccaacggtacggccgttttgggcttgggcgacatcggcgcgctggcgggcaaacccgtgatggaaggtaaaggcgtattgttcaaaaaattcgccggtgtggacgtgttcgacatcgaaatcgatgaaaaagacccgcaaaaactcgtggacatcatcgccgctttagagccgaccttcggcggcatcaacctcgaagacatcaaagcacccgagtgtttctacatcgaacgcgaattacgcaaacgctgcaaaatccccgtattccacgacgaccagcacggcacggccatcattaccgccgctgccgtattgaacgccctgcgttttaccggccgtaaaatcgaagaagcgaccttggtttgctctggtgcgggtgcggccgcgattgcctgcttgaaccaattgctggatttgggcttgaaacgcgaaaacgtgaccgtttgcgactcaaaaggcgtgatttacaaaacccgcgaagacaaagatcgcatggatgagtctaaacagttctacgccattgaagacaacggccagcgcgtattggccgatgcggttaaaggcaaagacatcttcttgggtctgtccggcgcgaacctgctgacccccgaaatgttgaacacgatgaacgaaaaacccatcgtgttcgctatggccaacccgaatccggaaatcctgccgccgctggcgaaagaaacccgtccggacgtggttatcggtaccggccgctccgacttcccgaaccaagtgaacaatgtattgtgcttcccgttcatcttccgtggcgcgttggatgtcggcgcgacgaccatcaacgaagaaatgaaacgcgcctgcgtgtatgctttggcggatttggcgatggaagaagtaaccgaagaagtggttgccgcttacggtaagaaatttgaattcggcgcggaatacctgattccgactccgttcgattcccgcctgctgccgcgcgttgctacggctgccgccaaagcagcgatggaaagcggcgtggcaacccgtccgattgcagatttggaagcttacgctgccaagctgagcgaatggaagctgtaa

SEQ ID NO: 44845 - DNA, 2394 bp, Neisseria meningitidis
atgaaactgaaacagattgcttccgcactgatggtcttgggcatatcgcctttggcacttgccgacttcaccatccaagacatccgcgtcgaaggcttgcagcgtaccgagccgagcaccgtattcaactacctgcccgtcaaagtcggcgacacctacaacgacacacacggcagtgccatcatcaaaagcctgtacgccaccggtttctttgacgacgtacgcgtcgagactgcggacgggcagctcctgctgaccgttatcgaacgccccaccatcggctcgctcaacatcaccggcgcaaaaatgctgcaaaacgacgccattaagaaaaacctcgaatcgttcgggctggcgcagtcgcaatactttaatcaggcgacactcaatcaggcagtcgccggcctgaaagaagaatacctcgggcgcggcaaactcaatatccaaatcacgcccaaagtaaccaaactcgcccgcaaccgcgtcgacatcgacatcacgattgacgagggcaaatccgccaaaatcaccgacatcgaatttgaaggcaaccaagtctattccgaccgcaaactgatgcggcagatgtcgctgaccgaaggcggcatttggacatggctgacacgaagcaaccaattcaacgagcagaaatttgcccaagacatggaaaaagtaaccgacttctaccagaacaacggctacttcgatttccgcatcctcgataccgacatccaaaccaacgaagacaaaaccaagcagaccatcaaaatcaccgtccacgaaggcggacgtttccgttggggcaaagtctccatcgaaggcgacaccaacgaagtccccaaagccgaactggaaaagctgctgaccatgaagcccggcaaatggtacgaacgccagcagatgaccgccgttttgggtgagattcagaaccgcatgggctcggcaggctacgcatacagcgaaatcagcgtacagccgctgccaaacgccgaaaccaaaaccgtcgatttcgtcctgcacatcgaaccgggccggaaaatctacgtcaacgaaatccacatcaccggcaacaacaaaacccgcgacgaagtcgtgcgccgcgaattgcgccaaatggaatccgcgccttacgacacttccaagctgcaacgctccaaagagcgcgtcgagcttttaggctacttcgacaatgtccagtttgacgccgtcccgcttgccggcacacccgacaaagtcgatttgaacatgagcctgaccgaacgttccaccggctcgctcgacttgagcgcgggctgggtacaggataccggcctggtcatgtccgcaggcgtttcccaagacaacctgttcggtacgggcaagtcggccgccctgcgcgcctcacgaagcaaaaccacgctcaacggctcgctgtcgtttaccgacccgtacttcacggcagacggggtcagcctgggctacgatgtttacggaaaagccttcgacccgcgcaaagcatcgaccagcatcaaacaatataaaaccaccacggcaggcgcaggcatccgcatgagcgtgcctgttaccgaatacgaccgcgtgaatttcggtttggtggcagaacacctgaccgtcaacacctacaacaaagcgcccaaacactatgccgactttatcaagaaatacggcaaaaccgacggcacagacggcagcttcaaaggctggctgtacaaaggtaccgtcggctgggggcgcaacaaaaccgacagcgcgttatggccgacgcgcggctacctgacgggcgtgaacgccgaaatcgccctgcccggcagcaaactgcaatactactccgccacccacaaccaaacctggttcttccccctgagcaaaaccttcacactgatgcttggcggcgaaatcggctatgccaacggctacggcaaaaccaaagaaatccccttctttgaaaacttctacggcggcggcctgggttcggtacgaggttacgaaagcggcacactcggtccgaaagtctatgacgaatacggcgaaaaaatcagctacggcggcaacaaaaaagccaacgtctccgccgagctgctcttcccgatgcccggcgcgaaagacgtgcgcaccgtccgcctgagcctgtttgccgacgcaggcagcgtgtgggacggcaaaacctacgacgacaacagcagttccgcgaccggcggcagggttcaaaacatttacggcgccggcaatacccataaatccacctttaccaacgaattgcgctattccgccggcggcgcggttacctggctctcgcctttaggcccgatgaaattcagctacgcctacccgctgaagaaaaaaccggaagacgaaatccaacgcttccaattccaactcggcacgacgttctaa

SEQ ID NO: 44846 - DNA, 1077 bp, Neisseria meningitidis
atgaagccgtctatcttagaaaaactgcaacaactcggcgaccggttggaagaagttacccaccttttagggcaacccgaagccacatccgatatggacaactaccgcaagctcacgcgcgaacacgccgaactgacccccgtcgtcgaagtattccaaaactatcggcttgcccaaagcgacttggcagatgccgaagaaatgctgtccgaccccgaaatgaaagattttgccgccgaagaaatcgaagcggccaaagccaaaatcggcgaactcgataccgaactgcaaaaactgctgctgcccaaagatgccgacgacgacaaaaacatcttcatcgaaatacgcgccggaacgggcggcgacgaagccgcgctgtttgccggcgatttgctgcgtatgtacagccgctacgccgagcgcaaccgttggcaggttgaaatcgtgtccgccaacgaaagcgaattgggcggctataaagaagtcatcgcccgtattgtcggactcggggcgtacagccgtttgaaatttgaatcgggcggacaccgcgtgcagcgcgtccccgccaccgaaagccaaggccgcatccacacctccgcctgcaccgttgccgtcatgcccgaagcggacgaactggaagacatcgaactgaacccagccgaccttcgcatcgacacctttcgcgcatccggcgcgggcgggcagcacatcaataaaaccgattccgccgtccgcatcacccacctgcccacaggcatggtggtcgaatgccaagacggacgcagccaacacgccaacaaagcgcaggcgatgaaagtcctcgccgcccgcctgaacgacgcgcaaaaacgcgaagcccaagccaaagaagccgccgaacgcaaatccctcatcggcagcggcgaccgcagcgaacgcatccgcacctacaactatccccaaggcagggtaacagaccaccgcatcaacctcaccctgcacaagctggattttgtgatggacggcgatttggcagaaatcaccgatgccctgattgccgaacatcaggcggagcttttggcggcaatgggcgattga

SEQ ID NO: 44847 - DNA, 1596 bp, Neisseria meningitidis
atgtcccaagaaatcctcgaccaagtgcgccgccgccgcacgtttgccatcatctcccaccctgacgcaggtaaaaccacgttgactgaaaaactcttgctgttttcaggtgcgattcaaagcgcgggtacggtaaaaggcaagaaaaccggcaaattcgccacctccgactggatggacatcgagaagcagcgcggcatttccgtggcatcaagcgtgatgcagttcgactataaagaccacaccgtcaacctcttggacacgccgggacaccaagacttctccgaagacacctaccgcgttttaaccgccgtggacagcgcattaatggtgattgacgcggcaaaaggtgtggaagcgcaaaccatcaagctcttaaacgtctgccgcctgcgcgatacgccgattgttacgtttatgaacaaatacgaccgcgaagtgcgcgactcgctggaactcttggacgaagtggaaaacatcctgcaaatccgctgcgcgcccgttacctggccgattggtatgggcaaaaacttcaaaggcgtataccacatcctgaacgatgaaatctatctctttgaagccggcggcgaacgtctgccgcacgaattcgacatcatcaaaggtatcgataatcctgaattggaacaacgctttccgttggaaatccaacagttgcgcgacgaaatcgaattagtgcaggcagcatcgaacgagtttaatctcgacgaatttctcgccggcgaactcacgcccgtgtttttcggttcggcgattaacaacttcggtattcaggaaatcctcaattcattgattgactgggcgcccgcgccgaaaccgcgcgacgcgaccgtgcgtatggtcgaaccggacgaggctaagttttccggatttatctttaaaatccaagccaatatggatccgaaacaccgcgaccgcatcgcttttttgcgcgtctgctccggcaaattcgagcgcggcatgaagatgaaacacctgcgcatcaaccgcgaaatcgccgcctccagcgtggtaaccttcatgtcgcacgaccgcgagctggtggaagaagcctacgccggcgacatcatcggcatcccgaaccacggcaacatccaaatcggcgacagcttctccgaaggcgaacaactggcatttacaggcattcccttcttcgcgcccgaactgttccgcagcgttcgcatcaaaaacccgctgaaaatcaagcaactgcaaaaaggtttgcaacagcttggcgaagaaggtgcggtgcaggtgttcaaaccgatgagcggcgcggatttgattttgggcgcggtcggcgtgttgcaatttgaagtcgttacctcgcggctggccaacgaatacggcgtagaagccgtgttcgacagcgcatccatctggtcggcgcgctgggtatcgtgcgacgacaagaaaaaactggcggaatttgaaaaagccaatgcaggcaacctcgccatcgacgcgggcggcaacctcgcctacctcgcccctaaccgcgtgaatctgggactcacgcaagaacgctggccggacatcgtgttccacgaaacgcgcgagcattcggtcaaactttaa

SEQ ID NO: 44848 - DNA, 627 bp, Neisseria meningitidis; identical to SEQ ID NO: 37626

SEQ ID NO: 44849 - DNA, 207 bp, Neisseria meningitidis; identical to SEQ ID NO: 39624

SEQ ID NO: 44850 - DNA, 747 bp, Neisseria meningitidis
atggaaaccccgaccaacaccccgcaacgctccctgcgtcaaaacagtatctacctgctgcccaactcctttaccatcgccgcgctgttttccgcattttatgcaatcacccaatccatgcacggacgttatgaaaccgccgccatcgcggtattcatctctatgttgctggacggtatggacgggcgcgtggcgcggctgaccaacagccaaagcgcgttcggggagcagctcgacagccttgccgatatggtcagcttcggcgttgctcccgctctgattgcctacaaatggcagctttggcagttcggcaaaatcggttattccgtcgccttcatctactgcgcctgcgccgccctgcgcctcgccctgttcaacacactcatcggcaaggtggacaaacgctggtttatcggcgtgcccagtccgactgccgccgcgctgattgtcgggctgatttgggtcaaccacagcgtcgaaaaattccccgccgtccactggtgggcattgggcatcacactgtttgccggcctgtcgatgattgtccaaatccctttttggagttttaaagaaatcaacatccgcagacaagtcccctttgtcggaatgctgcttgccgtcttactgctgcttctggtcacttgggaaccgtcgctcgtcctcttcctgttctttctcggatacagcctgtccggctacattatggcggcacgccgattttggaaaaaatacagaaaggcggattaa

SEQ ID NO: 44851 - DNA, 333 bp, Neisseria meningitidis; identical to SEQ ID NO: 43845

SEQ ID NO: 44852 - DNA, 1134 bp, Neisseria meningitidis
atgaaaatcgtttttatcacaacagtcgcatccagcatttacggtttccgcgcccccgtcattaaaaaattaatcggcaaaaaccatcaggtgtatgcctttgtatcggagttttccgataatgaattggatattatcagggaaatgggggttacacccgttacctaccgttcaaaccgcagcgggctgaacccgttttccgatataaaatccaccttcctcatctttaaagaactcaaaaaaatatcgccggatttggttttcccttatttcgcaaaacccgtgattttcggcacttttgccgcaaaactggcaggcgtgcccagaatcgtcgggatgctggaaggtttgggattcgcatttaccccgcagccggaaggcataccgttaaaaacaaaaatcataaaggggatcttgattgccttataccgcattgccctgccgatgttggaaagcctgattgtattaaaccccgacgacaaagacgaactgacggacaaatacggcatcaaaataaaaaacatccatattttgggcggaatcggtctggattcgcggcaatatccttattccgaggcggatattcccgatgaaaaagaacccgtaaaattcctctttatcggcagatttctgaaagaaaaggggattgatgattttattcgggcggcggaacaggttaaggacaaataccccgatacggtttttaccgctttgggcgcaatcgacaaatcacgcggggggggggggggcgatttggaacggcttgccgcccgcgatattatccgtttccccggttttgtgaacaatgtttccgaagtgataaaagaacatcatatattcgtattgccgtcttattatagggaaggcgttccccgaagcactcaggaggcaatggccgtcggcagggcagtgattacgacggatgtccccggatgcagggaaacggtcgccgacaaggtcaacggcttcctgatcgagccttggaatccccgcatcttggccgaaaaaatgatttattttatcgaaaacagggaagccgtccgcctgatggggaatgcaagttatgcgattgccaaagataaattcgatgccgaaaaagtcgatttgaaattgctcgatattttgaaggcgtaa

SEQ ID NO: 44853 - DNA, 1020 bp, Neisseria meningitidis
atgaaaaaaattctcgttaccggcggcaccggttttatcggctcgcataccgttgtttctttgctgaaaagcggccatcaagtcgtgattttggataacctatgcaattccagcatcaatatcctgccacgcttgaaaacgattaccggccaagagattccgttttatcaaggcgatatccgcgatcgtgagattttgcgccgtatttttgcggaaaaccgcattgattcggtgattcattttgccggcttgaaagcggtgggtgaaagtgtggccgagccgatgaaatattatgataataatgtttccggcagcttggtgttggcggaagaaatggcgcgtgcgggcgtgtttagcattgtgttcagttcttcggcgacggtttatggcgatccgggcaaagtgccttataccgaggatatgccactgggcgataccaccagcccttacggcacatcgaaatcaatggttgagcgcattctcactgatattcaaaaagccgatccgcgctggagcgtgattttgttgcgttatttcaatccgattggcgcgcacgaaagtggtttgattggcgagcagccaaacggtatcccaaacaatctgctgccttatatctgccaagtggcttcgggcaggctgccgcaactgtcagtattcggcggcgattatccgacccccgacggtacgggaatgcgcgactatattcatgtgatggatttggcagaaggccatgtcgcggctatgcaggcgaaaagcaatgtagcaggcacgcatttgttgaacttaggttccggccgcgcttcttcggtattggaaatcatccgcgcatttgaagcagcttcgggtttgacgattccgtatgaagtcaaaccgcgccgtgccggtgatttggcgtgcttctatgccgacccttcctatgcaaaggcgcaaatcggctggcaaacccagcgtgatttaacccaaatgatggaagactcatggcgctgggtgagtaataatccgaatggctacgacgattaa

SEQ ID NO: 44854 - DNA, 1455 bp, Neisseria meningitidis
atgactacgcaaaccatcaaatttcacatgaagccggaaactttcaagcaaaacgccgcaatttcccttcaagacaagcctttgcgcaaaagcctgcgtaccgcgatggatatgctgatgaccaaacgcaaagccgttttgaccgacgaagaagagctgcaaagcctgcgcgatttgtgcgaacacgtccgtcagcgctcattgtctaaattgccagccctgctggagcagctggaagaaaacctgactaagttgggcgtgaaagtgcactgggcagaaaccccgaccgaagcctgccaaattatccacgacatcatcacagccaaaaacggcaagctgatggtcaaaggcaaatcgatggtcagcgaggaaatcgagctgaaccattatcttgaagcaaaaggcattaaagcggtagaaagcgacttgggcgagttcatcgtccaaatggcaggcgaaaaaccgacccatatcgtgatgcccgccattcacaaaaccaaagaacaggtgagtgaactgttccaccaaaaccttggaactccgcttacggacgacgtggaccaactgaccggcttcgcccgcaaagccctgcgcgatatttacagcactgccgatgtcggtttgagtggcgtaaactttgctgttgccgaaacgggtacgctgtgtctggtggaaaacgaaggcaacggtcgcttgagtaccaccgtaccgcccgtgcatatcgctattaccggcattgaaaaagtggtggcgaaattgtccgacatcccacccttgtacagcctgctgccgcgttctgccattggtcagaacattaccacttatttcaatatgattaccggcccgcgccgtagcgaagagctggacggtcctcaagaaatgcacttggtcctgcttgacaacggtcgcagccaagcctatgccgaagaccaaatgcgccgcaccttgcaatgtatccgttgcggcgcgtgtatgaaccattgcccggtttatacccgtatcggcggcgcggcatacggcacaacctatcccggcccgattggcgagattatttcccctcacctgttgggtctggatgccacccgcgacttgccaaccgcctgtaccatgtgcggcgcgtgtgtggaagtctgtccggtacgcatcccgattaccgaacaaatgcagcgtttgcgcgttgaagcgcaacgttcgccgaccgaaaccgtgccacaccccatcctagggcaaggcgcatcgcataccttcggcgaacaaatggcgtggcgcacattcaacggtattttcagcggcagcaaaacctaccgcgccttcggttgggcagccaccaagttccgcaacctgaccccgcgcaaacagttgggttggacgcaaaaccgcgtgccgatgaaaccggcgaagaaaaccctgcacgaactaatggcagaaaaaatgcgccaaaaagaacaggcataa

SEQ ID NO: 44855 - DNA, 828 bp, Neisseria meningitidis; identical to SEQ ID NO: 38917

SEQ ID NO: 44856 - DNA, 2775 bp, Neisseria meningitidis; identical to SEQ ID NO: 38521

SEQ ID NO: 44857 - DNA, 240 bp, Neisseria meningitidis
atgattctcaacatacgcaaaatgggaaactcgcaaggcgtgattctgcccaaatcattattgggtcaaataggggcagtagacagcttggctgttacagttgaaaagggcaatatcattttaagctgtcctaccgttcgcaggggatgggcagaagctgccgcaatgcttgtcgaaaccgagcaggagcattttttttccgaaattgaaaacgaagcggataaagaatggatatggtag

SEQ ID NO: 44858 - DNA, 336 bp, Neisseria meningitidis
atgacggttgataaggaacaagtagaaaagatgatttattctgaaaataaacagagtgttattgacggtatgctcggtatgaccttcagctcggaggaggatgaaatcccctggatttccgagaagttgacggagttgtcgaaacataaagacttggatattgccagattgtcattaacctgtttcggacatctcgccaggatgcatgaaaatatcggcgattgcgataaagtgattgctttattgctctcaaaacaaggtgatccggattttcaaggttttgccgaagatgcgttagacgagatttctttatttatatttaaaaagcgtccgtaa

SEQ ID NO: 44859 - DNA, 1512 bp, Neisseria meningitidis
atgagcgaacaaaaccatccgcaaaccgagccgcagttggacgaaaaccaaatcatcgccctgcgccgcgaaaaactgcacaacatccgccaacagcgcaacgcctatcccaacgacttcaaacgcgacagcttcgccgccgatttgcacgcccaatacggcgaaatcggcaaagaagaactcgatccgcaaggcattcccgtcaaagtggccggccgcatgatgctgaagcgtcaaatgggcaaggcgagctttgccaccattcaagacgtgtccgggcaaatccagctttatctgaacaacaaaggcgtgagccaagaagttttggacgacttcaaccattgggatttgggcgacatcgtcggcgcggaaggcactttgttcaaaaccaaccacggcgaactgaccgtacgcgtgtccgacatccgcctgttgtccaaatccttgcgtccgctgccggacaaacacaaaggcttgagcgatcaggaaaccaaataccgccaacgctatgtcgatttgattgccaacgaagaatcgcgcaatacctttatcaaacgcagccaaatcatccaatccgtgcgtaattttatggtgggcgagcattatctcgaagtcgaaaccccgatgatgcacccgattcccggcggcgcgacggcaaaacccttcgttactcatcacaatgccttagatattccgctttacctgcgtatcgcgcctgagctgtatttgaaacgcctggttgtcggcggcttggaacgcgtgtttgaaatcaaccgcagcttccgcaacgaaggcatgtccgtgcgccacaaccccgaatttacgatgattgaattttacgaagccttctccgactacgaacgtatgatgcagatggcggaagacatcatccgcaacgcatcgcgcacagtaaacggtacggcaaacatcacttacaatggcaaagaagtcgatttggaaagcccgttcgagcgtctgaccatcctcgaagccatcaaaaaatacaatccgcactacaccgacgagcagttgaacgatgcggaatggctgaaaaaagaaatcgtcaaacacggtgaaagcctgccgccgtccccgggcatcggcagcctgcaactcgcgctgtttgaaggttgcgccgagggcaagctgtggaacccgactttcatcatcgattacccggtcgaagtttccccgttggcgcgcgcttcggataccaaacaaggtctgaccgaacgtttcgaattgttcgttgtcggccgcgaactggcaaacggctattccgagttgaacgaccccgaagaccaagccgaacgcttcaaagcgcaagtggcgcaaaaagacgcgggcgacgacgaagcgatgcactacgatgccgactacatccgcgcgatggagttcggtctgccgccgactggcggttgcggtatcggcatcgaccgcttggtaatgttgctgaccgattcgcaaaccatccgtgacgtgattctgttcccgcagatgcgccccgagtaa

SEQ ID NO: 44860 - DNA, 1053 bp, Neisseria meningitidis
atgtggaaagaaattttactgaattacggtattttcctgctcgaactgcttaccgtgttcggcgcaattgcgctgattgtgttggctatcgtacagagtaagaaacagtcggaaagcggcagtgtcgtactgacggatttttcggaaaattataaaaaacagcggcaatcgtttgaagcattctttttaagcggggaagaggcaaaacatcaggaaaaagaggaaaagaaaaaggaaaaggcggaagccaaagcagagaaaaagcgtttgaaggagggtggggagaaatcttccgaaacgcaaaaatcccgcctttttgtgttggattttgacggcgatttgtatgcacacgccgtagaatccttgcgtcatgagattacggcggtgcttttgattgccaagcctgaagatgaggttctgcttagattggaaagtccgggcggcgtggttcacggttacggtttggcggcttcgcagcttaggcgtttgcgcgaacgcaatattccgctgaccgtcgccgtcgataaggtggcggcgagcggtggttatatgatggcgtgtgtggcggataaaattgtttccgctccgtttgcgattgtcggttcggtgggtgttgtagcggaagtaccgaatatccaccgcctgttgaaaaaacatgatattgatgtggatgtgatgacggcgggcgaatttaagcgcacggttacttttatgggtgaaaatacggaaaagggcaaacagaaattccgacaggaactggaggaaacgcatcagttgttcaagcagtttgtcagcgagaaccgccctcaattggatattgaggaagtggcaacgggcgagcattggttcggtcggcaggcgttggcgttgaacttgattgacgagatttcgaccagtgatgatttgttgttgaaagcgtttgaaaacaaacaggttatcgaagtgaaatatcaggagaagcaaagcctgatccagcgcattggtttgcaggcggaagcttctgttgaaaagttgtttgccaaacttgtcaaccggcgggcggatgtgatgtag

SEQ ID NO: 44861 - DNA, 408 bp, Neisseria meningitidis; identical to SEQ ID NO: 38369

SEQ ID NO: 44862 - DNA, 2214 bp, Neisseria meningitidis
atgaccgccatcagcccgattcaagacacgcaaagcgcgactctgcaagaattgcgcgaatggttcgacagctactgcgccgcgctgccggacaacgataaaaaacttgtcttagccgcccgttcgctggcggaagcacattaccccgccgatgccgtcacgccgtatggcgagccgttgtccgaccacttcctcggcgcggcacaaatggtcgacgaactcgacctgctgcccgatgccgtcgccgccaccctgcttgccgacatcggacgctacgtccccgattggaatctattggtttccgaacgctgcaacagcaccgtcgccgagctggtcaaaggtgtggacgaagtgcagaaactcacccacttcgcccgggtggacagcctcgccacgccagaagaacgcgcccagcaggcagaaactatgcggaaaatgctgctggcgatggttaccgacatccgcgtcgtgttaatcaaactggcgatgcgtacgcgcaccctgcaattcttaagcaacgttcccgacaatcctgaaaagcgcgccgttgctaaagaaaccctcgacatttttgccccactcgccaaccgcttgggcgtgtggcaactcaaatggcagctcgaagatttgggcttccgtcatcaagagccggaaaaataccgcgaaatcgccctgcttttggacgaaaaacgcaccgagcgcctcgaatacatcgaaaacttcctcaatatcctgcgtacggaactcaaaaaatacaatatccactttgaagtcgccggccgcccgaaacacatctactccatttacaaaaaaatggtgaagaaaaaactcagcttcgacggcctctttgacatccgcgccgtgcggattctggttgataccgtccccgagtgttacaccacgctgggcattgtccacagcctttggcagcctatccccggcgagttcgacgactacatcgccaacccgaaaggcaacggctataaaagtttgcacaccgtcatcgtcggtcccgaagacaaaggtgtggaagtgcaaatccgcaccttcgatatgcaccaattcaacgaattcggtgtcgccgcccactggcgttacaaagaaggcggcaaaggcgattccgcctacgagcaaaaaatcgcctggttgcgccaacttttggactggcgcgaaaatatggcggaaagcggcaaggaagacctcgccgccgccttcaaaaccgagcttttcaacgacacgatttatgtcctgaccccgcacggcaaagtcctctccctgcccacgggcgcgacccccatcgacttcgcctacgccctgcacagcagcatcggcgaccgttgccgcggtgcgaaagtcgaagggcagattgtgccgctgtccaccccgctcgaaaacggacagcgcgtcgaaatcattaccgccaaagaagggcatccttccgtcaactggctttacgaaggctgggtcaaatccaacaaggcaatcggcaaaatccgcgcctacatccgccagcaaaacgccgacaccgtgcgcgaagaaggccgcgtccaactcgacaaacagcttgccaaactcacgcccaaacccaacctgcaagagcttgccgaaaatctcggctacaaaaagccagaagacctctacaccgccgtcggacaaggcgaaatttccaaccgcgccatccaaaaagcctgcggcacgctgaacgaaccgccgcccgtacccgtcagcgaaaccaccatcgtcaaacagtccaaaatcaaaaaaggcggcaaaaacggcgtgctcatcgacggcgaagacggtctgatgaccacgcttgccaaatgctgcaaacccgcgccgcccgacgacattgtcggcttcgttacccgcgatcgcggcatttcggtacaccgcaaaacctgcccctctttccgacacctcgccgaacacgcgcccgaaaaagtactggacgcaagttgggcggcgttgcaggaaggacaagtgttcgccgtcgatatcgaaatccgcgcccaagaccgctccgggcttttgcgcgacgtatccgacgcgctcgcccgccacaaactcaacgttaccgccgtgcaaacccagtcccgcgacttggaagccagtatgcggttcacgctcgaagtcaaacaggtcaacgacctcccgcgcgtcctcgccagcctcggcgacgtcaaaggcgtattgagcgttacccggctttaa

SEQ ID NO: 44863 - DNA, 807 bp, Neisseria meningitidis
atgtggcattgggacattatcttaatcctgcttgccgtaggcagtgcggcaggttttattgccggtctgttcggcgtaggcggcggcacgctgattgtccctgtcgttttatgggtgcttgatttgcagggtttggcacaacatccttacgcgcaacacctcgccgtcggcacatccttcgccgtcatggtcttcaccgccttttccagtatgttggggcagcacaaaaaacgggcggtcgactggaaaaccgtatttgcgatgatgccgggtatgatattcggcgtattcacgggcgcactctccgcaaaatatatccccgcgttcgggcttcaaattttctttatcctgtttttaaccgccgtcgcattcaaaacactgcataccggtcgtcagacggcatcccgcccgctgcccaagctgcccggactgactgcggtttccacactgttcggcacaatgtcgagctgggtcggcataggcggcggttcactttccgtccccttcttaatccactgcggcttccccgcccataaagccatcggcacatcatccggccttgcctggccgattgcactctccggcgcaatatcgtatctgctcaacggcctgaatattgcaggattgcccgaagggtcactgggcttcctttacctgcccgccgtcgccgtcctcagcgcggcaaccattgcctttgccccgctcggtgtcaaaaccgcccacaaactttcttctgccaaactcaaaaaatccttcggcattatgctgcttttgattgccggaaaaatgctgtacaacctgctttaa

SEQ ID NO: 44864 - DNA, 399 bp, Neisseria meningitidis
atgtccgattgctgcaaccgtatccaaccggttttgctttctgttttgcgtatcgtaaccgcttacctgtttttgttgcacggtacgtcgaaaatcttcgccttccccattgaaatgggcagcggttcgcccggcgggctgttgctgcttgccggtattttagaaattgtcggcggcattttgctggtgttgggcctgtttgcgcgccctgccgcgtttgttttgtccggccagatggcggttgcctattttatggcgcacgcttccggaaatgctttgttcccgattgccaacggcggcgagtccgcagtgctgttctgcttcgtattcctctatatcgcggcggcgggcggcggagcatggtcgctggacaggctgtttttcaagcgtaaagcctga

SEQ ID NO: 44865 - DNA, 342 bp, Neisseria meningitidis; identical to SEQ ID NO: 39758

SEQ ID NO: 44866 - DNA, 786 bp, Neisseria meningitidis
atgggctttctgcaaggcaaaaaaattctgattaccggcatgatttccgagcgttccatcgcttacggcatcgccaaagcctgccgcgaacaaggcgcggatttggcgtttacctacgttgtagacaaactggaagagcgcgtccgcaaaatggcggcggaattggattccgaactcgtattccgctgcgatgtcgccagcgacgacgaaatcaaccaagtgttcgccgatttgggcaaacattgggacggcttggacggtttggtgcattccatcggttttgcgccgaaagaagccttgagcggcgacttcctcgatagcatcagccgcgaagcgttcaacaccgcacacgaaatttccgcatacagcctgcccgcgctggcaaaagccgcccgtccgatgatgcgcggcagaaactccgccatcgtcgccctgagctacttgggcgcggtacgcgcgattccgaactacaacgtgatgggtatggcaaaagccagccttgaggcaggcatccgctttaccgccgcctgcttgggcaaagaaggcatccgctgcaacggcatttccgccggcccgatcaaaacgcttgccgcctccggcatcgccgatttcggcaaactcttgggacacgtcgccgcccacaatccgctgcgccgcaacgttaccatcgaagaagtcggcaataccgccgccttcctgctgtccgacctgtcgtccggcattaccggcgaaatcacttacgttgacggcggttacagcatcaatgccttgagcaccgagggataa

SEQ ID NO: 44867 - DNA, 1701 bp, Neisseria meningitidis
atgtcagtcaaaatccaaacccgatccatcaataccgacgtttttaatcatttgctcaccgccggtgccgatcctttaatcgcccggctttgtgcttcgcgcggtgtgcaaagtcctgccgaattggacgacaagcttgctgcgcttttgccgtatcaaacgctgacaaactgcgaagccgccgccggacgtttggcggatgcggttgggcgcaaggaaaaaatcctgattgtcgccgactacgatgccgacggcgcgacggcgtgtgccgtcggtttggacggtttggcggcgatgggggcaaaagtggatttccttgtgcccaaccgctttgaacacggctacggcttaacgcccgaacttgccgaaatcgctgccgcgcagggcgtggatttgctgattacggtggataacggtatcgccagcatcgcaggcgtggcgagggcgcaggctctgggtttggatgtgattgtaaccgaccaccatctgcctgccgataccgtgcccgactgcatcatcgtcaatccgaaccaaaaaggctgcggtttccaaagcaaaagcttggcgggcgtgggcgtgattttttatgtgttgacggcgttgcgtgccgaactgcgccgccgcaattatttttcagacggcctgaaagagccgaatctgggcgatcttttggatttggtcgcactcggcacggttgccgatgtcgtccctctcgaccacaacaaccgcatcctcgtgtcgcaaggtttgaaacggatgcgttcgggcaaaatgcgccccggcatccgcgccttgtttgaagtggcgcggcgcgactggcgcaaggcgcagccgtttgatatgggttttgcgttgggcccgcgcatcaatgccgccggacggctggacgatatgtcggtcggcatcgcctgcctgttggcgcgagatgattccgaagctcaggaactggcggctcagttaaacaacctcaatatcgagcgtcgcgaaatcgagcagtctatgctgcaagacgcgctgaacgcctttcctgaaaccctgccttcaggtcagacgactttggtggcgtatcgcgacgacttccatcaaggcgtggtcggtatcgtcgccagccgcctcaaagaccgtttttatcgtccgaccatcgtgtttgcgcctgccgacaacggcgaagtgcgcggttcggggcgttccattcccaacctgcacctgcgcgatgctttggacttggtgtccaaacgccatcccgatttgattttaaaattcggcggacacgcgatggcggcgggtttgagcatacttgaacacaacattcccgcgtttcagacgacctttgaagaagccgtgcgcgaaatggtgtgcgaagacgatttgtcgcaaaccttcatcaccgacggcagcctgcccgcctgcgacatcacgttggaacaggcgcaaaaccttgcccgtcacgtttgggggcagggcttcgcgccgccgagctttaccgacgagttccacgtcgtccgccagcaacctttgggcgcggagggcaaacacaaaaaagtctggctgcaaaaagacgactgcgaatttgaagcgatgttttggcgttgcagcgaagacatccccgaatacatccgcacggtttaccgccccgttgccaacgaatggcgcaacaatctcgaattgcagctgtatatcgattactgggaagcggtgtag

SEQ ID NO: 44868 - DNA, 780 bp, Neisseria meningitidis
atgaaactggtaaggcctcagaaaatcagcgatcaggtattgtcggtattggaaggccgcatcgtggaaggggtttacgcggaagggggcaagattccgcccgaacgcgttttggcggaagagttcggcgtgtcccgcccgtcggtcaggtcggcattgaatgttttggtcgcccgtcaggttttggaagcgaggcagggagacggttattatgtttcggtcaagccgcagcaggattttttgcaaagttggcaggagcttttgggcaagcattccaattgggaacaggatgtttttgatttcagctgccacatcgagggctgtatggcggcattggcggcagaacgccggacggatgccgatttgaagcggattgggttttggcttgaaaagtttgaggaggcgtgcgaaagcggcaatctggaacatcagagcgaagccgatgtcagcttccatcagacgattgcggatgcggcgcacaatttgttgttcagccatttgtcgggcggtttgttgaaaatgctgtaccggcagacgcgcagcagccttatttatctgaatcaggaagaagatccgcgtccgaaactgatggcgcagcaccgcgtgctgtatgaggcgatatcgaaccgtcggccgggcgaggcttcggaggcggcaaaggcacatttgaattatgtggcaagcagcatcatgaaagacagggaatatcagagccgtaaccgccacgcggatactttggcgcaaaacgatttgaagcgcgtgcaggattgggaggtatga

SEQ ID NO: 44869 - DNA, 231 bp, Neisseria meningitidis; identical to SEQ ID NO: 38834

SEQ ID NO: 44870 - DNA, 735 bp, Neisseria meningitidis; identical to SEQ ID NO: 40755

SEQ ID NO: 44871 - DNA, 723 bp, Neisseria meningitidis
atgaccaaacagctgaaattaagcgcattattcgttgcattgctcgcttccggcactgctgttgcgggcgaggcgtccgttcagggttacaccgtaagcggccagtcgaacgaaatcgtacgcaacaactatggcgaatgctggaaaaacgcctactttgataaagcaagccaaggtcgcgtagaatgcggcgatgcggttgctgcccccgaacccgagccagaacccgaacccgctcctgtcgtcgttgtggagcaggctccgcaatatgttgatgaaaccatttccctgtctgccaaaaccctgttcggtttcgataaggattcattgcgcgccgaagctcaagacaacctgaaagtattggcgcaacgcctgggtcaaaccaatatccaatctgtccgcgtcgaaggccataccgactttatgggttctgacaaatacaatcaggccctgtccgaacgccgcgcatacgtagtggcaaacaacctggtcagcaacggcgtacctgtttctagaatttctgctgtcggcttgggcgaatctcaagcgcaaatgactcaagtttgtgaagccgaagttgccaaactgggtgcgaaagtctctaaagccaaaaaacgtgaggctctgattgcatgtatcgaacctgaccgccgtgtggatgtgaaaatccgcagcatcgtaacccgtcaggttgtgccggcacacaatcatcaccaacactaa

SEQ ID NO: 44872 - DNA, 864 bp, Neisseria meningitidis
atgaaaaccttcttcaaaaccctttccgccgccgcactcgcgctcatcctcgccgcctgcggcggtcaaaaagacagcgcgcccgccgcatccgcttctgccgccgccgacaacggcgcggagaaaaaagaaatcgtcttcggcacgaccgtcggcgacttcggcgatatggtcaaagaacaaatccaacccgagctggagaaaaaaggctacaccgtcaaactggtcgagtttaccgactatgtgcgcccgaatctggcattggctgagggcgagttggacatcaacgtcttccaacacaaaccctatcttgacgacttcaaaaaagaacacaatctggacatcaccgaagtcttccaagtgccgaccgcgcctttgggactgtacccgggcaagctgaaatcgctggaagaagtcaaagacggcagcaccgtatccgcgcccaacgacccgtccaacttcgcacgcgccttagtgatgctcgacgaactgggttggatcaaactcaaagacggcatcaatccgctgaccgcatccaaagcggacattgccgaaaacctgaaaaacatcaaaatcgtcgagcttgaagccgcgcaactgccgcgcagccgtgccgacgtggattttgccgtcgtcaacggcaactacgccataagcagcggcatgaagctgaccgaagccctgttccaagaaccgagctttgcctatgtcaactggtctgccgtcaaaaccgccgacaaagacagccaatggcttaaagacgtaaccgaggcctataactccgacgcgttcaaagcctacgcgcacaaacgcttcgagggctacaaatcccctgccgcatggaatgaaggcgcagccaaataa

SEQ ID NO: 44873 - DNA, 1032 bp, Neisseria meningitidis; identical to SEQ ID NO: 42568

SEQ ID NO: 44874 - DNA, 1131 bp, Neisseria meningitidis
ttggatataagcatacggcaggaaagaaaaaaaactttgattttttcttttttctctggtgcgggctttttggatttgggcttcgagttgtcaggatttgatattgccttcgttaatgaagtccatcccccatttttggaagcatataaatactctcgaagcagaatggatatcccgaagcctaaatacggatattttaagggtagtattgacgaatgtctttatgctgagaaagcaaaagatttggctggctgggttaaaaaggaaaaacaaaatggcattattgtcggatttattggaggtcccccatgtccggatttttctattgcagggaaaaataaaggtaaggatggggagaatggtaagttatcacaaagttatgtggatttaatttgtaaaaaccagcctgatttttttgtatttgagaatgtgaaaggactatataggactgccaagcatagggagtttttcaatgcgttgaaacggcaactttctgattttggatatgtatgcactgaaaaactcatcaatgccatcgaatacggcgtaccgcaagacagggaaaggattatcctagtgggttttttgagtcagcatgttgatgctttgcagaagtttgattgggatgctcatatttcattccctgatgccttggaaaaagattggcctacgacagaagaagtaggaagagtggtcagtcagcctgcaaacatataccctgagttgaccgttcagtattggttcaatcgcaatggggtggatacacacccgaatgcgagcaaacacttccaaccaagagcgggtttagaaaaatttcaaaccataagcgaaggggatgataaaaagaagtcctataaacgcctacaccgctggcgttattctccgactgctgcatacggaaacaacgaagtccacattcatccctatctgccaagaaggatttccgctgcggaggcattggcaatacagtctttgccgaaggagtttgagctgcctgataacatgacattgagcaatatgttcaaaactataggcaacggtgtaccgtttttggcagcaaaagggatagcgatgacattaaaatcttatttggagaatcactatgagcggacaaaaactgacggctgctaa

SEQ ID NO: 44875 - DNA, 780 bp, Neisseria meningitidis; identical to SEQ ID NO: 39113

SEQ ID NO: 44876 - DNA, 1152 bp, Neisseria meningitidis; identical to SEQ ID NO: 39535

SEQ ID NO: 44877 - DNA, 198 bp, Neisseria meningitidis; identical to SEQ ID NO: 39472

SEQ ID NO: 44878 - DNA, 1374 bp, Neisseria meningitidis; identical to SEQ ID NO: 38214

SEQ ID NO: 44879 - DNA, 141 bp, Neisseria meningitidis
atgaaaattttttacggacaatatggaaaagatttttatgattatcatgagtttatgaaagataaaggcatagaagaaataaatatgtgggaaggagagctttttgatcacccatattatgaggatgaaaaatttaaataa

SEQ ID NO: 44880 - DNA, 2760 bp, Neisseria meningitidis
atgaaaagaatgttattcaacgcaacgcaggccgaagagctgcgcgttgccatcgtcgatggccaaaaccttttggacttggacatcgaaacgctgggcaaagaacagcgtaaaggcaatatctacaaaggtatcattacccgcatcgagccgtcgctggaagcatgtttcgtcgattacggaaccgaccgccacggctttttgccgtttaaggaagtatcgcgttcatatttccgcgactacgaaggcggcagggcgcgtattcaggacgtgctcaaagagggcatggaagtcattgtccaagtcgaaaaagacgaacgcggcaacaaaggcgcggcgctgaccactttcatcagcctggccggccgctatttggtattgatgccgaacaacccgcgcggcggcggcgtatcccgccgtatcgaaggcgaagagcgtcaagagttgaaagccgccatggccgaactcgacattccaaacggcatgagcatcattgcccgtactgccggcatcggccgcagtgcggaagagttggaatgggacttgaactacctcaaacaactctggcaagccattgaagaagcaggcaaagcacaccatgacccttacctgctctttatggaaagctcactgctgatccgtgcgattcgagactatttccgtcccgatatcggtgagattttggtggacaatcaagaagttcacgaccaagttgccgagttcatgagctacgtcatgccgggcaatgtaggccgtctgaaactctatcaagaccacacgccgctgttctcccgtttccaaatcgaacaccaaattgaaagcgcgttctcacgcagcgtcagtctgccttccggcggcgcgattgtgatcgaccacaccgaagccctggtttccatcgacgtcaactctgcccgcgccacacgcggctctgacattgaagacaccgcgttcaaaaccaatatggaagccgccgaagaggttgcccgtcaaatgcgcctgcgcgacttgggtggtttggtcgtcatcgacttcatcgacatggaaaatccgaaacatcagcgcgatgttgaaaacgtcctgcgcgatgcgctcaaaaaagaccgcgcccgcgtgcaaatgggcaaactttcgcgtttcggccttttggaattgagccgccaacgtctgaaaccggctttgggcgaaagcagccacgtcgcctgtccgcgctgcgccggcacaggcgtcatccgcggcatcgaatccaccgccctgcacgttttgcgtatggttcaggaagaagcgatgaaggacaacaccggcgaagtgcatgcacaagtgcccgtcgatgtcgccaccttcctgctgaacgaaaaacgcgccgagctgtttgcgatggaagagcgtttggatgtcaacgtcgtcctgattccaaacatccacttggaaaatccgcactacgaaatcaaccgcatccgcattgatgacgtagaagaagacggcgaaccgagctacaaacgcgttgccgagccggaagaagacgaatccgccaaacctttcggcagcgaaaaagccaaagcttcccgtcctgagccagctgtcaaaggcgtacgccatacccagcctgcaccgactgtcgcccctgagaaaaaagcctcttggtgggacagcttcaaagcttggttgaaacgcattttcggcggcagcgaaacccaagccgcgcccgctgccgaaacctccgaaaaacgcagcacggcaaaccgcagcggcagccgcgccaacaaccgccgccaaaacccgcgccgcagcaaacgcgaaggcagcaaagtagaagtccgcgaagtggcaggcaaaactgccggacaggaagcgcgcgccgacaaagccgaaacgcgcaacaacggcaaccgccgccgcaacgaacgcggcgaccgtgccgccggacgcgccgacgaagcggaaatccaagaccgcaacatacagcctgccgcaaccgttgcagatgccgcaccgtccgaaaccgaagtgcaaaccggaaaacgccgccgcaacggcagccgcagcgaacgcggccaaaccgcgccggaaaccgccaccgttgccgaaacaaccgttcagacagcggaaaacacgccgtccgaaccgcataccgcagaagacaaaggcagcaagcccaaatccgaacgcaaccgccgcgaacgcgacagccgagatgccaaagaacgccgcgagcgcaacaatcagcgcgaccgccgtcaaaacggcaaaaaacgcaatattccgtctgccgccaaaatcgagcagtacctgaatattcacgacaccgccgacaaagtccgttccgccgccgcgcacgttttcggcgaaaccgacgcaaacgcgccgattaccgtcagcattgccgatccggttgcagaaagggatcttccgacagcatctcccgccgtttcaaacggcgacgcaccggtttatgatgcggcggaaaaaatccgccgtgccaccgccgccatcctgcccgaaggcgcgacaccgaaagccgaagcacaggaaatgccgtctgaaaccgcaacctttacggctgcggcggaacaggcacgggaaaccgcacaaaccggcggactcgtcctgatcgaaaccgaccctgccgcattgaaggcatgggcggcacaacccgaagtccaagccggacgcggtttgcgccgttccgaacagcccaagccgtctgaagtcgcaaccgtccctgccgaagaaatgatccaagtcgaaacccggcaaggctga

SEQ ID NO: 44881 - DNA, 579 bp, Neisseria meningitidis; identical to SEQ ID NO: 36924

SEQ ID NO: 44882 - DNA, 462 bp, Neisseria meningitidis
atgaaaccgcaaaaatccctacgcgcccgcgcgatggacatcctctcgcgccaagaagtcagccgcatcggtctgaaacgcaaacttgcaccgcacgccgaaagcgaagaagagttggaaaacgtgttaaacgaatttgccgaacgcaactggcagtcggatttgcgctatgccgaagcctatatccgcagcaaaagccgcaaacacggttcattgaggctgaaacaggctttggcgcaacagggcatagatgaagaaaccagccgcaacctgcttcccgaccgctcaagcgaaaaacaggccgccatagacgtgttgcgtaaaaaattcaaacaccccgccgccgaccttaaagaaaaacaaaaacaggcgcgtttcctcgcctatcgcggattcgatgccgataccgttcagacggcattgaaacacgcttgggacgaaaattgggaagacggctgctga

SEQ ID NO: 44883 - DNA, 927 bp, Neisseria meningitidis; identical to SEQ ID NO: 38159

SEQ ID NO: 44884 - DNA, 867 bp, Neisseria meningitidis
atgatgaaaaccttactgccctttttcggcgtggtgcgcgtcagcggcgaagaccgccaaaccttcctgcacggacagctttccaacgacatcaataatcttcagaccgggcaggcgtgttatgcgacttacaacacgcccaaaggccgcgtcatcgccaatatgattgtcgtcaaccgtggagacgatttgctgctgattatggcgcaagacttgcttgaagcaacggtcaaacgtttgcggatgtttgtgttgcgtgccaaagccgtttttgaaatccttgaagattacgccgtcggcgcggaattggcagcatccgccgaaccgcttgccgcgcaagaaccctgccttgcctttaccgccgaatgcggttcagacggcatctgttccgtcgtcctgccccatcggggcattttgcacatcgcccccgaaaccgccctgccgccttatgatgccgccgccgaaaacgcgtggcggctgcacgaaatcctcagcggttatccgtggatatgcgcggctaccaaagaaactgccgttgcccaaatgctcaaccagcacatcatcggcggtgttcacttcaaaaaaggctgctacccgggacaggaaatcattgcccgtgcccagtatcgggggcaggtcaaacgcggcttggcggtattgtcgggaaattcggccgtcgaagcaggaaccctgctgacggcagacggcgaagagaccggcatcgtgctcgacagcgttaaagattcggaaagctttaccgcccttgccgtgattaaattctccgccgcacaaaaagaactgaccgtcccaaacggcggtatcttcaaagcggttcatcccttctttaaaaccgaaaatgcagaataa

SEQ ID NO: 44885 - DNA, 510 bp, Neisseria meningitidis; identical to SEQ ID NO: 36896

SEQ ID NO: 44886 - DNA, 450 bp, Neisseria meningitidis
atgagccttatcggcgaaattttgcctttgtcccatattgttttggatatggaggtgggcagtaaaaaaaggctgtttgaggaagcgggcctgcttttggaacgcgaatcctcattgtcccatgctgatgttttcgaatgtctttttgcccgtgaaaaactcggttcgaccggtttggggcagggcgttgccatcccgcacggccgtcatgccggcgtgaagcaggcgacgggcgcgttcatccgcacgcgcgaacccgtcggatttgacgcaccggacggcaaaccggtttccctggtttttatcttgctggttccggaaaatgcgacgggtgagcatttggaggtattgtccaaactggccggcaagttttcccaaaaaagcatccgcgaatcgctgatgacggtttcttctgcggaagaagcccgcgccatcctgaccgaagaataa

SEQ ID NO: 44887 - DNA, 1065 bp, Neisseria meningitidis
atgaaagcagcacgtttttacgataaaggcgacatccgcatcgaagacatccccgaaccgaccgtcgcccccggcactgtcggcatcaatgtcgcctggtgcggcatctgcggtactgacctgcacgaattcatggaaggcccgattttcattccgccttgcggtcatccgcacccgatttccggcgagtccgcacccgtcacgatgggacacgagttctccggcgtggtctatgccgtcggcgaaggcgtggacgacatcaaagtcggccaacacgtcgtggtcgaaccctacatcatccgcgatgacgtaccgaccggagaaggcagcaactaccacctctccaaagatatgaactttatcggcttgggcggctgcggcggcggtctgtccgaaaaaatcgccgtcaaacgtcgttgggtgcatccgatttccgacaaaatcccgttggatcaagccgctttgatcgaaccgctgtctgtcggacaccacgcctatgtacgcagcggcgcgaaagcaggcgacgtcgcattggtcggcggcgcaggtccgatcggtttgctgttggctgccgtgttgaaagccaaaggcatcaaagtcatcatcaccgagttgagtaaagcacgcaaagacaaagcgcgcgaatccggcgttgccgactacatcctcgacccgtccgaagtcgatgttgtcgaagaggtgaaaaaactgaccaacggcgaaggcgtggacgtggcattcgaatgtaccagcgtgaacaaagtgttggatactttggtcgaagcctgcaaacctgccgccaatttggttatcgtatccatctggagccaccctgcaaccgtcaacgtccacagcgtcgtgatgaaagagctggatgtgcgcggcacgattgcctactgtaacgaccacgccgaaaccatcaaactggtcgaagaaggcaaaatcaacctcgaacccttcatcacccagcgcatcaagctggacgaactggtttccgaaggcttcgagcgtctgatccacaacaacgaatccgccgttaaaattattgtgagtccaaacctgtaa

SEQ ID NO: 44888 - DNA, 1239 bp, Neisseria meningitidis
atggctttttatgcttttaaggcgatgcgtgcggccgcgttggctgccgccgttgcattggtactgtcgtcttgcggtaaaggcggagacgcggcgcagggcgggcagcctgcgggtcgggaagcaccggctcccgtcgtcggtgtcgtaaccgtccatccgcaaaccgttgcgttgaccgtcgagttgccgggacgtttggaatcgctgcgtaccgccgatgtccgtgcgcaagttggcggcattatccaaaaacgcctgttccaagaaggcagttatgtccgtgccggacagccgctgtatcagatcgacagttccacttatgaagcaaatctggaaagcgcgcgcgcgcaactggcaacggctcaggcaacgcttgccaaagcggatgcggatttggcgcgatacaagcctttggttgccgccgaagccgtcagccggcaggaatacgatgctgcggtaacggcgaaacgttctgccgaggcaggtgtcaaagcagcacaggcggcaatcaaatctgccggcattaatctgaaccgttcgcgcattaccgcgccgatttccggctttatcggtcagtccaaagtttccgaaggtacgctgttgaatgcgggcgatacgaccgtgctggcaaccatccgccaaaccaatccgatgtatgtgaacgttacccagtctgcatccgaagtgatgaaactgcgccgtcagatagccgaaggcaaactgctggcggcggatggtgtgattgcggtcggcatcaaatttgacgacggcacagtttaccctgaaaaaggccgcctgctgtttgccgatccggccgtcaacgaatcgaccggtcagattaccctgcgcgccgccgtaccgaacgatcagaatatcctgatgcccggcctgtatgtgcgcgtgctgatggaccaagtggcggtggataatgcattcatcgttccacagcaggcagtaacgcgcggtgcgaaagataccgtgatgattgtgaatgcccaaggcggtatggaaccccgcgaggtaacggtcgcgcaacagcagggtacgaattggattgttacgtcgggtctgaaggacggggacaaggtggttgtggaaggcatcagtatcgccggtataacgggtgcgaaaaaggtaacgcccaaagaatgggcgccgtctgaaaaccaagccgccgcgcctcaatccggcgttcagacggcatctgaagccaaaactgcttctgaagcggaataa

SEQ ID NO: 44889 - DNA, 924 bp, Neisseria meningitidis; identical to SEQ ID NO: 39069

SEQ ID NO: 44890 - DNA, 1254 bp, Neisseria meningitidis; identical to SEQ ID NO: 38589

SEQ ID NO: 44891 - DNA, 363 bp, Neisseria meningitidis; identical to SEQ ID NO: 39007

SEQ ID NO: 44892 - DNA, 387 bp, Neisseria meningitidis
gtgagaaagattctgcttgatacccatgctttgctgtggtggttgttggatgacaagaaactggggacatctgcacgcaaactgatagaaaatccgagaaatgcgatctttgtcagtgcagcaagtatttgggaaatttccatcaagcagaacaaggggttgttgaaattaccggaagagttttttgatgtgcttcaagaagaggattttgaaatgctgcctataggtctgtttcatgcaaaacaggctggaagccttccggaaatacacaaagaccctttcgataggatgttgattgcacaaacccaagcggaaggctttgaactgatgactgtcgatgaatatattccgcaatatggaattagagttgtcaatgcatcaagctga

SEQ ID NO: 44893 - DNA, 375 bp, Neisseria meningitidis; identical to SEQ ID NO: 38891

SEQ ID NO: 44894 - DNA, 303 bp, Neisseria meningitidis; identical to SEQ ID NO: 43286

SEQ ID NO: 44895 - DNA, 345 bp, Neisseria meningitidis
ttgattggcagccgatcgagcaaaggtacgaccatctatgccgataaaggctatgacagtgcggaaaaccggcaacatctgaaagaacatcagttgctggacggcattatgcgcaaagcctgccgcaaccgtccgctgtcggaagcgcaaaccaaacgcaaccgatatttgtcgaagccccgttatgtggtcgaacaaagcttcggtacgctgcaccgtaaattccgctatgcgcgggcagcctatttcgggctgctcaaagtgagtgcgcaaagccacctgaaagcgatgtgtttgaacctgttgaaagcggccaacaggctaagtgcgcccgctgccgcctaa

SEQ ID NO: 44896 - DNA, 492 bp, Neisseria meningitidis
atgaattccctctttgtggacaatactgttttcattacacggctgaaagccgggcatatcggcaggttggttcaggcgttgtttgaggagtggcacggatttgaaccgtggtcttctgtggataagattcatgcctattacggcaggtgtttgaaggatgacgaactgccgctggcatttgcggctgtggatgattccggaatcctgttgggttcggctacggtcaagcggcatgatatggaaagttttccacagtatgaatattggttgggtgatgtctttgttttacctgaatatcgcggaaaaggcattggcaggaggctggtcgcccattgcataggcgcagcgcgttcgctggggataaagttcttgtatctttatacgcctgatgtgcaaatattttatgaatcattcggctgggcggttgtcgggcgacatttccataacggtgaatgggttacggttatgcgtttggatatggataaggtttaa

SEQ ID NO: 44897 - DNA, 516 bp, Neisseria meningitidis; identical to SEQ ID NO: 39413

SEQ ID NO: 44898 - DNA, 420 bp, Neisseria meningitidis
atggcacaattacctctatatcggactgccgaaatcggaaattttactgtcggcacgcctaaagttttagaatcattttccaaacatatcccttatggtgtcgtctttgaagacgacggcgacacgggctacttctatgctgcttcgcaagacgggattttagatgccttgcacatctacaatgtcgaagatgtatccgacaaacatatccccaatcatgtcttgattttatgggatgatgcctgcaccatagccgcattgtgtgtcaacgactacattcatgccgtctatgattttgtcgaacaggcaggatattgccgcaacggcttccctgaagcaggcggcgaatgggtgaaagtcgaaaaccgcgtcttggatgatgaattgctggacaaaatcctatcccgagaacctacataa

SEQ ID NO: 44899 - DNA, 654 bp, Neisseria meningitidis
atgaagataacgcactgcaaattaaagaaaaaagtacagaaagaactgctccatttttttgtactggaagttaccgcccgttctgccgccgatattttgggtatccatcccaattcggcagcactgttttaccgtaaaatccgcacggttatcaaccatcatttggtcttggctgccgatgaggtttttgagggccctgtcgagccggacgaaagcgatttcggcggacggcgtaaaggcagacgtggtcgcggtgcggcaggaaaagtggttgtcttcggcattctgaaacgcaacggacgggtctataccgttgtcgtagataatgccaagtctgaaacgttactccctgtcatcaaaaagaaaatcatgccggacagtattgtttataccgatagtctgagcagctgcgacaagttggacgtgagcggttttatccattaccgcatcaaccattccaaggaatttgcagaccgtcaaaaccacattaacggcattgagaacttttggaatcaggcaaaacgcgtcttgcgaaaatacaacggaatcgatcgtaaatctttcccgctgttcttgaaagaatgcgaatttcgatttaacttcggcacaccgtcccggcagctaaaaatcctacaggattggtgtgggatttag

SEQ ID NO: 44900 - DNA, 1116 bp, Neisseria meningitidis
atgcgcttgtttaaaagcttgaaaaaccctaaaaaaacagatgccaagctccctaaaaaatcttcgggactcaataaccgcgcggcaatcggcatcgatatcgaccagcattccatcaaaatggtccaattgtcaggacgtagtttaaaccaaattcaattggaaaaatacgtcattgccaaattaccaaagaatatcattcaaggcaataaagtccaaaattacgatcaacttgttacatatttgcaacaagcctatgccaaactgggtacgtcgtgcaaaaacatcatcgcgtccgtcccgcaaaatctggcaaccatcgaacaattgacctacacagacaaagatgcagaattagacctgcaggggttcgtggagtcctccatctccgaagtcagctcgatatcgctcgaagaagccaattacgactatcaggtcttgtcccaatcggccgccggcgaagctgtgttggccgtcgcatcgagaaaggatgaaatcgaacccctgattgacgcattcaacgccgccggtatgaaattatccgcgcttgatgtggacattttcggacaatacaacgcctacgcgctatggataaaccatttcgcccccgagcttgcagccgaaaaagtcgccattttcggcgtatatgccgcacagacctacgccttggtcatccaagacggaaaaatcctatacaaacaggaaacctccgtcagcgaagaacagctcaaccaactcatccagcgcacctatcaggtaacagaagaaaaagcggaagaaatcatcaactccccgcaaaaaccttccgattaccaagaaagcgtggcaaactatttcaaccagcagattacccaagaaatacaaagggtcttgcagttttattacaccacgcagaccgcagacgatatgaccgacatcaagcatatcctgctgaccggggaagcggcgcaccaggaaggcatcgcccaaaccgtcgcctcacaaaccaatgcagatgtacaatgcgtccatcccgcgcgttattttgcggacaacctcaaaacagacaaacaacaattcgaacttgatgcgccgacactgaccagggcgttcggtttggcggtacggggattataa

SEQ ID NO: 44901 - DNA, 987 bp, Neisseria meningitidis
atgcaataccgaatcagaagagaaaacgaagcacccgaagcaaaaaatgcgggggaaaccttatgggagcgcgatatgatgcgcgaagtgctgttgtccgcctatcaggacaggcgcagggagcggatgtggaaaaacatctggcgcgccgtcagcaccctgattctggttgccctgattgcaggcattttccaaaaagacgaagccgcattgcagttggcgggcaacacgccgcataccgcagtcgtcaacctgtacggcgaaatcggcaacggtgtagaagaccaggtcaaaaaactcaaagacggtatggaggccgcctacaaaaacccgcaggcaaaagccatcgtcatccgcgccaacagccccggcggttcgcccgtcgtctccaacaccgcttttgaagaaatacgccgtctgaaagcgcaacatcccgacattcccgtttatctcgtggcggaggatatgtgtgcatccggctgctactatattgcggcggcggcagacaaaatttatgcggactcgtccagcatcgtcggcagcatcggcgttatcggcagcagttttgatgctactgaattaatggaaaaaatcggcgtgaaacgcagggttaaaattgcaggcagcaacaaaggcatgggcgatccgttttcgcccgaaacgcccgaacagtcgaaaatctgggaagaaatgctgaccggcatacacggcgagttcatcaaagccgtcaaaaccggacgcggcggccgcctcaaattccgacaatatcccgacgtgttcagcggtcgcgtgtacacaggcgcggatgcgctgaaagtcgggctggtggacggactcggcaatatttacagcgtggcgcgagacgtggtcaaagcccccgatgtggtggattacactccgaaggacgatttcggcagaatcttgggcagacgcttcggcgcagaactcaaagccggcgtgcgcgaagccctgcaggccgtccggtag

SEQ ID NO: 44902 - DNA, 402 bp, Neisseria meningitidis; identical to SEQ ID NO: 38334

SEQ ID NO: 44903 - DNA, 2427 bp, Neisseria meningitidis
atgtcggcacaaaccgatcccggctacttcttcatgcccaaccacattatcctgataggcgcgagcgaacgtccgtacagcctgggcgaacgcgtactcagcaacctgctgagtacgccctttcaaggaaaaatcacccccgtaaacccgcgccaccacaccatagccgggcttcccgcctacaccagcctcaacaaaatccccggcaatgcagacctgattattgccgttaccctacccgacagttacgacaccctcttcaaaacctgccgcaaaaagcagctccgacacatcatcctcatacaggactgggacagcctgtctgccgcagaactgcacaccgccgaaactgccatccgcaaacaccacggcaacggactcaacatcaccgcctgcaccaccgcaggcatccaactgccctcactcggacttaacatcagtacccaagacggatacgccgcaggccataccgccatactgaccggcaatgccgccgtcagccgccaaatcgacaacatcctgaacaaactccgtcaaggcacatcccgccacatcagcctgcatcccggcatcagccccatcacatccgccgattggctcaaccgcttcggacacagcctgcacaccaaaaccgccgtcctacaccacaaccctgaagagaatcagcgcaaactgttcagcgcaatccgccaatttacccgccatacgccgctgattctccacatcacctgccgcacgacagaaaccgaccgtgccgtactgcactgcctcgcccgacactgcaacttcctcatcagtttcaacgccgacgacctcgaagccgcactgcgcgcccaactgtccgaccttccacccctgtcccgactcgacatcctgtccgacacgcctgccgaatggctgaacgcgcacgcgccaaaaaccctcgccctccactttcccaaccttccccaccacatccgcaacggacacctgaccggcacacccacaccctcaatctgccacgacatcgcctcacgtcagcttgcccgccccgacacccaagccgtcctgaccatcctcagcccctccggacacgaggattacaaaaaaacagcacgcgcccttatccgcctgtccgaacagagcgccaaacccctgctcgtcagcagccccttttcagacggcataacacatttcgacacccccactcaggcaatccgcaccctttcctaccgcaacaccgccgccgccctgaaacaggcacagctcgacattgcaccgccgcagccatgccgtctgaaaacaccgcaaccccaaaacatcaaaaaagccctcgaagccgccgaccccgccctaatcgccgaagccctgcacctccccccctaccggcacaccacccataacgccgtccaattccaattcggcagccactccctctatggcgacatcctgaccgcacgttgcaacggacaaaccactgccgtactcccgccgtttaccacgctcgacagccgccaccttgcccgctttgccgaactcgacggcacacaaaccctcgaccagttcctgcacacactgaccatcattcccgaataccgccaacacattctcggcatcaccctcaacctaaacggcggacaatacagcagcgatttcatcttaaagacacccgaaacacacgacacgcccaaacgcaagaacacaggcaaagccgcccaaaccctcgaacatgccgccgcaaaaatgcagagtgccgccgcatacctgaaacacaaaaacccgacagccgccgaatttctccgccacacaagcgaagccgccgcagaactgctcggcagcaaaaccgaaaccggagcagccgtacccaacgtacttgccccctatcccgcagcataccccaaaacactgtccctaagaaacaacacgaccgttaccattacccccattttgcccgaagacgcagaagccaaacagcagttcgtccgcagcctcggtcccgaagcacggtacacacgcttcatgacccacaccaacgaactgcccgcagccacgttggcacgcctgtgcaaccccgattaccactgtgaagccgcatggacggcaaaggatgccgacagcaacatcgtcgccgtcgtccgccacagccgcctgaaccgcaacgaatgcgaattcggcatcacactggcggaacatatgcgcggcagcggactggcacagaaaatgatggaactcatcatccaaaccgccgcacagcaaggctaccggactatgagtgccgacattctcaaaaccaatacccccatgatcaaacttgctgaaaaatcaggatttaccctcaaggaatcggacaccgaaaaaaacctgtaccgcgcatatctgaaccttgcggcagacaaaacaacagaaaaaacaaataaaaacttgcgcaccgaccacaaaataacctaa

SEQ ID NO: 44904 - DNA, 1410 bp, Neisseria meningitidis
atgaatttccccaaaacagcggcctccctgctgctgcttctcgcctccctcgccgcacacgcgctcgatacaggtcgcattccgcaaaacgaaatcgccgtatatgtccaagagcttgacagcggaaaagtcatcattgaccaccgctcggatgtccccgtcaaccccgcctccacaatgaaactcgttaccgcgtttgccgccttcaaaaccttcggcagcaattaccgctgggcgaccgagtttaaaagcaacggtacggtaaacgacggcacgcttgacggaaacctgtattgggcgggcagcggcgaccccgttttcaatcaggaaaacctgcttgccgtccaacgccagttgcgcgaacaaggcatacgcaatatcacgggacacctgatgctcgaccacagcctgtggggcgaagtcggcagccccgacgatttcgaagccgacagcggttcgccgtttatgacgccccccaatccaactatgctgtctgccggtatggttatggtgcgcgccgaacgcaatgccgccgacagtaccgacatcctcaccgatccgcctttgccgcatattttcgcccaaaacaacttgaaaattaccgcctcccaagctgcctgcccttcgatcaaaaaactgatgcgtgcatctttttcggacaatacgctgaaattgcgcggcaatattcccgagagctgtttgggcaagcctgtcggtgtccggatgttcgcgcttgacgaactgatccggcaaagttttaccaaccactggctgctcggcggcggacggatttcagacggcatcggcatatccgacacgccggaaggcgcgcagacgcttgccgttgcacactcaaagccgatgaaggaaattttgacggacatgaacaagcgttcggacaatctaattgcgcgttccgtcttcctcaaactcggcggcgacggcaaactgcccgccgtttccgaacaggcggcgtctgccgtccggcgcgaacttgccgtgtcgggcatcgatattgcggatttggttttggaaaacggttcaggtctgtccagaaaagaaagggtaacggcgagaatgatggcgcaaatgttggaaacggcttatttcagcccgtttgcacaagatttcatcgacacgctgcccatcgccggcacagacggaactttacgcaaccgcttcaaacaaagcggcgggctgttgcgcttaaaaaccggcacgctcaacaatgtccgcgcccttgcaggttattggctgggcgacaaaccgatggcggtggtcgtcatcatcaacagcggccgcgccgtttccctgctgcccgacttggacaacttcgttgccaaaaacatcatctccggcggcgacggctggctggatgcgaaactgatgtgcaaagaacgccgagcctga

SEQ ID NO: 44905 - DNA, 237 bp, Neisseria meningitidis
ttgccgtactatctgtactgtttgcggcttcgtcgccttgtcctgatttttgttaattcactatatttttgtcatgcggatatttcacgggatgacaaaacgggcgcaaaaaagcccgattggaaaatccgaatcgggcttttttgtgatgttctgttcgatttgcgtactaactgccggccggagcgtccgcgcccggtttggcaggtcggattctcgaatccgacggctatttga

SEQ ID NO: 44906 - DNA, 1032 bp, Neisseria meningitidis; identical to SEQ ID NO: 36792

SEQ ID NO: 44907 - DNA, 570 bp, Neisseria meningitidis
  misc_feature 555, 556, 557, 558, 559: 'n' is a, c, g or t
gtgttacaccgtttgcagaaagtcgtgcgccatatcgcgcaaaccgaaattatgccgcgttttttgaatacgccgtctcaccgcaaggaagacggttcgatgttgagcgaggcggacattgccgcgcagacggcttttgccgccgcgttgccgcttctgatcgattgcccgatgttgggcgaggaaatgtcgcggcaggagcagtcggctttgtgggcggaatattcgggagaaaaggggctgtggattgtcgatccgatagacgggacgaacaattttgtcaacgggctgccgcattttgccgtgtcggtggcgtttgtccgcaacgggcgcgccgaattgggcgtaatctacaacccggtcagcggcgaatgtttttacgccgaacgcgggcagggggcgtttttaaacgggacgcgcctgcccctgcgcctcgtggataaaaaactcaatgaggcaatcgcgggcgtggaaatcaaatatctgcgttcgggcaaactttccagccgcatgagtacgctcgcacctttcggtacggtgcggagtatgggcagnnnnncacacacttaa

SEQ ID NO: 44908 - DNA, 465 bp, Neisseria meningitidis
atgtacaaacatctggttgttgccgttgacggcagtgaaacgtccatcaatgccctgaaacatgccgccgagcttgccggggtcaacggtgcgcgtctgactttggtacacgttgccaatcctgccgaatatatggcgctcgcccccgaatttttgcaacacgaaagctacgaagccgccgccgtcgcgcaaggcaacgaagttttggatgccgccgagcgcaccgcccgggaactgggtgtggaaaataccgtcaaacacctgctggttgccaataagggtgcgcgtgaaatggcgcaggatttggttgattatgccgatgaaaacggtgccgacctgctggtgttgggtacgcacggacgtaccggactgatgcaccttttaatgggcagttttgccgaaacggtaatgcgccaaagccacctgccgcttttgattatccgcagcaaagccgaagaggcgtag

SEQ ID NO: 44909 - DNA, 2082 bp, Neisseria meningitidis
atgatttacggctcaatgccgtctgaaaagctcacaatttttcagacggcatttgttatgcaagtaaatattcagattccctgtatgctgtacagacgcgggagtgttaagccccccttgtttgaagctccgcggctcctgccgagcttcaccgaccccgttgtgcccaagctctctgctcccggcggctacattgtcgacatccccaaaggcaatctgaaaaccgaaatcgaaaagctgtccaaacagcccgaatacgcctacctgaaacagcttcagacggccaagaacgtcgattggaaacaggtgcagctggcctacgacaaatgggactataaacaggaaggcttgaccggagccggtgcagcgattgtggtgattattgtaaccgctctaacttatggatacggagcggctgcagcgggtagcgtaactgccgcaggaagtagtacagccgcagctgcaacaacgacagcggcagcaactaccactgtttctactgcagctgccatgcaaaccgcagctttagcctccttgtatagccaagcagctgtagccatcatcaataataaaggcgatgtaggcaaagcattaaaagatctcggcaccagtgatacggtcaagcagattgttacttccgcactgacggcgggtgcattaaaccagatgggagcagatattgcccaattgaacagcaaggtaagaaccgaactgttcagcagtacgggcaatcaaaccattgccaaccttggaggcagattggccaccaacctcagcaatgcaggtatctcagctggtatcaataccgccgttaacggcggcagcttgaaagacaacttaggcaatgccgcattgggagcattggttaatagcttccaaggggaagccgccagcaaaatcaaaacaaccttcagcgacgattatgttgccaaacagttcgcccacgctttggcgggttgtgttagcggactggtacagggaaaatgtaaagatggggcaattggcgcagcagttggggaaatcgtagctgaatccatacttggcggcagaaaccctgctacactcagcgatgcagaaaagcataaagttatcagttactcgaagattattgcgggcagcgtggcggcactcaacggcggcgatgtgaatactgcggcgaatgcggctgaggtagctgtggtgaataatgctttgaattttgacagcacccctaccaatgcgaaaaagcatcaaccgcagaagcccgacaaaaccgcactggaaaaaatcatccaaagtattatgcctgcacatgcggcaggtgcgatgactaatccgcaggataaggatgctgccatttggataagcaatatccgtaatggcatcacaggcccgattgtgattaccagctatggagtttatgcagcaggttggacagctccgctgatcggtacagctggtaaagcagctatcagcacctgtatggctaatccttctggttgtactgtcatggttacgcaggctgctgaagcgggcgcgggaatcgccacgggtgcggtaacggtaggcaacgcttgggaagctccagtaggagcgttgtcgaaagcgaaggcggctaagcaagctgctcctaaagaaacaataaacaatttggcaaatttagccaaagcagaacagcagattttattccgtattgcccaacgcgatacgcaactggatgcatggaagacgggatttaacaatagagtaaggaaaggagcaggcttgcttgatgcaagtaatattccgataaccattaacggaaaaaccatcaaacctgtacaagccataagcttaaagggagcacccgtttacagcggcgtaagcgaacaggagatttttgcgctttatcggcagatgactggccagaatccgaattttagagttttgcctgacggaagattagcaaatggcattatcagtactggagaatgggcaggaacaaaaattgcattaagaaatttttcaaaaacagagaattcaactcaagcacgatggacattagatttgcagaatcctccatcatttattaaaggtactaaattggagcttaaattccaataa

SEQ ID NO: 44910 - DNA, 1008 bp, Neisseria meningitidis
atgagcaccttcttccagcaaaccgcccaagccatgattgccaaacacatcgaccgtttcccgctattgaagttggaccaggtgattgattggcagccgatcgaacagtacctgaatcgtcaaaaaacccgttaccttagagaccaccgcggtcgtcccgcctgtcccctgttgtccatgttcaaagccgtcctgctcggacaatggcacagcctctccgatcccgaactcgaacacagcctcatcacccgcatcgatttcaacctgttttgccgtttcgacgaactgatcatccccgattacagtaccttatgccgctaccgcaactggctggcgcaagacgacaccctgtccgaattactcaaactgattaactgccaactgaccgaaaaaggcctaaaaatagagaaagcatccgccgccgtcgttgatgccaccattatccagaccgccggcagcaaacagcgtcaggccatagaagtcgatgaagaaggacaagtcagcggccaaaccacaccgagtaaggacagcgatgcccgttggataaagaaaaacggcctctacaaactcggttacaaacaacatacccgcaccgatgcggaaggctatatcgagaaactgcacattactcccgccaatgcccatgagtgcaaacacctgtcgccgttgttggaaggactgcccaaaggtacgaccgtctatgccgacaaaggctatgacagtgcggaaaaccggcaacatctggaagaacatcagttgcaggacggcattatgcgcaaagcctgccgcaaccgtccgctgacggaaacgcaaaccaaacgcaaccggtatttgtcgaagacccgttatgtggtcgaacagagcttcggtacgctgcaccgtaaattccgctatgcgcggtcaacctatttcggactgattaaagtgagtgcgcaaagccacctgaaagcgatgtgtttgaacctgttgaaagcggccaacaggttaagtgcgcccgctgccgcctaa

SEQ ID NO: 44911 - DNA, 750 bp, Neisseria meningitidis
atgaaagcactggtcgcagtaaggcgcgtagtggactacaacgtcaaagttcgtgtaaaagccgatggttcggatgtggatatcggcaatgtcaaaatgtcgatgaatccgtttgacgaaatcgctgtggaagaagctgtccgtttgaaagaagccggaaaagtaagcgaaatcgtagcggtttctttgggtgagaaaaaatgcgaagaaaccttgcgtacagctttggcgatgggtgccgaccgtgccattcatgttgaaaccgatactaaactggagtctctggccgttgctaagttgctgaaagccgttgcggacaaagaaaatccgcaaattttctttttgggcaaacaagcgattgatgatgatgccaatcaagtggcgcaaatgctggcagctttgctgaatgcggcgcaaggtacgtttgcttcaaaagtacacattgaatgtggtgaagtacagattgtgcgcgaaattgatggcggcgaagaaaccatagcattaaaactgcctgctgttatcagtgctgatttgcgtttgaacgagccgcgctttgtcaaactccccaatattatggcggcaaagaaaaaacctttggaaaaactgactcctgacgatttggttgccgacatttcacctcgtttgaaaacggtgaaatttgccgaacctaaggcgcgtcaggcaggcgtaaaagtagcaagcgttgccgaattggttgaaaaattgaaaaacgaagccaaagtgatttga

SEQ ID NO: 44912 - DNA, 1005 bp, Neisseria meningitidis; identical to SEQ ID NO: 38175

SEQ ID NO: 44913 - DNA, 1680 bp, Neisseria meningitidis
atggaaaattttgctcagctgttggaagaaagctttaccctgcaagaaatgaacccgggtgaggtgattaccgctgaagtagtggcaatcgaccaaaacttcgttaccgtaaacgcaggtctgaaatcagaatccctgattgatgtagctgaattcaaaaacgctcaaggcgaaattgaagttaaagtcggcgacttcgttaccgttaccatcgaatccgtcgaaaacggcttcggcgaaaccaaactgtcccgcgaaaaagccaaacgtgcagccgattggattgccctggaagaagccatggaaaacggcgacatcctgtccggcatcatcaacggaaaagtcaaaggcggcctgaccgttatgattagcagcatccgcgcattcctgccgggttctttggtcgacgtacgtcctgtaaaagacacttctcacttcgaaggcaaagagatcgaattcaaagtgatcaaactggacaaaaaacgcaacaacgtcgttgtttcccgccgcgccgttctggaagccactttgggtgaagaacgcaaagccctgctggaaaacctgcaagaaggctccgtcatcaaaggcatcgttaaaaacattaccgattacggtgcattcgttgacttgggcggcatcgacggtctgttgcacatcaccgatttggcatggcggcgcgtgaaacacccgagtgaagtcttggaagtcggtcaggaagttgaagccaaagtattgaaattcgaccaagaaaaacaacgcgtttccttgggtatgaaacaactgggcgaagatccttggagcggtctgacccgccgttatcctcaaggcacccgcctgttcggcaaagtatccaacctgaccgactacggcgcattcgtcgaaatcgaacaaggcatcgaaggtttggtacacgtctccgaaatggactggaccaacaaaaacgtacacccgagcaaagtcgtacaactgggcgacgaagtcgaagtcatgattttggaaatcgacgaaggccgccgccgtatctctttgggtatgaaacaatgccaagccaatccttgggaagaatttgccgccaaccacaacaaaggcgacaaaatctccggcgcggttaaatccattaccgatttcggcgtattcgtcggcctgcccggcggcatcgacggtttggttcacctgtccgacctgtcctggaccgaatccggcgaagaagccgtacgcaaatacaaaaaaggcgaagaagtcgaagccgtcgtattggcaatcgacgtggaaaaagaacgcatctccttgggtatcaaacaactggaaggcgatccgttcggcaacttcatcagcgtgaacgacaaaggttctttggttaaaggttccgtgaaatctgttgacgccaaaggtgctgttatcgccctgtctgacgaagtagaaggctacctgcctgcttccgaatttgcagccgaccgcgttgaagatttgaccaccaaactgaaagaaggcgacgaagttgaagccgtcatcgttaccgttgaccgcaaaaaccgcagcatcaaactttccgttaaagccaaagatgccaaagaaagccgcgaagcactgaactccgtcaatgccgccgccaatgcgaatgccggcaccaccagcttgggcgacctgctgaaagccaaactctccggcgaacaagaataa

SEQ ID NO: 44914 - DNA, 123 bp, Neisseria meningitidis; identical to SEQ ID NO: 38799

SEQ ID NO: 44915 - DNA, 195 bp, Neisseria meningitidis; identical to SEQ ID NO: 39661

SEQ ID NO: 44916 - DNA, 936 bp, Neisseria meningitidis
atgagtgtattgattattgtcgaacacgacaacaaacagttgaatcctaccactttgcatgctgttaccgctgccgctaagctgggtaaaatcgatttattggttgccggaagcggtgcatctgctgtggtagagttcgcaaaacaagtggcgggtgtggaaaaagttttggttgcagatgctgcccattatgccgaaggtttggctgaagagttggctccgctggttgttaaattggcagtggattactgctatgttgcagcaacggcaactacattcggtaaaaaccttttgcctcgcgtagcagccttattagacgtaccgcaaatttctgatttgaccgaaattgtggataacacgacttttgtgcgccccatttatgcgggtaatgcatttgaaaccgtgcaagctgattcagaaaaattggtgctgaccttccgtgcgacggtttttgacgcagtggcggcgcaaggtggtaatgctgaggtaattaatgttgaagcaacccctgcccaaaacctgagtcgttttgttaaccgtcagctttcccattccgatcgtcctgaactgactcaggcaaaagtgattgtttccggtggtcgtgcgttgggtagtgcggaaaaattcaatgaagtgctgacaccgttggcggatgttttaggtgcggcaatcggtgcatcccgtgcagcagttgatgccgaatatgcgccaaacgatgctcaagtcggacaaaccggtaaagtggttgcgccgcaactctattttgcaatcggtatttcaggtgcaattcaacacgttgccggtatgcaagacagtaaggtgattgttgcaatcaataaagatgctgatgcgccgattttcaatgtagccgattacggattggttggcgatttatttgaaatcgttccacaattaacagaagtattgaaaaattga

SEQ ID NO: 44917 - DNA, 867 bp, Neisseria meningitidis; identical to SEQ ID NO: 37866

SEQ ID NO: 44918 - DNA, 624 bp, Neisseria meningitidis
atggaacgcaaagaacgcctgcgtgcaggcattgccgcgatggggctggatatttcggaaacggcacaggacaggcttttggcctatgtggatctgttgaaaaagtggaacaaaacctacaatctgaccgccctgcgcgacgaggaaaaaatgattgtccatcatcttttggacagcctgacgctgctgccccatatcgagggtgtgcaaacgatgctggatgtcggttcgggcggcggtcagcccggcattccggcggcggtgtgccgtccggatgtgcagataacccttttggatgcgaatacgaagaaaacggcttttttacagcaggcggttatcgagttggggttggacaatgtgcgcgtggtatccggacgcgtggaggcggtttcggacgtgcgtgccgatgtggttaccagccgtgcgtttgcagaactggcggattttgtgtcgtggacggtgcatctgttgaaagacggcggctactgggcggcgatgaagggcgtgtatccgcaggaagaaatcggccgcctgccgcaggatgtgtgcgttgaaaaagtccaaaggctcgacgtgccgggcttggatgcggaacgccatatcgtcatcctgagcaagcgttga

SEQ ID NO: 44919 - DNA, 456 bp, Neisseria meningitidis; identical to SEQ ID NO: 40384

SEQ ID NO: 44920 - DNA, 621 bp, Neisseria meningitidis
atgacaaagttatacgcagaaatcgccaagatggagacgcaggacgacgacacggtcaaggtttggggttacgcttcaagcgaggaaatcgattcggacggcgaagtcatcgcggcggcagctatgaaggcggcgattcccgattatatgaagtttggcgcggggcgcgagatgcacggctcaaacgctgcgggaacggcaattgaaatcaacgttgaagacgacggcataacctttttcggtgctcatatcatcgaccccgttgtcgtgtcgaaagtcaaaacaggcgtttacaaaggcttttccatcggcggcagcgttaccgcccgcgatgatttgaacaagtcgcaaatcacgggcttgaagctgacggaaatcagccttgtcgagcgccctgccaatcccgatgcggtgtctacctgctttaaggcggacaaaggtgcggaaacggtaaacaacgatacagaacataatgctacatattttagccatttcccttccaaacaaaaaagcaccgacggcggccgatgccccttcctttacaggttcccctattttttatccgcgggcagagccggttttgccgggccttttggtgcgggcgcgccgacagaagcctga

SEQ ID NO: 44921 - DNA, 492 bp, Neisseria meningitidis; identical to SEQ ID NO: 39153

SEQ ID NO: 44922 - DNA, 765 bp, Neisseria meningitidis
atgtgttcctgccttgttgtcaaaaataccgttatcggaagcggacgcaccaaaatcgccgtgccgcttgtcgcccgcgatgccgccgaactttccgccgtacttgagcaaatcaaaaatatgcccttcgatattgcggagttccgcgccgactttttggaatgcgcgggcagtatcggcgaaatattgcaccacacgcagaccgtccgcgacgcgctgcccgacaagccgctgctgtttacgttcagacggcatggcgaaggcggctcgttcccgtgttcggacgattattattttaaactgctcgacgcgctgatcgaaagtcgcctgcccgacattatcgatatcgagctgttttccggcgaaaccgccgtccggcgcgctgtggcgaatgctcaaaaaaacggcatcgccgccctgctctgcaatcatgagtttcaccgcacgccgccgcaagaagaaatcgtatgccgtctgaaacagatggaggactgcggcgcggacatctgcaaaattgcggtgatgccgcaaagcgcggaagatgtgctgactttgctttccgccacgctcaaagcgaaagagcttgccgccaaaccgattgttacgatgtcgatggggcagacgggggcggtcagccggcttgccggacaggtgttcggctcaagcatcacgttcggttcgggaacgcaaaactccgcgccggggcaaatcggcgtatccgccctccgtgcgacactcgactgcctcgaaaacggcgcagactga

SEQ ID NO: 44923 - DNA, 300 bp, Neisseria meningitidis; identical to SEQ ID NO: 43627

SEQ ID NO: 44924 - DNA, 1674 bp, Neisseria meningitidis
atgcttctaacactttctttgcgtgattttgtcattgttgaaaatctgaatctggattttcaaagcggctttaccgtattgaccggagaaaccggcgcgggcaagtccattactttggatgcgattggtctgctgttgggcgacaaagccgattacagccaagtccgcagcggtgcaaaagaagcgcagttgtcggcattgttcgatatttcccatttgcctgttttaaaagcagaattgtatgaacaggggcttttaaacgacggagaagaagaactcagtatccgccgcattatcgatgccaaaggcaaaagccgcagctttatcaacaatcaggccgctaccttggcgcaactcaaatccgtcggtagccagcttatcgacatccacgggcaaaacgcccatcattcgcttaatcaggaagccgcccagcgcgaattgttggacgcatttgcgggtagcagggagcaggcggaaaccgtcaggcagctttatcaaaattgggccaatgcgaaaaaagccctccaagaggcgcaggaacacgccgatgccgtcattatcgagcgggagcgtctggaatggcagtttaacgaactgaatcagttggacattaaacaaggcgaatgggaagccctcagccaaagccacgacagccttgcccattctgccgagctgttgcaggctgccgaagaagtcggaagcaagattgacggcgacaacggcatccaacgccatatctatcaatgtcaaaaactattggccaatctgcaaaacatcgagccgcgctttgccgagagcctgaatatgttggcaagcatcgaagccgaattgggcgaaatcagtgccaatatgcgcgatgtggcaggtcgcagcgacatcaatcccaatgaattggcggcacaggaacagcgcatgggcgagctgatggggatggcgcggaaataccggatcgagcctgaagagttgcctgccaagttggcagaaatcgaagaacgcctgcaaagcctgcaagctgccgccgatttggacgcgctcgagcataatgttgcccacaattttgccgaatatcaggaagctgcccacatcctttctgccatgcgccatcaggcggcagagcgtttgagcggcgaaacgaccgagcatatgcaacaccttgccatgaaaggtgcgcgttttgacattgccctactgccgtcttccccgacgtcgcacggcttggagcaagtacagtttcaagttgccgccaacaaaggcaatccgccccgtccgctgaataaagttgcctccggcggcgaattggcgcgtatcagccttgccttacaggttgttgccagccaatatacccaagttcccaccctgatttttgatgaggtcgataccggtattggagggggagtggctgaaatggtcggcaaggcattacgtgcgttgggcagaaaacatcaggtgcttgccgttacccatcttccgcaagtcgcatcctgcggcgaaaaccactggcgggtgcgcaagcacagcgagggagagcaaaccgtcagcgaaatcagtatattggatgaaatccaacgggtcgaagaggttgcccgtatgttgggcggagaagtcattaccgatacgacgcggcaacatgcggcagaattgctgcaacttgcgtcgaaaaatagtttattttaa

SEQ ID NO: 44925 - DNA, 801 bp, Neisseria meningitidis
atgagcccatccccctttatcgaaatgaaagacgtcgccttcgcgtatggcgaccgcccgattctgaagaacatcaatttcagcattccgcaaggcaattttgctgccgtaatgggcggttcgggcagcggcaaaaccacgctgatgcgactgattacaggacagattcgtccgcagtccgggcaggttttgattgaaggacgggatttggcgggcttttcggctgacgagttgtatgaacaccgccgccgtatgggcgtattgttccaacacggcgcgctgtttactgatttgtcggtattcgacaatatcgcttttccgatgcgcgaactgacgcgcctgccggaagcggtgattcgggatttggttttgttgaaattgaacgcggtcggtctgcgcggtgtggaaaacctgatgccgtccgagttgtccggcgggatgtcgcgccgcgtcgcgcttgcccgcacgattgcgctcgaccctgaaattatgttgtacgacgagccgtttaccggcctcgatccgatttccttgggcgtgattgcccacttgatcagccgcgtcaacaaggctttgcgttcgaccagtattatggtaacgcacgacattgaaaaatctttggaaatcgtcgatcaggtgattttcttggcgcacggcgaaattatgttctccggctcgccgcaggaaatgcgcgaactggattcgccttgggtgcgccagtttgtcggcgggctggcagacggccccgtagcataccgttatccggcgcaaacgtcgttgcagcaggacctgttgggataa

SEQ ID NO: 44926 - DNA, 348 bp, Neisseria meningitidis; identical to SEQ ID NO: 39706

SEQ ID NO: 44927 - DNA, 225 bp, Neisseria meningitidis; identical to SEQ ID NO: 38642

SEQ ID NO: 44928 - DNA, 519 bp, Neisseria meningitidis
atgcgccttttcccgattgccgccgccctgtcgcttgccgcctgcggtactgtgcaaagcacacaatatttcgtgttgcccgacagccgctacatccgtcctgcaacgcaaggcggcgaaactgccgtcgaagtccgtcttgccgaaccgctcaaacgcggcggactggtctatcaaaccgacccctaccgcctcaacaccgcacaaaaccacgtttgggcggacaccttggacgatatgctcgaagcggcgttgagcaatgcattcaaccgtttggacagcacacgcatctttattcctgcctcacgcagcggcagtaccgaaaaatggacggtctatattgacgcattccaaggcagctacacgggcaaaaccctcatcagcggctacgccgtcctacccgacggtacgaacagacccttccatatcgaaaccgaacagcagggtgacggctacgccgcgatgaccgccgcactcgaacagggactgaaacaggcggcgcaacagatggtcgagtaa

SEQ ID NO: 44929 - DNA, 738 bp, Neisseria meningitidis; identical to SEQ ID NO: 39629

SEQ ID NO: 44930 - DNA, 723 bp, Neisseria meningitidis
atgaaacccgcctatttcatctccgacctgcatttgagcgaaaagcaccccgaactgaccgcgctgttgctgcgttttttacgttcttccgccgccgggcaggcgcgggcggtttacattttgggcgatttgtttgatttttgggtgggcgatgacgaagtttccgagttgaatacttcggttgcgcgtgaaatcaggaaattgtccgacaaaggcgttgccgtgttcttcgtcaggggcaaccgcgacttcctgatcggtcaggatttttgccggcaggcgggcatgacgctgctgccggattactcggttttggacttgttcggctgcaaaaccctcatctgccacggcgacactctgtgtacagatgacagggcataccaacgtttccgcaaaatcgtgcatcggaagcggctgcaaaaactgttcctgatgctgcccctgaagtggcgcacgcgccttgccaccaaaatcaggcgtgtcagcaaaatggaaaaacaggtcaagcccgccgatattatggatgtcaatgccgcctttaccgcgcggcaggtacgcgccttcggtgcggaaaggctgatacacggacacacccaccgcgagcatatccatcacgaaaacggctttacccgcatcgttttgggcgactggcataacgactatgcttcaatcctccgcgtggacggggacggcgcggtattcgtgccgctggaaaaatactga

SEQ ID NO: 44931 - DNA, 732 bp, Neisseria meningitidis
gtgtcgcgcgaaatcaatgcgggcgggcatcatttcctctacggcggcatcagcggcggcggcgtgcattattgggataacaaagatttcagcgaacagtgcctgcacctgtcgctcggctataaaaatcgttcggtaacgcgctcgttcggcatcgtgccgtttgtcgggcaaaacctcttaggcggcagccgatacaatttcgtcggcggctttaatgccgatttctcccaacacttgagcgaacgctggcggttgacactaaacgcgggcaatatgtggaagcattatcaggaagaccgcaccgccgcccgatacgacagccatatgccgctggcgggcgcgacgctgatgtattccgcgccgaaagactggctgctttacggcggggcggactggtcgcacgacttgacgaaggaggcggaacaggcttccgtccgcaagggtttgcgtatcggcgcggtcaaaacgttcgacggcggcttgggtctgcgggcaaacctgcgctatacacgcaggacgtttgacgcgcccgggaccattgtgtaccgcttcccgcgcaaagaccacgaatatcaggcaaacctgtcgttttggcacgacaaaatctcttggaagggctttacgccgcaactcaatttccgctatctgaaaatcgacagcaatatgaaaagtttttacacacgcaaaaacacgcagattttcatgagcgtggaaaaggatttcaaataa

SEQ ID NO: 44932 - DNA, 993 bp, Neisseria meningitidis
atggaaaatgtaaaccgcatcgttgcagaaggcattgccgcagtagaagctgcgcaagacttcaacgctctagaacaaatcaaagcccgttatcttggcaaaaccggcgagttgaccggacttctgaaaactttggggcaaatgtcgcctgaagagcgcaaaaccataggtgcgcatatcaatgaatgcaaaaaccggtttcagacggcttttaatgccaaacgcgatgccctcaacgaagccaagctgcaagcccgacttgccgccgaagccctcgacattaccctgcccggacgcgctcaggaaggcggcagcctgcatcccgtaaccctgaccttgcaacgtgtggtcgaactctttcacggaatgggtttcgaagtggcggacgggcctgaaatcgaagacgattttcacaatttccaagccctgaacatccctgcaaaccatcctgcccgtgcgatgcaggatacgttttacgttgaaaacggtgatgttttgcgtacgcacacttccccgattcaaatccgctatatgctcgataaaaaagagccgcccatccgcattatcgcccccggccgcgtttaccgtgtggacagcgatgccacgcactcgcctatgttccatcaggcggaaggtttgtgggtagaagagggtgtaacttttgccgacttaaaagcagtgttcacggattttatccgtcgcttctttgaacgcgatgatttgcaagtacgtttccgcccgtctttcttcccgttcaccgaaccgtctggcgaaatcgacattatgggcgaaaacggcaaatggctggaagtcggcggctgcggcatggtgcatcccaacgtgttgagaaatgtgaatatcgatcccgaaaaatacaccggtttcgctttcggtatcggtctcgaccgtttcgcgatgctgcgttacaacgtgaacgatttgcgcttgttttttgataacgatttgaattttttgaagcagtttgcgaaataa

SEQ ID NO: 44933 - DNA, 822 bp, Neisseria meningitidis
atggattttctgattgtcctgaaagccctgatgatgggcttggtagaaggttttaccgaatttttaccgatttccagcaccggacatttgattgtgttcggcaatctgattgattttcacagcaatcacaaggtttttgaaattaccatccagctcggtgcggttttggcggtagtgtttgaataccggcagcgtttcagcaatgtgttgcatggcgtgggaaaagaccggaaagccaaccgtttcgtccttaatcttgccattgcttttatacctgccgccgtgatggggctgttgttcggcaaacaaatcaaagagtatctgtttaaccccttgagtgttgcagtcatgctggttttgggcggtttttttattttgtgggtggagaaacgccaaagccgggcagagcctaaaattgtcgatgttgatgcattgcgtccgattgatgcgttgatgatcggcgttgcccaagtgtttgcactggttccgggtacgtcccgttcgggcagtacgattatgggcgggatgctttggggaatcgagcggaaaacggcaacggagttttcatttttcttggccgttccgatgatggttgcagcaacggcttatgatgtcctgaagcattaccggtttttcaccctgcatgatgtcggtttgattctgattggctttgttgccgcttttgtttccggtttggtggcggtaaaagcgttgctgaggtttgtttccaagaaaaattatattccttttgcctattaccgcattgtttttggcattgccatcattatattgtggctgtcaggctggataagttgggaatga

SEQ ID NO: 44934 - DNA, 525 bp, Neisseria meningitidis
atgcaaacccgcatcctctccgccgtactgctggctttttcaaccgctgcctttgccgggggcgcattcacgctgcaattcgacaacccgtccgaagacggcggcttcacgcaaaaccagcttttgagtgcgccttacggcttcggctgttcgggcggcaatgctccgcccgcgctgtcgtggaaaaatccgcccgccgggacaaaaagtttcgtcctgaccgtttacgataaagacgcgccgaccggactgggctggatgcactgggtggtcgccgacattcccgccgatgtccgccgccgcaacgcggcctcgctgcaattaagccgctgcgccaacatcgccgacgaccagtccgcagccatatcggcggtaatcagtttgcggatttgccgcatcaggttgacgccttcgtacacggcaaaaccgatgccgtcatgctgcaaccacgccaacacgccgcaaagcgcggcctccgccacattgtgcggcactttttcatccgccagcaccgcagccgcataa

SEQ ID NO: 44935 - DNA, 996 bp, Neisseria meningitidis; identical to SEQ ID NO: 38514

SEQ ID NO: 44936 - DNA, 216 bp, Neisseria meningitidis; identical to SEQ ID NO: 38426

SEQ ID NO: 44937 - DNA, 390 bp, Neisseria meningitidis
atgagcacgcacgagaaacttttaaccgccgacaaccccgtcctgcatcaacgcgccaaagccatgcgccaagaaatgagcgaggcggaagcaaaattgtggcagcacctgcgggcaggccgtctgaacggctataaattccgccgccagcagccgatgggaaactatattgttgattttatgtgcgtaacgcccaagttgattgtcgaagcagacggagggcagcacacagaacaagccgcatacgaccacgcgcggacggcatatctcaacagcttgggctttaccgtactgcggttttggaatcacgagattttacagcagacaaacgatgtgctgacagaaatcctgctcgtgttgcaagaattggaaaagcaagctgcacgatag

SEQ ID NO: 44938 - DNA, 1302 bp, Neisseria meningitidis
atgccgtctgaaaccgcccgccccctttatgcggacacgtgcgccgcacacacgctcgtctggttccgccaaaacctccgcatccgcgacaacgccgccttatgcgccgccgttgccgaaggtttgcccgttatcggtatttggattgacgatgccgaaacagacaaccctcgccgcgccgcgttctaccgccaatccgccgccgaactcgcccaagggcttgcagggcgcggcatcccgctctacacggcggcatcgcctgccgagctcgtccggctcgccgtccgcctcaatatccgcgccgtcatcgccgacgaatcccatacttttgccgacaaactcgccgacaacgccctttggcatgaattggacaaacacggcatcgcgttaaccttcgtcaacgaccgtgccgttttcggcaaaaccgacctgatacccgacggcggcacggcacacaccgatttcgaccgctaccgcgaagtatggctcgaccgcttttccaagcagccccccgccggtccggacctattcgcggcataccgccaacccttccccgaaaacctttccgccccgccgcctgccgccctttcagacggcatcttcctgccgcaaaacagcggcgaaacggcggcttggcggcagtggcggcggtttctcgaacaggcggattcctactccgttttaaaggatttcccctcgcgcaaacacacttcgctgatgggcgcgtatttgagtgccggctgcatctcgccgcgcctgctcgcgcgggaaagcctcgaacgccgtctgaacgcgtgggcggacaacatcatccgccgcgattttttccttcaacttgccttgcagcacacggatgacgacccttcagacggcaatcctgaacacaccctgcgcctgacgctttggcagcagggccagaccggcattccgattatcgatgccgcgatgcgctgtttgcacaaaaccggcagcctccaccccgccctgagacgcttgagcgcggattttttctgccacgttttaaacctcccccgccgcgaaggcgagatatggtttgcccgacagctgaccgatttcgatgcagcaatcaaccaaggcaactggcggcttgccgcctcacggcacacctgccccgacattgccgccgccgcacacaagaccgaccccgacggcacctttgtcagacggcacattcccgaactcgcccacctgtccgccgacaccgtccacacgccttggcggtttgcctgttcggtcgatacccacggctatcccgcctatcctgtcgccggtattccctaa

SEQ ID NO: 44939 - DNA, 2835 bp, Neisseria meningitidis
atgaacagaaggcatacattcccacttaccctgaccgccttggccattgcaaccgcttttccggcttatgccgcccaagcgggggtggcggcacctgatgccgcgcagacccaatccctgaaagaggttaccgtccgtgccgccaaagtgggacggcgatcgaaagaggcgaccggtttgggcaaaatcgtcaaaacgtcggaaacgttgaacaaagaacaggtactcggtatccgcgacctgacgcgctacgatccgggcgtggcggttgtcgaacagggcaacggcgcgagcggcggttattcgatacgcggcgtggataaaaaccgtgtggcggtttcggttgacggcgttgcccaaatacaggcgtttaccgtgcagggatcgttgagcggatacggcggacgcggcggcagcggcgcaatcaacgaaatcgaatatgaaaacatcagcacggtggaaatcgacaaaggtgccggttcatccgatcacggcagcggcgcactcggcggcgcggtcgctttccgcaccaaagaggcggcagacctgatttcagacggcaaaagctgggggatacaggcaaaaaccgcctacggcagtaaaaaccgccaatttatgaagtcgctcggcgcggggttcagcaaagacggttgggaagggctgctaatccgtaccgaacgccaagggcgggaaacgcgcccgcacggcgatattgcggacggggtggcatacggcataaaccgtttggatgcgttccgccagacacacgatattcaaagcaaagataaaacagggcaatttttcttagtagagggcgagaatacactcaagcccgtggcaaaattggcgggctacgggatatatttgaaccgccagcttaaccgctgggtaaaagaacgtattgaacaaaataagcctttaagtgctgaagaagaagcgatggtgcgggaggcgcaggcgcgccacgaaaacctgtccgcccaatcgtacacgggcggcggcaggatattgcccgatccgatggattaccgcagcggctcttggcttgccaagctgggctaccgcttcggcggcaggcattatgtcggcggcgtgtttgaggataccaaacagcgttacgacatccgcgatatgacggaaaaacagtattacggtacggacgaggcggaaaagtttagagacaagagcggggtgtacgacggcgacgatttccgcgacggcttgtattttgtgccgaatatagaagagtggaagggcgatacaaatttggtcaagggcataggtttgaaatattcccgcaccaaatttattgacgaacatcaccgccgccgccgtatgggtttgctgtaccgttatgaaaacgaagcgtattctgacaactgggcggataaggcggtgttgtcgtttgacaaacagggcgtggcaaccgacaacaacacgctgaagctgaattgcgccgtgtatcctgctgtggacaaatcctgccgcgcgtcggcggacaaaccgtattcctacgacagcagcgaccgtttccactaccgcgaacagcacaatgttttgaatgcctcgtttgagaaatcgctgaaaaacaaatggacgaaacaccatctgactttgggcttcggttacgatgcttccaacgcgatttcccgccctgaacagctttcccacaatgcggcaaggatttcggaatccacgggattcgatgataacaatcaagataagtaccgtttgggtaagcccgaagtcgtcgaagggtcggtctgcggctacatcgaaaccctgcgttcccgcaaatgcgtgccaagaaaaatcaacggcagcaatatccacatttctttgaacgaccgtttttcaatcggcaaatattttgatttcagcttgggtggcaggtacgaccggaaaaacttcaccacgtcggaagaactcgtccgcagcggacggtatgttgaccgttcgtggaacagcggcatcgtgttcaaaccgaaccggcatttttctttgtcttaccgcgcctccagcggcttcagaacgccctcattccaagaacttttcgggatagacatttatcacgattatccgaaaggctggcagcgtcccgccctgaaatcggaaaaggcagccaaccgcgaaatcggtttgcagtggaagggcgatttcggctttttggaaatcagcagcttccgcaaccgttataccgatatgattgccgttgccgatcacaaaaccaaattgccgaatcaggcaggacaattgacagagattgatatacgcgattattacaatgcccaaaatatgtcgctccaaggcgttaatatattgggaaaaatcgactggaacggtgtgtacggcaaactgcccgaaggtttgtacaccacattggcatacaaccgcatcaaaccgaaatcggtatccaaccggccggacttgtccctccgcagctatgctttggatgcggtacagccgtcgcgttatgttttggggttcggatacgaccagccagaggggaaatggggcgcaaacattatgctgacctattccaaagggaaaaaccctgacgagcttgcttatctggcaggcgatcaaaaacgatattcgacaaaaagagcgtcgtcttcttggtcgacggcagacgtttccgcctatctgaatctgaaaaaacggctgaccttgagggcggctatctacaatatcggcaactaccgctacgttacttgggaatccttgcgccagactgcggaaagcacggcaaaccggcacggcggcgacagcaactatggaaggtatgccgcaccgggcaggaacttcagcctcgcgctcgaaatgaagttttaa

SEQ ID NO: 44940 - DNA, 696 bp, Neisseria meningitidis
atgagtgagttgattttgaaatgcgaaggcgtgggcaaacgctaccgcgacggcggtttggacgttcgggtgctgcacggcttggatttggaaatccgcgcgggggaaagcaccggcatcatcggttcttcgggcagcggaaaatcgacgctgctgcatattctgggcgggctggatatgccgtctgaaggcagggtgctgctgatgggcgaggatttgcgtacattaagccagcgacaactgggcatcctgcgcaaccgccatctcggtttcgtgtaccagttccaccatcttctgcctgaattttcggcactggaaaacgtgatgatgccgcttctgatcggcaagaaaaaacgggaagaggcggcagaaacggcaatggcgatgctggaaaaggtcggactgaaacaccgttcgacgcaccgcgcgggcgaactgtccggcggcgaacgccagcgtgccgccattgcgcgcgccttggttacgcaaccaaaatgcctgcttgccgacgaaccgaccggcaacctcgaccgtgcgaacgccaggaatgttttggatatgatgctggaactgaaaacggaattgggaacggggctggtggtcgtaacgcacgacgacgaactcgccggccgcttcgagcgcgtgatggtcatgaaagacggcagcctgcaccccaaacagggcgcaaacgcctaa

SEQ ID NO: 44941 - DNA, 855 bp, Neisseria meningitidis
atgtcggcacaactgatcaatggtaaagaagtttcgcaaaaacgcctgcaggcggttgccgaagcggtggcgcaacgccaacagaacaatctgcacacgccttgcctggccgtggttttggtcggaggcgaccctgccagcgcggtttatgtccgcaacaagaaaacctcctgccaaaaatgcggcatcaaatcactgtcttacgagctgcccgaatcaacatcgcaggaagaactgctggcactggtcgaccgcctgaatgtcgattccgaagtggacggtattctggttcagctgccactgccgaagcacctcgacagccaggcggttttggaacgtatttcgccggataaggacgtggacggcttccatccttacaatgtgggcaggcttgcagtcaaaatgccgctaatgcgcccgtgtacgcccaagggcgtgatgacgcttttggaggcttacggcatcgatccgaaggggaaaaaagcggtcgtggtcggcgcgtcgaatattgtcggccgcccgcaggctttggaattgctgctggcgcgcgcaacggtaacggtctgccacagtgcgaccgaaaatctggcagacgaggttgccggggccgatattttggtggtcggcgtaggcattccgaactttgtcaaaggcgaatggatcaaacccggcgcggtcgttattgatgtgggcatcaaccgtctggacgacggcagcctgtgcggcgacgtggaatttgaaacggcaaaagaacgggcggcgatgattacgcccgttcccggcggcgtgggtccgatgacgattgccacattgatggaaaacaccctgcacgcggcttcactgcacgatgcttga

SEQ ID NO: 44942 - DNA, 2112 bp, Neisseria meningitidis
atgaaaatatcatttcatttagctttattacccacgctgattattgcttccttccctgttgctgccgccgatacgcaggacaatggtgaacattacaccgccactctgcccaccgtttccgtggtcggacagtccgacaccagcgtactcaaaggctacatcaactacgacgaagccgccgttacccgcaacggacagctcatcaaagaaacgccgcaaaccatcgatacgctcaatatccagaaaaacaaaaattacggtacgaacgatttgagttccatcctcgaaggcaatgccggcatcgacgctgcctacgatatgcgcggcgaaagcattttcctgcgcggttttcaagccgacgcatccgatatttaccgcgacggcgtgcgcgaaagcggacaagtgcgccgcagtactgccaacatcgagcgcgtggaaatcctgaaaggcccgtcttccgtgctttacggccgcaccaacggcggcggcgtcatcaacatggtcagcaaatacgccaacttcaaacaaagccgcaacatcggtgcggtttacggttcgtgggcaaaccgcagcctgaatatggacattaacgaagtgttgaacaaaaacgtcgccatccgtctcaccggcgaagtcgggcgcgccaattcgttccgcagcggcatagacagcaaaaatgtcatggtttcgcccagcattaccgtcaaactcgacaacggcttgaagtggacggggcaatacacctacgacaatgtggagcgcacgcccgaccgcagtccgaccaagtccgtgtacgaccgcttcggactgccttaccgcatggggttcgcccaccggaacgattttgtcaaagacaagctgcaagtttggcgctccgaccttgaatacgccttcaacgacaaatggcgtgcccaatggcagctcgcccaccgcacggcggcgcaggattttgatcatttctatgcaggcagcgaaaatggcaacttaatcaaacgtaactacgcctggcagcagaccgacaacaaaaccctgtcgtccaatttcacgctaaacggcgactacaccatcggccgttttgaaaaccacttgaccgtaggcatggattacagccgcgaacaccgcaacccgaccttaggttacagccgcgcctttactgcttccatcgatccatacgaccgagcaagctggccggcttcgggcagattgcagcctatcctcacccaaaaccgccacaaagccgactcctacggcatctttgtgcaaaacatcttctccgccacgcccgatttgaaattcgtcctcggcggtcgttacgacaaatacacctttaattccgaaaacaaactcaccggcagcagccgccaatacagcggacactcgttcagccccaacatcggcgcagtgtggaacatcaatcccgtccacacactttacgcctcgtataataaaggcttcgcgccttatggcggacgcggcggctatttgagcatcaacacgtcgtcttccgccgtgttcaacgccgaccccgagtacacccgccaatacgaaaccggtgtgaaaagcagttggctggacgaccgcctcagcactacgttgtctgcctaccaaatcgaacgcttcaatatccgctaccgccccgacgagcaaaatgatccctacacttgggcagtcggcggcaaacaccgttcgcgcggcgtggaattgtccgccatcgggcaaatcatccccaaaaaactctatctgcgcggttcgttgggcgtgatgcaggcgaaagtcgttgaagacaaagaaaatcccgaccgagtgggcatccatttgaataacaccagcaacgttaccggcaacctgtttttccgttataccccgaccgaaaacctctacggcgaaatcggcgtaaccggtacaggcaaacgctacggttacaactcaagaaataaagaagtgactacgcttccaggctttgcccgagttgatgccatgcttggctggaaccataaaaatgttaacattacctttgccgcagccaatctgctcaatcaaaaatattggcgttcggatgccatgcccggcgcgccgcgcacttatacggcgcgggttaattacagtttctaa

SEQ ID NO: 44943 - DNA, 1056 bp, Neisseria meningitidis; identical to SEQ ID NO: 38549

SEQ ID NO: 44944 - DNA, 246 bp, Neisseria meningitidis
ttgaaggattctacagggcaaatgaggctggcaaccaaggatttggcggaagccattaaacgaggagaagtacgtagttctgcttttacaacaaagcaactaaaggcaatcgaaaaaggagaatctaaaataccggattacacttggcatcatcatcaagacactggaaggatgcaattgattaatgaagacttgcatcatgataccggccatatcggttggagagcgatgagtaaaggaaagtaa

SEQ ID NO: 44945 - DNA, 789 bp, Neisseria meningitidis
atgctcaccctatacggagaaactttcccttcacggctgctgctcggcacggctgcctacccgacccccgaaatcctcaaacaatccatccaaaccgcccagcctgcgatgattaccgtctcgctgcgccgcgcgggaagcggcggcgaggcgcacggtcaggggttttggtcgctgcttcaagaaaccggcgttcccgtcctgccgaacacggcaggctgccaaagcgtgcaggaagcggtaacgacggcgcaaatggcgcgcgaagtgtttgaaaccgattggataaaattggaactcatcggagatgacgacaccttgcagccggatgtgttccagcttgtcgaagcggcggaaatcctgattaaagacggcttcaaagtgctgccttattgcaccgaagacctgattgcctgccgccgcctgctcgacgcgggctgtcaggcgttgatgccgtgggcggccccgatcggcacgggtttgggcgcggttcacgcctacgcgttgaacgtcctgcgcgaacgcctgcccgacacgccgctgattatcgacgcgggcttgggtttgccctcacaggcggcacaagtgatggaatggggctttgacggcgtgcttttgaatactgccgtttcccgcagcggcgatccggtcaatatggcacgcgccttcgcactcgccgtcgaatccggacggctggcatttgaagccggaccggtcgaagcacgcgacaaagcgcaagccagcacgccgacagtcggacaaccgttttggcattcggcggaatattga

SEQ ID NO: 44946 - DNA, 873 bp, Neisseria meningitidis
atgcccattttgaaccatattgccctcatcggtgtagggctgatcggcggttcgttcgttctcgacctcaaaaggcagggactcgtccgcaccgttaccggtatcgacaccgaccgcgacaacctcgaacgtgcattggaacgcggcgtgattgaccgtgcgtccgttgccatcgacgcggacagcatcggcggtgcggacttggtactgattgccacgcccgtcgccaccgttcccgccattttgaccgcgctgcgccccgttttgccggaacacacttggatttccgatgtcggcagcaccaaatcttcggtcatcgaagccttccgccgctgtctgcccgaccgtctgcaccactgcatcgccgcccacccgattgccggttcggacagaagcggtgcgcaagccgcgcagttcgggctgttccgccacagaaaactcatcatcacgccacacggcggcgaacattcagacggcattgccttggtagaagaactgtggcacgcggtcggtgcggaaatttatacgatggacgcgcaacgccacgacgcggttttcgccgccgtctcccatatgccccacctgaccgccttcgcctatgtccaccagattctcgaccaccccgacggacaggaatatctgaaattcgccgccacgggctttcgggacttcacccgcatcgcctccggtcatcccgccgtgtgggcggacatctgccttgccaacaaagacagcctgctgcaactggttcaaggcttgggcaaacagttggacgttttggcaaacatcctgaccaccgacgaccgcgaagccctgtaccgctattttgaagaagccaaaaccacacgcgaccgctggctggacggcaactga

SEQ ID NO: 44947 - DNA, 969 bp, Neisseria meningitidis
atgaacgagaaaaccatcatccttgccaatccgcgcggcttctgcgctggtgtggatcgggcaatcagtattgtcgaacgtgctttggaagagttcggcgcgccgatttatgtgcgccacgaagtcgttcacaacaaattcgtcgtggacaacctgcgtgaaaaaggtgcggtgtttattgaagacttggcggaagtgccgccgggcgcgacactggtttattcggcacacggcgtatcgaaggcggtgcggcaagaagcggcggagcgcggtttccgcgtgtttgatgcgacttgcccgctggtgacgaaagtgcataaggaagtcgcccgactggatgcccaagactgtgaaatcatcatgatcgggcataaggggcacgtcgaggttgaaggaacgatggggcagcttgcgccgggcaaaatgcttttggtcgaaacggtcggagatgtggcaaaactcgaagtcagaaaccccgacaaactcgcctatgtcagccaaaccacgctctcggtcgatgaaaccaaagacatcatcgccgcgctgaacgcgcgtttccccaatatccgcaatccgcacaaggaagacatctgctatgcgacgaccaaccggcaaaccgccgtcaaagagctggcggaacagtgcgacatcgtgattgtggtcggttcgcccaattcgtccaacagcaaccgcttgcgcgaagtggcggcatcgcgcggaatcgatgcgtatatggtggataatgcaggctacctgcaacgcgcatggtttgagggcaaaaacaaagtcggcgtaacggcaggcgcgtccgcgcccgaagtgttggtgcgggaagtactggcaaccatacgcggatgggggcacgaaaccgtacgcgaaggcgagggtgcggaagaaagcattgtgttcgtcctgcccaaagagctgcgccgcgagggcgaaaccaaacccgatttgtgcaaacgttga

SEQ ID NO: 44948 - DNA, 432 bp, Neisseria meningitidis; identical to SEQ ID NO: 36206

SEQ ID NO: 44949 - DNA, 732 bp, Neisseria meningitidis; identical to SEQ ID NO: 39074

SEQ ID NO: 44950 - DNA, 915 bp, Neisseria meningitidis
atgaaacacctcaaactcacccttattgccgcattgctgaccactgccgcaactgccgccccccttccggttgtaaccagtttcagcattttaggcgacgttgccaaacaaatcggcggagagcgcgtatccatacaaagtttggtcggagccaaccaagatactcatgcctatcacatgaccagtggcgacattaaaaaaatccgcagtgcaaaactcatcctgctcaacggcttaggacttgaagccgccgacatccaacgtgccgtcaaacagagcaaagtatcctatgccgaagcgaccaaaggcatccaacccctcaaagccgaagaagaaggcggacaccatcatgaccacgaccatgaccacgaaggacaccaccatgaccacggcgaatttgacccgcacgtctggaacgaccccgtcctcatgtccgcctatgcccaaaacgtcgccgaagccctgataaaggccgaccccgaaggcaaagtttattatcaacaacgcttgggcaactaccaaatgcagctcaaaaaactgcacagcgacgcacaagccgcatttaacgccgtccctgccgccaaacgcaaagtcctgaccgggcacgatgccttttcctacatgggcaaacgttaccatatcgaattcatcgccccgcaaggtgtgagcagcgaagccgagccttcagccaaacaagtcgccgccatcatccgacaaatcaaacgcgaaggcatcaaagccgtattcaccgaaaatatcaaagacacccgcatggttgaccgtatcgccaaagaaaccggtgtcaacgtcagcggcaaactgtattccgacgcactcggcaacgcgcccgcagacacctacatcggaatgtaccgccacaacatcaaagccttgaccaacgcgatgaagcaataa

SEQ ID NO: 44951 - DNA, 483 bp, Neisseria meningitidis; identical to SEQ ID NO: 38704

SEQ ID NO: 44952 - DNA, 492 bp, Neisseria meningitidis; identical to SEQ ID NO: 38741

SEQ ID NO: 44953 - DNA, 576 bp, Neisseria meningitidis
atgccgtctgaaaacccgataggaaaaacgatgaaatccatagacgaacaaagcctgcataatgcccgccgcctgtttgaaagcggcgacatcgaccgtatcgaagtcggtaccaccgcgggcctgcaacagattcaccgttacctgttcggcggcttatatgattttgcgggtcaaatcagggaagacaacatttccaaaggcggttttcgttttgccaacgccatgtatttaaaagaggctttggttaaaatcgagcagatgcccgagcggacttttgaagaaatcatcgccaaatatgttgaaatgaacattgcccatccgtttttggagggtaatggcagaagtacccgcatctggctggatttggtgctgaaaaaaaacctgaaaaaagtcgtgaactggcaaaatgtaagtaaaaccctgtatttgcaggcaatggaacgcagccccgtcaacgatttagaactgcgctttctgttaaaggacaacctgactgacgatgtggacaaccgtgaaatcatctttaaaggtatcgagcagtcgtattattacgaagggtatgaaaaaggctga

SEQ ID NO: 44954 - DNA, 576 bp, Neisseria meningitidis; identical to SEQ ID NO: 36297

SEQ ID NO: 44955 - DNA, 1476 bp, Neisseria meningitidis
atgatcagcaaacaagaataccaagcccaagccgctcaaggctacaaccgcatcccgctcgtgcaagaactccttgccgatttggatacgccgctttccctctatctcaaactcgccaaccgcccctatacctacctgctcgaatccgttgtcggtggcgaacgtttcggccgctattcttttatcggcctgccttgcagccactatctcaaagccagcggcaaacacgtcgatgtttatcaaaacggcgaaattgtcgagcaacacgacggcaaccccctgccctttatcgaagccttccacaaccgcttcaaaacacccgaaatcccaagcctgccgcgctttaccggcggactggtcggctacttcggttacgaaaccatctacaattttgaacacttcgcccaccgcctgaaaaacaccaccaaagccgacccgctcggcacgcccgacatcctcctgatgctctcgcaagagcttgcagtagtggataacctaagcggtaaaatctacctgattgtttacgccgatccgtcgcagcccgacggctacgaacgcgcacgcgaacgcctcgaagacatccgtacacagttacgccaaagttgcgccatcccgctttcgctcggcagcaaacacaccgaagccgtcagcgaattcggcgaagagccgttcaaagcctgcgttaacaaaatcaaagactacatctttgcaggcgactgcatgcaggttgtccccagccagcgcatgagcatggaattcaccgacagctcgctcgccctctaccgcgccttgcgcacgctcaacccttcgccttatctcttctactacgatttcggcgatttccacatcgtcggctcctcgcccgaaatcctcgtccgccgcgaacgcgacgatgtcatcgtccgccccatcgccggcacgcgcctgcgcggcaaaacccccgccgaagaccttgccaacgaacaagatttgttaagcgatgccaaagaaatcgccgaacacgtcatgttgattgacttaggacgcaacgacgtcggccgcatcagtaaaaccggcgaagtcaaagttaccgacaaaatggtgattgaaaaatactcccatgtaatgcacatcgtttccaacgtcgaaggccgtctgaaagacggcatgaccaacatggacatcctcgccgctaccttccctgccggcacactctccggcgcacccaaagtccgcgccatggaaatcatcgaagaagtcgaaccgagcaaacgcggcatctacggcggtgccgtcggcgtatggggtttcaacaacgacatggatttggcaatcgccatccgcaccgccgtagtaaaaaacaacacgctatacgtccaaagcggcgcgggcgtggttgccgactccgatccggcctccgaatggcaggaaacacaaaacaaagcccgagccgtcatacacgccgcgcagatggtgcaggaagggttggataaatga

SEQ ID NO: 44956 - DNA, 2130 bp, Neisseria meningitidis
atggcctatcaagttctcgcccgaaaatggcggcccaaaaccttttccgacttagtcggtcaggaacacgtcgtcaaagccttgcaaaacgccttggacgaaggcaggctgcaccacgcctacctgctgaccggtacgcgcggcgtaggcaaaaccaccatcgcccgcatccttgccaaaagcctcaactgcgaaaacgcgcaacacggcgaaccttgcggcgtgtgcgaaagctgcacccaaatcgatgccggacgctatgtcgacctgctcgaaatcgacgccgcctccaacacaggcatcgacaacatccgcgaagtattggaaaacgcccaatatgcaccgactgccggcaaatacaaagtctatatcatcgacgaagtgcatatgctttccaaaagcgcgttcaacgctatgctcaaaacgctggaagagccgcccgaacacgtcaaattcatccttgccacgaccgatccgcataaagtccccgttaccgtcttgagccgctgcctgcaatttgtcttgcacaatatgacttcgcagcaggttgccgaccacctcgcccacgtcctcgacagcgaaaaaatcgcctacgaaccccctgccctgcaacttttgggacgcgccgccgccggatcgatgcgcgatgccttgagcctgctcgaccaagccatcgccatgggttcgggcagcgttgccgaacaagacgtccgccaaatgatcggtgcggttgacaaacaatacctttacgaactcttgacaggcatcatcaaccaagacggcgcagccctgaccgccaaagcgcaggaaatggcggcgtgtgccgtcggctttgacaacgccttgggcgaacttgccatactgctgcaacacctcgccctgatacaggcggtgccctccgccttggcgcacgacgaccccgattccgatattttgcaccgcctcgcccaaaccataagcggcgaacaaatccagctttactaccaaatcgccgtccacggcaaacgcgacctgagcctcgcccccgacgaatacgccggctttatgatgaccctgctgcgtatgctggcgtttgcgcccttggcggcagcttcgtgtgatacaaacgccgtgattgaaaataccgaactaaaatccccatcggcacaaaccgccgaaaaggaaaccgccgtaaaaaagccccaaccgcgccctgaagcagaaaccgcccaaacacccgttcagacggcatccgcagcggcaatgccgtctgaaggcaaaactgccggacccgtttccaatcaagaaaacaacgatgttccgccttgggaagacgcgccagacgaagcccaagccgcagccggcacggcgcaaacgtcggcaaaaagcattcagacggcatccgaagccgaaacgccgcccgaaaaccaagtttccaagaacaaggcagccgacaacgtaaccgatgcccccttgtccgaagtgccgtctgaaaaccccattcaggcaacaccgaatgatgaagccgttgaaacggaaacatttgcacacgaagcccctgcagaacctttctacggttacggctttccggataatgactgccccgtagaagacggcgcagaaatcccgccgcccgattgggaacacgccgcccctgccgataccgcaggcggaggcgcggacgaagaagcagaagcaggcggcatcggcggaaacaacacgccgtccgccccgccgcccgaattttccaccgaaaactgggcagccatcgtccggcatttcgcccgcaaactcggcgcggcgcaaatgccggcgcaacactccgcgtggacggaataccatcccgacaccggcctgatggttttggcgatgaccgccgaagcccgcgccaccgccgacaaaaaacgtctcgacaaaatccgcgacacccttgcccaagcctacggactgcaactcaccctgcaaacccaagactggcgcgacgaagccggcagggaaacccccgcgatgcaggacaagcgcgtccaagccgaagacaggcaaaaagcacaagcattgctcgaagccgaccccgccgcacaaaaaatcctccaagcattcggcgcgcaatggcagcccgaatcactggaattggcagcaaaccggccataa

SEQ ID NO: 44957 - DNA, 759 bp, Neisseria meningitidis
atgaaaatcacccccgtcaaagccttgaccgacaactacatctggatgatacagcacggcaaccatgccgtctgcgtcgacccttccgaaccctcgcccgtcttggaattcctcgtccgcaaccgcctcatgcttgcccaaacatgggtaactcacccccatcccgaccacgagggcggtgcggcggcactctggcgcggctacatggaatcgcccgtttacggcgaatccgacatcgaagcagcaacccacaccgtaaccgccggcacccaattcaccttcggcgacggacaggttaccgtttgggcaacacccggccacacagaccgccacaccagctaccttctcgaaacttcagacggcatacacgtcttttgcggcgacacccttttttccgccggctgcggacgcgtgtttaccggcacaatcgaacagctttacgacagcttccaacgcttcaaccgcctgcctgaaaacaccctgttctatccggcgcacgaatacaccgccgccaacctggattttgccgcccatatcgagccggacaacgccgacattcagacggcactgaaagcggcggcgcatacgcctaccctgcccgttaccctcgcgcacgaacgccgtgtcaatccgtttttgcgcgtcgacctgccgcacgtcagagaccgcgccgaggcattgagcgggaaaacgttaaacagcagcctcgatacctttgtcgcgctgcgtgaacttaaaaaccaataccggacgaaataa

SEQ ID NO: 44958 - DNA, 186 bp, Neisseria meningitidis
atgtaccactaccaatccgaagccacacaattcctcaaccgcctgattgaagaaaaacctgagttggaacagcagcgtttggaaaaccgggggcttttgtgggatgtcgaactcaatcccgaagaacaggaaaacttcgaggcggcaaaagtagcgaaaaaaccttatacctattaccaagactga

SEQ ID NO: 44959 - DNA, 909 bp, Neisseria meningitidis
atgaacacgccccaatccgccatcattcccgaccacgcccaagccggcatctttatcgaagccgacttcgccgccaaccgcctcaacgatattaaagccgcctgccgcgcttcgctcgacgcgttaactgccttgaaagcccgctttccggacgatattttgggtctgaccatcgccttcggcagcaaagcctgggcaacattcggacatacggacgaaggcagtgaaatcaaacccttctccgaaatgggcaacgggcttgcgccgtccacgcagcacgatatgtccatccacatccaatccttccgccaaaacgccgcctacgcgcttgcccaatccgttttaggcgcgttcggcgacagcatatgcgtcgcgtccgaagaacacggtttgcgcctgtatcaggatcgcggactggacggtttcgtcgacggcacggaaaacccgcagggcgatgaaaatgtccgcgaagtcgccatcatccccgaaggaaaacccgatgcgggcggcagctatgtcctgctgcaaaaatacctgcacgatttgaaaaaatgggatgccgtccccgtcgccgaacaggaggcctcggtcggacgcggcaaggaaaccgacgacgaattcggccgcgatgtccgcctgcccgattcgcacctcggccgcgtcaacctgaaagaaaacggagtcggcctgaaaatcgtccgccgcagcctgcccttcggcaaaatcagcggcgaacacggtttgatgtttaccgcatactgccgcacgctgcacaatatcgaagcgcaattattgagtatgttcggcgatacggacggcaaaaccgacctgctgctccgacacctctccgccgccgtttcgggcggatactactacgcgccgtctgtcgaacgcctgcaaaacctctaa

SEQ ID NO: 44960 - DNA, 2112 bp, Neisseria meningitidis
ttgttgcccttacttttggcatcttgtattggcggcaatttcggcgtgcagcctgttgtcgaatcaacgccgaccgcgtaccccgtcactttcaagtctaaggacgttcccacttcgccccctgccaaaccttctatagaaaccacgccggtcaatcaacctgccgtcggtgcggcaatgcggctgccaaggcggaatatcgcaacttttgataaaaatggtaatgaaattcccgatagtaagcaggcagaggagtatctgccgctcaaagaggaggatatcctgtttttagacggtacgccgcaagaacaggccgacaaacttaaaaagaaaatcaacgaacggtatcctgatgtgaaggttatcacatcgacaaatgaagatgcaaaatataattatcggtttgtccgtgcgggctatgtgtttaccagggggggaggatacgataatgaaaaagaaaagactcctgatggtaaggagtttgttaaccgatttagttatgacggttttgtatattattcaggagaacatccgtctcaatccctgccgcgtactgaaaccgtgcaatattccggtaattggcagtttgttaccgatgccaagcgttggcggacacaaaatgatggtggcggtataaatttggggtttagtcacttttacggcaacgatatcggtgcaacctcttatgccgctagggatgtcgacgacagggaaaaacatcctgccaaatatacggtagatttcggtaacaaaaccctgacgggcgagctgattaaaaaccaatatgtcaaacccaatgagcagcaaaaaccgctgatcatttacaacattactgcaaaattggacggcaaccgctttaccggcagtgccagtgtcaatcctaaattgaagacaaactattcggacaaggaatatttgtttttccatgccgatgccgatcagcggcttgagggcggttttttcggcgataacggagaagagcttgccggacggtttatcagcaacgacaacagcgtattcggcgtattcgcaggcaaacaaaaaacagacgcatcaaacgcatcagatacaaaacctgccctgtcgtctggaaaacacaccaaaatcttggattctctaaaaatttccgttgacgaggcaagtgataacaatgcccgcccgtttgccatttcccctatgcccgattttggtcatcctgacaaacttcttgtcgaagggcgtgaaattcctttggtaaacaaagaacaaaccatcgagcttgccgacggcaggaaaatgatcgtccgtgcttgttgcgattttctgacctatgtgaaactcggacggataaaaaccgaacgcccggcaagtaaaccaaaggcggaagataaaggggaggatgaagagggtgcaggcgttgataacggcgaagaaggcgaagacgaagccgtagaagacgaaggcagcgaagaagacgaagtttccgaaggtgataacggtgaaaacgaagaagaaatcgccgaagaagaaaccgaagaagaagttgaagaacccgaagaagaagttgaagaacccgaagaagaattgccggcagaagaaggcaacggcggttcaggcagcatcctgcccactccggaagcctctaaaggcagggacatcgaccttttcctgaaaggtatccgcacggcggaagccgacattccaaaaaacggaacggcgcattataccggcacttgggaagcgcgtatcggcgtatcggatagtggtacgtccattcaaaaggatagctatgcgaatcaaggggcaaaagcagaatttaccgttgatttcgaagcgaagacggtgtccggaatgctgacagaaaaaaatgatacaacccccgctttttatattgaaaaaggtgtgattgacggtaacggtttccacgctttggcgcatactcgggagaacggtattgacctttctgggcagggttcgactaacccgaagaacttcaaagccgacaatcttcttgtaacaggcggcttttatggcccgcaggcggcagaattgggcggtaatattatcgacagcgaccggaaattcggtgcggtatttggggcgaaaaaagatgacaaggaggcaacacgatga

SEQ ID NO: 44961 - DNA, 252 bp, Neisseria meningitidis; identical to SEQ ID NO: 37103

SEQ ID NO: 44962 - DNA, 1092 bp, Neisseria meningitidis
atgagtttgaaatgcggcatcgtcggtttgcccaacgtcggcaaatccaccctttttaacgcgctgacccaatcgggtatcgaagcggcaaactatcctttctgtaccatcgaacccaacgtcggcatcgtcgaagtccccgatccgcgtatggccgaattggcaaaaatcgtcaatccgcaaaaaatgcagcctgccatcgtcgaatttgtcgatattgccggtttggttgcaggcgcgagcaaaggcgagggcttgggcaaccagttccttgccaacatccgcgaaaccgatgcgattgtgaatgtcgtgcgctgctttgacgacgacaacatcgtccacgttgcaggccgcgtcgatccgattgccgacatcgaaaccatcggcacagagttggcacttgccgacctggcaagtgtggaaaaagccatcgtccgcgaagaaaaacgcgcccgttcaggcgacaaagacgcgcaaaagctggtcgatttgtgcaaaaaactgctgccgcatctggacgaaggcaaacccgtgcgttccttcggtttggacgcggaagaacgcgcgatgctcaaaccgctgttcctgctgaccgccaaaccggcgatgtatgtgggcaacgtcgccgaagacggttttgaaaacaatccgcacctcgaacgcctgaaagaattggcggcaaaagaaaacgcccccgtcgtcgccgtttgcgccgcaatggaaagcgaaatcgccgaattggaagacgacgaaaaagccgagttcctcgccgaaatgggcttggaagaaccgggcctgaaccgcctgatccgtgccggctacgaccttttggggctgcaaacctactttaccgccggcgtgaaagaagtccgcgcttggacgatacacaaaggcgacaccgccccgcaagccgccggcgtgattcacaccgactttgagcgcggcttcatccgcgcccaagtcatttcttacgacgactttgtctcgctcggcggcgaagccaaagccaaagaagccggcaaaatgcgtgtggaaggcaaggaatacgtcgtgcaggatggggatgtgatgcactttttgtttaacgtgtaa

SEQ ID NO: 44963 - DNA, 735 bp, Neisseria meningitidis
atgacgacacgccaaatcatcctcgataccgaaaccaccggtctgtatgccgacggcggcgaccgcttggtcgagtttgccggtttggaaatggtcaaccgccaaatgaccgacaaaaacctgcacctctatgtccaccccgagcgcgatatgcccgaagaggcggcacgcgtccacggcttgacgatacaggttttggaagggaaaaacgcgccgccgtttgcagaggtcggcaggcagattgccgatttcctgcgcggtgcggaactgattatccacaatgccaaattcgacgtgggcttcctcaatatggagttccgccggatggggttgccgaccgttgaggaactcggctgtaccgttaccgataccctggcgatggcgcgcgaaatgttccccgggcagaaagccagcctggatgccttgtgcaaccgtttttccgtcgaccgcagcaagcgcgtcctgcacggcgcattgatcgactgcgaacttttgggcgaagtctatcttgctatgacgcggcggcagttcgacctgatgggtgcggccgcagaggaaaaaatggaaaccaaacccgtggtgcataccgaaaccaaacgcagcggcaaactgaaagtcatcagggcggacgaaaacgagttggcggaacacgggcaatatttggacggcttgggcgaagcctgtatctggcgcaaggaagccgtgccgtctgaaaacggcgggacggacgcatga

SEQ ID NO: 44964 - DNA, 774 bp, Neisseria meningitidis; identical to SEQ ID NO: 40828

SEQ ID NO: 44965 - DNA, 834 bp, Neisseria meningitidis; identical to SEQ ID NO: 39098

SEQ ID NO: 44966 - DNA, 381 bp, Neisseria meningitidis
atgaatatcaggtttttcgcactgaccgtgccggttttgtctctggcggcctgtgccgtgccggagacgtatgatggcggcggacgcgggcatatgccgcccgttcaaaaccaagcccgcccggcagattttcgggcattttcctgcgagaacggtttgtctgtgcgcgtccgccgtttggacggcggcagaatcgcgttgcggttggacggcaggcgtgccgtcctctcttccgacgttgccgcatccggcgaacgctataccgccgaacacggtttgttcggaaacggaaccgagtggcaccagaaaggcggcgaagcctttttcggctttaccgatgcctacggcaattcggtcgaaacttcctgccgcgcccgttaa

SEQ ID NO: 44967 - DNA, 315 bp, Neisseria meningitidis; identical to SEQ ID NO: 38226

SEQ ID NO: 44968 - DNA, 951 bp, Neisseria meningitidis
atgaaattacaacaattgaaatacgccttagaagtttaccagcacaacctgaacgtttccgaagcggccgaagccttgtttacttcgcaacccggcatctccaaacaaatcaaattgctggaagaagaaatcggcattcagatttttatccgcagcggcaagcgcgtggtttcggtctcgcagccgggcaaggtggttttggatattgcggaacgtattttacgcgatgtacagaacattaaaaatatcggcagcgagtttaccggacaggacagcggttcgctgacggttgccacgacgcatactcaggcacgctatgccctacccttgattgttgccgattttgtgaaacgctatccgaaagtcaacctgaccatcaaacaggggagccctgccgccatcgcacgtatggttacctcaggcgaggcggacttggcgattgttacggaacggatagacgaccatcccgaactgggaaaacttccctgctatgactggactcatgcggttatcgtaccgaacgaccaccccttgctcgaatgcagaaaccccctccgcattgaagatttggcgaggtttccgctgattacttatgaatttgcattcaatgcgggcagcagcatcgcgcgggcattttccaaagcccgtttggaacagccggatgtcgcattggcggcggcggatacggacgtattgaagacttatgtgcgcttgggtttgggcgtgggactgatggcgaaaatggcgtacaacccggatacggacggcgatttgcagcttgtggatgcggcacacctgttcgagccgtcgccgacgtggattgctttgcgcagcgatacttatttgcgcggatatgcctacgactttatccaagcgtttgcgccgcacctgacacgcgagaaggtggataggattctgtacacgcccatcagcgaggatttttcgatttag

SEQ ID NO: 44969 - DNA, 693 bp, Neisseria meningitidis; identical to SEQ ID NO: 39567

SEQ ID NO: 44970 - DNA, 213 bp, Neisseria meningitidis; identical to SEQ ID NO: 41375

SEQ ID NO: 44971 - DNA, 1362 bp, Neisseria meningitidis
atgctgaaaaaagttttaatcgccaaccgaggcgaaatcgcattacgcgtactccgtgcctgccgcgaaatgggcattgccaccgtcgccgtgcattccgaggccgacaaagacagcctgcacgtcaaactcgccgacgaatccgtgtgcatcggccctgccgcttccgcgcaaagctacctcaacgtccccgccattatcgccgccgccgaagtaagctgcgcggacgctgtccacccgggctacggtttccttgccgaaaacgccgatttcgccgaacaggtcgagcagtccggctttacctttatcggcccgaaacccgacaccatccgcctgatgggcgacaaagtatccgccaaacacgccatgatcgaagcgggcgtgccttgtgttcccggctctgacggcgcattgcccgacgacggcgaagaaatcctcaaaatcgccgataaagtcggttatcctgtcattatcaaagcctctggcggcggcggcggtcgcggtatgcgcgtggtcgagaaaaaagaagacctcctccaatctgtcgaaatgaccaaggcagaagcaggcgcggcattcggcaacccgatggtttacatggaacgctatttgcaacgtccgcgccacgtcgaaatccaagtgattgccgacgaacacggcaacgccgtctaccttgccgaacgcgactgttcgctacaacgccgccaccaaaaagtcatcgaggaagcaccggctccgttcatcactgaaaaagaacgcgccaaaatcggcaacgcctgtgccgacgcctgcaaacgcatcggctatcgtggcgcaggtacgtttgaattcctgtacgaagacggcgaatttttctttatcgagatgaatacgcgcgttcaggttgagcatccggttaccgagctcatcaccggcgtggacattgtgcaggagcaactccgcatcgcatccggcctgccgctgcaatacaagcagaaagacatcaaaatcgaaggccacgcgtttgagtgccgtatcaacgccgaagacccatacaacttcatccccagcccgggcccgattgaaagctgccacctgcccggcggcttcggtatccgcgtcgacagccacatttaccaaggctaccgcatcccgccttactacgacagcctgatcggcaaaatctgcgtacacggcaaaacgcgtgaacaggcaatggcgaaaatgcgcgtcgcactcgccgagctggcggtaaccggcatcaaaaccaatacgccgcttcaccgcgacttgttcaacgacccaggtttccaaaaaggcggcgtcagcatccactatttggaacactggctggaagatcgcaaagccaaacaggacaaataa

SEQ ID NO: 44972 - DNA, 2106 bp, Neisseria meningitidis
atggctcgtaagaccccgatcagcctgtaccgtaacatcggtatttccgcccatatcgatgcgggtaaaaccacgacgacagaacgtattttgttctatactggtttgacccacaagctgggcgaagtgcatgacggtgcggctactaccgactacatggaacaagagcaagagcgcggtattaccattacctccgctgccgttacttcctactggtccggtatggcgaaacaattccccgagcaccgcttcaacatcatcgacaccccgggacacgttgactttaccgtagaggtagagcgttctatgcgtgtattggacggcgcggtaatggtttactgcgcggtgggcggtgttcaaccccaatctgaaaccgtatggcggcaagccaacaaataccaagtgccgcgcttggcgtttgtcaataaaatggaccgtcagggtgccaacttcttccgcgttgtcgagcaaatgaaaacccgtttgcgcgcaaaccctgtacctatcgtcattccggttggtgcggaagacaacttcagcggtgtggttgatttgttgaaaatgaaatccatcatttggaatgaagccgataaaggtacaacctttacctatggcgatattcctgccgaattggtcgaaactgccgaagaatggcgtcaaaatatgattgaagccgcagccgaagccagcgaagaactgatggacaaatacttaggcggcgacgagctgaccgaagaagaaatcgtaggcgcgttgcgtcaacgtactttggcaggcgaaattcagcctatgctgtgtggttctgcatttaaaaacaaaggtgttcaacgtatgttggacgcagttgtagaattgctgccagctcctaccgatattcctccggttcaaggtgtcaacccgaataccgaggaagccgacagccgtcaagccagcgatgaagagaaattctctgcattggcgttcaaaatgttgaacgacaaatacgtcggtcagctgacctttatccgcgtttactcaggcgtagtaaaatccggcgataccgtattgaactccgtaaaaggcactcgcgaacgtatcggtcgtttggtacaaatgactgccgcagaccgtactgaaatcgaagaagtacgcgccggcgacatcgcagccgctattggtctgaaagacgttactaccggtgaaaccttgtgtgcggaaagcgcgccgattatcttggaacgtatggaattccccgagccggtaatccatattgccgttgagccgaaaaccaaagccgaccaagagaaaatgggtatcgccctgaaccgcttggctaaagaagacccttctttccgtgtccgtacagacgaagaatccggtcaaaccattatttccggtatgggtgagctgcacttggaaattattgttgaccgtatgaaacgcgaattcggtgtggaagcaaatatcggtgcacctcaagtggcttaccgtgaaactatccgcaaagccgttaaagctgaatacaaacacgcgaaacaatccggtggtaaaggtcaatatggtcacgttgtgattgaaatggaacctatggaaccggggggcgaaggttacgagtttatcgatgaaattaaaggtggcgtgattcctcgcgaattcattccgtctgtcgataaaggtatccgcgatacattgcctaacggtatcgttgccggctatcctgtagttgatgtacgtatccgtctggtattcggttcttaccatgatgtcgactcttcccaattggcatttgaattggccgcttctcaagcgtttaaagaaggtatgcgtcaagcatctcctgccctgcttgagccgattatggcagttgaagtggaaactccggaagaatacatgggcgacgtaatgggcgacttgaaccgccgtcgcggtgttgtattgggtatggatgatgacggtatcggcggtaaaaaagtccgtgccgaagtacctctggcagaaatgttcggttattcgaccgacctgcgttctgcaacccaaggccgcgctacttactctatggagttcaagaaatattctgaagctcctgcccacatagctgctgctgtaactgaagcccgtaaaggctaa

SEQ ID NO: 44973 - DNA, 858 bp, Neisseria meningitidis; identical to SEQ ID NO: 43095

SEQ ID NO: 44974 - DNA, 657 bp, Neisseria meningitidis; identical to SEQ ID NO: 39384

SEQ ID NO: 44975 - DNA, 567 bp, Neisseria meningitidis
atgtccgccctcctccccatcatcaaccgcctgattctgcaaagcccggacagccgctcggaacttgccgcctttgcaggcaaaacactgaccctgaacattgccgggctgaaactggcgggacgcatcacggaagacggtttgctctcggcgggaaacggctttgcagacaccgaaattaccttccgcaacagcgcggtacagaaaatcctccaaggcggcgaacccggggcgggcgacatcgggctcgaaggcgacctcatcctcggcatcgcggtactgtccctgctcggcagcctgcgttcccgcgcatcggacgaattggcacggattttcggcacgcaggcagacatcggcagccgtgccgccgacatcggacacggcatcaaacaaatcggcaggaacatcgccgaacaaatcggcggattttcccgcgaatccgagtccgcaaacatcggcaacgaagcccttgccgactgcctcgacgaaataagcagactgcgcgacggcgtggaacgcctcaacgaacgcctcgaccggctcgaacgcgacatttggatagactaa

SEQ ID NO: 44976 - DNA, 1011 bp, Neisseria meningitidis
atgagcaaaaaacgagttctgaccggcgtaaccaccaccggcatcccgcatctgggcaactacgtcggtgctatccgccccgccgtccgcgcggcgcaaaaccctgataccgaatccttcctcttcctcgccgattaccacggtatcatcaaatgccacgagccggagatgattcaccaatccacccaagccgttgccgccacttggcttgcctgcggactcgaccccgagcgcaccaccttctaccgccaaagcgacattcccgaagtgatggaattgaactggattctgacctgtatcaccgccaagggtttgatgaaccgcgcccacgcctacaaagccgccgtgcaggcaaattcagaaaacaatcaggaagatcccgatttcggcgtggaaatgggtttgttcagctatccgattctgatgaccgccgacatccttatgttcaacgccaacgaagtgcccgtcgggcgcgaccaaatccaacacgtcgaaatggcgcgcgacatcgccggtcgcttcaatcaccgcttccgagaactctttaccctgcccgaagtgaaaatcgacgaaaacgtcgaactcttggtcggtttggacggacgcaaaatgtccaaatcctacggcaacaccattccgctttgggaaaacgacaaaaaaacccaaaaatcggtcaacaaaatcatcaccaatatgaaagagccgggcgagccgaaacagcccgacgaaagcccattgtttgaaatctacaaagccttctccacgccgtctgaaacggtggaatttacgaaaatgcttgccgacggcttggcttggggcgaggcaaaaaaacttttggcggcgaaaatcaacgccgaactcgccgaaccgcgcgaacgctacaacgagctgaccgccgacccttcgcaaatcgaagagattttgcaggcaggcgcgcaaaaagcgcgtaaagaagcacgcgaattgttggacaaagtacgcgatgcggtcggcatccgcccgttgaaataa

SEQ ID NO: 44977 - DNA, 405 bp, Neisseria meningitidis
atggccgaagggcaggatgtcgatttggtagagatttccccaactgctaaaccgcctgtgtgcaaactgatggattacggtaaatacaaataccaacaagccaagaagcgcgacgaagccaagaaaaatcaaaagcaggtgcaaatcaaggaaatcaaattccgtccgggtacggatgagggcgattatcaaatcaagatgcgcaacattaaccgcttccttgccgacggcgataaagtcaaagtgacattgcgttttcgcggccgtgaaatggctcaccagcaactcggcgcgcaacttttggaacgtgtaaaagaagatttggctgaagtggcgcaaatcgagtcctttcccaaaatggaaggtcgccaaatggtgatgatgattgcgccgaagaaaaaataa

SEQ ID NO: 44978 - DNA, 540 bp, Neisseria meningitidis; identical to SEQ ID NO: 44661

SEQ ID NO: 44979 - DNA, 1248 bp, Neisseria meningitidis; identical to SEQ ID NO: 39099

SEQ ID NO: 44980 - DNA, 891 bp, Neisseria meningitidis
atgctgagctattgtggcgtattaagcgaagaaaagttttctagatactatcggtacggcgtacagaataataaaatcctgcaatatattgccaatcgtgaaagaaatgccctaaatttcatccaagcatttagtgaaaaattattaaaagacagtggtatttatccaaaatttgccgatttttttgcccagcctaataaaaatacgtttgaaagtatgaaaacggcgtttaccgatcttgttatccaaaacacacccaaaaataccgaagtagaagttcgccgtatttttaccaaaatcattaatccattggcttataaacataatacttttggtacaagaaaagggagtatttccaatacccccattacattagacgagctttattacaatcgcctaaactggcgagataaaggcaaagaaaaatcgctcactcgcaaagaagctcaaactctatttgccgatagtgcaaatgccgcaaatttgaattatttagttaataaagccacaaaatttgtcaaaacgctacacaaaaccagcgaagttcaacgttttgatcccacagaagccaatcaggcacatcatatttttatggcaagcgaatttcctgatttagcatcgctgcctgaaaatctgatttgcctgacaccaaaccagcatttcaatttagcacacccaagcaataaaaccaccgttattgacaaacattaccagcgtatttgcctgatggcgaaattggacagtattgagcaagataaccgtgctaatacaggaaattacgattaccatgaatttattcatgtactcaatacaggatttaatacagatcagtttgatgtttctatgagttacgaaacattgaagcatcgtattttaatgtttgatttttaa

SEQ ID NO: 44981 - DNA, 1986 bp, Neisseria meningitidis
atggctaaaaacaaccaatacagcgaatccagcatcaccgtcctcaaaggtttggaaccggtcaaagaacgtcccggtatgtacacccgcaccgacagcccgacccatatctgccaagaagtcatcgacaacgcggcggacgaggcgttgggcggtttcgctacggcaatcgacgtgcaaattcatgaagacggttcgctttccgtacgcgacaacggccgcggtattcccgtcggtctgcaccctgaagaaggcgtacccgtagtcgaactcgtgttcacccgtctgcacgcgggcggcaagttcaacaaaaaagacggcggcagcgcgtatgccttttcaggcggcctgcacggcgtgggcgtatccgtgaccaacgccctttccacccgccttgaggtaacggtcaaacgcgaaggcaaaatccaccgcatcgtgtttgccggcggcgacgtggtcgaaccgttggcacaagtgggcaaatgcgccgtcaaagacagcggcaccgaagtgcgcgtctggccggacggcaaatattttgaaagcccgaattacagcatccccgaactcgaacgcctgctgcgcgccaaagccgtgctgctgccgggcgtgcgcgtttccctgacccgtccggtcaaaggcgaagacgaagcgcacacccaaacctggcattaccccgacggtctgaaaagctatctgaccgacctgattgccgacgcgcaggaagccgtgcctatcttctcttgcgaaaactacatttcagacggccacaacggcgatttcagcatcggcgaaggcgccgcgtttgccctgacctggctggaagaaggctcgtgcgccaacgaaagctacgtcaacctcatccccaccccgctgggcggcacgcacgaagcgggcttgaaacaagccgtgttcaacgccgtcagcaacttcatcaatctgcacaaccttttaccacgcggcgtgaaagtgcaaagcgacgacgtgttcggcaaaaccgcctttgtcctctctgcccgtgtcctcgacccgcagttccaaggtcagaccaaagacaaactgaccaaccgcgacgcgctgaaactcgttgctaccgtatcgggcgaccctttggaattgtggctgaaccaaaacgtggacttcggcaaaaaaatcgccgaactcgccatccgtcaggcacaggcgcggatgcgttcggttaaaaagattgaaaagaaaaaaggcagcggcgtcgccgtcctgcccggtaagctgaccgactgcgaaagcgaagacatccgcgaaaacgaactcttcctcgtcgaaggcgattccgccggcggctccgccaaactcgcccgcgacaaagccacccaagccatcctgcccctgcgcggcaaagtgctcaacagctttgaagtccaccccgaccagctcttcggcaacgccgaaatccacgacatttcagttgccatcggcgtcgatccgcacggcatcaacgaccatcccgatttaagcggcctgcgttacggcaaaatcgccatcctgtccgatgccgacgtggacggctcgcatattcaagttttgctgctgaccctgttctaccgccacttcccgaaactggtcgctgacggacacatctacgtcgcccagccgccgctgttccgcgtagatgtcaacgcacaaggtaaaagcaaacccgcccgcaaattctacgccctcgaccaaaacgaacttgacggcattttagagcggctgcaaaaagaaggcgttaaagaaactgcttattccatcagccgtttcaaaggtttgggtgagatgaacccagaccagctcaaagatactaccatgcaccccgacacccgccgcctgttgcaggtacaaatccccgaaggcgcggatgacgagacgcgcgacatcttcgtcaaactgatgggcaaaggcgaagccgccgcccgccgtgcctggatggagcgcgaaggcgatacggcggaactcgatatttga

SEQ ID NO: 44982 - DNA, 1131 bp, Neisseria meningitidis
atgattaaaatcagcacccgcttcgatgccggctcggtcgtcgtcaaagacctgaccgatccttccaacatccgcctcgccctgcgtcccgacaacgcctccgattttgcacaatggttctacttccggctgcaaggcgcggcatatcaaaactgcatcatgcattttgacaatgcggcagaagccgcctacccgaaaggctgggaaggctatcaggcgtgtgcctcatacgaccgccgcaactggttccgcgtaccgacttcctacgaaaacggcgtactgaccgtcaaccataccccgctgtccaatagcgtgtactacgcctatttcgaaccctattccgaagaacagcacctcaacctcctcggcgacgcgcaaggcagcggcctgtgccgcatcgacgacttgggcagcaccgtgcaagggcgcgacatcaatctgctgaccataggcaaccaggtcgaaagcgatttgaaaatctggattaccgcccgccagcatccaggcgaaaccatggcggaatggtttgtcgaggggctgctcggcagactgctcgaccatcaggatgcaaccgcgcgcaccctgctcgatcgcgccacgttctatatcgtccccaacatgaaccccgacggttcggcactgggcaaccttcgcaccaacgccgccggtgtgaacctcaaccgcgaatgggaaaatccgactgtggaaaaaagccccgaagtgttcttcgtgcgtgaaagaatgctggaaaccggcgtggatttgtttttggatatccacggcgacgaagggttgccctttgtctttgttgcaggaactgaaggcgtgccgaactacaatccgcgcatttccgcgttggaaacacagttcaaaaccgcccttttgaacgccagccccgatttccaagatgaatacggttacgaaaaagatgcgcccggtcaggcaaacgtgaccttggcaacaaactgggtcggcaaccgtttcaactgccttgcctatacgttggaaatgccgttcaaagacaatgccaacctgcccgacgacgacttcgggtggaacggtcaacgttcgttgcgcttgggcgaagcggtgctttccgccattttgaacgtcgccggcgatttgcgttga

SEQ ID NO: 44983 - DNA, 474 bp, Neisseria meningitidis
atgaaaaaattattggcggccgtgatgatggcaggtttggcaggcgcggtttccgccgccggagtccacgttgaggacggctgggcgcgcaccaccgtcgaaggtatgaaaataggcggcgcgttcatgaaaatccacaacgacgaagccaaacaagactttttgctcggcggaagcagccccgttgccgaccgcgtcgaagtgcatacccacatcaacgacaacggcgtgatgcggatgcgcgaagtcaaaggcggcgtgcctttggaggcgaaatccgttaccgaactcaagcccggcagctatcacgtgatgtttatgggtttgaaaaaacaattaaaagagggcgacaagattcccgttaccctgaaatttaaaaacgccaaagcgcaaaccgtccaactggaagtcaaaatcgcgccgatgtcggcaatggaccacggtcatcaccacggcgaagcgcatcagcactaa

SEQ ID NO: 44984 - DNA, 933 bp, Neisseria meningitidis
atgaagcagaaccgcacctttaccttccccgattttcgcaccgtttacagctatgcgcctttatatcggctgcaacatttaaaatacacattgcgaaaatttttcggaaaaaaagaaatttacgccttcgagcagtttgtcaacgcctcccctatccgtcaggggctgttcctccactgcccgcaaaatgcctatccgctgctgcgcgaatttgttgacaggcgttttaactgcaaacgccgtttagatgcgatgacggcagattttctcatggcggaaaaactgttcggcacagacatcctgcaccaaatggaagactaccgcttccatttggtcttggcgcacctttcagacggcatcagcttgtggctcaaccgcaacgacaactgcgtcgaagaaggcgcgtggtctttatctttgcgcgacgaagcaggcaaccggctgtatatggcgactttcgcctttgtcggcacacacctgctgacagcctccgtacaagggcctgcgggtgaagaagccaaagacactgtccgccgcataaccaaacaacttcacggcttgcgtccccaacaactgatggtaaccgcactgcaatatttcgccgccgtactcggcttggacggcgcaatgggcattgcacaaaaacatcaggtcaaactgcgctggaaacttaaaaagcgcgtcaaaatgaattacgacgcattctggcaggaatacggcgcaagtttggaacgggacggctactggcatctcccccaaacccccgcccgcaaagaccttaccgacatcgaaagcaaaaaacgctcgatgtaccgcaagcgttatgaaatgctggacaacatggttgcagagatgaaggacggtctgaaaacagaagcacgcggcatttcagacggcatccaaacggaaaaaccgctccgccggacagcctga

SEQ ID NO: 44985 - DNA, 600 bp, Neisseria meningitidis
atgagcgagttggataacatccttgcccataaccggcagtttgtcgagtcgggcgaatatgaaaaatactttaccgacaaataccccgaacgcgggctggcagttttgtcctgtatggatgcgcggattatcgggctgctgcccgacgcgttgggtttgaaaaacggcgatgccaagctgattaaaaatgccggcgcgctggttacgcacccgtggggttcggtgatgcggagccttttggttgccgtgtttgaactgaaggtcagagagattatggtcatcgcccatcacgattgcggtatgcaggggctgaatgccgaagaattcctcgggcgcgtccgggaaagccggattcccgaagaccgtatcgaaaccctgcgttatgccggtatcgacctcgacggctggctgaccggtttcgacaacgtcgaagacagcgtgcgccacacggtggaccttatccgtaaccatccgctgatgccgcgccatatcgccgttcacggactggtcatccatcccgttaccggcaaactgacgctggttgtggacggcagtgtttcagacggcatggacttatcggaaggaatggaaacatcatga

SEQ ID NO: 44986 - DNA, 513 bp, Neisseria meningitidis; identical to SEQ ID NO: 38230

SEQ ID NO: 44987 - DNA, 2190 bp, Neisseria meningitidis
atgatctaccaccgcatcgccgtaaacgtgccgctttcagacggccttttgacttattcacattccgagccgctgccgcagggaacgcgggtgcttgtgcctttctgcaacaagaccgtggtcgggattgtgtgggaaacggatattgcgccggatatggatgcggcgcggattttgggcgttcagacgaccttttcggacgaaccgccgctgcccgaaagctggcgtgatttgttggcgtttacgtcgcgttattaccactatccgacggggcaggcggtgtttgccgcactgccgcaaggtttgaaggaaacgcgcgcggtggaaatgccgcagccgccattgttttatgctttaaacgaagcaggcagggcgcaaacgccgccgccggcgcggttcaacaaaaaagcggctttgtgggacgcgctgctgtcgggcgaaatgacgatggcagcgttgaagcaggtaaacgcgcaggcggtgaaattaatcgaaaattgggcggaacagggttggattgaaacgacggaagcggcgaaacccgttttaaggtcgtaccacgggcaggcttcgcactctgaatttgtgttgaatgccaaccagcagaaagcttccgatgccattcagacggcattgggacgcttccggccgtttctgctgtacggcatcaccggcagcggcaagaccgaagtgtatttcgatgcgatggcgaaagtgttggctcaggggcggcaggtgttgtttctgttgcccgaaatcaacctcacgccgcagcttttgaagcgggtgggaaatcgttttgccgacgtgccgaccgccgtgttgcacagtcagatggcggcaggcaggcgcacgcaggattatttgcgcgcgatgttggggcaggcgaaattggtcatcggcacgaggctggcggtgttcacgcctttgcctgatgtcgggctgattgtggtcgatgaggaacacgacggctcgtttaaacaagacaacgaattgcgctaccacgcccgcgatttggcggtgtggcgggcgaagcagagcggctgcccgatcatattgggcagcgcgaccccgagtttggaaagctggcacaaggcgcaaagcggcgcgtaccgcctgctgcaactgaccgagcgcgcccataccgctgcgcaactgccgcaagtggacatcctcaacgtaggccgtctgaaactcgacaacggtttctcgccgcaagccttgcagcttttgaaacagaattttgaagcgggcggtatgtcgttggtgtacctcaaccgtcgcggtttcgcgccagcgctgttttgcagcgactgcggccataccttcggctgcccgaactgctccgccaaaatggtgctgcaccaacgtgcccgccaactgcgctgccaccactgcgaccaccgcgaacccgtcccgttcaaatgccccgactgcggcaaccaagatctgaccgccgtcggacacggcacgcagcgcgtcgaagaaaccctgcgcgccttcctgcccaaggcagccgtcgtccgtgttgacagggacagcaccgcgcacaaaaacgactgggcggatttgtaccgccgcattgccgacaacgaaatcgacattctggtcggcacgcagatgctcgccaaagggcatgatttcgcgcggctcaacctcgttatcgtgttgaacgccgacggcagcctgtacagcgcggactttcgcgccccggaaaggctgttcgccgagctgatgcaggtgtccggcagggcggggcgcgccgacaaacccggcaaggtgttgatacagacccaactgcccgaacatcccgtcttcgccgccgtcaaagcgcaggattatgccgtgttcgccgaaaacgaattgaacgagcggcaaatgttcgcgatgccgcccttcggtttccagaccgccgtccgcgccgatgcgccgcgtgttgccgatgcgatggaatttctcaacgccgccaaagaaaccctcgccccgctgttgcccgaaagcgtttcccagtttggcgcggctccgatgctgatggtgcgccttgccgaacgcgaacgcgcgcaaatcttcctcgaatcaacatcccgacaagatttgcaccgagccgtgagtttgtgggtgcaggtgttgcagcaaaacagggacggcaaaatccgatggtcggtggatgtcgatccgcaggaggcttga

SEQ ID NO: 44988 - DNA, 939 bp, Neisseria meningitidis
atgagacgtaaaatgctaaacgtaccaaaaggcaattatgatggtatgaagggttttaccattattgaatttttggttgcgggcatgctcagtatgattgtcctgatggcggtcggatcgagttacttcacatcccggaaattaaatgatgcggcaaacgagcgtctttccgagcaacaggatttgcggaatgcggcaacattgattgtccgcgatgcaagaatggcggggagcttcggttgtttcaatatgtccgagcatcctgcaattgatgttatttccgatacgacgcaacaaaattctcctttttccttaaaaaggaacggtatagataaacttattcccatagcggaatcttcaaatatcaattatcagaattttttccagtttggtagcgcattgatttttcaatacggaatcgatgatgttaatgcaagcaccgcgactaccgtcgtcagcagctgtgccgtaatatcgaaaccgggcaagcaaatccctactttagaagatgcaaaaaaagaattgaagattccgcaggataaggagcaaaatggcaatatagcgcgtcaaaggcatgtggtcaatgcctatgcggtcggcaggattgccggtgaggaaggtttgttccgcttccaattggatgataagggcaagtggggtaatcctcagttgctcgtgaaaaaggttagacgtatgaaagtgcggtatatctatgttttcggctgtcctgaagatgacgatgccggcaaagaggaaacattcaaatatacggataaattcgacagctccacaaatgctgttacgcccgccggggtggaggttttattgagtagcggtactgataccaagattgccgcttcttcagacaattatatttatgcttaccgtatcgatgcgacaatacgcgggggaaatgtatgcgcaaacagaacactttga

SEQ ID NO: 44989 - DNA, 201 bp, Neisseria meningitidis; identical to SEQ ID NO: 39543

SEQ ID NO: 44990 - DNA, 864 bp, Neisseria meningitidis
atgaataacgctttcgcattacccgccatccaaagcggcaacggcagcctcgaacaatacatccacaccgtcaacagcatcccgatgctgtcccaggaagaagaaacccgcctcgccgaacgccggataaagggcgacctcaacgccgccaaacaactcatcctgtcccacctgcgcgtcgtcgtttccatcgcgcgcggctatgacggctacgggctgaatcaggcagacctgattcaggaaggcaatatcggactgatgaaggcggtcaaacgctacgagcccggtagaggcgcgcgtctgttttcatttgccgtacactggattaaagccgaaatccacgagtttattttgagaaactggcgtttggttcgcgttgccaccaccaaaccgcaacgcaagctgtttttcaatttacgcagtatgcgtaaaaacctcaacgccctgtctcccaaagaggcacaagacatcgccgacgatttgggtgtcaaactttccgaagttctggaaatggaacagcgcatgacgggacacgacatcgccatcatggcagacaacagcgacgacgaggacagtttcgcccccatcgactggcttgccgaccacgattccgaaccgagccggcaactatcgaaacaggcgcattacgccctgcaaacagaaggtttacaaaacgctttggcgcaactggatgacaggagccgccgtattgtggaaagccgctggcttcaagacgacggcgggctgacgctgcaccagcttgctgcagaatacggcgtctctgccgagcgcatccgccagattgaagcaaaagccatgcagaaactgcgtggtttcctgaccgaagaagccgaagcggtttga

SEQ ID NO: 44991 - DNA, 513 bp, Neisseria meningitidis
gtgatttccgcctttcagacggctgggacggcaatgactgacaacctaatacagatagcaacgccgatattgactgttatcggcgtttttgttgccgcttacggcatcatgaggaatacagaaaacgccaaaaagcgcgccaccatcgacatgatcatggccgaacgtaacaatgccgcccttcaagaagccataaccatagtaaacgggctggcaaaaacagacggatgcatactcgccacctatacatcggataccccggacaagaagaaagaccgtgaagccatactgacagttttaaaccagcgcgaatttgtctgtgcgggcgtattgggcggagcactgcacgagaaaatgtataaagatttcgaatactccatgctgttacgtgactgggacaacctaagcagcttcatttttgaaatacgccgtatcaggagcgcaccgacggcctttcaagaatttgaagccgtagcccgaaaatggaagaaaaagcctctgaaaaccaaatag

SEQ ID NO: 44992 - DNA, 1245 bp, Neisseria meningitidis
gtgattgcatcgctgacgggcgcggccgtgggcggcacgccggtagatgcgcaaaccggaggtgcggtcggacagaatgcggtggaaaacaacctctatctgacatcggaagccttaaagaaggacaagcagacagctcgtaaaatttattccgtcataaaagagcaagtcaagcatgaatgcagttccacaggaagaattaccgaatgtcgtcaaaatataggacgcattatcgaatttacccaagacaaacgctttgacagtaggtttaaggacttaaaaaaagaatccttatattacctaaataaacatcctgatttagtagcctcttatttgaaggctgaatacgaaaagctggatagggaagacaaaagtatcctgcaccgctacatctcacccggggctgaaatcgtttcgggcagtttgggggttgttctttcaggagtagccggaggcggatcttgtgccgagactttcggcttaggctgtgccgccgctttggttggtgtaacgtcttcctacgatcatgtcattactgggacgaaaaacttcggaaaaaaagccagcgagcaacgaccgacgattgcggttcaggccttgaagcagttggggctgtcggagcaggctgcggaatatgttcagttctctatagatttgttcagtgtgggtaaatcggggggcggtatacctaaggctaagcctgtgtttgatgcgaaaccgagatgggaggttgataggaagcttaataaattgacaactcgtgagcaggtggagaaaaatgttcaggaaacgagaagaaggagtcagagtagtcagtttaaagcccatgcgcaacgagaatgggaaaataaaacagggttagattttaatcattttataggtggtgatatcaataagaaaggcacagtaacaggagggcatagtctaacccgtggtgatgtacgggtgatacaacaaacctcggcacctgataaacatggggtttatcaagcgacagtggaaattaaaaagcctgatggaagttgggaggtgaaaacgaaaaaaggtgggaaagtgatgaccaagcacaccatgttcccaaaagattgggatgaggctagaattagggctgaagttacttcggcttgggagaaaagaaaggaattagaaggtcaaaaatggagaggtacaagtaaatctggtgttgaaatagaaggatttacggaacctaatcgaacagcttatccactttataatagtaaatga

SEQ ID NO: 44993 - DNA, 1104 bp, Neisseria meningitidis
atgagcgactacacgcagcagcttcaagataaaaaagaccaccttaaaaccctttttgcaggtttggatgttcctgagtgggaagtgtacgaatctccggacaaacattaccgtatgcgtgccgagttccgtatttggcacgaaggcggtgaaatgttttatgccatgtttgaaaaaggacaaaaggctggcggggcaagcctgatccgttgcgaccgttttgaagcggcttccgaagccgtcaaccgcctgatgccagaattgattgccgttgccgcccaatctgccgaactgagaaaccgttggtatgccgtcgaatttttgtctacgctcagcggggaaatgctggttaccatgatttaccacaaaaggcttgataatgagtggatgcaggcggcgcaagcgttacagcaacagttggatatttccgtcatcgggcggagcaggggacagaaaatagtcttaaaacaggactatgtaacggaaactttgaaggtcggcaaccgggatttccgttatcggcaaattgaaggcagttttacccaaccgaatgccgccgtgtgtcagaaaatgcttgaatgggcctgcggtgcagcagaaggattggatggggatttgctcgaactgtattgcggaaacggcaactttacgcttcctttatctgaaaagtttgaacgtgttttggcaaccgaaatctccaaaacctccgtcagcgcggcgcaatggaatatcgaagccaaccgcatcggcaacatcaaaatcgcccgtctgtctgctgaagaatttaccgaagcctataccggaaaacgtgagtttaaacgccttaaggatggcggtattgctttgacggattacgcattttccactattttcgtcgatccgccgcgtgccggtatcgatgaggaaactttgaagctggtgtcgcagtttgacaacatcatctacatttcctgcaatcccgaaacgctgcgtaccaatttggacaccttggcggaaacccatacggttgaacgtgccgccctgttcgatcaatttccgtttacgcaccatattgaaagcggtgtgctgttgaaaaagaaaatccttggaaaaagcaagaggtaa

SEQ ID NO: 44994 - DNA, 339 bp, Neisseria meningitidis
atgtcggatgaaagccctattatttttactgacagctgctgtgccaaagttgccgatttgattgccgaagaaaacaatcccgatttgaaattgcgggtttttgtcaatggcggcggctgttcgggtttccagtacggatttacttttgatgaaatcaaaaacgacgacgattttgaaattgagaaaaacggtttggtctttttggtcgatccgatgagctatcaatatctggtcggcgcggaaatcgactatacggaaagtttgcagggttcgcaattcgtcatccgcaatccgaatgcggaaacaacctgcggttgcggatcgtcgttttccgtatga

SEQ ID NO: 44995 - DNA, 1068 bp, Neisseria meningitidis; identical to SEQ ID NO: 39103

SEQ ID NO: 44996 - DNA, 702 bp, Neisseria meningitidis
atgacggaacctgcggccgaaggcggtaaagctgccaaggcgttaaaaaaatatctgattacgggcattttggtctggctgccgattgcggtaacggtttgggtggtttcctatatcgtttccgcgtccgatcagctcgtcaacctgctgccgaagcaatggcggccgcaatatgttttggggtttaatatcccggggctgggcgttatcgttgccattgccgtattgtttgtaaccggattgtttgccgcaaacgtattgggccggcagattcttgccgcgtgggacagcttgttggggcggattccggttgtgaagtccatctattcgagtgtgaaaaaagtatccgaatcgttgctgtccgacagcagccgttcgtttaaaacaccagtactcgtgccgtttccccaatcgggtatttggacaatcgcattcgtgtccggtcaggtgtcgaatgcggttaaggccgcattgccgaaggacggcgattatctttccgtgtatgttccgaccacgccgaatccgaccggcggttactatattatggtaaagaaaagcgatgtgcgcgaactcgatatgagcgtggacgaagcgttgaaatatgtgatttcgctgggtatggtcatccctgacgacctgcccgtcaaaacattggcaggacctatgccgtctgaaaaggcggatttgcccgaacaacaataa

SEQ ID NO: 44997 - DNA, 213 bp, Neisseria meningitidis; identical to SEQ ID NO: 38488

SEQ ID NO: 44998 - DNA, 822 bp, Neisseria meningitidis
atggctgttttaattaccggtgcttcggcaggattcggcgaagcgatgtgccgcgcgtttgtcggggcgggataccgcgttatcggtgcggcgcgtcgtgcggacaggcttcaggccttggcggatgaattgggtgctttgttttaccctttggaaatggacgtgtcgcgccgcgagtcggtggaaaacgccttaaacggcatccctgatgaattttccgacatcgactgcctcatcaacaatgccgggctggctttgggtctggacacggcggacaaggcggattttgaagattgggaaacaatgattcaaaccaatgttttgggtttgacgtttctaacgcgcaagattttgccgaatatggtggctcggggcggcggttatgtgatgaatttgggttcgattgcaggcaattatgcttatgccggcagcaacgtttacggggcgaccaaggcgtttgtgcgccagttcagcctgaatttgcgcgcggagttggcggataagaacatccgcgttaccaatatcgagccgggtttgtgcggcaatacggagttttccaacgtgcgcttcaaaggcgatgacgagaaggcagcaggcgtgtatgagggtgtggaatttatccgccccgaagatattgcggaaaccgcattgtggctgtaccgccggccggcgcatatgaatgtgaacacgattgaaattatgcccgtggcgcagacttttgcaggaatgaaggtgataaaaaaagccgtgccggaagtgcgggaagactttgaaaaacagagtatgtcgctgttttcccgcatcagatcttggttcaaatga

SEQ ID NO: 44999 - DNA, 4179 bp, Neisseria meningitidis
atgagctattcgtttaccgagaaaaaacgtatccgtaagagttttgcaaagcgggaaaatgttttggaagttcctttcttgctagcaacccaaattgattcttatgcgaagtttttgcagctggaaaatgcttttgacaaacgtaccgatgacggtctgcaggcagcatttaattctattttcccgattgtgagccataacggttatgcgcgattggagtttgtgcattacacattgggcgagcctttgttcgatattcccgaatgtcagttgcgcggaatcacttatgcagcccccttgcgcgcgcgtatccgtttggtgattttggataaggaagcatctaaaccgacggtaaaagaagttcgtgaaaacgaagtgtatatgggcgaaattccgttgatgaccccgagcggttcttttgtgattaacggcacagagcgtgtgattgtctcccagttgcaccgttcgcccggcgtattcttcgagcatgacaaaggtaagacgcactcttccggcaaattgttattctccgcccgcatcattccctaccgtggttcatggttggattttgaatttgatccgaaagatttgctgtatttccgtatcgaccgccgccgtaaaatgccggtaacgattttgttgaaggctttgggctacaacaatgagcaaatcttggatattttctacgacaaagaaacgttctatttgtcttcaaacggtgttcaaaccgatttggtcgcaggccgtctgaaaggcgaaactgccaaggtcgatatcttggataaagaaggcaatgtattggttgccaaaggtaagcgtattactgcgaaaaatatccgtgatattaccaatgcaggcctgacccgtttggatgtagaaccggaaagcctgctgggcaaagcattggctgccgatctgattgattcggaaaccggcgaggtattggcttctgccaatgatgaaattacagaagagttgttggccaaatttgatatcaacggcgtaaaagaaattacgaccctttacatcaatgagttggatcagggtgcttatatctccaataccttgcgcacggatgagactgccggccggcaggcggcgcgtgttgcgatttaccgtatgatgcgtccgggcgaaccgcccaccgaagaggcagtcgagcaattgtttaaccgcttgttcttcagtgaagacagctacgatttgtcccgcgtaggtcgtatgaaatttaatacgcgcacatacgaacaaaaactgtccgaagcccaacaaaactcttggtacggccgcctgctgaacgaaacgtttgccggtgctgccgaaaaaggcggttatgtcctgagcgtcgaagatattgtcgcctcgattgcgactttggtcgagttgcgtaacggccatggtgaagttgacgatatcgatcacttgggcaaccgccgagtacgttcggtaggcgagctgactgaaaaccaattccgcagcggtttggcccgtgtggaacgtgctgtaaaagaacgtttgaatcaggcggaatcagaaaacttgatgccgcacgatttgattaatgcaaaacctgtttctgccgctattaaagaattcttcggctccagccaattgagtcagtttatggatcagaccaaccccttgtctgaagtaacccataaacgccgcgtatctgcattgggtccgggcggtttgacccgcgaacgtgccggcttcgaggtacgggacgtgcatccgacccactacggccgcgtatgtccgattgaaacgcctgaaggtccgaacatcggtttgatcaactcattgtccgtttatgcgcgcaccaatgattacggtttcttggaaacgccttaccgccgcgttatcgacggcaaagtaaccgaggaaatcgattacttgtctgccatcgaagaaggccgctatgtgattgcacaggcgaatgccgatttggattcagatggcaatctgattggcgatttggttacctgtcgtgaaaaaggcgaaaccattatggcaacgcccgaccgcgtccaatatatggacgtggcaaccggccaggtggtatccgttgcggcatccctgattccgttcttggaacatgatgacgcgaaccgcgcattgatgggtgccaacatgcaacgtcaggcagtgccttgcttgcgtcctgaaaaaccgatggtcggtaccggtatcgagcgttccgttgccgttgactctgctactgcaatcgttgcccgccgaggcggcgtggtcgagtatgtcgatgccaaccgtgttgtgattcgtgtccatgacgacgaagcgactgccggcgaagtgggtgtcgatatttacaacttggttaaatttacccgttccaaccagtctaccaatatcaatcagcgtcctgccgtcaaagccggcgatgttttgcaacgcggcgatttggtggccgatggcgcgtccaccgatttgggcgaattggctttgggtcaaaatatgaccatcgccttcatgccgtggaacggttacaactacgaagactcgattctgatttccgaaaaagtggctgcggatgatcgttacacttcgattcacattgaggaattgaatgtcgttgcccgcgataccaagctgggtgcggaagacattacccgcgatattccgaacttgtccgagcgtatgcaaaaccgcttggacgaatccggtatcgtttacatcggtgcagaagtagaagccggcgatgtgttggtaggcaaagtaacgcctaaaggcgaaacccaactgacgccggaagaaaaactgttgcgcgccatcttcggcgaaaaagcgtctgacgtaaaagatacttcactgcgtatgcctaccggtatgagcggtacggttatcgacgttcaagtcttcactcgtgaaggtattcaacgcgacaaacgcgcccaatccattatcgattccgagttgaaacgctaccgtttggatttgaacgaccaattgcgtattttcgacaacgacgcattcgaccgtatcgaacgtatgattgtgggtcaaaaagccaatggtggtccgatgaagctggctaaaggcagcgaaattactaccgaatatttggcgggtctgccgagcaggcacgattggttcgatatccgtctgaccgatgaagatttggccaagcagttggaactgattaaagtgagcctgcaacaaaaacgcgaagaagcggacgagttatacgaaatcaagaagaaaaaactgacccaaggcgacgaattgcaacccggcgtacaaaaaatggtgaaagtttttatcgccatcaaacgccgtctgcaagccggcgacaaaatggcgggccgccacggtaacaaaggcgtggtatcgcgcattctgccagtggaagacatgccttacatggcggacggccgtccggtagacatcgtactgaacccattgggcgtaccttcccgtatgaacatcggtcagattttggaagttcacttgggttgggcagcaaaaggtatcggcgagcgtatcgaccgtatgctgaaagagcaacgcaaagcaggcgagttgcgcgagttcttgaacagactctacaacggcagcggtaagaaagaagatttggacagcctgacagatgaagaaatcatcgaattggcttccaacctgcgtaaaggtgcatctttcgcttctcctgtattcgacggtgcgaaagagtctgaaatccgcgaaatgttgaacttggcttacccaagcgaagatcctgaggttgagaaactgggcttcaacgacagtaaaactcaaatcacgctgtatgacggccgttcaggcgaagcatttgatcgcaaggttacagtcggtgtgatgcactatctgaaactgcaccacttggttgacgaaaaaatgcacgcccgttctaccggtccatacagtctggttacccaacagcctttgggcggtaaagctcagttcggtggccaacgtttcggtgagatggaggtttgggcattggaagcatacggtgcggcatacacgctgcaagagatgctgactgtgaagtctgatgacgtgaacggccgtaccaaaatgtacgagaacatcgtcaaaggcgaacacaaaatcgatgccggtatgcccgagtccttcaacgtattggttaaagagattcgttcactgggcttggatatcgatttggaacgctactaa

SEQ ID NO: 45000 - DNA, 1815 bp, Neisseria meningitidis
atgagtgaacacgatatgcagaacacaaatccgccattaccgcctctgccgcccgaaatcacgcagctcctgtcggggctggacgcggcacaatgggcgtggctgtccggctacgcttgggcaaaagcaggaaacggggcatccgcagggctgcccgcgcttcagacggcattgccggcggcagaacctttttccgtaaccgtcctttccgcctcgcaaaccggcaatgcgaaatccgttgccgacaaagcgtcggacagcctggaagccgccggcatccaagtcaggcgcgccgaactgaaagactataaggcgaaaaacatcgccgacgaacgccgcctgctgctggttacgtccacccagggcgaaggcgaaccgccggaagaagccgtcgtgctgcacaaactgctgaacggcaaaaaagccccgaaattggacaaactccaatttgccgtactgggtttgggcgacagttcctatccgaatttctgccgggcgggcaaagatttcgaccggcgttttgaagaattgggcgcaaaacgcctgctcgaacgcgttgatgcggatttggactttgccgccgccgcagacggatggacaggccgcattgtcgcgcgcttaaaagaagaagccgcaaaaaaccgggcaacgcccgcgccgcagacaacgccccccgccggccttcagacggcaccggatggcaggtactgcaaggcagacccctttcccgccgccctgctggccaatcagaaaatcaccgcccgccaatccgataaagacgtgcgccacatcgaaatcgatttgagcggttcggatttgcactacctcccgggcgacgcgctcggcgtttggtttgacaacgatccggcactggtcagggaaatcctagacctgctcggcatcgatccggcaacggaaatacaggcgggcggaaaaaccctgccggttgcctccgcactgttatcccattttgaactcacgcaaaacacccccgcctttgtcaaaggctatgccccgttcgccgatgatgacgaactcgaccgtattgctgccgacaacgccgttttgcaaggctttgtgcaaagcacgccgattgccgatgtgctgcaccgcttcccggcaaaactgacggcggaacaattcgccggcctactgcgcccgcttgcgccgcgcctgtattcgatttcctcgtcgcaggcggaagtgggggacgaagtgcacctgaccgtcggcgcggtgcgtttcgaacacgaagggcgcgccagggcgggcggcgcatcgggtttccttgccgaccggctggaagaggacggcacggtgcgcgtgtttgtggaacgcaacgacggcttcaggctgcccgaagacagccgcaagccgattgtgatgatcggctcgggcaccggcgtcgcaccgttccgcgccttcgtccaacaacgtgccgcagaaaatgcggaaggcaaaaactggctgattttcggcaatccgcattttgcccgtgattttctctatcaaaccgaatggcagcagtttgccaaagacggtttcctgcacaggtacgatttcgcctggtcccgcgatcaggaagaaaaaatctatgtgcaggacaaaatccgcgaacaggcggaaggactttggcaatggctgcaggaaggcgcgcatatctatgtgtgcggcgatgcggcaaaaatggcaaaagacgtggaagccgccttgctggatgtgattatcggggcaggacatttggacgaagagggcgcagaagaatatttggatatgctgcgcgaagaaaaacgctatcagcgtgatgtttattga

SEQ ID NO: 45001 - DNA, 324 bp, Neisseria meningitidis; identical to SEQ ID NO: 38148

SEQ ID NO: 45002 - DNA, 207 bp, Neisseria meningitidis; identical to SEQ ID NO: 38607

SEQ ID NO: 45003 - DNA, 594 bp, Neisseria meningitidis; identical to SEQ ID NO: 37729

SEQ ID NO: 45004 - DNA, 966 bp, Neisseria meningitidis
gtgaaaccgcgtttttattgggcagcctgcgccgtcctgctgaccgcctgttcgcccgaacctgccgccgaaaaaactgtatccgccgcatccgcatctgccgccacactgaccgtgccgaccgcgcggggcgatgccgttgtgccgaagaatcccgaacgcgtcgccgtgtacgactgggcggcgttggatacgctgaccgaattgggcgtgaatgtgggcgcaaccaccgcgccggtgcgcgtggattatttgcagcctgcatttgacaaggcggcaacggtggggacgctgttcgagcccgattacgaagccctgcaccgctacaatcctcagcttgtcattaccggcgggccgggcgcggaagcatatgaacagttggcgaaaaacgcgaccaccatagatctgacggtggacaacggcaatatccgcaccagcggcgaaaagcagatggagaccttggcgcggattttcggcaaggaagcgcgcgcggcggaattgaaggcgcagattgacgcgctgttcgcccaaacgcgcgaagccgccaaaggcaaaggacgcgggctggtgctgtcggttacgggtaacaaggtgtccgccttcggcacgcggtcgcggttggcaagttggatacacggcgacatcggcctaccgcctgtagacgaatctttacgcaacgaggggcacgggcagcctgtttccttcgaatacatcaaagagaaaaaccccgattggattttcatcatcgaccgtaccgccgccatcgggcaggaagggccggcggctgtcgaagtattggataacgcgctggtacgcggcacgaacgcttggaagcgcaagcaaatcatcgtcatgcctgccgcgaactacattgtcgcgggcggctcgcggcagttgattcaggcggcggagcagttgaaggaggcgtttgaaaaggcagaacccgttgcggcggggaaagagtag

SEQ ID NO: 45005 - DNA, 681 bp, Neisseria meningitidis
atgacttataccattacccccatcggcaccgcccgatcgccctacaaacagaaattcggcatcgcccgccagcccggtttagtctccgccgcagaagtatgcatcgagctgaatcccgaatttaccgcagacagcgtgcgcgggctggaagatttcgattatgtgtggataagttttatttttcacggcgtattggatgaaggctgggcacaaatggtgcgcccaccacggctcggcggcaaacaaaaaatgggcgtattcgccacgcgcagcccccaccgccccaaccatctcggactatcactcttaaaactcaaccgcatcgaaaccggcaaacccgtccgcctttattgcagcggcgcagacctgctcgacggcacgccgattgtggacatcaagccttatatcccctttgtcgaatccaaacccgatgccgcatctggtttcgtcagcggcaaacccgtagagttggaagtcgtttggcaggaaaacatcggcgcggaaaatttatctgcaaacaccaaaaaccttatcagccaaagcattgcccaagatccgcgccccgcctatcagaatattcccgaacggatttatgtgatgaatattgcggattacgaaatcagatttcaaatcgaggaaaaccgtgcaaccgttattgatctttccccaaccccgctttaa

SEQ ID NO: 45006 - DNA, 252 bp, Neisseria meningitidis; identical to SEQ ID NO: 41525

SEQ ID NO: 45007 - DNA, 1638 bp, Neisseria meningitidis
atggattttaaaagactcacggcgtttttcgccatcgcgctggtgattatgatcggctgggaaaagatgttccccactccgaagcccgtccccgcgccccaacaggcagcacaacaacaggccgtaaccgcttccgccgaagccgcgctcgcgcccgcaacgccgattaccgtaacgaccgacacggttcaagccgtcattgatgaaaaaagcggcgacctgcgccggctgaccctgctcaaatacaaagcaaccggcgacgaaaataaaccgttcatcctgtttggcgacggcaaagaatacacctacgtcgcccaatccgaacttttggacgcgcagggcaacaacattctaaaaggcatcggctttagcgcaccgaaaaaacagtacagcttggaaggcgacaaagttgaagtccgcctgagcgcgcctgaaacacgcggtctgaaaatcgacaaagtttatactttcaccaaaggcagctatctggtcaacgtccgcttcgacatcgccaacggcagcggtcaaaccgccaacctgagcgcggactaccgcatcgtccgcgaccacagcgaacccgagggtcaaggttactttacccactcttacgtcggccctgttgtttatacccctgaaggcaacttccaaaaagtcagcttttccgacttggacgacgatgccaaatccggcaaatccgaggccgaatacatccgcaaaaccccgaccggctggctcggcatgattgaacaccacttcatgtccacctggattctccaacctaaaggcagacaaagcgtttgcgccgcaggcgagtgcaacatcgacatcaaacgccgcaacgacaagctgtacagcaccagcgtcagcgtgcctttagccgccatccaaaacggcgcgaaagccgaagcctccatcaacctctacgccggcccgcagaccacatccgtcatcgcaaacatcgccgacaacctgcaactggccaaagactacggcaaagtacactggttcgcctccccgctcttctggctcctgaaccaactgcacaacatcatcggcaactggggctgggcgattatcgttttaaccatcatcgtcaaagccgtactgtatccattgaccaacgcctcttaccgctctatggcgaaaatgcgtgccgccgcacccaaactgcaagccatcaaagagaaatacggcgacgaccgtatggcgcaacaacaggcgatgatgcagctttacacagacgagaaaatcaacccgctgggcggctgcctgcctatgctgttgcaaatccccgtcttcatcggattgtattgggcattgttcgcctccgtagaattgcgccaggcaccttggctgggttggattaccgacctcagccgcgccgacccctactacatcctgcccatcattatggcggcaacgatgttcgcccaaacttatctgaacccgccgccgaccgacccgatgcaggcgaaaatgatgaaaatcatgccgttggttttctccgtcatgttcttcttcttccctgccggtctggtattgtactgggtagtcaacaacctcctgaccatcgcccagcaatggcacatcaaccgcagcatcgaaaaacaacgcgcccaaggcgaagtcgtttcctaa

SEQ ID NO: 45008 - DNA, 1377 bp, Neisseria meningitidis
atgaaacacatccacattatcggtatcggcggcacgtttatgggtgggattgccgccattgccaaagaagcagggtttgaagtcagcggttgcgatgcgaagatgtatccgccgatgagcacccagctcgaagccttgggcataggcgtgtatgaaggcttcgacaccgcgcagttggacgaatttaaagccgacgtttacgttatcggcaatgtcgccaagcgcgggatggatgtggttgaagcgattttgaaccgtgggctgccttatatttccggcccgcaatggctggctgaaaacgtgctgcaccatcattgggtactcggcgtggcggggacgcacggcaaaacgaccaccgcgtctatgctcgcgtgggttttggaatatgccggactcgcaccgggcttccttatcggcggcgtaccggaaaatttcggcgtttccgcccgcctgccgcaaacgccgcgccaagacccgaacagccaatcgccgtttttcgttatcgaagccgacgaatacgacaccgcgtttttcgacaaacgctccaaattcgtgcattaccgtccgcgtaccgccgtgttgaacaatctggaattcgaccacgccgacatctttgccgacttgggcgcgatacagacccagttccactacctcgtgcgtaccgtgccgtctgaaggcttaatcgtctgcaacggacggcagcaaagcctgcaagatactttggacaaaggctgctggacgccggtggaaaaattcggcacggaacacggctggcaggccggcgaagccaatgccgacggctcgttcgacgtgttgctcgacggcaaaacggccggacgcgtcaaatgggatttgatgggcaggcacaaccgcatgaacgcgctcgccgtcatcgccgccgcgcgtcatgccggtgtcggcattcagacggcctgcgaagccttgggcgcgtttaaaaacgtcaaacgccgcatggaaatcaaaggcacggcaaacggcatcaccgtttacgacgacttcgcccaccacccgaccgccatcgaaaccacgattcaaggtttgcgccaacgtatcggcggcgcgcgtatcctcgccgtcctcgagccgcgctccaacaccatgaaactcggcacgatgaagtccgccctgcctgtaagcctcaaagaagccgaccaagtgttctgctacgccggtggcgtggactggaacgtcgccgaagccctcgcgcctttgggcggcaggctgcacgtcggcaaagacttcgatgccttcgttgccgaaatcgtgaaaaacgccgaagcaggcgaccatattttggtgatgagcaacggcggtttcggcggaatacacggaaagctgctggacgctttgagatag

SEQ ID NO: 45009 - DNA, 1302 bp, Neisseria meningitidis
atgaccgaatccgtccgcctccccgtcgcccgtctcaaaccttccaccgtcgccctgcccggctccaaaagcatcagcaaccgcaccctgctgcttgccgccttgtccgacaatgcttgcgaaatccattccctgctcaaatccgacgataccgaccgtatgctcgaagcactcgataaactcggcgttcaaatcgaatatcttgccgaagaccgtctgaaagtgcacggcacaggcggacgcttccccaaccgcactgccgatttgtttttgggcaacgcgggcacggcgttccgtccgctgactgccgcacttgccgttttgggcggcgattatcatctgcacggcgtgcctcgtatgcacgaacgccccatcggcgatttggccgatgcgctgcggattgccggcgccgatgtcgaatatctcggcaaggaacactatccgccgcttcatatcggcaaacgtcaagacaacggcgaacgcgtgattccgattaaaggcaatgtgtccagccagtttctgaccgcccttttaatggcgttgccgctgaccgggcaggcgtttgaaatccgtatggtcggcgaattgatttccaagccctatatcgacattactttaaaactgatggcgcaattcggcgtacaggttgccaatgaaaactaccgcgtcttcaaaattcccgccgatgcgcactaccacgcgcccgaacacttgcacgtcgaaggcgatgcctccagcgcgtcctacttcctcgcagccggtttgattgctgccacgcccgtgcgcgtgaccggcatcggcgcaaacagcatacagggcgatgtcgcctttgcccgcgagctggaaaaaatcggggcggacgtggtttggggcgaaaacttcgtcgaagtttcacgcccgaaggaacgtgccgtccaatcctttgatttggatgcgaaccatatccccgatgccgccatgaccctcgccatcgtcgcgcttgctacagggcaaacctgcacgctgcgcaacatcggttcgtggcgcgtcaaagaaaccgaccgcatcgccgcgatggcaaacgagttgcgcaaactcggggcaaaagtcgtcgaagaagccgaagcaattcacatcaccccgcccaaaacgctgacacccgacgccgtcatcgacacgtacgacgaccaccgcatggcgatgtgtttctcgctggtttcgctgttgggcgtacccgtcgtcatcaacgatccgaaatgcacccataaaaccttcccgacttatttcgacgtgttctcttcactgaccgaaacaacggaataa

SEQ ID NO: 45010 - DNA, 1113 bp, Neisseria meningitidis
atgcaaaccgccgcccgccgctcgttcgattacgatatgcccctcattcaaacgccgacttccgcctgccaaatccgtcaggcgtgggcgaaggttgccgacacgcccgaccgcgaaacggcaggccgtctgaaagacgaaatcaaggctttgctgaaggagaaaaacgcggtcttggtggcgcattattatgttgatccgctgattcaggatttggctttggaaacgggcggatgcgtgggcgattcgctggaaatggcgcgctttggtgcggaacacgaagccgatacattagtggtggcgggcgtgcgtttcatgggcgagagcgcgaaaatcctctgccctgaaaaaacagtgctgatgcctgatttggaggcggaatgttctttggatttgggttgcccggaagaggcgttttcggcgttttgcgaccaacaccccgaccgcacggtggtggtgtacgccaacacttccgccgccgtgaaagcgcgtgccgactgggtggtaacgtcttcagtggcgttggaaatcgtgtcgtatctgaaatcgcgcggcgagaagctgatttggggacccgaccgccacctcggcgactacatctgccgcgaaacgggcgcggatatgctgttgtggcagggttcgtgcatcgtccacaacgaatttaaagggcaggagctggcggcgttgaaagcggaacatcccgacgcggtggtgctggttcatcctgaatcgccgcaaagcgtcatcgaactgggcgacgtggtcggctcgaccagcaaactgctcaaggccgccgtatcgcgtcctgaaaaaaaattcatcgtggcgaccgatttgggcatcctgcacgaaatgcaaaagcaggcgcccgacaaagaatttatcgccgcgccgacggcgggcaacggtggaagctgtaaaagctgcgcgttctgcccgtggatggcgatgaattcgctgggcggcatcaaatacgccctgacaagcggacgtaacgaaatcctgttggacaggaagctgggcgaagccgccaaactgcctttgcagcgtatgctcgacttcgcggcaggactcaaacgcggggatgtgttcaacggcatgggtcccgcctga

SEQ ID NO: 45011 - DNA, 228 bp, Neisseria meningitidis
atgtttaaaagcatcaaaacaaatgttcgtaaagcgggtgcggttttagcactggctaccctttccgctccgacttgggcggacggcatcgaaggcgttgcaaacggcatcgtaaccgaaatcaataaagttgttccggtcgtttcaagcgtcggcgtcgccctgctctccgtttatgtgctggttaaagcattccgcctcgtctccggctttgttgctggtcgttaa

SEQ ID NO: 45012 - DNA, 996 bp, Neisseria meningitidis
atgaaaacatctatccgatacgcactgcttgccgcagccctgaccgccgcaacccccgcgctggcagacattaccgtgtacaacggccaacacaaagaagcggcacaagccgttgcagatgcctttacccgggctaccggcatcaaagtcaaactcaacagcgccaaaggcgaccagcttgccggtcaaatcaaagaagaaggcagccgaagccccgccgacgtattctattccgaacaaatcccggcactcgccaccctttccgcagccaacctcctagagcccctgcccgcctccaccatcaacgaaacacgcggcaagggcgtgccggttgccgccaaaaaagactgggtggcactgagcggacgttcgcgcgtcgtcgtttacgacacccgcaaactgtctgaaaaagatttggaaaaatccgtcctgaattacgccacgccgaaatggaaaaaccgcatcggttacgcccccacttccggcgcgttcttggaacaggttgtcgccatcgtcaaactgaaaggcgaagcggccgcattgaaatggctcaaaggtctgaaagaatacggcaagccttacgctaaaaactccgtcgcccttcaagcggttgaaaacggcgaaatcgatgccgccctcatcaacaactactactggcacgcttttgcgcgtgaaaaaggcgtacaaaatgtccacacccgcctgaatttcgtccgccacagagatcccggcgcactcgttacctattccggcgcagccgtgttaaaatcctcccaaaacaaggatgaggcgaaaaaattcgtcgccttcctcgccagcaaggaaggacagcgcgccctgaccgccgtccgtgccgaatatcctttgaatccgcacgtggtatccactttcaatttggaacccatcgccaagttggaagcaccccaagtgtccgccaccactgtttccgaaaaagaacacgccacccggctgcttgagcaagccggtatgaaataa

SEQ ID NO: 45013 - DNA, 1902 bp, Neisseria meningitidis
atgactacgccaaaaaaaaccgccaaaacttccggcaacgaagcgcgcgaacttgccgacttgagcgaagacatcggtatccgcttcaaatatccgaactcggaacgcgtgtatctgcaaggcagccgcgacgacatccgcgtgcctttgcgtgaaatccgtcaggacgacacctatacggcgcaaggcgcggaagccaacccgccgattcccgtctatgacaccagcggcgtgtacggcgatccagcggcacacatcgacctgaaacaaggcctgccgcacatccgcaccgcatggctgaacgaacgcggcgataccgaaatcctgcccaagctctccagcgaatacggcatcgaacgcgcacacgatccgaaaaccgcccatctgcgcttcaaccaaatcacccgcccgcgccgcgcgaaaagcggcggcaacgttacccagcttcactacgcgcgccgcggcatcatcacgcccgaaatggagtttgtcgccatacgcgaacgtttaaaattagacgaattgtcccaaaaatcggaatacgccaaactcttgaaacagcacgcagggcaaagtttcggcgcgaatatcccgacccatcccgaccaaatcacgcctgaattcgtgcgccgagaaattgccgccggacgcgcgattatccccgccaacatcaaccaccccgaactcgaaccgatgattatcggccgcaacttccgcgtcaaaatcaacggcaacttgggcaattccgccgtcacttccagcctgaccgaagaagtcgaaaaaatggtgtggtcgctgcgttggggcgcggacacgattatggatttgtccaccggcgcgcacatccatgaaacgcgcgaatggattatccgcaacgcgcccgtccccatcggcaccgtgccgatttaccaagcgttggaaaaaaccggcggcattgccgaagatttgacttgggatttgttccgcgacaccttaatcgagcaggcggaacaaggcgtggactatttcaccatacacgcaggcgtgttgctgcgttatgtgccgatgactgccgaccgcctcaccggcatcgtatcgcgcggcggttcgattatggcgaaatggtgtttggcacatcatcgggaaaacttcctttacacgcatttcgacgaaatctgcgaaattatgaaggcgtatgacgtatcgttcagcctcggcgacggtttgcgtcccggctgcattgccgatgccaacgacgaatcccaattcgccgagctgcacaccttgggcgaattgacctccaaagcgtggaaacacgacgtacaggtgatgatcgaaggtcccggccatgtgccgctgcaacgcgtcaaagaaaatatgaccgaagagttgcaacactgttttgaagcaccgttttacaccctcggcccgctcgttaccgacatcgcccccggctacgaccacatcacctcgggcataggcgctgccaatatcggctggtacggcacggcgatgctctgttacgttacccccaaagaacatttgggactgcccgacaaagaagacgtgcgtaccggcatcatcacctacaaactcgccgcccacgccgccgacctcgccaaaggctggccgggcgcacagttgcgcgacaacgccctgagcaaggcgcgtttcgagttccgctggcgcgaccagttccgcctaagcctcgaccccgaacgcgccgaaagcttccacgacgaaaccctgcccgccgaaggcgcgaaaatcgcccacttctgttcgatgtgcggccccaaattctgctcgatgaaaatcacgcaggaagtgcgcgactacgccgacaagcaaaaagcccaacggcagggcatggaggaaaaagcggtcgagttcgtcaaaaaaggagcgaagatttacagctaa

SEQ ID NO: 45014 - DNA, 2157 bp, Neisseria meningitidis
atgtcagttttccgcatcaatatgaccgccgccacggttttggcagcactttcgtcttcggtttttgccgcacaaacggcggatttggaaaccgtccatattaagggtcagcgttcgtacaacgcgattgccaccgagaaaaacggcgattacagctcgtttgccgccaccgtcggcacaaaaatccccgcttctttgcgcgaaattccgcaatctgtcagcatcatcaccaatcaacaggtcaaagaccgcaatgttgatacgtttgaccagttggcacgcaaaacgcccggcctgcgcgtgttgagcaacgacgacggacgctcttcggtttacgcgcgcggttacgaatacagcgaatacaacatcgacggcctgcccgcgcagatgcagagtatcaacggcacgctgcccaatctgtttgccttcgaccgtgtggaagtgatgcgcgggccgagcggcttgttcgacagcagcggcgagatgggcggcatcgtaaatctggtgtgcaaacgcccggccaaagcgttccaaggtcatgctgcggcagggttcggtacgcacaaacaatataaagccgaggcggacgtatcgggcagcctcaattcagacggcagcgtgcgcggccgcgtgatggcgcagaccgtcggcgcgtctccgcgtcccgccgagaaaaacaaccggcacgaaaccttctacgcggcggcggattgggacatcaaccccgatacggttttgggcgcgggctatctttaccagcaacgccacctcgcgccgtacaacggcttgccagccgatgccaataacaaattaccgtccctgccgcaacacgtatttgtcggcgcggattggaacaaatttaaaatgaacagccacgacgtgtttgccgatttgaaacattacttcggcaacggcggctacggcaaagtcggtatgcgctattccgaccgcgatgccgactccaactatgcctttgccggcagcaagctgggcatgaaaaccctggcaggccgcccgggctgcaatacggctgacgacaaagcctgcgcggtgggtttgggtacagaaatcaaacaaaaagccctcgcgtttgacgccagctacagcaggcctttccgcttgggcaatacggccaacgaatttgtcatcggcgccgattacaaccgcttccgcagcaccaacgaacaaggccgtactactttatatgcacgcggcggcctggctttaaacgagttccgcagcataccgcaggttgatttgattgccaacgcgcgcaaaggcgtgcgcggttacagccataccgtcgctaccgaaaacctcgacgaattcggcatttacggcaaatccaccttccatcctgccgacgggctgtcgcttatcggcggcggacgtttgggacactataaaatcgagttgggcgaaggcaaaaccctgcacaaagccagcaaaaccaagttcaccggctacgcaggcgcggtttacgacttgaacgacaacaacagcctctacctgagcctgtcccagctctacacaccgcaaaccaacctcgatgccgacggcaagctgctcaaaccgcgccaaggcaaccagtttgaagtcggttacaaaggcagctacatggacgaccgcctcaatgcccgagtttcgttctaccgcatgaaagacaaaaacgccgccgcaccgttgaacccgaacaacaaaaaaacccgttacgccgcattgggcaaacgcgtgatggaaggcgttgagaccgaaatcagcggcgcggttacaccgaaatggcaaatccatgcaggttacagctatctgcacagccaaatcaaaaccgcctccaattcacgcgacgacggcatcttcctattgatgcccaaacacagcgcaaacctgtggacgacttaccaagttacgcccgagctgaccatcggcggcggcgtgaacgcgatgagcggcattacttcatctgcagggatgcatgcaggcggttatgccacgttcgatgcgatggcggcataccgcttcacgcccaagctgaagctgcaaatcaacgccgacaacatcttcaaccgccattactacgcccgcgtcggcggcgcgaacacctttaacattcccggttcggagcgcagcctgacggcaaacctgcgttacagtttttaa

SEQ ID NO: 45015 - DNA, 411 bp, Neisseria meningitidis; identical to SEQ ID NO: 39808

SEQ ID NO: 45016 - DNA, 1794 bp, Neisseria meningitidis
atgaaaaatatccgaaatttctccatcattgcccacatcgaccacggcaaatcgacgcttgccgaccgcttcatccaatattgcggcggtttggatttgcgcgaaatgagtacgcaggtactcgattccatggacatcgaaaaagagcgcggcattaccatcaaagcgcaaaccgccgcgctcaactataaagcgcgcgacgggcaggtgtatcagcttaatttgattgacacgccgggacacgtcgacttctcttacgaagtttcccgttcgctgtcggcttgcgaaggcgcgcttttggtcgttgacgcgtcgcagggcgtggaagcgcaaaccgtagcgaactgttacaccgcgattgatttgggcgtggaggttgtgcctgttttgaacaaaatcgacctgccagccgccgaccccgaacgcgtggagcaggaaattgaagacatcatcggcatcgatgcggtcggcgcggtgcagtgttccgccaaaagcggcatcggcgtggaagacgttttggaagaaatcgttgccaaaattcctgcgccgaccggcgatgaaaacgcgccgctgcaagccgtgattgtcgattcgtggtttgacaactacgtcggcgtggtcatgctgattcgagtgaaaaacggcaccatcaaactgaaagacaaagtgcgctttatgagcaccaaggcggaaacgcaggttgagcagttgggcgtattcacaccgaaatcggttcaaaaacaagaactcaaagccggcgaagtgggctttttgattaccggcgtaaaagaattgggtcaggcgaaagtcggcgatacggttacactggttgccaaccctgccactgagccgctgcccggcttccaagaagtacaaagccaagtattcgccggactttatcccgtggaaagccacgactacgaagccttgcgcgacgctttggaaaaattgcagcttaacgacgcttcgttgaaattcgagcctgaagtttcccaggcattgggcttcggcttccgttgcggcttcttgggtctgttgcacttggaaatcgtgcaggaacgcttggagcgcgagttcgatatggatttgattaccaccgcgccgacggtggtttacgaagtcgtgttgaaaagcggcgaaaaaatcgaagttgaaaacccgtccaaactgcccgacatcggcagcatcgaaaccatactcgagccgattattaccgcgaccatccttgtgccgcaggaatacgtcggcaacgtcatgactttgtgtaaccaaaagcgcggcgttcaggtcaatatgcagtacatgggccgccaagtcatgctgacttacgatttgcccatgaacgaagtcgtcatggacttcttcgacaaactcaaatccacttcgcgcggttatgcttcgttggactaccatttcaaagagttccaaccgtctgatttgattaagctggatattatggtcaacggcgaaaaagtcgatgcattaagcctgattgtgcaccgtcaaagcgcggttcaccgaggccgcgagctggcatcaaaaatgcgcgagctgattccgcgccaaatgttcgacatcgccgtccaagccgccatcggcagccagattatcgcccgcgaaaacgtcaaagccctgcgtaaaaacgttttggcgaaatgttacggcggcgatattacgcgtaagaaaaaactgcttgaaaaacaaaaggcaggtaaacgccgtatgaaacaagtgggcaatgtggaaattccgcaaagcgcgttcttggcgattttgcaggtgagcgacaaataa

SEQ ID NO: 45017 - DNA, 579 bp, Neisseria meningitidis; identical to SEQ ID NO: 39087

SEQ ID NO: 45018 - DNA, 1407 bp, Neisseria meningitidis
atggaaaaaaacaccctatccgcccgcgcaccatccccttggctgccgcttctgctggcaattgccatttttatgcagatgttggatgcgaccattttaaataccgcactgcctgaaattgccgccgacctgaatgagtcgccattgaacatgcagctggcggttatttcctacacgctgacggttgccctgctgattcctttgagcggttatttggcggacaggttcggaacgaaaaaagtctttttcggttcgattgccgtttttatgctcggatcggcattgtgcgccgcatcgggttcgctgtttgaattgacgctttcccgtgtcgttcagggcatcggcggttcgatgctggttccgataccgcgtctgaccatcttgcgtgtgtacgacaagtccaagctgctcaacgccatcaattatgcggttatgcccgcattaatcggaccggttttagggcctttggcgggcggttatctggtcgaatacgcttcgtggcactggattttcctgctcaacctgcccatcggtcttctgggtttcatattgggacgcaacatcatgcccgatattaaaggcagcaatatctctttagacttcaaaggctatctgattttttctgccgccgcgtgcctcttgttactttcggcagaaagcctgtcgcacgcgctgcctccgtattttgcactgttgccgctgtgcggcggactgctgtttgcacgccgttatttccgacatatgaaaaccgcgtccaaaccgatttattccgccgacctgtttctgatacgcactttccgtctaggactggcgggcaatctgttcagccgtctcggcatcagctcgattccttttctgatgcccctgatgtttcaagtcgctttcggcttcggcgcaagcctgtcgggttggctggtcgcccccgtcgccctgtcttcgctgctggtcaaaccgctgattgcaccgctcatgaaacgtttcggctaccgcacggtactgctttggaacaccaagctgcttgccgccttcatcatgctgctcgccctacctgatggaaactcgccgctgtggatttggattttcctctcgctggcgatcggcgcgtgcaactccctacagttttctgccatgaacacactgaccctcgccgatttgcgcccgcaacagaccggcagcggcaacagcctgatggcggtcaaccaacagcttgccatcagcatgggcattgttgtcggcgcattaatccttaaaaactggacatttctgataccggcttcttcaggtctgcattccgccttccgtatgaccctgctcagtatcggcggcattacccttgcctcgtcgttggttttcaagcgtctgcacgtttcagacggtgcaaacctgacacggaacacaccgtcctaa

SEQ ID NO: 45019 - DNA, 1296 bp, Neisseria meningitidis; identical to SEQ ID NO: 39281

SEQ ID NO: 45020 - DNA, 1275 bp, Neisseria meningitidis
atgaaaacactgcaagactggctctcccatttggaaaccgcccacagcggtggcttgatcgatatgggcttggaacgcgtaggcgaagtgaaaaaacggatgaagctcacgccgcaatgccccgtcgtcgttgtcgcgggaacaaacggcaaaggttcggtctgcgcctacctgacacagatttacaaacaggcaggctttaaagtcggtacgctgaccagcccgcatttattgcgttacaacgaacgcatcgccgtcaacgccgaacccgtttcggacgatacgattattgcctctttcgagcgcatcgaagcggcgcgcggcgaaatatcgctgacttattttgaattcaatgccttggcggccgtcgacatcttcatgcgcgaacaggttgacgtgatgatattggaagtcggcttgggcggacgcttggacgcggtcaacgcatttgacggcgattgcgcggtggttaccagcgtggatttggaccatcaggcgtttttgggcgatacggtcgagcaggtcggctttgaaaaagcaggcgtgttccgcagcggcaaacccgccatctgcggtcaaaaccccgcgcccgcatcattggtcgcacacgccgaagccataggcgcgaaactgctgatggtgcagcgcgatttcgagtttcacgcgctggaaaacatccaatggaactaccgcttccatccgcaacattcagacgaccccacgcgcaaccgcaatgccctgcccttccccgcattgcgtggcgcataccagctttccaacgccgcctgcacgttgaccgtattggaatgcttgaacgacaaattgcctgtggacatcggcgccatcaaacgcggattgctgctggttgaaaatcccggccgcttccaagtcctgcccggccgtccgctgaccgttttggatgtcggacacaatccccacgctgcccgcgccctgcgccgcagcctgattaatttggcgtttgcgcaaaaacgcaccgccgtattcagtatgctgtccgacaaagacatagacggcgtgttggaaatcgttaaagaccagtttgacgagtggtatatcgcaccgttggatgtaccgcgcggcatgacgctcgagagcctgcaaaacaaactgcacgaacacggcatcgaaaacatacagacattcgccgccgtccgcgaagcataccgggcggcagcctcaaaagcgggcgagaacgacagaatcgtcgttttcggctcatttcataccgttgccgatgtcatgtcggtactttaa

SEQ ID NO: 45021 - DNA, 1044 bp, Neisseria meningitidis
atgattccggccacctacaccctgtcccaaatcaccgcgcggctcggcggcgaatggcgcggcgaggacatttccgttaccgccgtgcgcccgctcgcagacgcgcaggcggaacacatcagcttccttgccaatccgaaatacaaagccgaagtccacgacagcagcgcgggcgcggtcatcgtttccgccaaagcggcagacggatttgaagggcgcaacctgattgtcgccgacgacccctatctctatttcgccaaagtcgcccgcctgttttcacccgtcgtcaaagcgcgcggcggcatccatccgaccgccgtcgtcgaaccgggcgccaccgttcccgcaagctgcgaaatcggcgcgaacgcctacatcggcgcaaacaccgtgctcggcgaaggctgccgcatcttggcaaacgccgtcgtccaacacgattgcaaactgggcgacgaagtcgtcatgcaccccaacgccgtcgtttattacggctgcacactgggcagacgcgtcgaaatccacagcggcgcggtcatcggcgcggacggtttcggactcgcttttgccggcgattcatggtttaaaatcccgcaaaccggcgcggtaacgctgggcgacgacgtggaaatcggctcgaacaccaacatcgaccggggcgcgatgagcgacaccaccgtcggcaacggcaccaaaatcgacaaccaagtccaaatcggacacaactgcaaaatcggttcgcacaccgtcatcgccgccaaaaccggcatctcaggcagcgtaaccataggcagctactgcatcatcggcggcggcgtcggtacggtcggacacatcgaaatcgccgacaaaaccaccatcggcggcggcacgtccgtcacccacagcattaccgaaagcggcaaacacctcgccggcatcttcccgatgtccacccataaagaatgggcgcgcaacgctgtttacatccaccgcttaagcgaaatgaacaaacgcctcaaaacgctggaacagcagctttcagacggcaaagacacgcaataa

SEQ ID NO: 45022 - DNA, 348 bp, Neisseria meningitidis
atgaatcgaacaaaaacgtgtaaggagtgcggagagattaagccgataacggcgtttccgaaaaacggctttgacagaaaaaccgggctgcaaaaatacgcgccccgatgccgccgatgccacaacgtctatcagcaagatttgctgtacaagcgccgtgaaaaagaatttgagcaaaagcaggcagtcatggcggcattgatggacgccgagcgcgaaaaagaggaggcagctaaggcgcgaagcatcgcacaaagcctcgtgttggcgaaagcagcctgtccgatactgcacatcggcttgtggactgagccgttatttatccctcaagggatgttacagatttaa

SEQ ID NO: 45023 - DNA, 861 bp, Neisseria meningitidis
atgtctgatttgtctgtattgtcgccgtttgccgtgcctttggcagcggtgttcgggctgctggtcggcagtttcttaaatgtcgtcatttaccgcgtgccggtcatgatggaacgcggctggacggtatttgccaaagaatatttaaacctgccgctgaccgaagaggaaagccgtaccttcaacctgatgaaaccggattcctgctgtcccaaatgccgcgtgccgatacgcgcgtggcagaacatcccgattgtcagctacctgctcctgcgcggcaaatgcgcctcctgccaaaccaaaatcagcatacgctatcccttaatcgaactgctgaccggcgtattgttcgggctggttgcctggcaatacggctggtcttggattacattgggcggtttgatactgaccgcgtttctgatttccctgacctttatcgatgcggacacccaatacctgcccgactcgatgacattacccttgatttggctggggctgatatttaatttggacggcggcttcgtgcctttgcagtctgccgttttaggtgcggttgccggctatggttcgatatggcttttatgcgcggtatataaactgattaaaggcgaaatcggtatgggcaacggagatttcaaactgattgccgcattgggcgcgtggctcggcatatccgcattgcccgtgctgatttttgtttcctcgctgatcggtttggtcgcggcaatcgttatgcgcgtcgccaaggggcagcattttgccttcggccccgcactgacagtttcgggctggataatttttacggcaaacgattccgtatggcgggcggtcaactggtggctgacccatccggtgctgtaa

SEQ ID NO: 45024 - DNA, 351 bp, Neisseria meningitidis
atgtcagacggacaaaatattccggcaaaaatgatgtcgttgcagctgaaagacatgaatctgctgtacagctcctacatgccgtttttggaacacggcggtctgtttgtgcagaccaacgacgtattttccatcggggacgatattctgcttgccgtagaaatcctcaacttccccaaactgttcctgccgaccaaagtcgcctggatcaatcctgcgcgtacttcctccaaacccaaaggggtagggctggcattcacaaaacacgaaaactgcctgaaagtcaaagatcagatcgaagtcgaactgggcaacacaatcggcggcagcagacctacgtttaccatgtaa

SEQ ID NO: 45025 - DNA, 642 bp, Neisseria meningitidis
atgaccgatttccgccaagatttcctcaaattctccctcgcccaaaatgttttgaaattcggcgaatttaccaccaaagccggacggcggtcgccctatttcttcaatgccggcctctttaacgacggcttgtccacgctgcaactggcaaaattttacgcacaatccatcattgaaagcggcatccgattcgatatgctgttcggccccgcctacaaaggcattattttggcggcggcaaccgcgatgatgctggcggaaaaaggcgtgaacgtcccgtttgcctacaaccgcaaagaagccaaagaccacggcgaaggcggcgtgttggtcggcgcgccgcttaaagggcgcgtgctgattatcgacgacgtgatttccgccggcacatccgtacgcgaatcgatcaaactgattgaagcggagggtgcaacccccgccggtgtcgccatcgcgctcgaccgcatggaaaaaggcacgggtgaattgagcgcggttcaggaagtggaaaaacaatacggtctgcccgtcgcccccatcgccagcctgaacgatttgtttattctgttgcaaaacaaccccgaattcggacagttcctcgaacccgtccgagcctaccgtcggcagtacggcgtagaataa

SEQ ID NO: 45026 - DNA, 291 bp, Neisseria meningitidis; identical to SEQ ID NO: 38283

SEQ ID NO: 45027 - DNA, 249 bp, Neisseria meningitidis; identical to SEQ ID NO: 38918

SEQ ID NO: 45028 - DNA, 1569 bp, Neisseria meningitidis
atgagtcaaaccgatacgcaacgggacggacgatttttacgcacagtcgaatggctgggcaatatgttgccgcacccggttacgctttttattattttcattgtgttattgctgattgcctctgccgccggtgcgtatttcggactatccgtccccgatccgcgccctgttggtgcgaaaggacgtgccgatgacggtttgattcacgttgtcagcctgctcgatgctgacggtttgatcaaaatcctgacgcataccgttaaaaatttcaccggtttcgcgccgttgggaacggtgttggtttctttattgggcgtggggattgcggaaaaatcgggcttgatttccgcattaatgcgcttattgctcacaaaatctccacgcaaactcactacttttatggttgtttttacagggattttatctaataccgcttctgaattgggctatgtcgtcctaatccctttgtccgccatcatctttcattccctcggccgccatccgcttgccggtctggctgcggctttcgccggcgtttcgggcggttattcggccaatctgttcttaggcacaatcgatccgctcttggcaggcatcacccaacaggcggcgcaaatcatccatcccgactacgtcgtaggccctgaagccaactggttttttatggtagccagtacgtttgtgattgctttgattggttattttgttactgaaaaaatcgtcgaaccgcaattgggcccttatcaatcagatttgtcacaagaagaaaaagacattcggcattccaatgaaatcacgcctttggaatataaaggattaatttgggctggcgtggtgtttgttgccttatccgccctattggcttggagcatcgtccctgccgacggtattttgcgtcatcctgaaacaggattggtttccggttcgccgtttttaaaatcgattgttgtttttattttcttgttgtttgcgctgccgggcattgtttatggccgggtaacccgaagtttgcgcggcgaacaggaagtcgttaatgcgatggccgaatcgatgagtactctggggctttatttggtcatcatcttttttgccgcacaatttgtcgcattttttaattggacgaatattgggcaatatattgccgttaaaggggcgacgttcttaaaagaagtcggcttgggcggcagcgtgttgtttatcggttttattttaatttgtgcttttatcaatctgatgataggctccgcctccgcgcaatgggcggtaactgcgccgattttcgtccctatgctgatgttggccggctacgcgcccgaagtcattcaagccgcttaccgcatcggtgattccgttaccaatattattacgccgatgatgagttatttcgggctgattatggcgacagtgatcaaatacaaaaaagatgcgggcgtgggtacgctgatttctatgatgttgccgtattccgctttcttcttaattgcatggattgccttattctgcatttgggtatttgttttgggcctgcccgtcggtcccggcgcacccactttgtatcccgcaccttaa

SEQ ID NO: 45029 - DNA, 843 bp, Neisseria meningitidis; identical to SEQ ID NO: 39439

SEQ ID NO: 45030 - DNA, 1506 bp, Neisseria meningitidis
atgtgttgttctcttagttttgcagaaccagcaagaatagatgatcgaataataaaatttaggccatctaaatcaaagttttttgaatctccaggatatagaaaaatcaataatgaattttctaaattcacagaagcggcaaatgtcgaacatatccccacgggcgcaaaagcccgaatcaacgcaaagataaccgccagcgtatcccgcgccgccgtcttgtcaggagtcggcaaacttgtccgccaaggcgcgaaattcagcacaagggcagtcccttatgtagggacagcccttttagcccacgacgtatacgaaactttcaaagaagacatacaggcacgaggctaccaatacgacaccgaaaccgacaaatttgtaaaaggctacgaatatagtaattgcctttggtacgaagacgaaagacgtattaatagaacctatggctgctacggcgttgacagttccattatgcgccttatgtccgattacagcagattccccgaagtcaaagaattgatggaaagccaaatggaaaggcttgcccgtccgtattgggaaaagttaaggaatcgtcctgatatgtattattttaaaaactacaattttaaacgttgttatttcggattgaacggcggagattgtttagttgctaaaggtgatgatggtagaacttttatcagtttctcacttcaaggaaattcaaaatacaaagaagaaatggatgccaaaaagctggaagagattttatcgttgaaagtcgatgccaatcccgacaaatacataaaggcaaccggatatcccggttattccgaaaaagtagaagtcgcacccggaacaaaagtgaatatgggacccgtcacggacaggaacgggaatcccgttcaggttgtcgcaacattcggcagggattcgcaaggcaacaccacagtggatgttcaagtaattccgcgtcccgacttaacccccggaagcgcggaagcgccgaacgcacagccgctgcccgaagtatcgcccgctgaaaaccccgcaaacaacccggcccccaatgagaaccccggcacgcgtcccaatcccgaacccgaccccgatttgaatcccgatgcaaatcccgatacggacggacagcccggaacaagccccgattccccggccgttccggaccgcccaaacggcagggacggcaaagatggcgggcttttgtgcaaattcttccccgacattctagcttgcgacaggctgcccgagcccaatccggcagaagatttaaatctgccgtctgaaaccgtcaatgtagagtttaagaaatccggaatctttcaagattccgcacagtgtcccgcccccgttacgttcactataaccgtgcttgattcaagcaagcagttcgcgttcagctttgagaacgcatgtaccatagccgaacggctaaggtacatgcttctcgcccttgcttgggcggttgccgcctttttttgtatccgcacagtatcccgtgaagtctag

SEQ ID NO: 45031 - DNA, 1197 bp, Neisseria meningitidis; identical to SEQ ID NO: 39631

SEQ ID NO: 45032 - DNA, 309 bp, Neisseria meningitidis; identical to SEQ ID NO: 39572

SEQ ID NO: 45033 - DNA, 951 bp, Neisseria meningitidis
atgtcccaacaccgcaaactgattattttgggttccggccccgccggatacaccgccgccgtctatgccgcgcgcgccaatttaaaccccgtcattattacaggtatcgcgcaaggcgggcaactgatgaccaccaccgaagtggacaactggcctgccgatgccgacggcgtgcaagggccggaattgatggcgcggtttctcgcccacgccgaacgtttcggaacggaaatcatttttgaccaaatcaacgccgtcgatctgcaaaaacgcccgtttacactcaaaggcgatatgggcgagtacacttgcgatgccctgattgtcgcaacaggcgcgtccgccaaatacctcggtttgccgagtgaggaagcgtttgcagggaaaggcgtttccgcttgtgccacctgcgacggtttcttctacaaaaaccaagatgttgccgtagttggcggcggcaatacggcagttgaagaggcactctaccttgccaatatcgccaaaaccgttaccctgatccaccgccgcagcgagttccgtgccgaaaaaatcatgatcgacaaactgatgaaacgcgtggaagagggcaaaatcatcctcaagctggaaagcaacctgcaagaagtactgggcgacgatcggggcgtaaacggcgcattattaaaaaacaacgacggttctgagcaacaaattgccgtcagcggcatttttatcgccatcgggcacaagccgaataccgatattttcaaaggtcagttggaaatggacgaagccggttacctgaaaaccaaaggcggcacggcggacaatgtcggcgcaaccaatatcgaaggcgtatgggcggcgggcgacgtaaaagaccatacctaccgtcaggcgattaccagcgcggcttccggctgtcaggcggctttggacgcggaacgctggctgggcagccaaaacatttga

SEQ ID NO: 45034 - DNA, 1215 bp, Neisseria meningitidis
atggaatgggaattcaacagttattacacactgattgccgccacgctcgtgttgctggttggtaaatttctggttcaaaaaatcaaattcttacgagacttcaatattcccgagccggtcgctggcggtttggttgccgcgattatcctgtttgcgctgcacgaggcgtacggcgtgagcttcaaatttgagaaaccgctgcaaaatgcgtttatgctgatttttttcacgtccatcggcttgagcgcagatttttcccgtttgaaggcgggcggtttgccgctggtggtttttaccgcgattgtgggcggatttatcttggtgcaaaactttgtcggggtcggactggctacggctttgggtttggatccgctcatcggtctgattaccggttcggtgtcgctgacgggcggacatggtacgtcaggtgcgtggggacctaattttgaaacgcaatacggcttggtcggcgcaaccggtttgggtattgcatcggctactttcgggctggtgttcggcggcctgatcggcgggccggttgcgcgccgcctgatcaacaaaatgggccgcaaaccggttgaaaacaaaaaacaggatcaggacgacaacgcggacgacgtgttcgagcaggcaaaacgcacccgcctgattacggcggaatctgccgttgaaacgcttgccatgtttgccgcgtgtttggcgtttgccgagattatggacggcttcgacaaagaatatctgttcgacctgcccaaattcgtgtggtgtctgtttggcggcgtggtcatccgcaacatcctcactgccgcattcaaggtcaatatgttcgaccgcgccatcgatgtgttcggcaatgcttcgctttcgcttttcttggcaatggcgttgctgaatttgaaactgtgggagctgaccggtttggcggggcctgtaaccgtcatccttgccgtacaaaccgtggtgatggttttgtacgcgacttttgttacctatatctttatggggcgcgactatgatgcggcagtattggctgccggccattgcggtttcggcttgggtgcaacgccgacggcggtggcaaatatgcagtccgtcacgcatactttcggcgcgtcgcataaggcgtttttgattgtgcctatggtcggcgcgttcttcgtcgatttgattaatgccgcgattctcaccggttttgtgaatttctttaaaggctga

SEQ ID NO: 45035 - DNA, 729 bp, Neisseria meningitidis; identical to SEQ ID NO: 39174

SEQ ID NO: 45036 - DNA, 327 bp, Neisseria meningitidis
ttgggcgaaaaaatcaaagacggcaaaaaccaaaaaaccgtactttctcgcgaagaagaacaaaaaatctgcaatactttcacgcacaaacaagcagtggaagatttcagcgtggtgatcggctacgatgaaatcaaagcgaagaatcacagcttgtcggcggggcagtatttcgaggtaaagattgattatgtggatatttccgccgacgaatttgcgcaaaaaatggcgggattttcagcggatttggataaacttttcgccgaatctgccgaattggaaaaagagattaaggatagattggcgatgttgaaattcaattcataa

SEQ ID NO: 45037 - DNA, 351 bp, Neisseria meningitidis
  misc_feature 336, 337, 338, 339, 340: 'n' is a, c, g or t
atgaccccgataatcagcagtccgataaacgtcagcatcatttctcctttattttattttaaacagaaaaccgaccgtgcaggcaaaaccgcccacagacgcgggataagccttgcattctacttttttattttgaaacaagtcaatcggtcatttcctcccatttacgcctgccgccattcctgtatccgtccgtcatttcacggcggcaaccgatacggaacaaccggcaaaccggtatcgggacggcgcgggggcattcatcccggtgcgccgattcaaacgaaaccgcccctatcattgcggagcgcggggcgtgccgtacacgcgggattnnnnncacacacttaa

SEQ ID NO: 45038 - DNA, 423 bp, Neisseria meningitidis
atgaaaatcaccaaaatcttcaccttcgactcctcgcatatgctcgacgggcatgacggcaaatgccaaaacttgcacggacatacctacaaactcgaaatcaccgtttcagacggcattatcaaaggcggcgcgaaagacggtatggtgatggactttaccgacttgaaagccattgtcaaacaacacattaccgaccccttcgaccacgccttcatctaccacggcggcaacagccgcgaatctcaaatcgccgcactcttggaaggctggaacatgaaaaccctgcgcctgccctgccgcaccactgccgaaaatatggcggtcgaaatgtacgaccgtctgaaaaacgcggggctgaacgtgtgccgcgtcaaattgtgggaaacgccgacatcgtgtgcggagtatgaaggggagtag

SEQ ID NO: 45039 - DNA, 486 bp, Neisseria meningitidis; identical to SEQ ID NO: 39660

SEQ ID NO: 45040 - DNA, 618 bp, Neisseria meningitidis
atgaccttcccgcccttgaaatccccgctcaaattctacgccgtcgtccccaccgccgattgggtggggcgcatggtcaaagcaggtgccgacacggtgcaactgcgctgcaagaccctgcacggcgatgaattgaaacgcgaaatcgcccgctgcgtcgccgcctgtcaaggcagccgtacgcagcttttcatcaacgaccactggcgcgaggcaatcgaagcaggcgcgtacggcgtgcatctcggacaagaagacatggacaccgccgaccttgccgccatcgccgccgccggtttgcgcttgggtttgagtacgcactccgttgccgaactcgaccgcgccctgtccgtacaccctagctacgtcgccagcggcgcgattttcccgaccacgaccaagcaaatgcccaccgccccgcaaggcttggacaaactgtgcgagtatgtgaaacaggcaggcggcacgcccgtcgtcgccatcggcggtatcgacttgaacaacgcccgagccgtactcgccaccggcgtttcctcactcgccgccgtccgcgccgtgaccgaagcggaaaatcccgaagcggtggttaaagcgtttcaggctttgtgggatggataa

SEQ ID NO: 45041 - DNA, 390 bp, Neisseria meningitidis; identical to SEQ ID NO: 38449

SEQ ID NO: 45042 - DNA, 1584 bp, Neisseria meningitidis
atgccgaacaaaaagaaaaaagccgcctttgcgcgtgctgcaacggagaacggtgtgccggacgtgtccaacatcaaaaattcatatgatgatttgatgtatgaatccaaagcattttcccaaaccgccatcaacgccttggaggctcgcgcccgcatgatgggtttgcagcccgcgcccgccgccaatgccaaggtcttggagctgggctgttcgatgggcggcaacatcatcacgcaggctctttattacccggatgcggaatttgtcggtatcgacttgtccggcaggcaggttgcgcagggcaacgccatcattgaaaaaatgggcttgaaaaatgtgcgtctggaagaaaaagatattttgaccgtcgatgagtcattcgggaagttcgactatatcatcgtccacggcatttggtcgtgggtgcctgacgcagttaaagacaaaatcttttcgatttgccggaacaacctgaccaaacacggcattgcctatatttcatacaatgtttaccctggctggaaacggcaggagcagttgcgcgaaattatgtactttgccggcagggatgtgcttgaagaacccttggaagcgcggacgcggaaaggcttggacgcgctcaaggcgctggcggaaattttggaaaacgacaaaggcttgggcggcggcggcaaacttccggcgattcaaaaaatattgaatcacaatacttattatgtcgcacacgaatatatggaaatattcaacgacccgatttacgttaacggcttcatcgaatgggcaaaccgccaccggctggcgtatatcggggataccgatttgcacgcgtcttttgtttcttggatggcggagcatacgcgggagcggattctggcattggcagggggcgattatattgccaaagaattttacagcgatattttatccgaccgccaattccgccgttcgcttttatgccgtgaggaagtcggggatactgtcaggcgtgacgagtcggttgccgtcgaagtgatagaaagtttgaatttccgcccggcaagaggggaaacaatcaactttgatgaaaacgataccctgctttcgggcatacgcgatgtgatgaaaaccggagaggcgtttaaaacggaagatgttgcggaaaatctcgcccgccgatttcccggtttgacattcgaccgtatgaaaatcaattcccagcttttattgcaaaccattctcgggcgtttttctgtttcatcagacaatgcgggcaaacaattttttgaagaccataaaacctatgtgccggcgcgttttacagattatgtcgccgcctttgtggaacacggcgcggaagcgtttgtccagcctgccaaccgttacaacgaaagcaccccctcattcgggtacgggcatttgtacattatgcggcaattgtcgcggccgacgagcaaacaggcattgattgaaacggttgccgaaaacttgaacatcgtcagcaccacgcccgacggtttgacattccatccgcctgccgaagtgtatgtggaagaaatattggcagacttggcagacaggcattttctcgtttcggcggattga

SEQ ID NO: 45043 - DNA, 1092 bp, Neisseria meningitidis
atgtcccatatttcccccatccccgaaatccttgccgacatcaaagccggcaaaatggtcatcatcaccgatgccgaagaccgagaaaacgaaggcgacctgctgatggcggcgcaattcgtcacgcccgaagccatcaacttcatgatcaaacacgcgcgcggcttggtctgcctgccgatggacggcgaaatggtcgaaaaactcgggctgccgatgatgacccaaaaaaacggcgcgcaatacggcaccaactttaccgtctccatcgaagccgcacacggcattaccaccggcatttccgccgccgaccgcgccctgactattcaaaccgccgtttccccgaccgccaaacccgcagacatcgtccaacccggtcatatcttcccgcttcgcgcccaaaaaggcggcgtactcgtccgcgccggacacaccgaagccggcgtcgacttggcgcaaatgaacgggctgattcctgccgccgtcatctgtgaaatcatcaacgacgacggcaccatggcgcgtatgcccgagctgatgaagtttgccgaagaacacaaccttaaaatcggcaccattgccgacctcatcgaataccgcagccgtaccgaaagcctgctcgaagacatgggcaatgcgcctgtacaaaccccgtggggcgagttccaacaacacgtttacgtcgacaaactctccggcgaaacccacctcgccctcgtcaaaggcacgcccgccgccgacaccgaaaccctcgtccgcgtccacgaacccttcagtgtgatggacttcattcaagccaacccgcgccattcatggtcattgcccaaagcactcgagcgcgtccaacaggcagaaagcggcgtcgtcatccttctgcaccgcaccgaagacggcgcatccctgctcgaccgcaccctacccaaaggcgcaaaccaagcctacaaatgggacagcaaaagctacggcatcggcgcacaaatcctcgtcggcctcaacgtcaaaaaactgcgcgtcctcgggcagccctcatctttcaccggtctgaccggcttcggtttggaagtcgtcggctttgaagaagcggaaaaataa

SEQ ID NO: 45044 - DNA, 2607 bp, Neisseria meningitidis
atggctgccaaccaacgttaccgcaaaccgctgcccggtacggatttggaatactacgacgcgcgtgcggcgtgtgaggacatcaagcccggctcttacgacaagctgccttatacaagccgtatcttggctgagaacttggtcaaccgcgcggacaaagtcgatttgccgacgctgcaaagctggctgggccagttgatagaagggaagcaggaaatcgactttccgtggtatcccgcgcgggtggtgtgccacgatattctggggcagaccgcgttggtggatttggcaggcctgcgcgatgcgattgccgaaaaaggcggcgatcctgccaaagtgaatccggtggtgcaaacccagctcatcgtcgaccactcgctggcggtggagtgcggcggttacgatcctgatgctttccgcaaaaaccgcgaaatcgaagacagacgtaacgaagaccgtttccacttcatcaactggacaaaaaccgcatttgaaaatgtggacgtgattccggcgggcaacggcatcatgcaccaaatcaatctagaaaaaatgtcgcccgtcgtccaagtcaaaaacggcgtggcgttccccgatacctgcgtcggcacggattcgcacacgccgcacgtcgatgcgctgggcgtgatttccgtgggcgtgggcggattggaagcggaaaccgtaatgctgggacgcgcgtccatgatgcgcctgcccgatattgtcggcgttgagctgaacggcaaacggcaggcgggcattacggcgacggatattgtgttggcgctgaccgagtttctgcgcaaagagcgcgtggtcggggcgtttgtcgaatttttcggcgagggcgcgagaagcctgtctatcggcgaccgcgcgaccatttccaacatgacgccggagttcggcgcgactgccgcgatgttcgctattgatgagcaaaccattgattatttgaaactgaccggacgcgacgacgcgcaggtgaaattggtggaaacctacgccaaaaccgcaggcttatgggcagatgccttgaaaaccgccgtttatcctcgcgttttgaaatttgatttgagcagcgtaacgcgcaatatggcaggtccaagcaacccgcacgcgcgttttgcgaccgccgatttggccagcaaaggcttggctaaaccttacgaagagccttcagacggacaaatgcccgacggcgcggtcatcatcgccgcgattaccagttgcaccaacacttccaacccgcgcaacgtcgttgccgccgcgctcttggcgcgcaacgccaaccgcttcgggctgaaacgcaaaccgtgggtcaaaacctcgtttgcccccggttcgaaagtggcggaaatttatttgaaagaagcaggcctgctgcccgaaatggaaaaactcggcttcggtatcgtcgccttcgcctgcaccacctgcaacggcatgagtggcgcgctggatccgaaaatccagaaagaaatcatcgaccgcgatttgtacgccaccgccgtattatcaggcaaccgcaacttcgacggccgtgtccatccgtatgcgaaacaggctttcctcgcttcgcctccgttggtcgttgcctacgcgctggcaggcagtatccgtttcgatattgaaaacgacgtactcggcgttgcagacggcaaggaaatccgcctgaaagacatttggcctgccgatgaagaaatcgatgccgtcgttgccgaatatgtgaaaccgcagcagttccgcgatgtgtatgtaccgatgttcgacaccggcacagcgcaaaaagcacctagtccgctgtacgattggcgtccaatgtccacctatatccgccgcccaccttactgggaaggcgcattggcaggggagcgcacattgagcggtatgcgtccgctggcgattttgcccgacaacatcaccaccgaccacctctcgccatccaatgcgattttggcaagcagtgccgcaggcgaatatttggcgaaaatgggtttgcctgaagaagacttcaactcttacgcaacccaccgcggcgaccacttgaccgcccaacgcgcaacctttgccaatccgaaactgtttaacgaaatggtgagaaacgaagatggcagtgtacgccaaggttcgctggcacgcgttgaacccgaaggccaaaccatgcgcatgtgggaagccatcgaaacctatatgaaccgcaaacagccgctcatcatcattgccggtgcggactacggtcaaggctcaagccgcgactgggctgcaaaaggcgtacgcctcgccggtgtggaagcgattgttgccgaaggcttcgagcgtatccaccgtaccaacttgatcggtatgggcgtattgccgctgcagttcaaaccgggtaccaaccgccacaccttgcaactggacggtacggaaacctacgacgtggtcggtgaacgcaaaccgcgctgcgatctgaccctcgtgattcaccgtaaaaacggcgaaaccgtcgaagttcccgttacctgccgcctcgatactgcagaagaagtattggtatatgaagccggcggcgtgttgcaacggtttgcacaggattttttggaagggaacgcggcttag

SEQ ID NO: 45045 - DNA, 807 bp, Neisseria meningitidis
atgagcaccttcttccggcaaaccgcacaagccatgattgccaaacacatcgaccgcttcccgctattgaagttggaccaggtgattgattggcagccgatcgaacagtacctgaaccgtcaaaaaacccgttaccttcgagaccaccgcggccgtcccgcctacccgctgttgtccatgttcaaagccgtcctgctcggacaatggcacagcctctccgatcccgaactcgaacacagcctcattacccgcatcgatttcaacctgttttgtcgttttgacgaactgagcatccccgattacagcaccttatgccgctaccgcaactggctggcgcaagacgacaccctgtccgaactgttggaactgatcaaccgccaactgaccgaaaaaggtttaaaaatagagaaagcatccgctgccgttgttgacgccaccattattcagaccgccggcagcacacagcgtcaggctatagaagtcgatgaagaaggacaaatcaacggccaaaccacaccgagtaaggacaaagatgcccgttggatcaagaaaaacggcctctacaaactcggttacaaacaacatacccgtaccgatgcggaaggctatatcgagaaactgcacatcacccccgccaatgcccatgagtgcaaacacctgtcgccgttgttagaagggatagctgaaagtacgaccgtctatgccgacaaaggctatgacagtgcggaaaaccggcaacatctgaaagaacatcagttgttggacggcattatgcgcgggcagcctatttcggactgctcaaagtga

SEQ ID NO: 45046 - DNA, 195 bp, Neisseria meningitidis; identical to SEQ ID NO: 38181

SEQ ID NO: 45047 - DNA, 540 bp, Neisseria meningitidis
atgaacatcattgataccgccattcctgacgtaaaactgcttgagccccaagtcttcggcgacgcgcgcggcttttttatggaaaccttccgcgacgagtggtttaaaacccaagtctgcgaacgcaccttcgtgcaggaaaaccactccaaatccggcaaaggcgtattgcgcggcctgcactaccaaaccgaaaacacacaaggcaaactcgtacgcgtagttgtcggcgaagtattcgacgtggccgtcgatatgcgtaaagactcccccactttcggcaaatgggtaggcgagattctgtccgcagaaaacaaacgccaactgtgggtacccgaaggtttcgcacacggcttctatgtactgagcgatgaagccgagttcgtctataaatgcacagactattacaaccctgaagccgaacactcactaatttggaatgatccgaccgtcggcatcgactggccgctacaaggcgagccgaacctgtcgcctaaagacttggcaggcaaagtattggccgaagcagtcacgttttaa

SEQ ID NO: 45048 - DNA, 342 bp, Neisseria meningitidis; identical to SEQ ID NO: 39379

SEQ ID NO: 45049 - DNA, 378 bp, Neisseria meningitidis; identical to SEQ ID NO: 37228

SEQ ID NO: 45050 - DNA, 807 bp, Neisseria meningitidis
atgaagaaaacattgacactgctcgccgtttccgccctatttgccacatccgcccacgcccaccgcgtctgggtcgaaaccgcccacacgcacggcggcgaataccttaaagccgacttgggctacggcgaatttcccgaactcgaacccatcgccaaagaccgcctgcacatcttcagcaaaccgatgcagctggttaccgaaaaaggcaaggaaaacatgattcaacgcggcacatacaactaccagtaccgaagcaaccgtcccgttaaggacggcagttacctcgtcatcgccgaatatcagcctactttctggtcaaaaaacaaagcaggctggaaacaggcgggcatcaaagaaatgcctgacgcaagctattgcgaacaaacccgaatgttcggcaaaaacatcgtcaacgtcggacacgaaagcgcggacaccgccatcatcaccaaaccggtcggacaaaacttggaaatcgtcccgctggacaatcccgccaacattcacgtaggcgaacgcttcaaagtccgcgttctgttccgtggcgaaccgctgcccaatgccaccgttaccgccacctttgacggcttcgacaccagcgaccgcagcaaaacgcacaaaaccgaagcacaggctttctccgacagcacagacgacaaaggcgaagtggacatcatccccttgcgccaaggcttctggaaagccaatgtcgaacacaaagccgacttccccgatcaaagcgtgtgccaaaaacaggcgaactactcgactttaaccttccaaatcggccattcgcaccattaa

SEQ ID NO: 45051 - DNA, 240 bp, Neisseria meningitidis; identical to SEQ ID NO: 39921

SEQ ID NO: 45052 - DNA, 1974 bp, Neisseria meningitidis
atgcaccccatcgaaacccccgataagaccttccacgacggcgacggcgtgtccgaattgggcaccatcctgcccgcgtggtggctcaaccaagtgcaatccgagctgctggccgtgctgactgcggccggtatccagccggataagtcgcagcctaatcaattactggcagcactgaatagactggctgtagttaccaccggcaaccaagaaatcggcggccaaaaaacctttaccgcccaaacccaattccaaagcggcatccatttatccgccaaccagacgaactggaacggcggccacaaagcctacatcggcgcggatgccgacaacgcccacatcgtcttcggcgacgacaccctgcgcctgcacggcgcaaacaaccgcatttcctacaacaaccacgacatcttccacaaagccaacaaaccgcgttttgccgaagacatcgaaggcaaaccgaacacactgtccggatacggcatcggcaatttcaaagtcgaaaccttccggggcgatttgaacaccctcaaaacagacggcatctattccctgtcgacggcggtcggcagctccaacctgcccgttgaaaacaccgcctgccatatccaagtcatcgccggcacgaaacacggctggtgcaggcagttgggttatcccgcctacacgtccgacgtgtacgaacgccaccaaacgagcagcgcaaacgacaactggtccgcatggaaaaaactcaattcggacggcatccccgtcggcgcgatcgtatcctttcccaaagccgtccgaaaccccgcaggctatctcaaagccaacggcacgacctttgcacaaaacaccttccccgacctctaccgcgccttgggcaacagcaaccgcctgcccgatttaagccgtaccgacatcggcatgaccgcgtggtttccgtccgaccaaatcccgaccgactggctggcgtttgacgacatccgcacgcgcgtaaccgaaaccgcttatcccgagctgtaccgtctgctgaccggaaaatacggcagcatccaaaacgtcccgcaggcggaagaccgctttatccgcaacgcaggcaacagcttggcagtcggaacgaagcaggaagacgaaatcaaacggcacgtccacaaagtattttcacactggacaaaccacacagacacggcagccgtcggttacgaagaccacaacgaaaggcagagaagcgcgctcgtatcgacttggacggacggcgatttaaacgacaacggctttttaaccccgcgcccggacagcaaaatggcgacaggcggcgacgaaaaccgccccaaagccctggttttaaaactgtgcatcaaagccgccgacaccttgggcgaagccgtgttttggataaagtcccacggcgaaaccatcaacgccggcgcgctggacgcgggcacgctggcgcaaaacctccaagacaaagcagaccgcgcccacacccacaccgccgcccaaatccaagggctggacgaaaaaatcagcaccgccgttgccgcgcaattcacacgccaaaccatcggcggcgtggatattgtcagattccccgacggcacaatgatacagaccggcagctacaggttcacacgaagcggcggccccatcgaaaacgaagtcgtcttccccgtcgcctttgccgacggcaacgtcaaatgcttcgtatccgaacgccattcgggacgcgttaccggcgatcgaaggcaacacaactggctgtttatccgcgcaaaaaaccacgccgccgccattattaccaactggtacgaaggcagttgcgactggatggccatcggcaaagccgcctcgggaaacgccgccagctccccgataggccccgaaatacctgaaaccaacgaagaaccgcaaagagagagtggaagaacatcaaccggaccccgaaaccgccgccgccgagacggcttgctcgaggcactgcaagactag

SEQ ID NO: 45053 - DNA, 279 bp, Neisseria meningitidis; identical to SEQ ID NO: 36930

SEQ ID NO: 45054 - DNA, 1077 bp, Neisseria meningitidis
atgatttgccgaaaacctatcggacacacaccatattttgatatgaataaaacaatctgccgcactgctgcactattgataagcggtttttcatacgcaaacaccgtcattcccgatgtctcccccgtcgcacaaggtcaacatgtcttcattaacatccctcagcaacgcctgttcctctacaccgacggcaaactgaccaaggtttatcccgttgcagtaggtcgggcgatgacgcaaaccaatctaggcgaacataaaatcggtgcgaaagcctataaccctgtttggtacatccccaaatccatacagaaagaacgcggcgacggcgtaaaaaccatagccgccggcccggacaaccctttggggccggtttttgtccgcttaggcgaccccaaactcggtttgggcatacacgggaccaatgcgccggccagcgtccccggggttcggagtcacggctgcgtccgcatgaaatcgcccgacgcgctcgagtttgccaaaaccatcgccagcggctcgcccgcctccgtcatctatcaaatggcgggtctcaatgaagatgcggatcgcaacctgtggcttgccgccttccgcgacccttacggtaagaacaaccttgacatcgcctctctgaaaaaaagtattgcgcaatgggcaaaaacacagggtaaaaccatcgcgcccgagaaagtcgatgctgtactcaaagaccgcaccggatcggccgtctgcctgacctgcggcaaaaacggcaagatgaagatgccgctcaaatcgctggcgtggatacagggttcttcctcatacagccaagctgaagtcattgaacaaactgaggaaaccaactctgccgaaatatccgagacacgcacgcccgaagtgcctgatgtacacacgcccgaggcacaaccgcatttaaatacccaatccgacggcacgccgactgcctataccgaaccggctgccgattcatcgccgcaagtagaaacacctgatcaggctgcttccgagccggttgatgtattattttcaatagatgtgatacggcagggaaatttgcgtttaggtaattga

SEQ ID NO: 45055 - DNA, 768 bp, Neisseria meningitidis; identical to SEQ ID NO: 39902

SEQ ID NO: 45056 - DNA, 435 bp, Neisseria meningitidis
gtggcaaagaaaattatcggctatattaaactgcaaattcctgcaggtaaagccaatccatctcctccggttggtcctgctttgggtcagcgcggtttgaatattatggaattttgtaaggcatttaatgctgcaacccaaggtatggagcctggcttaccgattccggttgtgattactgcatttgcagataaatcattcacatttgtgatgaaaaccccgccagcttctatcttgttgaaaaaggctgccggtttgcaaaaaggtagttctaatcctctgaccaacaaagtgggtaaattgacccgtgcccagttggaagaaattgctaaaactaaagagcctgatttgactgctgctgacttggatgcggctgtccgtactatagcaggttctgctcgctcaatgggcttggatgtggagggtgttgtataa

SEQ ID NO: 45057 - DNA, 621 bp, Neisseria meningitidis
atgaaaccgcacaacctgttccaattcctcgccgtttgctccctgaccgtctccgtcgcttccgcacaggcgggcgcggtggacgcgctcaagcaattcaacaacgatgccgacggtatcagcggcagcttcacccaaaccgtccaaagcaaaaagaaaacccaaaccgcgcacggcacgttcaaaatcctgcgcccgggcctcttcaaatgggaatacacttcgccctacaaacagactattgtcggcgacggtcaaaccgtttggctctacgatgtcgatttggcacaagtgaccaagtcgtcccaagaccaggccataggcggcagccccgccgccatcctgtcgaacaaaaccgccctcgaaagcagctacacgctgaaagaggacggttcgtccaacggcatcgattatgtgctggcaacgcccaaacgcaacaacgccggctaccaatacatccgcatcggcttcaaaggcggcaacctcgccgccatgcagcttaaagacagcttcggcaaccaaacctccatcagtttcggcggtttgaataccaatccccaactctcgcgcggcgcgttcaagtttaccccgcccaaaggcgtggacgtgttgagcaactga

SEQ ID NO: 45058 - DNA, 180 bp, Neisseria meningitidis; identical to SEQ ID NO: 39090

SEQ ID NO: 45059 - DNA, 492 bp, Neisseria meningitidis
atgcgacatatcttatctgttctgattgaaaacgaatcaggtgcgatgagccgcgtggtcggtttgttctctgcacgcgattacaatatcgattctttggcggttgcgccgaccgaagacaaaaccctgtcccgtatgaccatcgttacccacggcgacgagcaggttatcgaacaaatcaccaagcaactcaataaattgattgaagtgattaaagtggtcgatttgaacgaaagccgttttgtcgaacgcgaactgatgttggtaaaagtccgtgccgccggcaaagaccgcgacgaatttttgcgtttgaccgaaatctaccggggcagcatcatcgacgtaaccgaccgcagctatacgattgaaattaccggctcgaccgacaagctggattcctttttggaaacggtcggacgcgcccaaattttggaaaccgtacgtacaggcgcggccggcatcggtcgcggtgagcgtattttgaaaatttaa

SEQ ID NO: 45060 - DNA, 999 bp, Neisseria meningitidis
gtggcggcacatatcggacgcattgatacggacgcgcctttgaaacccctgtacgtcatccacggcgaggaagaactgttgcgtatcgaggcattggacgcattgagggcggcggcgaagaaacaaggttaccttaatcgggaagtttatacggcagacaatgctttcgattggaacgagctgctgcaaaccgcaggcagtgcgggtctgtttgccgatttgaagctgttggaactgcatatccctaacggcaagcccagcaaaaccggcggcgaggcgttgcaggattttgccgcccgcctgccggaagatacggtaacgctggttttactgcccaaactggagaaaacccagctccagtccaaatggtttgccgcattggcggcaaagggggaagtgtgggaagccaaaccggtcggcgcggcggctttgccccaatggatacgcggacggctggacaaaatcggtttgggtatcggggcagacgcattggcactgtttgccgagcgcgtggaaggcaatctgttggcggcacgtcaggaaatcgacaagctcgcgctgctgtatccgaaagggcataccgtcaatatcgatgaggcgcaaaccgccgttgccaacgtcgcccgcttcgacgcgttccaactggcaggcgcgtggatgaagggcgatgtcctgcgcgtatgcaggcttttggacggattgcgggaagagggcgaagaaccggtgctgttgctgtgggcggttgccgaagacgtgcggacgctgatccggcttgctgccgccctgaagcaggggcagagcatccaatccgtccgcaacagccttaggctttggggcgacaagcagacgctcgcaccgcttgcagtcaagcggatttccgtcgtccgcctgcttgacgcgctcaaaacctgtgcccaaatcgaccgaatcatcaaaggcgcggaagagggcgacgcatggacggtattcaaacggcttgtcgtgtcgctggcggaataa

SEQ ID NO: 45061 - DNA, 474 bp, Neisseria meningitidis
atgaaaaaacaaatcacctcagccgtaatgatgctgtctatgattgcccccgcaatggcaaacggattggacaatcaggcatttgaaaaatacgtattccacacgcaggcagatgcgccgatgcagttggctgagctttctcaaaaggagatgaaggagactgagggggcgtttcttcctattgtggcaggtgctttgatgggaggggcaattagtgcttgggctaatcacggcatttctaaaattaaaacagggcaatttgcttcaacaagaagtaccttggctgcaaccgctggtggtatgataggaggcggatatagcagtgcgatgttgcgcggtgcagggattactactagtgtttttgcccgttctgcttggaaagggggaaatgctattcctaatgcagttattcgtgcaaatggtgcagcattaaatcagtcttctagcgccgcaatgggaaaacatagaagataa

SEQ ID NO: 45062 - DNA, 645 bp, Neisseria meningitidis; identical to SEQ ID NO: 39354

SEQ ID NO: 45063 - DNA, 369 bp, Neisseria meningitidis; identical to SEQ ID NO: 41144

SEQ ID NO: 45064 - DNA, 2376 bp, Neisseria meningitidis
atgaataaaaatattaaatctttaaatttacgggaaaaagacccgtttttaagtcgtgaaaaacagcgttatgaacatcctttgcccagtcgggaatggataatcgaattgttggagcgcaaaggtgtgccttcaaaaatcgaatcgcttgcgcgcgagctgtcgattacggaagacgagtatgtcttttttgaacgccgtctgaaggcgatggcgcgggacggtcaggttttaatcaaccgtcggggcgcggtttgcgcggcggacaaattggatttggtcaaatgccgcgtcgaggcgcataaggacggtttcggcttcgccgtaccgctcatgccgacgggcgaaggagatttcgttttatacgaacgccagatgcgtggtgtcatgcacggcgacattgttaccgtccgccctgtcggcatagatcgcagggggcggtgcgaagggacggttctggatattgtcgaacgcgcgcaaagcaaagttgtcggtcgtttctatatggataggggcgtggcgattttggagccggaagacaagcgtctgaaccaaagcatcgtattggaaccggacggcgtggcgcgtttcaaacctgaatccggtcaggtcatcgtcggcgaaattgaggtttatcctgagcaaaaccggccggcagtggcaaaaatcatcgaagttttgggcgattatgccgacagcggcatggagattgaaattgccgtgcgcaagcatcatttgccgcaccaattcagtgaagcgtgtgccaaagccgtgaaaaaaattcccgaccatgtacgcaaaagcgatttgaaaggccgcgtcgatttgcgcgacctgcctttggtaacgattgacggcgaaacggctcgagattttgacgatgcggtgtttgccgaaaaaatcggacgcaattaccgtctggtcgtggcgattgccgatgtcagccattatgtccgccccgatgacgctatcgacacggacgctcaggaacgcagcaccagtgtttacttcccgcgccgcgtgattcccatgttgccggaaaacctgtccaacggcatctgctcgctcaatcctaatgtcgagcgtttgtgtatggtgtgcgatatggtcatcacttacgcgggcaatattaaagaataccgcttctaccccgccgtgatgcgctctcatgcccgcctgacctacaaccaagtttggaaatggctttcaggcggaatcgggcatccgttcaaagcccaaatcgacacgctttacaaactcttcaaaatccttcagaaaaagcgtttcgaacgcggggcggtggagtttgacagcatcgaaacccaaatgcttttcgacgacaacggtaaaattgaaaaaatcgtccccgttgtccgcaacgatgcccacaagctgattgaagaatgtatgttggcggcaaacgtttgcgcagcggattttctgttgaaaaacaagcataccgcattgttccgcaaccatttggggcccacgcccgaaaaactcgccgccttgcgcgagcagctcggtctgttggggcttcaacttggcggcggcgacaacccgtcgccgaaagactatgccgcgcttgccggacagttcaaaggcaggccggatgccgaattgctgcaagtcatgatgttgcgctccatgcaacaggcggtttacgaaccgcattgcgacggacactttggtcttgcctacgaagcatacgcccacttcacctcgcccatccgccgctatcccgacctgaccgtacaccgcgccatcaaagccgtgttgaatcagcaaacctacacgccaaaaaaaagctggcaggctttgggcgtgcatacctcgttctgtgagcgccgtgccgacgacgccagccgcgacgtggaaaactggctgaaaacctattatatgcgcgataaggtcggcgaagtattcgaaggtaaaatctccggcatgaccagttttggtatctttgtaacactggacggcatccacattgacggcttggtgcatatcagcgatttgggcgaagactatttcaacttccgccccgaaatcatggcaatcgaaggcgaacgcagcggcatccgtttcaacatgggggacagggttgccgtccgggtcgcccgtgccgatttggatgatggaaaaatcgattttgtcctgattgccgaggggagcggcagggggcggaaagctaaatcatccgcgtctgtcaaaccggcagggacggcggggaaagggaaaccgaaaaccgccgccgagaaaaaaacagcccgaggcggcaaagtaaggggaaggggcgcgtctgccgccgcagaatcggggaaaaaggcaaagaaaccggttccgattaaggtaaaaaaacggaaaggcaaatcataa

SEQ ID NO: 45065 - DNA, 576 bp, Neisseria meningitidis
gtggatgttcaagtaattccgcgtcccgacttaacccccggaagcgcggaagcgccgaacgcacagccgctgcccgaagtatcgcccgctgaaaaccccgcaaacaacccggcccccaatgagaaccccggcacgcgtcccaatcccgaacccgaccccgatttgaatcccgatgcaaatcccgatacggacggacagcccggaacaagccccgattccccggccgttccggaccgcccaaacggcagggacggcaaagatggcgggcttttgtgcaaattcttccccgacattctagcttgcgacaggctgcccgagcccaatccggcagaagatttaaatctgccgtctgaaaccgtcaatgtagagtttaagaaatccggaatctttcaagattccgcacagtgtcccgcccccgttacgttcactataaccgtgcttgattcaagcaagcagttcgcgttcagctttgagaacgcatgtaccatagccgaacggctaaggtacatgcttctcgcccttgcttgggcggttgccgcctttttttgtatccgcacagtatcccgtgaagtctag

SEQ ID NO: 45066 - DNA, 2028 bp, Neisseria meningitidis; identical to SEQ ID NO: 39197

SEQ ID NO: 45067 - DNA, 984 bp, Neisseria meningitidis; identical to SEQ ID NO: 40864

SEQ ID NO: 45068 - DNA, 537 bp, Neisseria meningitidis
gtggatttgagggaagtaaaattaggcggcgaaaccatttacgagggcggtttcgtcagcatcagcaaggataaggtcaggttgcccaacggtaacgaagggcagcgtatcgtcatccgtcatcccggtgcggcatgcgtgttggcggttacggacgaggggaaagtggttttggtacggcagtggcggtatgcggcaaatcaggcgacattggaacttcctgcgggcaagctggatgtggcgggcgaggatatggcagcgtgtgcgctgcgagaattggcggaggaaacgccttatgttgccgacagtgtacgcctgttgtacagtttttatacggcggtcggtttttgcaacgaaaaaatgtatctgttcgaggcggaaggcgtacgcttgggcagtacgcttgccaatgacgaagacgagattacggaaaccgtattgatgtcgaaggaggaagtccgtcaggcattggcaaacgatgaaattaaagacggcaagacattaatcggtttgcaatactggctgatgaaggattga

SEQ ID NO: 45069 - DNA, 1662 bp, Neisseria meningitidis
atgacagaatccatcacccgcgacagtatgcaatacgatgtcgtgattgtcggcgcaggcccatcgggtttgtccgccgccatcaaactcaagcagcttgccgaacaaaatgggcgcgaaatcagcgtttgcgtggtggagaaaggttcggaggcgggtgcacattcgctggcgggcgcggttatcgatccgattgcgctgaatgagttgattcccgactggaaagaaaaaggcgcgccgctgacgcgtacggtaacgcaggacaaagtgttgttcctgactgagaaaaaagcgttcaatctgcctattaccccaaatttcgacaatcacggcaactacatcgtcagcttgggcgaagtcgtgcgctggttggcggagcaggcggaaaatttgggcgtggaaatttatccgggctttgccgctgccgaagtgctgtatcacaaagacggttcggtcaaaggcattgcaaccggcaatatgggcgtgggcaaaaacggcgagccgaccgattcattccagcccggcatggagctttgggcacggcaaaccctgtttgccgagggctgccgaggttcgctttccaaacaaatcatcgaacgcttcaaactcgaccaaaacagccagccgcaaacttacggcttgggcattaaagaagtttgggaagtgccgtccgaacagcatcagcccggtttggtggtgcacagcgcaggctggccgctggacagcaaaacctacggcggcgcgtttgtttaccatttcgacgacaacaaagttgccgtcggcttcgtggtcggtttggactatcaaaatccttatctgtcgccgtttgaagagttccaacgtttcaaaacccatcccgaaatccgcaaaacctttgaaggcggccgccgcattgcttacggtgcgcgttcgctgattgaaggcggttttcaaagtttgccgaagctctcgttcaaaggcggcgttttggtcggcgatgcggcgggtttcctcaatatgccgcgcatcaaaggcattcataccgcgatgaaatccgccatgctcgccgccgaagccgtgttccccttgttggaaaaccttgaagaagtggaaaacttcgacagcggcaaagaggcggcggattatcagcaacgttttgaacaaagctggctgtatcaagagctttacgccgcgcgcaatgtccgtccgtcattcaaatggggcgtttacctcggctcaatctacaccggcatcgatcagatgattttcagaggcaaagccccgtggaccttgaaacatcacggcaaagacaacgagcagcttaaaaaagccgccgcgtgcaagccgattgattatccgaaacccgacggcgtattgaccttcgaccgcttgagcagcgtcttccttgccaatctcgcgcacgaagaaaaccagcccgaccatttggtgctgaacaatccgcaaacgatgatagacgtgaactacaaagaatacgcctcacccgaaacgcgctattgtccggccggcgtgtatgaaatcgtcgaagaaaacggcagcccgcgcctgcaaatcaacgcggcaaactgcgtgcactgcaaaacctgcgacatcaaagacccgacgcaaaacatcacttggatttgccccgaaagcgcgagcgggccgaattacggcgggatgtaa

SEQ ID NO: 45070 - DNA, 939 bp, Neisseria meningitidis
atgtccatccatactctgaaacgcctgccctcatcgctgctgctcggtctctgcctttccctgccgtcagcccacctttttgccgacaacgacattttagggcaatttttagaacagaacatgcttacctcctccgatccgatagaaatattcgccgaaagcacgatacaccccaccaacacccaagccattacaggcggtctgattctctcctcacagtctgccctggtcgtcaacaacaaaaccggacagatactgtatcagaaaaacgccgacaggattatgcccatcgcctccatttccaaactgatgagcgcgatggtcgttttggatgcaaacttggacatgaacgaaaccgttaccattacgcccgacgaaatcgaccgcatcaaagggaccggcagccgtcttgccataggtacggcacttacacgcaaagaactgctgcacctgagcctgatgagcagcgaaaaccgcgccacccatgcattgggcagaacctaccccggcggcatgggcgcatttgtcgccgccatgaaccgcaaagcccaaagcctcggtatgtacggcagccgcttttacgaaccgaccggactcaacttccaaaacgtttccaccgccaaagacctgagccttatggtcaacgccgccgcccaatatccgcaaatccgcaccaactcgacttccaactacgcctcggtacagaccaaaaacgggcagcagaactacaaaaactccaatgcgctggtcagggaaggcatgtggaacatcgaattgcagaaaaccggctacatacgcgaagcaggcaggtctatggttgtcaaagccaacattcaaaatcaacccgttaccatcgtattgctgaactcgcccacatccgccacacgcgtcaacgacgcccgcaaaatcgaatcgtggatgctgcagcaacgctcctga

SEQ ID NO: 45071 - DNA, 843 bp, Neisseria meningitidis; identical to SEQ ID NO: 37164

SEQ ID NO: 45072 - DNA, 507 bp, Neisseria meningitidis
ttgttcaatatgaacgttaaagttcataaagacacacaccatttcggtattcacaacctcaacaataccgatgttcatctgactgccgaagacagcgataatgtgattgagattaaaggggaactcgccgaccttatgccgacaggaaatgttgagagtacaagttttttaaggggcattgaaacggcttttaaatccaataccgtattaacggggaataacaataaaatatccatcgccactgagggcaagggcttgggattgggcgtaaatggtctccagtccaactccccctattccggacgcacgacgggcattttcatcaataatcaatcaagcgaccttacccaaccttcccttgatggcatcagcactatcaagctcaaagccgtcaagggaaataatgaagttgatttaaatgtaaaaaaccacgcctccgtaaaaggcattatcgcgtcgcattctgcaaaagcaacgcttgaagccgaaggggacaatattgtctag

SEQ ID NO: 45073 - DNA, 270 bp, Neisseria meningitidis
atgctcaaacaatccatcgaaatcatcaacaaactcggactccacgcccgcgcgtccaacaagttcacccaaaccgcgtcccaattcaaaagcgaagtctgggttacgaaaaacgacagccgcgtcaacggcaaaagcattatggggctgatgatgctcgccgccgccaagggtacggtcatcgagctggaaaccgacggcgcggacgaggcggaagcgatgcgcgccctgaccgacttaatcaacggctacttcggcgagggcgaataa

SEQ ID NO: 45074 - DNA, 546 bp, Neisseria meningitidis
atgaaaaaacaaattaccgcagccgtaatgatgctgtctatgattgcccccgcaatggcaaacagcatggacaatcagatatttgaaaaccaagtattccatacgcgggcagatgcgccgatgcagttggcggaactttctcaaaaggagatgaaggagactgagagggcgtttcttccattggctatcttgggtggtgctgccattggtatgtggacacagcatggttttagttatgcaacgacaggcagaccagcttctgttagagatgttgctattgctggcggattaggcgcaattcctggtggtgtaggcgccgcaggaaaggttgtttcctttgctaaatatggacgtgagattaaaatcggcaataatatgcggatagcccctttcggtaatagaacaggtcatcctattggaaaatttccccattatcatcgtcgagttacggataatacgggcaagactttgcctggacagggaattggtcgtcatcgcccttgggaatcaaaatctacggacagatcatggaaaaaccgcttctaa

SEQ ID NO: 45075 - DNA, 2310 bp, Neisseria meningitidis
atgaataccaaactgacaaaaatcatttccggtctctttgtcgcaaccgccgcctttcagacagcatcggcaggaaacattacagacatcaaagtttcctccctgcccaacaaacagaaaatcgtcaaagtcagctttgacaaagagattgtcaacccgaccggcttcgtaacctcctcaccggcccgcatcgccttggactttgaacaaaccggcatttccatggatcaacaggtactcgaatatgccgatcctctgttgagcaaaatcagtgccgcacaaaacagcagccgtgcgcgtctggttctgaatctgaacaaaccgggccaatacaataccgaagtacgcgggaacaaagtttggatattcattaacgaatcggacgataccgtgtccgcccccgcacgccccgccgtaaaagccgcgcctgccgcaccggcaaaacaacaggctgccgcaccgtctaccaagtccgcagtatccgtatccaaaccctttaccccggcaaaacaacaggctgccgcaccgtttaccgagtccgtagtatccgtatccgcaccgttcagcccggcaaaacaacaggcggcggcatcagcaaaacaacagacggcagcaccagcaaaacaacaggcggcagcaccagcaaaacaacaggcggcagcaccagcaaaacaaaccaatatcgatttccgcaaagacggcaaaaatgccggcattatcgaattggctgcattgggctttgccgggcagcccgacatcagccaacagcacgaccacatcatcgttacgctgaaaaaccataccctgccgaccacgctccaacgcagtttggatgtggcagactttaaaacaccggttcaaaaggttacgctgaaacgcctcaataacgacacccagctgattatcacaacagccggcaactgggaactcgtcaacaaatccgccgcgcccggatactttaccttccaagtcctgccgaaaaaacaaaacctcgagtcaggcggcgtgaacaatgcgcccaaaaccttcacaggccggaaaatctcccttgacttccaagatgtcgaaatccgcaccatcctgcagattttggcaaaagaatccgggatgaacattgttgccagcgactccgtcaacggcaaaatgaccctctccctcaaagacgtaccttgggatcaggctttggatttggttatgcaggcacgcaacctcgatatgcgccaacaagggaacatcgtcaacatcgcgccccgcgacgagctgcttgccaaagacaaagccttcttacaggcggaaaaagacattgccgatctgggcgcgctgtattcacaaaacttccaattgaaatacaaaaatgtggaagaattccgcagcatcctgcgtttggacaatgccgacacaaccggaaaccgcaatacgcttgtcagcggcaggggcagcgtgctgatcgatcccgccaccaataccctgattgttaccgatacccgcagcgtcatcgaaaaattccgcaaactgattgacgaattggacgtacccgcgcaacaagtgatgattgaggcgcgtatcgtcgaagcggcagacggcttctcgcgcgatttgggcgttaaattcggcgcgacaggcaagaaaaagctgaaaaatgatacaagcgcattcggctggggggtaaactccggcttcggcggcgacgataaatggggggccgaaaccaaaatcaacctgccgattaccgctgccgcaaacagcatttcgctggtgcgcgcgatttcctccggtgccttgaatttggaattgtccgcatccgaatcgctttcaaaaaccaaaacgcttgccaatccgcgcgtgctgacccaaaaccgcaaagaggccaaaatcgaatccggttacgaaattcctttcaccgtaacctcaatcgcgaacggcggcagcagcacgaacacggaactcaaaaaagccgtcttggggctgaccgttacgccgaacatcacgcccgacggccaaatcattatgaccgtcaaaatcaacaaggactcgcctgcgcaatgtgcctccggtaatcagacgatcctgtgtatttcgaccaaaaacctgaatacgcaggctatggttgaaaacggcggcacattgattgtcggcggtatttatgaagaagacaacggcaatacgctgaccaaagtccccctgttgggcgacatccccgttatcggcaacctctttaaaacacgcgggaaaaaaaccgaccgccgcgaactgctgattttcattaccccgaggattatgggtacggccggcaacagcctgcgctattga

SEQ ID NO: 45076 - DNA, 579 bp, Neisseria meningitidis
atgtcaaacacaatcaaaatggttgtcggcttgggcaacccgggcaaagaatacgaacagacacgccacaatgcgggtttttggttcctcgacgaactggcgtggaaatggaaggcttcatttaaagaagaaaaaaaattcttcggcgaagtcgcccgtgccgccctgcccgacggcgacgtttggctgctcaaacctgccacgttcatgaaccgttccggacaggcagttgccgcccttgcgcagttttataaaatcaaacccgaagaaatcctcgtcgtccacgacgaactcgacattccctgcggacggatcaaattcaaactcggcggcggcaacggcggacacaacggcttgaaagacattcaggcaaaactcggcacggcagactattaccgtctgcgcctcggcatcggccacccgggcgaccgcaacctcgtcgtcggctatgtcctgaacaaacccagtacggaacaccgccgacagattgacgatgccgtcgccaaatccctgcaggccatacccgacatccttgccggcaaatgggaagaggcaacccgcttcctgcacagcaaatga

SEQ ID NO: 45077 - DNA, 1395 bp, Neisseria meningitidis
atgaacaaacaacccctttccctcgccgtcgtcgggcataccaataccggcaaaacctcgctccttcgtaccctgttgcgcgacagcggtttcggcgaagtcagaaacgccccatcgaccacacgccatgtcgaagaagccgccatcagcgacggcgcagacacgctggttttcctgtacgacacgcccggacttgaagacgcgggcggcgtgctggaatggctggaaaaccatacggacaatcgttcagacggcatcgaacggctgcaacagtttctcggcagccacggcgcgcaccatgatttcaatcaggaagccaaagtcttacggcaagtcttgcaaagcgatatggcaatgtacgtcatcgacgcgcgcgagcccgtcctcgacaaatatcgggatgaattgaccatcctttcatggtgtgccaaaccagttatgcccgtgttcaactttaccggcggacagcttcccgaatcgtggacaaccatgctggcgaggagaaacctgcacgttttcgcagggttcgacaccgtcgcctttgattttgaaggcgaactacgcctgtgggaaaacctcgccaccatgttgcccgaacgcagcacacttgaccgcctgacagccatgcgccggcgcgaatggcagcggctggacggcgaagcgcgccgcgaaatcgccgatttcctgctcgatgccgccgccttcaggcaggaagtggacgaaaacgaggataccgccaccgtgctacaaaccatgcaggcggaaatacgccaactcgaacggcagatgcagcagcggctgtttgccctctaccgtttctaccacagcgaaatcgacggcggcgactggatgccgcaagccttccgccaagacccgttcgacagcgaattgctcaaacaatacggcatccgcaccggcacgggcgcggcaaccggcgcactcatcggcttggggctggacatcgccacactcggcggctcgctcggattgggtacggcaatcggcggctttttgggcggcatcctgcccaatacccgcaccatttccgacaaactcgccggccgccaaaccttgcacaccgaccctgaaaccctgaccctgctcgccgcccgcgccctcgatctgctccacgtcctgcaaacgcgcggacacgcggcacaatcggatatcgagttgcacagccgcaaagccccgtgggacgccgccagactcccgcccgaactcaacaaagcccgcagtcattggaaatggtcgtcgctcaatacgcaccgccccgaaaccagccgcgccgaacgcgccggatatgtggagaaacttcaaatccgcctgtcgggaaaatatagtgaattaaatttaaatcaggacaaggcggcgagccgcagacagtacaaatag

SEQ ID NO: 45078 - DNA, 2163 bp, Neisseria meningitidis
atgaacgccccgtttttccgcctcagcctgctctcgcttaccctggcggcaggttttgcccatgcggcagaaaataatgccaatgtcgcattggataccgttaccgtaaaaggcgaccgccaaggcagcaaaatccgtaccaacatcgttacgcttcaacaaaaagacgaaagcaccgcaaccgatatgcgcgaactcttaaaagaagagccctccatcgatttcggcggcggcaacggcacgtcccaattcctgacgctgcgcggcatgggtcagaactctgtcgacatcaaggtggacaacgcctattccgacagccaaatcctttaccaccaaggcagatttattgtcgatcccgctttggttaaagtcgtttccgtacaaaaaggcgcgggttccgcctctgccggtatcggcgcgaccaacggcgcgattatcgccaaaaccgtcgatgcccaagacctgctcaaaggcttggataaaaactggggcgtgcgcctcaacagcggctttgccagcaacgaaggcgtaagctacggcgcaagcgtattcggaaaagagggcaacttcgacggtttgttctcttacaaccgcaacgatgaaaaagattacgaagccggcaaaggtttccgcaatgacaacggcggcaaaaccgtaccgtacagcgcgctggacaaacgcagctacctcgccaaaatcggaacaagcttcggcgacgacgaccaccgcatcgtattgagccacatgaaagaccaacaccgaggcatccgcactgtgcgtgaagagtttgccgtcagcgaaaaaaattcacggataactattaaacgccaagcccctgcttaccgcgaaaccactcaatccaacaccaacttggcgtacaccggcaaagatttgggctttgtcgaaaaactggatgccaacgcctatgtgttggaaaagaaacgctattccgccgatgacaaagataacggctacgcaggcaatgtaaaaggccctaaccatacccgaatcaccactcgaggtatgaatttcaacttcgacagccgccttgccgaacaaaccctgttgaaatacggtatcaactaccgccatcaggaaatcaaaccgcaagcgtttttgaactcgcaattttctatcccaaaaacagaaaaaaaagacggtaaagatgttgctaaatcatcggaacaacaaaccaaagaccgcaaagacgaaaccattgtccattcctacaaactttccaacccgaccaaaaccgataccggcgcgtatatcgaagccattcacgagattgacggttttaccctgaccggcgggctgcgttacgaccgcttcaaggtgaaaacccatgacggcaaaaccgtttcaagcagcaaccttaacccgagtttcggcgtgatttggcagccgcacgaacactggagcttcagcgcgagccacaactacgccagccgtagcccgcgcctgtatgacgcgctgcaaacccacggcaaacgcggcatcatctcgattgccgacggcaccaaagccgaacgcgcgcgcaataccgaaatcggcttcaactacaacgacggcacgtttgccgccaacggcagctacttctggcagaccatcaaagacgcgcttgccaatccgcaaaaccgccacgactctgtcgccgtccgtgaagccgtcaacgccggctacatcaaaaaccacggttacgaattgggcgcgtcctaccgcaccggcggcttgactgccaaagtcggcgtaagccacagcaaaccgcgcttttacgatacccatcctaaaaaactgttgagcgcgaatcccgagtttggcgcacaagtcggccgcacttggacggcctcccttgcctaccgcttccaaaatccgaatctggaaatcggctggcgcggacgctatgttcaaaaagctacgggttcgatattggcggcaggtcaaaaaaaccgcgacaaacaattggaaaacgttgtacgcaaaggtttcggtgtgaacgatgtcttcgccaactggaaaccgctgggcaaagacacactcaatgtcaatctttcagtcaacaacgtgtttaacacgttctactatccgcacagccaacgctggaccaataccctgccgggcgtgggacgtgatgtacgcttgggcgtgaactacaagttctaa

SEQ ID NO: 45079 - DNA, 606 bp, Neisseria meningitidis; identical to SEQ ID NO: 39821

SEQ ID NO: 45080 - DNA, 2016 bp, Neisseria meningitidis
atgatgaaactcaatccccaacagctcgaagccgtccgctacctcggcggcccactgctcgtccttgccggtgcaggcagcggcaaaaccggcgtgattactcaaaaaatcaagtatttgattgtcaatgtcggctatctgccgcataccgttgccgcgattacctttaccaataaagccgccgcggaaatgcaggagcgcgtcgccaaaatgctgcacaaatcgcaaacgcgcgggctgacgatttgcacgttccactctttgggcatgaagattctgcgcgaagaggcgaaccatatcggttacaaaaaaaacttctccattctcgattctaccgacagcgcgaaaatcatcggcgaactcttaggcggtacgggcaaagaagccgtattcaaggcgcagcaccagatttccttgtggaaaaacgatttaaaaacgcctgaagatgtcgttcagacggcatcgaacatttgggaacaacaaaccgcacgcgtgtatgcgagctatcaggaaaccttacaaagctatcaggcagtggacttcgacgacttgatccgcctgcctgccgtgctgttgcagcaaaacagcgaagtgcgcaacaaatggcagcggcggctgcgttatctgctggttgacgaatgccaagatacgaatacctgccaatttacgttgatgaaacttctgaccggcgcagaaggtatgtttaccgccgtcggcgacgacgaccagtccatctacgcatggcgcggcgcgaacatggaaaacctgcgcaaaatgcaggaaaactatccgcagatgaaggtcatcaaactggagcaaaactaccgctccaccgcgcggattctcaaaatcgccaacaaagtcatcgagaacaaccccaagctgttcaccaaaaaactttggtcgaaattgggcgaaggcgagcccgtcaaagtcgttgcctgccaaaacgagcagcacgaagccgactgggtcgtcagccaaatcgtcaaacaaaaactcatcggcggcgacaaaacccaatatgccgatttcgccgtgttgtaccgcggaaagcatcaggcgaggattttcgaggaagcattgcgcggcgcgcgcatcccctaccgtctctccggcggacaaagctttttcgacaaagccgaaatcaaagacgtgttgtcttatgtgcggctgcttgccaaccccaatgacgatcccgcctttctgcgtgccgttaccacgcccaaacgcggcatcggcgatgtcacgctgggcaagctcaacacttacgcgcacgaacacgaatgcagcctgtatgaagccgcacaaaacgaagaagcccttgccacgctgaacaataccaaccgccaacacctgcaagcctttatggatatgttcggcagctaccgcgccaaagcggaaaccggcgaagcaggcgagttcatcaacagcctgctcgaagaaatcgactatgaaaaccatttgatgcaaaacgaagaaggcaaggccggcgaaatcaaatggcgcaatgtcagcgatttggtatcatggtttgcgcgaaaaggcggggaagacggcaaaaacatcatcgaactcgcccaaaccgtcgccttgatgacgcttttggaaggaaaagacgaagaagaaaccgatgccgtctcgctatccacgctacacgccgccaaaggtttggagtatccgtatgttttccttgtcggttgcgaagaaggcgttttgccgcacaacgacagtatcgaagagggcaacgtcgaagaagaacgccgcctgatgtacgtcggcatcacccgcgccaaacgccaactcacgctgacccactgcgtcaaacgcaaaaaacaaggcacatggcagttccccgaacccagccgattcatagacgaaatgccgcaggaagatttgaaaatcctggggcgcaaaggcggcgagccgattgtcagcaaggaagaaggcagacgcaaccttgccgatataatcggaaggctcgacagcatgaaaaaaggcaatccgtcggattaa

SEQ ID NO: 45081 - DNA, 924 bp, Neisseria meningitidis
atgacgaaaaccgaaccgaacaacgtccaactcgactggttggaatccgaatccatccacattatccgcgaagtggcggcagaatgcgaaaaccccgccctgctcttttccggcggcaaagattccgtggtcctgctcgccctcgcctgcaaagccttccggctgggcagcaggccggtaaaactgcccttcccgctggtgcatatcgacacggggcacaactaccccgaagtgattgccttccgcgacgcgcaggcggcaaaactcaatgcccgcctgatagtggggcgcgtggaagactccatcgctaaaggcacggtggtcttacgcaaagaaaccgattcgcgcaatgcggcacaggcggttaccttgttggaaaccatcgaggcaaacggctttgacgcgctgatgggcggcgcgcggcgcgacgaagaaaaagcccgcgccaaagaacggattttctcgttccgcgacgagttcggacaatgggatccgaaggcgcaacgccccgagctgtggtcgctgtacaacaccaggctgcacaaaggcgaaaatatgcgcgtcttcccgatttccaactggacggaactcgacatctggcaatacatcgcccgcgaaaacctcgagctgccgccgatttattacagccacaggcgcgaagtggtcagacgcagggggctgctggtccctgtaacgccgctcaccccgaaaatgccgtctgaaacctccgaaatccttgatgtccgcttccgcaccgtcggcgacatcagctgcacctgcccggtagaaagcaccgcgtccacgccggcggagattatcagggaaacggcggttgccgacatttccgaacgcagcgcgacccggctagacgatcaggcaagcgaggcggcaatggaaaaacgcaaaaaagaaggctatttctaa

SEQ ID NO: 45082 - DNA, 1548 bp, Neisseria meningitidis
atgcagcttaatcctgctgaaattagcgatttgattaaagccaagatcgaaaatctgtctgtaaatgccgaagtgcgtacccgtggtacggtgatttcggtaactgacggtatcgttcgcatccatggtttgtcagatgcaatgcaaggtgagatgctcgaattcccgggtaacactttcggcttggcgatgaacctggagcgcgactccgtcggcgccgtagtgttgggcgagtacgaacatattaaagaaggcgacacggttacctgtaccggtcgtatcttggaagtgccggtcggacgcgaactggtcggacgcgtcgttgatgcattgggtcggcctatcgacggcaaaggcccgattaatacaactttgaccgcccctatcgaaaaaatcgcaccgggcgtgattgcgcgcaaatcggttgaccagccgatgcaaaccggtctgaaggcgattgactctatggttcctgtcggtcgcggtcagcgtgagttgattattggcgaccgtcaaaccggtaaaacggccgtagcgctggatgccatcgtcaaccaaaaaggtacgggtgttatctgtatctatgtcgctatcggtcaaaaagcatcttctattgccaacgtggtccgcaaattggaagagcatggcgcgatggaacacacgattgtggttgctgcaactgcatctgaagcggcggcattgcaatatatcgcaccttactccggttgtacgatgggtgaattcttccgcgaccgcggcgaagatgccttgattgtttatgacgatttgtccaaacaggctgtggcttaccgtcaaatttccctgcttttgcgccgtccgcccggccgcgaagcctatcccggcgatgtgttctacctgcactcccgtctgttggaacgtgcagcacgtgtcaatgaacacgaagtggagaaattgaccaacggcgaagtaaaaggcaaaaccggttctctgactgctttgccgattatcgaaacccaagcgggcgacgtatctgctttcgttccgactaacgtcatttcgattaccgacggtcagattttcttggaaaccgacctcttcaacgccggtatccgtcctgcaatcaatgccggtatttccgtatcccgcgtaggcggtgctgcacaaaccaaagtgattaaaaagctgggtggcggtatccgtttggcgttggcacaatatcgtgaattggcggcgttctcgcaatttgcatccgatttggatgaagctacgcgcaaacaattggagcatggcgaagtcgtaaccgaactgatgaaacagaaacagttcagtacgttgaatacggctgaaatggctttgaccctttgggcaatcaacaacggttcgtattctgatgttccggttgccaaagctctggcttttgaatctgaatttttgagctttgtccgtacccaacatccggaagttttggaagccgtcaatgcttcaggtgcaatgtccgacgagagcgagaaaacgcttgaagcagccatgaaatccttcaaatcttcttacgcctatcaggcataa

SEQ ID NO: 45083 - DNA, 693 bp, Neisseria meningitidis
atgaccgcctttgtccacaccctttcagacggcatggaactgaccgtcgaaatcaagcgccgtgccaagaaaaacctgattatccgccccgccggcacacataccgtccgcatcagcgtcccaccctgcttctccgtctccgctctaaaccgctggctgtatgaaaacgaagccgtcctgcggcaaacactggcgaaaacaccgccgccgcaaactgccgaaaaccggctgcccgaatccatcctcttccacggcagacagcttgccctcaccgcccatcaagacacgcaaatcctgctgatgccgtctgaaatccgtgttcccgaaggcgcacccgaaaaacagcttgcgctgctgcgggactttttggaacggcaggcgcacagttacctgattccccgcctcgaacgccacgcccgcaccacacaactgttccccgcctcctcctcgctgacctctgccaaaaccttctggggcgtgtgccgcaaaaccacaggcatacgcttcaactggcggctggtcggcgcaccggaatacgttgccgattatgtctgcatacacgaactctgccacctcgcccacgccgaccacagccgcgcgttctgggcactgacccgccgcttcgcaccctacacgcccgaagcgaaacagtggctcaaaatccacggcagggaacttttcgccttaggctga

SEQ ID NO: 45084 - DNA, 1224 bp, Neisseria meningitidis
atgtctgcgcaatcacaaaacaatcatacgtccccattggtcgtcttgaccacgctgttcttcatgatgggttttattacctgcatgaacgacatccttatccctcatttgaaagaaattttcgacctgtcttacgttcaggcgatgctgatccaattctgtttctttaccgcctatgcggtgatgtccatcccgatgggggcttttgtcggcaaagtcggctacaaaaacggcgttatcggcggctttctgctgacggcggtcggatgcctgctgttttatcctgctgcgggcagccattcttacgcggtatttttgggcgcgttgtttattttggcttccggcgtaacgctgcttcaggttgccggtaatccttatgttaccctgctggcgaaacccggcaaggaatcggcaacactgacgctggttcaggcgtttaacgctttgggtacgaccattgcgccgcaaatcggcgcgttcctgattttggcggacgcaacccaaaccgtcagcaaggcggaacagatttcttccgtacagattccctatttgggactggcggggctgctgattatccttgccgttttcgtgaaaatgatccggctgcccgacgcgcgcaaaattgccgccgaggaaagcgcgcacaaccacgacggcaaaaccggcgtatggcaatacaaacatctcgtgttcggtacggcaggcattttctgctatgtcggcgcggaggtgtctatcggttcgttgatggtcaacgtattgggttatctgaaagggctggatcatgcttctgccgcgcattacctgtcgttctattggggcggcgcgatggtcggacgtttcctcggttcggcggtgatggcgaaattcgcgcccaaccgttatttggcgtttaacgcatcggctgcggtcgtactgcttgccatcgcgatggcgacgggtagcggcaatgcggatgtggcgatgtggtcgctgcttgccatcggttttttcaactcgattatgttcccgacgattttctctttggcaaccaaaggattgggaaaatttaccaacgcggcttccggtgtactgtgtaccgcgattgtcggcggtgcggtcgttcctgtcgtgcagggctgggtggcagatacttacaccctgatgtcttcgtttgtcgtttccgtcatctgttatctgtatatcgtgttttttgcggtgtacggatatagggcggacaaataa

SEQ ID NO: 45085 - DNA, 1143 bp, Neisseria meningitidis; identical to SEQ ID NO: 39162

SEQ ID NO: 45086 - DNA, 369 bp, Neisseria meningitidis
ttggtcgtgtatttttatccgaaagacagtacgctgggctgtacgacggaaggcttggatttcaatgcgcgtttggaacagtttgaggcattgggttataccgtggtcggtatttcccgcgacggcgtaaaggcgcatcagaatttttgcgccaagcagggtttccggttcgagctgttgagcgacaaggatgaaacagtgtgccgcctgtttgatgtcatcaaattgaagaaactgtacgggaaagagtcgttaggtatcgagcgcagtacgttcgtcttgaataaggatggagaaatcgcccatgaatggcggaaagtcaaagtggcgggtcacgcgcaggaagtattggaaacgctttcccgataa

SEQ ID NO: 45087 - DNA, 1497 bp, Neisseria meningitidis
atgtcgcttgccttggtttacagccgcgccttgagcggtatgaatgcgccgttggtcgaagtggaagcccaccttgccaacggtctgccgcatttcaacatcgtcgggctgcccgatacggaagtcaaagaaagtcgcgaccgcgtccgtgccgccattattcaaagcggttttgaattccccgccaaaaaaatcaccgtcaacctcgcccccgccgacctgcccaaagagtcggggcgtttcgatttgccgattgcaatcggcatccttgccgcatcggggcaggttgcgcccgaaaaactggcggaatacgagtttgcgggggaattggcactgtcggggctgttgcgccccgtgcgcggcgcgttggcgatggcgtggcagggtatgcaggcaaaacgtgcatttgttttgcctgaagaaaatgcaggacaagccgccgtgatgcgcggcattaccgtttacggcgcgcgctctttgggcgaagtcgccgcccatttgaacggcatcgaacctttggcgcaaaccgaatgccaagttcctcagatgccgtttgaacatggcggacaacctgatttgtgcgatgtgaaaggtcagcacaccgcgcgccttgctttggaaatcgctgccgcaggcggacacagcctcttgatgatgggtccgccgggaacgggcaagtctatgctctcccaacggctgcccggcatcctgccgccgctgaccgaagacgaattggtagaagtttgggcattgcgttcgctcctgcccaaccaccagcaacaactcgacagcaaccgtcctttccgcagtccgcatcacagcgccagcgcggcggctatggtcggcggcggttccgacccgcgtccgggcgagatttcattggcgcaccacggcgtattgtttttggacgagctgcccgagttcgaccgcaaagttttggaagttttgcgcgaaccgttggaaaacggcgaaatccacatttcccgcgcggcgcgccaagccgtctatcctgccaaattccaacttgttgccgccatgaacccctgcccgtgcggttatctcgggcatcccgtcaaaccctgccgctgcacgcccgaaagcgtcgcgcgttaccgcagcaagatttccgggccgctgctcgaccgcatcgatttgaccatcgaagtccccagcctgtccgccgccgaactgatgcagcaggaagcgggcgaaagcagcgcgtccgttttggaacgcgttatcgccgcccgcgacaaacaatacgcacggcagggcaaagtcaacgccgctttgagcgtcagcgaactcgattcccaagcctgcatccaaaaagaagcgcaggaagcattgggcggcctgctggaaaaactctccctttccgcccgcagcttccaccgcatcatgcgcgtggcgcgtacattggcggatttggctggcgacgaagaagtcggcagaagccacgtcatgaaagccataggtttccgtcgtgctttatag

SEQ ID NO: 45088 - DNA, 666 bp, Neisseria meningitidis
atgacggtattagacagagagcaggttctatccgcatttaaaaaccgcaaatcatgccggcattacgatgcggcacgtaaaatcagtgccgaggattttcagtttattttagaactcgggcgtttgtcgcccagttcggtcggttcggagccttggcagtttgttgtggttcaaaaccctgaaatccgacaggcaatcaagccgttttcttggggtatggcggatgctttggataccgccagtcatttggtggtgtttttggcaaagaaaaatgcccgcttcgacagcccgtttatgttggaaagcctcaaacggcgcggcgttaccgaaccggatgccatggcaaaatctttggcgaggtatcaggcgtttcaagccgacgacatcaagattttggacgattcgcgcgccttgtttgactggtgttgccgccagacctatatcgcgttgggcaacatgatgacgggtgcggcgatggcaggtatcgattcctgcccggtggaaggtttcaactatgccgatatggaacgcgtattgtccgggcagttcggtttgttcgatgcggcagaatggggcgtgtccgtcgccgcgacattcggttaccgcgttcaggaaatcgccacgaaggcgcgcaggcccttggaagaaaccgttatttgggcataa

SEQ ID NO: 45089 - DNA, 1812 bp, Neisseria meningitidis
atgaaacaaatccgcaacatcgccatcatcgcccacgtcgaccacggcaaaaccacattggtcgaccaactgctgcgccaatccggcacattccgcgccaaccagcaggttgacgagcgcgtgatggacagcaacgacctcgaaaaagaacgcggcatcaccatcctcgccaaaaacaccgccatcgattacgaaggctaccacatcaatatcgtcgatacgccgggacacgccgacttcggcggcgaagtagagcgcgttttggggatggtggactgcgtcgtcttgttggtggatgcgcaagaaggtccgatgccgcaaacccgtttcgtgaccaaaaaagccttggctttggggctgaaaccgattgtcgtcatcaacaaaatcgataaaccgtccgcccgtccgagctgggtcatcgaccaaactttcgaactcttcgacaacttgggcgcaactgacgaacagttggacttcccgattgtttacgcttcaggtttgagcggctttgccaagctggaagaaaccgacgagagcaacgacatgcgtccgctgttcgacaccatcctaaaatacacgcccgcaccgagcggcagcgcggacgaaacgctgcaactgcaaatctcccaactcgactacgataactacaccggccgcctcggcatcggtcgtatcttgaacggacgtatcaagcccggtcaagttgttgccgtgatgaaccacgagcagcaaatcgcccaaggccgcatcaaccagcttttgggtttcaaaggcttggaacgcgtgccgcttgaagaagccgaagcaggcgacatcgtgattatttccggtatcgaagacatcggtatcggcgtaaccatcaccgacaaggaaaatcccaaaggtctgccgatgttgagcgtagacgaaccgacgctgaccatggactttatggtgaacaccagcccactcgcgggtactgaaggcaaattcgtaaccagccgccaaatccgcgaccgcctgcaaaaagaattgctgaccaacgttgccctgcgcgtggaagataccgccgatgccgacgtgttccgcgtatccgggcgcggcgaactgcacctgaccattttgttggaaaatatgcgccgcgaaggctacgaactcgccgtcggcaagccgcgcgtcgtgtaccgcgacatcgacggtcaaaaatgcgaaccttatgaaaacctgaccgtggacgtacccgacgacaaccaaggcgcggtaatggaagaactcggccgccgccgtggcgaactgaccaatatggaaagcgatggcaacggacgcacccgcctcgaataccatattccagcgcgcggcttgatcggtttccaaggcgaatttatgaccctgacgcgcggggtcgggctgatgagccacgtgttcgacgattacgcgcccgtcaaacccgatatgcccggccgccacaacggcgtgctggtgtcccaagagcagggcgaggcagtcgcttacgccttgtggaatctggaagaccgcggccgtatgttcgtatcgcccaacgacaaaatctacgaaggtatgattatcggtatccacagtcgcgacaacgatttggtggtcaacccgctcaaaggcaaaaaacttaccaacgtccgtgccagcggtaccgacgaagccgttcgcctgaccacgccgattaaactgacgctggaaggtgcggttgagtttatcgacgatgacgaactcgttgaaatcacgccgcaatccatccgtctgcgcaagcgttacttgagcgaattggaacgccgccgccactttaaaaagctggattga

SEQ ID NO: 45090 - DNA, 2178 bp, Neisseria meningitidis
atgacacgcttcaaatattccctgctgtttgccgccctgttgcccgtgtacgcgcaggccgatgtttctgtttcagacgaccccaaaccgcaggaaagcactgaattgccgaccatcaccgttaccgccgaccgcaccgcgagttccaacgacggctacactgtttccggcacgcacaccccgctcgggctgcccatgaccctgcgcgaaatcccgcagagcgtcagcgtcatcacatcgcaacaaatgcgcgaccaaaacatcaaaacgctcgaccgcgccctgttgcaggcgaccggcaccagccgccagatttacggctccgaccgcgcgggctacaactacctgttcgcgcgcggcagccgcatcgccaactaccaaatcaacggcatccccgttgccgacgcgctggccgatacgggcaatgccaacaccgccgcctatgagcgcgtagaagtcgtgcgcggcgtggcggggctgctggacggcacgggcgagccttccgccaccgtcaatctggtgcgcaaacgcccgacccgcaagccattgtttgaagtccgcgccgaagcgggcaaccgcaaacatttcgggctggacgcggacgtatcgggcagcctgaacaccgaaggcacgctgcgcggccgcctggtttccaccttcggacgcggcgactcgtggcggcagcgcgaacgcagccgcgatgccgaactctacggcattttggaatacgacatcgcaccgcaaacccgcgtccacgcaggcatggactaccagcaggcgaaagaaaccgccgacgcgccgctcagctacgccgtgtacgacagccaaggttatgccaccgccttcggcccgaaagacaaccccgccacaaattgggcgaacagccgccaccgtgcgctcaacctgtttgccggcatcgaacaccgcttcaaccaagactggaaactcaaagccgaatacgactacacccgcagccgcttccgccagccctacggcgtagcaggcgtgctttccatcgaccacaacaccgccgccaccgacctgattcccggttattggcacgccgacccgcgcacccacagcgccagcgtgtcattgatcggcaaataccgcctgttcggccgcgaacacgatttaatcgcgggtatcaacggttacaaatacgccagcaacaaatacggcgaacgcagcatcatccccaacgccattcccaacgcctacgaattttcccgcacgggcgcctatccgcagcctgcatcgtttgcccaaaccatcccgcaatacggcaccaggcggcaaatcggcggctatctcgccacccgtttccgcgccgccgacaacctttcgttgatactcggcggcagatacagccgttaccgcaccggcagctacgacagccgcacacaaggcatgacctatgtatccgccaaccgtttcaccccctacacaggcatcgtgttcgacctgaccggcaacctgtcgctttacggctcgtacagcagcctgttcgtcccgcaatcgcaaaaagacgaacacggcagctacctgaaacccgtaaccggcaacaatctggaagccggcatcaaaggcgaatggcttgaaggccgtctgaacgcatccgccgccgtgtaccgcgcccgtaaaaacaacctcgccaccgcagcaggacgcgacctgagcggcaacacctactaccgcgccgccaaccaagccaaaacccacggctgggaaatcgaagtcggcggccgcatcactcccgaatggcagatacaggcaggttacagccaaagcaaaacccgcgaccaagacggcagccgcctgaaccccgacagcgtacccgaacgcagcttcaaactcttcactgcctaccactttgcccccgaagcccccagcggctggaccatcggcgcaggcgtgcgctggcagagcgaaacccacaccgaccctgccacgctccgcatccccaaccccgccgccaaagcccgcgccgccgacaacagccgccaaaaagcctacgccgtcgccgacatcatggcgcgttaccgcttcaatccgcgcgccgaactgtcgctgaacgtggacaacctgttcaacaaacactaccgcacccagcctgaccgccacagttacggcgcactgcggacagtgaacgcggcgtttacctatcggtttaaataa

SEQ ID NO: 45091 - DNA, 456 bp, Neisseria meningitidis; identical to SEQ ID NO: 39491

SEQ ID NO: 45092 - DNA, 807 bp, Neisseria meningitidis
atgcaaaaccacgttatcagcttagcttccgccgcagaacgcagggcgcacattgccgataccttcggcaggcacggcatcccgtttcagtttttcgacgcactgatgccgtctgaaaggctggagcaggcaatggcggaactcgtacccggcttgtcggcgcatccttatttgagtagtgtggaaaaagcctgctttatgagccacgtcgtattgtggaagcaggcgttggacgaaggcgtaccgtatgttgccgtatttgaggatgatgtcttactcggcgaaggggcggagaaattccttgacgaagacgcttggctgcaagagcgttttgacaaggattccgcctttatcgtccgcttggaaacgatgtttatgcacgtcctgacctcgccctccggtgtggcggactactgcgggcgtgcctttccgctgttggaaagcgaacactgggggacggcgggctatatcatttcccgaaaggcaatgcggttttttttggacaggtttgccgttttgccgtccgaacgcctgaaggcggtggattggatgctgttcagcagttttctcgacaaaggggggatgacggtttgccaactgacccccgccttgtgcatccaaagcgaaaccctgcccagccaactgaaaaacggcaggcaggaatcgtaccgcaaccgccgctccccgaaggttttgttgaaacgcgctttgggaaaaatcggcagggaaatcgaaagggcgagggaacggaaacgtcagaaaaaattggaaaaacacctcgggcggcacgtcgtcccgtttgaatag

SEQ ID NO: 45093 - DNA, 3204 bp, Neisseria meningitidis
atggctaaattttttatcgaccgccctatttttgcgtgggttatttcgattttcattattgcggcgggtattttcggcatcaaaagcctgcctgtttcgcaatatccgtctgtcgccgccccgaccattactttgcacgccacttatccgggtgcgtccgcgcaggtaatggaagacagcgtgctttccgtgatcgagcggaatatgaacggcgtggaaggtttggattatatgtccacttccgccgattcgagcggcagcggcagcgtgagcctgacctttacgcccgataccgacgagaatctggcgcaggtggaagtgcagaacaagctttccgaagtattgagcacgctgccggcaaccgtccagcaatacggcgtaaccgtatccaaggcgcgttccaatttcctgatgattgtgatgctttcgtcggatgtgcagtcaaccgaagagatgaacgactacgcgcagcgtaatatcgttcccgagttgcagcgtatcgaaggcgtggggcaggtacgtctgttcggcgcgcaacgcgcgatgcggatttgggttgatcctaagaaactgcaaaactacaatttgtcgtttgccgatatcggcagtgcgctgtccgcccagaacgtccagatttcagcgggttctatcggttcgcttcccgccgttcgcggacagacggttacggctaccgtaacggcgcaagggcagttgggtacggcagaagaattcggcaacgtcatcctccgcgccaataccgacggttctaatgtttacctgaaggatgtggcaagggtcggactgggtatggaagactattcttcctcaacccgtctgaacggtgtaaataccaccggtatggcggtgatgctgtccaacagcggcaatgcgatggcgacggcaaaggcggttaaagaacgcatggcgacgttggaaaaatactttcctcagggtatgagctggaaaaccccttacgatacttccaaattcgtcgaaatttcgattgaaaaagtgattcatactttaatcgaagcgatggtgctggtgtttgtcgtaatgtatctcttcctgcaaaacatccgttatacgctgattccgaccatcgtcgtaccgatttcgctgttgggcggtttcgccttcatctcttatatgggcatgtcgattaacgtactgaccatgtttgcgatggttttggtcatcggcatcgtggtcgatgacgcgattgtggtggttgaaaacgtcgagcgcattatggcgggtgaaggcttgccgcccaaagaagcgaccaaaaaagcgatgggtcagatttcgggcgcggtcatcggtattaccgccgttctgatttccgtgttcgtaccgttggcgatgttcagcggggcgacgggcaatatttacaaacagtttgccctgacgatggcgtcatcaatcgcattctccgccttccttgcgctgacccttacccctgctttgtgtgccacaatgttgaagacaatcccgaaagggcatcacgaagagaaaaaaggtttcttcggctggtttaacaagaaattcaacagttggacgcacggttacgaaggccgggttgccaaagtgctgcgtaagactttccgcatgatggttgtctatatcggcttggcggttgtgggcgtgttcctgtttatgcgcctgccgacttcattcctgccgaccgaagaccaaggcttcgtcatggtcagcgtgcaactgcctgcaggagcgacccaagagcgcaccaatgcgactttggcgcaagttacccaactggcgaaaagcattcctgaaatagaaaacatcattaccgtttccggcttcagcttttcgggcagcggtcagaatatggcgatgggttttgccatattgaaagattggaacgagcgtaccgcgcccggcagcgatgccgttgcgattgccggcaagctgacgggtatgatgatggggacgcttaaagacggttttggcatcgccgtcgtcccgcctccgattctggagttgggcaatggttcgggcctgagcatcaacctgcaagaccgcaataataccggccataccgcattgctggcgaagcgcaacgagttgattcagaaaatgcgtgccagcggtttgtttgaccccagcaccgtccgtgctggcggtttggaagactcgccgcagttgaaaatcgacatcaaccgtgccgccgcggcggcgcaaggcatttcgtttgccgacatccgcaccgcattggcaagcgcgctgagttcgtcttatgtcagcgacttcccgaaccaaggccgtctgcaacgcgtgatggtgcaggccgacgaggatgcccgtatgcagcctgccgatattttgaacctgaccgtgccgaacaaatccggcgtcgccgtaccgctttccaccattgctactgtttcttgggaaaacggtacggaacagagcgtacgcttcaacggttatccttcgatgaagctgtccgcttcgcctgcaaccggcgtttccaccgggcaggctatggcggcggttcaaaaaatggttgacgaattgggcggcggttacagcttcgaatggggcggacagtcgcgcgaagaggcaaaaggcggctcgcaaaccctgattttgtacggtttggcggttgcagccgtatttttggtacttgccgcgctttatgaaagctggtcgattccgctggcggtcatccttgtgattccgttgggtttgatcggtgcggctgcgggcgtaaccgggcgcaacctgtttgaaggactgttgggcagcgttccctcgttcgccaacgacatctactttcaagtcggtttcgttaccgtgatgggtttgagtgcgaaaaatgcgattttgattatcgaatttgccaaagaccttcaagcgcaagggaaaagcgcggttgaagccgctttggaagcagcccgcctgcgtttccgtccgattatcatgacctcgtttgcctttattttgggcgtggttcccctgtatattgccggcggtgcaagttctgccagccagcgcgccattggtacaaccgtattctgggggatgctcatcggcacgctcttgtcggtgttccttgttccgcttttctatgtggtggtgcgcaaattcttcaaagaaaccgcgcacgaacacgaaatggcagtaaaacacgctgccgaagcgggcatcaccggttcggacgacagccaacattaa

SEQ ID NO: 45094 - DNA, 1281 bp, Neisseria meningitidis
ttgaaggattgttttcctcaaggtctgaatggaaaaaaaacagcggtggcattaagcggcggcttggattccgtggtcttgctgcacctgcttgtccgcgctgggaaacgggcaggatttgtgccggaggcattgcatatccatcacggcttgagcccccgtgccgacgattgggcggatttctgtcaaaactattgcgatatgctaggggtggggctggaaacggttaaggtctgcgtggaaaaaaacggtttgggcatcgaagcggcggcgcggcaaaagcgttatgccgcgtttgccgaaaaaggctttgacattttggcgttggcgcaccacagggacgatcaaatcgaaacctttatgctggcggtcgcgcgcggcggcggtttgcgcgctttggcggctatgcccgccgtccgcccttttggggaaaaaggcatcatttggcggcccttgctgcctttttcgcgccaagatatatgggattatgcccaaaaacacggtttgccgaatatcgaggatgaaagcaataccgatacggcttatttgcgaaaccgcttccggcaccgtattttgcccgaactttcggcgcagattccccatttcgggcgacatgtgctgaacaatgtccgcgctttgcaggaagatttggctttgttggacgaggtcgtcgttcaggactgccgttgggtttgcggggccggttatttcgatacggcgcggtggctgacgttttccccgcgccggaaaacccatattttgcggcattttctgaaggaaaacggcattcccgtgccgaatcagaatgcccttgccgacattgcccgggttttgacggaggcaaaaaccggacgttggaacttgcaaggctttgaattgcatcattatgcaggcaggctgtttgtgttccgacaggaaaaaacggataaactgcggtttttgaaagacaggcagataagcggaaatttaagggaaatattgacggggcagggatttgttttaaaacgtcatccgtttgggcttcctgagcatcttttggagcaggacggaattttgaggacggtagcggtatcggatacgttggctgtcggcggcatccataaggatgtgaaaaaaatccttcaggggaaacgggttttgcctgtcctgcgcccaatttggccgcttgttgccgacagcggaaaccgtccattggcgttggcaaactgttgtgcggatttccaatactcggtttcagacggcattttgcccgtccatcctgactttcccattttattttga

SEQ ID NO: 45095 - DNA, 1173 bp, Neisseria meningitidis; identical to SEQ ID NO: 44658

SEQ ID NO: 45096 - DNA, 270 bp, Neisseria meningitidis; identical to SEQ ID NO: 43130

SEQ ID NO: 45097 - DNA, 1059 bp, Neisseria meningitidis
atgattacaccgcaacaggctatcgaacgattaatcagcaataatgagttgttttacgatgaaatgaccgacttgatgcgccaaatgatgagcggaaaagtgccgcccgaacaaattgcggcgattttgacaggattgcgtatcaaggttgaaaccgtttccgaaattaccgcagctgcagccgtcatgcgtgagtttgcgacaaaagtgccgctggagaatgcagaggggctggtcgatatcgtcggtacgggcggggatggcgcgaaaaccttcaatatttcgacgacttcgatgtttgttgccgcagcggcaggcgcgaaggttgccaaacacggaggccggtcggtctcttcctccagcggtgcggctgacgtggtggagcagatgggcgcaaacctcaacctgactcccgaacaggttgcccaaagtatcaggcagaccggcatcgggtttatgttcgcgcccaatcaccacagtgccatgcgccatgtcgcccctgtacgccgttcgctcggtttccgaagtattttcaacatattgggtccgttaacgaatcctgcgggcgcgccgaaccagcttttgggcgtgttccacaccgatttgtgtggcattttgtcgcgggtcttgcaacaacttggttcaaaacacgttttggttgtttgcggggagggcggtttggatgaaattacactgacgggcaaaacacgcgttgccgagctcaaagacggaaaaatcagcgaatacgacatccgcccagaagatttcggtatcgaaacccgccgcaatttggatgaaatcaaagttgccaatactcaggaatctttgttgaaaatgaatgaggtgctggaaggaagagaaggggctgcgcgcgatatcgtattgctcaacaccgccgccgccctgtatgccggaaatgtcgctgcttcgctttcagacggcatatctgccgcacgggaagccatcgattcaggcagggccaaatcgaaaaaagaggagtttgtcggttttcaaccacaacaaagatgccattttcttggaaagatggagcttgggtga

SEQ ID NO: 45098 - DNA, 918 bp, Neisseria meningitidis
atgagcatcatccactacgcctcgctgcacatcgaatccgcccgcaccgcgctcaaagagcttctgcgccaacccttcggcacgctgctcaccctcctgatgctcgccgtcgcgatgaccctgccgctgtttatgtatttgggcattcaaagcgggcaaagcgtgttgggcaaactcaacgagtcgccgcaaatcaccgtctatatggaaaccgccgccgcacaaagcgacagcgataccgtccgcagcctgctggcgcgcgacaaacggatcgccaacgtccgcttcatcggcaaggaagacggcttggcggaattacagtccaacctcgaccaaaatttggtttcgatgctcgacggcaacccgctgcccgacgcatttatcgttacccccgaccccgcgacaacgcccgcgcaaatgcaggcaatctaccgggacattaccaaactgcctatggtcgaatccgcgtctatggataccgaatgggtgcaaacgctgtaccaaatcaacgaatttatccgtaaaattttatggtttctttccctgacgctgggtatggcgttcgtccttgtcgcacacaacaccatccgcctgcaaatcctcagccgcaaagaagaaatcgaaatcaccaaactcttgggcgcgcccgcatcgttcatccgccgccccttcctttatcaggcaatgtggcagagcatcctttccgccgccgtcagcctggggctttgcggttggctgctttccacagtgcgccccttggtcgatgccatcttcaaaccctacgggctcaatatcggctggcgtttcttttatcctgaagaaatcgcgctggtgttcggcttcgtcatcgcgttgggcgtattcggcgcgtggcttgccaccacccagcacctgctcggcttcaaagccaaaaaataa

SEQ ID NO: 45099 - DNA, 957 bp, Neisseria meningitidis
atgaatataatcgggctggacatctcaaaggataccatagacgcaacattgcataaaacaaacggaagtatccattacattaaatttaagaataatgatgatggattaaaacagtttagattgtggataaagggaaacagaatcagaaaagcctatatcggcatggaggcaacaggcatctattacgaaaaggcagcagatatgctttcttcctactataccgtttacgttatcaatcccttaaaaatcaaggactacgggaaaagcaggtttaaccgtaccaaaaccgacaaagcagattcaaacctgatagcagattacataaaaaggcatcaagatacattgataccgtatcagatacccaaaaacaaagcactgcaaaaactgattaaccttaaaaatcaattacagcaacatcagaagcaaattaaaaaccgtcttcatagcactgaagaagacttcataaggaacatacatcaagacttgatagataccatacaggacaagatggaacaggtaaaaatagccatatccgaacaaatcaaaaaacaaacggataataaccattaccgcaatcttcaaaccatcccgagcataggcaaagacaccgcatcagttctttatgcgcaacttacagaaaaacattttaaaaccgcaaaccagtttgtatcctatgccggattaagtcccgccatcatacaatcagggacaagcgtaagaggtcggggcagattgagccgatacggaaacagacgattaaaaagtacgctgtatatgcccgccctttgtgcttaccgttttaacgcatttccgaaattaataaataatctgaaaaaagcgggtaagccaaagatggtaatcatcgttgccatcatgcgcaaactggcgaagctcgcctattacattgttaaaaccggccagccttacgatgcggaaagacaccgattgaatcaataa

SEQ ID NO: 45100 - DNA, 783 bp, Neisseria meningitidis; identical to SEQ ID NO: 38738

SEQ ID NO: 45101 - DNA, 1389 bp, Neisseria meningitidis
atgtctattaaatttgccgatttgaaccttgataaaaacattttgtccgccgtcagcagcgagggttacgaaagcccgacgccgattcaggcgcaggcgattccgtttgctttggaaggccgcgacatcatggcttcggcgcaaaccggctccggcaaaaccgccgcctttctgttaccgactttgcagcgactgaccaaacgcagcgaaaaaccgggcaaaggcccgcgtgctttggtgttgaccccgacccgcgaattggcggcacaagtggaaaaaaacgcgctggcgtatgccaaaaatatgcgctggttccgtaccgtcagcatcgtcggcggcgcatcgttcggctaccaaacccgcgccctgagcaaaccggtcgatctgattgtcgccacgccgggccgcctgatggacctgatgcaaagcggcaaagttgattttgaacgtttggaagtgctgattttggacgaagccgaccgtatgttggatatgggctttatcgacgacatcgaaaccatcgtcgaagccaccccgaccgaccgtcagactttattgttctccgccacttgggacggcgcggtcggcaaactggcacgcaaactgaccaaagaccctgaaatcatcgaagtcgaacgcgtggacgaccaaggcaaaatcgaagaacaactgctgtactgcgacgatatgcgtcacaaaaaccgcctgctcgaccacatcctgcgcgatgccaatatcgatcaatgcgtgattttcacgtccaccaaagcgatgaccgaagtcatcgcggatgaattgtacgaaaaaggtttcgccgccaactgcctgcacggcgacatgccgcagggctggcgcaaccgcacgctgatggatttacgcaaaggccgctgcaaaattttggttgccaccgacgttgccgcacgcggtatcgacgtaccgaccattacccacgtcatcaactacgacctgccgaaacaggcggaagactacgtccaccgcatcgggcgcaccggccgcgcaggccgcacgggtattgcgattacgtttgccgaagtgaacgaatacgtcaaagtccacaaaatcgaaaaatacattaaccgcaaactgcccgaactgaccatcgaaggcatggaaccgacccgcaaacgcaaatccgcaggcggtaagccaaaaggcaaaggcggctggggcgataggaaatccggcggccggcgcggcgatcataaaccgggcaaagaaggcttcggcggcaaaacgcgcggcgaaggtttcaagaaagaaggctttaagaaagacggtttcaaaaaaaccggcgaaggcttcaaaggcaaacgtaaagccggcgattcttttgcaggcagaggcgaacgccgttacaaagaccgctaa

SEQ ID NO: 45102 - DNA, 2115 bp, Neisseria meningitidis
atgttcctcttttcagacggcctacaatccattaataacaataatcgacgaaaacgcattgtgaaaaacgcctacatcccctctcgtggcatccgcaaaatcccccatctcttcaccctattgcctgagtttcatatctgcaaggatgggaaaggagcagaggctgttatcggctggggtttgcgcccgacgacacacaaagcgcgtgcttttgccgctgaacaccagcttccctttattgctttggaagacggctttttacgctcgcttggcctgggcgttgccggctatcctccctattccatcgtctatgacgacatcggcatctactacgacaccacacgtccttcgcgtttggaacaactgattcttgccgccgataccatgccgtctgaaaccttggctcaggcgcagcaggcgatggatttcatcctgcaacaccacctgtccaaatacaaccacgcgcccgaactttcagacgatcatcctttacgctccccatccaaacctgaaaccgtcctcattatcgaccaaacattcggcgatatggccatccaatatggcggcgcagacgcctctacgtttgaactgatgtttcagacggccttaaatgaaaacccgcaagccgatatttgggtcaaaacccatcccgatgttttgtgcggcaaaaaacaaggctatctgacccaactggcgcagcaacaccgcgtcaatcttctggcagaagacatcaatccgatttctttgttgcaaaacatcgataaagtttattgcgttacctcgcaaatgggttttgaggcgcttttgtgcggcaagccgctgaccactttcggcctgccgtggtatgccggatggggcgtgagtgacgaccgccatcctaaaatcgacagccttgttcaaacccaacgccgcgccccccgcaacttgctgcagctcttcgctgcagcctatctgcaatacagccgctacctcaaccccaataccggcgaagcaggcagcctctttgatgtcatcgactatctggcgacggtcaaacgtaaaaacgacaaattgcgtggcgagttatattgcgtcggtatgtctttgtggaaacgcgcggttgccaaaccgttctttaacgtaccctcttgccgtctgaaatttatctcttccacccaaaaactggccggggtcaaactgtccgacgatgcacgcatcctggcttggggcaacggcaaagaggccatcgtccgctttgccgaacaacaccacatccccctgctgcgcatggaagacggctttatccgctcggtcggactcggctccaacttagtgccgccgctgtcgctcgttaccgacgatatgagcatttatttcaatgccgaagccccatcccgccttgaacacatcctgcaaaaccaaaacttcgacgatcaagactttcagacggccttgaagttgcaaaaaatgctgaccgaaaaccatatcagcaaatacaacgtcggcaactcagactttaccgccccatcaaccgacaaaaccgtgatcctcgttcccggtcaggttgaggatgatgcgtctatccgctacggttcgccccaaatctatcacaatctggatttgctccgtaccgtacgcgaacgccatcccgatgcctatatcatctacaaaccgcatcccgatgtagtcagcggtaaccgcatcggccatatttcccctgaagatgctgcacgatatgccgaccaaaccgccgaacaagccgacatcctgacctgtctccaatacgcagacgaaatacataccatgacttcgctgaccggttttgaagccttgttgcgcggcaaaaaagtcagctgctacggcctgcctttttacgcaggctgggggcttacccaagatctgctccccatcccgcgccgtagccgcagacttgagctttggcagctgattgccggcacgctcatccactatcccgactacatccaccccgaaacccatcaggccataaatgcggaaaccgcagcccaaatcctgatacgacaaaaaaatatgcaaaaaaacaacaacggattacatcgcgggtgctttgccaaaaaattaggtaaaatcaaacaactatatcgatctttcaaataa

SEQ ID NO: 45103 - DNA, 1266 bp, Neisseria meningitidis
atgagcaaaaaacaacccgcacaaccgaccaggcgcactctttttaaaaccgcgatcgcagccggagcagtcggcgcaatcggaggttatctcggcggcaaaaaacagggcgaaaccgccgaacgcaccgccgaaagccaacactcgccccaagcctatccctgctacggcgaacatcaggcaggcatcgttacgccgcagcaggcgttttcgattatgtgcgccttcgacgtaaccgcgcaaagtgccaagcagctggaaaacctgttccgcacgctgaccgcccgcatcgagtttctcacccaaggcggcgaataccaagacggcgacgacaaacttccgccagccggcagcggcattttgggcaaagccttcaaccccgacgggttgaccgttaccgtgggggtgggcagcagcctgtttgacggccggttcggactcaaagacaaaaaaccgattcatttgcaggaaatgcgcgacttctccaacgataagctgcaaaaaagctggtgcgacggcgatttgagcctacaaatctgtgcctttacccccgaaacctgccaagccgccctgcgcgacatcatcaaacacaccgtccaaaccgccgttatccgttggagtatcgacgggtggcagcccaaatccgaacccggcgcgatggcggcgcgcaacctgttgggcttcagggacggcacgggcaaccccaaagtttccgaccccaaaaccgccgacgaggttttgtggacgggtgtggccgccaacagcctcgacgaaccggagtgggcgaaaaacggcagctatcaggcagtccgccttatccgccactttgtcgagttttgggacaggacgccgcttcaagagcaaaccgacattttcgggcggcgcaaatacagcggtgcgccgatggacggcaaaaaagaagccgaccaaccggattttgccaaagaccccgaggggaataccacgcccaaagacagccatatacgcctggcgaatccgcgcgatcccgaattcctcaaaaaacaccgcctcttccgccgcgcctacagctattcgcgcggactcgcctcaagcggacagcttgatgtcggactggtgttcgtctgctatcaggcaaaccttgccgacggattcatcttcgtgcaaaacctcctcaacggcgaaccgctggaagaatacatcagccccttcggcggcggctatttcttcgtcttgcccggcgtggaaaaaggcggctttttggggcaagggctgctgggcgtataa

SEQ ID NO: 45104 - DNA, 846 bp, Neisseria meningitidis
atgaacaaattttcccaatccggaaaaggtctgtccggttttttcttcggtttgatactggcgacggtcattattgccggtattttgttttatctgaaccagagcggtcaaaatgcgttcaaaatcccggcttcgtcgaagcagcctgcagaaacggaaatcctgaaaccgaaaaaccagcctaaggaagacatccaacctgaaccggccgatcaaaacgccttgtccgaaccggatgctgcgacagaggcagagcagtcggatgcggaaaaagctgccgataaagccgacgaggttgaagaaaaggcgggcgagccggagcgggaaaagtcggacggacaggcagtgcgtaagaaagtgctgacggaagagcgtgaacaaaccgtcagagaaaaagcgcagaagaaagatgccgaaacggttaaaaaacaagcggtaaaaccgtctaaagaaacagagaaaaaagctccaaaagaagagaaaaaggcggaaaaggaaaaagttgcacccaaaccgaccccggaacaaatcctcaacagcggcagcatcgaaaaagcgcgcagtgccgccgccaaagaagtgcagaaaatgaaaacgtccgacaaggcggaagcaacgcattatctgcaaatgggcgcgtatgccgaccgccggagcgcggaagggcagcgtgccaaactggcaatcttgggcatatcttccaaggtggtcggctatcaggcgggacataaaacgctttaccgggtgcaaagcggcaatatgtctgccgatgcggtgaaaaaaatgcaggacgagttgaaaaaacatgaagtcgccagcctgatccgttctatcgaaagtaaataa

SEQ ID NO: 45105 - DNA, 1641 bp, Neisseria meningitidis
atgactgacaacagccctcctccaaacggacacgcccaagcacacgtccgcaaaaacaacaccttcctctctgccgtctggctggttccgctgatcgcgctgattgccggcggctggctgtggattaaggaaatccgcaacagggggcctgtggttacgctcttgatggacagcgcggaaggcattgaggtcaacaatacggtcatcaaagtattgagcatcgatgtcggacgcgttacccgaatcaaactgcgcgacgaccaaaaaggcgtggaagtaaccgcccaactcaatgcggacgtatccggcctcatccgcagcgatacccagttttgggtggtcaagccgcgtatcgaccaaagcggcgtaaccggtttgggtacgctgctttcgggttcgtacatcgcttttacacccggcaaaagcgacgaggcaaaagacgtgttccaagtgcaggacattccgcccgttaccgccatcgggcaaagcgggctgcgcttgaatttgattggtaaaaacgaccgcatcctcaacgtcaacagccctgttttgtatgaaaactttatggtcgggcaagtcgaaagcgcgcatttcgacccgtccgaccaaagcgtgcattacaccatcttcatccaaagccccaacgacaaactgattcattccgccagccgtttttggctggaaagcggcatcaatatcgaaaccacaggcagcggcatcacactcaattccgcccctctgcctgccctgctgtcgggcgcgatttcatttgattcgccgaaaaccaaaaacagtaaaaacgtcaaaagcgaagacagcttcacgctttacgacagccgcagcgaagtcgccaacctgcctgacgaccgctcgctgtactacaccgcgtttttcaaacaatccgtgcgcggcctgaccgtcggttcgcccgtcgagtacaaagggctgaatgtcggcgtggtttccgatgtcccttattttgaccgcaacgacagcctgcatttatttgaaaacggctggattcccgtacgcatccgcatcgagccttcccgtttggaaatcaatgccgacgaacaaagcaaagagcattggaaacaacaatttcagacggctttaaacaaaggcctgaccgccaccatctccagcaacaacctgctgaccggcagcaaaatgattgagttgaacgatcagccttcgtcttcgcccaagctgcgaccgcataccgtttatgcaggcgataccgtcatcgctacacaaggcggcggtttggacgacttacaggtcaaattggcggatttgctggacaaattcggcaaactgcctttagacaaaaccgtttcaggtttaaacgcttcgctcgccgaactcaaatccacgctgaaatccattaacacgctaagcaataatccgcaaacgcaaaacattccgaacgagttgaaccaaaccctgaaagagttgcgcacaaccctgcaaggcgtatcgccgcaatcgcctatctacggcgacgtacaaaatacgctgcaaagtttggacaaaaccttaaaagacgttcaacccgtcattaacactttgaaagaaaaacccaacgcgctgattttcaacagcagcagcaaagaccctatcccgaaaggaagccgataa

SEQ ID NO: 45106 - DNA, 1392 bp, Neisseria meningitidis; identical to SEQ ID NO: 38504

SEQ ID NO: 45107 - DNA, 510 bp, Neisseria meningitidis; identical to SEQ ID NO: 36289

SEQ ID NO: 45108 - DNA, 534 bp, Neisseria meningitidis; identical to SEQ ID NO: 37691

SEQ ID NO: 45109 - DNA, 1101 bp, Neisseria meningitidis
atgattactctgaaaaccaccccatttcatcaagcccatcaagatgcaggcgcgaagccggtagattttgccggctgggagctgcccatccattatggttcgcaaatcgccgaacacgaagccgtgcgcaccgacgccggtatgtttgacgtatcccatatgcttgttaccgacgtagcaggcgcaaatgccaaagcctttttccgcaaattgattgccaacgatgtcgccaagctcgcttttgtcggcaaagccctttattccgctttgctcaacgacaacggcggcgtgattgacgacttgatcgtttaccgcaccaatgaagccgaaacccaataccgcatcgtgtccaacggcgcgactcgcgaaaaagatacggcacaattccacaaagtcggacaagagttcggtgtttccttcaatccgcgctacgacctcggcatgctcgccgtacaaggccctaaagccattgaaaaactcctgaccgtcaaacccgaatgggcagatgtcgtccataacctcaaaccgttccaaggcgcggatttgggcaacgactggtttgtcgcccgcaccggctacaccggcgaagacggcgtcgaagtcatcctgcccggcaccgaagccgtcgcattcttcaaagccctgcaagcagcaggcgtacaaccttgcggtctcggcgcgcgcgacaccctgcgcatggaagccggcatgaacctctacggcaacgatatggacgacgataccagcccgctcgaagcaggcatgggttggaccgttgatttgaaagacgaaagccgcgattttgtcggcaaagctgccttgttggcattgaaagaaaaaggcgttgccgtcaaacaggtcggtttgctgctcggcaaaggcggcatcctgcgcgcgcatatggaagtgttgaccgacaaaggcaaaggcgaaaccaccagcggcgtattctctccaagtctgaaacaatccatcgccatcgcccgcgtaccgaaagattttgacggcgataccgccaaagtgctgattcgcggcaaggaagcggacgtgcgcgtactgaagctgccgttcgtccgcaacggtcaaaaacagtttgattaa

SEQ ID NO: 45110 - DNA, 609 bp, Neisseria meningitidis
ttgaataccctctatttaggttcaaacagcccgcgccgaatggaaatcctgacacagttgggctatcaggtcgtcaagctgcctgccaacatcgacgaaacggtcagacagaacgaagaccctgcccgttacgttcaaaggatggcagaagaaaaaaaccgaaccgccctgaccctcttttgcgaaaccaacggcacaatgcccgatttccccctgattaccgccgacacctgcgtcgtttcagacggcattatattaggcaaaccccgctcccaagccgaagcaatcgaatttttaaaccgattgtccggcaaacaacataccgtcctgactgctgtctgcattcattatcgcggcaaaacgtcaagccgcgtccaaaccaaccgcgttgttttcaagcccctgagttcggaagaaatttccgcctatgtgcaaagcggcgaaccgatggacaaagccggcgcctacgccgtacaaggcataggcggcatctttatccaatctatcgaaggcagcttcagcggcattatgggactgcccgtttatgaaaccgtttcgatgttgcaggatttgggataccgctcccccttgtccgcccttaaaccgtaa

SEQ ID NO: 45111 - DNA, 657 bp, Neisseria meningitidis
atgaaaaacaaaaccaaagtctgggacttccccacccgccttttccattggctgcttgccgcatccctaccctttatgtggtatagcgcgaaaaccggcggcgatatgctgcaatggcacacgcgcgtcgggctgcttatccttttcctgctcatattccgcctctgctggggcatttggggcagtgataccgcccgtttttcccatttcgtccgcggatggtcgggtatcagggattatctgaaaaacggtattcccgaacatatccagcccggacacaaccccttgggcgcactgatggtcgtcgcgcttttggccgccgtctcatttcaagtcggcacggggctttttgccgccgatgaaaacaccttcagcaccaacggctacctcaaccatttggtttccgagcatacgggcagcctgatgcggaaaatccacctcaactttttcaagctgctcgccgttttttccgccatccatatcgccgccgtcgctgcataccgcctattcaaaaagaaaaacctcgtcttcccgatgataaccggcttcaaatatatcgaaggcaaaacttccatacactttgccggcaaagccgcgcttgccgccgcattatcggttgtcgcgcttgtcgcagccgccatcctgctcctgtcctga

SEQ ID NO: 45112 - DNA, 564 bp, Neisseria meningitidis
atgaccgatttagaaaccaaacgccttgaaacacaggcgatgcttgaaaacgccgatcttttgttcgaccaaggccaatgccgtgccgcactgcaaaaagtggcggacgagattacgcgcgatttgggcggcaaatatccgctgctgctgcccgtgatgggcggcgcggtggtgtttacggggcagttgctgccgctgttgcgttttcccttagattttgattatgttcacgtttcccgttacggcgacaagctggagggcggcgcgttcaactggaagcgtatgcccgatgcggaacaaatccggggcaggcacgtcgtcgtgctggacgatattttggacgaagggcatacgatgtccgccattcaagccaaacttttggaaatgggtgcggcaagctgccgtgcggcggtgttcgccaacaagctgatcgacaaacccaagcctatccgagccgattatgtcggactggatgtgccgaaccgttatgttttcggttacggcatggatgcggcgggctgctggcgcaatctgggcgagatttacgcattggacggaaaataa

SEQ ID NO: 45113 - DNA, 1065 bp, Neisseria meningitidis
atggcactcgtatccatgcgccaactgcttgatcatgctgccgaaaacagctacggcctgcccgcgttcaacgtcaacaacctcgaacaaatgcgcgccattatggaagccgccgaccaagtcggcgcgcccgtcatcgtacaggcgagtgcaggtgcgcgcaaatatgcgggcgcgccgtttttgcgccacctgattctggcggcagtcgaagaatttccgcacatccccgtcgtgatgcaccaagaccacggcgcatcgcccgacgtgtgccaacgctccatccaactgggcttttcctccgtgatgatggacggctcgctgatggaagacggcaaaaccccttcttcttatgaatacaacgtcaacgccacccgtaccgtggttaatttctcccacgcctgcggcgtatccgttgaaggcgaaatcggcgtattgggcaacctcgaaaccggcgaagcaggcgaagaagacggcgtaggtgcagtgggcaaactttcccacgaccaaatgctgaccagcgtcgaagatgccgtacgtttcgttaaagataccggcgttgacgcattggctattgccgtcggcaccagccacggcgcatacaaattcacccgtccgcccacaggcgacgtattgcgtatcgaccgcatcaaagaaatccaccaagccctgcccaatacacacatcgtgatgcacggctccagctccgttcctcaagaatggctgaaagtcatcaacgaatatggcggcaatatcggcgaaacctacggcgtgccggttgaagaaatcgtcgaaggcatcaaacacggcgtgcgcaaagtcaacatcgataccgacttgcgccttgcttccaccggtgcggtacgccgctaccttgccgaaaacccgtccgactttgacccgcgcaaatacctgagcaaaaccattgaggccatgaagcaaatctgcctcgaccgttatcttgcgttcggctgcgaaggtcaggcaggcaaaatcaaacctgtttcgttggaaaaaatggcaagctgttatgccaagggcgaattgaaccaaatcgtcaaataa

SEQ ID NO: 45114 - DNA, 204 bp, Neisseria meningitidis; identical to SEQ ID NO: 39691

SEQ ID NO: 45115 - DNA, 351 bp, Neisseria meningitidis; identical to SEQ ID NO: 39765

SEQ ID NO: 45116 - DNA, 171 bp, Neisseria meningitidis
atggcgcaatatatgtgcggcccctgcggctggatttacgatgaagaacacggcgaccccgaacacggcatcccccctgggacaaagtttgaagacatccccgacgactggaaatgccccgaatgcggcgtgggcaaagaagatttctacctgttggatttcgtgatatag

SEQ ID NO: 45117 - DNA, 330 bp, Neisseria meningitidis
atgtcattacccccatgcccacaatgcgcctccgaatacacctatgaagacggcggacaatacatctgccccgaatgcgcccacgaatggaatgaaaccgaatccgccgccgaccttgcggctcaagtgctcgatgccaacggcgcggcactgcaaaacggcgataccgtcatcctcatcaaagacctcaaggtaaaaggcagctcgatggtgatcaaacaaggtacaaaagtcaaaggcatacgcctgcaggaaggcgatcacaacatcggctgcaaaatcgacggcagcgcgatgaatttaaaatccgaattcgtcaaaaaagcctga

SEQ ID NO: 45118 - DNA, 531 bp, Neisseria meningitidis
atgaaattcgtcagcgaccttttgtccgtcatcctgtttttcgccacctataccgttaccaaaaacatgattgccgcaacggcggtcgcattggttgccggtgtggttcaggcggcttttctgtattggaaatataaaaagctggatacgatgcagtgggtcggattggtgctgattgtggtattcggcggcgcaaccattgttttgggcgacagccgcttcattatgtggaagccgagcgttttgttttggctgggcgcgctgttcctgtggggcagccacctcgccggtaaaaacggcttgaaggcgagtatcggcagggagattcagctttcagatgccgtatgggcgaaattgacgtatatgtgggtcggttttctgatttttatgggtattgccaactggtttgtgtttactaggtttgaagcgcaatgggtcaactataaaatgttcggctcgactgcactgatgcttgttttctttattattcagggtatttatctgagtacctgtctgaaaaaggaggattga

SEQ ID NO: 45119 - DNA, 1041 bp, Neisseria meningitidis
atgcaacccatccgataccgaaccgaccttaccccctacaacactttcggcctgcgcgcccaagcccgagcctttattgcgcttgaacacgccgacgggttgcgcgacatcgtccggctacccgagttcaaccgagatactgttttatggctgggcggcggcagcaatatccttttgatggaggactacgccggtctggtcgtacatatggaaaacaaaggcatacgcgaaattgctcgttcagacggcatggttctgattgaagcgcaggcgggcgaaatctggcacgattttgtcctgcacgccgtcgcgctgggtttgaacggtttggaaaacctgagcctgattccgggtacggtcggcgcgtcgcccgtgcagaacatcggcgcatacggcgtagaggcgaaagatgtgattcacagcgtgcgctgcttcgatttggatacggaaacctttgtaaccctttccaatgccgactgccgcttcgcctaccgcgaaagcctgttcaagcaggaaggtaaagggcgttatgtgattgtttcggtcgtatttgcattaaaaacgcattttgtgccgaacttgggttacggcgatttggcggccgccgttgccgaactgagcgcgggcagggtgccgacggcgaaagatgtttccgatgcagtgtgtgcaatccgcaacagtaaacttcctaatcctaacgtgcttggcaatgtcggcagtttctttaaaaaccccgtcgtcagcgcagaaaaagccgccaccttgttgcagcggcatcctgatatgccgcgctatccgcagcccgacggttcggtcaaactcgccgccggctggctgatcgaccaatgtcgtctgaaaggctttcaaatcggcggcgcggcggtacatgacaggcaggctttggtcttagtgaacaaaaacaatgcctcggcaaacgatgtccggcagttggcgcaacacatcaaatttacagtatttgctcggtttcaggtagaattgcacgccgaacccaattggctgcctgcttcgttcagcctgtaa

SEQ ID NO: 45120 - DNA, 417 bp, Neisseria meningitidis; identical to SEQ ID NO: 39610

SEQ ID NO: 45121 - DNA, 1143 bp, Neisseria meningitidis
atgaatgtttttaaacaacagcttgaacaactcggcgcgcaaaaccaatatcgttcgattccggatttgattcatcaagggcggtatattacgcgggaaaaccgcaaaatgctgaatatgtcgtctaatgattatttgggtttggcatcagatgaaaacttgcgccggtcttttttgcagcaatacggcggtaattttccctcttttaccagttcttcatcgcgtttattaacgggcaactttcctatttataccgatcttgagcagcttgtcgcacaacgtttccaacgggaaagcgcgttattgttcaacagcggctatcacgccaatctcggtattttgcctgctttgacgacgacgaaaagtttgattttggcagataaatttgttcacgccagtatgattgacggcatccgtttgagccggtgtgcgtttttccgttatcgtcataatgattatgaacatttgaaaaatctgcttgaaaaaaacgtcggaaaatttgaccgcacttttatcgttaccgaatctgttttcagtatggacggcgatgtggcggatttgaaacagcttgtccaattaaaaaaacagtttcccaatacttatctttatgtggatgaagcccacgcaatcggtgtttatgggcaaaacggattggggattgccgaacgggataatttgattgccgagattgatttattggtcggcactttcggtaaagccttagcctcggtgggggcgtatgccgtctgcaaccaagtattgaaagaatgtttgattaatcaaatgcgcccattgattttttcaaccgcattgccgccgtttaatgtggcttggacttattttatttttgaacgattgccgcaattctcaaaagaaagaagccatcttgagcagttaagcgcatttttacggcgggaagtggcgcatcggacgcaaataatgccgagccaaacctgtatcgtcccctatattttaggcgggaatgaagccacccttgccaaagcggaatacctgcaaaggcagggttattattgcctgcccatcagaccaccgacagtaccaaaaggtacatccagaatacgattgtctttgacggcagatatgacaatggatgaagtgcggcagtttgcggtgtgcctgtaa

SEQ ID NO: 45122 - DNA, 1311 bp, Neisseria meningitidis
atggacacttcaaaacaaacactgttggacgggatttttaagctgaaggcaaacggtacgacggtgcgtaccgagttgatggcgggtttgacaacttttttgacgatgtgctacatcgttatcgtcaaccctctgattttgggcgagaccggcatggatatgggggcggtattcgtcgctacctgtatcgcgtctgccatcggctgttttgttatgggttttgtcggcaactatccgattgcactcgcaccggggatggggctgaatgcctatttcacctttgccgtcgttaagggtatgggcgtgccttggcaggttgcgttgggtgcggtgttcatctccggtctgatttttatcctgttcagcttttttaaagtcagggaaatgctggtcaacgcactgcctatgggtttgaaaatgtcgattgctgccggtatcggtttgtttttggcactgatttccctgaaaggcgcaggcattatcgttgccaatccggcaaccttggtcggtttgggcgatattcatcagccgtccgcgttgttggcactgttcggttttgctatggtggtcgtattgggacatttccgcgttcaaggcgcaatcatcatcaccatcttgaccattaccgtcattgccagcctgatgggtttgaatgaatttcacggcatcatcggcgaagtaccgagcattgcgccgacttttatgcagatggattttgaaggcctgtttaccgtcagcatggtcagtgtgattttcgtcttcttcttggtcgatctatttgacagtaccggaacgctggtcggcatatcccaccgtgccgggctgctggtggacggtaagctgccccgcctgaaacgcgcactgcttgcagactctaccgccattgtggcaggtgcggctttgggtacttcttccaccacgccttatgtggaaagcgcggcgggcgtatcggcaggcggacggaccggcctgacggcggttaccgtcggcgtattgatgctcgcctgcctgatgttttcacctttggcgaaaagtgttcccgcttttgccaccgcgcccgccctgctttatgtcggcacacaaatgctccgcagtgcccgggatattgattgggacgatatgacggaagccgcacctgcgttcctgaccattgttttcatgccgtttacttattcgattgcagacggcatcgctttcggcttcatcagctatgccgtggttaaacttttatgccgccgcaccaaagacgttccgcctatggtatggattgttgccgtattgtgggcactgaaattctggtatttgggctga

SEQ ID NO: 45123 - DNA, 267 bp, Neisseria meningitidis; identical to SEQ ID NO: 39031

SEQ ID NO: 45124 - DNA, 381 bp, Neisseria meningitidis; identical to SEQ ID NO: 39549

SEQ ID NO: 45125 - DNA, 1635 bp, Neisseria meningitidis
atgaccaaattcattttcgtaaccggcggcgttgtctcctcactgggtaaaggtatcgccgccgcttctattgccgccatcctcgaatcgcgcggcttgaacgttaccatgctcaagctcgatccttatatcaacgtcgatcccggcacgatgagcccgttccaacacggcgaagtgttcgtaaccgacgacggcgcggaaaccgacctcgacttgggacactacgaacgctttatcgattccacgatgacccgccgcaacagcttcagcacggggcaggtgtacgaaaacgtcatcgccaaagaacgacggggcgactatttgggcggcacggttcaagtcattccgcacattaccgacgaaatcaaacgccgcatccacgaaggcgcggcaggttacgatgtggcgattgtcgaaatcggcggtacagtcggcgatatcgaatctttgccattcttggaagccatccgccagatgcgaagccagttgggacgcaacaacaccctgttcgcccacttgagctacgtcccctacatcgccgctgcaggcgaaatcaaaaccaagccgacccagcacaccgttaaagaaatgttgagcatcggtttgcaacccgacatcctgatttgccgtatggacaggacaatgcctgcggacgaacgccgcaaaatcgccttgttctgcaacgtggaagaacgcgcgattgtcggcagctacgatgtggacagcatctacgaatgccccgaaatgctgcacgaccaaggcatcgacaacatcattaccgagcagttgcagcttaatgtgcagcaggcggatttgaccgcgtggaaaaaaatcgtccacgccatccaaaacccgaaacacaccgtcaaaatcgccatggtcggcaaatacgtcgatttgaccgagtcctacaaatcgctgatcgaagccttgaaacacgcaggcattcacaccgaaaccgacgtacaaattacctttgttgacagcgaaagcatcgagaaaaacaacggcgacgtttccatgcttaaagacatggatgccatcctcgttcccggcggttttggttcgcgcggcgtggaaggcaaaatcgccgctgtgcgctatgcccgcgaaaacaacgtgccatacttgggcatctgcctcggtatgcagattgcgctgatcgaatacgcccgcgacgtggcaggtttgaaaggtgcgaattccaccgagttcgacctcaaatgcgccgcccccgtcgttgccctgattgacgaatggcaaactgccgacggcagcgtcgaaacccgcgacgaatccgccgatttgggcggcaccatgcgtttgggcgcgcaagaagtcgaattgaaagcaggcagcctcgccgccaaaatctacggcagcgaacacatccgcgaacgccaccgccaccgctacgaagtcaacaacaactacgttcctacgctggaacaggcaggtttggtcatcggcggcgtatccgccggacgcgaacgcttggtcgaaaccatcgaactgccgaaccatccttggttcttcgcctgccagttccaccccgagtttacctccaatccgcgcaaagggcatcctttgttcaccgcgtttgtcaaagctgcgttgaacaataaaaaagcctga

SEQ ID NO: 45126 - DNA, 444 bp, Neisseria meningitidis
atgagcgaagaactgcaacccgtattcagcatcgagcgactgtatgtcaaagacttgtctttggaagtgccgcacgcgccgcaaatctttttggaacagggcgagcccgaagtggatatgcgcgtttccaccggcagccaaaagctggaagacggctactacaacgtggatgtaaccgttaccgtaaccgccaaattggataacgagcgcacgatgtttttgaacgaagtaacccaaagcggtattttccgtttggaaaacatccccgaagaagatgtgcagctgctgctgggcgtggcgtgtccgaacatcctcttcccttacgcgcgcgaagccgtttccggtacggtaacacgtgccggcttcccgcccgtcctgctcgcgccgattaattttgaggcgatttaccaacaacagcaggaagccgaagccgccggggcttga

SEQ ID NO: 45127 - DNA, 1413 bp, Neisseria meningitidis
ttgttgtttgaatttaaagagaataaaatgattgttgcttctcgctggcccttgctggaaaaggtatttttacggtttggaatgcctgttgccgtggttgatttggaatcgacgggcggcaatctgtatgaagacagggtaaccgaagtggctttggtcaagtttgagcagggaagggtggtgaggcatgagtggttggttaatcctcaaaaaccgattccgcagtttgtggtggggctgacggggatttcagacggcatggttgccgatgcgcctgtttttgcagagattgccggcgagttgttttcggtattgaagggttgtgtgctggttgcacataacagccgtttcgactatacgtttttaaagcatgagtttcatcgtgtgggtatcggattttcatcgcctgttttgtgcagtgtgcagctgtcccggtgtctgtatccgcaattttacaagcacagcctggacagtatcatcgaaaggttggggattgttgtggaagacaggcatcgtgcgatggcggatgtatcggcattgtgcgattatttggaatacagtctgtcggaacacggggtcgaggcatggatcaggcagtgtttccgtttgatgaatccgaaaccgttgcctgccgcgctgcccgaacggttgagggaacagttgtacggtttgcctgacggtatgggggtgctggcctgtttcgacggcggaggaaaagtaaattacatcggtacgtttgaacgggtatatagcgaggtttcggctttattggattccggaaaagccccgtttgattggtgcaatacggaggaagtccgtttttttcctgcattgggcagcctgcatgcatataagattaaagcggaattggtcggacgttatcattcgggttgttatgtatctgccaaaaatctgcttaaaacatttacgaccgtcaggtttgaaaaaggttcagacggcatgttgaatgcgaaaacagcggctttgaaaaacggtgtgacggataatccgcctaccggattatttgccaataaaaaggcagcgagacgggctttgtcgtcgtgggcggaaacatacggattgtgtcctgccgcagccggtatcctgtcggacggttatacagaggatgagccttgtcccgtatatgtttcagaccgatgtgataaggcgtgcgtccgctctgacgaacaggttttggcgtttgcacacaagctgcctgtcttggattggggaaaaatgcatgaggtggaaattaccgaaaccgatcctttaacgggggaaaaagttgttctgcatggaatgggcggcgcattagaaatggatgacgggctttggtatttcgataaagatttaccggatgcgtttaaggcgaagtttaaaacggacaggaaaaatattaaggaaatcggttaa

SEQ ID NO: 45128 - DNA, 294 bp, Neisseria meningitidis; identical to SEQ ID NO: 38787

SEQ ID NO: 45129 - DNA, 717 bp, Neisseria meningitidis
atgaagaccaaattaccgctttttatcatttggctgtccgtatccgccgcctgttcttcccctgtttcccgcaatattcaggatatgcggctcgaaccgcaggcagaggcaggtagttcggacgctattccctatcccgttcccactctgcaagaccgtttggattatctggaaggcacactcgtccgcctgtcgaacgaagtggaaaccttaaacggcaaagtcaaagcactggagcatgcgaaaacacacccttccagcagggcatacgtccaaaaactcgacgaccgcaagttgaaagagcattacctcaataccgaaggcggcagcgcatccgcacataccgtcgaaaccgcacaaaacctctacaatcaggcactcaaacactataaaagcggcaggttttctgccgctgcctccctgttgaaaggcgcggacggaggcgacggcggcagcatcgcgcaacgcagtatgtacctgttgctgcaaagcagggcgcgtatgggcaactgcgaatccgtcatcgaaatcggagggcgttacgccaaccgtttcaaagacagcccaaccgcgcccgaagccatgttcaaaatcggcgaatgccaatacaggttgcagcagaaagacattgcaagggcaacttggcgcagcctgatacaggcttacccgagcagcccggcggcaaaacgcgccgccgcagccgtacgcaaacgatag

SEQ ID NO: 45130 - DNA, 1503 bp, Neisseria meningitidis
atgcaagtaaatattcagattccctatatactgcccagatgcgtgcgtgctgaagacaccccctacgcttgctatttgaaacagctccaagtcaccaaagacgtcaactggaaccaggtacaactggcgtacgacaaatgggactataaacaggaaggcttaaccggagccggagcagcgattattgcgctggctgttaccgtggttactgcgggcgcgggagccggagccgcactgggcttaaacggcgcggccgcagcggcaaccgatgccgcattcgcctcgctggccagccaggcttccgtatcgctcatcaacaataaaggcgatgtcggtaaaaccctgaaggagctgggcagaagccgcacagtgaaaaaactggttgtagcagcggccatcgcaggcgtatccaacaaaatcggtgcttcctcccttgccacttggagcgaaaccccttgggtaaacaacctcaacgtcaacttggctaatgcgggcagtgccgcgctgattaacaccgccgttaacggcggcagtctgaaagacaatctggaagcgaatatccttgcggctttggtgaatactgcgcatggagaggcagcaagtaaaatcaaacaattggatcagcactacattgcccataagattgcccatgccatagcgggctgtgcggcagcggcggcgaataagggcaagtgtcaggacggcgcgattggtgcggtcgtgggggagattgtcggggaggctttggttaagaataccgatttcagcggtatgactgcttctgaaattgaaaaagctaaagcgaatattactgcgtatgcaaaattggtagccggagcgactgtaggtgttacaggaggcaatgttgatgtggcggcaaatgcttccgaaacagctgttaaaaataatgcattagatattatttgggatatcggcaacctcgtatgggacggcggtaaatggatttacgccaaatctattggcgataagcagatggctcgagaagcggcgattgattttggtgtggatgccgccgcagctgccgttccctttgttccggcaggtgcgactaaaatcagccgaggcggggcttatgttctgaaggcgggagacgaagcagttgatacggctaaagccatacaggaaattcagaagcagaccggaatcaagcttacttatgataaggttaataaggtttggacaacaccggcggggttagattatgggttagatgctaagcatggtaataggattaaacatgttttagcccatacaattccaaatccaaacaaacctgttcattctgtttttaatgtgtcccgtaaagaagttttgcctttggttgatgaagcttggagaatgaaaggaaatcctttgccaaatgattcatccgtatatcttgtagatatgaagaaacctattggaacaaaaggagaaacaaaagtgcggattgttgtgcaaaaaggaacaaataaaatcatttctgcatatcctcagaaataa

SEQ ID NO: 45131 - DNA, 195 bp, Neisseria meningitidis; identical to SEQ ID NO: 39733

SEQ ID NO: 45132 - DNA, 375 bp, Neisseria meningitidis
atgcagtatctgattgtcaaatacagccatcaaatcttcgttaccatcaccattttggtattcaacatccgtgttttcctactttggaaaaatccaaaaaagcccttggtcggcttttggaaggcactgccccaccttaacgacaccatgctgctgtttacgggattgtggctgatgaaaattacccatttctccccgttcaacgcgccttggctcggtacaaaaatcctgcttctgctcgcctatatcgcattgggtatgatgatgatgcgcgcccgtccgcgttcgaccaagttctacaccgtttacctgctcgccatgtgttgcgtcgcctgcatcgtttaccttgccaaaaccaaagtcctgcctttctga

SEQ ID NO: 45133 - DNA, 669 bp, Neisseria meningitidis
atgaaaaacctcgccatcttcgacctcgacaacaccctcatcaacaccgattccgaccacgcctggccgcaatacctcatcaaaaaaggcttggttgacgctgccgaaaccgaagcgcaaaacgaaaaattctaccgcgactaccaaaacggctgcctcgacatcgacgcattcctcaaattccacctcgccccgctcgcccgttacagcaaagaagagctggcggaatttcaccgcgaatttatggcggaatacatcatcccccacatctcgcctatgcagcgtatgctggtgcagagccaccaaatggcaggcgacgaaacccttgtgatttcctcaaccaacgagttcatcatcacccccgtctgccaccttttcggcattaccaacatcatcggcacacaactcgaatccggttccgacggccgctacaccggcaattacatcggcacgcccagcctcaaagaaggtaaaatcacccgcctgaaccaatggctcgccgaacgcggcgaaacgctcgaaagctacggcaaaacctatttttacagcgactccaaaaacgacctgccgctgctgcgcctcgtcgacgaacccgtcgccgtcaaccccgatgccgagctggaaaaagaagccaaagaaaaaggctggccggttttgaatttcaaatga

SEQ ID NO: 45134 - DNA, 690 bp, Neisseria meningitidis
atgaagcgcaaaaatatcgcgctgattcccgccgccggcatcggggcgcgtttcggtgcggacaaacccaagcaatatgtcgaaatcggaagcaaaaccgttttagaacatacgcttgggatttttgaacggcatgagggcgtcgatttgaccgtcgttgtcgtctcgcccgaagacacgtttgccgataaggttcagacggcatttccacaggttcgggtgtggaaaaacggcggacagacccgcgccgaaaccgtccgcaacggtgtggcaaaattgttggaaaccggtttggcggcggaaaccgacaatattctggtacacgatgccgcgcgttgctgcctgccgtctgaagctttgacgcggttgatagaacaggcgggcaacgctgccgaaggtgggattttggcaattcccgttgccgatacgctcaagcgcgcggacggtgggaacattagtgcaaccgtcgagcggacgagcctttggcaggcgcaaacgccgcagcttttccgcgccgggctgctgcaccgcgcattggctgcggaaaacttggacggcattaccgatgaagcgtccgccgtggaaaaattgggtgtgcgtccgctactgatacagggcgacgtgcgcaatttgaaactgacgcagccgcaggacgcatacatcgtcaggctgctgctcgatgccgtctga

SEQ ID NO: 45135 - DNA, 1398 bp, Neisseria meningitidis
atgagccaaggcaaaatcgtacaaattatcggtgcggttgttgacgtggaatttccacgcgacatgattccgcgcgtttacgacgctttgaaattagacgaaaacggtctgactttggaagtccaacagcttttgggcgacggcgtagtccgtaccattgcgatgggcagctcggacggtttgaaacgcggcatgactgtgagcaataccggtgcgcccattactgtgccggtaggtaaaggtacattgggtcgtattgtcgacgtattgggtacgcctgttgacgaggcaggtccaatcgataccgacaagagccgtgccatccaccaagccgctcctaagtttgacgaactgtcttccacaaccgaattgctcgaaacgggcattaaagtgattgacttgctgtgtccgtttgccaaaggcggtaaagtaggtctgttcggcggtgccggtgtgggtaaaaccgtgaacatgatggaattgatcaacaacatcgccaaagcgcacagcggcttgtccgtgttcgcaggcgtgggtgagcgtacccgcgaaggtaacgacttctaccacgagatgaaagattccaacgtattggataaagtggcaatggtttacggtcagatgaacgaacctccgggcaaccgtttgcgcgtcgcattgaccggtttgaccatggcggaatacttccgtgacgaaaaagacgaaaacggcaaaggccgcgacgtattgttcttcgtggacaacatctaccgttacactctggctggtaccgaagtatccgcattgttgggccgtatgccgtctgcagtgggctaccaaccgacattggcagaagaaatgggtcgtttgcaggagcgtattacctctacccaaaccggttctattacttctatccaagccgtatatgtacctgcggacgacttgaccgacccgtctccggcaacaacgttcgcccacttggacgcaaccgtcgtattgagccgcgatattgcctctttgggtatttacccggcagtcgatccgcttgattccacttcgcgccaactggatccgatggtcttgggtcaagagcactacgacgtggcgcgcggcgtacagtccaccctgcagaaatacaaagaattgcgcgacatcatcgccatcttgggtatggacgaattgtctgacgaagacaaactgaccgtaatgcgtgcgcgtaaaatccaacgcttcctgtcccaaccgttccacgttgccgaagtgtttacaggttctccgggcaaatatgtcgccctgcgcgataccattgccggcttcaaagccatcttgaacggcgaatacgatcatctgcccgaacaggcattctacatggtcggcagcatcgaagaagcggttgagaaagcgaaaaccttaaactga

SEQ ID NO: 45136 - DNA, 2703 bp, Neisseria meningitidis
atgcaactgcatattctgaacaatccgaaggacgcggctttggcggcggacgcggaatttctgaaacaatccctgttcaacctcctgcacgaagaagcctcgccattggttgtcgaaacggtcaaactcttgtccacttccgacgacagcgcggcattgattgaaaaagtattgccgcaattggacgaacaacaaacccacgatttaaccttggcctgcggcctgttcgcccagattttgaatatcgccgaagacgtgcaccacgaacgccgccgccaaatccacgaagaagccggacgcggcggcgcggaaggcagcctgacggaaaccgtccgcaggctcaaagcggggaaagccgacggcaaatcggtgcagcggcagttggacaatacgtccgttaccgccgttttgaccgcgcacccgaccgaagtgcaacgccaaaccgtcttaagcttcaaccgccgcatccgcgcactgttgccgcaacgcgaacgctgcaccaatgccgacgcgctggcacggctgcgccgcgaaatcgacactatcctgctgggcttgtggcagaccagcgaaacgcgccgccacaaactcagcgtcaacgacgaaatcaacaacggcgtgtccatcttcccgatgagctttttcgaagccctgcccaagctctaccgcaatatggaacacgactttcagatggtctatcccgatgtctgcgttccgaacatcctcaaaatcggcggctggatcggtggcgaccgcgacggcaatccgttcgtttctgccgaaaccttgcgttttgccttccgccgccacgccgatgccgtgttccgtttttaccgtggcgaactcgacaaactttaccgcgaactgccgctctccatccgccgcgtcaaagtcaacgacgacgtaatggcactggcagccctctcgcctgacgaagaaatcgctcgcaccgaagaaccctaccgccgcgccattgcttacatcatggcgcgcgctatgggcaaagcgcgcgcgctcggtttgggcatgggctgcaaattcggctttctcgagccgtatgcttcggcacaagaatttctcgatgatttgaaaaaattgcaacgttcccttatcgacaacggcagccgcctgcttgctgaaggccgtttggcagacctcatccgttccgtgtccgtgttcggcttccacatgatgccgctcgacctgcgccaacacgcaggcaaacacgccgatgtggttgccgagcttttccaacacgcaggcttggaagactacaacagcctgaacgaagagcaaaaacaagccgccctgttgcgcgaattgagccatcaacgtccgctgtacagcccgttcatcacatacagcgaccatacccgccacgaactggcaattttcaacgaagcgcgcaaaatcaaagacgaattcggcgaagatgccgttacacaaagcattatttccaactgcgaacaacccagcgacctgctcgccttggcattgctgctgaaagaaagcggcctgctggcggtggaaaacggcaaaccgcgcagccgcatcaatatcgtgccgctgtttgaaaccatcgaagcactcgaaaacgcctgtccggtcatggaaaccatgttccgcctcgattggtacgatgccctgctcgaaagctgcggcaacatccaagaaattatgctcggctactccgactccaacaaagacggcggctatgttaccagctcatggtgtctgtatcaggcggaattgggcttggtcgaactcttcaaaaaatacgatgtccgcatgcgcctgttccacggtcgcggcggcagcgtcggacgcggcggcggcccttcttaccaagccattctcgcccaaccggcgggcagcgtggcgggacaaatccgcattaccgaacaaggcgaagtcattaccgccaaatacgccgaccccggcaatgcccaacgcaacttggaaaccttggttgccgcgactttggaagccagcatcctgccggataaaaaagaccctgatgccaaactgatgcaggcattgtcggacgtatcgttcaaatactaccgcgaactgattacccaccccgacttcatcgactacttcctgcaaaccagcccgattcaggaaatcgccaccctcaacctcggcagccgtcctgccagccgcaaaaccttggcgcggattcaggacttgcgtgcgattccgtgggtattctcatggatgcaaaaccgcctcatgctgcctgcttggtacggtttcggcagcgcggtggaaaccttgtgcgaagacaaacccgaaacgctcgccgccctgcgcgaacacgcccaaagcaacccgttcttccaagccatgctttccaatatggagcaagtgatggcgaaaaccgacatcaccctcgcggaaaactatgccggcttgagcgaatcgccggaaaaagccgccgtcatcttcggcatgattaaggaagaataccaacgcagccgcaaagccctgctcgacctgctgcaaaccgaagaacttttacgcgacaaccgcagcctcgcccgttcgcttgccttgaggattccatatttgaacgcgctcaacggcctgcaggtcgccatgctcaaacgcctgcgtaaagaacccgacaatccgcacgcgctgctgatggttcacctgaccatcaacggcgtggcgcaaggtttgcgcaatacaggctga

SEQ ID NO: 45137 - DNA, 573 bp, Neisseria meningitidis
gtggcatcctgccgcctgccgaccgaatggggcgtatttacgatgcacggctttgaagaggcaaacgggcaggaacacgtcgcgctgaccgtcggtaatttttcagacggcaatccggttctgacgcgcatccactccgaatgcctgacgggcgatgcgctgttctcgagaaaatgcgactgcggacctcaacttgaagcggccatgagggcggtacagacagaggggcgcggcatcatcgtctatctgcgtcaggaaggacgcggcatcgggctgattaacaaaatccgcgcctatcatctgcaagaccaaggtatggatacggttgaagccaatttggcactcgggctgcccgtcgatgcccgcgatttccgtttggcgcaatctatctacgaatatctgggcatccgctcggtcaaactgctgaccaacaaccccgaaaaaatccaaaccctgaaagatgcggggattaacgtggtcgaacgcatccccctgcacgtcggggaaaaccttgaaaacaaacgctacctccaaaccaaagcagacaagctggggcatctgatgtcggaataa

SEQ ID NO: 45138 - DNA, 570 bp, Neisseria meningitidis
atggcggcaggcaaacataccaaacacagcaaccgggtacgcattatcggcgggcaatgccggggcaggaaattgagtttcacatccgccgacggactgcgtccgacacccgacagcgtgcgtgaaaagctgtttaactggctgggacaggatttgacgggtaaaacggttttggatctcttcggaggcagcggcgcactcggtatagaagccgcttcgcgcaacgccaaacgcgtgctgatttcggataacaaccgccaaaccgtgcagaccttgcagaaaaacagtcgcgaactgggtttggggcaggtgcaaatcgtctgttcagacggcatcgcatatttgaagaccgtatccgaacagtttgatgttgtctttctcgacccgccgtttgcatggcaggactggcaaatcctgtttgatgccttgaagccgtgcctgaacccccgagcattcgtctatctcgaggcgggtacgctgccggatattcccgattggctgacggaatatagagaagggaaatcggggcagagtacattcgaattaagggttttccaagtggctgaataa

SEQ ID NO: 45139 - DNA, 651 bp, Neisseria meningitidis
atgccgtctgaaaacacaaaaggaacaaccatgaccacacatcatgtcgaattgaggaatgtcaccaaacggttcggggcgcaaaaagccgtcaaccaagtcgatttggttttgaaggcaggagaaagcgtcgggcttgccggatacaacggcgcgggcaagtccaccattatgaagctgatactcgggctgattaccccgaccgaaggcgaagtgatgcttttgggcgaacgtaccggcagcaaagcgggggcgcggcttcgcagccaaatcggctacctgcccgaaaccgttgcgctgcacccttcgctgaccggcatcgaaacgctggatttttatgccaaacttaaaaaacagccgctcacgcagaaccgggggctgcttgagcgcgtcggcatttcacaggcggcacaccgccgcgtcggcacttattctaaagggatgcgccaacgccttgccttggcacaagccctgctgggcgagcccaaagtcctgctgtttgacgaaccgacaaccggcctcgaccctgcatcacgacaaatgttttacgaagtcgtgcgcgaactcaacgggcgcggcgcgaccgtattgctcagcacccacgcccttgccgagttggacggacacgccgaccgcattatcgtggattaa

SEQ ID NO: 45140 - DNA, 903 bp, Neisseria meningitidis
atggataccgcaaaaaaagacattttaggatcgggctggatgctggtggcggcggcctgctttaccattatgaacgtattgattaaagaggcatcggcaaaatttgccctcggcagcggcgaattggtcttttggcgcatgctgttttcaaccgttgcgctcggggctgccgccgtattgcgtcgggacaccttccgcacgccccattggaaaaaccacttaaaccgcagtatggtcgggactggggcgatgctgctgctgttttacgcggtaacgcatctgcctttggccaccggcgttaccctgagttacacctcgtcgatttttttggcggtattttccttcctgattttgaaagaacggatttccgtttacacgcaggcggtgctgctccttggttttgccggcgtggtattgctgcttaatccctcgttccgcagcggtcaggaaacggcggcactcgccgggctggcgggcggcgcgatgtccggctgggcgtatttgaaagtgcgcgaactgtctttggcgggcgaaccctgctggcgcgtcgtgttttacctttccgtgacaggtgtggcgatgtcgtcggtttgggcgacgctgaccggctggcacaccctgtcctttccatcggcagtttatctgtcatgcatcggcgtgtccgcgctgattgcccaactgtcgatgacgcgcgcctacaaagtcggcgacaaattcacggttgcctcgctttcctatatgaccgtcgttttttccgccctgtctgccgcattttttctgggcgaagagcttttctggcaggaaatactcggtatgtgcatcatcatcctcagcggcattttgagcagcatccgccccactgccttcaaacagcggctgcaatccctgttccgccaaagataa

SEQ ID NO: 45141 - DNA, 321 bp, Neisseria meningitidis
atgaattttcaagactatctcgccacattttcttcaatcgaccatctgggcggtttggacgttcaggatgcagatggcaaaacggttcaccacattcctgccgttcagggtaagctcggttcgctcaagttgtacaacgctttggcagaacgttttgacggaaaattggacaaagaagcggcagaacagggtttgatatggtttgccgaacacgttgccgacgcgcgcgcccatcccggcaagcatcccaatatcgacctgcttgaaaaagttgtgcaaagcggcgaaaccttgctgctcaagccgcttgccgcgcaataa

SEQ ID NO: 45142 - DNA, 627 bp, Neisseria meningitidis
atgaaaaacatcgtcatcctgatttccggacgcggcagcaatatgcaggcaatcgtcaatgccgccattcccaacgtccgcattgccgccgtgttgagcaacagcgaaacggctgccggtttgcaatgggcggccgaacgcggcatcccgaccgacagcctgcatcataaaaactttgaatcacgacttgccttcgataccgccatgatggaaaaaatcgacgcatatcaacccgacttggtggttttggcaggttttatgcggattctgacccctgagttctgtgcccattacgaaggcaggctgatgaacattcacccgtccatccttccctcgtttaccggacttcatacgcacgaacgcgctttggaggcaggttgtcgcgttgccggctgcaccatccatttcgttactgccgaactggattgcggcccgattgtatcgcaaggggttgtgccgatactcgacggcgatacggcagacgatgttgccgcccgggttttggctgtcgagcataaactctatccgaaagccgttgccgattttgccgccggccgcctgattatcgagggaaaccgcgtcagaaattcggaaaacgccgatgccgcccgttttctgacggcgtaa

SEQ ID NO: 45143 - DNA, 1287 bp, Neisseria meningitidis; identical to SEQ ID NO: 39759

SEQ ID NO: 45144 - DNA, 273 bp, Neisseria meningitidis
atgaagaaaaccggcaaatatcttatctatgctgcggcatttaccgcattctgctttgccttccaagaaaaccgttctgaagccaaacagcctgacatcactttatccgcatccctatgcgaacaattcaacatactgaacgccaaagatatggatgcagaacaagtctccctttccaaagaatgcgacatcatcgagtcttcacacgactgggaaaaagagtacggcaacttgaacgaacaggaaatgctcgccggcatcgtctatgaataa

SEQ ID NO: 45145 - DNA, 468 bp, Neisseria meningitidis
atgcaggtatttctgacgattcccggctatgatgttgaggcagaaatcgaaaaattcgtttggatggatgctgtgatttggcagatgccgagctggtggatgcacgagccttggacagtgaaaaaatacatagacgaagtattaaccgctggacacggcaaactctaccaaagcgacggcagacacagcgtcaatccgactgagggctacggcacaggcggcttgttgcaaggcaaaaaacatatgctttcactgacttggaatgcgccgattgaggcgtttacccgcgaaagcgatttctttgaaggcaaaggcgttgatgttttgtatatgcacttccacaaagccaacgagtttttgggtatgacccgcctgccgacattcttatgtaacgatgtggttaaaaatccgcaagtggaaaaatacttggcagattatcaggcacacttggaaaaagtgttcggctaa

SEQ ID NO: 45146 - DNA, 1977 bp, Neisseria meningitidis
atgtcccgaattgccgccctgcccgaccatcttgtcaaccaaatcgctgccggcgaagtagtcgaacgccctgccaacgccttgaaagaaattgttgaaaacagtatcgatgcaggcgcaacggcgattgatgtcgagctggcgggcggcggcatccgcctgattcgcgtcagcgacaacggcggcggtatccaccccgacgacatcgagcttgcgctccaccgacacgctaccagcaaaatcaaaaccttaaacgatttggaacacgttgccagcatgggctttcgcggcgaaggcttggcaagcatcgcctccgtcagccgcctgaccctgaccagccgtcaagaagacagttcgcacgcaacccaagtcaaagccgaagacggcaaactcagcagccccaccgccgccgcccaccccgtcggcaccaccatcgaagccgccgaactcttcttcaatacccctgcgcggcgcaagttcctcaagtctgaagccaccgaatacgcccactgcgccactatgctcgaacgcctcgcgctggcgcatccgcacattgccttctcgctcaaacgcgacggcaaacaagtgttcaaactccctgcacaaagcctgcatgaacggattgccgccattgtcggcgatgattttcagacggcatcattggaaattgacagcgacaacggcgcattgcggctctatggcgcgattgccaaaccgactttcgccaaaggtaaaaccgacaaacaatactgcttcgtcaaccatcgttttgtccgcgacaaagtcatgctccatgccgtcaagcaggcataccgcgacgtattgcacaacgcactgacgcctgctttcgtcctctttctcgacctgccgcccgaagccgtggatgtcaacgtccacccgaccaaaaccgaaatccgcttccgcgacagtcagcaggtgcaccaacttgtgttccacacgctcaacaaagcccttgccgacacacgcgccgacctgaccgaaagcgtcagcaacgcaggcgaagtgttgcatgacattaccggcgttacgcctgcaccaatgccgtctgaaaacaacagcgaaaatctgtttgatcgcgcatccaactacccgacaggcaacaaatcagatacacacaatgcctttggttcatcaggcaaaaccgcgcccatgccctatcagtccgcatatgcgccgcaacaacgcagcctgtccctgcgcgaaagccgcgcggcaatgaatacttacgccgaactttacaaaaaaaccgacgacatcgaccttgagttaagccgattcgagcaggcacgtttcggcaatatgccgtctgaaacgcctgctccccaaacagatacgccgctttcagacggcatcccgtccccatccgaactgccgccgctcggtttcgccattgcccaattacttggcatctacattcttgcccaagccgaagacagcctgttgctcatcgatatgcacgccgccgccgaacgcgtcaactacgaaaaaatgaaacgccaacgtcaggaaaacggcaacctgcaaagccaacgcctgcttattcccgtaacctttgccgcgtcccacgaagaatgcgccgcccttgccgaccacgccgaagcactggcaggcttcgggctggaactgtccgatatgggcggcaacaccctcgccgtccgcgccgcacccgcaatgttgggcaaatccgatgtcgtctccctcgcccgcgacgtattaaacgaattcgcccaagtcggcagcagccaaaccatcgaggaacacgaaaaccacatcctcgccaccatgtcctgccacggctcgatccgcgccggccgccggctcaccctgcccgaaatgaacgcccttctgcgcgatatggaaaatacgccgcgcagcaaccagtgcaaccacggcaggccgacttgggtcaaactgactttgaaagaattggacgcactgttcttgcgcggacaataa

SEQ ID NO: 45147 - DNA, 1293 bp, Neisseria meningitidis
atggctgtcttcccactttcggcaaaacatcggaaatacgcgctgcgcgcgcttgccgtttcgattattttggtgtcggcggcatacattgcttcgacagagaggacggagcgcgtcagaccgcagcgcgtggaacaaaaactgccgccgctgtcttggggcggcagcggtgttcagacggcatattgggtgcaggaggcggtgcagccaggcgactcgctggcggacgtgctggcgcgttcgggtatggcgcgggacgaaattgcccgaataacggaaaaatatggcggcgaagccgatttgcggcatttgcgtgccgaccagtcggttcatgttttggtcggcggcgacggcggcgcgcgcgaagtgcagttttttaccgacgaagacggcgagcgcaatctggtcgctttggaaaaaaaaggcggcatatggcggcggtcggcttctgaggcggatatgaaggttttgccgacgctgcgttcggtcgtggtcaaaacgtcggcgcgcggttcgctggcgcgggcggaagtgcccgtcgaaattcgcgaatccttaagcgggattttcgccggccgcttcagccttgatggtttgaaggaaggcgatgccgtgcgcctgatttacgacagcctgtatttccacgggcagcaggtggcggcgggcgatattctggcggcggaagtcgttaagggcggcacaaggcatcaggcgttctattaccgttcggacaaggaaggaggagggggcggcaattattacgatgaagacggcagggtgttgcaggaaaaaggcggcttcaacatcgagccactggtctatacgcgcatttcttcgccgttcggctaccgtatgcaccccatcctgcacacttggcggctgcacacgggcatcgattatgccgcaccgcagggaacgccggtcagggcttccgccgacggcgtgattacctttaaaggccggaagggtggctacggcaacgcggtgatgatacgccacgccaacggtgtggaaacgctgtatgcgcacttgagcgcgttttcgcaggcacaaggcaatgtgcgcggcggcgaggtcatcggttttgtcggttctaccgggcgttcgacggggccgcacctgcattacgaggcgcgcatcaatgggcagcccgtcaatcctgtttcggtcgcattgccgacacccgaattgacgcaggcggacaaggcggcgtttgccgcgcagaaacagaaggcggacgcgctgcttgcgcgcttgcgcggcataccggttaccgtgtcgcaatcggattga

SEQ ID NO: 45148 - DNA, 474 bp, Neisseria meningitidis
atgcaagttaccaaaaatttcagtctgcgcgagttgacacgcagtgaaaccgcgcgtcgcgcaggtgtaccgaacgaaccgtcgcccgccgacatggacaacatttattacaccgcacagcagcttgaaaaaatccgcgaatacgtcggtcgcccgattatcgtaacaagctgcttccgcagcgagcgggtaaacaaattggtcggtggcagcccgacatcggcgcaccggcacggacttgccgccgattgtgacgcatcgggtatgacctcgccggcatttgccaaactgttaatcaaaatgcgtgatgaaggcgcgctgaaattcgaccagttgatactcgaatttcccgagcgcggggacggcgcatgggtacacatcggtttccgacgcaacagcccgcaacgcaaccagatactgaccgcaaccaagaaaaacggcaaaaccgtgtatctgcccgggctgcatccttga

SEQ ID NO: 45149 - DNA, 891 bp, Neisseria meningitidis
atgaatcctaaatcccctttatttttacgactgtccgatcgtttggatgtgtacctgcgcctgatgcgggcggacaagcccattgggacgctgcttttactgtggccgacctactgggcattgtggctggcttcagacggcattcccgatttggcggtattggcggcgtttacaatcggtacgtttttaatgcgcagtgccggttgcgtcatcaacgattttgccgaccgcgattttgacggtgctgtcgagcgcaccaaaaaccgtccgttcgcacagggcagggtcaagaaaaaagaagccctgctgctgacggcatttttgtgcctgcttgccgcattgtgcctgattccgctgaatcatctgacttggctgatgagcctgcccgccctgtttcttgcgctgacttacccgtttaccaaacgtttttttccgattccccaactctatctcgggcttgccttttccttcggtatcccgatggcgtttgccgcagtgggcaacagcgtccccgttgaagcatggatactttttaccgccaatgttttatggacactggcttacgacactgtttacgccatggcggacaaagaggacgatttgaaaatcggcatcaaaacctccgccgtcacgttcgggcgttacgacatcgccgccgttatgctgtgtcatggcggctttaccctgctgatggcagtattgggggcggttatcggtgcggcatgggcatattggacggcaatccccatcgtcctgctgctgcaataccgccaatatgccgccatcaaaagccgcgtccggcaaatctgttttgaaacgtttttggcaaacaacagaattggttgggtgtggtttaccgccatttttgcccatacgtttttcgcgaaataa

SEQ ID NO: 45150 - DNA, 699 bp, Neisseria meningitidis
atgagttttgaaatttaccgttacaacccggatgttgatgccaagccttatatgcagcgttacgagttggaattggaaccgaccgacgtgaaacttttggatgctttggtacgcctgaaagcacaagacgataccttgtctttccgccgctcctgccgcgaaggcatttgcggatcggacggtatgaacatcaacggcaaaaacggcttggcgtgtttgaccgatctgcgtggcttgaaacagccggttaaaatccgtcctctgccaggtctgcctgttatccgcgacctgattgtggatatgacccagttcttcaaacaataccattccgtcaaaccttatgttgtcaacgataatccgattgatgcggacaaagagcgtctgcaaactcaggaagagcgtaaagagttggacggtttgtacgagtgtattttgtgcgcctgctgttcgactgcctgcccgtcattttggtggaaccctgataaattcgttggtccgtccggtttgctgaatgcttaccgtttcattgcggacagccgtgataccatcactaatgagcgtttggataatctgaacgacccataccgtttgttccgttgccacaccattatgaactgcgtagacgtatgtcctaaacacttgaatccgacccgagccatcggtaagattaaagagattatgttgaaacgggccgtttaa

SEQ ID NO: 45151 - DNA, 750 bp, Neisseria meningitidis
atggtattgcgcagggattttctgacttggtgtaatgaaacattgcagacagcgttgtttaaagattacgcccctaacggtttgcaggttgaagggagggaatatatcgggaaaatcgttacgtcggtaacggcaagcagggcagcgattgattttgctgtggagcagaaggcagatttgcttttggtacatcacggtatgttctggaaaaacgagttgccgaccgttactggttggaaaaaagaacggattgccgcactgttacggcacgacatcaatatggcaggctaccatctgcccctggatgcacatcccacactgggcaacaatgcccaactcgccgacagattgggttttgcgacagaaaaacggttcggcgaacaaaacctgctcaactcgggcagcctgaaacaagccaagacactcggcgcattggcggcgcatattgaaacagttttgcaacgtaagcctgtcgtcatcggcaaacccgaacgcgaaatccgacgggttgcatggtgcagcggcggggcgcaggggttttttcagacggcaatagacgaaggtgtcgatctgtatttgacgggggaaatttccgaagcccaataccaccttgccaatgaaacgggtacggctttcatttcggcagggcatcacgcgacggaacgttacggcgtacgcgcgctggcagaatcggcggcagaggttttcgggttggaagtgtgccattttgacgaaaacaatccggcttga

SEQ ID NO: 45152 - DNA, 462 bp, Neisseria meningitidis
  misc_feature 4, 5, 6, 7, 8: 'n' is a, c, g or t
gtgnnnnncggcctctacaaactcggttacaaacaacatacccgtaccgatgcagaaggctatatcgagaaactgcacattacccccgccaatgcccatgagtgcaaacacctgtcgccgttgttggaagggttacccgaaggtacgaccgtctatgccgacaaaggctacgacagtgcggaaaaccggcaacatctggaagaacatcagttgttggacggcattatgcgcaaagcctgccgcaaccgcccgctgtcggaagtgcaaaccaaacgcaaccgatatttgtcgaagacccgttatgtggtcgaacaaagcttcggtacgctgcaccgtaaattccgctatgcgcggtcaacctatttcggactgattaaagtgagtgcgcaaagccacctgaaggcgatgtgtttgaacctgttgaaagccgccaacaggctaagtgcgcccgctgccgcctaa

SEQ ID NO: 45153 - DNA, 1977 bp, Neisseria meningitidis
atgaacgaattttcgcttgcccctattgtggttgttttgctggtgtcggtcattacggtgatcctgtgccgcaagttcaacattccctccatgctgggctacctgctggtgggctttttggcggggcccggtatgctcagcctgattccgaaaagccatgcgacggattatttgggcgaaatcgggattgtgttcctgatgttcagtataggcttggagttttcgctgcccaagctgagggcaatgaggcggctggtgttcgggctgggtggtttgcaggtcggcgttacgatgctgtcggtaatgggcatactgatgctgacgggcgtcccgttcaattgggcgtttgccgtgtcgggcgcgttggcgatgtcgtccacggcgattgtgagccggattttgtcggaaaagacggaattggggcagccgcacggtcagatggcgatgggcgtgctgctgatgcaggacatcgccgtcgtgccgctgatgattctgattcccgcgctggcgggcggaggggacggaaatatttgggcggccttgggtttggcgtttgcaaaaatgctgctgacgctggggctgctgtttttcgtcggcagcaaaattatgtcgcgatggttcaggatggtggcaaaacgcaaatcgtccgaactctttatgatcaatgtgctgctggtaaccttgggtgtggcttatctgactgagctggaaggtttgtctatggcgttgggcgcattcgttgccggcatgctgctttcggaaacggaataccgtttccaagtcgaagacgacatccgcccgttccgcgatattttgctcggctttttctttatcacggtcggcatgaagctggacattcaggcattgatcggcggctggcggcaggtattgatgctgttggcaatgctgctggtgttgaaggcactggttgtgtttgccattgccttcaaaatgaaacattcggtcggcgacagcctcaaaacggctttgtatctcgcgcagggcggcgagttcggcttcgtgatgctggccattgccgggcagcttgatatggtttcgccagaatgggaacaggcggcgacggcggcggttctgctgtcgatgattatcgcgcccttcctcttgggcggcagcgatgcgctggtcgggcgtttggtcaagtcaagctgggacatgaagtcgctcgatctgcacagtatgctggtagaaaccatgagcaagtccgaccatgtgctgattgtcggcttcggcaggggcgggcagacggtcggacgcgtccttgcccaagaggatattccgtatttcgcgctcgacttggacattgcgcgggtgcaggttgccagaagtgcgggcgaaccggtgtcgttcggcgatgcgaaacgcagggaagtattggaagccgccggtctgggacgggcgaaaatggtggtgctgacgctcaacaatatgcacgaaacgcaacacgttttagacaatgtgctgtccatgtatcccaatatgcccgtatatgtgcgcgccaccaacgacgattatgtgaaaacgtttaccgatataggtgcggaagaagccgtgtcggacaccaaagaaaccggactcgtgctggcaggctatgcgatgttaggcaacggcgcgtcgtatcggcacgtctatcagacgatggcaaatatccgccacagccgttatgccgcgttggagggactgtttgtcggtagtgatgatgaggcaggattcggcgaaaacggcgaaaccgtccgtcacgcctttcctttggctgcagaagcatacgccgtcggcaaaacagtcggcacgcttccgatggcggcttacggcatcaaactcttgttcgtccgccgccgcaccggccggattgaaaacccggatgcctcgtttacattggaaggcggtgacgtgttggtggtcgcaggcaaaaaagaagaaattatctcttttgaaaactggagtttgcagggaatataa

SEQ ID NO: 45154 - DNA, 360 bp, Neisseria meningitidis; identical to SEQ ID NO: 38354

SEQ ID NO: 45155 - DNA, 1329 bp, Neisseria meningitidis
atgaaaaaagtatttatccgcaccttcggctgccagatgaacgaatacgacagcgacaaaatgctcgccgtcctcgccgaagaacacggcggcatcgaacaggttacccaagccgacgaagccgacatcatcttgttcaacacctgctccgtgcgcgaaaaagcacaggaaaaagtgttctccgatttggggcgcgtgcgtccgctcaaagaaaaaaaccccggccttatcatcggcgttgccggctgcgtcgcctcgcaagaaggcgaaaacatcatcaaacgcgcgccttatgttgacgtggttttcggcccgcaaacgctgcaccgcctgcccaaaatgattgtggacaaagaaaccagcgggctgtcgcaagtcgatatttccttccccgaaatcgaaaaattcgaccacctgccgcccgcccgcgtcgaaggcggcgcggcatttgtatcgattatggaaggctgttccaaatactgctccttctgcgtcgtcccctacacgcgcggcgaagaattctcccgcccgctcaacgacgtattgacagaaatcgccaaccttgcccagcaaggcgtgaaagaaatcaacctcttgggacaaaacgtcaacgcctatcgcggcgaaatggacgacggcgaaatctgcgactttgccactttgttgcgcatcgtccacgaaatccccggcatcgaacgtatgcgctttaccaccagccatccgcgcgagtttaccgactcgattatcgagtgctaccgcgacctgccgaagctggtttcccacctgcacctgccgattcaaagcggttccgaccgcgtattgagcgcgatgaaacgcggctacaccgctttggaatacaaatccatcatccgcaaactgcgtgccatccgtcctgatttatgcctgagcagcgatttcatcgtcggcttccccggcgagaccgaacgcgagttcgagcaaaccttgaaactggtgaaagacatcgccttcgacttgagcttcgtgtttatttacagtccgcgccccggcacgcctgccgccaacctgccggacgacacgccgcacgaagaaaaagtgcgccgcctcgaagccttgaacgaagtcatcgaagccgaaaccgcgcgcatcaaccaaaccatgatcggcacggttcaacgctgcctggtcgaaggcatctccaaaaaagaccccgaccaactgcaagcccgtaccgccaacaaccgcgtcgtcaacttcaccggcacgcccgacatgattaaccaaatgatcgatttggaaatcaccgaggcctacaccttctccctgcgcggcaaagttgtcgaagcctaa

SEQ ID NO: 45156 - DNA, 663 bp, Neisseria meningitidis
atgatacacgccgtactcttcgacctcgacggcacacttgccgacaccgccctcgacctcggaggcgcactcaacaccctgctcgctcgccacggactacctgcaaaaagcatggacgagatccgcacccaagccagccacggcgcggcaggactgatcaaactcggcgcaggcatcacccccgaccaccccgactatgcccgatggcgcaccgaatatctggaggaatacgaccgccgctacgcccaagacaccgagctctttgacggcgtgaacgaactcattgccgaactcaaccaacgcggcatcaaatggggcatcatcaccaacaaacccatgcgcttcaccgacaaactcgtccccaaactcggcttcatcatcccacccgccgtcgtcgtcagcggcgacacctgcggcgaacccaagcccagcatcaaacccatgctgtatgcgtgcggacaaatccacgccgacccgcaacacacactctacgtcggtgatgccgaacgcgacatccaagcaggccgcaacgccggcatgaaaaccgtcctcgccgaatggggctacatcgctcccgaagacgataccggctcatggcaggcggatttccacatccgcacgccactcgatctgctcgaatgtctggacaaaatacagccctga

SEQ ID NO: 45157 - DNA, 501 bp, Neisseria meningitidis
atggcggatttgcagaaaacttttcaaacttcgttccgtgatgcgatggcatcctgtgcggcaggcgttcatgtcatcacgacagacggtgcggcagggcgttacggcattacaatgacggcggttacaccggttacggacgagccgccgaccgtgatgctgtgcatcaaccgtaaagcccgtatcatcccgatactgtcggaaaacggcagcctgtgcatcaatacgttggcagacgaacatcaggatgttgccgaacattttgccgggctgaccgggctgtcgcccgaagagcggtttgcctaccacatctggcatcgcggcaaaacgggacaacttgaaatagagggcgcgttggcgcacctgcacgggcatattgtcggcaaacatgaaatcggcacgcattttgtgttttacgtcaggctcgacgaaatcaaaaactgcgggtgcaaacgccccgcgctgctgtatttcagacggcagtttagatttttagactga

SEQ ID NO: 45158 - DNA, 384 bp, Neisseria meningitidis; identical to SEQ ID NO: 36608

SEQ ID NO: 45159 - DNA, 546 bp, Neisseria meningitidis
atgggcaaaaccgtaaccttaacctctggacacagcaacaccgacccgggtgcggtcaacggcagcgaccgtgaggcggacttggcgcaggatatgtgcaatatcgtggctgctattttgcgcgatgactacggtttgactgttaaaaccgacggcacgggcaaaggcaatatgccgctgcgtgaagcggtcaagctgattcgcggctcggatgtggcgattgagtttcacaccaacgctgccgtcagcaaagcggcgacaggcatcgaagccttgagtaccgttaaaaacaaacgctggtgtcaggtgttgagcaaagccgttgccaagaaaaccggctggaaactgcgcggcgaagacggctttaaacccgacaatgcgggccagcattcgcgcctggcttatgcacaagccggcggcattgtgtttgagccttttttcatcagcaacgacactgatttggccttgtttaagacgactaaatggggcatctgccgcgcgattgcggacgcgattgcgatggaattgggggcggcaagagtatga

SEQ ID NO: 45160 - DNA, 630 bp, Neisseria meningitidis; identical to SEQ ID NO: 38660

SEQ ID NO: 45161 - DNA, 810 bp, Neisseria meningitidis; identical to SEQ ID NO: 38580

SEQ ID NO: 45162 - DNA, 945 bp, Neisseria meningitidis; identical to SEQ ID NO: 39666

SEQ ID NO: 45163 - DNA, 1911 bp, Neisseria meningitidis
atgaatatattatctgtagaaaacgcttcttttgccatcggccacgttgccttgctcgacaaaacttcttttcaactcgacagcggcgaaaaagtcggcttgatcggacgcaacggcgcaggtaagtcttcgtttctgaaaatcctcgccggcgtgcaaaagctcgacgacgggcagattatcattcaaaacaacctcaaaatcgtttatgtaccgcaggaatccttttttgataaggacgcaaccgtatttgataccgttgccgaaggtttgggtgaaattcgcgatttattgcgccgttaccaccgcgtcggccatgagttggaaaacggttcgggtgaggctttgttgaaagaactcaacgaattacaacttgaaatcgaagcgaaggacggctggaagctggatgcggcagtcaagcagactttgggggaactcggtttgccggaaaacgaaaaaatcggcaacctttccggcggtcagaaaaagcgtgtcgccttggcgcaggcttgggtgcagaagcccgacgtattgctgctggacgaaccgaccaaccatttggatatcgacgcgattatttggctggaaaatctgctcaaagcgtttgaaggcagcttggttgtgattacccacgaccgccgttttttggacaatatcgccacgcggattgtcgaactcgatcgcggtattttgcgttcctatcccggctcgttctccaaatacagcgaaaaaaaagtgcaggaattggcggttgaagcggaacacaaccgcctgtttgacaaattccacgcgcaggaagaagcgtggatacgcaaaggcatcgaagcgcgccgcacccgcaacgaaggccgcgtgcgccgtttggaagagctgcgccgccaacgcgccgaacgccgcaatgtgcagggacaggtcaacttcaagctcgacagcggcgagaaaagcggcaaaatcatcgccgaattggaacatgcctcgtttgcctatggcgacaaagtcattatggacaaattctccgcgattttgcagcgcggcgataaaatcggtctaatcggccccaacggcatcggcaaaaccacatttttaaaactgattttaggcgaactcaacccgacttacggcagaatccgtatcggcagtaagcaggaagttgcctatttcgaccaattccgcagcacgttgaacgaaaacgacaccgtgttttacacgctcggtcaaggcaacgattacgtcgaagtcggcggcaagaaaaaacacataatgagctatctggaagatttcttattccatccagcccgcgcacaaagtcccgtttcatcgctctccggcggcgaacgcaaccgccttttgctggcaaaactctttacccgtcctgctaatattttgattttggacgaaccgaccaacgacttggatatcgatacccaagagctgcttgaagatttgctgcgcgattatcaaggcacggtattccttgtctcacacgaccgtatgttcctcgataacgtgattacccaaagcattatttttgaaggaaatggaaggttaaaagaatatatcggcggctatcaggactacatcgacgcaaaatcacgcgaagcgaagattcagacggaatccgcacccaaaacagccgatgccgaaccggtgaaagaaaaacccaaagccaaccgcacggtcaaactgtcctacaaagaacagcgcgaactcgacgccctgcccgacgaaatcgccgccttggaagccgaacaggcagaaatcaacgcgcagctttccgatcccgaaatcttcaaagattacgaaaaagccggcgcactgcaaagccgcgccgaagaaatcgaaatgctgcttttggaaaagctggaacgctgggagctgctggaaaccaaacagaacggcaatgccgtctga

SEQ ID NO: 45164 - DNA, 828 bp, Neisseria meningitidis
atgatgttgaaaaaattcgtactcggcggcattgccgcattggttttggcggcctgcggcggttcggaaagcggcagcggagcatcttccgcgcctgcacaatcggcagtttccggttctttaatcgagcgcatcaacaataaaggcacggttaccgtcggcacggaaggcacttacgcaccgtttacctaccacgacaaggacggcaaactgaccggttacgatgtggaagtaacccgcgccgtggcggaaaaactgggcgtgaaagtcgagtttaaagaaacgcaatgggattcgatgatggcgggtttgaaggcggggcgtttcgacgtggtggcaaaccaagtcggtctgaccagccccgaacgccaagcgacattcgacaaatccgatccttacagctggagcggtgccgtattggttgcccgtaacgacagcaacatcaaatctatcgacgacatcaaaggcgtgaaaaccgcacaatccctgaccagcaactacggcgaaaaagccaaagctgcaggcgcagatttggtggcagtggacggtttggcgcaatcgctgaccctgattgaacaaaaacgtgccgatgcaaccctgaacgacgaattggcggttttggactatctgaagaaaaacccgaatgcgggcgtgaaaatcgtttggtccgcacctgccgatgaaaaagtcggttccggcctgattgtcaacaagggcaatgacgaagccgtggcgaaattcagtacggcaatcaacgagctgaaagccgacggtacgctgaaaaaactgggcgaacaattcttcggaaaagacatcagtgttcaataa

SEQ ID NO: 45165 - DNA, 282 bp, Neisseria meningitidis; identical to SEQ ID NO: 39155

SEQ ID NO: 45166 - DNA, 3615 bp, Neisseria meningitidis
atgtctgcacccatccaagcatttgacccgctgaccgtccccattgccggcaccaacctgattgaggcctctgccggcaccggaaaaacctacggcattgccgccctgtttacgcgcctgatcgtattggaacaaaaaaacgtcgagcgcgtattggtcgttaccttcaccaaagccgccaccgccgagttgaaaacacgcctgcgcgcacgtttggacgatgtgttgcaggttttagaaagtaaagaaattgccaaacttggagacgacacgctttcagacggcatcgccgcctactgcgccgaacaccacaaaggcgacaccttcctgcccgcactcttaaaacaggctttgcaaaaagagggccggacgcgtctgattgtccgcctcaaagccgccatcgggcaattcgacaacgccgccatctataccatccacggcttctgccagcgcatcctgcgcgactacgcgtttttgtgccaagcaccgttcgatgtcgaactgaccgaagaagacggcgaccgcctgcttgtcccggcgcaagatttttggcgggaacgcgtcagcaatgatccggtgcttgccgcattggcgtttaaacgcaaagctgtgccgcaaaccgtccttgcccaaatccgcgcctacctgtcccgcccgtacctgaatttccgccgtccgcaaaccgatttgccgcaagcccgggatgccgctttggcaagctggcaaaacatttgcggaaatctggctgaattaaaagaaactttttggcgcatccatccccttttaaacggcaattcatatcggaaaaacagttttgccgaactgtttgacgcattggaacaaaaagccctgtcgccggatttgccctttttggaggcaaagctgcacgaacggctcttgaaacttgcgtccgacaaactcgaagccggactgaaaaaaggcaaaacgcccgatgcggcagtatttgccgaattgcagaaactggcagacttcaggcgtgatttggacgcactcgaagaagcggaagaagcaacaataatccggctgcaactggatttaatcggatacctcaaccgcagccttgccgagatgaaaaaatcgcgccgcgaacgcggtttcgacgacctgctgctcgatgtccacaccgcgctgaccgacaatccgcacgccgaaaccctcgcccgcgccgttgccgaaaactgggaaaccgcgctgatcgacgagttccaagacaccgacccgctgcaatacgaaatcttccaaaaaatcttcatcgcccaaaaccgaccgctgttcctcgtcggcgatcccaaacaggcgatttacagctttcgcggagcggacatttacgcctaccttcaggcggcggaagacgcgcggcaccgctacacgctcgccaccaactaccgcagccacgccgcgcttatcggcagcataggcgcgctgttccgcctcaaagaacgcccgttcgttttggaaaacatcggctattcggaagtcggtgcggcgcgtgccgaaagcaggttgtcccccgaacgtcctgccgtacaggttcgttggctgcacgaaaacgacaatgaaaaagccaacaaagacgttttgcgccgccgtgccgccgactattgcgccgacgaaatcgcccacgcgctcaacgaagccgccgaatgccgtctgaatttcaaaggctgcccgttgcagtcgggcgatattgccgtgctggtacgcacgcacaacgaggcggtgatggtttccgctgccctgaaaaaacggcaggtgcaaagcgtcctgctttcgcgcgaatccgtgttcgcctcgcccgaagccgccgccctttccgcactcatcggcttctggctcgaaccgcgccgcgccggaacgctgcgctttgtcctgacaagcggcatattcggttatgacgcgcagcaattgcacgacttcaaccaaaacgaaagcgagattttgcattgggcggaatctgcccgaaccgcgctcgacaactggaatcaatacggcattttcgccgccatgcagcaattttcccaaacacacggcatcgaaacgcgcctcttaagccggaacaacgggcgcagcctgaccaattatttccaactgctcgaactgcttgccgccgaagacgcgcaaaaccgcaaccccgccgcgctgcacaaatggttgcgcgaccaaatcagcctggccggcaacaacagcggcgacaaccgcgccatccgtctggaaagcgacgaagatttggtcaaaatcgttaccatgcacgcctcgaaaggtttgcagtatccgctggtgtactgcccgtttgcgtgggacgcgcaagataccgggccgtccgactggcaaatcctccaccaaagcgcaaatcgaaccgaactgttggcaaaggcgcaactgtcggaagacgaacagaagcaatacgccgatgaggaaatggcggaacgcctgcgcctgctttatgtcgcgctgacgcgtgccgaggaacagctcaacatctacgccgcctattcttccgataccgccgacaaccccctcgcctacctgattgaaggcttgccgcaagacagccgcgaaaccgtccgccaaacctatgaccgggaaaaagacggcatcgcgatgctcaaacgcaactggcggcgtttgacggacaatgccccggccggcacggatttcgccttcacagaagatgcgccgccccctgccgcctatcgcggcaacgccggtcaaaccgccgaatttgccgcaaacagcattcccgaacgcagattccgatttgtccgccacaccagctttaccgccttaagccgccatacccaaacgcccgacggcggcgaagaagatgcctgcccgtccttggatgccgccgaaacctcggtgccggcgatgccgtctgaaacgccgacggcttcagacggcatatcgatacacgattttccgaaaggcacgcaggcggggctgtgcctgcacgaaattcttgaagatttcaaattcggacaagcagccgccggacaggaaactctcattgccgacaagctgaaaaaatacggatttgaagaaatatggctgcctgccgttgccgaaatggcggaagcctgccgcaaaacgccgctgacgggggcatactgcctgtccgacatcccgcccgagtgccgctgtcccgaaatgggctttaccctccacaccgaagacttcggcctcaaacggctgcgcgactggtttgcccgcgacgatatccgattgcccgaagtctgccgtgccgccgccgaaacgctcgacttccacaccgtcaacggctttttaaacggctttatcgatatggtctgccaagaccccgacggcaatatctgcgtcatcgactacaaatcaaaccatctcggcgcggacgcatccgcctacacgcaacaggcgatggacgaagccgtcgcgcaccaccactattaccttcaggcgctgatttacgccgttgccgccgcacgctacttcaaactgcgcggacaaccgcccgccgccgtttccgtccgctacctgtttttgcgcggattggatggcaaaggcggcggcgtttggcgttgggacatagatgccgccgctttggaacagataaaataa

SEQ ID NO: 45167 - DNA, 1143 bp, Neisseria meningitidis
atgaaaaaatccgtattagccgttttggccgcgctgtctctggcagcctgcggcggcagcgaaaaaaacgccgtgcaacctcaagcagacgctgcgtctgctgccaatgccgaagccgctgccaccgatactctgaacatctacaactggtcgaactatgttgacgagagtacggtcgaagactttaaaaaagccaacaatctgaagctgacttacgacttgtacgaaaacaacgaaacgctggaagccaaaatgctgaccggcaaatccggttacgatttggttgtgccgggcatcgccttcctgccgcgccaaatcgaggcgggcgcgtatcaaaaagtcaacaaagacctgattcccaactataaaaacatcgatcccgaactcttgaaaatgctggaaaccgccgacccgggcaaccagtatgccgtcccctatttctccggcgtgaacacgattgcgattacggcgaaaggcaaagagcttttaggcggcaagctgcccgaaaacggctgggatttgctgttcaaacccgaatacacccacaagctgaaatcctgcggcatcgccctgtgggacaccccgagcgaaatgttcccgattttgctgaactacttgggcaaagaccccaaaggctcgaatcctgaagatttgaaggcggcggcggaagtgttgaagtctatccgtccggatgtcaaacgtttcagcccgtccatcatcgacgagctggcgcgcggcgacatctgcctggcggcaggcaacggcggcgatttgaacttggcgaaagcacgttccgaagaagtgaaaaacaacgtcggcatcgaagtgctgaatccgaaaggcatgggcttctggattgagtcttggctgattcccgccgatgcgaaaaacgtcgccaatgcccacaaatacatcaactacacgctcgaccccgaaatcgcggcgaaaaacggcatcgccgtaaccttcgcccccgccagcaaaccggcgcgcgaaaaaatgcctgccgagctggtgaacacccgttccatcttcccgaacgagcaggatatgaaagacggtttcgtgatgcctcaaatgagtacggatgcgaaaaaactgtcggtcagcctgtggcagaaaatcaaagtcggcaccaactga

SEQ ID NO: 45168 - DNA, 789 bp, Neisseria meningitidis; identical to SEQ ID NO: 36434

SEQ ID NO: 45169 - DNA, 2013 bp, Neisseria meningitidis
ttggcgtgtttggtatcggtattggggtttcatggtttttatacggatttgcgccatttaagggcgcgtttttctttgtctcttaaaggcgcaacattggcagatttggtacggtttgctaatagcatgaatttaactgctcgagctgttcggttggatttagatgaattggtaaatttgcgcttaccctgtattttacattgggatttaaatcattttgtggtgttgcatgaagttcatcgtaatcacattgtgattatgaaccctgcttcgggttggcaaaaagtgcgtatggaagaagtctcgcgctgttttacaggcatagcgttggagctattccctaacacgcaatttgaagagaaacacgaaacgcgtaaaattcgcatactaccgatgttgcgcggagtggtgggattaaaaagatctttatttcagcttctgctgctggcggcagtattacaggtgtttgctttggcaagccctttttttatgcaatgggtaatagatcatgccattgtatcggcagaccgtgatttattgctaacattggcattgggttttggtttgttgatgattgtgcagcagttggtgtcattgttgcaaacttgggcaggtatgtatttgtctacttcattgaatatccaatggaaagccaacgtattccgccgcttaatggatttacctgtttcttatttcactaaacgacacttgggcgatgtggtttcacgttttggctcggtggatagtattcaaagtacgctcacttctactttctttgtgctggtactcaacagcattatggcagtatttacattagggttaatgtatttatacagccctagtttaacggctgttgtattggttgttttactgatttatatcggtattcgttgggtggcatattatccgttacgccatgcaaccgaagaaaatattgttcatgctgccaagcaaagcagttatttcatggaaaccatacgcggtattcaaaccgttaaattatttgataaaaatgcacaacgtcatgcggcttggctgaacttatttgttgatacaatcaacacaggtttaacgacacaaaaactttccgcaatgttcggttttgcgaacagccttttgtttggtatcgctaatattttaattgtgtattttggtgcggtttctgtgttggacggtgtttttaccgttggggcgttaatggcgtttatgtcctacaaaagtcagtttgagagtaaagcaggttcattgattgaccagtttgtacaaatcaaaatgctaggattgcacgcggaacgcttggcggatattgtgctagaaaaaacggaaaacgagcagaacaacgatttcaggctgcctaaaaatttagaacactttgatattaaaatagaaaatatatcatttcgctatgctgaaaatgaaccatacattttgcaagatttcagtttaattatcaaacaaggaacagccattgcttttgctggacattcaggctgtgggaaatctacgctcattcaaattctgacaggcagtctgaaacctgaaagcggtcacgtgttactaggcgagaatgatattcatgcgtttccacctgcatttatccgcaaatggagcgcaagtgtaatgcaagatgatgtgttatttgctggctcaatcgcagaaaacatcagtttttttgatgatacgcccaatatggaaaaaatcgcattttgcgctcaaatggcgaatattcatcatgaaattgtcgctatgcctatggcgtatgaaaccttaattggtgacatgggaagcgcattgagcggtgggcaaaagcagcgtattgttctagctcgtgctttatatcgtgaacccaaaattttgtttttagacgaagccagtagccatttggacatcaacaatgaacgtgtgattaacgataatctacgccaactcaacattaccaaaatcatggtcgcgcatcgtcaggaaactttaaatactgctgatagcgtagtttatttagacaaggtagcctga

SEQ ID NO: 45170 - DNA, 207 bp, Neisseria meningitidis
atggcacgtattaccaccgaagactgtaccggaaaaatttccaaccattttgacctgacattggtagcggcccgtcgggcccgccagcttgaaaatggcaatacgccgcttgtggacgatgtccgcaataacaaaccgaccgttaccgccttaagggaaatcgccgccgggcatatcggtacggaactgttgacgcgcaataaataa

SEQ ID NO: 45171 - DNA, 594 bp, Neisseria meningitidis; identical to SEQ ID NO: 38781

SEQ ID NO: 45172 - DNA, 1140 bp, Neisseria meningitidis
atgaaaaaaacactggtggcggcggcaatcctgagcctcgccttgactgcgtgcggcggcggaagcgataccgccgcccaagccccctccgccaagcctgaagccgaacaatcgggcaaactcaatatctacaactggtcggattatgtcgatcccgaaaccgtcgccgcctttgaaaaagaaaccggcatcaagacgcgttccgattattacgacagcaacgaaacactggaggcaaaagtcctgaccggcaaatccggctacgacctgaccgcgccgtccatcgccaacgtcggccggcaaatcaaagcgggcgcgtatcagaaaatcgacaaggcgcaaatcccccattacagcaacatcgataaagatttgctgaaaatgatggaagccgtcgatccgggcaacgaatacgccgtcccctatttctggggcatcaacaccttggcaatcaacacgcggcaggtgcaaaaggcattgggtacggacaagctgcccgaaaacgaatgggatttggtgttcaaacccgaatacaccgccaaactcaaatcctgcggcatcagctatttcgacagcgcaatcgaacagattcccttggcgttgcactatttgggcaaagatcccaacagtgagaatcccgaagacatcaaagccgccgtcgatatgatgaaagccgtccggggcgacgtgaaacgcttcagctcttccggctacatcgacgatatggcggcgggcaacctgtgtgccgccatcggttacggcggcgatttgaacattgccaaaacccgtgccgaagaagccgcaaacggcgtggaaatcaaagtattgaccccgaaaaccggcgtgggcgtgtgggtggattcctttatgattccgcgcgacgcgcaaaacgtcgccaacgcccaccgctatatcgactacacgctccggcccgaggtggcggcgaaaaacggcagcttcgttacctacgcgcccgccagccgtcccgcgcgcgagctgatggatgaaaaatacacctccgacgcatcgattttcccgaacaaagaactgatggaaaaaagtttcatcgtatcgcccaaatccgcagaatccgccaaactgggcgtgaagctgtggcaagggctcaaagcgggcaaataa

SEQ ID NO: 45173 - DNA, 552 bp, Neisseria meningitidis
atgccgtctgaacgccgaccgtttcaaacggcatttttatcgaacaggaaaaccgtcggtaaacttgcagagcgtgtgcaatcccgatatgatggtttgcataaatttaaacatgtatgttccgcagctatggcactgattaaagagccgttggacaaagcgaaacaaaggaacgaagaacttgaagcggcagaagaagcggcggcgcaggaggcattgggtcgggagcaggaagtcgaccgcgtatccgaatgggaagaacgctacaagctgtcgcgcagcgagttcgagcaattctggaaaggattgcctcaaaccgtacagaataagctgcaagcctcacagaaaacatggaaaagcgggatggataaaatctgtgccaacaatgcgaaagctgaaggtgaaacgccaaacggcataaaattcagcgaactggcatgcaaaacggcggaaaccgaagcacgcttggaagagctgcacaaccgtaaaaaagcccttatcgacgaaatggccagggaagcggacaagaaagaactgccaaagcggctctga

SEQ ID NO: 45174 - DNA, 1155 bp, Neisseria meningitidis
atgactgaaactactcaaaccccgaccttcaaacctaaaaaatccgttgcgctttcaggcgttgcggccggtaataccgctttgtgtaccgttggccgtaccggcaacgatttgagctatcgcggttacgacatcttggatttggcacaaaaatgcgagtttgaagaagtcgcccacctgctgattcacggtcatctgcccaacaaattcgagctggccgcttataaaaccaagctcaaatccatgcgcggcctgcctatccgtgtgattaaagttttggaaagcctgcctgcacatacccatccgatggacgtaatgcgtaccggcgtatccatgctgggctgcgttcatcctgaacgtgaaagccatccggaaagtgaagcgcgcgacatcgccgacaaactgatcgccagcctcggcagcatcctcttgtactggtatcaatattcgcacaacggcaaacgcattgaggttgaaagcgacgaagagaccatcggcggtcatttcctgcaactgttgcacggcaaacgcccaagcgaatcccacatcaaagccatgcacgtttcactgattctgtatgccgaacacgagttcaacgcttctaccttcaccgcccgcgtgattgccggtacaggctctgatatgtactccagcattaccggagcaatcggcgcgttgaaaggtccgaaacacggcggcgcgaacgaagtggcttacgatattcaaaaacgctaccgcaatgccgacgaagctgaagccgacatccgcgaacgcatcggccgcaaagaaatcgtgatcggtttcggtcatccggtgtacaccatctccgaccctcgcaacgttgtcattaaagaagtggcacgcggtttgagcaaagaaaccggcgatatgcgcctctttgacattgccgaacgtttggaaagcgtgatgtgggaagagaaaaaaatgttcccgaatctggactggttctctgccgtttcctaccaaaaattgggcgtaccgaccgctatgttcacaccgctgttcgtaatttcccgtacaaccggttggagcgcacacgttcttgagcaacgcaaagacggcaaaatcatccgtccgagcgcaaactacacgggccctgaagatttggcgtttgtggagattgaagaacgctga

SEQ ID NO: 45175 - DNA, 957 bp, Neisseria meningitidis
atgattttaacaccgccggacacgccctttttcctccgcaacggcaatgccgacacgattgccgccaaattcctgcaacgccccgcacctgcataccgccgcgagctgcttccagacagcacgggtaaaaccaaagtcgcctacgacttttcagacggcatttcgcccgacgcaccgctggtcgtgctgtttcacggtttggaaggaagcagtggcagccattacgcggtcgaactgatgctcgcggtacgcgatcgcggttggaacggcgcagtcgtccatttccgcagctgcggcggcattgccaacaccgctccggtgttctaccacttgggcgataccgccgaaatcgcctttactttggacacgcttgccgcgcgttaccgtgaaatatacgccgtcggcgtatcgctgggcggcaacgcgctggcaaaatatttgggcgaacggggcgaaaacgcgctgccgcaagccgctgccgtcatctccgcacccgtcgatgcagaggcggcaggcagacgcttcgacagcggcatcacgcggctgctctacacgcgctacttcctccgcaccctgatacccaaagcacggtcgctccacggttttcagacggcatttgccgcagggtgcaaaacactgggcgagtttgacgaccgcttcaccgcaccgctgcacggctttgccgaccggcacgactactaccgccaaacttcctgcaaaccgctgctcaaacacgttgccaaaccgctgctcctgctcaatgccgccaacgaccccttcctgccgcccgaagcgctgccgacaccggacgaagtgtccgaagccgttaccctgttccagccggcacacggcggacacgccggctttgtcggcagcaccggcggcaggctgcacctgcaatggctgccgcagaccgtcctgtcctatttcgacagcttccgcacaaacaggcggtaa

SEQ ID NO: 45176 - DNA, 600 bp, Neisseria meningitidis
atggcgttaaaaacatcaaacttggaacacgcaatgctggttcatcccgaagctatgagtgtcggcgcgcttgccgacaaaatccgcaaaatcgaaaactggccgcaaaaaggcatcttattccacgacatcacgcccgtcctgcaaagcgcggaatacttccgacttttggttgatttattggtttaccgctatatggatcagaaaatcgacatcgttgccggtttggacgcgcgcggcttcattatcggcgcggcactcgcctaccatctcaacgtcggttttgtccccatccgcaaaaaaggcaagctgccttttgaaaccgtatcgcaaagctacgcgctcgaatacggggaagctgcggtggaaatccacaccgatgccgtcaaacccggttcgcgcgtgctgctggtcgatgatttggttgccacgggcggcacaatgcttgccgggctggaactgatccgcaaactcggcggagaaattgtcgaagctgccgctattttggaatttaccgaccttcaaggcggcaagaatatccgtgcaagcggcgcgcccttatttaccctgcttcaaaacgaaggctgtatgaagggctga

SEQ ID NO: 45177 - DNA, 498 bp, Neisseria meningitidis
atgactgcgcttacccttccggaagacatccgccaacaagagccatccgccctgctctatcccctcgtttccgcctacctcgaacacaccgcccaaaccggcgacgaatccctctcctgcctgtccgacgaccagcacacgctgaccgcattctgctacctcgacagccaagtcgaagaaggcggcttcgtgcaactcatcgcctccggttacggcgaatatattttccgcaacccgcttgccgacagcctgcgccgctggaaaatcaaagccgtgccgaaagtcttggacaaagccaaagccctctacgaacaacacggcaaaaccatcgaaacgctcgccgacggaggcgcagacatcgaatccctgcgcaaacagttccccgactttgaagaatgggacggcgcatactacgaagccgccgaacaagacctgcccctgcttgcagaacacatacagtcaaactgggaaaccttcgcccatatcgggcaggcgtga

SEQ ID NO: 45178 - DNA, 663 bp, Neisseria meningitidis
atgaatttgaaattagtatttgaatcgggcgatcccgtcctgatcggtgtgtttgtgttgatgctgttgatgagtatcgtaacgtggtgtttggttgtcttgcgctgcatcaagctgtatcgggcgcgcaaagggaatgccgccgtcaaacggcatatgcgcgatactttgtcgctgaacgacgcggtcgaaaaagtgcgcgccgtcgatgcgcctttgtccaaactggcgcaagaggcattgcagtcttaccgcaactaccgccgaaacgaagcgtccgaactggcgcaggctttgccgttgaacgagtatttggtcattcaaatccgcaacagtatggcgcagattatgcgccggtttgattacgggatgaccgcgcttgcctccatcggcgcgaccgcgccgtttatcgggctgttcggcacggtttgggggatttaccacgccctgatcaatatcgggcaaagcgggcagatgagtattgcggcggttgccggcccgattggcgaggcactggtggcgacggcggcgggtttgttcgtggcgattccggcggtgttggcatacaacttcctcaatcgcggcacaaaaatactgacccaggatttggatgcgatggcgcacgatttgcacgtccgcctgcttaatcaaaaggatagctga

SEQ ID NO: 45179 - DNA, 1662 bp, Neisseria meningitidis
atgctgacctacactccgcccgatgcccgcccgcccgccaaaacccacgaaaagccgtggctgctgctgttgatggcgtttgcctggttgtggcccggcgtgttttcccacgatttgtggaatcctgccgaacctgccgtctataccgccgtcgaagcactggcaggcagccccacccctttggttgcccatctgttcggtcaaaccgatttcggcataccgcccgtgtatctttgggttgccgccgcgttcaaacatttgctgtcgccgtgggcagccgacccgtatgatgccgcacgctttgccggcgtgtttttcgccgttgtcggactgacttcctgcggctttgccggtttcaactttttgggcagacaccacgggcgcagcgtcgtcctgattctcatcggctgtatcgggctgattccagttgcccatttcctcaaccccactgccgccgcctttgccgccgccggactggtgctgcacggttattctttggctcgccggcgcgtgattgccgcctcttttctgctcggtacgggctggacgctgatgtcgttggcagcagcttatccggcagcatttgccctgatgctgcccttgcccgtactgatgtttttccgtccgtggcaaagcaggcgtttgatgttgacggcagtcgcctcacttgcctttgccctgccgcttatgaccgtttacccgctgctcttggcaaaaacgcagcccgcgctgttcgcgcaatggctcgacgatcacgttttcggtacgttcggcggcgtgcggcacgttcagacggcattcagtttgttttactatctgaaaaacctgctttggtttgcactgcccgcgctgccgctggcggtttggacggtttgccgcacgcgcctgttttcgaccgactgggggattttgggcgtcgtctggatgcttgccgttttggtgctgcttgccgtcaatccgcagcgttttcaggataacctcgtctggctgcttccgccgcttgccctgttcggcgcggcgcaactggacagcctgaggcgcggcgcggcggcgtttgtcaactggttcggcattatggcgttcggactgtttgccgtgttcctgtggacgggctttttcgccatgaattacggctggcccgccaagcttgccgaacgcgccgcctacttcagcccgtattacgttcccgacatcgatcccattccgatggcggttgccgtactgttcacacccttgtggctgtgggcgattacccgcaaaaacatacgcggcaggcaggcggttaccaactgggcggcaggcgttaccctgacctgggctttgctgatgacgctgttcctgccgtggctggacgcggcgaaaagccacgcgccggtcgtccggagtatggaggcatcgctttccccggaattaaaacgggagctttcagacggcatcgagtgtatcgacataggcggcggcgacctgcacacgcggattgtttggacgcagtacggcacattgccgcaccgcgtcggcgatgtacaatgccgctaccgtatcgtccgcttgccccaaaatgcggatgcgtcgcaaggctggcagacggtttggcagggtgcgcgcccgcgcaacaaagacagtaagttcgcactgatacggaaaatcggggaaaatatataa

SEQ ID NO: 45180 - DNA, 405 bp, Neisseria meningitidis; identical to SEQ ID NO: 38321

SEQ ID NO: 45181 - DNA, 474 bp, Neisseria meningitidis
atgaaaggcgaccgtttggttatccgcgagctaaacaaaaacttaggcttgctgctggtaaccatcaaccaatatttccttcacgcccgtattttgaaaaactggggctttgaagaactgggcgaacatttcttcaaacagtccatcgttgaaatgaaagctgccgacgatttgatcgagcgcattctgttcctcgaaggtctgccgaacctgcaagaactgggcaagcttctgattggcgagtccaccgaagaaatcatcgcctgcgatttgaccaaagaacaggaaaaacacgaagccctgcttgccgccatcgccacagcagaagcgcaacaggattacgtcagccgtgatttgttggaaaaacaaaaagacaccaacgaagaacacatcgactggcttgaaacccagcaggaactgatcggcaaaattggtttgccgaactacctgcaaacagcggcgcaagaggactaa

SEQ ID NO: 45182 - DNA, 483 bp, Neisseria meningitidis
atgccccaactcactttagacaaaaccgatattaaaatcttacaggttctccaggaaaacggcaggctgaccaatgtcgaactgtccgaacgtgtcgcactttcgccttctccgtgcctgcgccgtctgaagcagttggaagatgccggcatcgtccgccaatatgccgcgctgctgtctccggaatccgtcaacctggggcttcaggcatttatccgcgtttccatccgcaaagcaaaagacgcgcgggaagactttgccgcatcggttcgaaaatggcctgaagtcttgagctgcttcgccctgacaggggaaaccgactacctgcttcaggcgttttttaccgatatgaacgcgttttcccattttgttttggatacgctcctgtcccaccacggcgtacaagatgcgcaatcgagctttgttttaaaagaaatcaaacacaccacctccctgccgctcaaccacctgctgaaggaatag

SEQ ID NO: 45183 - DNA, 414 bp, Neisseria meningitidis
atgatgcccgcctacgcctacgccgcgctcgccttttccgccttcacttccgccaccctcctgcccggcacatccgaagccgcctttgccctgttcgtccgccgctttcccgaacacgcatacggcgcgttgctgtgcgccggccttgccaacggattgggcagtatggtttcctattggatgggacgtttgctgccttcccgaaaaatgccgtctgaaaaaacactgaatctgatgcggcgtttcggtatttggctgcttccgtttgcctggctgcccgtcgtcggcgacgcactgccgcttgccgccggctggctgcggttgaatccgtggacaagcgggctgatgctggttatcggcaaaacggcgcgttacgccttcattctgtggggaatgcaatattacgccgcctga

SEQ ID NO: 45184 - DNA, 987 bp, Neisseria meningitidis; identical to SEQ ID NO: 38696

SEQ ID NO: 45185 - DNA, 447 bp, Neisseria meningitidis; identical to SEQ ID NO: 39246

SEQ ID NO: 45186 - DNA, 996 bp, Neisseria meningitidis
atgttgaaaaaaatgttgaaatggactgccgtttttttgaccgtatcggcagccgttttcgccgcgctgctttttgtccctaaagacaacggcagggcataccgaatcaaaattgccaaaaaccagggtatttcgtcggtcggcaggaaacttgccgaagaccgcatcgtgttcagcagacatgttttgacggcggcagcctatgctttgggcgtgcataacaggttgcacacaggtacgtacaggcttccttcggaagtgtcggcttgggatatcttgcagaaaatgcgcggcggcaggccggattccgttaccgtgcagattatcgaaggttcgcgtttttcgcatatgaggaaaatcatcgacgcaacgcccgacatcgaacacgacaccaaaggctggagcaatgaaaaactgatggcggaagttgcgcccgatgccttcagcggcaatcctgaagggcagtttttccccgacagctacgaaatcgatgcgggcggcagcgatttacagatttaccaaaccgcctacaaggcgatgcaacgccgcctgaatgaggcatgggaaagcaggcaggacgggctgccttataaaaatccttatgaaatgctgattatggcgagcctggtcgaaaaggaaacggggcatgaagccgaccgcgaccatgtcgcttccgtcttcgtcaaccggctgaaaatcggtatgcgcctgcaaaccgacccgtccgtgatttacggcatgggtgcggcatacaagggcaaaatccgtaaagccgacctgcgccgcgacacgccgtacaacacctacacgcgcggcggtctgccgccaaccccgatcgcgctgcccggcaaggccgcgcttgatgccgccgcccatccgtctggcgaaaaatacctgtatttcgtgtccaaaatggacggcacgggcttgagccagttcagccatgatttgatcgaacacaacgccgccgttcgcaaatatattttgaaaaaataa

SEQ ID NO: 45187 - DNA, 282 bp, Neisseria meningitidis
atgaaaaaatccctgtttgccgctgctttgttgtctttggtcctggcagcctgcggcggtgaaaaagccgctgaagctcccgctaccgaagcacctgccgccgaagctcccgctgctgaagctgccgctactgaagcacctgccgccgaagctcccactgctgaagctgccgctactgaagcacctgccgccgaagctcccgctgctgaagctgccgctaccgaagcacctgccgctgaagctcctgctgccgaagctcctgctgccgaagctgcaaaataa

SEQ ID NO: 45188 - DNA, 993 bp, Neisseria meningitidis
atgaaacagaaaatttttgtcctttataccggcggcaccatcggcatgacgcaaagcagcgaaggcctgcgccccgataccgcgctggtcgggcaggcactcgcgccgttttcaaacggcatggatttcgattggcacgtttgtgggacgctgattgattcttccgccgtccaactgcaaaactggtgcgcttggctggacatcattgccaccgcgctgccgcagtacgacggcgttttggtgctgcacggcacggacacgctcgcctataccgccaatctgttcgccctcgcgctgcagggtttggacaagccaatcgtcctgaccggctcccaatggccgtacaacgccgtgggcagcgacgcgccgcgcaatctggcgactgccgttgccgcattcccactcggattgaagcagacgcttattgcctttgacggcaaactttatcccgccgtcggcagcagcaaagtcagcaccgaaaccgccgccggtttcgacaatccgcatttcggcgcactggcggagtgggacgaaacccagggctggcacaatgtccgcatcccgaatcaggacacggcagatgtttcagacggcctcaaaatccgttatcccgatcctcaggcaaaaatcgctgtccgcacgcttatccccggctttgccgtccaagaacttgcggacggactcggacagcttcccgcccacgcccttatcctgcaaagctacgggcacggcaacaccccggcagacgaaggctttatccgcgccgtgcaagacttcacgcagcaaggcaggctgctgctcaacatcagccaagtccgacaaggcagaactgccgccgtttacgcgcaaggcaatgcgttccgcaactcgggcatcatcaacggcggcaaatgcaatttggaaaccgcaaccgcattgatgacgcttgccgtttctgaaggatggggcgcggacgaggtgaaacacgagttgcagcggttggggctggtgtga

SEQ ID NO: 45189 - DNA, 1392 bp, Neisseria meningitidis
atgtttcccgatttctcccaaaccctctccaaagaccgccacttcctgcaatccgccttcaaaaatcccaacaaatacggcggcttgtccaaagtcgaagaaaaataccgaaaatcgcacgaaatctttttgaaacgtttggcagccttgcccaaacccgaattcgacaacaccctgcccgttcacgaaaaacttgacgaaatcaaaaaaaccgttgccgaacatcaggtaacgattatttgcggcgaaaccggttcgggcaaaaccacgcagttgcccaagatttgtttggaactcgggcgcggggtagcgggtttgatcgggcatacccagccgcgccgtttggcggcgcgttcggtggcagagcggattgccgaagagctgaaatccgaaatcggcagcgcggtcggctataaagtacgcttcaccgaccacacctcgcgcgatgcctgcgtcaagctgatgaccgacggcatcctgctggcggaaacgcagaccgaccgttatctcgccgcctacgacacgattatcatcgacgaagcgcacgagcgcagcctgaacatcgacttccttttgggctatttgaaacaactcctgccgcgccgccccgatttgaaagtcatcatcacctcggcaacgatagacgcagaacgcttctcccgacacttcaacggcgcgcccgttttagaagtgagcggacggacgtatcccgtcgaaatcctctaccgaccgctgaccggcaaagacgaagacgacgcagaagtggagttgaccgacgcgattgtcgatgcggcggacgaattagcgcgacacggcgaaggcgatattttggtattcctgccgggcgagcgcgaaatccgcgaaactgccgaagccttacgcaaatctacactgcgccgcaacgacgaaatccttcccctgttcgcacgcctgtcgcacgccgagcagcacaaaatcttccacccttcaggcgcgaaacgccgcatcgtattggcaaccaacgtcgccgaaacctcgcttaccgtgccgggcatcaaatacgtcatcgacaccggcctcgcgcgcgtcaaacgctattccgcacgggcaaaggtggagcagcttcatgtcgaaaaaatctctcaagccgccgcccgccaacgctccggccgctgcggacgcgtctccgcaggcgtgtgtatcagactgttttcagaagaagatttcaacagccgccccgaatttaccgacccagaaatcgtccgcagcaacctcgccgccgtcatcctgcgcatggcatcgctgaacctgggcgatgtggcggcattcccatttttagaaatgcccgattcgcggtatatcaatgacggttttcaggtattgctggaattgggggcggtagaggccgtctga

SEQ ID NO: 45190 - DNA, 552 bp, Neisseria meningitidis
atgaaagttttgaacggttggtcggacaggaagatgtggcgggttttgagtgctttgccgataggcgtggtgttttttgatttgatctacggttttgtgttgaatgtgttgcagggtttggatttgcagcgtgccgtgccggatttggaaggcgtgttggcggttacgcccgatattgcattcaacagtttgcagattgtcgccaacggcggtatggcggcggtggtctgtttcgggttggcggttgtgtttttgctcaaccgttcggtgcggcggcggcaggtgttggaaatcggggtgttccagatgttggggctggtggcggtattggcgttcagcgcgccgtcggtgtgggagtgggcgaacgcgctaccgctgctgctgaagggcgcggacgtggtcaatacggggaatgcgcgttatgtgctgacggctttgtgtatgccctttccggcggtgtcgtgcgtcatcgggctggtggggcggttcaggcttcagacggcatcgggcagggcggcaaagtcagggggtgcgggcaaggcggacggatag

SEQ ID NO: 45191 - DNA, 1854 bp, Neisseria meningitidis
atgaaccgttatcctttatggaaatatctgctgattgtgttcacgattgcggttgccgcagtgtattcgctgcccaacctattcggcgaaacacccgccgtgcaggtatcgaccaaccgacaagccatcatcatcaacgaacagactcaatccaaagtggatgccgcgctgcaaaacgcgggtattcagaccgacgggatgtttgttgtggacaattcactgaaagtgcgtttcaaagacacagaaacgcagcttaaagcgcgcgacgtcatcgaaaacactttgggcgaagggtatattaccgcgctcaacctgttggcggacagccccgaatggatggcgaaaatcaaagccaatccgatgtttttgggtttggacctgcgcggcggcgtgcatttcaccatgcaggtcgatatgaaagcggcgatgcagaaaacgtttgaacgttattcgggcgacatccgccgcgaactgcgccgcgaaaaaatccgcagcggcacggtgcgtcaggctggaaacagcctgaccgtccctttgcaggatgcaggtgatgtgcaaaaggcactgccgcagttgcgcaagctgtttcctgaagcaacgctgaattcagacggcagcaatatcgtcttgacgctttcggaagaggcggtcaataaagtgcgttccgatgcggtcaaacagaacatcactaccctgcacaaccgtgtgaacgagttgggcgtggccgaacccgtcatccagcagtcaggtgcagaccgtatcgtcgtgcagcttccgggcgttcaggatactgccaaggcaaaagacatcatcggccgtaccgcgactttggaattgcgtatggtggaggacgatcctgccaagttgcgcgaggcattggaaggcaacgtgccgagcggttatgagctgctttcaagcggcggagatcgtcccgaaactctgctaatcagcaaacaggtcgagctgacgggcgacaacatcaacgatgcgcaaccgagtttcgaccaaatgggcgcacctgccgtcagtctgagcttggacagcgcgggcggcagcattttcggcgaactgactgccgcaaatgtcggcaaacgcatggcgatggttttgatcgaccaaggaaaatccgaggttgtaaccgcgccggttatccgtactgccattaccggcggacgcgtggaaatttccggaagcatgacgacagccgaagccaatgatacgtctttgctgttgcgtgccggttctcttgccgcgccgatgcagattgtcgaagaacgtaccatcggtccgtctttgggtaaggagaacatcgaaaaaggcttccattcgactttatggggttttgccatcgttgctgcattcatggtggtttactatcgtctgatgggtttcttttctaccattgcattgagtgccaacatactgttcctaatcggtattttgtctgctatgcaggcaacgttgacgttaccgggtatggccgcgctggcgttgactttgggtatggcaatcgactccaacgtcttgattaacgaacgtatccgcgaagaattgcgtgtcggcgtgccgccgcagcaggcaatcaatctcggtttccaacacgcatgggcgaccattgtcgattccaacctgacttcgctgattgccggtatcgcgcttttggtattcggttccggcccggtacgcggttttgcggtcgtacactgtttgggtattctgacttcgatgtattcgtccgtcgtcgtattccgtgcgttggtcaatctgtggtacggacgcagacgcaaattgcagaatatttccatcggtgcggtatggaaacctgaagccgaaactgcggcaggtaaggagtaa

SEQ ID NO: 45192 - DNA, 291 bp, Neisseria meningitidis; identical to SEQ ID NO: 41644

SEQ ID NO: 45193 - DNA, 1071 bp, Neisseria meningitidis
atgaacctgatttcacgttacatcatccgtcaaatggcggttatggcggtttacgcgctccttgccttcctcgctttgtacagcttttttgaaatcctgtacgaaaccggcaacctcggcaaaggcagttacggcatatgggaaatgctgggctacaccgccctcaaaatgcccgcccgcgcctacgaactgatgcccctcgccgtccttatcggcggactggtctctctcagccagcttgccgccggcagcgaactgaccgtcatcaaagccagcggcatgagcaccaaaaagctgctgttgattctgtcgcagttcggttttatttttgctattgccaccgtcgcgctcggcgaatgggttgcgcccacactgagccaaaaagccgaaaacatcaaagccgccgccattaacggcaaaatcagcaccggcaataccggcatttggctcaaagaaaaaaacagcattatcaatgtgcgcgaaatgttgcccgaccataccctgctgggcattaaaatctgggcccgcaacgataaaaacgaactggcagaggcagtggaagccgattccgccgttttgaacagcgacggcagttggcagttgaaaaacatccgccgcagcacgcttggcgaagacaaagtcgaggtctctattgcggctgaagaaaactggccgatttccgtcaaacgcaacctgatggacgtattgctcgtcaaacccgaccaaatgtccgtcggcgaactgaccacctacatccgccacctccaaaacaacagccaaaacacccgaatctacgccatcgcatggtggcgcaaattggtttaccccgccgcagcctgggtgatggcgctcgtcgcctttgcctttaccccgcaaaccacccgccacggcaatatgggcttaaaactcttcggcggcatctgtctcggattgctgttccaccttaccggacggttcttcgggtttaccagccaactctacggcatcccgcccttcctcgccggcgcactacctaccatagccttcgccttgctcgctgtttggctgatacgcaaacaggaaaaacgttga

SEQ ID NO: 45194 - DNA, 1035 bp, Neisseria meningitidis; identical to SEQ ID NO: 44313

SEQ ID NO: 45195 - DNA, 447 bp, Neisseria meningitidis; identical to SEQ ID NO: 38678

SEQ ID NO: 45196 - DNA, 1266 bp, Neisseria meningitidis
atgttcagcttcttccgtcgcaagaaaaaacaggaaacgccggctctcgaggaggctcaaattcaggaaaccgcagcaaaagcagagtccgaaaccgatcaagtaattgaaaatattaaagaagaagtcgaatctttaacggaaagcgtcaaagagcaggtcgaatcggctgttgaaaccgtcagcggtgcggttgaacaagtaaaggaaaccgttgccgagatgctgtctgaagcagaggaagcggcggaaaaagcagcggaacaagtcgaagcggcaaaagaagccattgccgaaaccgtcggcgaggctgtcgggcaagttcaagaagccgttgcaacaactgaagaacacaagctcggttgggcggcgcgtttgaaacaaggtttgaccaaatcgcgcgacaaaatggcgaaatcgctggcgggcgtgttcggcggcggacaaatcgacgaggatttgtacgaagagctggaaaccgtgctgattaccagcgatatgggcatggaagccaccgaatacctgatgaaagacgtgcgcgaccgcgtcagcctcaaagggctgaaagacggcaacgaattgcgcggcgcgttgaaagaagccttgtacgacctgattaagcctctggaaaaaccattggtcttgcccgaaaccaaagagccgtttgtcatcatgcttgccggcatcaacggcgcgggcaaaaccacgtctatcggcaaactcgccaaatatttccaagcgcagggcaaatccgtattgctggcggcaggcgacactttccgcgccgccgcccgtgagcagcttcaggcatggggcgaacgcaacaacgttaccgtgatttcgcaaaccacgggcgattccgccgccgtgtgcttcgatgccgtccaagccgccaaagcgcgcggcatcgacatcgtgcttgccgacaccgccggccgcctgcccacgcagcttcatttgatggaagaaatcaaaaaagtgaaacgcgtgctgcaaaaagccatgcccgacgcgccgcacgaaatcatcgtcgtgcttgatgccaacatcgggcaaaacgccgtcaaccaagtcaaagcctttgacgacgcattagggctgaccggtttaatcgtgaccaaactcgacggcacggcaaaaggcggcatcctcgccgcgcttgcttccgaccgccccgtccccgtccgctacatcggcgtgggcgaaggcatagacgatttgcgcccgtttgacgcgcgcgcgtttgtggacgcactgctggattga

SEQ ID NO: 45197 - DNA, 684 bp, Neisseria meningitidis
atggaactggtatttatccgccacggacaaagcgaatggaacgcgaaaaacctgtttacaggctggcgcgacgtgaagctgagcgagcaggggcttgccgaggctgccgccgccggtaaaaaactgaaagaaaacggctatgagttcgacatcgccttcacatccgtcctgacccgcgcgattaagacctgcaacatcgttttggaagaatccgaccaactgttcgtaccgcaaatcaaaacatggcggctgaacgaacgccactacggccaactgcaaggcctggacaaaaaacaaaccgccgaacaatacggcgacgagcaagtccgcatctggcggcgcagctacgacaccctgccgccgcttttggacaaagacgatgagttttccgcacacaaagaccgccgctatgcccatctgcctgccgatgtcgtacccgacggcgaaaacctgaaagtaacgctggagcgcgtattgccgttttgggaagaccaaatcgcccccgcgattttgagcggcaaacgcgtcttggtggcggcgcacggcaactccctgcgcgcgctggcaaaacacatcgagggcatttccgacaaagacatcatgggcttggaaatcccgaccggtcagccgttggtgtacaaattggacgacaatttgaaagtcctcgaaaaattctacctgtaa

SEQ ID NO: 45198 - DNA, 909 bp, Neisseria meningitidis
atgaatcaaaccgccatcaaccgcgccgatgtgcgtacccgctttatcttcgacgatatgcccgtgcgcgggctgcacgtccgtctggaaaacgagtggcagcacattgtaaaacagaaaaactatcccgccgccatccgccgcgccttgggcgagctgttggctgccggtgttctgctgtcgggcaacctcaaaaacgaaggcacgctgattgtgcaggttcaggggcaggggcggctgaaaatgctggttgcggaagcgacttccgaccgtaccgtccgtgcgaccgcgcggtgggacgaggcggcagaaatcggtgaagatgaaagtttggtcgatcttttgggcgagggcggcgtattcgtgctgacgctgcagcccaaagacggcgaaccctggcagggcgtagtgcctttggaaggcgacggtatcgcgcaaatgttgatgaactatatgaaacgttccgaacagcttgatacgcacatcgtcctgtctgcaagcgatgaagcggcgggcggtctgctggtgcagcgtctgcctgaagaggtgttggatgaagaggcatgggaacacgtcagtacgctggcgcgcacgctgacggcgggcgagttggcagaattggatgcgcaacatgttttgtaccgcttgttccacgaaacgccgccgcgcgtgttcgagccggaaacgtttgaattttcatgcacctgttcgcgcggcaaagtcagcgatatgctgttgatgctgggcggggaagaagtcggcggcgtggtggtggaacaaggcagcatcgaagtcgattgcgatttctgccacagcaaatatgtgtttgacgaaaccgatgtcaacgcgctgttcggggaggatgtggtcggcgttgccaaagggctgccccggcatatcgtccaataa

SEQ ID NO: 45199 - DNA, 2130 bp, Neisseria meningitidis
atgaacaatccattggtaaatcaggctgctatggtgctgcctgtgtttttgttgagtgcttgtttgggcggaggcggcagtttcgatcttgattctgtcgataccgaagccccgcgtcccgcgccaaaatatcaagatgtttcttccgaaaaaccgcaagcccaaaaagaccaaggcggatacggttttgcgatgaggttgaaacggaggaatcggcatccgcaggcaaaagaagacaaagttgaactaaacccaaatgattgggaggagacaggattgccgagcaagccccaaaacttacccgagcgacagcaatcggttattgataaagtaaaaacagacgatggcagcaatatttacacttccccttatctcacgcaatcaaaccatcaaaacggcagcactaatagcggtgcaaaccaaccaaaaaacgaagtaaaagattacaaaaatttcaaatatgtttattccggctggttttataaacatgcagagagtgaaagagaattcagtaaaatcaaatttaagtcaggcgacgacggctatattttttatcacggtaaagacccttcccgacaacttcccacttctgaaaaagttatctacaaaggcgtatggcattttgtaaccgatactgaaaagggacaaaaatttaacgatattcttgaaacctcaaaagggcaaggcgacagatacagcggattttcgggcgatgacggcgaaacaacttccaatagaactgattccaaccttaatgataagcacgagggttatggttttacctcgaatttagaagtggatttcggcagtaaaaaattgacgggtaaattaatacgcaataatagagttacaaacgctactactaacgataaatacaccacccaatactacagccttgatgcccaaataacaggcaaccgcttcaacggtaaggcgatagcgaccgacaaacccgacactggaggaaccaaactacatccctttgtttccgactcgtcttctttgagcggcggctttttcggtccgaagggtgaggaattgggtttccgctttttgagcgacgataaaaaagttgcggttgtcggcagcgcgaaaaccaaagacaaaacggaaaatggcgcggtggcttcaggcggcacagatgcggcagcatcaaacggtgcggcaggcacgtcgtctgaaaacagtaagctgaccacggttttggatgcggtcgagctgaaattgggcgataaggaagtccaaaagctcgacaacttcagcaacgccgcccaactggttgtcgacggcattatgattccgctcttgcccgaggcttccgaaagtgggaacaatcaagccaatcaaggtacaaatggcggaacagcctttacccgcaaatttgaccacacgccggaaagtgataaaaaagacgcccaagcaggtacgcagacgaatggggcgcaaaccgcttcaaatacggcaggtgataccaatggcaaaacaaaaacctatgaagtcgaagtctgctgttccaacctcaattatctgaaatacggaatgttgacgcgcaaaaacagcaagtccgcgatgcaggcaggagaaagcagtagtcaagctgatgctaaaacggaacaagttgaacaaagtatgttcctccaaggcgagcgcaccgatgaaaaagagattccaagcgagcaaaacatcgtttatcgggggtcttggtacggatatattgccaacgacaaaagcacaagctggagcggcaatgcttccaatgcaacgagtggcaacagggcggaatttactgtgaattttgccgataaaaaaattactggtacgttaaccgctgacaacaggcaggaggcaacctttaccattgatggtaatattaaggacaacggctttgaaggtacggcgaaaactgctgagtcaggttttgatctcgatcaaagcaataccacccgcacgcctaaggcatatatcacagatgccaaggtgcagggcggtttttacgggcccaaagccgaagagttgggcggatggtttgcctatccgggcgataaacaaacgaaaaatgcaacaaatgcatccggcaatagcagtgcaactgtcgtattcggtgcgaaacgccaacagcctgtgcgataa

SEQ ID NO: 45200 - DNA, 771 bp, Neisseria meningitidis
atgaggctgaccgacacacattgccatcttgccgattctgttttgcgcggcaatctggcgcaggtgcttgccgaagcgcgacaggcgggtgtgtggcggtttatcgttcccgcgacgcgcccgcaggattggcaaagcgtggcggaactgtcggaaatgccgtccgaacacggtcaaatccgtattgcgctcggcatccatccttggttttcagacggcattgccgagcgtgattgcgtccgcctggaaacgatgttggcacgttatccgcaggcatgggtcggcgaaatcggcttggatttttacgacaaaacccaaacgccgccgcagcgcgaacggcaaatccaagttttcgtccgccagcttgccatcgcgcaaaccctgcgccgccgcgtgattatccataatctcaaagccaccgccgacatcgccgccgccgtcaaacagacaggctttgcccaaggcggcatcgttcacgccttctcaggcagcgcggaagaagcgcgcgtgttgacgaaactgggtttcaaaatcggcatcggttcgttgttgctcaatccgaacgcgcgtaaagtgcgcgatacgcttaaagccttgaacgacggggatttcgtattggaaaccgacagcccgtttatgctgaaaaaagagattaatacgcctgccaacattcttcggattgccgaaattgccgcgcagatacgcggtaccggcgcggcggaaatcgccgcgataacggaacgcaatgccgacagcctgctccgtccctag

SEQ ID NO: 45201 - DNA, 390 bp, Neisseria meningitidis; identical to SEQ ID NO: 39501

SEQ ID NO: 45202 - DNA, 1719 bp, Neisseria meningitidis
atgaacctacatcaaaccgtcgaacacgaagccgccgccgcctttgccgccgcaggcatcgccgacagtcccgttgttttgcagccgaccaaaaatgccgaacacggcgatttccaaatcaacggcgtgatgggtgcggcgaaaaaagccaaacaaaatccgcgcgaactggcgcaaaaggtcgccgacgcattggcgggcaacgccgtcatcgaaagcgcggaagtcgccggtccgggctttatcaacctgcgcctgcgccccgaatttctcgcgcaaaacattcagacggccttgaacgacgcgcgtttcggcatagcgaaaaccgacaggccgcaaaccgtcgtcatcgactattcctcacccaatctggcaaaggaaatgcacgtcggccacctgcgttccagcatcatcggcgacagcatttcgcgcgtgttggcatttatgggcaacaccgtcatccgccaaaatcacgtcggcgactggggtacgcagttcggcatgttggtcgcttatttggtcgagcagcaaaaagacaatgccgcgttcgagctggcggatttggagcagttttaccgcgccgccaaagcgcgctttgacgaagaccctgcctttgccgacaccgcacgcgaatacgttgtgaagctgcaaggcggcgatgaaaccgttttggcgttgtggaaacagtttgtcgatatttcgctctcacacgcccaagccgtttacgacacgctgggcttgaagctgcgccccgaagacgtggcaggcgaatcgaagtacaacgacgatttgcaagccgtggtcgatgacttggttcaaaaaggtctggcagtcgaagacgacggcgcgaaagtcgtattcttggacgagtttaaaaacaaagagggcgaacctgccgcatttatcgtgcaaaaacaaggcggcggcttcctttatgcttccaccgacttggcatgtttgcgctaccgtttcggcacgcttcatgccgaccgcctgctgtacgtcgtcgaccaccgccaagccctgcacttcgagcaactctttaccacttcccacaaagcaggctatctgccggaaaacgtcggcgcggcatttgtcggcttcggcacgatgatgggcaaagacggcaaaccgttcaaaacgcgcagcggcgacaccgtaaaactggtcgatctgctgaccgaagccgtcgaacgcgccaccgctttggtgaaagaaaaaaatcccgaattgggcgcggatgaagccgccaaaatcggcaagaccgtcggcatcggcgcggtcaaatacgccgatttgagcaaaaaccgcaccagcgattatgtgttcgactgggacgccatgctctcgtttgaaggcaacaccgccccctacctgcaatacgcctacacccgcgtgcaaagcgtgttccgcaaagcaagcgaatgggacgcaactgcgccaaccgttttgaccgaacctttggaaaaacagcttgccgccgagctgctgaaattcgaagacgtgctgcaaagcgtggcggacacggcgtatccgcactacctcgccgcctacctctatcaaattgccaccctgttcagccgcttctacgaagcctgcccgattttgaaagccgaaggcgcaagccggaacagccgcctgcaactggcgaagctcaccggcgacacgctgaaacaaggcttggaattgttaggcatcgatgtgttggacgtaatgtaa

SEQ ID NO: 45203 - DNA, 579 bp, Neisseria meningitidis
atgaaaacttttgccctgatactggccgacggtcaggcgagccgtatgggaggcgaggacaaggggcttgctcttttggggggtaaggcactgatagatcatgtcatcgacagggtcaggccgcaggtcagccatatcgccatcagcaccaaccggaatttggaagaatatgctcgaagaagtccgcatatttttccggacgcacggcagtggcagcatttcggcccgctttcggcattgtgtaccgcagccaacgatttgcagttggcgactgccgactggcttttggttgtgccgtgcgatatgccgtatctgccgggcgatttggtggcgaggtttgaaaccgtgtcgaaacgcacaccgttgtgcaatgcgtattatgtggaaacgccgataacgatgcactacaacattatgtatatccgcccgcagattctgcaaagcgcgattccctatctgttttcgggtatgaaaacattaagaagctggttgcagcagcaaagggcgcggccggtcagattcgagtttgacgggcattttgccgacttgaacacgcaaatcgatttgcaggagggataa

SEQ ID NO: 45204 - DNA, 318 bp, Neisseria meningitidis; identical to SEQ ID NO: 39456

SEQ ID NO: 45205 - DNA, 906 bp, Neisseria meningitidis
atggacattctggacaaactggtcgatttcgcccaattgacgggcagtgtggatgtgcagtgccttttgggcggacaatggtcggtacggcatgaaaccttgcaacgcgaaggattggtacacattgttacatcgggcagcggctatctctgcatcgacggcgaaacttccccgcgtccggtcagtacaggggatattgtatttttcccgcgcggcttgggtcatgtgttgagccacgacggaaaatgcggagaaagtttacaaccggatatgcggcagcacggtgcgtttacggtcaagcagtgcggcaacggacaggatatgagcctgttttgcgcccgtttccgctacgacacccacgccgatttgatgaacgggctgcctgaaaccgtttttctgaacattgcccatccgagtttacagtatgtggtttcaatgctgcaactggaaagcaaaaaacctttgacggggacggtttccgtggtcaacgcattgtcgtctgtcctgctggtgcttatcctgcgcgcctatctcgaacaggataaggatgtcgaactctcgggcgtattgaaaggttggcaggacaaacgtttgggacatttaatccaaaaggtgatagacaaaccggaagacgaatggaatgtcgacaaaatggtggcggctgccaatatgtcgcgcgcgcaactgatgcgccgtttcaaaagccgggtcggactcagcccgcacgcctttgtgaaccatatccgcctgcaaaaaggcgcgttgctgctgaaaaaaaacccggattcggttttgtcggtcgcactgtcggtaggctttcagtcggaaacgcacttcggcaaggcgttcaaacggcaatatcacgtttcgccgggtcaataccggaaagaaggcgggcaaaaataa

SEQ ID NO: 45206 - DNA, 1284 bp, Neisseria meningitidis
atgactgtatcgaaatcaggttttatcgggcaaatcttttcccgaaatatgcttgtttgtatttttacggggtttacctcggggctgccgctgtactttctgattaacctgattccggcgtggttgcgcagcgagcaggtggatttgaagagcatcgggctgatggcgttaatcggtctgccgtttacttggaaatttttgtggtcgccgctgatggacgcggtcaggctgcccgttttgggacggcggcgcgggtggatgctgctgacgcaggcagggttgctggcggctttggcggcctatgcctttttaaacccccgtaatcatctgccgctgattgccggcttgtcggtgcttgtcgcttttttttccgccagtcaggacattgtattggatgcgttcaggcgcgagattttgtcggacgaagaattgggtttgggcaactcggttcatgtgaacgcctatcgggttgccgccctgattcccggttcattgagtttggtgttggcagacaggatgccgtggtcagaagtatttgttatcacttcattatttatgctgcccggccttctgatgacgctgtttcttgcgcgcgaacccgtgttgccgcctgccgttcctaaaacgttgaagcagaccgtggtagagccgtttaaagaattttttacgcgcaagggcatcgcttcggcggtgtgcgtgctgctgtttatcttcctttacaaactcggcgacagtatggcaaccgcgttggcaacgccgttttatctggatatgggtttcagcaagacagacatcggtttgattgcgaaaaatgcaggactgtggccggcagtggcggcaggtatcttgggcggcgtgtggatgctgaaaatcggcgtaaacaaagccttgtggctattcggcgcggtgcaggctgtaaccgttttggggtttgtatggctggcagggttcggacctttcgacacggtcggcacaggcgagaggctgatgctggcggcagttatcggcgcggaagcggtcggcgtggggttggggacggcggcgttcgtatcgtatatggcgcgtgaaaccaatcccgcatttaccgcaacgcagcttgcgctgtttaccagcctgtccgccgtcccgcgcacggtcatcaattcctttgccggttatctgattgaatggctcggttatgtaccgtttttccaactgtgtttcgcactcgccctaccgggtatgctgctgctgctgaaagttgcgccttggaacggggagaaaactcaggatgcaggcagatga

SEQ ID NO: 45207 - DNA, 1212 bp, Neisseria meningitidis
atgaaccaactgaaacttgccgtttccggcgcgcagattttatttgtggcattcggcgcaatggtgctggttcccctgctgaccggtctgaatccggctcttgcgcttttgggcgcaggcttgggaacgctgctgttccaaatcacaaccaaacgcaaagtgccgatttttcttggttcttcgtttgcctttatcgcaccgattatctactccgtcggcgaatgggggctgccttccaccatgttcggactgtttaccgccggctttatgtattttgtgtttgccgcgctgatccgttggcgcggactggcagcggtacacaaactgctgcctccggtcgtcatcggccccgtcatcatggtcatcggtctgtctgttgccgtggcggcaagcagcatggcaatgggtcaggcggacggcaaacaggtcatcgactataccgattcgctgattctttccggctttacctttgccgttaccgccatcgtatcggttttcggcagcaggatgatgaagctgattcccatcttgatcggtgtcgcttcgggttatgttttggcactgctgatgggactggtggacacggcaagcattgcacacgcgccctggttcgccgttccccattttgaaacgcctcaggtcaactggcaggctgcactgtttatgctgcccgttgccgtcgcccccgccatcgaacacatcggcggcatcatggcaatcggcaatgtgacggggaaagactatacgaaagacccgggcttggacaaaacccttgcaggcgacggtttgggcgtatgcgttgcgggtctgatcggcggcccgccggttacgacctacggcgaagtaacgggtgcggtgatgattaccaaaaacagcaaccccgtcatcatgacttgggcggcggtttttgccgtctgcatggcgtttttcggcaaattcaatgcgtttttggcttccattccgatgccagtaatgggcggcattatgctgctgctgttcggcacgattgcttctttgggcgtgaaaacgttgattgatgccaaagtcgatttgatgctgccgaaaaacctggtcatcgtcagctcggtactgaccacgggcatcggcggcatgacgctcaaattgggcagcttcagctttgccggcgtgggcttgtgcgccgtacttgccattatgttgaacagcctgctgcccgatccgaaagaatcctga

SEQ ID NO: 45208 - DNA, 516 bp, Neisseria meningitidis; identical to SEQ ID NO: 42639

SEQ ID NO: 45209 - DNA, 696 bp, Neisseria meningitidis; identical to SEQ ID NO: 38171

SEQ ID NO: 45210 - DNA, 876 bp, Neisseria meningitidis; identical to SEQ ID NO: 38422

SEQ ID NO: 45211 - DNA, 1167 bp, Neisseria meningitidis
atgagaaaattcaatttgaccgcattgtccgtgatgcttgccttaggtttgaccgcgtgccagccgccggaggcggagaaagctgcgccggcagcgtccggtgaggcgcaaaccgccaacgagggcggtgcggtcagtatcgccgtcaacgacaatgcctgcgaaccgatggaactgaccgtgccgagcggacaggttgtgttcaatattaaaaacaacagcggccgcaagctcgaatgggaaatcctgaaaggcgtgatggtggtggacgagcgcgaaaacatcgcccccggactttccgataaaatgaccgtcaccctgttgccgggcgaatacgaaatgacttgcggtcttttgaccaatccgcgcggcaagctggtggtaaccgacagcggctttaaagacaccgccaacgaagcggatttggaaaaactgtcccaaccgctcgccgactataaagcctacgttcaaggcgaggttaaagagctggtggcgaaaaccaaaacctttaccgaagccgtcaaagcaggcgacattgaaaaggcgaaatccctgtttgccgacacccgcgtccattacgaacgcatcgaaccgattgccgagcttttcagcgaactcgaccccgtcatcgatgcgcgtgaagacgacttcaaagacggcgcgaaagatgccggatttaccggctttcaccgtatcgaatacgccctttgggtggaaaaagacgtgtccggcgtgaaggaaattgcagcgaaactgatgaccgatgtcgaagccctgcaaaaagaaatcgacgcattggcgtttcctccgggcaaggtggtcggcggcgcatccgaactgattgaagaagtggcgggcagtaaaatcagcggcgaagaagaccggtacagccacaccgatttgagcgatttccaagccaatgtggacggttcgaaaaaaatcgtcgatttgttccgtccgctgatcgaggctaaaaacaaagccttgttggaaaaaaccgataccaacttcaaacaggtcaacgaaattctggcgaaataccggactaaagacggttttgaaacctacgacaagctgggcgaagccgaccgcaaagcgttacaggcctctattaacgcgcttgccgaagaccttgcccaacttcgcggcatactcggcttgaaataa

SEQ ID NO: 45212 - DNA, 480 bp, Neisseria meningitidis
atgccggaaagtatttttaaacagatttcccttgatattttgaaactgcatcgggactctgtttattcgctgcttgccacttccggctgcaactgtcaggtgcatgaagcggcgtatgtcaacatcgacggcaaatattatattgcgctttcatgcgagcccgaggtgggggaagtcaaaacaggcattttgctgattgaggatgaaagccgcaaccttcgtttgagctgggtcggcagtgcgcgggagcttgactgcaaggataatgcctacaaacgcgccctgtccgccttgtctagaaagctggggcggtgtaaggacaagttgcatacggcggttcaaccgtttctgttggagctggtaccggagaaaggcagattttctgtcggcgatgaagaagtttggatttctcgaaacgatttagtgagggctttatatcctgtcggatacagtatgcggcaggcagtgtttcagatttaa

SEQ ID NO: 45213 - DNA, 813 bp, Neisseria meningitidis
atggacaaaatcagagttgccgccgtgcagatggtgtcgggcgtgtcgccggaaaccaacgtcgctgccatgaaacgcctggtcgcacgggcggcggagcagggtgtggattgggtgctgctgcccgaatattgggtgctgatgggcgcaaacgataccgacaaactcgcgcttgccgagcctttgggcggcggacgctttcagacggcattgagcgaaacggcgaaagaatgcggcgtggtgctgttcggcggaaccgtgccgctgcaaagccccgaggcgggcaaggtcatgaatactttattggtgtacgggcgcgacggcaaacggacggggctgtaccacaaaatgcacctcttcggcttttccggtttgggcgaacgctatgccgaagccgataccatcagcgcagggcgggaagtgccgcacttgtcggcagaaggcgtgtcggtggcggcgggcatttgttacgatgtccgctttcccgaatttttccgccgccagctgccgtttgacgtattgatgctgcccgctgcgtttacgcacacgacgggcaaggcgcattgggagctgctgctgcgcgcgcgtgccgtcgaaaaccaatgttacgtcgtggcggcggcacagggcggtttgcacgaaaacggacggcgcacgttcggacacagcatgattgtcgatccgtggggcgacgtattggacgtattacccgaaggcgaaggcatcgttacggcagacatcgatgccaaccgcctgaacagcgtccgcaaccgcctgcccgccttgaaataccgggttttggatgccgtctga

SEQ ID NO: 45214 - DNA, 780 bp, Neisseria meningitidis
atgagcgcaaccattcccccaaaaatcatccgatacgacagcaatccgaccgatgtctattttttcggcacttgcgtccttgatctttttatgcccgaagcaggcatggatgccattaccctaatcgagcaacagggcatacgcgtccatttcccgatggcgcaaagctgctgcggtcagcccgcctattcatccggccatccgaccgaagcctttgatgtcgccagagcgcaactcgaccttttccccgaggagtggccgattgtcgtaccgtccggttcgtgcggcggtatgatgaagcaccattggccgacgctgtttaaaggcagcgagtacgaggaaagggctgtggattgcgccggccgcatcatcgagtttacccatttcctgcttgccatcggtttcaaacccgaagacaagggcgaaccgctcaaagtcgccgttcacacttcctgcgccgcccgccgcgaaatgaatgtccatctctcgggctggcaactgattgacggtatggaaaacgtcgaacgcatcgtccacgaccacgaaagcgaatgttgcggcttcggcggcacattctccgtcaaacaagccgatatttccggcgcgatggtaaccgacaaagtcgccgcgctgaaagaaaccggcgcaaccgaaatcatcagcgcggactgcggctgtatgatgaacatcggcggcaaaattgctaaggacgaaccgaatatgccgcgtccgaaacatatcgcatccttcttgttggaacgtaccggaggcaaagcatga

SEQ ID NO: 45215 - DNA, 246 bp, Neisseria meningitidis; identical to SEQ ID NO: 39751

SEQ ID NO: 45216 - DNA, 855 bp, Neisseria meningitidis
  misc_feature 832, 833, 834, 835, 836: 'n' is a, c, g or t
atgagtcgtgaaatgttacagctggcagaagcactggcaagcgaaaaaaacgttgatgcggaagtcgtcttccaagcactggaattcgccctgtctaccgccgccaagaaaaaggcagaccgcgaacacatggacgtgcgcgtccaaatcaaccgcgacaccggcgaataccaaaccttccgccgctggctgattgtcgccgatgaagactatacctatcccgatgtcgaaaaaaccatcgaggaaatccaagaggaaattcccggcactaccatccaaatcggcgaatactacgaagagcagctacccaacgaaggcttcggccgccaagccgcgcaaaccgccaaacaaatcatcctgcaacgcatccgcgatgcggagcgcgagcaaaatctgaacgagtttctcgccgtcaaagaagacatcgtgtccggcacggtcaaacgcgtcgaacgccacggcatcatcgtcgaagtcgttgccggcaaactggacgcgctgattccgcgcgaccaaatgattccgcgcgaaaacttccgcagcggcgaccgcatccgcgccctcttcctgcgcgtcgaagaaatcggcaacaccggccgcaaacaagtcatcctgagccgtacttccggcgatttcctcgtcaaactgtacgccaatgaagtacctgaaattgcagacggcatgcttgaaatccgcgctgtcgcccgcgacccgggccaacgtgccaaagtcgccgtcaaagccaacgaccagcgcatcgatccgcaaggcacctgtatcggcgttcgcggttcgcgtgtcaatgccgtcagcaatgaattatccggcgagnnnnncacacacttaattaattaa

SEQ ID NO: 45217 - DNA, 279 bp, Neisseria meningitidis; identical to SEQ ID NO: 40400

SEQ ID NO: 45218 - DNA, 282 bp, Neisseria meningitidis; identical to SEQ ID NO: 39646

SEQ ID NO: 45219 - DNA, 1155 bp, Neisseria meningitidis
atggttgataaaaaaagccctttgattgctgtcagtgtcggcgaagcgtcgggcgacctgttgggggcgcacctgatacgcgccatccgcaagcgttgcccgcaggcgcgttttgtcggtatcggcggcgaactgatgaaggcggaaggtttcgagagcctttatgatcaggagcgactggcggtgcgcggctttgccgaagtggtcaggcggctgccggaaattttacggatacgcagggggctggtacgggatttgctgtcgttgaaacctgatgtctttgtcggcatcgatgcgcccgattttaatctgggtgtggcggagcggctcaaacggtcggggattccgaccgtgcattatgtcagtccgtcggtttgggcgtggcggcgggaacgcgtgggcaaaatcgtgcatcaggtcaaccgcgtgctgtgcctgttcccgatggagccgcagctttatcttgatgcgggcggacgtgcggagtttgtcggtcatccgatggcgcagcttatgcccttggaagacgaccgtgaaacggcgcggaaaactttgggcgtggatgccggcatccccgtattcgccctgctgcccggcagccgcgtcagcgaaatcgactatatggcgccggtgttttttcagacggcattattgttgttggaacgctatcccgccgcacgcttcctgctgcctgccgcaacggaggcgacgaagcggcgtttggcggaagttttgcagcggccggagtttgccggattgccgctgacggtaatcgacagacagtctgaaacagtgtgcagggcggcggatgcggtgctggtaacgagcggtacggcaactttggaggtggcgttgtgtaagcgtccgatggtcatcagctacaagatttcgccgctgacctatgcttatgtgaaacgcaaaatcaaagtgccgcatgtcggcctgccgaatatcctgttgggtaaggaggctgtgccggaattattgcaatctgaagcaaaaccggaaaaactggcggcggcgttggcggactggtacgaacaccccgataaggttgccgcgctgcaacaggatttcagggcgttgcacctgctgttgaaaaaagatacggcggatttggccgcgcgcgcggttttggaagaggcgggatgttga

SEQ ID NO: 45220 - DNA, 522 bp, Neisseria meningitidis
atgtcctgtttttcaatcaaacgtatgtccgcgtttcgggcgcggataacagtgttttttaccgcctttgtctttttgacggcggcactgcccgcttatgcggagcgtctgcctgattttctggcgaaaatacagccttcggaaatttttccaggtgcggaccgttacggcaagccggaaggcaagcctatggttgcccgcgtttacaaaggcgatgagcagttgggcttggtctatatcacgaccgatgcggtcaatacgcgcggttattcgaacaaaccgatcgatacgctgatggctttggcaaatgacggcacgatagccggagcgaaactggtcgatcatcacgaaccgattatgctgatcggtatcccgcatttgcccgcgcccatgcgggcgatacgctcaaactggcttccggcgtatatcaaaccaaactttatatcgacaaaccgattacgattgaagggcctgctgaccgttctgcaaccatcgaaggagacaggagcggacgtacgatag

SEQ ID NO: 45221 - DNA, 477 bp, Neisseria meningitidis
atggaacacctatttgggaaatggctgcccgacttgcccgccgccgtttcagacggcatcgacctgccgatgagccggttattgaaagcccggtcgctgaccgccgcattgcgcgccttgccgcatacattttcggtggaactgctgaaactgggcgaattggagacggaatgcggagggaggctggtgcgcgaagttttgttgaagctggaccgtatccctgttgttgaggcaaggagcgaatgccggataggttcggcgttttggcaaaacattttggactgcggcacgcgccctttgggcgagcgtctgtttcaagccgatttggaaggggcgcgttcggcgtttgagtttgccgtttccggcgaaggatgcggacggtactttgccgcgcggcgttctcggttttcccgtcacggcgaggaaatgctgctgaccgagtattttctgcccgaactgaaacgctttatcggataa

SEQ ID NO: 45222 - DNA, 1128 bp, Neisseria meningitidis
atgaaacacttactcatcgattttgaaaacgtccagccgcaaaacttagacaaattaccaaccgaaaatacccatatttggctatttataggtgtattacacaaaatgttacctattagtctggtgcaatccctactacgtttcggcgaacgtgtccatcttgtccagttacaaaaaacggggaaaaacgcattggatttttacctgtcctattacctcggacaaattaccgccacagaccccaatgcccaaatcggcatactctcgcgtgatggaggatacgatgttctggtcgaacatattttgaaaaaccaccaggcgaagggtatcgtgcgcctagccaatatagatgaagtacaacatcagaaaattactaccgaaccgccgtcagcattgctggaaaacactcctcagcctgaaaccaccctcaaaccacagcaaccattaacttcctatttccaagcagccctaactgcactgcgccgccccgacgctttccgcccctgccgcctgcataacctgcgacaaaatctgcgtaagcatattttgagtgatttgtttaaagaaaaaaccgatgaagaatgcgaaataaccactgctaacgttatcaataaactcaaagcacaaaacttcatcagcattgatgaacaggaaaccgtttcctaccatctcagtgataatgatttgttacaaagaatccaacgccatattttaagccaacgtcccaaaacctacgctgattttcaagccgtcgtgcaaaaccgagcagatgcacttcacttaacagtcggtaccaacgacattcaatcctttgcgcgacatttgcgcgaccaaaacctgatccgccaaaacaatgggaaaattgaatatgcaccgtttactgaacctaaaccacagccaacgcccaagcagcctaaaaaaaccgcatgggaacctgatgaaattatttggaaaaaagtgattgccgcgttatcgttaaagaaccgtcctaataaaaccaaaactttacgcaatacaatccaggcactcacaaaatccaatgcacaagaaactgacaaactgctacaacatttacaagatacccaagtcctacgtattgacggtactaaaattgtgtatatcaagtag

SEQ ID NO: 45223 - DNA, 1059 bp, Neisseria meningitidis; identical to SEQ ID NO: 37985

SEQ ID NO: 45224 - DNA, 612 bp, Neisseria meningitidis; identical to SEQ ID NO: 39023

SEQ ID NO: 45225 - DNA, 672 bp, Neisseria meningitidis; identical to SEQ ID NO: 42198

SEQ ID NO: 45226 - DNA, 1188 bp, Neisseria meningitidis; identical to SEQ ID NO: 38360

SEQ ID NO: 45227 - DNA, 1290 bp, Neisseria meningitidis; identical to SEQ ID NO: 38999

SEQ ID NO: 45228 - DNA, 2853 bp, Neisseria meningitidis
atgaaactgtccgaactgttcaaccccgacgaatttgccgcgcggcatttgagtttcggcgacgaagcggcgttgcttgccgctgtcggcgagaaaagtatggacgattttgtcggcaacaccgtgccgcaaagcatccgtatgccgtccgaactcgatttgcccgatgccctgaccgaagcggacgcgttggcaaaattgaaaggcattgcgtcgaaaaacgtgatcaacaagtcctatatcggtttaggctattacccgacccgcgtgccgaatgtgactttgcgcaacgtattggaaaatccgggctggtataccgcctacacgccgtatcaggcggaaatcgcgcagggtcgtttggaagcattgttgaacttccaacaagtgtgcatcgatttgaccggttttcccgtggcgggcgcgtctttgctggacgaggcaactgccgcggctgaagcgatggcgatggcgcaccgagtgggcaaagtgaaatccgaacgtttctttgtggatgcgcgcgtgtatccgcaaactttggacgtgatgaaaacccgcgccaaatatttcggctttgaattggtggtcggtgattttgcccaagcggaggaaggcgaatacttcggtgcgctgttccaatacgtcggcaaagacggcgatgtgcaagacttgcaggacgttatcggccgtctgaaagccaaaggcacaatcgttgccgttgcagccgacattatgagcttggttttgctgaagtctccggctgaactaggtgcggatattgctttgggcaacacgcaacgcttcggcgtgcctatgggctttggtggtccgcacgccgcttatttcgcgtttaaagacgagttcaaacgttccgccccgggccgcatcatcggcgtatccaaagacgcatcaggcaaacctgccttgcgcatggcgttgtccacccgcgagcaacacatccgccgcgaaaaagcgacatccaatatttgtaccgcgcaggcattgctggcgaacttggcgggtatgtacgccgtttaccacggccctgaaggtgtgaaacgcatcgccaaccgcattcacgcgctggcttctgcctttgccgatgcgctggtttcagacggcctgaatgtggttcataaggtcttcttcgataccgttaccgtcgatttcggcagcaaagagcaagcagaccaagtgtttgccgctgctttggaatcgggctacaacctgcgccgcgtcagcgatactcaagttgcggcagccttccatgaaacttcgacacgcgaagatttggtcgatttgtaccgcgcgtttaccggcaaggatacgttcgcatttgccgatgatgtcaaaggccgtctgaatgccgaattactgcgtcaagacgacattctgcaacatcccgtgttcaaccgttaccacaccgaacacgaaatgttgcgctatctgaaaaaactcgaagaccgcgacttggcgatgaaccgcagtatgatttcgctgggcagttgcaccatgaaactcaatgccactgcggaaatgttgccgattacttgggcggagttctccgacatccacccctacgcccccgaaacccaaaccgcaggctaccgcgaactcttaacagacatggaaaacagcctgaaagccatcaccggctttgacgcgatttccttgcaacccaactccggcgcacaaggtgaatacaccggtatgctctccatccgccgttatcaagaagccaacggcgagggacaccgcaacatctgtttgattcccaaatccgcccacggtaccaaccctgcgactgcggccatgctgggcttgaaagtcgtcgttgtcgataccgacgaacacggcaacgtcaacatcgacgatttgaaagccaaagccgagcaacaccgcgacactttgtccgccatcatgattacctatccgtctacccacggcgtgtacgaagaaggcatccgcgacatctgccgcatcatccatgaaaacggcggacaggtttacatggacggcgccaacctcaacgcccaaatcggcatcatgcagcctgccgaagtcggcgcggacgtgttgcacatgaacctgcacaaaaccttctgtatccctcacggcggcggcggtccgggcatgggtccgattggcttgaaagcccatctggctccgttcgcaccaggccatgtggtaaccgatatgcacaacgccagtgccgatcaaactgccgtggctgccgcagctttcggttctgcgtccatcctgccgattacttggatgtacctgaccatgatgggcaaacaaggcatggagcaggcaacacgctgggcattgctcaacgccaactacgttgccaaacgcttgagcgaagactatccgattctgtatacaggcaaaaacggccgcgtcgcgcacgaatgtatcgtcgacttgcgtccgctcaaagccgaaagcggcattaccgaaaccgacatcgccaaacgcctgatggactacggcttccacgccccgaccgtctccttccccgttgccggcacgctgatgatcgagccgaccgaaagcgagagcaaagccgaactcgaccgcttcatcgccgccctgaaacaaatcaaacaggaagtgttgaaagtcgagcgcggcgaatggccgaaagaggacaacccgttggtgaacgctccgcataccgcatccgacgtaactggcgaatggacgcatccgtattcccgcgaagaagccgtcttcccattgccgttcgtccgcgaacacaaattctggccgagcgtcaaccgtgtggacgacgtgtacggcgaccgcaatctcgtgtgcagctgcccaccgatggaaaattatgaagactga

SEQ ID NO: 45229 - DNA, 915 bp, Neisseria meningitidis; identical to SEQ ID NO: 39317

SEQ ID NO: 45230 - DNA, 363 bp, Neisseria meningitidis
atgaagctgccgcgcaaccgcttcagcctgctttccgcattgtggtttgccggcggcatctattcgctgctcttcaaagctgccgacaccgcgccgccgccgtttccgcatttcgacaaagcagcacaccttgccctgtttttcgcacaaatctggcttttgaccaaagcattcaaaaccggaaaacttcccatcccctaccgcagcctgatggtctttgccctctgtttcgccctcttcagcgaatgcgcgcaggcatggtttaccgcaacgagaaccggcagtttgggcgatgtccttgccgacctgacgggtgcattgctcgcactctttgccgcacgttccgccgaccgcccggactga

SEQ ID NO: 45231 - DNA, 129 bp, Neisseria meningitidis
atgaacgaacaagatttagatttggacaacctcgacaacctgcttgacgatttcgacggcgttaccgtggaaggcggcgtcgattcggaaaacgacgacggctgtgaaggcggagcgtgcaaaatctaa

SEQ ID NO: 45232 - DNA, 957 bp, Neisseria meningitidis; identical to SEQ ID NO: 39269

SEQ ID NO: 45233 - DNA, 1344 bp, Neisseria meningitidis; identical to SEQ ID NO: 39017

SEQ ID NO: 45234 - DNA, 1935 bp, Neisseria meningitidis
atgagcttgatcgaatgtaaaaacatcaaccgctatttcggcagcggcgagaaccgcgtccatattttgaaagacatcagcctgtcgatagagaagggcgattttgtcgccatcatcgggcagtccggttcgggcaagtccacgctgatgaacatactcggctgtttggataccgccggttccggttcgtaccgaatcgacggcatcgaaactgccaaaatgcagcctgacgagctggcggcattgcgccgcgaacgcttcggtttcatcttccaacgctacaacctcttaagctcgctgaccgcaagggacaacgtcgcgctgccagccgtgtatatgggcgcgggcggcaaagagcgttccgcgcgtgcggagaagttgttgcaggatttgggtttggcaagcaaagagggcaacaagcccggcgaactctcgggcggacagcagcagcgcgtctccatcgcccgcgccctgatgaacggcggagaaatcatcttcgccgacgagccgaccggcgcgctcgataccgccagcggcaaaaacgtgatggaaatcatccacaagctgcacaaagccgggcataccgtcattatggtcacgcacgaccccggcatcgccgccaatgccaaccgcgtcatcgaaatccgggacggcgaaatcatttccgacacctcgaaaaatcccgaaatccccgcaagcaatgtcgggaggattcgggaaaaagcctcgtggtcgttttattacgaccagtttgtcgaagccttcagaatgtcggtgcaagcagtattggcgcacaaaatgcgttcgcttctgacgatgctcggcatcatcatcggtatcgcttcggttgtctccgtcgtcgcattgggcaatggttcgcagaaaaaaatccttgaagacatcagttcgatagggacgaacaccatcagcatcttcccggggcgcggcttcggcgacaggcgcagcggcaggattaaaaccctgaccatagacgacgcaaaaatcatcgccaaacaaagctacgttgcttccgccacgcccatgacttcgagcggcggcacgctgacctaccgcaataccgacctgaccgcttctttgtacggcgtgggcgaacaatatttcgacgtgcgcggactgaagctggaaacggggcggctgtttgacgaaaacgatgtgaaagaagacgcgcaggtcgtcgtcatcgaccaaaatgtcaaagacaaactctttgcggactcggatccgttgggtaaaaccattttgttcaggaaacgccccttgaccgtcatcggcgtgatgaaaaaagacgaaaacgctttcggcaattccgacgtgctgatgctttggtcgccctatacgacggtgatgcaccaaatcacaggcgagagccacaccaactccatcaccgtcaaaatcaaagacaatgccaatacccaggttgccgaaaaagggctggccgatctgctcaaagcgcggcacggcacggaagatttcttcatgaacaacagcgacagcatcaggcagatagtcgaaagcaccaccggtacgatgaagctgctgatttcctccatcgccctgatttcattggtagtcggcggcatcggcgtgatgaacatcatgctggtgtccgttaccgagcgcaccaaagaaatcggcatacggatggcaatcggcgcgcggcgcggcaatattttgcagcagtttttgattgaggcggtgttaatctgcgtcatcggcggtttggtcggcgtgggtttgtccgccgccgtcagcctcgtgttcaatcattttgtaaccgacttcccgatggacatttccgccatgtccgtcatcggcgcggtcgcctgttcgaccggaatcggcatcgcgttcggctttatgcctgccaataaagcagccaaactcaatccgatagacgcattggcacaggattga

SEQ ID NO: 45235 - DNA, 1185 bp, Neisseria meningitidis
atgacaccacaagtcctgaccatattaggcagtaccggcagcataggcgaaagcacgctggacgttgtctcccgccaccccgaaaaattccgcgtattcgcgctggcagggcataagcaggtcgagaaactggcggtgcaatgccggacgttccgccccgaatatgccgtcgttgccgatgccgaacacgccgcccggcttgaagctttgttgaaaggcgacggcacggcgacgcaggttttacacggcgcgcaggcattggttgacgttgcctctgccgacgaagtcagcggtgtcatgtgcgccatcgtcggggcagtggggctgccttccgcgctcgcagcggcgcaaaaaggcaaaaccatttatctggcgaacaaagagacgctggtggtttccggcgcgttgtttatggaaaccgcccgtgcaaacggcgcggcagtgctgcccgtcgacagcgaacacaacgccgttttccaagttttgccgcgcgattacgccggccgtctgaacgaacacggcatcgcttcgattatcctgaccgcttccggcggcccgtttctgaccgccgatttaaacacgttcgacagcattacgcccgcccaagcggtcaaacaccccaattggagcatggggcgcaaaatttccgtcgattccgcgtcaatgatgaataagggcttggagttgattgaggcgcattggctgtttaactgtccgccggaaaaactggaagtcgtcatccatccgcaatccgtgattcacagcatggtgcgttatcgcgatggttcggtattggcgcagttgggcaatcctgatatgcgtacgcctattgcttattgtttgggtttgcccgagcgcatcgattcgggtgtcggcgacctggatttcgacgcattgtccgcgctgaccttccaaaagcccgactttgaccgcttcccctgcctgaagctcgcctatgaagccatgaacgcaggcggagccgcgccctgcgtattgaacgccgccaacgaagccgccgtcgccgcctttttggacggacagattaagtttaccgacattgccaaaaccgtcgcccattgtctttcacaagacttttcagacggcataggcgacataggggggctcttggcgcaagatgcccggacacgcgcacaagcgcgggcatttatcggcacactgcgctga

SEQ ID NO: 45236 - DNA, 1653 bp, Neisseria meningitidis
atggttgcctatgttttcctatttttgtttgtaacggcggcgttggtgctgattatcaggtcgcactaccgttggacgtattttttcgcatccgcgctgtttgtctttttggcgggcggtatgctgatgttgacggctcagtggcagcgcgccttgaatttcgcttcggtctggtttgtggtgctgatactgttccacaggctgaaaatccattattacaaacagccgttgttgatttccgactttttgctgattgccgactggcggaattgggaaacgctgttccattataaggaagcggttatcggtatggcggggctgctggctttggcggcatatgcggttttcggctggagcggtgcggatgctttgggtttgccatggcgttgggcaggcacggttttgtttgcggcggcgttcgtgtcgatgcggcatttttccaaacatccgggcgcggtaaagacgtggctggactcgctgccggacgacgggcgcgacgtatttttgaacctgccgatgtcctgtcgggcggtgtttttccaagtacccgtgttcgagggcgacggggaagcgtttgccaaacagatgccgtctgaaacccagccgtacggcatgtcggatgagaaacccgatattgtcgttaccctgatggaatcgacgctcgatccgcactgtttcgactttgccgccgccaagattcccgatttgaaaatgttcggacggcaggaagataccgtattttcctcacctttgcgcgtgcatactttcggcggcgcaacgtggaagtcagaatttgcgtttttggcgggtgttccgtccacggatttcggcgcgttggcaagcggcgtgttttactcggtcgtgccgcatttgcagaccggttttgtccgcaacctgcgcgaacacggttatttttgcgtggcgctctcgccgtttaccaagggcaactacaatgccaaggcagcatatgaccatttcggctttaatctgatgttccagccgcaagatttgggctatcccgcgccgatgggcaaaaacctgtggcatatttccagtgaggaaatgatgcagtatgcgcggatgattttggaaaaacgccatcccgatttggaaaacgtgcggcagccgatgttcgtatatgtgctgaccatgaaggagcacgggccgtatcggacggataccgacaatgtgtttgatttggatgtacctgatttgaatgcgaaaaccgtatccgcgcttaacgactacatcgggcgcattgccgatttggacaaagcggtggaaagtttcgaccgttatctgcacgaacgcggcaaaccctttgttttcggttatttcggcgatcatcaggtaccgtttgagggcgtgtccgtcaggaagaaatgggattacgcgcagccggattatgtaacgcagtttgccgtcaggagcaatattgccggcggattcgtacagcggcaggatttcctcgaccttgcctttgcaggcggcgtgctgatggaggcggctggtctggaagccaaagacggcttcatgcgtgcgaatatggcgatgcgcggtttgtgcggcggagggttggaagactgcccgaaccggaaactggtcggagactatcggaactatctgtacgacgttttgaaaattgccagttag

SEQ ID NO: 45237 - DNA, 3099 bp, Neisseria meningitidis
atgaataaaactttaaaaaggcaggttttccgccataccgcgctttatgccgccatcttgatgttttcccataccgggggggggggggcgcaggcggaaacccataactacgctattgtcatgaacgaacaaaatcagctgaaggtaaagcagaagggttcatattcaaccttaagggaaaaagacagggaacgcaaatttatctataataaaagccggcagggtggaggctctgtctttttcgacaataccgatacccttgtttcccgacaaagcggtactgccgtttttggcacagccacctacctgccgccctacggcaaggtttccggttttgatgccaacgctctgaaagagcgcaacaatgccgtcgattggattcataccacccgggccgggctggcaggctacgcctacaccaacgtcgtatgcagaagccaccaatgcccccaacttgtctataaaacccgattttccttcgataatcccgacttggcaaaaagaggaggcgggctggataggcacacagagccaagccgcgacaattcgctcatttacaaattgaaggatcatccatggttgggcgtatctttcaatttgggcagcgagaataccgtcaaaaatagccaatcatccagcagattgatatcttcttttagtgaagacaataataatcaaaccatcgtctctacgacagaaaaccaccctatttcccttggcgacaggcagcgcgaacataccgccgtggcctattatctgaacgccaaactgcacctgctggataaaaaagggattaaagatatcaccggcaaaacagtgcggttgggtgtcttgaagccgagcatcgatgtgaagacacaaaggacggggcttggcggcttgctaggttttcatgctaagtgggacattaaagataccgggcagattccggtcgagctcggcctgccgcaaatcaaagcaggccgctgcatcaacaaaccgaaccccaatcccaaagcccaagccctttcgccggcactgactgcccccgcgctgtggttcggacctgtgcaaaatggcaaggtgcagatgtattccgcttcggtttccacctaccccgacagttcgagcagccaaattttcctgcaaaacctttcccgcaaggatgacacaagcaaaccgggccgctattccctcaaacccttgagtacgtcggagattaaaagtaaagagccgactttcacagggcggcaaaccgtcatccgattggatggcggcgtacagcagattaaacttcaaggcaatgaggtcactagttttaatgtaaacaacggcaacaacactttcggcattgttaaggacttgggcgtcgatcctgatgccagcgagtggaaaaaagtgctgctgccttggacggttcgtgcttccaatgatgacaatcaatttaaaacaattaaccaacaacttaaccaacaaaaaatccaatacagccaaagataccgcatccgcgacaacggcaatcgcgatttgggcgacatcgtcaacagccccatcgtggcggtcggcgagtatttggctacttccgccaacgacgggatggtgcatatcttcaaacaaagcggcggggacaagcgcagctacaatctgaagctcagctacatccccggcacgatgccgcgccaatattttgataacgacacttccgctctcaaagactccaccctcgccaaagagctgcgcacctttgccgaaaaaggctatgtgggcgaccgctacggcgtggacggcggctttgtcttgcgcaaagtcgaacggaacgggaaagaccatgtgtttatgttcggcgcgatgggctttggcggcagaggcgcgtatgccttggatttaagcaaaatcgacagcggcaacggcaacctggcagacgtttccctgtttgatgtcaaacatgacaagaatgacaataatcgcgtggaattaggctacaccgtcggcacaccgcaaatcggcaaaacccacgacggcaaatacgccgctttcctcgcctccggttatgcgactaaaaccattgacgaccaacaaaataaaaccgcgctgtatgtgtatgatttggaaagcagcggtacgctgattaaaaaaatcgatgtacccggcggcaagggcgggctttcgtcccccacgctggtggataaagatttggacggcattgtcgatatcgcctatgccggcgatcgcggcgggaatatgtaccgctttgatttgagcagcgacaatccgtccagctggactgtacgcactattttcagcggcaacaaaccgattacttccgcgcccgccatttcccaactgaaagacaaacgcgtggttatcttcggcacgggcagcgatttgagtgaggatgatgttgataaaacggacgaacaatatatttacggtatctttgacgacgatacggcgacgacgggtcctgtaaacttcagcggtacgggaggcgggctgctcgagcaagtgcttactgaggaaaataaaaccttattcctgaccgattacaagcgatccgacggctcgggcagcaaagggtgggtagtgaaattgaaggacggacagcgcgttaccgtcaaaccgaccgtggtattgcgtaccgcctttgtaaccatccgcaaatataaagacaacggctgcggcgcggaaaccgccattttgggcatcaataccgccgacggcggcaagctgaccaagaaaagcgcgcgcccgattgtgccggccgacaatacggctgtcgcgcaatattccggccataagcaaaccaccaaaggcaaatccatccctataggttgtatggaaaaagacaatggaatcgtctgcccgaacggatatgtttacgacaaaccggttaatgtgcgttatctggatgaaaagaaaacagacggattttcaacaacggcagacggcgatgcgggcggcagcggaacattcaaagaaggtaaaaaacccgcccgcaataaccggtgcttctccggaaaaggtgtgcgcaccctgctgatgaacgatttggacagcttggacattaccggcccgacgtgcggtatgaaacgaatcagctggcgtgaagtcttctactga

SEQ ID NO: 45238 - DNA, 297 bp, Neisseria meningitidis
atgttccgcatattactgttgcttttcccttgtgcaatccttgccgcctgcacccgaaacataccggcaaacccggccgtttcaaattgcgcgcatcttcaaaaccgcaccatcctgtattttgacgcacacggcaaacccgccgacggcgcagtaaagggcggattttacaaaattatcgaaatacagggtgcaaaccgcatccttattcaagactttaacagcacgggcaatgccctcggcggatcctatgtgccggactgccgcaaatcatcccttttcccgaaaaatatttga

SEQ ID NO: 45239 - DNA, 1929 bp, Neisseria meningitidis
atgtccaaaaaccaaaatcacgaagaataccaagacgatgcccgccccctgacgattgaggaacaacgcgcgcgcctgcgccaactcatcattatgggcaaagaacgcggctacatcacctactccgaaatcaatgacgcactgcccgacgatatgtccgatgccgatcaaatcgacaacatcgtcagtatgatttccggtttgggcatccaagttaccgaacacgcccccgatgcggaagacatattgttaagcgacaatgccgccgttaccgacgatgatgccgtcgaagaagccgaggccgccctttccagcgcagattccgagttcggcaggacgaccgaccccgtccgtatgtatatgcgcgaaatggggcaggtcgacctgctgacccgcgaagacgaaatcatcatcgccaaaaaaatcgaaaacgccctgaaaaatatggttcaggccatctccgcctgcccgggttccattgcggaaatcttagaactcatcgaaaaaatccgcaaagacgaaatccgcgtcgacgaagtcgtagaagccattatcgacccgaatgaagtattgctcaacgaattgggcttggggcacttggaaaccacagcacccgagaaaccttccaacgacaattcggacgaaaacgaagacgacgaagaatcggaagaagatgcggatgaaatctcggcagccaatctcgccgaattgaaacaaaaagtcatcggccactttgcccaaatcgaaaaagactacaaaaaaatgattggccgtttggaaaaacaccacagccggcacaaagactatctcgcctaccgcgacgcgattgccaacaaactgctggaagtccgtttcgccacccggcaaatcgacagcctcagcagcagcctgcgcggaaaagtagaaaacatccgcaaactcgaacgcgaaatccgcgacatctgcctcgaccgcgtccatatggagcgcgactacttcatccaaaacttcctgcccgaaatcaccaatctggaatggattgaagaagaaatcgccaaaggcagggtttggagcgacgcgctcgaccgcttccgccacgccatcctcgaaaaacaaaccgagttggcggatatggaaaaagaaacccgcatttccatcgaagagttgaaagaaatcaacaaaaatatggtgtcgagcgaaaaagaaaccgcagccgccaaacaggaaatgattcaggcaaacttgcgcctcgtgatttccatcgccaaaaaatacaccaaccggggcttacaattccttgatctgattcaggaaggcaacatcggtttgatgaaagcggtcgataagttcgaataccgcagaggctataaattctccacctacgcaacctggtggatccgccaggcaattacacgctcgattgccgatcaggcgcgtaccatccgcattccggtacatatgattgaaaccatcaacaagatgaaccgcatctcgcgccaacaccttcaagaaaccggcgaagaacccgattccgccaaacttgccgaactgatgcagatgcccgaagacaaaatccgcaaaatcatgaaaatcgccaaagagccgatttcgatggaaacccccatcggcgacgacgacgattcgcacttgggcgacttcatcgaagatgccaacaatgttgcgccggccgatgcggcaatgtacaccagcctgcacgaagtaaccaaagaaatcctcgaaagcctgaccccgcgtgaggcaaaagtcctgcgtatgcgtttcggcatcgatatgaacaccgaccacacgctggaagaagtcggcagacagtttgacgtaacgcgcgaacgcatccgacaaatcgaggcaaaagcactccgcaagctgcggcatccgacaagaagcgaccgtttgagaagtttcttggacagcgaagacagcaagctgtaa

SEQ ID NO: 45240 - DNA, 633 bp, Neisseria meningitidis; identical to SEQ ID NO: 39614

SEQ ID NO: 45241 - DNA, 726 bp, Neisseria meningitidis
atggattttctctctcgttggcggcgcatcgcagacgcgcccactatcaggcgttgcgtattatgccacggttcgtccggcgtttcagacggcatctgcgccggctgccgcgacgatttggcggcataccgcaccgacgcggcaaacagctgccccctgtgtttcaggcacatccaaggcggcgcggtgtgcggcggctgtcagaaaaaaccgcccgcattcgaccggatgtgggcttcgctgcattacgaaccgcccgtcagcaatatgatacacgcgctgaagcacttggctgatttgagcatggtgcagccgctggcagacctgatgatgcagaatccgcccgaccggcttgcagacgaatgtttcgatttcgtcctgcccgtaccgctaagcagggagcggctgctgcaacgcgggttcaaccaaagtgaaagcatcgtcgggttgttggcacaacgctacggctggcagatactgccccgacacaccgtattccgacaccaccgcccgccgcaaagcacgctcaaaggcagcgaacggcggcgaaacatcaaaaacgcctttgaaatccgcacaccgataccggaaaactgtaatattctgttaatcgacgatgtctttaccaccggcgcgacgctggacgaattggcaaagacgctgaaaaaatcgggcgcgaaccgcatctgctgctggacgctggcacgcacgccaatgaaaaaataa

SEQ ID NO: 45242 - DNA, 633 bp, Neisseria meningitidis
atggatttgcacaatattcgggaagattacagcaaacgggaattgtcggaaggcgattgcgccgacaatccgatcgagcagttcgagcggtggttggacgaggcggtacgcgcacaggtcaacgagccgacggcggtcaatgtggcggcggtcgacggacgcggcaggcctaacagccgtatggtgctgctgaaggaagttaattctgaaggttttgttttctttacgaattatcacagccgcaaggggcgttcgctggatgctcatccatttgcggcgatgacgtttttttggccggagctggagcgtcaggtgcgcgtggaagggcgtgttgaaaggctggcggagaagttgtcggacgaatattttgagagccgcccgtatcagagccgtttgggtgcgtgggcaagtgcgcagagcgaggtgattccgaacaaggcggtattggtggcaaaggcggcggcggtcggactcaaacatcctttgcacgtgccgcgtccgccgcattggggcggctatattgtgattcccgatttgattgagttttggcagggcaggccgagcaggctgcacgaccgcatccaataccgtttgctggatggtggctggatacgcgagcggctgtcgccttga

SEQ ID NO: 45243 - DNA, 1527 bp, Neisseria meningitidis
atgaacacgccccttccttattccaattacctcatccgcatcctgacagcatctgtctatgatgtcgcggtcgaaacgcctttggaaccggcacgcagcctttctgtacgtttgaaaaacaacatccttttgaaacgcgaagatttgcagccggttttttcgttcaaaatacgcggcgcgtacaacaaaatgtccaagttgccgaaagatgcgctcgcttgcggcgtgattgcggcaagcgcgggcaatcacgcacaaggcgtggcattgtccgcacagcgtttgggttgccgtgccgttatcgtcatgccggagactacgccgaaaatcaaagtggatgcggtcaaaagccgtggcggcgaggtggttttgcggggcgtttcatacaacgatgcctacgattatgcgatggagttggcggaaaaagaagggttaacctatatcgcgccgtttgatgatcctgatgtgattgcgggacaggggacggtggggatggaaattgtcagccagcatcccgatccaatccgcgccgtattcgtaccgataggcggcggcggtttggcggcgggcgtggcggcatttatcaagcaggtccgccccgaaatcaaagttatcggcgttcagaccaacgattcctgctgtatgaagcaatcggttgaagcgggcgaaatcgtccatttgaaagatgtcgggctgttttcagacggcacggcggtcaaagtcgtcggaaacgaaaccttccgtctctgcaaagaacttttggatgaaatcattacagtcgataccgatgcggtttgcggcgcggtcaaggatattttcgatgacacgcgcagcattaccgagccggcgggcgcgttggcgttggcgggtctgaaagcctatatcgcccgagaaggcgcggaaaaccaaaccctgattgccgttaccagcggtgcgaatatgaattttcaccgtttgcgccatgtgtcggagcgtagtgaattgggcgagggcaacgaaggtatttttgccgttaccatccccgaagaacgcggcagcttccttaagtttgtcaatatattgggaaataggaatattaccgagttcaactaccgctacggagacgatgaaaaagcgcatatctttgtcggacttcaagcggcaggcccgcaggatttggcggttatcggcagccggttggatgaggcgggattgcccaatgtcgacctgactgatgatgagattgccaaaatccatatccgttatatggttggagggcggacggacaaagtagaaaacgagcgtttggtcagttttgagtttccggagcgtccgggggcgttggcgcgttttttgaaccatatgcagggcggttggaacattacgctcttccattaccgcaaccacggtgcggattacgggcggattttggtcggtatcgatgtgccgccgcacgatgccgccgcatttgacggtttcttggaaagtctgggatacagctatcacgaggaaacgcaaaatgccgcgtacaagctgtttcttgcctga

SEQ ID NO: 45244 - DNA, 1857 bp, Neisseria meningitidis
atgttgaacaaaatattttcctggttcgagtcccgaatcgacccttatcccgaagccgccccgaaaacgccagaaaaaggcttgtggcggtttgtctggagcagcatggccggcgtgcggaaatggatagccgccctggctgcgctgaccgccggcatcggcattatggaagccctggtttttcaatttatgggcaaaatcgtggagtggctcggcaaatacgcgcccgccgaactgtttgccgaaaaaggttgggaactggcggcaatggcggcgatgatggtattttcggttgcgtgggcgtttgccgcgtccaacgtgcgcctgcaaacccttcagggcgtgttccctatgcgcctgcgctggaacttccaccgcctgatgctgaaccaaagcctcggtttttatcaggacgaatttgccggacgcgtgtccgccaaagtcatgcagaccgcgctggcgttgcgcgacgcggtgatgacggttgccgatatggtcgtttatgtgtcggtgtatttcattacctccggcgtgattctcgcctcgctcgactcatggctgctgctgccctttatcggttggattgtcggtttcgcttcggtgatgcgcctgctgattcccaaattggggcaaaccgccgcatggcaggcggatgcccgctcgctgatgaccggccgcattaccgatgcctattccaatatcgccaccgtcaaactcttctcccacggcgcgcgtgaagccgcctatgccaagcagtcgatggaagaatttatggttacggtgcgcgcccaaatgcggctggcgacgctgctgcattcgtgcagcttcatcgtcaacacctccctgaccctctccaccgccgcactgggcatctggctctggcacaacgggcaggtcggcgtgggcgcggttgctacagccaccgccatggcgttgcgcgtcaacggtttgtcgcaatacattatgtgggaatccgcgcagctgtttgaaaacatcggcaccgtcggcgacggcatggcaaccctgtccaaaccgcacaccatcctcgacaagccgaacgccctgccgttgaaagtgtcgcaaggcgcaatcaaatttgaacacatcgatttctgctacgaagccggcaaaccgctgctcaacggcttcaacctcaccatccgacccggcgaaaaggtcggcttgatcggacgcagcggcgcgggcaaatccaccatcgtcaacctgcttttgcgcttctacgaaccgcaaagcggcacggtttcgatcgacgggcaggacataagcggcatcacccaagaatctttacgcgcccaaatcggtttggtcacgcaagatacctcgctgctgcaccgttccgtgcgcgacaacattatttacggccgccccgacgcgaccgatgccgaaatggtttctgccgccgaacgcgccgaagccgccggcttcatccccgacctttccgatgccaaagggcggcgcggctacgacgcacacgtcggcgaacgcggcgtgaaactctccggcggtcaacgccagcgcatcgccatcgcccgcgtgatgctcaaagacgcaccgattcttcttttggacgaagccaccagcgcgctcgattccgaagtcgaagccgccatccaagaaagcctcgacaaaatgatggacggcaaaaccgtcatcgccatcgcccaccgcctctccaccatcgccgcaatggacaggctcgtcgtcctcgacaaaggccgcatcatcgaagaaggcacgcacgccgaactcctcgaaaaacgcgggctttacgccaaactctgggcgcaccagagcggcggcttcctcaacgaacacgtcgagtggcagcacgactga

SEQ ID NO: 45245 - DNA, 1008 bp, Neisseria meningitidis
atgagcaccttcttccaacaaaccgcccaagccatgattgccaaacacatcgaccgtttcccgctattgaagttggaccaggtgattgattggcagccgatcgaacagtacctgaatcgtcaaaaaacccgttacctcagagaccaccgcggccgtcctgcctatcccctgttgtccatgttcaaagccgtcctgctcggacaatggcacagcctctccgatcccgaactcgaacacagcctcatcacccgcatcgatttcaacctgttttgccgtttcgacgaactgagcatccccgattacagcaccttatgccgctaccgcaaccggctggcgcaagacgacaccctgtccgaattgctggaactgattaaccgccaactgaccgaaaaaggtttaaaagtagagaaagcatccgccgctgtcgttgatgccaccattattcagaccgccggcagcaaacagcgtcaggccatagaagtcgatgaagaaggacaagtcggcggccaaaccacaccgagtaaggacagcgatgcccgttggataaagaaaaacggcctctacaaactcggttacaaacaacatacccgcaccgatgcggaaggctatatcgagaaactgcacatcacccccgccaatgcccatgagtgcaaacacctgccgccgttgttagaagggatagctgaaggtacgaccgtctatgccgacaaaggctatgacagtgcggaaaaccggcaacatctggaagaacatcagttgcaggacggcattatgcgcaaagcctgccgcaaccgtccgctgtcggaaacgcaaaccaaacgcaaccggtatttatcgaagacccgttatgtggtcgaacaaagcttcggtacgctgcaccgtaaattccgctatgcgcggtcaacctatttcggactgattaaagtgagtgcgcaaagccatctgaaggcgatgtgtttgaacctgttgaaagccgccaacaggctaagtgcgcccgctgccgcctaa

SEQ ID NO: 45246 - DNA, 1887 bp, Neisseria meningitidis
atgatttaccccaaaacctacgacgttatcgtcgtcggcggcggacacgccggcacagaagccgcgctcgccgccgcccgtatgggcgcgcagacgcttttgctcacacacaatattgaaacgctcggacaaatgtcgtgcaacccttccatcggcggcatcggcaaagggcatttggtacgcgaactcgacgcgctcggcggcgcaatggcgttggccaccgacaaatccggtatccagttccgccgcctgaacgccagcaaaggcgcggcagttcgagccacgcgcgcgcaggccgaccgcattttgtacaaagccgccatccgcgaaatgttggaaaaccaagaaaacctcgaccttttccaacaagccgtcgaagacgtaacgctcgacggcgaacgcatcagcggcgtaatcaccgcgatgggcgtggaattcaaagcccgcgccgtggtgctgaccgcaggcacatttttgtccggcaaaatccatatcggtttggaaaactacgaaggcggccgcgccggcgaccccgccgccaaatcgctgggcggacgtttgcgcgaattgaagctgccgcaaggccgtctgaaaaccggcacgccgccgcgcatcgacggacgcacgattgacttttcccaactgaccgaacagcccggcgacacacccgttcccgtcatgtccgtgcgcggcaacgccgaaatgcacccgcgccaagtgtcctgctggattacgcataccaacacgcaaacccacgacatcatccgctcaggcttcgaccgcagcccgatgtttaccggcaaaatcgaaggcgtgggcccgcgttattgtccgtctatcgaagacaaaatcaaccgtttcgccgataaagacagccaccagattttcctagaacccgaaggcctgactacgtacgaatactatcctaacggtatctccaccagcctgccgttcgacatccaaatcgcgctcgtccgcagtatgaaaggtttggaaaacgcccatatcctgcgccccggctacgccatcgaatacgactacttcgacccgcgcaacctcaaagccagcctcgaaaccaaaaccattgagggactgtttttcgctgggcaaatcaacggtacgaccggctacgaagaagccgccgcgcaaggtttattggcaggcgcgaacgccgtgcaatatgtgcgcggacaagacccgctcctgctgcgccgcgaacaagcctacctcggcgtattggtggacgacctcatcaccaaaggcgtgaacgaaccctaccgaatgttcaccagccgcgccgaataccgcctgcaactcagggaagacaacgccgacatgcgcctgaccgaagacggctacaaaatcggcttggtgggtgaagcgcaatggcgtatgttcaacgaaaaacgcgaagccgtcgaacgcgaaatccaacgtttgaaaacaacgtggtacacaccgcaaaaactcgccgaagacgaacaaatccgcgtattcggacaaaaactcagccgagaagccaacctgcacgatttgttacgccgcccgaacctcgactacgccgcgctgatgacgctcgaaggcgcgatgccgtctgaaaacctctccgccgaagtcatcgaacaagtcgaaatccaagtcaaataccaaggctatatcgaccgccaaaacgaagaaatcgacagccgccgcgacatcgaaaccttaaaactgcccgacggcatcgattacggcaaagtcaaaggcttgtcggcagaagtgcagcaaaagctcaaccagcacaaacccgaaaccgtcgggcaggcaagccgcatttccggtgtaacgcctgccgccgtcgcactgctgatggtgcatttgaagcgcggatttaaagacgcgaaataa

SEQ ID NO: 45247 - DNA, 1251 bp, Neisseria meningitidis
  misc_feature 4, 5, 6, 7, 8: 'n' is a, c, g or t
gtgnnnnntcccggcactaccatccaaatcggcgaatactacgaagagcagctacccaacgaaggcttcggccgccaagccgcgcaaaccgccaaacaaatcatcctgcaacgcatccgcgatgcggagcgcgagcaaaatctgaacgagtttctcgccgtcaaagaagacatcgtgtccggcacggtcaaacgcgtcgaacgccacggcatcatcgtcgaagtcgttgccggcaaactggacgcgctgattccgcgcgaccaaatgattccgcgcgaaaacttccgcagcggcgaccgcatccgcgccctcttcctgcgcgtcgaagaaatcggcaacaccggccgcaaacaagtcatcctgagccgtacttccggcgatttcctcgtcaaactgtacgccaatgaagtacctgaaattgcagacggcatgcttgaaatccgcgctgtcgcccgcgacccgggccaacgtgccaaagtcgccgtcaaagccaacgaccagcgcatcgatccgcaaggcacctgtatcggcgttcgcggttcgcgtgtcaatgccgtcagcaatgaattatccggcgagcgcatcgacgttgtcctttggtcgcccgagcctgcccaattcgtcatgagcgcgctctcacccgccgaagtcagccgcatcgtgattgacgaagacaaacacgccgttgacgtgattgttgatgaaaaccaactggcgctagccatcggacgcggcggtcaaaacgtgcgccttgcttccgacctgaccggctggcagctcaacatcatgacttccgccgaggcagacgaacgcaatgcggcagaagatgccgccatccgccgcctgtttatggatcacttgaacgtggacgaagaaaccgccgacgtactggttcaagaaggttttgcaaccttggaagaagtcgcctatgttcctgccgccgaactgcttgccattgaaggatttgacgaagaaatcgtcgatatgctccgcaaccgcgcccgcgatgccatcctgaccatggcgattgccgccgaagaaaaactgggcgaagtatccgacgatatgcgcaacctcgaaggcatagatgccgatatgctccgcagccttgccgaagcaggcattaccacccgcgacgacttggcagagcttgctgtggacgaactgattgaaatcaccggtgtaaacgaagaaaccgcaaaagccgtcatcctgaccgcacgcgaacactggtttaccgaagacaaataa

SEQ ID NO: 45248 - DNA, 606 bp, Neisseria meningitidis
atgatgaccctctattccggcattacctgccccttcagccaccgctgccgcttcgttttgtacgaaaaaggtatggattttgaaatcaaagacgtcgatatttacaacaaacccgaagacctcgccgtcatgaacccgtacaaccaggtccccgtactggtcgagcgcgatttggtgctgcacgagtccaacatcatcaacgaatacatcgacgaacgcttcccccatccgcagcttatgcccggtgatcccgttatgcgcggcaggggccggctggtgctgtaccgtatggaaaaagaattgttcaaccacgtccaagttttggaaaaccccgccgccaccaacaaggaacaggcaaaagcgcgcgaagccatcggcaacggtctgaccatgcttgccccttcgttcagcaaaagcaaatacatcctcggcgaagatttttctatgattgatgtcgcccttgctccgctgctgtggcggctcgaccactacgatgtcaaactgggcaaaagtgccgcgccgctgctcaaatacgccgagcgcatcttccagcgcgaagcctttatcgaagcactgacacccgccgaaaaagccatgcgcaaataa

SEQ ID NO: 45249 - DNA, 840 bp, Neisseria meningitidis
atgctggtcgcttttttaattatgttgcgcgagggtatcgaagccgcgctcattgtcggcatcgttgccggttttctgaaacagtccggacattccaaactgatgcctaaggtctggttcggggttgttcttgcttctttgatgtgtttggggctggggtacggcatccattcggcaacaggcgagattccccagaagcagcaggagtttgtcgtcggcatcatcggtttggttgccgttgccatgctgacttatatgattttatggatgaaaaaggcggcgcgttcgatgaagcggcagcttcaggattctgtgcaggcggctttgaaccgtggcagcggtcaaggatgggccttggtcggtatggcgtttcttgccgtggcgcgcgaaggtctggagagcgtttttttcctgcttgccgtattcaaacagagcccgacgtggcagatgccggccggtgcggtagcgggggttttggctgccgccgtgattggcgcgttgatttatcagggcgggatgcgcctgaatctggcgaagtttttccgttggacgggggcgtttttgattgccgttgccgccggtctgcttgccggctcgctgcgcgcgctgcatgaggcaggtatttggaacgcgcttcaggacattgtgttcgactcatcaaaatatttgcacgaagacagcccgttgggcgtgctgctcggcggatttttcggctataccgaccatccgacgcagggcgaggccttggtttggctgctgtaccttattcccgtcataacttggtttttgtgcggcagcaggccgtctgaaactttaacccgtaaagaggagctgaaatga

SEQ ID NO: 45250 - DNA, 198 bp, Neisseria meningitidis; identical to SEQ ID NO: 36305

SEQ ID NO: 45251 - DNA, 1782 bp, Neisseria meningitidis
atgccttatttcgccctgtttgacgatgccgtaagcggccgcgcaaaacgctatcaaaatcatgtggaaagccgttttttccgtcccgaagaactcgatgctttggacggcgcgctgcaatcgggctggcaaaaagggctgcatgccgtgttgtttgcagactacggattcggtttgccgctgacgggggtcgagtccgaacgcggcggcaaccttgccctgcactggtttgccgactgcgccgacaccgatgccgcaagctggcttgcccgacactcagacggcctccccgccggcatttccacgccgcaatcctccgtatccgaagccgattacctcgaccatatccgccaaatccacgaagccatccgacgcggcgacacctatcaaatcaactacactacccgcctgcacctgcaagcctacggcaatcccgtcaaactttaccaacgcctgcgccagcccgtcccctatgccgttttgtcccacctgcccgatgcacaagggcaatccgcgtggacgctgtgtttctcgcccgaactcttcctcaaaatcggttcggacggcaccatcagcaccgaaccgatgaaaggcaccgcgccgattttgggcgacggacaagacgaacgccgcgccgccgagttgcaagcagacccgaaaaaccgcgccgaaaacgtgatgattgtcgatttgctgcgtaacgacctcggcaaaatcgcccaaaccggcacagtatgcgtacccgaaccgtttaaagtatcgcgtttcggcagcgtttggcagatgaccagcaccatccaagcccaagccttgccgcacacctcgttcgccgacatcctccgcgccgccttcccctgcggcagcatcaccggcgcgcccaaaaaaatgagtatgcagattatcgaatcgctcgaagccgaagcgcgcggactttatacgggcagcatcggctatttgaacccgtgttccggcggcttggggtttgaaggcacgttcaacgtcgttatccgcaccttgtcgctcacgccgctttcagacggcatttatcaaggcgtgtacggtgtcggttccggcatcgtcatcgacagcgaccctgccgccgaatatcgggaatgcggctggaaagcccgtttcctcaacgaattgcgccccgacttcggcatttttgaaaccctgcgcgtggaaaacggacgctgcgccctgctcgaccgccacctatgccgtctgaaaacctccgcccaagccctcaacctgcccctgcccgacggttgcgaaaatcaaatcaaacaatacatcgcacgcttgcccgacggcgcgttccgcatcaaagccctgctcgcttcagacggcatcagcctgtcccgcgccgttttaaaccgtctgaccgacaaacaacgcgtcatcatttcgccgaccatcctgcccgcacaaaactacctgcgccgcttcaaaaccacctgccgcaccgtcttcgaccaagcgtggcaaaccgccgaaacacaaggcgcgttcgacagcctgtttttcaattcagacggcatcctgctcgaaggcggcagaagcaacgtgttcgtcaaataccaaggacaatggcttacgccctctttagatttagacattttaaacggcataatgcgccaagccgtattggacgaaccgcaaaaatatttgcaaacaaatcaagtaatcgaaacacacatcacacaaaaaacactgcaagaagccgaagaaatccgcctctccaacgccttgcgcggcgtatttgccgccgcccttgcctga

SEQ ID NO: 45252 - DNA, 726 bp, Neisseria meningitidis; identical to SEQ ID NO: 39096

SEQ ID NO: 45253 - DNA, 1089 bp, Neisseria meningitidis
atgtcccaaactatcgacgaactcctccttccccaccgcaacgccatcgacaccatcgatgccgaaatcctgcgcctgctcaacgaacgtgcgcaacacgcccacgccatcggcgagctgaaaggcacgggcgcagtgtaccgccccgaacgcgaagtcgccgtgttgcgccgcattcaggatttgaacaaaggcccgctgcccgacgaatcggtagcacgcctgtttcgggaagtgatgagcgagtgcctcgccgtagaacgcccgctgaccatcgcctatctggggccgcagggcacgtttacccagcaggcggcgatcaagcatttcggacacgccgcgcacaccatggcgtgtccgaccatagacaactgcttcaagcaggttgaaacccgtcaggcggattatctggtcgcgcccgtggaaaactcgaccgaaggctcggtcgggcgcacgttggatttgcttgccgttaccgcgttgcaggcgtgcggcgaagtcgttttgcgcatccaccacaaccttttgcgtaaaaacaacggcagcaccgaaggcattgccaaagtcttttcccacgcgcaggcgttggcgcagtgcaacgactggttgggcagacacctgcccaacgccgaacggattgccgtgtccagcaatgccgaagccgcaaggctggttgccgaatcggacgacggtacggttgccgccatcgccggacgcacggcggcggaaatctacggactcgatatggttgccgagtgcatcgaagacgaaccgaacaacaccacgcgcttcttggtgatgggacatcacgaaaccggtgcaagcggcagcgacaagacttcgctggccgtttccgcgcccaaccgggcaggcgcggttgcctcgctgctgcaaccgctgactgagtcgggtatttccatgaccaagtttgagagccgtccgagtaaatccgttttgtgggaatacctgttcttcatcgacatcgaaggacaccgccgggacgcgcagattcagacggcattggaacgcttgggcgaacgcgcttcgttcgtcaaagtcatcggttcgtacccgaccgccgttttgtag

SEQ ID NO: 45254 - DNA, 3144 bp, Neisseria meningitidis
atgaataaaacttggaaacggcaggttttccgccataccgcgctttataccgccatattgatgttttcccataccggcggggggggggcgcaggcgcaggagaatccatacgctattgtaatgaacagtcaaaagctgcccgaggtaaagtgggggaattcatataaaaaaggggagttgaggcccgaagacagggatcgtaaatttacctttacgagtacttatggaatcaaacgtaacactaatatcacattcaataataccgattatcttgtttctgaaaaaaacggtactgccgttttcggcgcggcgacctacctgccgccctacggcaaggtttccggttttgataccgataggctgaccaagcgcggcaatgccgttgattggattaatacgacccacccggggttgataggctacagctaccaaggtatcacatgcagcagcagcagctgtcctgaatttggctataaaacccaatttaccttcggtaattccggtttggcaaaaaagacaaacagcagcaagctggatatatacgaagacaaaagccgcgacaattcgcccatttacaaattgcaggattatccttggttgggcgtgtctttcaatttgagcagcgatagctacgtcaaacaaaagagacacaatagtttggtatcttcttttagcgaggatgtgacgcagagcaatggtacgcaaagcccatacaaagacagaaacctcgtttatcgtacagacgattaccataataagggtaattatagccatcaggacgcacaccacgccatcgccttttatctgaacgccaagctgcacctgctggataaaaaacaaatcaaaaatatcgcgcaaggcagtgaacttaatttgggtatgttgaaaacgcacatcgagctgccgaaaaattttaatcaaaggagcttggtaggttcggtggttagttggacggttaaagatgagggaaaagtcagcgtcaaactcaaattgccggaagtcaaagcaggccgctgcatcaacaaagataaccccaatcccaaatccaaagccccttcccccgccctgaccgcccccgcgctgtggttcggacctgtgcaaaatggtaaggcgcagatgtattccgcttcggtttccacctaccccgacagttcgagcagccgcatcttccttcaaaatctggaaagaaaaaccgaccccggcagacccggccgccattccctcgaaaccttgactgagaacgatattaaaagtcgacagccgaatttcacagggcggcaaacaatcatccgattggatagcggcgtacagcagattaaactggatcaaaacaatactgaggtcgtcaattttaatggaaacagcaacaacgcaactttcggcattgttagtgaatatggcctcacgcctgatgccaatgagtggaaaaaagtattgctgccttggacggttcgtgctttcaatgatgacggtcgatttaacacagtcaacaaagaagaaaacaacggcaagccaaaatacagtcaaaaataccgcagccgcgacaacggcaagcacgagcgcaatttgggcgacatcgtcaacagccccatcgtggcggtcggcgagtatttggctacttccgccaacgacgggatggtgcatatcttcaaacaaagcggcggggacaagcgcagctacaatctgaagctcagttatatcccgggtacgatgccgcgcaaggatattcaaaacaccgaatccacccttgccaaagagctgcgcgcctttgccgaaaaaagctatgtgggcgaccgctacggcgtggacggcggctttgtcttgcgcaaagtcgaacggaacgggaaagaccatgtgtttatgttcggcgcgatgggctttggcggcagaggcgcgtatgccttggatttaagcaaaatcgacagcggcaacggcaacctggcagacgtttccctgtttgatgtcaaacatgacaagaatgacaataatcgcgtggaattaggctacaccgtcggcacaccgcaaatcggcaaaacccacgacggcaaatacgccgctttcctcgcctccggttatgcgactaaaaccattgacgaccaacaaaataaaaccgcgctgtatgtgtatgatttggaaagcagcggtacgctgattaaaaaaatcgatgtacccggcggcaagggcgggctttcgtcccccacgctggtggataaagatttggacggcattgtcgatatcgcctatgccggcgatcgcggcgggaatatgtaccgctttgatttgagcagcgacaatccgtccagctggactgtacgcactattttcagcggcaacaaaccgattacttccgcgcccgccatttcccaactgaaagacaaacgcgtggttatcttcggcacgggcagcgatttgagtgaggatgatgttgataaaacggacgaacaatatatttacggtatctttgacgacgatacggcgacgacgggtcctgtaaacttcagcggtacgggaggcgggctgctcgagcaagtgcttactgaggaaaataaaaccttattcctgaccgattacaagcgatccgacggctcgggcagcaaagggtgggtagtgaaattgaaggacggacagcgcgttaccgtcaaaccgaccgtggtattgcgtaccgcctttgtaaccatccgcaaatataaagacaacggctgcggcgcggaaaccgccattttgggcatcaataccgccgacggcggcaagctgaccaagaaaagcgcgcgcccgattgtgccggccgacaatacggctgtcgcgcaatattccggccataagcaaaccaccaaaggcaaatccatccctataggttgtatggaaaaagacaatggaatcgtctgcccgaacggatatgtttacgacaaaccggttaatgtgcgttatctggatgaaaagaaaacagacggattttcaacaacggcagacggcgatgcgggcggcagcggtatagaccccgacggcaagcgttccggcaaaaacaaccgctgcttctcccaaaaaggggtgcgcaccctgctgatgaacgatttggacagcttggacattaccggcccgacgtgcggtatgaaacgaatcagctggcgtgaagtcttctactga

SEQ ID NO: 45255 - DNA, 291 bp, Neisseria meningitidis; identical to SEQ ID NO: 38495

SEQ ID NO: 45256 - DNA, 1155 bp, Neisseria meningitidis
atgaaattcatcgacgaagcaaaaatcgaagtcgccgcaggcaaaggcggtaatggcgcaaccagtttccgccgcgaaaaattcgtaccgcgcggcggcccggacggcggcgacggcggcaaaggcggtagcgtctgggcggaagccgacgaaaacaccaacaccctcgtcgaataccgcttcgttaaacgctaccaagccaaaaacggcgaaaaaggccacggttccgaccgttacggcgcaggtgcggacgacatcgtcctcaaaatgcccgtcggcaccctcatccgcgacctcgacaccgacgaaatcgttgccgacctcacttaccacggacagcgcgtctgcctagccaaaggcggcaaaggcggcttgggcaacatccacttcaaatcctccgtcaaccgcgccccaaaacaatccacgcccggcgaagaaggcgaagcccgttccctgcaactcgaactcaaagtcctcgccgatgtcggcttattgggtatgcccaacgccggcaaatccaccctgattaccgccgtatccgccgcacgccccaaaatcgccaactaccccttcaccaccctgcatccaaacttaggcgtggtacgcatcgacgaaaaccacagcttcgtgatggccgacatccccggcctgattgaaggcgcggcagaaggcgcgggtttggggcatcgtttcctcaaacacttatcgcgcaccggattattgctgcacgtcgtcgatttggcgcccttcgacgaaaccgtcaaccctgccgaagaagcacttgctatcatcaacgaattgcgcaaatacgatgaagaactttacggcaaaccgcgctggctggtgctgaataaactcgacatgcttgacgaagaagaagcccaaacgcgcactgccgccttcctcgaagccgtcggctgggactaccccaaacccgacgaccgtttccaatttgacatggaaaccccgcgcctcttccaaatcagcgcgctgacccaccaaggcacgcaggaattggtacaccaaatcaaccaatacctgaccgagaaaaaacgtatcgaagctgaaaaagccgaagcggagaaagcagcggcaaatgttgaaattatcgaacagcagcctaaaacggatacgggcgtgtttaagccggagtga

SEQ ID NO: 45257 - DNA, 1131 bp, Neisseria meningitidis; identical to SEQ ID NO: 38490

SEQ ID NO: 45258 - DNA, 531 bp, Neisseria meningitidis; identical to SEQ ID NO: 39309

SEQ ID NO: 45259 - DNA, 798 bp, Neisseria meningitidis
atggataccgcacaaaaacaacgctgggcaataaccctatcctatgatggcagccgcttttacggctggcagaaacaggctgacggcgtaccgaccgttcaggcggcattggaaaccgcgctcgcccaaatagcaggggaagcggtttccaccaccgttgccggcaggaccgacaccggcgtgcatgccaccgcccaagtcgtccacttcgacacaactgccgcccgtccccaacaggcatgggtgcgcggcgtaaatgcccacctgcccgaaggcattgccgttttgcacgcccgacaggtcgcccccgaatttcatgcacgatttgacgcatacggacggcactaccgctacctgctcgaatccgcacccgtccgttcccccctgctcaaaaacagggcaggctggacacacctcaaactcgacatcgaaccgatgcgtcgggctgccgcctatttgatcggcgaacaagacttctccagcttccgcgccgccgaatgccaagcaaaatcccccgtcaaaaccatctaccgcgccgaccttacccaaagctcaggactcgtccgcctcgatttgcacggcaacgcctttttgcaccacatggtacgcaacatcatgggcgcgctcgtttatgtcggcagcggcagactcagcgtcgaaggcttcgccgcactgattcaagaacgcagccgcctcaaagccccaccgacctttatgcccgacgggctttacctgaccggcgtcgactatcccgaggcatacggcatcatccgcccccaaatccccgaatggctttaa

SEQ ID NO: 45260 - DNA, 1185 bp, Neisseria meningitidis
atgggcaaacatattcttttaggtgtaacgggcagtattgcggcgtataagtcttgcgagttggttcgtctgctgaaaaaacaggggcattcggttacggtggttatgagccgctcggcaactgaatttgtttctccgctgacttttcaggctttaagcggcaatcctgtcctgaccgacacgcacggcggcaacggttcaaacggtatggaacatatcaacctgacccggaatgcggatgtttttctgattgcgccggcaagtatgaataccgtggcaaaaatctgtaacggcgtggcagataacctactgaccagtctggcagccgcacggaaatgtccgcttgccatcgctcccgcgatgaatgtggaaatgtggctcaaccctgccaaccaacggaatatcgcacaactggtttcagacggcattactgtctatatgccgggcttgggcgaacaggcttgcggagaaaatggcatgggaaggatgccggaacctgccgaattgctggatttgcttccggacttgtggacaccgaaaattttaaggggcaagaaaatcttgattaccgcaggtgcgacatttgaagccattgaccctgtcaggggcatcacaaatacctccagcggaaaaatgggggtagctttggcgcgggcgtgccgtgccgccggtgcggaagtcagcctgattcacggacagcttcaaaccgcgctgcctttcggcatatccgatacggttcaagccgtcagcgctgaagatatgcatcgcgcagtgcatcgtttgattgaaaaacaagatgcttttatttctgttgccgccgtctcagactataaggttaaaaacaggagtacacaaaaattcaaaaaagataaaaatgccaaaccgttatccatcgaattggatgagaaccccgatattttggcttctattgcctcattgccgaacccgccgttctgcatcggttttgccgctgaaacggagaatgtaatggcatatgcacgagaaaaacgtattaagaaaaaaataccggtgatagttgccaatgatgtttcaatcgcgatgggcaaaccgaccaaccggattaccattatcggggacgacggggaactatcttttcccgaaacaagtaaagatgaagcggcgatgcagattgttgaaaggcttgccgtatatttgaacaaataa

SEQ ID NO: 45261 - DNA, 558 bp, Neisseria meningitidis
atgatcaacgatattcaaaaaacagccgaaggcaaaatgcagcgttcggtcgaagtactgaaagaaaatctggcgaaagtgcgtaccggccgcgcgcataccggcctgctcgaccaagtggaagtcgaatactggggcagcatggtccccgtcagccaagttgccaacgtaacgcttctggacgcgcgcaccatcggcgtgaaaccgtttgagggcaatatggcggccaaagtcgagaaagccatccgcgattcaaacttggggctgaacccggcagctgtcggcgacctgatccgcgtgccgatgcccatgctgaccgaggaacgccgcaaagacctgattaaagtcgtacgcggcgaagcggaagaaggccgcgtctctatccgcaacgtgcgccgcgatgccaacgaccacatcaaaaaactcctcaaagacaaagaaatttccgaagacgaggcacgtcgcggcgaagaagcggttcaaaaactgaccgacaaatacattaccgaagccgacaaactcctgactgccaaagaagaagatttgatggcaatttaa

SEQ ID NO: 45262 - DNA, 966 bp, Neisseria meningitidis; identical to SEQ ID NO: 39761

SEQ ID NO: 45263 - DNA, 411 bp, Neisseria meningitidis
ttgcataaaacaaacggaagtatccattacattaaatttaagaataatgatgatggattaaaacagtttagattgtggataaagggaaacagaatcagaaaagcctatatcggcatggaggcaacacgcatctattacgaaaaggcagcagatatgctttcttcctactataccgtttacgttatcaatcccttaaaatcaagactacgggaaaagcagtttaaccgtaccaaaccgacaagcagattcaacctgatagcagattacataaaaaggcatcaagatacattgataccgtatcagatacccaaaaacaaagcactgcaaaaactgattaacttaaaaatcaattacagcaacatcagaagcaaattaaaaactgtcttcatagcactgaagaagacttcataa

SEQ ID NO: 45264 - DNA, 606 bp, Neisseria meningitidis
atgacccgtcaatctctgcaacaggctgccgaaagccgccgttccatttattcgttaaataaaaatctgcccgtcggcaaagatgaaatcgtccaaatcgtcgaacacgccgttttgcacacaccttcttcgttcaattcccaatctgcccgtgtggtcgtgctgtttggcgaagagcatgataaggtgtggcaatttgtcgaagacgcgctgtgtgccgtcgtgcctgccgacagttttgaaccgaccgcgcaaaaattgaacctgtttaaggcgggtgcggcaactattttgttttatgaagatcaaaatgtcgtcaaaggtttgcaggagcagttccctgcttatgccgccaactttcccgtttgggcggaccaggcgaacgcgatggtgcagtatgccgtttggacgacacttgccgcggtcggcgtaggtgcaaacctgcaacattacaatcccttgcccgatgcggcgattgccaaagcgtggaatatccccgaaaactggttgttgcgcgcacaaatggttatcggcggtattgaaggggcggcaggtgaaaagacctttgaaccagttgcagaacgtttgaaagtgttcggcgcataa

SEQ ID NO: 45265 - DNA, 441 bp, Neisseria meningitidis
gtgcgcgcctttcagacggcattgaggccgtcccgcatcctgaacatcctgaccgtatcgctccactcggcttcccttgccgtctgcctgacctggttttacggccggatgatgtggttcggtttggcggctttggtggcaagttacgcatactcgctcaggataacgaatctgaaacaccgccatgccataaccgccattaccatagaccgcgacggacaggcggaaatcgtatccggcaaagacaaaacagcggcaacacttgcgggcagcagtatggttacgccttatgccttattcttacaatgggacaccggcggcaaaaccgtcagccaatgcatcatacccgacatgacggacaaagaatcctaccggcggctgaaagtctgggtgctttggcggcagccgaaaaaaaccgccgaaaccgatacaccaagctga

SEQ ID NO: 45266 - DNA, 1311 bp, Neisseria meningitidis; identical to SEQ ID NO: 39855

SEQ ID NO: 45267 - DNA, 2274 bp, Neisseria meningitidis
atgaacattactcaaattctttcccaagaactttccgcgactaccgcgcaaatcaatgccgctattgagcttttagacgacggcgcaaccgtgccgtttatcgcgcgttaccgtaaagaagccaccggcgggctggacgacacgcagctgcgccggcttgccgagcggctgcaatacctgcgcgagttggaagagcgcaaagccgttgtgttaaaaagcattgaagagcaaggcaaactttcagacggcctccgcgcgcaaatcgaagccgccgacaacaaaaccgcgctggaagacctgtatctgccctacaagcccaaacgccgcaccaaggcgcaaattgcgcgcgaacacggtttgcagccgctggcggacgtgttgcttgccgagcagtcgcaggacgtggaagccgccgcacaaggctacctgaacgaaaacgtccccgatgccaaagccgcgttggacggcgcgcgtgcgattctgatggagcagtttgccgaagacgcggaactcatcggcacgctgcgcgacaagctgtggaacgaagccgaaatccacgcgcaagttgttggaggcaaagaaaccgaaggcgaaaaattcagcgattattttgaccaccgcgaacctattcgtgcgatgcccagccatcgtgcgctagcggttttgcgcggacgcaatgaaggcgtgttgaacatcgcgctcaaatatcagcccgacgacacgccgattacgcagcaaagcgaatacgagcaaatcatcgcccgccgcttcaaagtttcagacggccacaaatggctgcgcgacaccgtgcgcctgacttggcgcgcgaaaatctttttgtcgttggaacttgaagctctcaatcgtttgaaagaagccgccgacaccgacgcgattaccgtgttcgcccgcaatctcaaagacttgctgcttgctgcgcccgccggacggctgaccacgctgggtctcgaccccggctaccgcaacggcgtgaaatgcgccgtggtggacgacaccggcaagctgctggataccgtcatcgtctatttgcatcaagaaaacaatatgttggcaacgctgtcgcgcctgattaaacagcacggcgtgaagctcatcgccatcggtaacggcaccgccagccgtgaaaccgacaaaatcgcgggcgaactggtgcgtgaaatgtcgaaaatggggctgcataaaatcgtcgtgtccgaagccggcgcgtcgatttattccgcgtccgaactggcggcgcgcgagttccccgacttggacgtttccctgcgcggcgcggtgtccatcgcccgcaggctacaagacccgcttgccgagttggtcaaaatcgaccccaaatccatcggcgtggggcagtatcagcacgacgtgaaccaaagccagctcgccaaatcgctggacgcggtggtcgaagactgcgtgaacgccgtcggcgtggacgtgaacaccgcctccgccccgctcttggcgcgaatttccggtttgaatcaaacccttgcccaaaacatcgttgcctaccgcgatgaaaacggcgcgttcgacagccgcaaaaaattgctgaaagtaccgcgtttgggcgaaaaaaccttcgagcaggcggcaggctttttgcggattaacggcggtaaagagccgttggacgcgagcgccgtccaccccgaagcctatcccgtcgtcgccaaaatgctggcgcaacaaggcattagcgccgccgaactcatcggcaaccgcgagcgcgtgaagcaaatcaaagcgtccgacttcaccgacgaacgcttcggcctgccgaccattttggacatcctgtccgaactggaaaaacccggccgtgatccgcgcggcgagtttcagacggcatcgtttgccgaaggtatccacgaaatcagcgacttgcaagtcggtatgatactcgaaggcgtggtttccaacgtcgccaacttcggcgcgttcgtggacatcggcgtccatcaggacggcttggtgcacatctccgccctgtccaacaagttcgtccaagacccgcgcgaagtggtgaaagctggcgacgtggtgaaagtgaaagtgctggaagtcgatgctgcacgcaaacgcatcgcgctgaccatgcgcttggatgacgaaccgggcggcgcaaaacataaaatgccgtctgaaaaccgcagccgcgaacggacagccggccgcaaaccccaacgcaacgaccgcgccccagccaattcggcgatggcggatgcgtttgcgaagctgaagcggtaa

SEQ ID NO: 45268 - DNA, 1422 bp, Neisseria meningitidis
atgaaaatcattcagatacagaacaatcacaatgtaaacgatgaccgccccgagtttgaccgcgcgctgattgccagcctgcccgccagcggcccgcgctacacttcctaccctaccgccgaccgtttccatgacggtttccgcgaaggcgaatatatcaaagctttacatttgcgcggtatgggcgcgttaaacaaaccgctttccctttacattcacattccgttctgcaacaccatctgctactactgcggctgcaacaaaatcatcaccaaagacaaaagccgcgccgatgcctacatcgaatatcttgaaaaagaaatggaactgctcgctccacatctgaacggacggcaccagcttgcccaactgcacttcggcggcggcacgccgacctttttgagcgacgaacagatcgaacgtgtcttccgcatgatacgcaaacatttcgagttaatccccaccggcgaatactccatcgaaatcgacccgcgcaaagtcagccgcgacaccgtcctcatgctcggcagactcggcttcaaccgcatgagcatcggcattcaggatttcgaccccaaagtgcaggcagcggtcaaccgcatccaaagttacgaagaaaccaaagaagtcatcgatgcggcgcgcgaagcggggttcaaatccgtcagcgtcgatttgatttacggcctgccgcaccagacttcggaaagcatcaaaaccaccatcgataccgttttgtcgctcgatcccgaccgcctcgccctttatcactacgcccacctgccgcacgtgttcaaaccgcaacgccgcatcgataccgcctccgtccccgacagcgaagagaagctcgatatgctgcaatactgcgtccaaaccctaaccgaacgcggctacgtcttcatcggcatggatcatttcgccaaacctgacgacgaactctccatcgccctcaaagaaggcttcctccagcgcaacttccaaggctattcgacctacgcggattgcgatttggtcgccatcggcgtgtcgtccatcggcaaaatcggcagcacctattcccaaaacgaacgcgacatcgatgcctactatgccgccatcgacgaaggcagactgcccatcatgcgcggttatcagctcaatcaggacgacatcctgcgccgcaatatcattcaggatttgatgtgccgcttcgcgctcgactaccggatttacgaaagtatgttcggcatcccgttcgaccgctacttcaaagacgaactggcggatttggaaaaactcgccggtttgggattggtgcgcctgaacagccacgggctgaccgttaccccgaaaggacgcttcctcatccgcaacatcgccatggtgttcgactaccacctgcgccacaaggaaaccaaggcgaaatattcgcaaacggtgtga

SEQ ID NO: 45269 - DNA, 1779 bp, Neisseria meningitidis
atgacggttttgaagctttcgcactggcgggtgttggcggagcttgccgacggtttgccgcaacacgtctcgcaactggcgcgtatggcggatatgaagccgcagcagctcaacggtttttggcagcagatgccggcgcacatacgcgggctgttgcgccaacacgacggctattggcggctggtgcgcccattggcggttttcgatgccgaaggtttgcgcgagctgggggaaaggtcgggttttcagacggcattgaagcacgagtgcgcgtccagcaacgacgagatactggaattggcgcggattgcgccggacaaggcgcacaaaaccatatgtgtgacccacctgcaaagtaagggcagggggcggcaggggcggaagtggtcgcaccgtttgggcgagtgtctgatgttcagttttggctgggtgtttgaccggccgcagtatgagttgggttcgctgtcgcctgttgcggcagtggcgtgtcggcgcgccttgtcgcgtttaggtttggatgtgcagattaagtggcccaatgatttggttgtcggacgcgacaaattgggcggcattctgattgaaacggtcaggacgggcggcaaaacggttgccgtggtcggtatcggcatcaattttgtcctgcccaaggaagtagaaaatgccgcttccgtgcaatcgctgtttcagacggcatcgcggcggggcaatgccgatgccgccgtgttgctggaaacgctgttggcggaacttgatgcggtgttgttgcaatatgcgcgggacggatttgcgccttttgtggcggaatatcaggctgccaaccgcgaccacggcaaggcggtattgctgttgcgcgacggcgaaaccgtgttcgaaggcacggttaaaggcgtggacggacaaggcgttctgcacttggaaacggcagagggcaaacagacggtcgtcagcggcgaaatcagcctgcggtccgacgacaggccggtttccgtgccgaagcggcgggattcggaacgttttctgctgttggacggcggcaacagccggctcaagtgggcgtgggtggaaaacggcacgttcgcaaccgtcggtagcgcgccgtaccgcgatttgtcgcctttgggcgcggagtgggcggaaaaggtggatggaaatgtccgcatcgtcggttgcgccgtgtgcggagaattcaaaaaggcacaagtgcaggaacagctcgcccgaaaaatcgagtggctgccgtcttccgcacaggctttgggcatacgcaaccactaccgccaccccgaagaacacggttccgaccgctggttcaacgccttgggcagccgccgcttcagccgcaacgcctgcgtcgtcgtcagttgcggcacggcggtaacggttgacgcgctcaccgatgacggacattatctcgggggaaccatcatgcccggtttccacctgatgaaagaatcgctcgccgtccgaaccgccaacctcaaccggcacgccggtaagcgttatcctttcccgaccacaacgggcaatgccgtcgccagcggcatgatggatgcggtttgcggctcggttatgatgatgcacgggcgtttgaaagaaaaaaccggggcgggcaagcctgtcgatgtcatcattaccggcggcggcgcggcaaaagttgccgaagccctgccgcctgcatttttggcggaaaataccgtgcgcgtggcggacaacctcgtcattcacgggctgctgaacctgattgccgccgaaggcggggaatcggaacatacttaa

SEQ ID NO: 45270 - DNA, 954 bp, Neisseria meningitidis
atgaatcagaagaaagtagtcgtattggatgcggatactttacccggtcggacttttcacttcgatttcccacacgagcttgcggtttacggtacgacagatgctgcggaaacggcaggacgggtgcgcgacgcgcatattatcatcaccaataaagtgatgatttcagcggatatcattgcacacgctccgcaacttgaattgattgccgtcagtgcgaccggtgtgaacaatgtcgatattggggcggcgaaggcggcgggcgttgcggtatgcaatgtccgcgcctacggaaacgaatcggttgcggaacacgcctttatgctgatgattgcgttgatgcggaatttgcctgcctatcagcgtgatgttgcggcaggattatgggagaagtcgccgtttttctgccattacggcgcgccgattcgggatttgaacggtaaaacgctggcggttttcggacgtggcaatatcggacggacgcttgccggatacgcgcaggcattcggtatgggggtggtgtttgccgaacacaaacacgcgcccgacgtgcgcgaaggctatgtttcctttgaagatgcggtacagactgccgacgtgttgtcgctgcactgtccgctaaacgcccaaactgaaaatatgataggcgaaaacgaattgcggcagatgaagcctggcgcggttttaatcaattgtgggcgcggcgggctggtggatgaaaacgcgctgcttgccgcactcaaatacgggcagatcggtggggcgggtgtcgatgttttgacggaggagccgccaaggggcggcaatcccttgctgaatgcacgcctgcccaatctgattgttacgccgcataccgcgtgggcgagccgcgaggctttggacaggctgtttgatatattgttggcgaacattcacgcctttgtgaaaggcgaggcacaaaatcgggtggtttga

SEQ ID NO: 45271 - DNA, 1377 bp, Neisseria meningitidis
gtgcgtggctacctcacttcccaagctattatccaaccacagaatatggattcgggaattctgaaattacgggtatcagcaggcgaaataggggatatccgctatgaagaaaaacgggatgggaagtctgccgaaggcagtattagtacattcaataacaaatttcccttatataggaacaaaattctcaatcttcgcgatgtagagcagggcttggaaaacctgcgtcgtttgtcgagtgttaaaacagatattcagattataccgtccgaagaagaaggcaaaagcgatttacagatcaaatggcagcagaataaacccatacggttcagtatcggtatagatgatgcgggcggcaaaacgaccggcaaatatcaaggaaatgtcgctttatcgttcgataaccctttgggcttaagcgatttgttttatgtttcatatggacgcggtttggcgcacaaaacggacttgactgatgccaccggtacggaaactgcaagcggatccagaagttacagcgtgcattattcggtgcccgtaaaaaaatggctgttttcttttaatcacaatggacatcgttaccacgaagcaaccgaaggctattccgtcaattacgattacaacggcaaacaatatcagagcagcctggccgccgagcgcatgctttggcgtaacagacttcataaaacttcagtcggaatgaaattatggacacgccaaacctataaatacatcgacgatgccgaaatcgaagtgcaacgccgccgctctgcaggctgggaagccgaattgcgccaccgtgcttacctcaaccgttggcagcttgacggcaagttgtcttacaaacgcgggaccggcatgcgccaaagtatgcctgcaccggaagaaaacggcggcgatattcttccaggtacatctcgtatgaaaatcattactgccggtttggacgcagccgccccatttattttaggcaaacagcagtttttctacgcaaccgccattcaagctcaatggaacaaaacgccgttggttgcccaagataaattgtcaatcggcagccgctacaccgttcgcggatttgatggggagcagagtcttttcggagagcgaggtttctactggcagaatactttaacttggtattttcatccgaaccatcagttctatctcggtgcggactatggccgcgtatctggcgaaagtgcacaatatgtatcgggcacgcagctgatgggtgcagtggtcggcttcagaggagggcataaagtaggcggtatgtttgcttatgatctgtttgccggcaagccgcttcataaacccaaaggctttcagacgaccaacaccgtttacggcttcaacttgaattacagtttctaa

SEQ ID NO: 45272 - DNA, 342 bp, Neisseria meningitidis; identical to SEQ ID NO: 38375

SEQ ID NO: 45273 - DNA, 384 bp, Neisseria meningitidis; identical to SEQ ID NO: 38324

SEQ ID NO: 45274 - DNA, 498 bp, Neisseria meningitidis
atgtcttcatctgtttcaagtaaaacgcgctattgggtattggcacttgccgccatcgtgctggaccagtggtcgaagtgggcggtgctgtcgtcgtttcagtatcgggaacgcgtcaatgtcattccttcctttttcgatctgacgctggtgtacaacccgggtgcggcgttcagcttccttgccgatcagggcggctggcaaaaatacttttttttggtgctggcggtggcggtgagcgcgtatttggtacgcgccatcttgcgcgatgagtttgcaaccctcggcaaaacgggtgcggcaatgattatcggcggtgcgttaggcaatgtcatcgaccgcctgatacacggtcatgtcgtcgatttcttattgttttattggcaaaattggttttatcccgcctttaatattgccgacagctttatctgcgtcggtgcggtgttggcggtgttggacaacatcgtccaccgtaaaacccaagaagaaaaatattga

SEQ ID NO: 45275 - DNA, 387 bp, Neisseria meningitidis; identical to SEQ ID NO: 39754

SEQ ID NO: 45276 - DNA, 1791 bp, Neisseria meningitidis
atgcgctacaaaccccttctgcttgccctgatgctcgttttttccacgcccgccgttgccgcccacgacgcggcacacaaccgttccgccgaagtgaaaaaacagacgaagaacaaaaaagaacagcccgaagcggcggaaggcaaaaaagaaaaaggcaaaaatggcgcagtgaaagataaaaaaacaggcggcaaagaggcggcaaaagagggcaaagagtccaaaaaaaccgccaaaaaccgcaaagaagcagagaaggaggcgacatccaggcagtctgcgcgcaaaggacgcgaaggggataagaaatcgaaggcggaacacaaaaaggcacatggcaagcccgtgtccggatccaaagaaaaaaacgcaaaaacacagcctgaaaacaaacaaggcaaaaaagaggcaaaaggacagggcaatccgcgcaagggcggcaaggcggaaaaagacactgtttctgcaaataaaaaagtccgttccgacaagaacggcaaagcagtgaaacaggacaaaaaatacagggaagagaaaaatgccaaaaccgattccgacgaattgaaagccgccgttgccgctgtcaccaatgatgtcgaaaacaaaaaagccctgctcaaacaaagcgaaggaatgctgcttcatgtcagcaattccctcaaacagcttcaggaagagcgtatccgccaagagcgtatccgtcaggcgcgcggcaaccttgcttccgtcaaccgcaaacagcgcgaggcttgggacaagttccaaaaactcaataccgagctgaaccgtttgaaaacggaagtcgccgctacgaaagcgcagatttcccgtttcgtatcggggaactataaaaacagccagccgaatgcggttgccctgttcctgaaaaacgccgaaccgggtcagaaaaaccgctttttgcgttatacgcgttacgtaaacgcctccaatcgggaagttgtcaaggatttggaaaaacagcagaaggctttggcggtacaagagcagaaaatcaacaatgagcttgcccgtttgaagaaaattcaggcaaacgtgcaatccctgctgaaaaaacagggtgtaaccgatgcggcggaacagacggaaagccgcagacagaatgccaaaatcgccaaagatgcccgaaaactgctggaacagaaagggaacgagcagcagctgaacaagctcttgagcaatttggagaagaaaaaggccgaacaccgcattcaggatgcggaagcaaaaagaaaattggctgaagccagactggcggcagccgaaaaagccagaaaagaagcggcgcagcagaaagctgaagcacgacgtgcggaaatgtccaacctgaccgccgaagacaggaacatccaagcgccttcggttatgggtatcggcagtgccgacggtttcagccgcatgcagggacgtttgaaaaaaccggttgacggtgtgccgaccggacttttcgggcagaaccggagcggcggcgatgtttggaaaggcgtgttctattccactgcaccggcaacggttgaaagcattgcgccgggaacggtaagctatgcggacgagttggacggctacggcaaagtggtcgtggtcgatcacggcgagaactacatcagcatctatgccggtttgagcgaaatttccgtcggcaagggttatatggtcgcggcaggaagcaaaatcggctcgagcgggtcgctgccggacggggaagaggggctttacctgcaaatacgttatcaaggtcaggtattgaacccttcgagctggatacgttga

SEQ ID NO: 45277 - DNA, 1074 bp, Neisseria meningitidis; identical to SEQ ID NO: 39216

SEQ ID NO: 45278 - DNA, 1863 bp, Neisseria meningitidis
atggctcttttgcagatttcagaaccgggcatgtccgcctccccgcaccggcaccgtttggcagcaggcatcgatttgggtacgaccaacagcttggtcgccaccgtccgcagcggcagtgccgcctgtctgcccgatgccgaagggcgcgttaccctgccttccgtcgtccgctatctggaaaacggcggcattgaagtcggcaaaaccgccctgtccgcccaaaaaaccgacccgctgaacaccgtcagctccgccaaacgccttatcgggcggacgcttgccgatctgcatcaaaatacgcattacctgccttaccgtttcggcgacaatcaacgcgttatcgaactgcatacgcggcagggggtgaaaacgcctgtcgaagtgtcggcggaaatcctcaaaacccttaaatcgcgcgccgaagaaaccttgggcggcgatttggtcggcgtggtgattaccgtccctgcctatttcgatgatgcccaacgccaagccaccaaagatgccgcgcgtctggcgggtttgaacgtattgcgcctgctcaacgaacccaccgctgccgcaatcgcctacgggctggacaacgcctcggaaggcacgtttgtcgtgtacgacttagggggcggcacattcgacgtatccgtattgcaactgaccaaaggactgtttgaagtcaaagccaccggcggcaacagcgcgttgggcggcgacgatttcgaccaccgcctgttctgccgcctgctcgaacaaaacggactctcccaactcaacgaacaagacagccaactcctgctctcgctcgtccgcgccgccaaagaacaattaaccacgcaaaccgaagcgcgcattcaggcgacgctttcagacggcatggcaatcgacacaagcatcagtcgcgccgagttccacaacctgacgcagcatttggtgatgaaaacgctcgaaccggtcacacaggcgttgaaagatgccggtgtcggtaaaaacgaagtcaaaggcgtgattatggtcggcggttcgacccgtatgctgcacgtccaacaggcagtcgccaccttcttcggacaaaccccgctgaacaacctcaatcccgacgaagtcgtcgcgctcggcgccgccatacaggcaaacgtcctcgcaggcaacaaaaccgacggcgaatggctgctgctggacgttacacctttgtcgctcggtttggaaacctacggcggcttggcggaaaaaatcatcccgcgcaattccaccatccccaccgcgcgcgcgcaggactttaccaccttcaaagacggtcaaaccgcgatgacgatacacgtcgtgcaaggcgagcgcgagctcgtttctgactgccgcagccttgccaaattcaccctgcgcggcattccaccgatggcggcgggtgcggcgcgtatccgcgtaaccttccaaatcgatgcggacgggctgctgtccgtttccgcccaagaacaaagcaccggcgtacaggcgcaaatcgaagtcaaaccttcctacggcttggacgacggcgcgattacccgaatgcttaaagacagtatggacaacgccgccgaagatatggcggcacgcgcccgcgccgaagccgtagtcgaagccgaaagcctgaccgatgccgtcaacgccgccctcgagttggacagcgatttactggatgccaaagaattgcaacagatccggcaaggcatcgccgatttgcaaggccgtctgaaagacggaaaagccgaagacatccgctccgccgtcgccaaactcagccgcagcaccgacaacttcgccgccaaacgcatgaaccgcaatatccaacgcgcattgacaggccagagtgtcgataatatttga

SEQ ID NO: 45279 - DNA, 612 bp, Neisseria meningitidis
ttggtctgccgactgaatgcaccttccgaactgggcaaacagcaaaagttgtgggcgtttgccgctgcgctcgggcagcacgacaggattgaggaagtggtggtcggcatgaacaatctgaccgtgttcacccgtttcgataccgatttggcgacgcttgccgatgaattgcaatatgtgtgggaacacaccgccgttacagaccatcagggcaaactggtggaaattcccgtctgctacggcggcgaatacggcccggatttggcggaagtcgctgctttccatcagacggttatttccgaaatcgtccgccgccatacggcgcaaacttataccgtatttatgatgggcttccagcctggtttcccttatctgggcggcttgcccgaagcattgcacacgccccgccgtgccgtgccgagaacgtccgttcctgccggttcggtcggtatcggcggcagtcagaccggtgtgtatccgttcgcttcgcccggcggctggcagattatcggcagaaccgaattacccttgttccgagccgatttgaatccgccgaccctgctggcggcgggtgaccaagtccgctttgttgcagaaaggattgagccatga

SEQ ID NO: 45280 - DNA, 624 bp, Neisseria meningitidis
  misc_feature 605, 606, 607, 608, 609: 'n' is a, c, g or t
atgaatataatcgggctggacatctcaaaggataccatagacgcaacattgcataaaacaaacggaagtatccattacattaaatttaagaataatgatgatggattaaaacagtttagattgtggataaagggaaacagaatcagaaaagcctatatcggcatggaggcaacaggcatctattacgaaaaggcagcagatatgctttcttcctactataccgtttacgttatcaatcccttaaaaatcaaggactacgggaaaagcaggtttaaccgtaccaaaaccgacaaagcagattcaaacctgatagcagattacataaaaaggcatcaagatacattgataccgtatcagatacccaaaaacaaagcactgcaaaaactgattaaccttaaaaatcaattacagcaacatcagaagcaaattaaaaaccgtcttcatagcactgaagaagacttcataaggaacatacatcaagacttgatagataccatacaggacaagatggaacaggtaaaaatagccatatccgaacaaatcaaaaaacaaacggataataaccattaccgcaatcttcaaaccatcccgagcataggcaaagnnnnncacacacttaattaa

SEQ ID NO: 45281 - DNA, 852 bp, Neisseria meningitidis
atgattatccatccccaattcgaccccgtccttatcagtatcggcccgcttgccgtccgctggtatgccctaagctacatcctcggatttattctttttacctttctcggcagaaggcgcatcgcgcaaggcttgtccgtttttaccaaagaatcgctcgacgacttcctcacttggggcattttgggcgtaattttgggcgggcgtttgggttacgtcctgttttacaagttttccgactacctcgcccatccgcttgatattttcaaggtatgggaaggcggaatgtcgttccacggcggctttttgggtgtagttattgccatatggttgttcggccgcaaacacggcatcggcttcctcaaactgatggacacggtcgcaccgctcgttccgctgggtctcgcttcgggacgtatcggcaacttcatcaacggcgaactttggggacgcgttaccgacatcaacgcattttgggcaatgggcttcccgcaggcgcgttacgaagatgccgaagccgccgcgcacaatccgctttgggcagaatggctgcaacaatacggtatgctgccgcgtcatccctcgcagctttatcagtttgcacttgaaggcatctgcctgttcgccgtcgtttggctgttctctaaaaaacagcggccgaccggacaagtcgcctcactcttcctcggcggctacggcatattccgcttcattgccgaatttgcacgccaacccgacgactatctcgggctgctgaccttggggctgtcgatggggcaatggttgagcgtcccgatgattgttttgggtatcgtcggctttgtccggttcggcatgaaaaaacagcactga

SEQ ID NO: 45282 - DNA, 567 bp, Neisseria meningitidis
atgttattgcaaaacatccttccattcgcccattgccttttgcggaaggcacttcccgaaggcggcaatgctttggacggcaccgccggcaacggacacgacacccttttcctcgcacaaaccgcaggcatccgggggaaagtgtgggcattcgacatccagccgcaagccctgagccgcactcgatgccgtctgaaagaagcgagatacgagaatgtgcaactcatcttagacggacacgaaaacctgaaacaatatgtttcagaaccactaaatgccgccattttcaactttggctggctgcccggcggagataaaagccttaccacccatacggaaaccagcattcccgccctttgcgcaaccctctccctgctgaaagaaggcggtatgcttattgccgtcctctatccgggacacgaaaacggcaaacaggaggcagaagcaatcgaacaatgggcaaaaaacctgcctcaagaacagtttgccgttttgagttacggctttaccaaccggaaaaacaacccgccctatctgttggcatttgaaaagttacgtcaaaaataa

SEQ ID NO: 45283 - DNA, 963 bp, Neisseria meningitidis; identical to SEQ ID NO: 39603

SEQ ID NO: 45284 - DNA, 408 bp, Neisseria meningitidis
atgactgtatggtttgttgccgctgttgccgtcttaatcatcgaattattgacgggaacggtttatcttttggttgtcagcgcggctttggcgggttcgggcattgcttacgggctgaccggcagtacgcctgccgccgtcttgaccgccgctctgctttccgcgctgggtatttggttcgtacacgccaaaaccgccgtgggaaaagttgaaacggattcatatcaggatttggatgccggacaatatgtcgaaatcctccgacacacaggcggcaaccgttacgaagttttttatcgcggtacgcactggcaggctcaaaatacggggcaagaagagcttgaaccaggaactcgcgccctaatcgtccgcaaggaaggcaaccttcttatcatcgcaaacccttaa

SEQ ID NO: 45285 - DNA, 594 bp, Neisseria meningitidis
atggccgacggtatgggcaatctgattggctgggaaaaaacggggcttgttgtcggtaagcagtggataaccgcaaaagacgacaaggtgtccgatgtctgcaatgccaacggcgagatgggcgtaatcgggctttacgagcctttctcacacggcgcattgacgatacccggtcatccgaactgccgatgcgaggttgtttccgtatcgggtggcgaattgggggaatttgccgaaaaaaaggagcttcgtaaagcggctatgcagtatgcgcgggataactttatcggcaaaagctatgtcaatgaaaacagcgggcatgaactgaaggtaacttggcaaggtgtgaaacacgctgcgtcaaaggcaaatcaggcggaattatccatcatgacaaaacttgatgacttattgcgctacgcaaaatatgagggttcttattcggataggaaaggtcatcctaatattattgcagcacataagtatcgtgccgttgccaaggttgggaataagtctttaaatatcggtgtgattgtaagggaatttccagacgaccataaacattacgaccatttcatcttgaaggatgaataa

SEQ ID NO: 45286 - DNA, 300 bp, Neisseria meningitidis
atgggatacagggtaggaatgcagtgtttttccaaaaaagaacaggcagaggattattctgtatccaaaatcgtgcccgttatatctcccgatgggaaactgtacgcgccatataaatcaggcggaaattggtattttgaaggctatcggatagatttgtctttcccgcaatgctcccaagaatcacagtttgcacaaggggcaatgcttgcctcttcgttcctgattttattcgtgatcgtatgggcatttaaaacggtaggaaacatgattaaaggaagttttgcaaatgatggttga

SEQ ID NO: 45287 - DNA, 1167 bp, Neisseria meningitidis
atgaatttacacgagtatcaggctaaagaactgctggctagctacggtttgcccgtacaaggcggtattttggcacacaacggcgaagaagccgctgcagcttacgacaaattgggcggcaaattcgctgttgtcaaagcacaagtacacgccggcggccgcggtaaagcgggcggcgtaaaagtcgttaaaagccgcgaagaagctaaagaagtggctgaaagcctgattggcaccaacttggtaacttaccaaacggatgccaacggccaacctgtcaacagcgttttggtttgtgaagatatgtatccggttcaaaccgagctgtacttgggcgcagtggttgaccgttctacccgccgcgttacattcatggcttctacagaaggtggcgtagaaatcgaaaaagttgctgccgaaactccagaaaaaatcttcaaagtaaccgttgatccgctggtcggcctgcaaccttgccaagctcgcgaagttgccttccaactgggcttgaaagacaaacaaatcaacgagttcgtcaaactgatgaccggcgcgtacaaagcgtttgtcgaaaacgacttcgccctgtttgaagtcaacccgctggcagttcgcgaaaacggcgcgctggcctgcgtggacggcaaaatcggcatcgacagcaacgcgctctaccgcctgccgaaaatcgccgaattgcgcgacaaatctcaagaaaacgaacgtgaactgaaagcttctgaattcgacctgaactatgttgccctggaaggcaacatcggctgtatggttaacggtgccggtttggcgatggccaccatggacatcatcaaactcaaaggcggtcaacctgccaacttcttggacgttggcggcggcgcaaccaaagaccgcgtggttgaagcgttcaaactgattttggaagacaaatccgttcaaggcgtattgatcaacatcttcggcggtatcgtacgttgcgacatgattgcggaagccatcgtggcagccgttaaagaaatcaacgtcgacgttcctgtcgttgttcgtttggaaggcaacaacgccgaactcggcgcgaaaatcctgaacgaatcaggtctgaaactgacttctgcagacggcctgaatgacgcagccgaaaaaattgttgcagccgtaaacgcctaa

SEQ ID NO: 45288 - DNA, 1242 bp, Neisseria meningitidis
atgcccaccaaaaccccttcactgttcggctgcgcgatgattatcgccggcacggtcatcggcgcaggtatgctcgccaacccgaccgccacatccggcgtatggtttaccggctcgctggccgtgttgctgtacacctggttttccatgctctccagcggcctgatgattttggaagtcaacacccactacccccacggcgcgagcttcgacaccatggttaaagacctgctcggacgcggctggaacatcatcaacggtatcgccgtcgccttcgttttatacctgcttacttacgcttatatcttcgtcggcggcgacctgaccgccaaaggcatcggcaacgccttgggcggcaatgtttcgcttaccgtcggacaactcgtcttcttcggcatcctcgccttttgcgtatgggcatccgcacgcttggtcgaccgattcaccagcgtcctcatcggcggcatggtattaacctttatttgggcaaccggcggcctgattgccgatgccaaaatgcctgttttgtttgacacccaagcccctgccggcaccggctactggatttacgccgccaccgccctgcccgtctgcctcgcttccttcggcttccacggcaacgtttccagcctgctcaaatactttaaaggcgacgcgcccaaagtggctaaatccatctggatgggcacactgattgcgctggtaatttacgtcctctggcaaaccgccatccaaggcaacctgccgcgcaacgagttcgcccccgtcatcgccgccgaagggcaagtctccgtcctcatcgaaaccctgtccaaattcgcccaaaccggcaatatggacaaaatattgtccctgttttcctatatggcgatcgccacctcgtttttaggcgtaacgctcggactcttcgactacatcgcagacatcttcaaatggaacgacagcgtgtccggccgcaccaaaaccgccgcgctgaccttcctgccgcccctgatttcctgcctgctcttccccaccggcttcgttaccgccatcggctacgtcggcctggcggcaaccgtctggacaggcatcatccccgccatgctgctctaccgttcgcgcaaaaaattcggcgcaggcaaaacctataaagtttacggcggcttgtggctgatggtttgggtcttccttttcggcatcgtcaacatcgccgcacaggtattgagccaaatggaactcgtccccgtatttaaaggataa

SEQ ID NO: 45289 - DNA, 921 bp, Neisseria meningitidis
atgagaatcaggctggggcggcacaacgcgcccgactttccgcacggggccgccgtaaccataggcaattttgacggcgtacacctcggacacaaacacatcctccaaaaactccgcctcgaagccgatacgcgcggattacccgtcgtgaccgtcgttttcgaaccccaacccaaagaatttttcgcactccgcaccggcaggatgccaccgtgtcggatcagccccctgcgcaccaagctcgaattattggaaggcacaggctgtgtcgatgccgtctgggttttgcgtttcgatcaaaatttttccgaaatatccgcgcaagggtttatcgaccgcctgctgcgtcaaaccttgaatacgcgttatttgctcgtcggcgacgatttccgtttcggtgcggggcgggaaggctgttttgaacttttggcacaacagcccgatatgcagaccgagcgtacgccttccgtcatcgtcgaagacatccgcaccagcagtaccgccgtgcgacaagccctttcagacggcaaccttgcctatgcgaaaaaacttttgggacacgactacgtcttgagcggcagggtggtgcacggcagaaaactcggacgcaccttaaacgccccgactgccaacatccgcctgccccgccaccgttatgcactcggcggcgtgttcgtcgtcgaagcggacggcgcgttcggcacgcggcgcggcgtggcgagcttcggcttcaatcccaccgttgatagcgactgttttcaaaagctggaagtccacctgttcgactttcaaggcgatttgtacggacaacggttgaacgtccgcttcctgcacaaactgcgcgatgaggaaaagtttgacggtatggaagaactgaaaaggcagattgaagccgatatggaagccgcaaagtgttggtag

SEQ ID NO: 45290 - DNA, 387 bp, Neisseria meningitidis
atgagcagcaacatcccggcagaactgaaatacgttgccagccacgaatggctgcgccttgaagaagacggtatcatcaccgtcggtattacccaccacgcgcaagagctgttgggcgacatcgtgtttgtcgagctgcctgaagtcggcgcaaaccttgccgccgaagaacaagccggtgtggttgagtctgtaaaagccgcgtccgacgtgtacgcaccgattgcaggtgaagtcgttgccgtcaacgaagatttgccaagcgctccggaaactgccaacagcgatccttacggtgcaggctggttcttcaaactcaaaccggcaaacgttgccgattacgacgttctgctgactgccgaacaatacgcgggcgaagtggattaa

SEQ ID NO: 45291 - DNA, 465 bp, Neisseria meningitidis
atgaaatgcccgttttgcgcccaccccgacacccgcgtcgccgattcgcgcctgatggaagaacgcaacgccgtgcgccgccgccgccactgccccagctgcggcaaacgcttcggcacgctcgaaaccgccgaactcaaaatgcccgccgtcatcggtccggacaaaaaacgttcgccctttaatgcacaacgcctccgcaacgacctgaccgccgccgcccgaaaatccgccctgacacccgaacagatcgacgaaaccgtccgcctgacgaaacacaggctctacacttcgggtcagcgcgacatcccctctgccgcacttgccgacatggtgctaaaagagctgcttgagcacaacacggaagccgccgtccgtttcgccgccctgcacaaacgcttcgacaatccggcagactttgcctcgtggctggcgcaagccgtcaaaacagaccgcaaagcctga

SEQ ID NO: 45292 - DNA, 618 bp, Neisseria meningitidis
atgaatatgaagaataatgattgcttccgcctgaaagattcccagtccggtatggcgctgatagaagtcttggttgctatgctcgttctgaccatcggtattttggcgttactgtctgtgcagttgcggacagtcgcttccgtcagggaggcggagacacaaaccatcgtcagccaaatcacgcaaaacctgatggaaggaatgttgatgaatccgaccattgattcggacagcaacaagaaaaactataatctttatatgggaaaccatacactatcagctgtggatggcgattttgcgattgatgccataaaaactaaggcgcagttggcagaggaacaattgaagagatttagttatgagctgaaaaatgccttgccggatgcggcagccatccattacgccgtctgcaaggattcgttgggtgctgcgccgacattgtccgccggcagtactttttctcaaaattgcgatggtagtgcaaatggggatactttgattaaagtattgtgggtaaatgattcggcaggggattcggatatcgcccgtacgaatcttgagacgaacggcgacaatatcgtatatacctatcaggcaagggtcggaggtcgggaatga

SEQ ID NO: 45293 - DNA, 1167 bp, Neisseria meningitidis
  misc_feature 6, 7, 8, 9, 10: 'n' is a, c, g or t
gtgtgnnnnnaaccgcacgtaaacgttggcaccatcggtcacgttgaccatggtaaaaccaccctgactgccgctttgactactattttggctaaaaaattcggcggtgctgcaaaagcttacgaccaaatcgacaacgcacccgaagaaaaagcacgcggtattaccattaacacctcgcacgtggaatacgaaaccgaaacccgccactacgcacacgtagactgcccggggcacgccgactacgttaaaaacatgattaccggcgccgcacaaatggacggtgcaatcctggtatgttccgcagccgacggccctatgccgcaaacccgcgaacacatcctgctggcccgccaagtaggcgtaccttacatcatcgtgttcatgaacaaatgcgacatggtcgacgatgccgagctgttggaactggttgaaatggaaatccgcgacctgctgtccagctacgacttccccggcgacgactgcccgattgtacaaggttccgcactgaaagccttggaaggcgatgccgcttacgaagaaaaaatcttcgaactggctgccgcattggacagctacatcccgactcccgagcgtgccgtggacaaaccgttcctgctgcctatcgaagacgtgttctccatttccggccgcggtacagtagtaaccggccgtgtagagcgcggtatcatccacgttggtgacgagatcgaaatcgtcggtctgaaagaaacccaaaaaaccacctgtaccggcgttgaaatgttccgcaaactgctggacgaaggtcaggcgggcgacaacgtaggcgtattgctgcgcggtaccaaacgtgaagacgtagagcgtggtcaggtattggccaaaccgggtactatcactcctcacaccaagttcaaagcagaagtgtacgtactgagcaaagaagagggcggccgccataccccgttcttcgccaactaccgtccccaattctacttccgtaccaccgacgtaaccggcgcggttactttggaagaaggtgtggaaatggtaatgccgggtgagaacgtaaccattaccgtagaactgattgcgcctatcgctatggaagaaggcctgcgctttgcgattcgcgaaggcggccgtaccgtgggtgccggcgtggtttcttctgttatcgcttaa

SEQ ID NO: 45294 - DNA, 1344 bp, Neisseria meningitidis; identical to SEQ ID NO: 38748

SEQ ID NO: 45295 - DNA, 969 bp, Neisseria meningitidis
atgaaactcaccctcgccattccctcgctcaatttggataaagacgaaacccgaatacctctatgcctgcccgccttcaacaaaatcctgcaatacggctcgctgcaccgccaaagctgcacggcttcggcattttacgcgcgttatttgtggtgcggcagactggcggaacgcgcggcacaaagcctgaatatgccgtctgaaaccgtcgcgctcgccacgcccgtctggcaaaagatggggatgcatcaggcaaatgtgctgacggcggaatatttggatgtcggtacggatgaagcggaacggctctgccgcgatctgtcggcgttttacggcgatattccgtggcgtttcgttcccgtcctgcccgaattatggctggtttcccttccccgcgcgtaccgctggggcgcgaagcccgttttggacttgggcggactgttgggtgcggacgatcaaccggacggggaagacgcgttggaatggctgcgcgtccaaaccgaaatccaaatgtggctggcggcgcaccccgtcaaccataaccgcaagaaacgcgggctgcccgagttgaacggcttatggctttgggacagtctgcacggaagcagtcaaggcggcacgcttttcgccgatacggtttggagccgtttctaccccgaccgccgcgcattgcccgacaacttccgcgcctatgaagaaacggcggcacacctgcccgacacgcaccatatcctgtttatggacgatttgcgcctgaccgccctgacaggggacagggagcggtatgcatcggttttacagcagtgggaagaacactggttcgcaccgatctacgaagccgtccgtaccggcaaaatcaaacggctggacatcaccacggacggacaacacggcggtacgctgaccttcaaacccgccgacaggtggaaattttggcgcggcgcgaaaacctttgacggaatctggtga

SEQ ID NO: 45296 - DNA, 600 bp, Neisseria meningitidis
atgtctgaaaaaccggaaaaaatcgttttggcaagcggcaatgcaggcaaactcaaagaattcggcaacctattcgaaccatacggcattaccgtattgccgcaatccgagttcagcatacccgaatgccccgaaccctattccacctttgttgaaaatgcgctggcaaaagcccggcacgccgccggacacagcgggctgcccgcactcgccgacgacagcggcatctgtgccgccgccttaaacggtgctccgggcatacattccgcacgttacgccggcagcaatcccaaatccgataccgccaacaacctgaaacttgccgccgaacttgccggcaaagccgacaaaagctgttgctacgtctgcgtattggtttttgtccgccataaagacgacccgcgtccgattattgccgaaggcgtatggcacggacaatggaacggcgttcccgccggtgaaaacggtttcggttacgacccgtatttttatctgcccggacacggcaaaaccgccgccgaattggattcggaggtcaaaaaccgcgaaagccaccgcgcgcaggcacttgccgaactcttacgcaaactcgccctttaa

SEQ ID NO: 45297 - DNA, 582 bp, Neisseria meningitidis; identical to SEQ ID NO: 37778

SEQ ID NO: 45298 - DNA, 687 bp, Neisseria meningitidis
atggcaggcttaacatttgaacaaaccgtttccaacatcatcggtatgaaaggcgaaatcgtccgcgcattgggcgaaaccttcgtaatggtcggtttgtccaccacattcgccgtcgttttcggcacgttgctgggcgtgttgctcttcgtaacctccagccgccaactgcattacaacaagccggtaaatttcctgctcgacaacctcgtcaacctcatgcgcgccttccccttcgtcattttgatgattgcgatgatacccgccacacgcgccattgtcggcagcaccatcggtccggttgccgcctcgctggtattgagcgtgtccggtctgttttacttcgcccgactggtggaacaaaacctgcgcgaagtccccaaaggcgtgattgaagccgccgccgcgatgggtgcgccgccggttgccatcgtccgcaaagtcctcttaaacgaagcgcgcacgggcatggtttccagcattaccgtgcttgccatcgggcttttgtcatacagcgcggcggcagggatgataggcggcggcggcttgggcgacctcgccatccgctacggctactaccgctaccaaaccgaagtcatcgtcttcatcgtcgccctcctcgtgctgctggtcatcctgattcaaagcaccggcaacgcgttggcgcggaaactcgacaaacgttaa

SEQ ID NO: 45299 - DNA, 204 bp, Neisseria meningitidis; identical to SEQ ID NO: 38753

SEQ ID NO: 45300 - DNA, 495 bp, Neisseria meningitidis
atgaacaacagacattttgccgtcatcgccctgggcagtaatcttgaaaaccctgcccaacaggtacgcgccgcattggacacgctgtcgtcccatcctgacatccgtcttaaacaggcttcctcactgtatatgaccgcgcccgtcggttacgacaatcagcccgattttgtcaatgccgtctgcaccgtttccaccactctggacggcattgccctgcttgccgaactcaaccgtatcgaggctgatttcggacgcgaacgcagcttccgcaacgcgccgcgcacattggatttggacattatcgactttgacggcatctccagcgacgacacccgactcaccctgccgcatccgcgcgcgcacgaacgcagtttcgtcatccgccctttggcagaaatcctccctgattttgttttaggaaaacacggaaaggttgccgaattgtcaaaacggctgggcaatcaaggtatccgtcttttacccgacaggtaa

SEQ ID NO: 45301 - DNA, 210 bp, Neisseria meningitidis
atggctgaatcgcggcaaacacgccttcaagtcaaatgtccgacctgtcaaacagcagtagtatgggaacccgaaaacgcattccgccccttctgttcgcaacgctgcaaactgatcgacttgggcggatgggcagacgggaaatatacggtttccggccaaacggaaagtttgccggaaatatccgaacccgacatggcataccgctga

SEQ ID NO: 45302 - DNA, 273 bp, Neisseria meningitidis; identical to SEQ ID NO: 38717

SEQ ID NO: 45303 - DNA, 2019 bp, Neisseria meningitidis
atgaataaatctttatccgggtcggtagaagaataccgcgaactgacgctccgaggcatgatactcggtgcattgatcactgtaatttttactgcgtccaacgtttacctcggtttgaaagtcgggctgacctttgcctcgtcgattccggcggcggtgatttcgatggcggttttaaagtttttcaaaggcagcaatattttggaaaacaacatggtgcagacccaagcttcggcggcgggtacgctttcgaccatcatcttcgtcctgcccggtttgctgatggcgggctactggagcggtttcccgttctggcagacgacgcttttatgtattgccggcgggattttgggggtgattttcaccattccgctgcgttacgcgatggtggtgaaaagcgatttgccttatccggaaggtgtggcggctgctgaaattttgaaagtgggcggtcatgaagaaggggataaccgtcagggcggcagcggcatcaaagagctggcggccggcggtgcgttggcgggattgatgagcttttgcgccggaggtctgcgcgtgattgccgacagcgcgagttattggtttaaaagcggtacggcgattttccagctgccgatgggcttttcactggcattgttgggcgcgggctatttggtcggactgacgggcggtatcgccatcctgttgggcatttcgattgcttggggcattgccgtgccgtatttctcctcacacattccgcaaccttccgatatggaaatggcggcgtttgcgatgaagctgtggaaggagaaagtgcgttttatcggtgcggggactattggcattgcggcggtttggacgctgttgatgctgctcaagccgatggtggaaggcatgaagatgtcgttcaagagttttggcggcggtgcgcccgctgcggaacgcgccgaacaggatttgtcgcctaaggctatgattttttgggtgctggcgatgatgtttgttttaggcgtgtcgttttaccactttatcggcgattcgcacattacgggcggcatggcttggcttttggtggtcgtttgcacgcttttggcttccgtcatcggctttttggtcgccgccgcctgcggttatatggcaggtttggtcggctcgtcttccagcccgatttccggcgtgggcatcgtgtccgtcgtcgttatttcactggttttgctgctggtaggcgaatccggaggtttgttggcggatgaggctaaccgcaaatttttgctggcactgactttgttttgcggctcggcagtaatctgcgtggcttcgatttccaatgacaacctgcaagacttgaaaaccggctacctgctcaaagccacgccttggcggcagcaagtcgccctgattatcggctgtatcgttggtgcgctggttatttcgcccgtgttggaactgctttacgaagcctacggctttaccggcgcaatgccgcgcgaaggcatggatgcggcgcaggctttggcagcccctcaagcgactttgatgacgaccatcgcgtcgggcattttcgcccacaaccttgaatgggtctatatctttaccggcatcgcgattggcgcggtgttgattgccgccgatttggtgttgaaaaaatcatcaggcggcaaacttgccctgcccgtccttgcggtcggtatgggtatttatctgccgccgtccgtcaatatgcccatcgtggcaggcgcggtgttggcggcggtgttgaaacacatcatcggtaaaaaagcggaaaaccgtgaaggccgtctgaaaaacgccgagcgcatcggaaccttgttctccgccggtctgattgtcggtgaaagtctgattggtgtgattatggcgtttattattgccttctccgtgaccaacggcggctcggacgcgccgctcgcgttgaatctgcaaaactgggatgccgccgcttcttggctgggcttggcgttcttcgttaccggaatgattatttttgcacggcgcgtactgaaggcgggtaggtag

SEQ ID NO: 45304 - DNA, 588 bp, Neisseria meningitidis
ttgaatattaaactgaaaaccttgttattgcccttcgccacgctggcattgtgcaccaacgcttttgccgccccgcccagcgacgcgtcgttggcgcgttggctggatacgcagaattttgaccgggatatagaaaaaaatatgattgagggctttaatgccggatttaaaccgtatgcggacaaagcccttgccgaaatgccggaagcgaaaaaagatcaggcggcaaaagcctttaaccgctatcgtgagaatgttttgaaagatttgattacgcccgaagtgaaacaggctgtccgcaatactttattgaagaatgcccgtgagatatacacgcaagaagaaattgacggcatgattgccttttacggttcgcctgtcggtcagtccgtcgttgccaaaaatccgcgcttaatcaagaaatcgatgagtgaaatagcagtatcttggactgcattgtcagggaaaatcgcgcgacatcatctgcccgcgtttacggaagagttgcggcgcatcatctgcggcggtaaaaatcccgatgcgggctgtaaacaagccggacaggttgggaaaaggcatcagaaataa

SEQ ID NO: 45305 - DNA, 312 bp, Neisseria meningitidis; identical to SEQ ID NO: 38726

SEQ ID NO: 45306 - DNA, 570 bp, Neisseria meningitidis
atggtacggcgtttgataatcggcatcagtggggcgagcggtttccaatacggcgtgaaggctttggaacttttacgcgcgcaagatatcgaaacgcaccttgtggtatcgaaaggtgcggagatggcgcgcgcttcggaaacggcttatgcgagagatgaggtatatgccttggcggacttcgtgcatccgatcggcaatatcggggcgtgcattgccagcggtacgtttaaaacggacgggatgctggtcgccccctgttcgatgcggacacttgcctcggtcgcgcacggcttcggcgacaacctcttgacgcgtgcggcggatgtggttttgaaggaaaggcggcggctggtgctgatggtgcgcgaaacgccgctgaaccttgcccatttggacaatatgaagcgggtaacggaaatgggcggcgtggtgtttccccctgttcctgcgatgtaccgcaaaccgcagacggcggacgacatagtggcgcacagtgttgcacacgctttgtcgctgttcggaatcgatacaccggattcgacggaatggcagggaatggcggattaa

SEQ ID NO: 45307 - DNA, 126 bp, Neisseria meningitidis; identical to SEQ ID NO: 39360

SEQ ID NO: 45308 - DNA, 693 bp, Neisseria meningitidis; identical to SEQ ID NO: 39213

SEQ ID NO: 45309 - DNA, 939 bp, Neisseria meningitidis
atgagctacacgcaactgacccaaggcgaacgataccacatccaatacctgtcccgccactgcaccgtcaccgaaatcgccaaacagcttaaccgccacaaaagcaccatcagccgcgaaatcagacggcaccgcacccaagggcagcaatacagcgccgaaaaagcccagcggcaaagccggactatcaaacagcgtaagcgacaaccctataagctcgattcgcagctgattcagcacatcgacacccttatccgccgcaaactcagtcccgaacaagtatgcgcctacctgtgcaaacaccaccggatcacgctccaccacagcaccatttaccgctaccttcgccaagacaaaagcaacggcagcacgttgtggcaacatctcagaatatgcagcaaaccctaccgcaaacgctacggcagcacatggaccagaggcaaagtccccaaccgtgtcggcatagaaaaccgacccgctatcgtcgaccagaaatcccgtatcggcgattgggaagccgacaccattgtcggcaaaggacagaaaagcgcattattgaccttggtcgaacgcgttacccgctacaccatcatctgcaaattggatagcctcaaagccgaagacactgcccgggcagctgttagggcattaaaggcacataaagacagggtgcacaccattaccatggataacggcaaagagttctaccaacacaccaaaataaccaaagcattgaaagcggagacttatttttgtcgcccttaccattcttgggagaaagggctgaatgagaacaccaacggactcatccggcaatacttccccaaacaaaccgatttccgtaacatcagtgatcgggagatacgcagggttcaagatgagttgaaccaccgaccaagaaaaacacttggctacgaaacgccaagtgttttattctga

SEQ ID NO: 45310 - DNA, 1053 bp, Neisseria meningitidis
atgaccgtatcccccgtcgccttgcgccgtaagaccgagtgcaagcctcatcccaccgcgcgctattggaaaaaatgcgatgtcgaggcacttttcggactgccgtttttagaacttgtccatcaggcggcagaagtccaccgccaaaatttcaacccgcgcgaaatccagctttccacgctgttgtccatcaaaaccggcggttgtcccgaagattgcgcctactgtccgcaatcggcgcaccacaataccaatctgggcaaagagcagatgatggatgtggatgaaatcgtcgaaaaagccaaaatcgccaaatcgcgcggcgcaagccggttttgtatgggcgcggcatggcgcggccccaaacccaaagacgtggagacggtttccgcaatcatcaaagccgtcaagggcttgggtatggaaacctgcggcacgttcggtatgctcgaagaaggtatggcggaagacttgaaagaggcgggcttggattattacaaccacaacctcgacaccgaccccgaccgctacaacgacatcatccatacacgccggcatgaagaccgtatggacaccttgggcaaagtccgcaacgccggtttgaaagtctgctgcggcggcatcgtcgggatgaacgaaacccgcgccgaacgcgcagggctgattgccagcctcgccaacctcgacccgcagcccgaaagcgtgccgattaaccggttggtcaaagtggaaggtacgccgcttgccgatgccgaggatttggactggacggaatttgtccgcaccatcgccgtggcgcggattacgatgccgcaaagttatgtccgactgtcggcagggcgcagcaatatgccggaagcgatgcaggcgatgtgctttatggcgggcgcgaactcgattttttacggcgacaagctgctgaccacgggcaatccggatgaagacggcgacagaatcctgatggaaaagctcaacctgtatcccttacagtttgagctggaaggcgaggtcgccgaagtggaaaaagcctctgggattaaagtggattattga

SEQ ID NO: 45311 - DNA, 471 bp, Neisseria meningitidis; identical to SEQ ID NO: 38791

SEQ ID NO: 45312 - DNA, 828 bp, Neisseria meningitidis
atggatggagaaggtatgtcggttgggcattatgagaattttcccgtcggttcgctgattttgccgcgcaggttgaggaagccggttcacgcggtgtacgcgtttgcacggacggcggacgatatggcggacgagggcagtatgccgtctgaagccaggttggcggggttggagggtttgcagcgcgagttggacgtgttggcatcgggcggccggtcggcgcatcctttgattgcacgattggatgccgaggcggttgtgccgttcggtttggatttgcagccgttttatgatttgctttctgcattttctcaggatgtggttaaaacgcggtacgcgcatttcggcgagctggccgattattgtcggcgttccgccaaccctgtcggacgcattatgctggctttgtacgggaaaacggatgcggtgtgcgtggcgcaaagcgacggtatctgtacggctttgcaactggtgaatttttggcaggatgtggctgtggattggcaaaagggcagggtttatatcccgcaggacgatttgttgaaattcggtgtttccgaaggacagattgcggagggtagggcggatgcggcgtttcagcggctgatggcgtatgagtgccggcgcgcattccgtatgctgaaggcgggttcgcctttggcgcgcgaattgaaagggcgtatcggtttggaactccgtatgattgtgttgggggcgcagttgattttgcagaaactggacgcgtgccgatacgatgtgtttgcacaacgtccggttttggataagaaggattggttgattatgttgaaacgcgcgttgtggaaatga

SEQ ID NO: 45313 - DNA, 879 bp, Neisseria meningitidis
ttgaaccgccacaaaagcaccatcagccgcgaaatcagacggcaccgcacccaagggcagcaatacagcgccgaaaaagcccagcggcaaagccggactatcaaacagcgtaagcgacaaccctataagctcgattcgcagctgattcagcacatcgacacccttatccgccgcaaactcagtcccgaacaagtatgcgcctacctgtgcaaacaccaccagatcacgctccaccacagcaccatttaccgctaccttcgccaagacaaaagcaacggcagcacgttgtggcaacatctcagaatatgcagcaaaccctaccgcaaacgctacggcagcacatggaccagaggcaaagtccccaaccgtgtcggcatagaaaaccgacccgctatcgtcgaccagaaatcccgtatcggcgattgggaagccgacaccattgtcggcaaaggacagaaaagcgcattattgaccttggtcgaacgcgttacccgctacaccatcatctgcaaattggatagcctcaaagccgaagacactgcccgggcagctgttagggcattaaaggcacataaagacagggtgcacaccattaccatggataacggcaaagagttctaccaacacaccaaaataaccaaagcattgaaagcggagacttatttttgtcgcccttaccattcttgggagaaagggctgaatgagaacaccaacggactcatccggcaatacttccccaaacaaaccgatttccgtaacatcagtgatcgggagatacgcagggttcaagatgagttgaaccaccgaccaagaaaaacacttggctacgaaacgccaagtgttttattcttgaatctgttccaaccactaatacactag

SEQ ID NO: 45314 - DNA, 1074 bp, Neisseria meningitidis
atgaaatacaaagccctctccttactgccgcttgctgccgcccttgccgcctgtgccggggggggggtagccgaaccgcacgtccccgtgtccatccccaccgccacgccgctgaccggtgaggtaaagttatcaagcgataacagcaaaatcgaaaacatcaacaccgccaacactgaaacacatccgccgcgccgcaccagacgctccctctatgcctccccgcaaaacacatcctccggtatttccattcagcagcgggaagtagaaaaaatctatttcggtgttaaatcaccagaaaaatcattcatcttccaaacacccggcggcgcgcaatacgccctttcatcctacgccgaccccatcgtccccagctactcctcccccgacttcaaaattcccgaccgccacgcagggcagcggcttgccgacggcagccgcatctttatctgctgcagcgactccggggctacttcgtatgcggaaattaccaaacaagattatatgaaattcggggcgtggataggccccaacggcgaaatcgacctcttcgccggcggcttccccatcggcaaaacgccgcctcctgcgttctcctggggcagccccacgaccgaaaccgcattgtcaaaaggcaaaatcacttatcaggtttggggcatccgcgtcagaaacgggcaatttgttacttcctcttatacgccgcccaaaggcagctcttggagtggttatcaaaacacccccgtcctttcctttatcaccgccaatttcaacagcaacaaactggcaggcgaaatccgcggcaacagcgattacgggccggatgtggaaattaaagaagcacagattgacggattatccttttccggcgatgccacctccggcggcaaaaccggcaaattggaaggcaagttttttggaaaattcaacggctaccgggacactgaaaccagcataggcggcaaaatcacctttgacggcgaccgctccctcgataccgtattcggcggtgtgagttataaaaaagaacttgaaaacaacactgatacaagtaccacccatctcacaaaataa

SEQ ID NO: 45315 - DNA, 2262 bp, Neisseria meningitidis
atgttacaaatcgaaatcgacggcaaacaagtatctgtggagcagggcgcgacggtgattgaagccgcgcacaagctcggtacttatattccgcatttctgttaccacaaaaaactttccatcgccgccaactgccgtatgtgtctggtgaacgtagaaaaagccccaaaacccctgcctgcctgtgccacgccggttacagacggcatgattgtgcgtacgcattcggcaaaagcccgagaggcgcaggaaggcgtgatggagttcctgctcatcaaccatccgcttgattgtccgacctgcgaccaaggcggggaatgccagttgcaggatttggcggtgggctacggaaaaaccaccagccgctacaccgaagaaaaacgttccgtcgtcggcaaagacatggggcctttggtttccgccgaggaaatgagccgctgtatccactgcacccgctgcgttcgtttcactgaagaaatcgccggtttgcaagaaattgcgatggtgaatcgcggcgaacactccgaaatcatgccctttatcggcaaaacggtggaaaccgagctgtcgggcaacgtcatcgatttgtgtcctgtcggcgcattgaccagcaaaccgttccgcttcaacgcgcgtacttgggaattgaaccgccgcaaatccgtttccgcccatgacgctttgggcagcaacctgattatacaaaccaaagaccataccgtccgccgcgtgttgccgctggaaaacgaagcgattaacgaatgttggctgtctgaccgcgaccgtttcgcctacgaaggcctgtatcacgaaagccgtctgaaaaacccgaaaatcaaacagggcggcgagtggatggacgtggattggaaaaccgcgttggaatatgtccgcagcgcgattgaatgtatcgccaaagacggcaaccaaaaccaagtcggcatttgggccaatccgatgaatacggttgaagagctgtatctggccaaaaagcttgccaatggtttgggtgttaaaaactttgccacccgtttgcgccaacaagacaaacgtctttcagacgaccttaaaggtgcacaatggttgggacaaagcattgaatctttggctgacaacgatgccgtattggtagtcggcgcgaacttgcgcaaagaacagccgctcctgaccgcccgcctgcgccgcgccgccaaagaccgtatggccttgagcgtattggccggcagtaaagaagaattgtttatgccgcttctgtctcaagaagccgcacatcccgacgaatgggcaggccgtctgaaaaaactgtctggcaatgcggaacacgcagttaccgccagcctgaaaaacgctgaaaaagcagcggtgattttgggtgcggaagtgcaaaaccatcctgattacgccgcgatttatgccgccgctcaagagctggcagatgcgaccggcgcagtgctgggtattttgccgcaagccgccaacagcgttggtgcggatgtcttgggcgtgaactcgggcgagagcgttgccgaaatggcaaacgcgccgaaacaggcggtcttgctactcaacgtcgaaccggaaatcgatacggcggacggtgcgaaagccgtggccgcgttgaaacaggcgaaaagcgtgatggcgtttacaccgtttgtcagcgaaacgctgctggatgtgtgcgacgtgttgttgccgattgcgccgtttaccgaaacatcgggcagcttcatcaatatggaaggccgtctgcaatcctttcacggcgtggtacaaggcttcggcgactcgcgtccgctgtggaaagtgttgcgcgtattgggcaacctgtttgacctgcaaggttttgaataccacgataccgccgcgattctgaaagacgcgctggacgcggaaagcctgccgtccaaactggacaaccgcgtgtcttcgactcaaaaagattttcagacggcatcaagccgcctcgtgcgcgtgggcggagtgggcatctatcacaccgatgccatcgtgcgccgttccgcaccgttgcaggcaaccgtccatgccgccgtgcctgccgcgcgtgtgaatccaaacacattggcacgcttgagcctgcaagacggacaaattgctgtcgccaaacaaaacggcgcaagcgtatcggttgctgtcaaagccgatgccggtttgcctgaaaacgtggtgcatctgccgctgcataccgaaaatgccgcgctgggtgcgttgatggacactattgaactggcgggagcttga

SEQ ID NO: 45316 - DNA, 1236 bp, Neisseria meningitidis; identical to SEQ ID NO: 39525

SEQ ID NO: 45317 - DNA, 729 bp, Neisseria meningitidis
atgcctgattacatccgcatctcgcgcgccgcggacagcctgcgcgatatcaaaatcacccctcatttcctgccgcatacggacggttcgtgccttattgaatgcggcaataccaaagtgatttgtaccgcttccatagatgaaaacgtcccgccgtttctgcgcggtaaaaaccaaggctgggtaacggcggaatacgggatgctgcctgcctcaactgcttcccggatgcgccgcgaagcttcggcgggcaaacagtccgggcgcacacaagaaatccaacgccttatcgggcgttcgctacgcgcggtcgtagatatggaaaaactcggcgaacgacaaatcttgattgactgcgatgtgattcaggcagatggcggtacgcgcacggcttcgattaccggtgcgtttgtcgcgctgcaaatcgccgtcggcaaactggtttcagacggcattttgagtgaaaaccccatccgcgaagccgttgccgctgtgtcagtaggcgtagtgaacggcgtgccgcttttggatttggattatcccgaagactccggttgcgacagtgatgtgaatatcgtcatgaccgcatcgggaaaaatcatcgaaatccaaggtacggcggaagacgcgccgttcagtttggacgaattgggcaaactggttgcactggcgcaaaaaggcataggcgaactgctgcaacaccagcaaaatgcgttgtccgccgcctga

SEQ ID NO: 45318 - DNA, 603 bp, Neisseria meningitidis; identical to SEQ ID NO: 38953

SEQ ID NO: 45319 - DNA, 402 bp, Neisseria meningitidis; identical to SEQ ID NO: 39145

SEQ ID NO: 45320 - DNA, 432 bp, Neisseria meningitidis
atggatatccaaaccatcctcgaaaaaaccctgcccggcctgggctacgaactggtcgattttgaactgaccgcgcaaggaacattgcgcgtgttcatcgacaaagaaggcggcattaccgtcgaagactgcgcaaccgtcagcaaccacttgagccgcgtcttcatggttgaagacatcgactacaaaaacctggaaatttccagccccggactcgaccgccccttgaaaaaagccgccgacttcgtgcgctttgccggtcagaatgccaaaatcaaaacccgcctgccgatagacggtcaaaaaaactttatcggtaaaatcgaaggctgcgaaaacgacactgttaccgtttccttcgacggcaaaaccgtacaaatcgaattgggcaacatcgacaaagcccgcctgcgccccgaattcaaattctaa

SEQ ID NO: 45321 - DNA, 498 bp, Neisseria meningitidis; identical to SEQ ID NO: 39756

SEQ ID NO: 45322 - DNA, 252 bp, Neisseria meningitidis
ttgttggacggcattatgcgcaaagcctgccgcaaccgccggctgtgggaagtgcaaaccaaacgcaaccgatatttgtcgaagacccgttatgtggtcgaacaaagtttcggtacgatgccccgtaaattccggtatgcgcggtcaacctatttcggactgattaaagtgagtgcgcaaagccacgtgaaggagatgtgtttgaacctgttgaaagccgccaacaggctaagtgcgcccgctgccgcctaa

SEQ ID NO: 45323 - DNA, 2580 bp, Neisseria meningitidis
atgcgatacgacaaattaaccgccaaattccaacaagcccttgcagaagctcagagtttggcgttggctgcggacggcagctatctggaagcaggctttgtgttaaaagccctgcttgacgaccaaaacagcggagccgccgcgttgctggcgcattcgggcgtgaacgtgccgcaggtgaaacagcgtttgcagcagcatttgaacagcctgccgaaagtgtccggccagggcggcgacattctgcccagccgcgaattgcaggcggtgttgaacctgatggacaaagccgcaaccaaacgcggcgatgcctatatcgccagtgaacttttcctgcttgccttggtgcagcagaacgatgcggccggcaaaattttgaaagaagccggcgcgaccgaacaaaacatcaatgccgcaatcgatgcggtacgaggaggacaaaacgtgaacgatgccaatgccgaagaccaacgcgatgcgctgaaaaaatatacgcttgacctgacccagcgcgcccgcgacggcaaacttgaccccgttatcggccgtgacgacgaaatccgccgcgcgattcaagtgctgcaacgccgcaccaaaaacaaccccgtgctgattggcgaaccgggcgtgggtaaaactgccattgttgaaggcttggcgcaacgtatcgtcaacggcgaagtgcctgaatccctgcgtaacaaacgccttttggttctggacttggcggctttgattgccggcgcgaaataccgcggcgaatttgaagaacgcttgaaaggcgtgttgaacgatttggcgaaagacgacggcaacactctgattttcatcgacgaaatccatactttggtcggcgcaggcaaaaccgacggtgcgatggatgcgggcaatatgctgaaaccggctttggcacgtggcgaattgcactgtatcggcgcgaccactttggacgaataccgccaatacatcgaaaaagatgcggcactcgaacgccgcttccaaaaagtattggtcggcgagccaagcgtggaaaacaccatcgctattttgcgcggtttacaggagcgttatgaaatccaccatggtatcgatattaccgaccctgctatcgttgccgcagcggagttgagcgaccgctacatcaccgaccgcttcctgcccgataaagcgattgatttgattgacgaagccgccagccgtgtcaagatggaaaaagaaaccaagccggaagcaatggacaaaatcgaccgccgtctaattcagcttcggatggaaaaggcgcacgttgaaaaagaaaaagacgatgccagcaaaaaacgtttggaactgatagacgaggaaatcaacggtctgcaaaaagaatacgccgatttagacgaaatctggaaagccgaaaaagcaatttcagacggtgctgctaatattaagaaacaaattgacgaagtcaaaattaaaatcgaacaggcaaaacggcaaggcgatttggcactggcttcaaaattgatgtatgaagatttggagcatttggaaaaacagcgtgcagccgccgaacgggcagatacggacagcacaaaaccggcaaacaaactcttgcgtaataatgtcggcgcagaggaaatcgcagaagttgtttcccgtatgaccggcattcctgtgtcaaaaatgatggaaggcgaacgtgacaagttgctgaaaatggaagaagtgttgcaccgccgcgtagtcggtcaagacgaagccgtgcgtgccgtgtccgacgctatccgccgcagccgttccggtcttgccgacccgaataaaccctacggcagcttcctgttcttgggcccgaccggcgtgggtaagaccgaattgtgcaaggcattggcaggcttcctgttcgacagcgaagatcatctgattcgtatcgatatgtccgaatacatggaaaaacatgctgttgcccgcctaattggtgcgcctccgggctatgtcggctacgaagaaggcggctacctgactgagcaagtccgccgcaaaccatacagcgtgattcttttggatgaagtggaaaaagcccatccggacgtgttcaacatcctgctgcaagtattggatgacggtcgtttgaccgacgggcaaggcaggacggtagattttaaaaataccgtgattgtgatgacttccaacatcggcagccagcacatccaacaaatgggcattcaggattacgaagcggtaaaagaagttgtgatggaggatgtgaaagaacatttccgtcctgaaatgatcaaccgcatcgacgaagtggtcgtgttccacggactggatcaggataatatccgcaacattgcgaaaatccagctcaaaggcttggaaaaacgtttggaaaaacaaaacctccgcctgactgtttccgatgccgctctggacatcatcgccaaagccggtttcgacccgatttacggcgcacgtccgctcaaacgcgccatccagtcggaaatcgaaaacccgctggcaaaagccctgcttgccggaaactatgcgcccgaaagcgaaatcagggtagaagccgacggcgacagactgaaatttgcctga

SEQ ID NO: 45324 - DNA, 900 bp, Neisseria meningitidis; identical to SEQ ID NO: 36345

SEQ ID NO: 45325 - DNA, 1356 bp, Neisseria meningitidis; identical to SEQ ID NO: 38710

SEQ ID NO: 45326 - DNA, 642 bp, Neisseria meningitidis; identical to SEQ ID NO: 38347

SEQ ID NO: 45327 - DNA, 1410 bp, Neisseria meningitidis
atgaaatacatcagcacgcgcggcgaaaccgcacacaaaccgttcagcgaagttttattgatggggcttgcacccgacggcggcctgatgctgccggaacattatccgcaaatcgggcgggaagccttggacaaatggcgcggtttggcttatcccgaattggcgtttgaaattatgcgcctgttcgttaccgacattccggaggacgatttgcgcgatattctgaaccgtacttacacggaagcggcgttcggtactaaggaaatcacccccgtccgcacgctttcagacggcatcaaaatccaagccttgtccaacggcccgacgctggcgttcaaagatatggcgatgcagtttttgggcaatgcgtttgaatatgttttaaacaaagaaggcaaaaaactcaatatcttgggcgcaaccagcggcgatacgggttcggctgcggaatatgccttgcgcggcaaaaaaggtgtgaatgtatttatgctgtcgcccgatggcaaaatgagcgcgttccaacgtgcgcagatgtacagcctgcaagacgggaatatccacaatatcgccgtgaagggtatgtttgacgactgtcaggatattgtgaaggcggtgcaaaacgatgccgcgttcaaggaaaaataccatatcggtacggtcaattcgattaactggggacgcatcgtcgcgcaagtggtttattactttgccggctatttcaaagcgacgcaaagcaatgacgagcaagtcagcttttgcgtgccgagcggcaacttcggcaacgtttgcgcgggacatattgccaaacagatgggcttgcccatccgccgcctgattgtcgcgaccaatgaaaacgatgtgttggacgagtttttcaaaaccggcgcgtaccgcccgcgcaacagcgcgcatacttatgttacctccagcccatctatggacatttccaaagcgtccaatttcgagcgtttcgtgttcgacctgatggatcgcgatcctcaggaaatcaatacgctgtggacggaagtcgcggcgggcaagggctttgacttgcagtttgccttagacaaagtcggcggcaaatacggctttacctccagcaagtccacccacgccgaccgcctcgccaccatcaaacaggtttacgagcaagaccaagaactcatcgacccgcacactgccgacggcgtaaaagtcgcccgcgaagtgcgcgaagaaggggaaacggtggtttgtttggaaaccgcgttggcagcgaaattcgatgcgaccatacgcgaagccgtcggcgatgccgccattccgcgccctgccgcgctggaaggtttggaaaacctgccgcagcgcgtgcaaaccgtgccgaacagtgcggatgcggtaaaaggcatcatcgaacaaacccttgcctga

SEQ ID NO: 45328 - DNA, 321 bp, Neisseria meningitidis; identical to SEQ ID NO: 43250

SEQ ID NO: 45329 - DNA, 714 bp, Neisseria meningitidis; identical to SEQ ID NO: 38766

SEQ ID NO: 45330 - DNA, 624 bp, Neisseria meningitidis; identical to SEQ ID NO: 36421

SEQ ID NO: 45331 - DNA, 324 bp, Neisseria meningitidis; identical to SEQ ID NO: 39252

SEQ ID NO: 45332 - DNA, 423 bp, Neisseria meningitidis; identical to SEQ ID NO: 38711

SEQ ID NO: 45333 - DNA, 1116 bp, Neisseria meningitidis; identical to SEQ ID NO: 39337

SEQ ID NO: 45334 - DNA, 2526 bp, Neisseria meningitidis
ttgaaaaacaacagacaaatcaaactgattgccgcctccgtcgcagttgccgcatcctttcaggcacatgctggactgggcggactgaatatccagtccaaccttgacgaacccttttccggcagcattaccgtaaccggcgaagaagccaaagccctgctaggcggcggcagcgttaccgtttccgaaaaaggcctgaccgccaaagtccacaagttgggcgacaaagccgtcattgccgtttcttccgaacaggcagtccgcgatcccgtcctggtgttccgcatcggcgcaggcgcacaggtacgcgaatacaccgccatcctcgatcctgtcggctactcgcccaaaaccaaatctgcactttcagacggcaagacacaccgcaaaaccgctccgacagcagagtcccaagaaaatcaaaacgccaaagccctccgcaaaaccgataaaaaagacagcgcgaacgcagccgtcaaaccggcatacaacggcaaaacccataccgtccgcaaaggcgaaacggtcaaacagattgccgctgccatccgcccgaaacacctgacgctcgaacaggttgccgatgcgctgctgaaggcaaacccaaatgtttccgcacacggcagactgcgtgcgggcagcgtgcttcacattccgaatctgaacaggatcaaagcggaacaacccaaaccgcaaacggcgaaacccaaagccgaaaccgcatccatgccgtccgaaccgtccaaacaggcaacggtagagaaaccggttgaaaaacctgaagcaaaagttgccgcgcccgaagcaaaagcggaaaaaccggccgttcgacccgaacctgtacccgctgcaaatactgccgcatcggaaaccgctgccgaatccgccccccaagaagccgccgcttctgccatcgacacgccgaccgacgaaaccggtaacgccgtttccgaacctgtcgaacaggtttctgccgaagaagaaaccgaaagcggactgtttgacggtctgttcggcggttcgtacaccttgctgcttgccggcggaggcgcggcattgatcgccctgctgctgcttttgcgccttgcccaatccaaacgcgcgcgccgtaccgaagaatccgtccctgaggaagagcctgaccttgacgacgcggcagacgacggcatagaaatcacctttgccgaagtcgaaactccggcaacgcccgaacccgctccgaaaaacgatgtaaacgacacacttgccttagatggggaatctgaagaagagttatcggcaaaacaaacgttcgatgtcgaaaccgatacgccttccaaccgcatcgacttggatttcgacagcctggcagccgcgcaaaacggcattttatccggcgcacttacgcaggatgaagaaacccaaaaacgcgcggatgccgattggaacgccatcgaatccacagacagcgtgtacgagcccgagaccttcaacccgtacaaccctgtcgaaatcgtcatcgacacgcccgaaccggaatctgtcgcccaaactgccgaaaacaaaccggaaaccgtcgataccgatttctccgacaacctgccctcaaacaaccatatcggcacagaagaaacagcttccgcaaaacctgcctcaccctccggactggcaggcttcctgaaggcttcctcgcccgaaaccatcttggaaaaaacagttgccgaagtccaaacaccggaagagttgcacgatttcctgaaagtgtacgaaaccgatgccgtcgcggaaactgcgcctgaaacgcccgatttcaacgccgccgcagacgatttgtccgcattgcttcaacctgccgaagcaccgtccgttgaggaaaatgtaacggaaaccgttgccgaaacacccgatttcaacgccaccgcagacgatttgtccgcattacttcaaccttctgaagtacctgccgttgaggaaaatgcagcggaaatcgttgccgatgatttgtccgcactgttgcaacctgctgaagcaccggccgttgaggaaaatgtaacgaaaaccgttgccgaaatacctgatttcaacgccaccgcagacgatttgtccgcattacttcaaccttctgaagtacctgccgttgaggaaaatgcagcggaaaccgttgccgatgatttgtccgcactgttgcaacctgctgaagcaccggccgttgaggaaaatgcagcggaaatcactttggaaacgcctgattccaacacctctgaagcagacgctttgcccgacttcctgaaagacggcgaggaggaaacggtagattggagcatctacctctcggaagaaaatatcccaaataatgcagataccagtttcccttcggaatctgtaggttctgacgcgccttccgaagcgaaatacgaccttgccgaaatgtatctcgaaatcggcgaccgcgatgccgctgccgagacagtgcagaaattgctggaagaagcggaaggcgacgtactcaaacgtgcccaagcattggcgcaggaattgggtatttga

SEQ ID NO: 45335 - DNA, 1911 bp, Neisseria meningitidis
atgactctggaaaccctgatcgccctgccgcgcaacatcaagaaaatctgtttcctcatacacgattttctgatgattttcattgccttttggttcacccaaagcctaaaggccgactactcggacgaatggttcgattttgccaactggcagtcttttttgctgactgccttgctgaccatcacattatttatccgaatggggctttaccgcgccgttacacgcttcgtcagcttccgcatcctctccaccgcgctggcaggcagcattgtttccgccgtcctgttcttcctcaacacattgatttttgaagaaaggctgcgcctcgccctgccgattgtctatttcttactgctgtttgtttccgtgaccggctcgcgtatggttttgcgcggactgttgtccgaacaccccaaaaaacagatgatccccgtcattatttacggcgcggggcgttcgggcagacagcttctcgaggtcgtcaaacaaatgcgcgaatattccgccgccgcctttgtggacgacgaccccaaactgtggcacaccgtcatctgcggccttgccgtttaccgccccgacgacatctccgccctcatcgaacgctacggcgtggaaaaaatcctgcttgccattcccagcgcgactcaggaacaacgccgccgaatcatcaacaaactggaagcctatccctgcgaagtgttgaccattcccggaatgaaagacctgatggacgggaaaatcagcatcggcacgctcaaaaaaatctccgtgtccgacctgctcgggcgtgattccgtcgcgcccgacaaccgcctcatgagtgccgacatcgaaggcaaaaccgtcatggtaaccggcgcgggcggctccatcggttcggaactctgccgccagattatccgccgccgccccgaaaagctgctgctgttcgagttatccgaattcgccctgtacgccatcgaaaaagaattgcgcgaaacctgcatccaaaaacgcctcaacaccgaaatcctgccctttctcggttcggtgcaaaaccgcaccctgctcgaacacgtcatgaccgccttttccgttgcgaccgtctatcacgccgccgcctacaaacacgtccccatggtcgaattcaacaccgtcgaaggcatacgcaacaacatcttcggcacactcgaatgcgcgcttgccgccacggcttcgggcgtggaaaccttcgtcctcatctccaccgacaaagccgtccgccccaccaacacgatgggcgcgggcaaacgcatggcggaactctgccttcaggcactcgccgccgaacccggacaaaaaacccgcttcagcatggtacgtttcggcaatgttttaggttcgtccggctccgttgtcccgctgtttgaaaaacagattgcagaaggcggcccgcttaccctgacccaccccgaaatcacacgttatttcatgaccatacccgaagccgcccaactcgtcatacaggcaggcgcgatgggtacgggcggcgacgtattcgtcctcgacatgggtgaatccgtcaaaatcatcgaccttgcccgccaaatgattaccctaagcggcctcaaacccaacacacccgaacaacccgacggcgacatcgaaatcctcattaccggactgcgtcccggcgaaaaactctacgaagagctgctcatcggcgacaacgtccgcaaaaccgcccatccgcgcattatgacggctgacgaggcgatgctgccgtggcacgagctctctgtcctgctcgaccgcatccgtgcggcctgcgaccgttacgaccagcaggcaatccgcaccctgctcatcaacgccccgaccggctttaccccaagcgacggtatctgcgacctgctttgggtacgagaaacacacagaaaaaatgccgtctga

SEQ ID NO: 45336 - DNA, 393 bp, Neisseria meningitidis; identical to SEQ ID NO: 38784

SEQ ID NO: 45337 - DNA, 738 bp, Neisseria meningitidis
atgattattttggacaaggtttccaagcattaccaaacgcgcgacaagacccgttttgccgctgtcgagccgaccagcctcgaaatccgcgacggtgaaatcttcgggctgatgggttattcgggtgcaggcaaatccaccctgttgcgcctgattaacctgttggaacgtcccgacagcggcaaggtcaacgtctgcggacaagagctgaccgcgctcgatgccgccgcattgcgtcaggctcggcagaatatcggcatggtgtttcagcagttcaacctgttgaacaaccgcaccgtcgccggcaacgtcgccttcccattggaaatcgccggatggccgtctgaaaaaatcaaagcgcgcgttgccgaatgtctcgaaatcgtcggactgaccgaacgcgccggccactatcccgcccagctttcaggcgggcagaaacagcgtgtcggcatcgcccgcgcactcgcgcccaaaccccaagtcatcctcgccgacgaacccacttccgccctcgaccccgccaccacgcgcagcgtcttggaatgtttggaagacatcaacaaacgattcaacgtaaccatcgtcatcgtaacccacgaaatgagcgttatcagacgactgtgcgaccgcgccgccctgttggataaaggcaaagtcgtcgaaatcgtcgaagtacgcggcaaccaaatccacgcccgatccgacattgggcgcgaactgattcgggaggactga

SEQ ID NO: 45338 - DNA, 1260 bp, Neisseria meningitidis; identical to SEQ ID NO: 38128

SEQ ID NO: 45339 - DNA, 2847 bp, Neisseria meningitidis; identical to SEQ ID NO: 38622

SEQ ID NO: 45340 - DNA, 1539 bp, Neisseria meningitidis
atgaatatgctgggagctttggcaaaagtcggcagcctgacgatggtgtcgcgcgttttgggatttgtgcgcgatacggtcattgcgcgcgcattcggcgcgggcatggcgacggatgcgttttttgtcgcgttcaaactgcccaacctgcttcgccgcgtgtttgcggagggggcgtttgcccaagcgtttgtgccgattttggcggaatataaggaaacgcgttctaaagaggcgacggaggcttttatccgccatgtggcggggatgctgtcgtttgtgctggtcatcgttaccgcgctgggcatacttgccgcgccttgggtgatttatgtttccgcacccggttttgccaaagatgccgacaaatttcagctctccatcgatttgctgcggattacgttcccctatatcttattgatttcactttcctcttttgtcggctcggtactcaattcctatcataaattcagcattccggcgtttacgcccacgtttctgaacgtgtcgtttatcgtattcgcgctgtttttcgtgccatatttcgatcctcccgttaccgcactggcatgggcggtttttgtcggcggcattttacaactcggcttccaactgccctggctggcgaaactgggttttttgaaactgcccaaactgaatttcaaagatgcggcggtcaaccgcgtcatgaaacaaatggcacctgcgattttgggcgtgagcgtggcgcagatttctttggtgatcaacacgattttcgcgtcttatctgcaatcgggcagcgtttcatggatgtattacgccgaccgcatgatggagctgcccagcggcgtgctgggggcggcactcggtacgattttgctgccgactttgtccaaacactcggcaaaccaagatacggaacagttttccgccctgctcgactggggtttgcgcctgtgtatgctgctgacgctgccggcggcggtcggactggcggtgttgtcgttcccgctggtggcaaccttgttcatgtaccgcgaattcacgctgtttgacgcgcagatgacgcaacatgcgctgattgcctattctttcggtttaatcggtttgatcatgattaaagtgttggcatccggcttttatgcgcggcaaaacatcaaaacgcccgtcaaaatcgccatcttcacgctcatctgcacgcagttgatgaaccttgcctttatcggcccactgaaacacgtcggactttcgcttgccatcggtctgggcgcgtgtatcaatgccggattgttgttttacctgttgcgcagacacggtatttaccaacctggcaagggttgggcggcgttcttagcaaaaatgctgctctcgctcgccgtaatgggcggcggactgtgggcggcgcaggcttgcctgccgtttgaatgggtacgcgccggcggaatgcggaaagcggggcagctctgcatcctgattgccgtcggcggcggactgtatttcgcatctctggcggctttgggcttccgtccgcgccatttcaaacgggtggaaagctga

SEQ ID NO: 45341 - DNA, 132 bp, Neisseria meningitidis
ttgctgcccacgcgttctgtttcaagtttattattgggtgaatatttggaatttgaagaaaacggtacaaagattgctgcggaaatcgacagtgcatggcatttttgggcgcggcttgtcggatttcaataa

SEQ ID NO: 45342 - DNA, 1371 bp, Neisseria meningitidis
atgatcaaccccatcgcctcgctttcccctttagacggccgttatgcccaatccgttgaagcattgcgcccgattttttcagagtacggcctgatgaaggcgcgcgtcaaagtcgaattaaactggctcaaagccctggccgccgagccgaagattgtcgaagtgccgcccttcagtgccggaacgcttgccgaaatcgacacggtgattgaaaacttttcattggaagacgcggccgccgtcaaagccatcgaagccacgaccaatcatgatgtcaaagccattgaatattggctgaaaaaacgttttgccgaagtgccggaagtcgccgccgtgagtgagttcatccacttcgcctgcaccagcgaagacatcaacaacctgtcccacgctttaatgctgcaagaagcgcgtgaggctgttttgctgccgaagctggccgaaatcatcgaaaaactgaccgctatggcgcacgaccttgccgccgtcccgatgatgagccgcacccacggccagcccgccacgcccacaacactgggcaaagaaaccgccaacgtcgtgtaccgcctgcaacgccagttcaaaatccttcaggcgcaagaattcctcggcaaaatcaacggtgcggtcggcaactacaatgcccatatggccgcttatcccgatgtggattgggaaacccactgccacaacttcgttgaaatcggcctcggtttgaccttcaacccctataccatccaaatcgagccgcacgactatatggctgaattcttccaaaccctcagccgcatcaacacgattctcatcgactttaaccgcgacgtttggggttatatttcattgggttacttcaaacaaaaagtcaaagcgggcgaagtcggctcttccacgatgccgcacaaagtcaaccccatcgattttgaaaactccgaaggcaacctcggtatggcaaacgccgtattgggttttttggcggaaaaactgcccgtctcacgctggcagcgcgatttgaccgacagcaccgtcttacgcaatatgggcgtgggcgtgggctatgccgtgttgggctttgccgcccacctgcgcggtctgaacaagctcgaacccaaccctgccgcgcttgccgccgatttggatgccacttgggagctgctcgccgagccgattcaaaccgtgatgcgtcgttacggcgtggccaatccttacgaaaagctcaaagacctgacgcgcggcaaaggcggcattacgcccgaagtgctgaaagtcttcatcggatcgttggaaattccggcagaagccaaagcaaaattgcttgagctgactcctgcactgtatgtgggcaaggctgaagcgttggcgaaacggatttga

SEQ ID NO: 45343 - DNA, 606 bp, Neisseria meningitidis
atgaagaaaatcggactgttcggcggcactttcgacccgatacacaacgggcatctccacatcgcccgcgcctttgccgacgaaatcggcttggacgcggttgttttcctgccgacaggcggcccgtatcacaaagacgcagcctccgcttccgccgccgaccgccttgccatggtcgaactggcgacggcagaagacgcgcgttttgccgtcagcgattgcgacatcgtccgagaaggtgcaacctatacttttgataccgtccaaatcttccgccagcagttcccatccgcgcaactctggtggctgatgggcagcgacagcctgatgaagctgcacacatggaaaaaatggcagatgctcgtgcgcgaaaccaatatcgccgtcgccatgaggcagggcgacagcctgcaccaaaccccgcgcgaactgcacgcgtggctgggcaagtcccttcaggacggcagcgtccgcatcttgtccgccccgatgcataatgtgtcgtcaacggaaatccgccgcaaccttgccagccaaggcgtttcagacggcatcccgcctgccgccgcacgctacatccgcgaacacggtttgtatgaaaaataa

SEQ ID NO: 45344 - DNA, 438 bp, Neisseria meningitidis
atgatagggcttttaatcatcacacacgaaaccataggcgaagcctaccgcaagctggcacatcattttttcccgggcgggctgcctgaaaacgtccgcatactcggcgtgcaaccgacggaagaccaagacgacatcatcaacaacgccattgccgcgcttcaggaatttcccgacaacgacggcgtgctgattatgaccgacatcttcggcgcgaccccctgcaatgccgcccgccgcctcgtgcgcgaaaacaaatcggcgattttgaccgggctgaacgcgccgatgatggttaaggccgtccaatattcgccggcggcggaagaccttgccgcctttaccgaatgtgtcagagaggcggctgtaaaaggcattttcgccatcacgtccgcgcccgaagatttggtgtgccggcgcagcggcgatgccgtctga

SEQ ID NO: 45345 - DNA, 723 bp, Neisseria meningitidis
atgaatccgcgtataaaggccatgtcgggtgtgatgctgcaagccttgtctgccgcgcagcaggatgttttggtcgatttgtggcaagtggacttgcggccgctgggcggtcgggttttctatttctgcaatcaggtcaacgagcggggtacggcggttgtctggcagggacaggcatatgagccttatccgattaaggctgacggctttgaatcaacttcgcaaggcgcgggtaaccgtccgacgctgacggtatcgaatctcttgggtttgattacgggcgcggcggatcagttcggtcagctcgtcggcgtgctggttgtgcgccgtcaaacctatgccaagtttttagatgcggtcaatttccagtccgggcgcaatccgaccgcagacccgatgcaggaagtcgtcggcaaatatttggttgaacggatgacggcattgaatgcagaaacggcaaccttcgaacttgccgcgccgtccgaatcggatggttcggtcattcccgcccgtattatgctggcaaatacctgctgctggcagtatcgcggcgaagggtgcggttatacggggcgtgcggttgccgaccgtttcgatatgcccacggacgatgcgtccaaagacgtatgcagcaaaacactgacaggatgtagggcgcggtttggcgcgacggcagttttgccgttcggcggtttcccatctagtgataaggtaacgacatga

SEQ ID NO: 45346 - DNA, 1350 bp, Neisseria meningitidis
atgaaattaccggtgatgtcgcccgaacattcggcgcaacttcaggcgtttgaggcaaaaatcctgtccaatcacgccaaaatcgaggcgtggttccgcacgcagtggagcgtacaccgcccgccgttttacggttcggtcgatatacgcaatgccggttacaaaatttcgtctatcgatatgaatttgttccccggcggcttcaataatctgaatcccaactttatcccgctggcggcggttgccgcgcaagatgcggtgcaacgcgcctgcgaaacggcgaaatccgtattgattattcccgaaaaccacacgcgcaatacgttttacctgcaaaacatttacgccctcggcgagattttgcgttcggcagggtatgaagtgcgcttgggcagcctgaatccggaagtaaccgaaccgaccgaatttgaaaccgcattgggcgacaaaatcctgttggaacctttattgcgtacccgcgaccgcgtccatcttgcagacggcttttcgccttgcgtggttttgttgaacaacgatttgtccgccggtattcccgacatcctcaaaggcatcagccaaaccgttttgccgccgttgcacggcggttggacgacgcgccgcaaaacaaatcatttcggcgcgtacaaccaagttgccgccgaatttgccaagttaatcggcatcgacgaatggcaaattaacccttattttgaaaaaatcggcggtttggacttccaagggcgtgaaggcgaagacgcgttggcggaggcggtagaacgtgtgctggcgaaaattcaagccaaatacgacgaatcgggcattaccgacaaacctttcgtcatcgtcaaagccgatgccggcacttacggcatgggcgtgatgagcgtcaaatccgccgacgaagtgcgcggattgaaccgtaaaaaccgcaataaaatggcgaaagtcaaagaaggtttggaagtcagcgaagtgattgtccaagaagggatttatacttatgaaaccttaaacagcgcggtgtgcgaacccgtcgtgtatatgatggaccgcttcgtcatcggcggctttttccgcgtacacgaagggcgcggtgcggacgaaaacctcaacgccggcggtatggtgtttgttccgctgtctaacagcattcctaccggtaacggcgataattcccaagaagcgcccgaagcctgcaagcgcgtattcgaacaatgggactcgctgggtatgccgcgctctgaaaaagactgcgacgtggacaacgaacacaaccgcctctacgtttacggcgtaatggcacgcctgtcgcttctggcggcttcaatcgagttggaagaaacggcgtaa

SEQ ID NO: 45347 - DNA, 966 bp, Neisseria meningitidis
atgttgcgtttgaccgcattgaccctctgcaccgtcctcgccttgggcgcgtgttcgccgaaagattccgactctgccccacaagccaaagaacaggcagtttccgccgcacaatccgaaggcgcgtccgttaccgtcaaaaccgcgcgcggcgatgttcaaataccgcaaaaccccgaacgcatcgccgtttacgatttgggtatgctcgacaccttgagcaaactgggcgtgaaaaccggtttgtccgtcgataaaaaccgcctgccgtatttagaggaatatttcaaaacgaccaaacctgccggaactttgttcgagccggattacgaaacgctcaacgcttacaaaccgcagctcatcatcatcggcagccgcgcagccaaagcgtttgacaaattgaacgaaatcgcgccgaccatcgaaatgaccgccgataccgccaacctcaaagaaagtgccaaagagcgtatcgacgcgctggcgcaaatcttcggcaaaaaggcggaagccgacaagctgaaggcggaaatcgacgcgtcttttgaagccgcgaaaactgccgcgcaaggcaaaggcaaaggtttggtgattttggtcaacggcggcaaaatgtccgccttcggtccgtcttcacgcttgggcggctggctgcacaaagacatcggtttgcccgctgttgacgaagccatcaaagaaggcagccacggtcagcctatcagctttgaatacctgaaagagaaaaatcccgactggctgtttgtcctcgaccgaagcgcggccatcggcgaagagggtcaggcggcgaaagacgtgttgaataatccgctggttgccgaaacaaccgcttggaaaaaaggacaggtcgtgtacctcgttcctgaaacttatttggcagccggtggcgcgcaagagctgctgaatgcaagcaaacaggttgccgacgcttttaacgcggcaaaataa

SEQ ID NO: 45348 - DNA, 291 bp, Neisseria meningitidis; identical to SEQ ID NO: 38495

SEQ ID NO: 45349 - DNA, 1116 bp, Neisseria meningitidis; identical to SEQ ID NO: 38517

SEQ ID NO: 45350 - DNA, 1392 bp, Neisseria meningitidis
atgcaagtgtttttagacaatcccaaagccttttttgaaaccgtcagcggctgggtttggggacctgttatgttgatgctgctggtcggcacgggtattttgctgactgttttattaaaaggtttgcagttcacgatgttgggttatgcgctgaaacaggcgtttgtgccgccaaagaagcataaaagcggcgaaggccacgaaggcgatatttcccatttcgcggcgttgatgaccgcgctgtccgccaccatcggtacgggtaacatcgccggcgtggcgactgcggtggtaaccggcggcccgggcgcggtattttggatgtggatgaccgccattttcggcatggccaccaaatacggcgaaggcgtgttggcggtgaaataccgcgtcaacaattccaaaggcgaaatgtccggcggcccgatgtattacatcgaaaaaggcttgggcaaaaactggaaatggatggcgttggcgttcgctttattcggcacattcgcttccttcggtatcggcagctcggtgcagtccaactcggttgcacaggcggtgcaaaccagcttcggtatcgaacctgcctataccggcattacgttgaccgttctgactgccgttgtcgttttaggtggtattaaaggcatcgccaaagccgcttctttcatcgtgcctgctatggcggtgttttatgtgttgggcggtctttccattatcgcgattaattccgatgcactgatgcctgccgtcaagctaattttctccgatgcgttcagcgcgcaggcagtggcgggcggcgctatcggtacggtcatccgctacggcgtggcgcgcggcgtgttctccaatgaggcgggtatgggttctgcgcctattgccgccgcagccgcgaaaaccgaccatcccgtccgtcaggccttggtttctatgaccggtacgtttttggataccatcgtcgtttgctcgattaccggcatcgtgttggtaatgggactgctcggcgcgggcggcgagtttgtcaaacctgaagtgagcggcgcggcactgacaaccgtcacattccaaaaaatgctgcccggcatcggcggctggattgttaccatcggcctgattttctttgcctactcaaccattttgggctggtgctattacggcgaaaaatgcgcggtgtatgttttcggcgagaaatttgccggtttgtaccgcgtgggttatgtttcttccgttatgctgggtaccgtgttgagccttgatttggtgtggctggcttcggacacattcaacggcttgatggcattgcccaacctgattgcacttttattgatggcgaaagtcatcgtcaatgaaacgcgcgacttcaaacaaaaaatcacaaacggcgaattgccgcattaa

SEQ ID NO: 45351 - DNA, 132 bp, Neisseria meningitidis; identical to SEQ ID NO: 41520

SEQ ID NO: 45352 - DNA, 777 bp, Neisseria meningitidis
atgaactttatccgttccgtcggggcgaaaaccctcggccttattcaatccctcggcagtatcacgctgtttctgctgaacattctggcgaagtccggtacggctttcgtccgtccgcgcctgagcgtgcgccaagtgtatttcgccggtgtgctgtcggtgttgattgttgccgtttcggggctgtttgtcggcatggtcttgggtttacagggctatacgcagttgtcgaaattcaaatccgccgatattttgggctatatggtcgcggcttcgctattgcgcgagctgggtccggtattggcagcgattttgtttgccagcagcgcgggcggtgcgatgaccagcgaaatcggtctgatgaaaacgaccgaacagctcgaagcgatgaatgtgatggcggtaaaccctgtcgcccgcgtggttgcgccgcgcttttgggcgggcgtgttttccatgccgcttttggcttcgattttcaacgtggcgggcattttcggtgcgtatttggtcggtgtaagctggctgggcttggacagcggcattttctggtcgcaaatgcagaacaacatcacgatacattacgatgtaatcaacggtctgatcaaatccgccgcgttcggcgtggcggtaacgctgattgccgtgcatcagggcttccactgtgtcccgacttcggaaggcattttgcgcgccagcacgcgtacggtggtttcgtccgccctgacgattttggcggtcgattttatattgaccgcgtggatgtttacagattga

SEQ ID NO: 45353 - DNA, 840 bp, Neisseria meningitidis
atgcaaaaccacgttatcagcctggcttccgccgcagaacgcagggcgcacattgccgataccttcggcaggcacggcatcccgtttcagtttttcgacgcactgatgccgtctgaaaggctggagcaggcaatggcggaactcgtccccggtttgtcggcgcacccctatttgagcggagtggaaaaagcctgctttatgagccacgccgtattgtggaagcaggcattggacgaaggtctgccgtatatcgccgtatttgaggacgacgttttactcggcgaaggcgcggagaaattccttgccgaagacgcttggctgcaagaacgctttgaccccgattccgcctttatcgtccgcttggaaaccatgtttatgcacgtcctgacctcgccctccggcgtggcggactactgcgggcgtgcctttccgctgttggaaagcgaacactgggggacggcgggctatatcatttcccgaaaagcgatgcggttttttttggacaggtttgccgttttgccgtccgaagggctgcaccccgtcgatctgatgatgttcagcgattttttcgacagggaaggagtgccggtttgccagctcaatcccgccttgtgcgcccaagagctgcattatgccaagtttcacgaccaaaacagcgcattgggcagcctgatcgaacacgaccgcctcctgaaccgcaaacagcaatggcgcgattcccccgccaacacattcgaacgccgcctgatccgcgccttgaccaaaatcagcagggaaagggaaaaacgtcggcaaaggcgcgaacagttaatcggcaaaattattgtgcctttccaataa

SEQ ID NO: 45354 - DNA, 897 bp, Neisseria meningitidis
atggagtctgaaaacattatttccgccgccgacaaggcgcgtatccttgccgaagcgctgccttacatccgccggttttccggttcggtcgccgtcatcaaatacggcggcaacgcgatgaccgaacctgccttgaaagaagggtttgcccgcgatgtcgtgctgctgaagctggtcggcattcatcccgtcatcgttcacggcggcgggccgcagatcaatgcgatgcttgaaaaagtcggcaaaaagggtgagtttgtccaaggaatgcgcgttaccgacaaagaggcgatggatattgtcgaaatggtgttgggcgggcatgtcaataaagaaatcgtgtcgatgattaacacatatggcggacacgcggtcggcgtgagcggacgcgacgatcatttcattaaggcgaagaaacttttgatcgatacgcccgaacagaatggcgtggacatcggacaggtcggtacggtggaaagcatcgataccggtttggttaaagggctgatagaacgtggctgcattcccgtcgtcgcccccgtcggcgtaggtgaaaaaggcgaagcgttcaacatcaacgccgatttggtagcaggcaaattggcggaagaattgaacgccgaaaaactcttgatgatgacgaatatcgccggtgtgatggacaaaacgggcaatctgctgaccaaactcacgccgaaacggattgatgaactgattgccgacggcacgctgtatggcggtatgctgccgaaaatcgcttctgcggtcgaagccgccgtcaacggcgtgaaagccacgcatatcatcgacggcagggtgcccaacgcgcttttgctggaaatctttaccgatgccggtatcggttcgatgattttgggcggtggggaagatgcctga

SEQ ID NO: 45355 - DNA, 1056 bp, Neisseria meningitidis
atggaactcaaaatagacattgcaaccaacaacttcaaacacggcggcggcacggaacgctacacattggatttggtaaagggtctgaacagacaaaacatcacaccggccgtttatgcgacgaaatttgatcacggcattcctgaatacgccatgatcgaaccccatcttgtcgatcaacaccggacgctgaaaaaactacgctcattcctcttttcaagtcggctcgctcaaaccagaaaaaacagtgccgccaaactgattgcctgccaccacgccgattacgccgacctcctcatctgcggcggcacacacttgggctacctgcaccatatggcgcaaaaaccgaacctgctcgaccgtctcgccatacgccgcaaccgcagcaactacgccaccgccaaactgattatggcgcattcccatatgatgcggcgcgaactggtcggactgtacggcgttccccctgaaagaatccaagtcgcccccccccccgcagatacggaacgcttctttccacaacccggagaaactgccgacctgcgcgccaaatacggctttgccgaccatgaaaccgttttcctgttcccatcgaccggccacacgcgcaaaggtctggaactgcttgccgactttttcgaacataccggcctgcccgtcaagcttgccgttgtcggctccccgctcccccgccctatgaaaaacgtcgtcggactgggcttctgcaccgatatgcccgaactctaccgcgccgccgactttaccattatggcctccctgtatgaacccttcgggctggtcggtgtcgaatccgtcctatgcggcacacgcgtcgtcctctccgaaaacatggcatgtacagaggtcatgaacgaagaagccggattctttttctcacgccaaaacccggaaaccctggcgcaagccgttgcccaagccgtcagccttaaaaaacagggcggacaccgcctgtccgacccgatgcgtgcactgaactacaacccgtccctgtcgcaccacatcgaccgactgaccgacatactggcatccgtataa

SEQ ID NO: 45356 - DNA, 882 bp, Neisseria meningitidis
atgccgtctgaaaacaccctcttcccactgcccgacaccctgttgcgccccatggtggaacaagccttgagcgaagatttgggcaggcgcggcgacattacgtccgccgccgtcatcgcgcccgataaaaccgccaaacttttcctcgtcagccgcgaagacggtgttatcgccggcatggacttggcgcgcctcgcctttcagacgatggatccgtccgtccgcttccaagccgaaatccgagacgggcaagtcgtccgcgcaggtcagacgcttgccgccgtcgaaggcaacgcccgcgcgctgctcgccgccgaacgcaccgcgctcaactacctcacgcacttgagcggcatctccaccgccaccgcgcgtgccgttgccgaagtcgccaaatacggtacagacatcgtgtgcagccgcaaaaccatccccctgctgcgcgtcctgcaaaaatacgccgtcagggcgggcggcggcgtgaaccaccgcatgggtttggacgatgccgtactcatcaaagacaaccacctcgcctattgcgacagcatcgcccaagccgttcggcaggcaaaacaggcggtcggaccgttgacctgcgtagaaatcgaagtggacacgttggcacaactggacgaagccatcgcagcgggcgcggaacggattttgctggacaacatggacgacgaaaccctgaaagaagcggcaaaccgctgccacacgcaaaccgcccacccccacaccgtctattgcgaagcatcgggcggcatcggcttcgaccgcctgaagcgcgtggcgcaaaccggcgtggacggcatcgccctcggctatctgacccacagcagccgctcgttggacataggtttggatttcttggcatga

SEQ ID NO: 45357 - DNA, 1395 bp, Neisseria meningitidis
atgaccgtcaaaacccgtttcgcccccagccccaccggctacctgcacattggcggcgttcgcaccgccttgttttcgtgggcgtttgcccgccatcataaaggcgaatttttattgcgcatcgaagacaccgacttggcgcgttctaccgccgaatccgtcaacatcatcctcgacggcatgaaatgggtcggcctgaactacgacaacgccgacaatgtcgtgtaccaaacccgccgtttcgaccgctacaaagaagtcattgccgaacttttagaaaaaggccatgcctactactgctattgcagcaaagaagagctggaagccatgcgcgagaaagccgaaaaagaaggcacggcgacttacgaccgccgctggcggccggaagcgggcaaaaccctgcccgaaatccctgccggcgtgcaacccgtcgtccgcttcaaaacgcctttggatggcgtaaccaagtgggcggacttggtcaaaggcgaaatttccatccccaacgaagccctcgacgacctgattatcgcacgcgccgacggcacaccgacctacaacttctgcgtcgtggtggacgactacgacatgggcgttacccacgttatccggggcgacgaccatgtgaacaacaccccgaaacaaatcaacatcttaaaagccatcggcgcaaacctgcccgaatacggacacctgcccatgattctcaacgaacaaggcaaaaaaatctccaaacgcagcggcgataccgtcgccattaccgatttcggcgcaatgggcatcctgcccgaagccatgctcaactatctggcgcgcttgggctgggcgcacggcgacgacgagttctttacgatggaacaattcatcgaatggtttgatttgaaagacgtttccccgtctccaagccgtatggacttgaaaaaactctactggatcaacggcgaacacatcaaaatcaccaccaacgaaaaactggccgaaatggtgaaaccgcgcctcgccctgcgcgatatccatgaaacaagcaagcctgctttggaagacgtgttggcattggtcaaagaccgcgcccaagatttgaacgccttggcagacgaatgcctgtatttctacaaaaaacaagtccctgccgaagccgatgttgccaaacactgggacgacgaagcctccgcccgtatgctgcgctttgccgaacgcctcgagggtttggaagactggaataccgaagccatccacgacctgttcaaacctttctgtgacgaagaaggtattaaaatgggcaaactcggcatgcctttgcgcctcgctgtctgcggcacggcgaagaccccaagcgtcgatgccgtgttggcattaatcggcaaagaagaagtgttgaaacgcatccgcgcttaa

SEQ ID NO: 45358 - DNA, 918 bp, Neisseria meningitidis; identical to SEQ ID NO: 37376

SEQ ID NO: 45359 - DNA, 1257 bp, Neisseria meningitidis
atgaaagtgcttgttttaggtgcgggtgttgccggcgtgtcttccgcgtggtatctggcagaggccggacatgaagtaacggtcatcgaccgcgccaagggtgtggcgatggaaaccagttttgccaatgcaggccagctttcttacggctataccacgccttgggctgcacccggtattccgaccaaagcactgaaatggctgtttaaaagccatccgcctttgctgtttcgccccgacggcagcctgtatcaaatcgaatggctgtggcggatgctgcaaaactgcacggcagcgcactatcaaaccaataaagagcgcatggtcaggatttccgaatatagccgtgaaatgttccgccgttttgaagcgcaaaccggcatgaattttgaggaacgcaaaaaagggacgttgcagattttccgccaaaccaaagaagtcgaagcggcagaacaagacattgccgttttggaacgctacggcgtgccgtaccgccgtctgaaacccgaagaatgtgcagaatttgagcctgcgctggcacgcgttaccgccaaaattgccggcggcctgcacctgcctgcagatgcgaccggcgactgccacctcttcactgaaaacctatacaaattgtgtcaggaaaagggcgtacagtttcatttcaaccaaaccatcagccgcatcgaccataacgggctgcgcatcaaagccgttgaaaccgaaacagggcggtttgaagcagatgccgttgtctgtgcgctcggctgcttcagtaggactgtgttggcgcagttagacctcgatctgccgatttatcccgtcaaaggctattccttgaccctgccggtcaccaattcagacggcgcgccggtgtccaccgttttggatgaaagctacaaagtcgccatcacgcgctttgacaacagaatccgcgtcggcggcatggcagaattgtcgggctacgaaatcaaactgcccgaaaaacgccgcgaaaccttggctttggtcgtcaacgatttgttcccggaaggcggcgatttgagccaagcattgttctggagcggcctcagaccgatgacgcccgacagcacgccgttaatcggccgcacccgctttgaaaacttattcttgaatacaggccacggcactttgggctggaccatgtcgctgggttcggcaaaattaaccgccgatatcgtgagcggcaaagacaccgaaatccgaagcgacgatttgagcctgtcgcgctatcaggcttaa

SEQ ID NO: 45360 - DNA, 1785 bp, Neisseria meningitidis
atggaactgatgactgttttgctgcctttggcggcgttggtgtcgggcgtgttgtttacatggttgctgatgaagggcaggtttcagggcgagtttgccgatttgaacgcgcaactggcggaaaaggcggcaagatgtgattttgtcgaacaggcacacgcagaaattgcatcggaattggccgttttggacgggaaataccgacatttgcaggacgaaaattatgctttgggcaaccgtttttccgcagccgaaaagcagattgcccatttgcaggaaaaagaggcggaatcggttcggctgaagcagtcgtatatcgagttgcaggaaaaggcacagggtttggcggttgaaaacgaacgtttggcaacgcagctcggacaggaacggaaggcgtttgccgaccaatatgccttggaacgccaaatccgccaaagaatcgaaaccgatttggaagaaagccgccaaactgtccgcgacgtgcaaaacgaccttgccgatgtcggcaaccgttttgccgcagccgaaaaacagattgcccatttgcaggaaaaagaggcggaagcggagcggttgaggcagtcgcataccgagttgcaggaaaaggcacagggtttggcggttgaaaacgaacgtttggcaacgcaaatcgaacaggaacgccttgcttctgaagagaagctgtccttactgggcgaggcgcgcaagagcttgagcgatcagtttcaaaatcttgccaacacgattttggaagaaaaaagccgccgttttaccgagcagaaccgcgagcagctccatcaggttttgaacccgctaaacgaacgcatccacggtttcggcgagttggtcaagcaaacctatgataaagaatcgcgcgagcggctgacgttggaaaacgaattgaaacggcttcaaggattgaatgcgcagctgcacagcgaggcaaaggccctgaccaacgcgctgaccggcacgcagaacaaggttcagggtaattggggcgagatgattctggaaacggttttggaaaattccggcctccagaaagggcgcgaatatgtggttcaggcggcatccgtccgaaaagaggaagacggcggcacgcgtcgcctccagcccgacgttttggtcaacctgcccgacaacaagcagattgtgattgactccaaggtctcgctgacagcttatgtgcgctacacgcaggcggcggatgcggatacggcggcacgcgaactggcggcacacgttgccagcatccgtgcacacatgaaaggcttgtcgctgaaggattacaccgatttggaaggtgtgaacacattggatttcgtctttatgtttatccctgtcgaaccggcctacctgctggcgttgcagcatgacgcgggattgttccaagagtgtttcgacaaacggattatgctggtcggccccagtacgctgctggcgactttgaggacggtggcgaatatttggcgcaacgaacagcaaaatcagaacgcactggcgattgcggacgaaggcggcaagctgtacgacaagtttgtcggcttcgtacagacgctcgaaagcgtcggcaaaggcatcgatcaggcgcaaagcagttttcagacggcattcaagcaacttgccgaagggcgcgggaatctggtcggacgcgccgagaaactgcgtctgttgggcgtgaaggcaggcaaacaacttcaacgggatttggtcgagcgttccaatgaaacaacggcgttgtcggaatctttggaatacgcggcagaagatgaagcagtctga

SEQ ID NO: 45361 - DNA, 243 bp, Neisseria meningitidis
atgacctaccgtgaattagttgaacgtcagttggctgtgcgccatgccgatttggaattgggcttaagccgcgcacgcgagcaagagccgtttgtcattcatgtttccgatctgttggataaggcaggcattgagtacgcggtacgcatggataaggattttcagacgaccttttgtgtggcgttttctgcgaccgcccctgctgatgtgattggtattttacggaaatattactcagtctga

SEQ ID NO: 45362 - DNA, 468 bp, Neisseria meningitidis; identical to SEQ ID NO: 38530

SEQ ID NO: 45363 - DNA, 1113 bp, Neisseria meningitidis
atgaccgcaaaggaagaactgttcgcatggctgcgccatatgaaccaaaacaaaggttccgacctgttcgtgacgactcatttcccgcccgcaatgaagctggacggcaaaatcacccgcatcacggacgaaccgctgacggcggaaaaatgtatggaaatcgccttttcgattatgagtgcgaagcaggcggaagaattttcatcgaccaacgagtgcaacttcgccatcagtctgccggacaccagccgcttccgcgtcaatgcgatgatacagcgcggcgcgacagcgttggtattccgtgcgattaccagcaagattcccaagtttgaaagcctgaacctgccgccggtcttgaaggatgtcgcgctgaaaaaacgcgggctggttatttttgtcggcggcaccggctcgggcaaatcgacttcgcttgcctcgcttatcgactaccgcaatgaaaattcgttcggacacatcatcaccatcgaagacccgatcgagtttgtccacgaacacaaaaactgcatcatcacccagcgcgaggtcggcgtggatacggaaaactggatggcggcgttgaaaaacacgctgcgtcaggcgccggatgtgattctgatcggcgaaatccgcgaccgcgaaacgatggactacgccattgcctttgccgaaacggggcatttgtgtatggcgacgctgcacgccaacagcaccaatcaggcactcgaccgcatcatcaactttttccccgaggagcggcgcgaacaattgctgacggatttgtcgctcaaccttcaggcgtttatttcgcaacgcctcgttccgcgagacggcggcaagggcagggtggcggcagtcgaggtgctgctcaattcgcccctgatttcggagttgattcacaacggcaacatccatgaaatcaaagaagtgatgaaaaaatccactaccctgggtatgcagaccttcgaccaacacctttaccaattgtatgaaaaaggcgatatttccttgcaggatgccttgaaaaatgccgattcggcgcatgatttgcgtttggctgttcagttgagaagccgccgcgcgcaaagttccggaccggatttggaattgctctga

SEQ ID NO: 45364 - DNA, 1215 bp, Neisseria meningitidis
atgagtgaagcagaatatttttcccatttcatatctaacggcaatgggaagttattagaaattccgcaacgtaggggcaggcaggacggcgtttttatagattggttgtcattcacactgcacgaagattccttgctgaaagtttccggatgccccttagtttccgatgccgaatatatgtttgttttaagcaaaaaattggaggaaatattagggtttggcatcacgagcagatgcaaatcgaagggcaataaattttacgattcgatgtttaggttgggatcggaagaagttgactacggcgaagtccattacggaggtcagcgaaatacggttttaatcgaattgaaaggtgtaggttgcaacattgcaaatccaggttgggaattgaggcttaagcagtttttggaagattcattgaggccgaggataacgcgggtagatttggcacttgatttttttgatggggagtacacgccggaacaggcgttgttagatcacgataatggtttttttgataacagcaatcaaaggccgaaatctgaaacgatcggtacggcttggcggaatgaggacgggagcggcaagacattttatgtaggtcgcaagaaaaattctcgttttgttcgtgtttatgagaaaggcaggcagcttggagataaagaaagcaaatgggtaaggttcgagatccagtttaattatggagatatagaaatacccttggatattttaataaatcagggttcgtatttctgtggagcttttccaatttgtagaaaatttaaaaatatgccggttcccgaaaggtttgatcagagaaagaaaacgcttaatttaactttcgagcataaattgcattacgcgaaaaacgcggttggaaaactggtcaatttcatgattgaaatgggttttgataatagcgaaattgtggaatctttaaaggcagattcgggatttcccaaaggattagaacctgaaaaatatgctctggaaatgttaagggacggtttgaaacacggttttattcatgaacagccggatattgatttggaaattgaacttgatgaattgggggttattgcttttaaaaattctgacaaattcgatagggaaaaaaggctttttagtcctgattatgatgccgagaaagaaaggaaatatcaggattatctagatgaagtttatcatcaaaatgtaaattatgattatttttaa

SEQ ID NO: 45365 - DNA, 774 bp, Neisseria meningitidis; identical to SEQ ID NO: 39194

SEQ ID NO: 45366 - DNA, 492 bp, Neisseria meningitidis
atgaaataccgtcgtttttaccgcaatggcggcacttacttttttacggttgtaaccaataaacggcagaagattttgaccgatgatgcggtgcgtttggctttgcggcaggcggtaatggcggtgcgcgaacggtatccgtttgaaattttggcatgggtgttgatgcccgaccatcttcataccatatggcggctgccggacaatgattctgcttattcggaacgctggcggcaaatcaagcggcacagccaatatttaatcggcggcaatctcaggctttggcaaaaacgcttttgggaatatactatccgcgatgaggccgattttgcctggcattttgattatctgcatttcaatccggtcaaacatggctatgtaggacaaatttccgattgggggttttctacgtttcaccgttatgtcaaacagggtatttatccgcataattggggtggcggcaatgcggacttttctattggatacgattga

SEQ ID NO: 45367 - DNA, 942 bp, Neisseria meningitidis
atgaaaaccctgctcctcctcatccccctcgtcctaaccgcctgcggcacactgaccggcatacccgcccacggcggcggcaaacgctttgccgtcgaacaagaactcgtcgccgcatcgtcccgcgccgccgtcaaagaaatggatttgtccgccctgaaaggacgcaaagccgccctttacgtctccgttatgggcgaccaaggttcgggcaacataagcggcggacgctactctatcgacgcactgatacgcggcggctaccaaaacaatcccgaaagtgccacccaatacagctaccccgcctacgacactaccgccaccaccaaatccgacgcgctctccagcgtaaccacttccacatcgctcttaaacgcccccgccgccgccctgactagaaacagcggacgcaaaggcgaacgctccgccggactgtccgtcaacggcacgggcgactaccgcaacgaaaccctgctcgccaacccccgcgacgtttctttcctgaccaacctcatccaaaccgtcttctacctgcgcggcatcgaagtcgtaccgcccgaatacgccgacaccgacgtattcgtaaccgtcgacgtattcggcaccgtccgcagccgcaccgaactgcacctctacaacgccgaaacccttaaagcccaaaccaagctcgaatatttcgccgttgaccgcgacagccggaaactgctgattgcccctaaaaccgccgcctacgaatcccaataccaagaacaatacgccctctggatgggaccttacagcgtcggcaaaaccgtcaaagcctcagaccgcctgatggtcgatttctccgacattaccccctacggcgacacaaccgcccaaaaccgtcccgacttcaaacaaaacaacggtaaaaaccccgatgtcggcaacgaagtcatccgccgccgcaaaggaggataa

SEQ ID NO: 45368 - DNA, 813 bp, Neisseria meningitidis; identical to SEQ ID NO: 39121

SEQ ID NO: 45369 - DNA, 213 bp, Neisseria meningitidis; identical to SEQ ID NO: 39705

SEQ ID NO: 45370 - DNA, 201 bp, Neisseria meningitidis
atgaaatttgaagaacgtttcatagttcaagatttagaaacgcatgactttatttatcccgatccgttcggtgatgtggggtttactcaaaatattaaatcagcaggtcaatttgaaagttacgaagatgcattgaattcaggcataaatgaaatgggcggaggattccagatatttcagttcttcgtaaaatcggaataa

SEQ ID NO: 45371 - DNA, 1458 bp, Neisseria meningitidis; identical to SEQ ID NO: 38730

SEQ ID NO: 45372 - DNA, 372 bp, Neisseria meningitidis; identical to SEQ ID NO: 38879

SEQ ID NO: 45373 - DNA, 510 bp, Neisseria meningitidis; identical to SEQ ID NO: 40753

SEQ ID NO: 45374 - DNA, 1071 bp, Neisseria meningitidis
atgaccaaacatatcgccatcctccgaggtgacggcatcggtcccgaaatcgtcgccgaaaccgtccgcgtactcgacaaactcatcgcccaaggtttggatgccggctacgaatacgccccattgggcggcgaagcctatgacgaatacggtcatccttatcccgaatttacgcaaaacctctgccgcaaagccgatgccgtcctgcttggtgcagtcggttctcctcaatacgacaacctcgaccgtccgttgcgccctgagcgcggcctgttggcaatccgtaaggatttgaacctgtttgccaatttgcgtcctgctgttttatatcccgaattagccaacgcctccacgctgaagcctgaaatcgttgccggtttggatattttgattgtgcgcgaactcaccggcgacatctatttcggcgaaccgcgcggcatccgcgttctggaaaacggcgaacgcgaaggctacaacaccatgaaatacagcgaaagcgaaatccgccgcatcgcccacgtcgctttccaatccgcccaaaaacgcagcaaaaaagtctgctccgtcggcaaagccaacgttttggaaaccaccgaactgtggcgcgaaatttttgaagaaatcggcaaacaataccctgatgtcgagctttcccatatgtatgtggacaatgccgctatgcagttggtacgcgcgcccaaacaatttgacgtgattgccaccggcaacatcttcggcgatattttatcggacgaggcctctatgctgaccggctccatcggtatgctgccttctgcttctttggacgaaaacggcaaaggcctgtacgaaccgtctcacggctccgctcccgacatcgccggacaaaacaaagccaacccgctggccaccatcctctcgctcgcaatgttgctgcgttacagcctgaacgacgaagcgcgcgcgcaacaagttgaaaacgccgtccaaaaagtgctgcaacaaggcttgcgtaccagcgacatttacgaagaaggcacaaaactcgtttcctgctccgaaatgggcgatgcggtactcgccgccttgtaa

SEQ ID NO: 45375 - DNA, 471 bp, Neisseria meningitidis; identical to SEQ ID NO: 37133

SEQ ID NO: 45376 - DNA, 372 bp, Neisseria meningitidis
atgtcaaaagacaaaaatcaaatcaccgtcggaatcaaccgtgaaatcatcgataccgaaaccgacagttctgccgagtttcacgtcatccgacatgtgtcgctggattatgcaaccggctttaatgtggtgttgttagacagctatgtgcgcaaatcgacatttgaacgtcgcggacgttcggtcggttcgatgcagttgaatattccgggcgtgccgcctcgcggtacggatgtattggactgggcataccaggctgttgtagcagcggttgaagggggcgcggtcgatgcctacggtcagcctatttccgccaacagcctgaccggcgcggagttggtctatgccgatttgcctgaagcagccatctga

SEQ ID NO: 45377 - DNA, 279 bp, Neisseria meningitidis
atgcatacagaactcaacaacggaacactgcacatcagcggcgacatcaccgtcaaaaccctgaccggggaggcttttgagcgtttccagcagcaatgccgtctgaaagaaaccattgccgtcgatttcggcggtgtcaaacgtgccgattccgcctgcgtgtcgctgctgctcgaagtgctgcgcggttgcaaaggcagcgtcaggctgaccggcattcccgaatccgtgcgcgcgctgtccgaactgtacgaaatcaaagactggctgaaatcatga

SEQ ID NO: 45378 - DNA, 852 bp, Neisseria meningitidis
atgcacatcctgttgaccgccctgctcaaatgcctctccctgctgccactttcctgtctgcacacgctgggaaaccggctcggacatctggcgttttaccttttaaaggaagaccgcgcgcgcatcgtcgccaatatgcgtcaggcaggcatgaatcccgaccccaaaacagtcaaagccgtttttgcggaaacggcaaaaggcggtttggaacttgcccccgcgtttttcagaaaaccggaagacatagaaacaatgttcaaagcggtacacggctgggaacatgtgcagcaggctttggacaaacacgaagggctgctattcatcacgccgcacatcggcagctacgatttgggcggacgctacatcagccagcagcttccgttcccgctgaccgccatgtacaaaccgccgaaaatcaaagcgatagacaaaatcatgcaggcgggcagggttcgcggcaaaggaaaaaccgcgcctaccagcatacaaggggtcaaacaaatcatcaaagccctgcgttcgggcgaagcaaccatcgtcctgcccgaccacgtcccctcccctcaagaaggcggggaaggcgtatgggtggatttcttcggcaaacctgcctataccatgacgctggcggcaaaattggcacacgtcaaaggcgtgaaaaccctgtttttctgctgcgaacgcctgcctggcggacaaggtttcgatttgcacatccgccccgtccaaggggaattgaacggcgacaaagcccacgatgccgccgtgttcaaccgcaatgccgaatattggatacgccgttttccgacgcagtatctgtttatgtacaaccgctacaaaatgccgtaa

SEQ ID NO: 45379 - DNA, 288 bp, Neisseria meningitidis; identical to SEQ ID NO: 39764

SEQ ID NO: 45380 - DNA, 450 bp, Neisseria meningitidis
atggacgttcaactccccatcgaagccaaagacatccaaaaactcatcccccaccgctacccgtttctccagctcgaccgcatcaccgccttcgagccgatgaaaaccctgaccgccatcaaaaacgtcagcataaacgagccgcagttccaaggccatttccccgacctgcccgtgatgcccggcgtactcatcatcgaagcgatggcgcaggcgtgcggcacgttggcgattttgagcgaaggcgggcgcaaagaaaacgaattcttcttcttcgccggcatagacgaagcccgtttcaaacgccaagtcatccccggcgaccaactcgtctttgaagtcgagctgctgaccagccggcgcggcatcggcaaattcaacgccgttgccaaagtggacgggcaagtcgccgtcgaagccatcatcatgtgtgccaaacgcgtggtttga

SEQ ID NO: 45381 - DNA, 192 bp, Neisseria meningitidis; identical to SEQ ID NO: 42043

SEQ ID NO: 45382 - DNA, 699 bp, Neisseria meningitidis
atgaaatccaaacacctcgccctcggcgttgccgccctgttcgcacttgccgcgtgcgacagcaaagtccaaaccagcgtccccgccgacagcgcgcctgccgcttcggcagccgccgccccggcagggctggtcgaagggcaaaactatactgtccttgccaacccgattccccaacagcaggcaggcaaagtcgaagtccttgagtttttcggctatttctgtccgcactgcgcccacctcgaacctgttttaagcaaacacgccaagtcttttaaagacgatatgtacctgcgtaccgaacacgtcgtctggcagaaagaaatgctgacgctcgcacgcctcgccgccgccgtcgatatggctgccgccgacagcaaagatgtggcgaacagccatattttcgatgcgatggtcaaccaaaaaatcaagctgcaagagccggaagtcctcaaaaaatggctgggcgaacaaaccgcctttgacggcaaaaaagtccttgccgcttacgaatctcccgaaagccaggcgcgcgccgacaaaatgcaggagctgaccgaaacctttcaaatcgacggtacgcccacggttatcgtcggcggcaaatataaagtcgaatttgccgactgggagtccggtatgaacaccatcgaccttttggcggacaaagtacgcgaagaacaaaaagccgcgcagtaa

SEQ ID NO: 45383 - DNA, 1125 bp, Neisseria meningitidis
atgcagaatacttcctttgataatgaatccgattatagcgacgattcagactttgcgtcagcttccgaaactgaaaaccgtatcggtctgaccgttccgctcgagcttgccggcgggcggttggatgcggtgttggcgaaacttctgcccgactattcgcgcagccgcctgacattatggattaaagagggcgcggttattgtaaacgataaaccttcgcaacccaaagacaaaatgataggcggtgagcaaatccgtgtaaccgtccgtccgagtgaggaaaatctggcgtttgttccagagcctatggctttggatattgtttacgaagacgataccgtcattgtcgtcaacaaaccggccggactggtggtgcatccggcggcaggcaactggagggggacgctgctcaacggcctgttggcgcactgtcccgaattgagccaagtaccgcgtgcaggcatcgtacaccgtttggacaaagaaaccagcgggctgatggtggttgccaaaaccctgccggcgcaaaattccctcgtgaggcagcttcaagagcgcacggtcaaacgcatctaccgcgccgtcgccaacggcatcgtccccttcgacggtaaaatcgaaacccaaatcggacgcgatccgcacaaccgcctgaaaatggcagtcgtcaaattcggcggcaaaccagccgttacccacgtcaaagtgttggaacgctatcttacccacagctatatcgaatgctcgctcgaaacgggcaggacgcaccaaatccgcgtccatatgcgcgaggccaaccatccgcttgccggcgatcccgtgtacggcaacccgcgccatccgtgcagcgacccggtgaaagaagccgttaaaagtttgggcgcgcgtcaggcattgcacgcctaccgcttgagtttcacccatccggaaagcggcgaaaccgtttcgtttgaggcaccgattccggacgacatatatcatttgttgtccgtcctccgtcttgaagccggtttggattcgtctttgagcaatgaagaggaatggcaggacaaattcggcgcggacgacgatgacgattggaacgaagacgactacgatgtcgaagtggtttatgtgagggagtga

SEQ ID NO: 45384 - DNA, 516 bp, Neisseria meningitidis
ttggtaacgcgggaggtttgcgaaccgcgaagttggacagtaaagacgcggattatacaggcaaacgcgttcagacggcatctgaacgccatgccgtctgaacacgcggcttatgccgacttgatggcgagttccgccaagcgtttgctttgtgcgaaggcgatattgttttcttcggcggtcaggacgggagccgctgtcgggaatatcttttttgacggcttcgcagacggcggagactttggggacggtgcgcaatacggcttcgcaaccttcaacgctgtcgatgccgcgagcgattcggcgggcgggattgcgggtgctgccgttttggaaatagtagaggacgaggattttgagggggatttgggttcatgggcggattccgttaaaatggttcggtcttcagacggcataacagttgttccgatgccgtctgaaacagccgcagttcaggcatttgttcctgacggcaaaattggctataacatcgggcatcaatgcccaacttactga

SEQ ID NO: 45385 - DNA, 831 bp, Neisseria meningitidis; identical to SEQ ID NO: 39589

SEQ ID NO: 45386 - DNA, 126 bp, Neisseria meningitidis
ttgaaagaggattttattaataatgagcgatatgaaaaaacagaattatattcccaaaaagataaggtaattctatttccaaagtttggcgaatatgatttggtgttaaatccggacattatttaa

SEQ ID NO: 45387 - DNA, 423 bp, Neisseria meningitidis
atgagcatcatgcaagttgaggtggtcagtagcgagcaaaacatctattcgggcgaagccagctttgtagtggttccgaccgttcaaggtgagcttggtatttacccgcgacacgagccgattatgagtttggtgcggccgggggctttgcgtttgaccgttccgggcgaggataaagaggttttggttgctgtttccggcggtgttttggaagtacagcctgataaagtaactgtcttggcggatgttgccgtccgcagtgcggagatggatcaggcacgtgcggaagaggcgaaaaaagccgcagaagcgggcatttcccaagctaaagacgataaggctttggcggaggcgcataaagcattggctgctgcgattgcacagctcaaaactttggactatatccgttcgcacaagaaataa

SEQ ID NO: 45388 - DNA, 759 bp, Neisseria meningitidis; identical to SEQ ID NO: 39063

SEQ ID NO: 45389 - DNA, 501 bp, Neisseria meningitidis
atgacccgtttgacccgcgcgtttgccgcggctctgatcggtttgtgctgcaccgcaggcgcgcacgccgacaccttccaaaaaatcggctttatcaacaccgagcgcatctacctcgaatccaagcaggcgcgcaagattcaaaaaacgctggacagcgaattttccgctcgtcaggacgaattgcaaaaactgcaacgcgaaggtctggatttggaaaggcagcttgccgaaggcaaactcagaaacgcaaaaaaggcgcaagccgaagaaaaatggcgcgggctggtcgcagcgttccgcaaaaaacaggcgcagtttgaagaagactacaacctccgccgcaacgaagagtttgcctccctccagcaaaacgccaaccgcgtcatcgtcaaaatcgccaaacaggaaggttacgatgtcattttgcagaacgtgatttacgtcaacacccaatacgacgttactgacagcgtcattaaagaaatgaacgcccgctga

SEQ ID NO: 45390 - DNA, 474 bp, Neisseria meningitidis
ttgaggacacgccctaatgcagaaaatagagataatgcaaaaaactacgtaaagattgaaacaaaacatcaaggaaacggcagcttccacgccgcttcttctctcggcttatccgccatttacgatttcaaactcaacgataaattcaaaccctatatcggcgcgcgcgtcgcctacggacacgttaaacatcaggttcattcagtggaaacaaaaaccacgactgttacctctaaaccgacggcaacctctccacagggaggccctattatacaaactgatcccagcaaacctccctatcacgaaagccacagcatcagcagcttgggtcttggtgtcatcgccggtgtcggtttcgacatcacgcccaagctgaccttggacaccggataccgctaccacaactggggacgcttggaaaacacccgcttcaaaacccacgaagtctcattgggcatgcgctaccgcttctga

SEQ ID NO: 45391 - DNA, 378 bp, Neisseria meningitidis; identical to SEQ ID NO: 39350

SEQ ID NO: 45392 - DNA, 1770 bp, Neisseria meningitidis
atgaccgtacagaccaagacaaaaggtttggcgtggcaagaaaaaccgctatccgacaacgaacgtctgaaaaccgaaagcaattttttacgcggcacgattttggacgatttgaaagacccgctcacgggcggcttcaaaggcgacaacttccaactcatccgcttccacggtatgtatgagcaggacgaccgcgacatccgcgccgaacgcgccgaggcaaaactcgagcccttgaaatttatgcttttgcgctgccggctgccgggcgggatcatcaaaccgtcccaatggatagaactggacaaatttgcccgggaaaacagtcattaccgctccatccggctgaccaaccggcaaaccttccaatttcacggcgtgccgaaagccaagttgcagacgatgcaccgcctcttgcacaaactgggtttggattccatcgccacggcggcggatatgaaccgcaacgtgctttgcacgtccaacccgatcgagtccgaactgcaccggcaggcttacgaatacgcgaaaaagatttccgaacacttgctgccgcgcacgcgcggttatctggatgtgtgggtggacggcaaaaaagttcaaagttccgacgacttccttcaagaagacgagccgattttgggcaaaacctatctgccgcgcaaattcaaaaccgcagtcgtcatcccgcccttgaacgatgtggactgctacggcaacgatttggatttcgtcgccgtttcagacggtaacggacagcttgccggcttcaatgttttggcaggcggcgggctttcgatggaacacggcaacaccaaaacctatccgaacatttcactggaactgggtttcgtgcctccggaacacgcgctgaaggccgccgaagcggtggtaaccacgcagcgcgacttcggcaaccgcagcgaccgcaaaaacgcccgcacccgctacaccattcaaaatatgggcttggacaacttccgcgcggaagtcgaacgccgtatgggtatgccgttcgaacccatacgcccgttcaaatttaccgggcgcggcgaccgtatcggctgggtgaaaggcatagacggcaactggcatttgacccttttcatcgaaagcgggcgtttggttgacgaaggcgggaaacagctgctgaccggcgtgttggaaatcgccaaaatccacaaaggcgatttccgcatcaccgccaaccaaaacctcatcgtggcaaatgtcgccgaagcagacaaagcaaaaatcgaagaacttgcccgaacatacggattaatccgcaacgatgtcagtaaactgcgtgaaaatgcgatgtcgtgcgtttccttcccgacctgcccgctggcaatggcggaagccgaacgcgtgctgccggacttcatcggcgagctggataagattatggcgaaacacggcacgtcggacgactacatcgttacccgcattaccggctgcccgaacggctgcggacgggcgatgttggcggaaatcggactggtcggcaaagccgtcggacgctacaacctccacatcggcggcgaccgcgaaggcgtacgcatcccccgactctacaaagaaaacattaccctgccggaaatcctttccgaattagacgacctgatcggcaaatgggcggcgggacgcgataccgacgaaggtttcggcgatttcgccatacggacgggcatcgtcaaacccgtgttggatgcgcccgtcgatttttgggacgcatccaaagccgtcccgattgcgcgcgcctga

SEQ ID NO: 45393 - DNA, 435 bp, Neisseria meningitidis; identical to SEQ ID NO: 40706

SEQ ID NO: 45394 - DNA, 756 bp, Neisseria meningitidis
atggggcgtttacttttgggcagtatccgcatgagcatcattgtcgaaaacctgaccgtcagctaccgccgccgacctgccgtgcaccatgtggacattacttttgaagaacatagtatgtgggcggttttcggtcccaacggcgcagggaaatccacctttctcaaatccttaatgggattgcagcctatcgatacgggcagcatccggctggacggattgacccgtcagaacattgcctaccttccccagcagtccgacatcgaccgctcgcagcccatgaccgttttcgacttggcggcaatggggctatggtatgaaatcggttttttcagaggaataaatgccgttcaaaaacaacgcgttcacgaatctttggaacgcgtcgggatgcggcagtttgccggccgccaaatcgcccacctctcaaacggacaattccagcgtgtcctttttgcccgaatgctggttcaaaacgccaaattcctacttctagacgaacctttcaacgctgttgatgcacggacgacctacgaacttctcgacgtattgcagaaatgccattgcggcggacacgccatcatcgccgtactgcacgattacgaacaagtccgtgcctactttcccaataccctgctgctcgcccgcgaaaaaattgcggcaggcgcaaccgagaccattctgacagaaccctacctcgcccaagccaacgccaaaatgcagcaacaggaaagccccgagtggtgcgcgtcataa

SEQ ID NO: 45395 - DNA, 1539 bp, Neisseria meningitidis; identical to SEQ ID NO: 39517

SEQ ID NO: 45396 - DNA, 693 bp, Neisseria meningitidis; identical to SEQ ID NO: 42313

SEQ ID NO: 45397 - DNA, 687 bp, Neisseria meningitidis; identical to SEQ ID NO: 38997

SEQ ID NO: 45398 - DNA, 2277 bp, Neisseria meningitidis
atgacaacattacatttctcaggcttcccgcgtgtcggcgccttccgcgaattgaaattcgcacaagaaaaatactggcgcaaagaaatcagcgagcaagaattgctggctgttgctaaagacttgcgcgagaaaaactggaaacaccaggccgctgccaacgccgatttcgttgccgtaggcgatttcactttctacgaccacatcctcgacctgcaagtcgccaccggcgcgattcccgcccgcttcggtttcgacagccaaaacctgtctttggaacaattcttccaactggcgcgcggcaacaaagaccaattcgctatcgaaatgaccaaatggttcgacaccaactaccactacttggtgcctgaattccacgccgataccgaattcaaagccaatgccaaacactatgttcaacaactgcaagaagcccaagccctcggtctgaaagccaaaccgaccgttgtaggtccgttgactttcctgtgggtgggtaaagaaaaaggcacagtcgaattcaaccgcctgagcctgttgcaaaaactgctgcctgtttacgttgaaatcctaaacgctttggttgaagccggtgcagaatggattcaaatcgacgagcctgctttgactgtcgatctgcctaaagaatgggtagaagcctacaaagacgtttacgctactttgagcaaagtaagtgccaaaatcctgctgagcacttacttcggttctgttgccgaacacgccgcattgttgaaatccctgcctgttgacggcctgcacatcgacttggtacgcgctcccgagcaactggacgcatttgccgactacgacaaagttctgtctgcaggcatcatcgacggccgcaacatctggcgcgccaacctgaacaaagttttggaaactgttgagcctctgcaagccaaactgggcgaccgtttgtggatttccagctcttgctctctgctgcacactccatttgacttgtcagttgaagaaaaactgaaagccaacaaaccggacctgtactcttggttggcatttaccctgcaaaaaacccaagaattgcgcgttctgaaagccgcattgaacgaaggtcgcgattccgttgccgaagaactggccgccagccaagctgctgccgattcacgcgccaacagcagcgaaatccaccgtgcagacgttgccaaacgcctggccgatttgcctgccaacgcagaccaacgcaaatctccatttgccgaccgtatcaaagcgcaacaagcatggttgaacctgcctctgctgccgacgaccaacatcggttctttcccgcaaactaccgaaatccgccaagcacgcgcagccttcaaaaaaggcgaactgtctgccgccgattacgaagccgcgatgaaaaaagaaatcgccttggtggttgaagaacaagaaaaactggatttggacgtactggtacacggcgaagccgagcgtaacgacatggtcgaatacttcggcgaattgttgagcggttttgcattcacccaatacggctgggtacaaagctacggctcacgttgtgttaaaccaccgattatcttcggtgacgtaagccgtcctgaagccatgactgtcgcttggtctacttacgctcaaagcctgaccaaacgtccgatgaaaggtatgttgaccggccctgtaaccattctgcaatggtctttcgtccgcaacgatattcctcgctctaccgtgtgcaaacaaatcgcactggctctgaacgacgaagtattggatctggaaaaagcaggcatcaaagtcatccaaattgacgaacctgccatccgcgaaggcttgccgctgaaacgcgccgattgggatgcctacctgaactgggcgggcgaatccttccgcctgtcctctgccggttgcgaagacagcacacaaatccacactcatatgtgctactccgagttcaacgatatcctgcctgcgattgctgcaatggatgcggacgtgatcaccatcgagacttcacgttccgacatggaactcttgaccgcgttcggcgaattcaaatacccgaacgacatcggcccgggggtttacgacatccacagcccgcgcgtaccgacagaagccgaagtggagcacctgttgcgcaaagccatcgaggttgtaccggttgaacgtctgtgggttaacccggactgcggcctgaaaacacgcggctggaaagaaactctggaacaactccaagtgatgatgaacgtaacccacaaattgcgtgccgaattggcgaaataa

SEQ ID NO: 45399 - DNA, 270 bp, Neisseria meningitidis; identical to SEQ ID NO: 38590

SEQ ID NO: 45400 - DNA, 537 bp, Neisseria meningitidis; identical to SEQ ID NO: 38262

SEQ ID NO: 45401 - DNA, 852 bp, Neisseria meningitidis
atgaacacgttgaaatttaccaaaatgcacggtttgggcaacgattttatggtgattgacgcggtcagtcaggattttacccccgaggacgcgccgattgcggcatgggcggaccgcttccgaggcgtgggcttcgaccagcttttggtggtcgggcgttcggaaaccgaaggcgtggatttccgttaccgtattttcaatgccgacggcagcgaggtcgggcaatgcggcaacggagcgcgttgttttgcccgttttgttgcagacaagggtttgaccgataagaaagaaatttgtgttgaaacggcaaatggcgttatttttccgaaattgtccgataacggcatggttacggtcaatatgggcaaaccgaggtttatgccgtctgaaataccgtttgtccccgaattgggcgagggggatgatgcctgtatttacggggtgcatctcgaatccggcattcagcctgtcagctgcgtcaatatgggcaacccccatgcggtgattgtggtcgatgacgtagaatgcgcgccggtgcgcgaaaccggttcgcttatcgaaccgcacaggcagtttcccgaacgcgtcaacgtcggctttatgcagattgtcagccgaaccgcgattcgtttgcgcgtgttcgagcgcggcgtgggcgaaacccaagcgtgcggtacgggcgcgtgtgcggctgtggtggcgggtatccgtctggggttgttggatgaagggaaaacggtagaggtgattttgccgggcgggactttatatatcgaatgggcctgcggcggcgatgtgatgatgaccggccctgcggaagcggtgtttgaaggcgagttggcgtattcatga

SEQ ID NO: 45402 - DNA, 726 bp, Neisseria meningitidis
  misc_feature 711, 712, 713, 714, 715: 'n' is a, c, g or t
atggccgacaactacgtaatctggtttgaaaacctgcgtatgacagatgttgaacgcgtgggcggtaaaaacgcctcgctgggcgaaatgatcagtcagctgaccgaaaaaggcgttcgcgtccccggcggctttgccaccacagccgatgcctaccgcgcattcctcgcacacaacggtctgagcgaacgcatttccgccgcactggcaaaattagatgtcgaagacgttgccgaactggcacgcgtcggcaaagaaatccgccaatggattttggacacgcccttccccgaacagctcgatgccgaaatcgaagcggcatggaacaaaatggttgccgatgccggcggtgcggacatttccgttgccgtacgctcttccgcaaccgccgaagacctgcccgacgcatcatttgccggccaacaggaaaccttcttgaacatcaacggattggaaaacgttaaagaagcgatgcaccatgtattcgcctccctgtacaacgaccgcgccatttcctaccgcgtccacaaaggcttcgaacacgatatcgtcgccctttccgccggcgttcaacgcatggtgcgttccgacagcggcgcatccggcgtgatgttcactctcgacaccgaatccggctacgatcaagtcgtctttgttacctcctcttacggtctaggtgaaaacgtcgtccaaggcgcggtcaaccccgannnnncacacacttaa

SEQ ID NO: 45403 - DNA, 351 bp, Neisseria meningitidis
  misc_feature 6, 7, 8, 9, 10: 'n' is a, c, g or t
gtgtgnnnnnaactcaacgataaattcaaaccctatatcggtgcgcgcgtcgcctacggacacgtcagacacagcatcgattcgaccaaaaaaacaacagaggttgttacctccacccatggtggtgctgacacaaaacctacgatttataatggggaaagtacgcaaaacgcctatcacgaaagccacagcatccgccgcttgggtcttggtgtcgtcgccggtgtcggtttcgacatcacgcccaagctgaccctggacaccggataccgttaccacaactggggacgcttggaaaacacccgcttcaaaacccacgaagtctcattgggcatgcgctaccacttctga

SEQ ID NO: 45404 - DNA, 1518 bp, Neisseria meningitidis; identical to SEQ ID NO: 38183

SEQ ID NO: 45405 - DNA, 378 bp, Neisseria meningitidis; identical to SEQ ID NO: 36713

SEQ ID NO: 45406 - DNA, 2298 bp, Neisseria meningitidis; identical to SEQ ID NO: 39011

SEQ ID NO: 45407 - DNA, 1377 bp, Neisseria meningitidis
atgcacgacaaaacctggtccggacgtttcaacgaacccgtttccgaactcgtcaaacaatacaccgcctccatcggtttcgaccgacggcttgccgaatgggacattcaaggctcgctggcacacgcgcaaatgttgaaagaaaccggcgtgttggacgaaggcgatttggcagacatccgtcggggcatggcggaaatcctcgaagaaatccgcagcggcaaaatcgaatggtcgtccgatttggaagatgtccacatgaacatcgaacgccgcctgaccgacaaaatcggcgacgcgggcaaacgcctgcacaccggccgcagccgcaacgaccaagtcgccaccgacatccgcctttggctgcgcgaccagattaccgtcatccgaagcctgattcaaagccttcagacggcattgctggatttggcggaacaaaacgccgaaaccgtcatgcccggttttacccatctgcaagtcgcccagcccgtcagcttcggacaccatatgctcgcctacgtcgaaatgctcggacgcgataacgaacggatggcggactgccgctgccgcgtcaaccgtatgccgctcggcgcagccgcccttgccgggacgacctacccgattcagcgcgaaatcaccgccgagctattgggctttgaacaaatctgccagaactcgctcgatgccgtatccgaccgcgatttcgccattgagttcacagccgccgcctcgctggttatggttcacctgagccgcctgtctgaagaattgattttgtggatgagcccgcgtttcggctttatcgacatcgccgaccgcttctgcacaggttcgtccatcatgccgcagaagaaaaaccccgacgtgcccgaactcgtgcgcggcaaatccggccgcgtcatcggacaccttatcggtctgattaccctgatgaaatcccaacccttggcgtacaacaaagacaatcaggaagacaaagaacccttgttcgacaccgccgacacgcttatcgacacgttgcggatttacgccgatatgatgcgcggcgtaaccgtcaaacccgacaatatgcgcgccgccgtgatgcagggcttcgctaccgccaccgacttggcggattatctggtcaaaaaaggcatgcctttccgcgatgcccacgaagtcgtcgcccaagccgtgcgccatgctgatgaagccggcgtcgatttgagcgaactgccgctcgaagtcttacaaggtttcagcgatttgattgccgacgacgtttacggcgtgctgacacccgaaggcagcttaaacgcgcgcaaccacttgggcggcaccgcgcctgaacaagtccgtttccaagtcaaacgctggcgggaaatgttggcttaa

SEQ ID NO: 45408 - DNA, 906 bp, Neisseria meningitidis
atgcttaccttccaacaaatcatcttcaaactgcaaaccttctgggcagacaaaggctgcaccgtcatccaacccttcgacatggaagtcggtgccggcacatcccatcccgccacctgcctgcgcgcgctcgggcccgagccttggtttgccgcctacgtccaacccagccgccgccccaaagacggccgctacggcgacaaccccaaccgcctgcaacactattaccaattccaagtcgccctcaagcccgctcccgctaatatccaagacctctatctcgactctctgcgcgaattgggcatcgatcccaaagtccacgacatccgctttgtcgaagacgactgggaaaaccccaccctcggcgcgtggggtttgggctgggaagtctggctcaacggcatggaagtaacccagtttacctatttccaacaagtcggcggcatcgactgcacgcccgtactcggcgaaatcacctacggcatcgaacgcttggcgatgtacttgcaaggtgtagaaaacgtctacgacctcgtttgggcaaaaacgctcgacggcaacaccgtcacctacggcgacgtgtaccaccaaaacgaagtcgagcaatccacctacaacttcgaatacagcgatgccgactggctgctgcgccagttcaacgactacgaagcgcaagccaaacgcctgcttgccgaagaaaacgccgccctcgccctgcctgcctacgagcttgtcctcaaagcggggcatacgttcaaccttttagacgcacgcggcgcgatttccgtaactgagcgggcaacttatattggacgtattcgtgcattgagccgcgccgtggcgcaaaaatatgttgaaagccgcgaaaaactgggcttccctttaatgaaggcaaacgccgcctaa

SEQ ID NO: 45409 - DNA, 3435 bp, Neisseria meningitidis
atgaccgagccgacctacatccccctgcgcctgcataccgaattttcgattaccgacggtatggtgcggattaaaaaactgattgccaaagcgcaggaatacggtttgcctgctttgggcatcagcgatttgatgaacgaattcggtttggtgaaattttataaagcctgccgcagcgcggggattaagcccgtcggcgcggcggacgtatggataggcaatccggatgcgcccgacaagccgttccgtgctatgctgattatccgcaacgatgcgggctatctgcgcttgagcgagcttttgacggcggcttatgtcggcaaagaccgcaatgtccatcatgcggaactcaatcccgaatggctggaaaacggcgacaacagcggcttgatttgtttgagcggcgcgcattacggcgaagtgggcgtgaatctcttgaacggcaacgaagacgcggcgcgggcggcggcgttgaaatatgcggcgtggtttcccgatgcgttttatctggagttgcaacgcctgcccgagcgtcccgaatgggaggcttgcgtttcgggcagcgtgaagctggtggaggaactgggtttgccggtggtggcgacgcatccgacgcagtttatgagccgcgacgatttcaacgcgcacgaggcgcgggtgtgtatcgcaggcggctgggtattgacggacaagaaacgtccgcgcgatttcacaccgagccagtttttcattccgccggaaacgatggccgaacgtttcgccgatttacccgaagccctcgaaaacacggtggaaattgccaaacgctgcaatctgcacatcacattgggcaaaaacttcctgccccttttccccacgcccgacggtttatcactcgatgactatctcatcaaactctccaatgagggcttgcaggaacgcatggttcagctttatcccgacgaggcggagcgtgcggaaaaaatgccggaatatcaggaacgtttggattttgagctgaacatcatcatccagatgaaattccccggctatttccttatcgtacaagactttatcaactgggcgaaaacacacggctgcccggtcgggccgggacgcggttcgggcgcgggttcgctggtggcgtattcgctgaagattaccgacctcgatccgctgaaatacgcgctgctgttcgagcgtttcctaaaccccgaacgcgtttctatgcccgacttcgacgtggacttctgtcaggcaaaccgcggccgcgtgattgaatatgtacgcgaaaaatacggtgcggaagcagtcagccagattgttaccttcggcacgatgtcgtccaaagcagtgattcgcgacgtggggcgcgtactggaactgccgtttatgctgtgcgacaaactgtccaagctgattccgttggaagccaacaaacctttgggtttggacgacgcgatgaaggcggagccgcagattcaggaattaatcgaagcggaagaagcggacgaactgattacgctggcgaaaaagctggaagatttgacgcgcggtttgggtatgcacgcgggcggcgtgttgattgcgccgggcaagatttccgattacagccccgtgtatcaggcggacgaatccgcctcgcccgtatccatgtacgacaagggcgacgtggaagacgtgggtttggtgaaattcgactttttaggtctgcgcaacctgaccatcatcgaaatggcgcagaacaacatcaaaaacaccaccggcgacatcatcgatgtcggcaaaattccgcttgacgaccaggttgcctaccaaatcttccgcgatgcgaacaccaccgccgtgttccagttcgagtcgacaggcatgaagaaaatgctgaaaacggcgcatacgaccaagtttgaagaactgattgccttcgtatcgctctaccgacccggcccgatggacaatattcccgacttcgtcgcgcgtatgaaaggtcaggaattccaatacatccacccgctactcgaaggcatcctcgcaccaacctacgggattatggtgtatcaggaacaagtgatgcaggcggcgcagattatcggcggctactcgctcggcggcgcggacctgctgcgccgcgccatgggtaagaaaaagcccgaagaaatggtgaaacaccgcgaaatcttcgccgaaggcgcggcaaaacaaggcatttcgcgcgaaaaatccgacgaaatcttcaactacatggaaaaattcgccggctacggtttcaacaaatcccacgctgccgcctacgccctgatttcctaccagaccgcatggctcaaagcccactaccccgccgaatttatggcggcgaccatgtcgtctgaattggacaacaccgaccagctcaagcatttctacgacgactgccgtgccaacggcatcgagttcctgccgcccgacatcaacgaatcagactaccgcttcacgccgtatccgaacatgaaaatccgctacgcgctcggcgcgattaaaggcacgggcgaagccgccgtcgaatccatcaccgccgcgcggcaaagcggcggcaagtttaccggcctcttggacttctgtgagcgcgtcggcaaagaacacatgaaccgccgcaccctcgaagctctgatacgcggcggcgcattcgacagcatcgaacccaaccgcgccatgctcttggcgaacatcgacctcgctatggacaacgccgaccaaaaagccgccaacgccaatcagggcgggcttttcgacatgatggaagacgccatcgaaccggtgcggctcatcgacgcgccgatgtggagcgaatcggaaaaactcgccgaagaaaaaaccgtcatcggcttttacctgtccggccacccgttcggcccgtatgcccaagaagtccgccaaatcgccccgcagaaactgtcgaaactcaaaccgcaagacagcgtgcgcctcgccggattcgttaccgccgtacgcaccatgatgggcaagcgcggcaaaatcgccttcgtcagccttgaagatttgagcggacaggttgaaatcatggtcggcggtcagacgttggaaaactgcgccgactgcctcaaagccgaccaagtgctgattatcgaatccaaagtcagccgcgacgactacggcggcggcgacggactgcgtattctggcaaaccaagtcatgaccctgcaaacggcacgcgaacgctacgcccgcagcctcagcctcgccctcgccccgcatcacgacatcggcggactggtacaactgctcgccgcccaccaactgcccgacacgccgcgcatcccgctgcaactgtcgtatgccaacgaaaaagcgtcgggcaggcttcaagtgccgccgaaatggacggttacaccgagctccgcattgttcggcgaactggaaacattgctcggcagccggtcggtgcgcgtcaactggtaa

SEQ ID NO: 45410 - DNA, 504 bp, Neisseria meningitidis; identical to SEQ ID NO: 39039

SEQ ID NO: 45411 - DNA, 777 bp, Neisseria meningitidis
atgaccctcatccacccgaccgccgtcatcgaccccaaagccgaactcgactccagcgtcaaagtcggcgcgtacaccgtcatcggccccaacgtccaaatcggcgcgaataccgaaatcggcccgcacgccgtcatcaacggccacaccagcatcggcgaaaacaaccgcattttccaatttgccagcctcggcgaaatcccgcaggacaaaaaataccgcgacgagccgaccaagctgattatcggcaacggcaacaccatccgcgaattcaccacctttaatttaggcacggtaaccggcatcggcgaaacccgtatcggcgacgacaactggattatggcgtactgccacctcgcgcacgactgcgtggtcggcaaccacaccatcttcgccaacaacgcctcgcttgccggacacgttaccatcggcgactacgtcgttttgggcggctacacgctggttttccaattctgccgcatcggcgactacgccatgaccgcgtttgccgcaggcgtacacaaagacgtgccgccctactttatggcatcgggctaccgcgccgaaccggcggggctcaacagcgaaggcatgcgccgcaacggttttaccgcagagcagatttccgccgtcaaagacgtgtacaaaaccctctaccatcgcggcattccgtttgaagaagccaaggcagacattctccgccacgccgaaacccaagccgagcttgccgtattccgagactttttcgcacaatcggcacgcggcatcatccgctga

SEQ ID NO: 45412 - DNA, 852 bp, Neisseria meningitidis
atgaccttactcggaataaagctcaaacagacccagcagctcaaccagcggctgcaacaatctttgcgcgtattgcagatgtcgggtatcgaacttgaacgcgaggtcgaaaactggctgtcggacaaccccctgctcgaacgcaaagacacggatgaattttccgatgccgagttcagccattacactgcgcctgcccgtcaaatcggcggagacgaaggcgaagatatgctgtccaacatcgccggcgagcaggatttcaagcaatacctgcacgcgcaagtatgcgaacacccgctttccgaccaagaatccgcctgtgtccacatcctcatcgatttccttgacgagcaaggttatctgaccgacagcatcgaagacatcctcgaccatacgcccttggagtggatgttggatgaagcaatgctgaaacaagccctgactgcattgcaaaaattcgacccggcaggcgtggccgccgccgatttgaacgaatcgctgatactgcagatagaaagatcgggcgaatgtgctgccaaacccgccgccctgcatatcgtccgaaacgccctcgacagcattgacggcaaccgcagccaaaccctcgcacgaataaaaaaacacctgccccaaaccgacagcggcacactcgaagccgcactcgacctcattgcttcgctcaatccctttcccgccgccggttttgcctcgtccacacccacgccgtattctgacgaggcactcgccaacctgctggctttccgcggcatggaggtttctcgccgcaccattgccaaatacagagaatcccttgagattccggcagcacacaaacgcaaaaccgcagaataa

SEQ ID NO: 45413 - DNA, 1308 bp, Neisseria meningitidis
atgaagccagtaaacatcggtcttttaggtttgggtacggtcggcggcggtacggctgccgtgttgcgggacaacgcggaggaaatttcccgccgcttggggcgcgaagtgcgcatcagtgccgtatgcgacttgagcgaagaaaaagcccgccaaatctgcccgtccgcagcctttgtcaaagatccgttcgaactggtcgcgcgtaaagacgtcgatgtcgtcgtcgaattgttcggcggcacgggcattgccaaagatgcggtgttgaaagccattgaaaacggcaaacacatcgttaccgccaacaaaaaactgctcgccgaatacggcaacgaaatcttcccgctggcggaagaaaaaaatgtcatggtgcaatttgaagcggcagtagcgggcggtatcccaatcatcaaagccctgcgcgaaggtttggcggcaaacaggattaaatccatcgccggcattattaacggcaccagcaacttcatcctctccgaaatgcgtgaaaaaggcagcgcgtttgccgatgtactgaaagaagcgcaggcactgggctatgccgaagccgacccgaccttcgacatcgaaggacatgacgcgggccataaaatcaccatcatgagcgcgctggcattcggcacgccgatgaacttttccgcctgctacctcgaaggcatcagcaaactcgacagccgcgacatcaaatacgccgaagaacttggctaccgcatcaaactgttgggcatcacccgcaaaaccggcaaaggcatcgagctgcgcgtccaccctaccctgattcccgaaagccgcctcttggcaaacgtcaacggcgtgatgaacgccgtgcgcgtcaacgccgatatggttggcgaaaccttatattacggcgcgggcgcgggcgcattgccgaccgcttccgccgtggttgccgatatcatcgacatcgcccgcctggttgaagccgataccgcccaccgcgtaccgcatctggcgttccaacccgcgcaagtccaagcgcaaaccatcctgcctatggacgaaattaccagcagctactacctgcgcgtccaagccaaagacgaaccgggcacgctggggcaaatcgccgcgctgttggcacaagaaaacgtgtccatcgaagcactgattcaaaaaggcgtgattgatcagaccactgccgaaatcgtgattctgacccacagcacggtcgaaaaacacatcaagtcggcaatcgcagccatcgaagcactggattgcgtggaaaaaccgattaccatgatccgcatggaaagcctgcatgactga

SEQ ID NO: 45414 - DNA, 957 bp, Neisseria meningitidis; identical to SEQ ID NO: 39251

SEQ ID NO: 45415 - DNA, 309 bp, Neisseria meningitidis; identical to SEQ ID NO: 38004

SEQ ID NO: 45416 - DNA, 279 bp, Neisseria meningitidis
atgaatatggaaaattatttttctaacttaaatttagacatcagaacacataaactcggcacatttaccgatcaaaaagtaaccccggatgtattatgtgccgtagcagaatgtatcatcgaatatattgaaaatattggagaaatatttagcattaacgatattcgttattcagattatgccgaatatatcgccaccgccgtatttaaaaaaccatccattgaaaatgccggtagcgaatacaataaatttttttcacaacggcggattcgcatttga

SEQ ID NO: 45417 - DNA, 846 bp, Neisseria meningitidis
atgaatattgcggacggacggcaggcgtttcccgcacctgcaaaactgaatctcgatttgaggattactggaaagcgggaagacggttatcacaatatcgaaagcatattctgcctgatagatttgcaggataccgtatatttgaaaccgagggacgacggcaaaatcatcctgcacaatcctgtcggcggaataccgcaggaagccgatttgagctaccgtgccgcatcgttgctgcaaaaatatgcgcgcaaccccgccggcgtggaaatatggctggacaaaaaaatcccgacaggggcgggtttgggcggcggaagctcggatgcggcaaccgttttgctggtgttgaaccgttggtggcagtgcggtctgacgcagcggcagctcattgattcgggcgcggctctgggggcggacgtaccgttttttattttcggcaaaaatgcgtttgcgcggggtataggcgacaggctggacgaaatggatattccgaaacagtggtatgtcatcgtcaaaccgcccgtccacgtttccactgcaaaaattttcacacacgaaggcttgacacgaaattccgcctcaagcataatgccgactttccaaaacctgcaaccgtttagaaatgacatgcaggcagttgtatttaaagaataccctgaagtttggaaagcctattccgaattgtcccgatatggatttgccttaatgacaggttctggtgcgtgtgtattcacggcgtgtcaagataggaatagcgcatacaatatataccgacaagtttcagatttgtacgaggcatatttggcagagggtctttcaaaacatccttggttgtccgtataa

SEQ ID NO: 45418 - DNA, 729 bp, Neisseria meningitidis
ttgaacatcaaatattcgggcatcgaaaacaggtttgaaaccgccatcctgaagaaaaacggcgtaagatccggcttcgtctccttcgcccccaaccttgccgccgtcaaactgaacgattatgccaaagttagaaaacggattaccaaaaccaaacagaaagccgacatcgtcattgtaatgttccacggcggcgggaagggaaacaggcggaacacctgccgttcgataccgaaatcttctatggggaaaacaggggcaacgtcgtcgagtttgcacggcttgccgtcgattccggcgcggatgtcgtattcgggcaggggccgcacgttacacgcgccgtcgaactttaccgcgaccgcttcatctcttacagcggcggcaactttgccacctacggcgcaatcaacacctccggcatcagcggcattgcgccgattttcaaaattatcaccaacaaacagggtaaatttatttccggaactatcatccctattacccaagccgacgataaaatccccaaaatcgaccctgaaaaaccgttatcgggcggattatttatctgaaccgcagcgacttccccaacgggaacgggctggatgtctcgcccgacggcaacatcacgcgccggtaaaaagatattggaaataccgtccgaacaaatgtcgtctgaaagccttttttcgggtttcagacggcatttttgcaatcgtcaataatccactttaa

SEQ ID NO: 45419 - DNA, 735 bp, Neisseria meningitidis
gtgaatgaaaagacagatcaaaaagcagtaagtgcgcaacaggctaaagaacaaaccagtttcaacaatcccgagccaatgacaggatttgaacatacggttacatttgattttcagggcaccaaaatggttatcccttatggctatcttgcacggtatacgcaagacaatgccacaaaatggctttccgacatgcccgggcaggatgcttactccattaatttgatagagattagcgtctattacaaaaaaaccgaccaaggctgggttcttgagccatacaaccagcaaaacaaagcacactttatccaatttctacgcgacggtttggatagcgtggacgatattgttatccgaaaagatgcgtgtagtttaagcacgactatgggagaaagattgcttacttacggggttaaaaaaatgccatctgcctatcctgaatacgaggcttatgaagataaaagacatattcctgaaaatccatattttcatgaattttactatattaaaaaaggagaaaatccggcgattattactcattggaataatcgagtaaaccaggctgaagaagataattatagcactagcgtaggttcctgtattaacggtttcacggtacagtattacccgtttattcgggaaaagcagcagctcacacagcaggagttggtaggttatcaccaacaagtagagcaattggtacagagttttgtaaacaattcaagtaaaaaataa

SEQ ID NO: 45420 - DNA, 1194 bp, Neisseria meningitidis; identical to SEQ ID NO: 42892

SEQ ID NO: 45421 - DNA, 726 bp, Neisseria meningitidis; identical to SEQ ID NO: 43300

SEQ ID NO: 45422 - DNA, 291 bp, Neisseria meningitidis
ttgaaggttcccgcaaaacgctatttcacgctggacgagttgtgcggactgttgcaaatcagcccctatggttttgcgcaatggcagcatgatcacggtgtggttgtcggttacggcggcgaacgctacacccgtttggatgtggtgaaactgttgaaattgcagagcacgtttgcaccgtatgcagaaggtgcggaatcgggttcggacggcaaccgtccggttacgcttcaggaaatcggagacggtctgaaagagctgttggcggatttggataaggaattgtgctga

SEQ ID NO: 45423 - DNA, 519 bp, Neisseria meningitidis; identical to SEQ ID NO: 36779

SEQ ID NO: 45424 - DNA, 1389 bp, Neisseria meningitidis
atgaatgcagtcgtagttgccgtaatcgttatgctggtgctgtcgctgtcgcgcgtgcacgtggtattgagcctgacggtcggcgcgtttgtcggcggcgcggtggcgggtatgccgctgcaaaacattgccgatgcggcgggacaggtcagccaggcggggattatccccgtgttcaacaaaggtttggaaggcggtgcgaagattgcgctttcttatgcgatgctcggcgcgtttgcaatggcgattacccattccggcctgccgcagcagcttgccggcgcggtcgtccgcaagctgaaccggggcggtatgcccgacagcgtgcgttcgggcgagggcgcggtcaaatggctgctgctttccatcatccttgtgatgggcatgatgagtcagaacatcatccccatccacattgcctttatcccgatgattgttccgcctctgcttttggtgttcaaccgcctgaaaatcgaccgccgcctgattgcgtgcgtcattactttcgggctggttacgacctatatgttcctgccttacggcttcggcgcgatttttttgaacgaaatcctgttgggcaacatccattccgccgcgccgcagcttgatgtgaaaaacatcaacgtaatggcggcaatggcgattcccgcgttgggaatgctggccggactcctgctggcgtttgtccattaccgcaaaccgcgcctgtaccaaagcaacaatgccgatacggcgggcaacgccgatgcggcaaaccgtccgcagccgtccgcctaccgcagcctggccgccgccgccgccattgccgtatgctttgccatccagttgatgtatgaagactcgctggtgttgggcgcgatgctcggtttcgccgtatttatgatgttgggcgtcatcaaccgcgacaaggcaaacgacgtattcggcgaaggcatcaagatgatggcgatggttggcttcattatgattgccgcgcagggttttgccgccgtgatgaatgcgaccgggcatattcagccgctggtggaaagcagtatggcgatattcggcaacagcaaaggtatggcggcattggcgatgctggtggtggggcttttggtaacgatgggcatcggttcgtccttttccactttgccgattattgccgcgatttatgtgcctttgtgtgtcggtttgggtttttcgccgcttgccaccgtcgccatcgtcggcacggcgggggcgttgggcgatgccggttcgcctgcgtccgattccacgttgggcccgacgatggggctgaacgccgacggacaacacgaccacatccgcgattccgttatcccgaccttcatccactacaatatcccgctgctgattgccggctggattgccgcgatggtgctgtaa

SEQ ID NO: 45425 - DNA, 810 bp, Neisseria meningitidis
atgaccgccctcccccgttactccgtttttggcaaccccgttgcacacagtaaatcgccgcaaatccatcagcaatttgcccttcaggaaggcgttgacattgaatacgaacgcatttgcgccgacatcggcggttttgcacaggcggtttcgacattttttgaaacaggcggttgcggggcaaacgttaccgtaccgttcaaacaggaagcgtttcatctggcggacgagcattccgaacgcgcattggcggcaggtgcggtcaatacgctgattccgttgaaaaacggcaagctgcgtggcgacaacaccgacggtatcggtttgaccaacgacatcacgcaggtcaaaaatattgccatcgagggcaaaaccattttgcttttgggcgcaggcggcgcggtgcgcggcgtgattccggttttgaaagaacaccgccctgcccgtatcgtcattgccaaccgtacccgcgccaaagccgaggaattggcgcagcttttcggcattgaagccgtcccgatggcggatgtgaacggcggttttgatatcatcatcaacggcacgtccggcggtctaaacggtcagattcccgatattccgcccgatatttttcaaaactgcgcgcttgcctacgatatggtgtacggctgcgcggcaaaaccgtttttagattttgcacgacaatcgggtgcgaaaaaaactgccgacggactgggtatgctagtcggtcaagcggcggcttcctacgccctctggcgcggatttacgcccgatatccgccccgttatcgaatacatgaaagccatgtaa

SEQ ID NO: 45426 - DNA, 2625 bp, Neisseria meningitidis
atgaaaacctccgaactgcgccaaaaattcctaaaattttttgaaaccaaaggccacaccgtcgtccgctcttccagcctcgtgccgcacgacgacccgaccctgctgtttaccaacgcgggcatgaaccagtttaaagacgtattcttaggtttcgacaaacgcccgtacagccgcgccaccaccgcgcaaaaatgcgtacgcgcaggcggcaagcacaacgacttggaaaacgtcggctacaccgcccgccaccacaccttctttgaaatgatgggcaacttctccttcggcgactacttcaagcgcgacgcgatccacttcgcttgggaatttctgacttcccccgaatggctcaatatccccaaagacaaactgttggcgaccgtttacgcggaagacgacgaagcctacaacatctggttgaacgaaatcggtatgccgtccgagcgcatcgtccgcatcggcgacaacaaaggcgcgaaatacgcgtccgacaacttctggcaaatgggcgacaccggcccttgcggcccctgctccgaaattttctacgaccacggcgaagaaatttggggcggcattcccggcagccccgaagaagacggcgaccgctggatcgaaatttggaactgcgtattcatgcagttcaaccgcgacgaacaaggcaatatgaatccgctgcccaagccgtccgtcgataccggcatgggcttggaacgcatggccgccgttatgcagcatgttcacagcaactacgaaatcgacttgttccaagacctgctcaaagccgttgcccgcgaaaccggcgcagctttcagcatggaagaaccaagcctaaaagtcatcgccgaccacatccgctcctgctcattcctgattgcagacggcgtattgccttccaacgaaggccgcggctacgtattgcgccgcattatccgccgcgccgtgcgccacggttacaaactgggtcaaagcaaaccgttcttccacaaactggtggccgatttggtcaaagagatgggcgatgcctaccctgaattgaaagaaaaacaagttcaaatcgaagaagcgttgaaaaacgaagaaagccgttttgcccaaactctggaaaccggtatggctttgttggaaaacgcgcttgccaaaggcagcaaaaaactcgacggcgaaatcatcttcaaactctacgatacctacggtttcccatacgacttgactgccgacatctgccgcgaacgcaatatcgaactggacgaagcaggcttcgagcgcgaaatggaagcccaacgcgcacgcgcacgcgccgcacaaagcttcaaagccaacgcccaactgccttatgacggtcaagacaccgagtttaaaggttatagcgaacgccaaaccgaatccaaagtcctcgccctctacaaagacggcgagcaagtcgacgaattgaacgaaggcgacagcggcgcagtcgtcatcgactttaccccgttctatgcagaatccggcggccaagtcggcgatgtcggctatatcttctcaggcgaaaaccgctttgaagtacgcgatacccaaaaaatcaaagcggccgtattcggtcaattcggcgtacaaacttcaggccgtctgaaagtcggcgacagcgttaccgccaaagtggacgacgaaatccgcaatgccaatatgcgcaaccacagcgcaacccacttgatgcacaaagccctgcgcgatgtattgggcagacacgtcgaacaaaaaggctctttggttaccgccgaatccacccgtttcgacatttcccatccccaagcggtaactgccgaagaaatcgccgaagtcgaacgccgcgtcaacgaagccgttttggcgaacgttgccgtcaacgccgccattatgagcatggaagacgcgcaaaaaaccggcgccatgatgctcttcggcgaaaaatatggcgacgaagtacgcgtattgcaaatgggcggtttctctaccgaattgtgcggcggcacgcacgtttcacgcaccggcgacatcggcctcttcaaaatcatcagcgaaggcggtattgccgcaggcgtgcgccgtatcgaagccatcaccggcctgaacgcactcaaatgggcgcaagagcaagagcgtttggtgaaagacatcattgctgaaaccaaagcccaaaccgaaaaagacgtactggcgaaaatccaagcaggcgcggcacacgccaaagcattggaaaaagaattggcacgcgccaaagccgaactcgccgtccacgcaggcgcaaaactcttggacgacgcaaaagacttgggcgcagccaaactcgttgccgcccaaatcgaagccgacgcagccgccctgcgcgaaatcgtaaccgacctgaccggaaaatccgacaacgccgtgattcttttagcggcagtaaacgacggcaaagtctccctgtgcgccggcgtatccaaagccctgaccggcaaagtcaaagcaggcgatctggttaaatttgcagccgaacaagtcggcggcaaaggaggcggcagaccagatttggcacaggcagggggcacggatgccggcaaattgcccgccgtgttggatagcgtgaaagactgggtcggcgcgaagctggtttga

SEQ ID NO: 45427 - DNA, 324 bp, Neisseria meningitidis
gtgaacattttggcatccgaccgaaattatgaattaaatattgaaatatttattgacaatataattcattttcaaataacagatgaatcttataaagtaaaattttcagaatatttatttgaaaataaagaaaaaaatgattgggatagaaatcctgctataaattattttttcgagataatagatgacagttatatggactggttgaaagaagaaagttttggtttttttgaaaagaaatattataaggcttacattttcttttttagcgattctgtaatagaagttatcagctcgacagaacctgtattttattcaaaataa

SEQ ID NO: 45428 - DNA, 576 bp, Neisseria meningitidis
ttgcggcggtggcggggcagaaaatccgtcaaaaaaccgggcaatatgcccgttttggacgtgatttccgccggcgcgaaagccgcgctggcaacgacgcgcaacaataaaatcggcattatcgccaccaatacgacagtcaacagcaacgcctatgcgcgcgccatccacaggaacaaccccgatacgctcgtccgcacgcaggccgcgccgctgctcgtccctttggtggaggaaggttggttggaacatgaagttacccgcctgaccgtatgcgaatacctcaaaccattgcttgcggacggcatcgatacgctggtgttgggctgcacgcactttcccttgctcaaacccttaatcggcagggaggcgcacaatgtcgcactggtcgattccgcgattacgactgccgaagaaaccgcacgcgtccttgcgcaggagggattactcaataccgacaacaacaatcccgactaccgtttttatgtcagcgatattcctttgaaattcagaaccatcggcgagcgttttctgggcaggacgatggagcagattgaaatggtgtctttgggttag

SEQ ID NO: 45429 - DNA, 957 bp, Neisseria meningitidis
atgaaagtcctctttatcgccgacccgatggcaagtttcaaaacctacaaagacaccacctacgccatgatgcgcgagatggcaaaacgcggttggcggctgtttcataccttgagcggggaattgtcggttaaaaacggtctggtggttgctgatgcgtctgcttttgagtttctcggcgcacaagacgaccacgacaaaaactggtttgccgccgccgacaaagttcagacggcattgaaagcatttgatgccgtgattatgcgtaccgatccgccgttcgatatgcaatacctctacgccacacagcttctgacgctggcggagcagcagggcgcgaaggtctttaacagcggacaggcgatgcgtgatttcaatgaaaaactggcgattttgaacttcagccgctttaccgcgcccacgctggtaacgacccgttccgccgatgtccgcgcatttttgaaagaacacggcgacatcatcattaaaccgctggacggtatgggcggtatgggtattttccgcctgaccgaaaaagatcccaacatcggcagcatcctcgaaaccctgatgcggcttgattcccgcaccattatggcgcaacgctacattcccgaaatcgtacacggtgacaaacgcatcctgattatcggcggcgaagtcgtcccctatgctttggcgcgtatcccgcaaaacggcgaaacacgcggcaaccttgcggcaggcggacgcggcgtggcgcaggaattggacggacgcgaccgcgaaattgccgaaacgctcgcccccgaactcaaacggcgcggcatcctgctggccggtttggacgttatcggcagcaacctgaccgaagtcaacgtaaccagcccgaccggattccaagaaattatgaaacaaaaaggtttcgacgtggcggcaatgtttgccgatgccgttgccgcgtggtcggtacgttaa

SEQ ID NO: 45430 - DNA, 825 bp, Neisseria meningitidis
  misc_feature 802, 803, 804, 805, 806: 'n' is a, c, g or t
atggctaaggaaaaattcgaacgtagcaaaccgcacgtaaacgttggcaccatcggtcacgttgaccatggtaaaaccaccctgactgccgctttgactactattttggctaaaaaattcggcggtgctgcaaaagcttacgaccaaatcgacaacgcacccgaagaaaaagcacgcggtattaccattaacacctcgcacgtggaatacgaaaccgaaacccgccactacgcacacgtagactgcccggggcacgccgactacgttaaaaacatgattaccggcgccgcacaaatggacggtgcaatcctggtatgttccgcagccgacggccctatgccgcaaacccgcgaacacatcctgctggcccgccaagtaggcgtaccttacatcatcgtgttcatgaacaaatgcgacatggtcgacgatgccgagctgttggaactggttgaaatggaaatccgcgacctgctgtccagctacgacttccccggcgacgactgcccgattgtacaaggttccgcactgaaagccttggaaggcgatgccgcttacgaagaaaaaatcttcgaactggctgccgcattggacagctacatcccgactcccgagcgtgccgtggacaaaccgttcctgctgcctatcgaagacgtgttctccatttccggccgcggtacagtagtaaccggccgtgtagagcgcggtatcatccacgttggtgacgagatcgaaatcgtcggtctgaaagaaacccaaaaaaccacctgtaccggcgttgaaatgttccgcaaactgctggacnnnnncacacacttaattaattaa

SEQ ID NO: 45431 - DNA, 279 bp, Neisseria meningitidis; identical to SEQ ID NO: 36597

SEQ ID NO: 45432 - DNA, 1044 bp, Neisseria meningitidis
atgcagattaccgacttactcgccttcggcgctaaaaacaaagcatccgaccttcacctgagttcgggcatatcccctatgattcgggttcacggcgatatgcggcgcatcaaccttcccgaaatgagcgcggaagaggtcggtaatatggtaacttcggtgatgaacgaccaccagcggaaaatctaccagcaaaacttggaagtcgacttctcgtttgaactgcccaacgtcgcccgattccgcgtcaacgccttcaacatcggccgcggtcccgccgccgtattccgcaccattcccagcaccgtcttatcgctggaagaattgaaagccccgagcattttccaaaaaatcgcagaatcgccgcgcggcatggttttggttaccggccctaccggttcgggcaaatcgaccacgcttgccgcaatgatcaactacatcaacgaaacccagccggcacacatcctgaccatcgaagacccgatcgaattcgtccaccaaagcaaaaaatccctgattaaccagcgcgagctgcaccagcacaccctcagcttcgccaacgcgctgcgttccgcattgcgcgaagaccccgacgttatccttgttggcgagatgcgcgaccccgaaaccatcggcttggcactgaccgccgccgaaaccggacacttggttttcggcacgctgcacacgaccggcgcagcaaaaaccgtcgaccgtatcgtggacgtattcccagcgggagaaaaagaaatggtgcgctctatgctgtccgaatcgctgaccgccgtcatctcccaaaacctgctgaaaacgcacgacggcaacggccgtgtcgcctcgcacgaaatcctgattgccaaccccgccgtccgcaacctcatccgcgaaaacaaaatcacgcagattaactccgtcctgcaaaccgggcaggcgagcggtatgcagacgatggaccaatcgctgcaatcgctggtgcgccaagggctgatcgcaccggaagtcgcacgcagacgcgcgcaaaacagcgaaagtatgagtttctga

SEQ ID NO: 45433 - DNA, 657 bp, Neisseria meningitidis
atgactattaaaattattctgatagacgaccataccctcttccgcagcggcattaaagcccttttgtcgcgccaacacggttttgaagtcatcggcgaagccgcagacggcctctcgggcatcaaaatgattagtcggctgcaacccgatgtcgtcctgctcgatttggatatgcccggcatgaacggacgcgaagcactctcccaaatcatcagcatcaatccgcagcaggcagtgattatgctgaccgtttccgaagacagcgacgacttgaccgaatgtattcgcatcggcgcgcgcggttacctgctgaaaaacatcaacgctgactttctgctcgaaagcatacgcaaagccgccgaaggcgataatgtattctcgcccgagatgaccgccaaactcgttaaaagcctgatttccccccaacctgcccaagggacacaggcactctcctcacttacccctcgcgaactggaaatcttgggctatctcgccgcaggacacagcaacaaaatcatcgcccgccacctcgatcttgccgaatccaccgtcaaagtccacgttcaaaacctgctccgcaaactcaacctcagcagccgggtgcaggccgctgtttacgccatccggcacaacgtcccccaacccgtgctggaataa

SEQ ID NO: 45434 - DNA, 684 bp, Neisseria meningitidis; identical to SEQ ID NO: 38600

SEQ ID NO: 45435 - DNA, 234 bp, Neisseria meningitidis; identical to SEQ ID NO: 41393

SEQ ID NO: 45436 - DNA, 4170 bp, Neisseria meningitidis
atgaccgataccgcaccgacagataccgatccgaccgaaaacggcacgcgcaaaatgccgtctgaacaccgccccaccccgccggcaaaaaaacgccgcccgctgctgaagctgtcggcggcactgctgtctgtcctgattttggcagtatgtttcctcggctggctcgccggcacggaagcgggtttgcgcttcgggctgtaccaaatcccgtcttggttcggcgtaaacatttcctcccaaaacctcaaaggcacgctgctcgacggcttcgacggcgacaactggtcgatagaaaccgagggggcagaccttaaaatcagccgcttccgcttcgcgtggaaaccgtccgaactgatgcgccgcagcctgcacattaccgaaatttccgccggcgacatcgccatcgttaccaaaccgactccgcctaaagaagaacgccctccgctcagccttcccgacagcatagacctgcctgccgccgtctatctcgaccgcttcgagacgggcaaaatcagcatgggcaaagcctttgacaaacaaaccgtctatctcgaacggctggatgcttcataccgttacgaccgcaaaggacaccgcctcgacctgaaggccgccgacacgccgtggagcagttcgtcggggtcagcctcggtcggcttgaaaaaaccgtttgccctcgataccgccatttacaccaaaggcggactcgaaggcaaaaccatacacagtacggcgcggctgagcggcagcctgaaggatgtgcgcgccgaactggcgatcgacggcggcaatatccgcctctcgggaaaatccgtcatccacccgtttgccgaatcattggataaaacattggaagaagtgctggtcaaagggttcaacatcaacccggccgccttcgtgccctccctgcccgatgccgggctgaatttcgacctgaccgccatcccgtcgttttcagacggcatcgcgctggaaggttcgctcgatttggaaaacaccaaagccggctttgccgaccgcaacggcatccccgtccgtcaggttttaggcggctttgtcatccggcaggacggcacggtgcatatcggcaatacgtccgccgccctgctcggacggggcggcatcaggctgtcgggcaaaatcgacaccgaaaaagacatcctcgatttaaatataggcatcaactccgtcggcgcggaagacgtactgcaaaccgcgttcaaaggcaggttggacggcagcatcggcatcggtggcacgaccgcctcgcccaaaatctcttggcaactcggcatcggcacggcgcgcacggacggcagcctcgccattgcaagcgaccccgcaaacggacagcggaaactggtgctcgacaccgtcaacatcgccgccgggcaaggcagcctgaccgcgcaaggctatctcgagctgtttaaagaccgcctgctcaagctggacatccgttcccgcgcattcgacccttcgcgcatcaatccgcaacttccggcaggcaatatcaacggctcaataaaccttgccggcgaactggcaaaagagaaattcacaggcaaaatgcggtttttacccggcacgttcaacggcgtaccgattgccggcagtgccgacattgtttacgagtcccgccaccttccgcgtgccgccgtcgatttgcggctggggcggaacattattaaaacagacggcggcttcggcaaaaaaggcgaccggctcaacctcaacatcaccgcacccgatttatcccgtttcggtttcggactcgcggggtctttaaatgtacgcggacacctttccggcgatttggacggcggcatccgaacctttgaaaccgacctttccggcgcggcgcgcaacctgcacatcggcaaggcggcagacatccgttcgctcgatttcacgctcaaaggttcgcccgacacaagccgcccgatacgcgccgacatcaaaggcagccgcctttcgctgtcgggcggagcggcggttgtcgataccgccgacctgatgctggacggcacgggcgtgcagcaccgcatccgcacacacgccgccatgacgctggatggcaaaccgttcaaattcgatttggacgcttcaggcggcatcaacagggaacttaccctatggaagggcagcatcggcattctcgacatcggcggcgcattcaacctaaaactgcaaaaccgtatgacgctcgaagccggtgcggaacgtgtggcggcaagtgcggcaaattggcaggctatgggcggcagcctcaacctgcaacacttttcctgggacaggaaaaccggcatatcggcaaaaggcggcgcacgaggtctgcatatcgccgagttgcacaatttcttcaaaccgcccttcgaacacaatctggttttaaacggcgactgggatgtcgcctacgggcgcaacgcgcgcggctacctcaatatcaatcggcaaagcggcgatgccgtattgcccggcgggcaggctttgggtttgaacgcattttccctgaaaacgcgctttcaaaacgaccgtatcggaatcctgcttgacggcggcgcacgtttcgggcggattaacgccgatttggacatcggcaacgccttcggcggcaatatggcaaatgcaccgctcggcggcaggattaccgcctcccttcccgacttgggcacattgaagccctttctgcccgccgccgcgcaaaacattaccggcagcctgaatgccgccgcgcaaatcggcggacgggtcggctctccgtccgtcaatgccgccgtcaacggcagcagcaactacgggaaaatcaacggcaacatcaccgtcgggcaaagccgctctttcgataccgcgcctttgggcggcaggctcaacctgaccgttgccgatgccgaagtattccgcaacttcctgcccgtcggacaaaccgtcaaaggcagcctgaatgccgccgtaaccctcggcggcagcatcgccgacccgcacttgggcggcagcatcaacggcgacaagctctattaccgcaaccaaacccaaggcatcatcttggacaacggctcgctgcgttcgcatatcgcgggcagaaaatgggtaatcgacagcctgaaattccggcacgaaggaacggcggaactctccggcacggtcggtatggaaaacagcggacccgatgtcgatatcggcgcggtgttcgacaaataccgcatcctgtcccgccctaaccgccgcctgacggtttccggcaacacccgcctgcgctattcgccgcaaaaaggcatatccgttaccgggatgattaaaacggatcaggggctgttcggttcgcaaaaatcctcgatgccgtccgtcggcgacgatgtcgtcgtattaggcgaagttaaaaaagaggcggcggcaccgctccccgtcaatatgaacctgactttagacctcaatgacggcatccgcttcgccggctacggcgcggacgttaccataggcggcaaactgaccctgaccgcccaatcgggcggaagcgtgcggggcgtgggcacggtccgcgtcatcaaagggcgttataaggcatacgggcaggatttggacattaccaaaggcacggtctcctttgtcggcccgctcaacgaccccaacctcaacatccgcgccgaacgccgcctttcccccgtcggtgcgggcgtggaaatattgggcagcctcaacagtccgcgcattacgctgacggcaaacgaaccgatgagtgaaaaagacaagctctcctggctcatcctcaaccgcgccggcagtggcagcagcggcgacaatgccgccctgtccgcagccgcaggcgcgctgcttgccgggcaaatcaacgaccgcatcgggctggtggatgatttgggctttaccagcaagcgcagccgcaacgcgcaaaccggcgaactcaaccccgccgaacaggtgctgaccgtcggcaaacaactgaccggcaaactctacatcggctacgaatacagcatctccagcgcggaacagtccgtcaaactgatttaccggctgacacgcgccatacaggcggttgcccgtatcggtagccgttcgtcgggcggcgagctgacatacaccatacgtttcgaccgcttctccggttcggacaaaaaagactccgccggaaacggcaaaggaaaataa

SEQ ID NO: 45437 - DNA, 1311 bp, Neisseria meningitidis
atgaccgatttgtttgcccgagaacccgacgcgccgcttgccgaacgattgcgtccgcatacgcttgacgacgtggtggggcaggaacacctcatcggcgaaggtaaacctttgcgcgtggcggtagaaggcggcaagccgcattctatgttgctgtgggggccgccgggcgtgggcaagacgacgttggcgcggattttggcgcagagtttcaacgcccagtttttgcctgtttccgccgtattttccggcgtgaaggacatccgcgaggcaatcgataaagccgaaatcgctttgcagcagggacgcgcgacgattttgtttgtcgatgaagtccaccgcttcaacaaggcgcagcaggacgcgtttttgccgcatgtcgaaagcggtttgctaacctttattggtgcgacgacggaaaatccgtcgtttgaagtcaatcccgcgctgttgagccgcgctcaggtgtatgttttgcaacccttgtcttcagacgacctgaaaaagctgattgccaaggtattggctttgcctgaataccaagagtttacgattgaaacggatgcgcaaaaattactcgtgaataccgccgacggtgatgcgcgcagattgttgaatttgttggaacaacttttacgcgccgccgatacacgtcgtctgaaaaacttaaccgccgaatttctcgccgacagtctcggggcgcaaatccgccgtttcgacaaaggcggcgagagtttctacaaccaaatctccgccctgcacaaatccgtgcgcggttcgcatccgaacgccgcgctgtattggttctgccgtatgctcgacggcggcaccgacccgcgctacctcgcccgccgcatcgtgcgtatcgcttgggaagacatcgggcttgccgacccgcgcgccttccaaatcgccaacgatgccgccgccaccttcgaacgcttaggctcgcccgaaggcgaactggctttggcgcaagcggtattgtaccttgccgccgccgcgaaatccaacgcgggctacaaagcgtataaacaaatgcgccgatttgttgcagaaaacagcagcgacgaagtgcctgtccatcttcgcaacgccccgaccaagttaatgaaggaattgggctacggacgcgaataccgctacgcccacgacgaaccgaacgcctacgccgccggcgaaagctatatgcccgacggcttggacgaaccggacttctaccaacccgtcccgcgcgggttggaaatcaaaatcggcgaaaagctggaatggttgaaatcgctggacgaagaagtattaaaggcaaaatga

SEQ ID NO: 45438 - DNA, 390 bp, Neisseria meningitidis
atgaaaaacgttcaaaaaggctttacgctgctcgagctgatgattgccgtcgccatcctcggcatcctgacgctcatcacctacccttcctataaaacctacatccggcgcatccgcctgtcggaagtcaaatccaccctgctgatgaacgcgcagaccatggaacgttactaccgccaaaaagggacgtttgaaaactacgataaaaacaaactgaaacaaaacaaatatttcaacgttaccttaagcaaagtcagccccgaccactttacccttcaggccgaccccaatcccaccaccaacgacggcgaaacctgcgtcgttacgctcaacgacggcggtaccattgccgcttccggtacaaaccaatcctgccccggcttcgactaa

SEQ ID NO: 45439 - DNA, 567 bp, Neisseria meningitidis; identical to SEQ ID NO: 38972

SEQ ID NO: 45440 - DNA, 897 bp, Neisseria meningitidis
ttgcaggtgtctgaaattcatcaaatttattgggaagagtcgggcaatcccgacggtgtgccggtcatttttttacacggcggaccgggggcgggggcttcgcctgaatgtcggggttttttcaatcccgatgtgttccgcatcgtcattattgaccagcgcggttgcggacgttcgcgcccgtatgcttgtgcggaagacaatacgacttgggatttggtggcggatattgaaaaagtccgtgaaatgctgggtatcgggaaatggctggtgttcggcggttcgtggggcagtactttgtcgctggcttatgcccaaacccatccggaacgggtaaagggattggtgttgcgcgggatatttttgtgcaggccgtctgaaacggcgtggctgaacgaggcgggcggtgtgagccggatttatccggaacaatggcaaaaatttgtcgcgccgattgctgaaaatcggcggaaccggctgattgaggcgtatcacgggttgctgtttcatcaagatgaagaagtgtgcctgtctgccgcaaaggcttgggcggattgggaaagctatctgatccgtttcgagccggaggaagtggatgaagatgcttatgcctcgctggcaatcgcgcgtttggaaaaccattattttgtcaacggcggctggttgcagggcgatagggcgattttgaacaatatcggcaaaatacggcatatcccgaccattatcgtgcaggggcggtatgatttgtgtacgccgatgcagagtgcgtgggcgctgtcgaaagcctttcccgaagcggaattgagggtggttcaggcagggcatcgtgcgttcgatccgcctttggtggatgcgttggttcaggcagttgaggatattttgccccatttgttgtaa

SEQ ID NO: 45441 - DNA, 966 bp, Neisseria meningitidis; identical to SEQ ID NO: 44613

SEQ ID NO: 45442 - DNA, 1080 bp, Neisseria meningitidis; identical to SEQ ID NO: 43538

SEQ ID NO: 45443 - DNA, 1254 bp, Neisseria meningitidis
atgtccgaacaacatatttcgacttggaaaagtaaaatcaacgcactggggccggggattatgatggcttcggcggcggtcggcggttcgcacctgattgcctcgacgcaggcgggtgcgctttacggctggcagatcgcgctcatcatcatcctgaccaacctcttcaaatacccgtttttccgcttcagcgcgcattacacgctggacacgggcaagagcctgattgaaggttatgccgagaaaagccgcgtttatttgtgggtattcctgattttgtgcatcctctccgccacgattaacgcgggcgcggtcgccattgtaaccgccgccatcgtcaaaatggcgattccctcgctgatgtttgatgccggcacggttgccgccttgattatggcatcctgcctgattattttggtgagcggacgttaccgcgctttggatcgcgtttccaaaatcatcatcgttactttgagtatcgccacgcttgccgccgccggcatcgctatgtcgcgcggtatgcagatgcagcccgattttatcgagccgacaccgtggacgcttgccggtttgggcttcctgatcgcgctgatgggctggatgcccgcgccgattgaaatttccgccatcaattctttgtgggtaaccgaaaaacaacgcatcaatccttccgaataccgcgacgggatttttgatttcaacgtcggttatatcgccagtgcggttttggctttggttttccttgcactgggtgcgtttgtgcaatacggcaatggcgaagcagtgcagatggcgggcggcaaatatatcgggcaattgatcaatatgtacgccgttaccatcggcggctggtcgcgcccgctggtggcgtttatcgcgtttgcctgtatgtacggcacgacgattaccgttgtggacggctatgcccgtgccattgccgaacccgtgcgcctgctgcgcggaaaagacaaaacgggcaacgccgaattctttgcctggaatatttgggtggcgggcagcggtttggcggtgattttttggtttgacggcgtaatggcgaatctgctcaaatttgcgatgattgccgcttttgtgtccgcccctgtgtttgcctggctgaattaccgtttggtcaaaggtgatgaaaaacacaaactcacatcaggtatgaatgcccttgcattggcaggcttgatttatctgaccggttttaccgttttgttcttattgaatttggcgggaatgttcaaatga

SEQ ID NO: 45444 - DNA, 1341 bp, Neisseria meningitidis
atgttgaatccatcccgaaaactggttgagctgatccgtattttggacgaaggcggttttattttcagcggcgatcccgtgcaggcgacggaggctttgcgccgcgtggacggcagtacggaggaaaaaatcatccgtcgggcggagatgatcgacaggaaccgtatgctgcgggacacattggaacgtgtgcgtgcggggtcgttctggttgtgggtggcggcggcgacgtttgcgttttttaccggtttttcaggcacttatcttctaatggacaatcagggtctgaatttctttttggttttggcgggcgtgttgggcatgaatacgctgatgctggcagtatggttggcaatgttgttcctgcgcgtgaaagtggggcgttttttcagcagtccggcgacgtggtttcggggcaaagaccctgtaaatcaggcggtgttgcggctgtatgcggacgagtggcggcaaccttcggtacgttggaaaataggcgcaacgtcgcacagcctgtggctctgcacgctgctcggaatgctggtgtcggtattgttgctgcttttggtgcggcaatatacgttcaactgggaaagcacgctgttgggcgattcgtcttcggtacggctggtggaaatgttggcatggctgcctgcgaaactgggttttcccgtgcctgatgcgcgggcgatcatcgaaggccgtctgaacggcaatattgccgatgcgcgggcttggtcggggctgctggtcggcagtatcgcctgctacggcatcctgccgcgcctcttggcttgggcggtatgcaaaatccttttgaaaacaagcgaaaacggattggatttggaaaaaccctattatcaggcggtcatccgccgctggcagaacaaaatcaccgatgcggatacgcgtcgggaaaccgtgtccgccgtttcgccgaaaatcgtcttgaacgatgcgccgaaatgggcggtcatgctggagaccgaatggcaggacggcgaatggttcgagggcaggctggcgcaggaatggctggataagggcgttgccgccaatcgggaacaggttgccgcgctggagacagagctgaagcagaaaccggcgcaactgcttatcggcgtgcgcgcccaaactgtgcccgaccgcggcgtgttgcggcagatcgtccgactttcggaagcggcgcagggcggcgcggtggtgcagcttttggcggaacaggggctttcagacgacctttcggaaaagctggaacattggcgtaacgcgctggccgaatgcggcgcggcgtggcttgagcctgacagggcggcgcaggaagggcgtttgaaagaccaataa

SEQ ID NO: 45445 - DNA, 891 bp, Neisseria meningitidis
ttggcacttttggcggcgatgacgtggggaacgctgccgattgccgtgcggcaggtattgaagtttgtcgatgcgccgacgctggtgtgggtgcgttttaccgtggcggcggcggtattgtttgttttgctggcattgggcgggcggctgccgaagtggcgggatttttcttggtgctcattcaggctgctgctgctcggcgtggcgggcatttcggcaaactttgtgctgattgcccaagggctgcattatatttcgccgaccacgacgcaggttttgtggcagatttcgccgtttacgatgattgttgtcggtgtgttggtgtttaaagaccggatgactgccgctcagaaaatcggcttggttttgctgcttgccggtttgcttatgttttttaacgataaattcggcgagttgtcgggtttgggcgcgtatgcgaagggcgtgttgctgtgtgcggcaggcagtatggcatgggtgtgttatgccgtggcgcaaaagctgctgtcggcgcaattcggaccgcaacagattctgctgttgatttatgcggcaagtgccgccgtgttcctgccgtttgccaaaccggcacacatcggaagtttggacggtacgttggcgtgggtttgttttgcgtattgctgcttgaatacgttaatcggttacggctcgttcggcgaggcgttgaaacattgggaggcttccaaagtcagcgcggtaacaaccttgctccccgtgtttaccgtaatattttctttgctcgggcattatgtgatgcctgatacttttgccgcgccggatatgaacggtttgggttatgttggcgcactggtcgtggtcgggggtgcggttacggcggcggtgggggacaggctgttcaaacgccgctag

SEQ ID NO: 45446 - DNA, 1518 bp, Neisseria meningitidis
atgtctcctaaaaaaatacccatttggcttaccggcctcatcctactgattgccctaccgcttaccctgccttttttatatgtcgctatgcgttcgtggcaggtcggcatcaacctcgccgtcgaactgttgttccgcccgcgtatgtgggatttgctctccaacaccttgacgatgatggcgggcgttaccctgatttccattgttttgggcattgcctgcgcccttttgttccaacgttaccgcttcttcggcaaaaccttttttcagacggcaatcaccctgcctttgtgcatccccgcatttgtcagctgtttcacctggatcagcctgaccttccgtgtcgaaggcttttgggggacagtgatgattatgagcctgtcctcgttcccgctcgcctacctgcccgtcgaggcggcactcaaacgcatcagcctgtcttacgaagaagtcagcctgtccttgggcaaaagccgcctgcaaacctttttttccgccatcctcccccagctcaaacccgccatcggcagcagcgtgttactgattgccctgcatatgctggtcgaatttggcgcggtatctattttgaactaccccacttttaccaccgccattttccaagaatacgaaatgtcctacaacaacaataccgccgccctgctttccgctgttttaatggcggtgtgcggcatcgtcgtatttggagaaagcatatttcgcggcaaagccaagatttaccacagcggcaaaggcgttgcccgtccttatcccgtcaaaaccctcaaactgcccggtcagatcggcgcgattgtttttttaagcagcttgttgactttgggcattattatcccctttggcgtattgatacattggatgatggtcggcacttccggcacattcgcgctcgtatccgtatttgatgcctttatccgttccttaagcgtatcggctttaggtgcgattttgactatattatgtgccttgccccttgtttgggcatcggttcgctatcgcaattttttaaccgtttggatagacaggctgccgtttttactgcacgccgtccccggtttggttatcgccctatccttggtttatttcagcatcaactacacccctgccgtttaccaaacctttatcgtcgtcatccttgcctatttcatgctttacctgccgatggcgcaaaccaccctgaggacttccttggaacaactcccaaaagggatggaacaggtcggcgcaacattggggcgcggacacttctttattttcaggacgttggtactgccgtccatcctgcccggcattaccgccgcattcgcactcgtcttcctcaaactgatgaaagagctgaccgccaccctgctgctgaccaccgacgatgtccacacactctccaccgccgtttgggaatacacatcggacgcacaatacgccgccgccaccccttacgcgctgatgctggtattattttccggcatccccgtattcctgctgaagaaatacgccttcaaataa

SEQ ID NO: 45447 - DNA, 2007 bp, Neisseria meningitidis
atggctgatatgaagaaaattacccctcaaaacctgcgccccctgctttcggaaagcttgggacataccgattttgtcaacgtcctcaacgcactgattaaatttttgcgccgtggcggcaaaaaatgtgcgggggaacgtttcgacctgattatcgacacattcaaacaagacagggaattgctgtcccgcttcagccggtgtttttacatctggctcgcgcaaatacacatttatccggcactcatcaaactcggcatcttctcgcgccacagctttgcccgggaaatgggcatacgcatctacgaacgcttcagcccgtcatataaagattttgccaacttgggcgaagtcttcctttatcttttccattccgaaaacgacgacaaatggctgcaaacgctcaatatccgccaatggctggttttatacgaactcatccggagccacgccgaaccgtccaaattgcagacggcgggcatccgccttgccgatgcgcgtttgcgcgccatcgaaatgctgtctgtctggacggcatccgaagccatcgaacccgacctcatccgcatcgccccgcgcctgctggaagccgattcttccttcgtcgccctccaacgcgaaaccgccaaactggtcgaacactaccgcaacggcaccgcgccttacgacaccgcccacctcgaagtgatgttcgaccaatgtttcagccagattgactatttgcgccgcaaagggacgggcgccggctccggttcgtcggtcaaagtcgcccacctgctcgaacggctccggcagaccgtagaccgtctgaagctgctcaccgacatccaaaccggcgccggcaacagcaaccgcctgaccatcgcgctgatgaactccctcatctacgcggcggtcgaacaatacagcacccgccacctgcgccgcagcagcatccgtatgctcgcccgcagcattaccgaaaacaaaagccaccacggcgaacactacatcacccgcaaccgcaaagaatatttcaaaatgttctactcggcggcaggcggcggcgtcatcatcgccctgatggcgctgctcaaaatccgcatcggcacactcggcctcagccccttcctcacttccttgtcggccgggttcaactacggcatcggctttatgatcatccatatgctgcactgcaccgtcgccaccaagcagcccgcgatgactgccgccagctttgccgaacaggtcgatctcaacgaaggcggcaaagcggtggacaacaaactcgccaagctcctcatcgacgtatgccgctcccaaagcgtcgccgtcttcggcaacgtttccatcgccatccttttggcgtgcgccatatcgttcggctatgcccatctgtaccggcagcccatactcgatgcccacaccgccgcctaccagttcaaatccatagacatcatcgcttacccgacgctgtggtatgccgccattgcaggtctgtggctgttctgctccggcatcatcgcaggttttttcgacaaccgcgccgactacctcaacctgcgccaacgcctgcctttcaaccccttgctgcgtaaaatcatgcgccccgggccccgccgcgtcctcgccgcctacatccacaaacactacggctcgttggtaggcaacttcatcttcgggatgctcttgggtatgaccggctatttcggacacctcctcgggctgccgctggacatccgccacgtcgccttttcctccgccaacctcggctatgccgccgtcagcggcaacgtcggtttgggcacgttcgtactcggcattttcagcgtcctcgccatcggcctggtcaacctctgcgtcagtttcagcctcgccctcttcgtcgccctgcgctcgcgccgcacgaaaatcggcagcatccgcaatctgattaaaagtttttggaatcagattaaaagcaatccctgcatacttttcctcccgcccgccaaagaacagggacatcctccttcggacaagccttga

SEQ ID NO: 45448 - DNA, 507 bp, Neisseria meningitidis
atgcccctactagacagtttcaaagtcgatcacacccgtatgcatgcccccgccgtacgcgtggcgaaaaccatgaccacgcccaaaggcgacaccattaccgtgttcgacctgcgcttttgcattcccaacaaagaaatcctgcctgaaaaaggcatacacacgctggagcatttgttcgcaggttttatgcgcgaccacttgaacggcaacggcgtggaaatcatcgacatttccccgatgggctgccgcaccggtttctacatgagccttatcggcacgccttccgaacagcaggtcgccgatgcatggctcgcctcgatgcaggatgtgggcaatgtcaaagaccaaagcaaaatccccgagttgaacgaataccaatgcggcacttatcaaatgcactcgctcgccgaagcgcagcaaatcgcgcaaaacgtgttggcgcgcaaagtggcggtgaacaaaaacgaagagctgacgctggatgaagggctgctgaacgcctaa

SEQ ID NO: 45449 - DNA, 480 bp, Neisseria meningitidis
atggctaacttagtaaaaacctttctgctcggcgagttggtaaaaggcatgggcgtaacgctcaaaaacttttttgcccgcaaagacacaatttatttccccgaagagaaaacgccgcaatccgtgcgtttccgtggcctgcacgcgcagcggcggtatccgaacggcgaagagcgctgtatcgcgtgtaaattgtgcgaggcagtttgtccggcaatggcgattaacattgaatcggaagaacgcgaagacggcacccgccgcaccaagcgttacgatatcgacctgaccaagtgcatcttctgcggtttctgcgaagaggcctgcccgaccgatgcgattgtggaaacgcatatttttgaataccacggcgagaaaaaaggcgacttgcacatgaccaagccgatcctcttggcaatcggcgacaaatacgaagccgaaatcgccaaacgcaaagccgctgacgcgccgtatcgttaa

SEQ ID NO: 45450 - DNA, 633 bp, Neisseria meningitidis
atgacggtatgggtcggactgaccggcggaatcggcagcggcaaatcggcagccgcgcaatgttttgccgatttgggcgtgccgcgcatcgatgcagacgcggcggcgcactcgctgacggcttcagacggcatcgccctgccggaaatcaggcggctgttcggcgacaccgttttcgacacacagggtttgttgcggcgcgacatattgcgtaaagaagtctttgcctccccatcgcgaaaagccttgctcgaatccgtgatgttgccgctgattttctcagaaatcaaaaaacagcaagaaacctttaccgatgcggcttacggcattgtcgaaattccgctgctgacggaaaagcgtcaatttatcatcctgatacggcgtgtcctgaccataagtgcccctgtggaaaaacgtatcggcagggtgatggcccgcagcgggctgacgcgcggcgaggtggctgccgtcatcagccatcaggcatccgaatccgaacgcctgctgcttgcagacgatgtgctgctcaatgacggcagcctcaaaagcctgcgtgagaaaacaatgcgcctgcacgcgttttattcagggattttcgcctcaaaaccaacacaaggaaaacacaatggctga

SEQ ID NO: 45451 - DNA, 180 bp, Neisseria meningitidis; identical to SEQ ID NO: 42055

SEQ ID NO: 45452 - DNA, 1233 bp, Neisseria meningitidis
atggctaaaaacggaggactttctttattttcaaagaaagaaaaacgctttatctttgaaggcaggcattccgcctccgacaaactggtcaacggcgaagtatccgcgtttaccgaagaagaggcgcgcaaaaaactggcaaaacgcggcatccgcccgttgcagattacccgtgtgaaaacaagctccaagcgcaaaatcacacaagaagacatcaccgttttcacccgccagctgtccacgatgattaaagcgggcctgccgctgatgcaggcatttgaaatcgtggcgcgcggacacggcaacccgtctatgacggaaatgctgatggaaatccgaggcgaagtggaacagggcagctcgttgagccgcgcattctcaaatcacccgaaatatttcgaccgcttctactgcaacctggttgcggcgggcgaaacgggcggcgtattggaaagcctgctggacaaattggcaatttacaaagaaaaaacccaggccatccgcaaaaaggtaaaaaccgcgctgacctatccggtatccgtcatcgccgtcgccatcggtttggtattcgtgatgatgattttcgtactgcccgcctttaaagaagtttacgccaatatgggcgcggagcttcccgcactgacccaaacagtgatggatatgtccgactttttcgtctcatacggctggatggtgctgatcgcactgggctttgccatatacggcttccttaaattgaaggcgcgttcgattaaaatccaacggcgtatggatgccatactgctgcgtatgccgattttcggagacattgtccgcaaagggacgattgcccgctggggcaggacgacggcgacgctgattgcggcaggcgtgcctttggtcgatgtattggactccactgccggcgcggcgggcaatttaatctatgaagaagccacccgggaaatccgtacgcgcgtcatccaaggtttgtctatgacttcggggatgcgtgcgacggaactgttccccaatatgatgttgcagatgtcttccatcggcgaggaatcgggttctttggacgatatgctcaacaaagccgccgaattttacgaagacgaggtggacaatgcggtcggcaggctgtccgctatgatggagccgatcattatcgtgattttaggcttggtcatcggcacgcttctggtcgccatgtatctgccgctgtttaatttgggcaacgtggtcgcctga

SEQ ID NO: 45453 - DNA, 777 bp, Neisseria meningitidis
atgcgcgcagtccccccgccccatatctccatcacaggcctaggttacctcggcctgccgctggcacaaaagttttaccaacacggcagccgcgtcgccgccataaaacgcagcctgacttcggacgacatcaacctgcccatacatctcgacaccttcgacctcggcagcaccgatgcctttcagacggcattgtggcggcaccacgccgacaaacccgtctggttcttcctgctaccgccctcctcgctgacgcattacgccgacaccgtcaaacaatgggcagaacttgcccgggcgtgcaacgtgcaacacctgattttcacaagcagcaccagcgtttacggcgatacagcgcgcgaatgcgacgaaaccgccacacccgatccgcaaaccgagtccgcccgccaaatcctcgccgccgaacaacacctgctcgacagcggcatctccaacatcgacatcctgcggctgggcgggctttattgcgccgaacgccatcccgtcagccgccttgttcaaaagcaaaacatcccgggcggcaaccgccccatcaacatcgtccaccgtaatatcgccgtcgaaagcctgtttcagacggcatttaaccccggcggcaggcggctgaaaaacattatcgaaccgcgccacccgacacgacgcgaattctacacggaagaagccgccaaactcggtttgccggctcctgatttcgcacccgacgacagcatgggcaaaatcatccgtaccgtttgcgataacagcttaagcctgtaa

SEQ ID NO: 45454 - DNA, 1050 bp, Neisseria meningitidis; identical to SEQ ID NO: 36439

SEQ ID NO: 45455 - DNA, 741 bp, Neisseria meningitidis
atgctgattgtccgaccgtcgggcagggcgaaggacgatgtggaaacctgccgtcgtgccgaatggcaggcggaagtgttgagtccgattgaaatcgaaaccgacaaagcaagcctgaaacggctgccggaaatgtatgcccgtgcggatgccgtgttttgggtcagtccgaccgccgttgaaaccgccgtcccgtaccttaacctttcagacggcataaagatgcacatttccgtagggcagggcagccgccgtgcattggaacgctgtttgggcagaacggtcatcgcgcctgatgacggcaacgacagcgaggcggttttgcgcctgccggtttggaacagtctgcccgaaggtgcgcgcgtattgtttgtgcgcggacacggcgggcgggattttctgatgaatgccttgcaggagaaaggttttcggacggaggtggcagaagtctatttcagacggcataaacctttgaactttcaaaatttccaaaccgaaaatattgccgccgcctatattacgtccgcagaactcgtgcagtcgctgtttgcacaggttccgccgcaattttcccgattcttcaaatccttgctatactttacccatcatccgcgcattgcggaggcattgaagcgcgaaggcgtgtgttcggtcgaaaccgtccctacgctggaagccgcgctttcccattcttccatttccgtttcagacggcatggtctttcccggaacctcaaattaa

SEQ ID NO: 45456 - DNA, 2502 bp, Neisseria meningitidis
gtgctgaagacaccccctacgcttgctgcagaactttcgggtaaaaccggtgtgagcattagcgcaccgtatgccaatgagaacagccgcatcattttgagtgccgccgatatagccgcagaaaacggcaaaatcaaactgcaatcctacggcgaccaatcctattacgccgggcagggcgaactctataccttagaacgccgcagctacaaaaccggcaaatggtacaaccgcaaacacattaccgaagtcaaagaacacaaaaacgccaagcccgacgcagtaaacctcagcgcatcccaaggtatcgacatcaaatctggtggcagcatcgacgcctacgccaccgtattcgatgcccccaaaggcagcattaacatcgaagccgggcggaaattgacactctatgccgtagaagagctcaactacgacaaactagacagtcataagaaacgcaaatttctcggcattacttatgataaggtacatgatacctctacccaacagatgcaaactgccttaccaagccgtgtagtggctgaatcagctaatctgcaatcaggttgggataccaagttacaaggtacgcagtttgaaaccacgctgggcggcgcggtcatccgtgcaggcgtaggcgaccaggcacgggccgatgccaagattatcctcgaagggatcaaaagcagcatccacacagaaaccgtaagcagcagcaaatccgccctctggcaaaaacaggcaggacgcggcagcaacatcgaaaccctgcaactgccaagtttcaccggccccgttgcgcccgtactctctgctcccggcggttacattgtcgacattccgaaaggcaatctgaaaacccaaatcgaaaccctcaccaagcagcccgagtatgcttatttgaaacaacttcaagttgcgaaaaacatcaactggaatcaggtgcagcttgcttacgataaatgggactacaaacaggagggcatgacacccgcagcagcagctgtcgtcgttatcgtcgtaaccgtattgacctacggtgcactgtccgccccggcagccgccggaacggcgggcgcggcaggcgcaggagcgggaggagccgcagcaggaacggcagccggaactggagtagcagcaggaacggcagccacaaccggagtagcagcaggcacatcagctgcagctatcaccacagccgcaggcaaagccgcactggccagtctcgccagccaagccgcagtttccctcatcaacaacaaaggagacataaaccataccctgaaagaactgggcaaaagcagcaccgtcagacaggccgccaccgccgccgtaaccgcaggcgtactgcagggcataagcgggctgaacacccaagcagccgaagccgtcagcaaacattttcacagtcccgcagcaggcaaactgaccgctaacctgatcaacagcaccgctgccgcaagtgtccataccgccatcaacggcggcagcctaaaagacaacttgggcgatgccgcactgggtgcgatagtcagtaccgtacacggagaagtagcgagcaaaatcaaatttaatctcagcgaagactacattgcccacaagattgcccatgccatagcgggctgtgcggcagcggtagcaaataaaggcaaatgtcgggacggcgcaatcggcgcggcagtcggcgagatggtgggagaaaccctgttggacggacgcgatgtaggcaaactgtcaccccaagaacgccaaaaagtcatagcctactcgcagattatcgcaggcagcgcagtggcattggttaaaggggatgtgaatacggcggcgaatgcggctactgtggcagtggagaataatagtcttttagctcgcaggagggtaaatatacgttggactccgcgacaagaattggaacatgaatatgccattcttgaaatccaggccattaccaatcaaatccgaaggctggatccgaaatttaacgggattgctattatgaggaatcctagagagccgtggacaagacatgatgtacaaacatacaggcaatattataatcaattaagggaatccagaggcattcctgttctcccaatttatagaatgaggataaacaacggcaatgaatttaaccgtatcatgtcatcaaaatacccttataatgagctttatgtagccaatcctaaatcggtaacgggacattttagggtagattcgtataatcctgcaacaagggaaattatttcaagaaaatttacccaattttctcaaatccaagaaagtacggggattggttatatcaaggaggctgttagaaaatatagccctggtgctgtcatttccaatgttccaagtacacctgcttcgctaagaggaagaaaacttacaggaaaacttattttagaagttcctgctcaggtcaatccaattccacaatctgtattaagggcggcacaagaagaaaatgttatcattagagatacaacaggaaggatttacaaatga

SEQ ID NO: 45457 - DNA, 1764 bp, Neisseria meningitidis
atgggttttcctgttcgcaagtttgatgccgtgattgtcggcggtggtggtgcaggtttacgcgcagccctccaattatccaaatccggtctgaattgtgccgttttgtctaaagtgttcccgacccgttcgcataccgtagcggcgcagggcggtatttccgcctctctgggtaatgtgcaggaagaccgttgggactggcacatgtacgataccgtgaaaggttccgactggttgggcgaccaagatgcgattgagtttatgtgccgcgccgcgcctgaagccgtaattgagttggaacacatgggtatgccttttgaccgtgtggaaagcggtaaaatttatcagcgtcctttcggcggccatactgccgaacacggtaaacgcgcggtagaacgcgcctgtgcggttgccgaccgtacaggtcatgcgatgctgcatactttgtaccaacaaaacgtccgtgccaatacgcaattctttgtggaatggacggcacaagatttgattcgtgatgaaaacggcgatgtcgtcggcgtaaccgccatggaaatggaaaccggcgaagtttatattttccacgctaaagctgtgatgtttgctaccggcggtggcggtcgtatttatgcttcttctaccaatgcctatatgaataccggcgatggtttgggcatttgcgcgcgtgcgggtattccgttggaagatatggaattctggcaattccacccgaccggcgtggcaggtgcgggcgtgttgattaccgaaggcgtacgcggcgagggcggtattctgttgaatgccgacggcgaacgctttatggaacgctatgcgccgaccgtaaaagacttggcttctcgcgacgttgtttcccgcgcgatggcgatggaaatctacgaaggtcgcggctgcggtaaaaacaaagaccatgtcttactgaaaatcgaccatatcggcgcagaaaaaattatggaaaaactgccgggcatccgcgagatttccattcagttcgccggtatcgatccgattaaagacccgattcccgttgtgccgactacccactatatgatgggcggtattccgaccaactaccatggcgaagttgtcgttcctcaaggcgacgaatacgaagtgcctgtaaaaggtctgtatgcggcaggtgagtgcgcttgtgcttccgtacacggtgcgaaccgcttgggtaccaactccctgttggacttggtggtattcggtaaagctgccggcgacagcatgattaaattcatcaaagagcaaagcgactggaaacctttgcctgctaatgctggtgagttgacccgccaacgtatcgagcgtttggacagccaaaccgatggtgaaaacgttgatgcattgcgccgcgaactgcaacgctccgtacaattgcacgccggcgtgttccgtactgatgagattctgagcaaaggcgttcgagaagtcatggcgattgccgagcgtgtgaaacgtaccgaaatcaaagacaagagcaaagtgtggaataccgcgcgtatcgaggctttggaattggataacctaattgaagtggcgaaagcgactttggtgtctgccgaagcacgtaaagaatcacgcggtgcgcacgcttcagacgaccatcctgagcgcgatgatgaaaactggatgaaacatacgctgtaccattcagataccaatactttgtcttacaaaccggtacataccaagcctttgagcgtggaatacatcaaaccggccaagcgcgtttattga

SEQ ID NO: 45458 - DNA, 372 bp, Neisseria meningitidis
atggctattactaaagaagacattttggaagcagttggttctttgaccgtaatggaattgaacgacttggttaaagcttttgaagaaaaattcggtgtttctgctgctgctgttgcagttgcaggtcctgctggtgccggtgctgtcgatgctgaagaaaaaaccgaatttgatgtcgttttggcttctgccggcgatcaaaaagtcggcgtgattaaagttgtccgtgcaattaccggtttgggtctgaaagaagctaaagacatcgttgacggtgcacctaaaaccattaaagagggtgtttctaaagctgaagccgaagacatccaaaaacaactggaagaagccggcgctaaagtcgaaatcaaataa

SEQ ID NO: 45459 - DNA, 1218 bp, Neisseria meningitidis; identical to SEQ ID NO: 36341

SEQ ID NO: 45460 - DNA, 1515 bp, Neisseria meningitidis
atgactacctccaaatgccccgtaacccatctgaccatgaacaacggcgcgcctgttgccgacaatcaaaacagcctgaccgccggtcctcgcggccctctgctggcgcaggatttgtggctgaatgaaaaactcgccgacttcgtgcgcgaagtcatccccgaacgccgtatgcacgccaaaggttcgggcgcgttcggtacgtttaccgtaacgcacgacatcaccaaatacacccgcgccaaaatcttcagcgaagtcggcaaaaaaaccgagatgttcgcccgtttcaccaccgtggcaggcgaacgcggcgcagccgatgcagaacgcgacatccgtggctttgcgttgaaattctataccgaagaaggcaactgggatgtggtcggcaacaacacgcccgtgttcttcctgcgcgatccgcgtaagttccccgacttgaataaagccgtcaaacgcgatccgcgcaccaatatgcgttccgccacaaacaactgggacttctggacgctgctgcctgaagcgttgcaccaagttaccatcgtgatgagcgaccgcggcatccccgccggctaccgccatatgcacggcttcggttcgcatacctacagcttctggaacgaagcaggcgagcgtttttgggtgaaattccatttccgcacccaacaaggcattaaaaacctgaccaacgaagaagccgccaaaatcatcgccgacgaccgcgaaagccatcagcgcgacttatacgaagccatcgaacgcggcgagtttccgaaatggacgatgtacatccaagtcatgcctgaagcagacgcggaaaaagtaccttatcatccgtttgacttgaccaaagtttggccgaaaaaagactatccgctgattgaagtgggcgaattcgagttgaaccgcaatcccgaaaacttcttcgccgatgtagaacaatccgcctttgctccgagcaaccttgtgcccggtatcggcgcgagccccgacaaaatgctgcaagcgcgtttgttcaattacgccgacgcgcaacgctaccgcttgggcgtgaacttccgccaaatccccgtcaatcgtccgcgttgccctgttcacagcaaccagcgcgacggacaaggccgagccgacggcaactacggcagcctgccgcactacgaacccaacagcttcggacaatggcagcagcagcccgacttcgccgaaccgcctttgaaaatcaacggcgacgcggcacactgggactaccgccaagatgatgacgactacttcagccaaccgcgcgccctgttcaacctgatgaacgacgcgcagaaacaggcattgttcggcaacaccgccgccgcaatgggcgacgcgcccgacttcatcaaataccgccatatccgcaactgctaccgttgcgatccggcatacggtgaaggcgtggcaaaagccctcggactgactgtcgaagacgcacaagccgcccgcgcgaccgaccccgcactcggccagcccggtttgctgtaa

SEQ ID NO: 45461 - DNA, 672 bp, Neisseria meningitidis
atgatgaagacttttaaaaatatattttccgccgccattttgtccgccgccctgccgtgcgcgtatgcggcagggctgccccaatccgccgtgctgcactattccggcagctacggcattcccgccacgatgacatttgaacgcagcggcaatgcttacaaaatcgtttcgacgattaaagtgccgctatacaatatccgtttcgagtccggcggtacggttgtcggcaataccctgcaccctacctactatagagacatacgcaggggcaaactgtatgcggaagccaaattcgccgacggcagcgtaacctacggcaaagcgggcgagagcaaaaccgagcaaagccccaaggctatggatctgttcacgcttgcctggcagttggcggcaaatgacgcgaaactccccccggggctgaaaatcaccaacggcaaaaaactttattccgtcggcggtttgaataaggcgggtacaggaaaatacagcataggcggcgtggaaaccgaagtcgtcaaatatcgggtgcggcgcggcgacgatacggtaatgtatttcttcgcaccgtccctgaacaatattccggcacaaatcggctataccgacgacggcaaaacctatacgctgaaactcaaatcggtgcagatcaatggccagtccgccaaaccgtaa

SEQ ID NO: 45462 - DNA, 483 bp, Neisseria meningitidis; identical to SEQ ID NO: 40363

SEQ ID NO: 45463 - DNA, 558 bp, Neisseria meningitidis
atgaacatcattgataccgccattcctgacgtaaaactgcttgagccccaagtcttcggcgacgcgcgcggcttttttatggaaaccttccgcgacgagtggtttaaaacccaagtctgcgaacgcaccttcgtgcaggaaaaccactccaaatccggcaaaggcgtattgcgcggcctgcactaccaaaccgaaaacacacaaggcaaactcgtacgcgtagttgtcggcgaagtattcgacgtggccgtcgatatgcgtaaagactcccccactttcggcaaatgggtaggcgagattctgtccgcagaaaacaaacgccaactgtgggtacccgaaggtttcgcacacggcttctatgtactgagcgatgaagccgagttcgtctataaatgcacagactattacaaccctgaagccgaacactcactaatttggaatgatccgaccgtcggcatcgactggccgctacaaggcgagccgaacctgtcgcccaaagaccttgccggcaaaacgtgggcgcaagccgaaaagctccgccttacactttcccgataa

SEQ ID NO: 45464 - DNA, 213 bp, Neisseria meningitidis; identical to SEQ ID NO: 36410

SEQ ID NO: 45465 - DNA, 363 bp, Neisseria meningitidis
atggatatccgatatttcggcacaacgccccgctattccgaagccgtcggcgcaaacggcttgattttcctctccggcatggttcccgaaaacggtgaaacggctgccgaacagactgccgacgtgcttgcccaaatcgaccgctggctggcggaatgcggctcggacaaggcacacgttttagatgcggtcatctatctgcgcgatatgggcgactacgcggaaatgaacggcgtgtgggacgcttgggttgccgccggcagaacgcctgcccgcgcctgcgtggaagctcggctcgcccgtccggagtggcgcgtcgaaatcaaaataaccgccgtgaagaaagacgcggcaaccgaataa

SEQ ID NO: 45466 - DNA, 612 bp, Neisseria meningitidis
atgttaccctcgaaatatgaagataacacactgcaaattaaagaaaaaagtacagaaagaactgctccgttttttgtgctggaagttaccgcccgttctgccgccgatattttgggtatccatcccaattcggcagcactgttctaccgtaaaatccgcacggttatcaaccatcatttggccttggctgccgatgaggtttttgagggccctgtcgagccggacgaaagcgatttcggcggacggcgtaaaggcagacgtggtcgcggtgcggcaggaaaagtggttgtcttcggcattctgaaacgcaacggacgggtctataccgttgtggtggataatgccaagtctgaaacgttactccctgtcatcaaaaagaaaatcatgccggacagcattgtttataccgatagtctgagcagctgcgacaagttggacgtgagcggttttatccattaccgcatcaaccattccaaggaatttgcagaccgtcagaaccacattaacggcattgagaacttttggaatcaggcaaaacgcgtcttgcgaaaatatagtggattggcacgaacgtttccccgaattggaagcgcaactgggtgcgccgattga

SEQ ID NO: 45467 - DNA, 486 bp, Neisseria meningitidis
  misc_feature 463, 464, 465, 466, 467: 'n' is a, c, g or t
atggtcattgcagccattatggcgatgatagccctccccaatatgagccaatggattgcatcccgccgcattgccagtcacgcggagcggattgccaaccttttgcgtttctccaggggcgaagccgtccggctcaatctccctgtctatatctgtcctgttcaagttaaaaaagacggtgcgcccaacaatagatgtgacttcagcaagaaggggcggggaatgttggctttcggcgacaaaaacggcaataaggcatatgacggcgatgcggcggatgttttcctccgcagcgtggtgttgaatgataccgacgacagccggattaattatgccttcaaccatatcgctttcggttcgtctcagccgaccgccgaccgtgtagtttggacattcaatcaaaacgggacgttcggttatacgaaagaccagcatcttacaagcaaatccagctttttttatnnnnncacacacttaattaattaa

SEQ ID NO: 45468 - DNA, 273 bp, Neisseria meningitidis
atgcctattgataatatacctttttatatttttgatttaattgatcttaaagaaggagtaggagatatttataatattttggattttgttccgaattcagacttatctaaagaccaagatgacgcattaacaggcattgccttcttaagggggatagatgtctatgaccctcccgtttcaaaagaaaaagcattaaaagccttaaagaaacatcctgaaatttatcagaggtttcagcatttctttccgtttgtagaactgcccccgctttaa

SEQ ID NO: 45469 - DNA, 459 bp, Neisseria meningitidis
atgaaaacccaaatcagccttgctgctgccgccatcacactgctcctttccgcctgcggaggcagcggaataccttcccaacccaaaggcgaaatttccgaaaaccgcaccgccgcgttcaaatctatgatgcccgacttctcgcgtatgggcaaaatggtcaaaggcgaagaaccttacgatgtcgaaaaattcaaacaggcggcagcggcgtttgccgacagcagcaaaaaaccgtttacgctttttgagtccgacccgcaaggcaacgggcgcgcactgcccgccgtttggtcggatggtgcaaaatttgaagccgaaaaaacaaaattcgccgccgccgtcgaaaaactcaacgccgccgcccaaaccggcaaactggacgaaatcaaagccgcctacggcgaaaccggcgcaagctgcaaatcctgccacgacagcttccgcgcgcccgaataa

SEQ ID NO: 45470 - DNA, 639 bp, Neisseria meningitidis
atgtccaaactgaccccccgcgaaattttgaccgccggcgcagttgtgccggtaatggcgattgacgacttaagcaccgccatcgatttgtcccacgcccttgtcgaaggcggcatccctaccctcgaaatcaccctgcgcacccctgtcggcctcgatgccatccgcctgattgccaaagaagtgcccaacgccatcgtcggcgcaggtacggtaaccaatcccgaacagcttaaagccgtcgaagacgcaggcgcggttttcgccatcagcccggggctgcatgaatccctcgccaaagccggccgcaacagcggcatccccctgattcccggtgttgccaccccgggcgaaatccaactggctttggaacacggcatcgacaccctcaaactcttccctgccgaagtcgttggcggcaaagccatgctcaaagccctgtacggcccttacgccgatgttcgcttctgcccgacaggcggcatcagcctcgccaccgcgcccgattacttggcactgcccaacgtcctgtgcgtcggcggctcatggctgacgccgaaagaagccgtgaaaaacaaagactgggacaccatcacccgtctcgccaaagaagcggcggcattgaaacccaaagcctga

SEQ ID NO: 45471 - DNA, 318 bp, Neisseria meningitidis
atgaaaaaagccctgaaatggattgccgtctttatcgctttttccgtttggtcattcggcatatttctgtacggattcaataacgggactgaagcaggaatgcaatgcgcccaaatcaaaggtaatggactttgtgcaatgtcctttgatggttcggcttcaaaaatcgaattttcagaccttaatgagaaaaatgataaacaaaccctttgctttcaatcattatgggaatttaacgatgaatgcgaaaaaaaagaatctaattctatatattatatagacctacccgaaaacaatcccaaagacataaaacaataa

SEQ ID NO: 45472 - DNA, 360 bp, Neisseria meningitidis
atgctttccaacatcatccccctttccatcggtgcggcactcggtgcaacggcgcgttggctgctcaacctcgccgttcctgccgccatgtctcccgccacgggcaacctgtttgccaactggacgggcgcgctgctcatcggcatctttgccgaaaccatcaatcacccgcaatggaagctgctgctgattaccggttttctcggcagcctgaccacgctttccggattttcactggaaaccgtaaccctgctccaatcgaatcgtcctgcttcagcacttgccaatattttcctacacacggcaggttcgctgctgctgacttggctcgggctgaagataggggcggcagtcaaataa

SEQ ID NO: 45473 - DNA, 276 bp, Neisseria meningitidis
atgaacgcgtcaaactggagcgtttacctgatattgtgtgaaaacagcgcgttctattgcggcatcagcccgaatccgcaacagcggcttgccgcccacacaaccggtaaaggcgcgaaatatacccgcgtattcaaaccggtggcgatgcgtatcgttgcaggcgggatggataaaggcacggcactcaggcaggaaatcgccgtcaaaaaactgaccgccgcacaaaaacggcaattgtgggagcaggcagaaaaaatgccgtctgaaacctga

SEQ ID NO: 45474 - DNA, 369 bp, Neisseria meningitidis
ttgaataatattcctgttgaaatccgtttgttgaaaaaccgtaccgtgttggttttgacttatggggacgaacctaaaaatctgcctgccgaatttttacgcgtctattcgccgagtgcggaagtgcgcggacacggtgtgggacaggatgttttgcagaccggtaaggcagatgtgcaaattacggatttgcagcctgtcggacagtacgcgctgaaaatcagtttttcggacgggcacgacagcggtctttacgattgggcgtatctgcacagactggcatacggatacgatgcgatgtggcaggaatatttggacaaattggcggcggcgggcgcgtcgcgttttgaaaagcaatcagattgttaa

SEQ ID NO: 45475 - DNA, 507 bp, Neisseria meningitidis
atgtttgaacaagaagacgaatgggtcagcaaaacccaaatgaaaaagcagatgaacggtttgcaggatttgggtatggagctgaccaagctctcaagcgacacgttgaaaaaaatcggcttggacgaagatttgtacgaagccgtcgttacctataaaaaaatcacatccaacggcgcgctcaagcggcaggcgcaatttatcggcagactgatgcgcgataccgatcccgcgcccatcgaggcatttcttgccaagctgcgcggcgacgatgcggcgcacaacgcctttttgcaacgtgtggagcggacgcggatggagctgctggcagacgacggcgcgttgacgcagtttatgtcggattttccgcatgcggacgcgggcaagctgaggacactcatccgcaataccaaaaaagagcaggagcaaaacaaaccaccaaaaaatttccgcgccctgtttcaagagttgaaaaccgtgatggaaaacggggacgcggaaatttag

SEQ ID NO: 45476 - DNA, 810 bp, Neisseria meningitidis; identical to SEQ ID NO: 39750

SEQ ID NO: 45477 - DNA, 378 bp, Neisseria meningitidis; identical to SEQ ID NO: 38701

SEQ ID NO: 45478 - DNA, 795 bp, Neisseria meningitidis
atgaatacgattttggctttcgatattgaaaccgtacccgatgtgcagggtatccgaacattgtacgagctgccgtcctcgctgcccgacgatgaagtggtgctgtttgcccagcaaaaacgccgtgctcagacgggtggggattttatgcagcatcatcttcatcagattgtggcgatttcgtgctgcatgcgttgggggcaggataaagtccatgtcggcaccatcggcgagatggacgatggcgaagaagtcgtgattgccaaatttttcgagttgattgaaaaacatacgccgcaactggtcagttggaacggcggcggtttcgacctgccggttctgcattaccgctccctgatatacggcattaacgccgcgcgctattgggatatgggcgacggcgatttcggcgacagccgcgatttcaagtggaacaactacatcagccgttatcaccaacgccactgcgatttgatggatttgctcgcgctttaccagccgagggcaaacgtgccgctggacgatatggcgaaactgtgcggttttccgggcaagctgggtatggacggcagcaaggtgtgggatgcgttccacgcgggcaggctgaaagaaatccgcaattattgcgaaaccgatgccgtgaatacgtatttgatgtatctgcgtttttgtctggtcagcggcagattcgacgcggacgaatacgaaatggaaatcaagcggatcagaaactatctttccacccaaacagaagataaaccgcattggtcagaatttgcccaagcgtggaaatag

SEQ ID NO: 45479 - DNA, 441 bp, Neisseria meningitidis
gtgaacatccgccgtgccgtttatgccgattgcgaggagctggccgcactcgatgccgtctgcaacccgtccgcatggacgcaacgccaattcgaatccgcactcgtttcgccgtccgaacaggttttccttgcggaaaaagacggcaggttggccgcctttatcgtttggcagaacctgcccgacgaatccgaactgcacctgattgccaccgctcctgcataccgccgccggggtgttgcgtccgccctactcgaatactggttcgccaacctgcccgaaggcacgcaacgcctgctgctcgaagtccgcgcaggcaacaccgccgcacaggtgctgtacgcggcacacggctttaccgatgcgggcaggcggaaaaactattaccgtacagccgacggtaaaaccgaagatgccgtcttaatggagaaaatatgttaa

SEQ ID NO: 45480 - DNA, 330 bp, Neisseria meningitidis; identical to SEQ ID NO: 37077

SEQ ID NO: 45481 - DNA, 1302 bp, Neisseria meningitidis; identical to SEQ ID NO: 39130

SEQ ID NO: 45482 - DNA, 1386 bp, Neisseria meningitidis
atggacggctggacacagacgctgtccgcgcaaaccctgttgggcatttcggcggcggcaatcatcctcattctgattttaatcgtcaaattccgcatccacgcgctgctgacactggtcatcgtcagcctgctgacggctttggcaaccggtttgcccacaggcagcattgtcaacgacgtactggtcaaaaacttcggcggcacgctcggcggcgtggcgcttctggtcggcctgggcgcaatgctcggacgtttggtcgaaacatccggcggcgcacagtcgctggcggacgcgctgatccggatgttcggcgaaaaacgcgcaccgttcgcgctgggcgttgcctcgctgattttcggcttcccgattttcttcgatgccggactaatcgtcatgctgcccatcgtgttcgccaccgcacggcgcatgaaacaggacgtactgcccttcgcgcttgcctccatcggcgcattttccgtcatgcacgtcttcctgccgccccatccgggcccgattgccgcttccgaattttacggcgcgaacatcggccaagttttgattttgggtctgccgaccgccttcatcacatggtatttcagcggctatatgctcggcaaagtgttggggcgcaccatccatgttcccgttcccgaactgctcagcggcggcacgcaagacaacgacctgccgaaagaacctgccaaagcaggaacggtcgtcgccatcatgctgattcccatgctgctgattttcctgaataccggcgtatcggccctcatcagcgaaaaactcgtaagtgcggacgaaacctgggttcagacggcaaaaataatcggttcgacaccgatcgcccttctgatttccgtattggtcgcactgtttgtcttgggacgcaaacgcggcgaaagcggcagcgcgttggaaaaaaccgtggacggcgcactcgcccccgtctgttccgtgattctgattaccggcgcgggcggtatgttcggcggcgttttgcgcgcttccggcatcggcaaggcactcgccgacagcatggcggatttgggcattcccgtccttttgggctgtttccttgtcgccttggcactgcgtatcgcgcaaggttcggcaaccgtcgccctgaccaccgctgccgcgctgatggctcctgccgttgccgccgccggctttaccgactggcagctcgcctgtatcgtattggcaacggcggcaggttcggtcggttgcagccacttcaacgactccggcttctggctggtcggccgcctcttggacatggacgtaccgaccacgctgaaaacctggacggtcaaccaaaccctcatcgcactcatcggctttgccttgtccgcactgctgttcgccatcgtctga

SEQ ID NO: 45483 - DNA, 873 bp, Neisseria meningitidis; identical to SEQ ID NO: 38119

SEQ ID NO: 45484 - DNA, 828 bp, Neisseria meningitidis
atgaaactcgatatttatgctttgctggaacgcgccctgctttcgggcgacccagatgaaaaaggacggctgacggatgaggcgtttgccgccgttcaaaatgcggacggggcggaagcaaacgcgccgccggcggacttcccccgagcgggacggccggacaagcctgttttggtcgcgccgtcgcaactgaccccgcgcaaaatgaacacaaccgaaggttatgcggcgatgctgcacgcgattgcgcatatcgaattcaacgccgtcaatctagctttggacgcggcataccgtttccgcacgctgccgtttcagtttgtccgcgactgggtgaaagtggcgaaggaagaggtgtaccatttccgcctgatgcgcgacagattgcgcgctttcggcttcgattacggcagtttcgaggcgcacaaccatttgtgggatatggcgtacaaaaccgcctacgacccgctgttgcgtatggcgttggtaccgcgcgtgttggaagcgcgcgggctggacgttacgccggggatacgcgcgaaggtggcgcagcgcggcgattcggaaacctgcggcgtattggacatcatttaccgcgacgaagtgggtcatgtcgccatcggcaaccattggtatcaacacctctgccgcgaacgcggtttggaaccgattaccctgttccgcagtctgattgcccgttacgatatgtttatcttccgcggctatgtgaacatcgaagcgcgcgaaaaagcgggcttcagccgctttgaattggatatgctggaagatttcgagcagggtttgaaacagaacaaaaataccgtctga

SEQ ID NO: 45485 - DNA, 711 bp, Neisseria meningitidis
atgaatgcagccatcgaacacgtccaagccgtcgccttcgatttggacggcacactgtgcgattccgtccccgaccttgccgccgccgcagaagcgatgttggagcaactcggtatgaaaccgctgcctgcaaaagtggtcgaaagctatgtgggcgacggcatcggcaaactggttcaccgcgtcctcaccaacgaccgcgaccgcgaagccgattccgaactgtgggaaaaaggtttcgtatcctatatgaaatactaccgcgaccatttgagcgtcttcacccgcccctatcccaaaaccgaagccgggctggcattgctcaaatctttaggcatcccgctcgccgtcgttaccaacaaaaacgaaatccttgccgtcgaactgttgaaacagctcggacttgccgactacttcagcctgatactcggcggcgacagcctgcccgagaaaaaacccagccccctgccgctgcggcatgccgccgaagttttgggtatcgatgttgcaaacatggttatggtcggcgactcgcgcaacgacatcatcgccgccaaagccgccggctgcctgagcgtcggcgttaccttcggttacggcgatatgacgctgctctcgcaagacgatgcgacccgccccgactggattatcggctcgctgcccgaaatttacgaaaacctgcaaccgcagaaaaataaagacgaagaataa

SEQ ID NO: 45486 - DNA, 510 bp, Neisseria meningitidis
atgattatcctgcacaccaacaaaggcgacatcaaaatcgaactcgatttcgacaaagcccccgttaccgccaaaaacttcgagcaatacgtcaaagacggcttctacgacggcgtaatcttccaccgcgtcatcaaaggcttcatgattcaaggcggcggcatggatgaaaacatgaacgaaaaagaaacccgcgatccgattcaaaacgaagcgtccaacggcctgcccaacgataaatacaccatcgccatggcacgcacttccgacccccattccgccagcgcgcaattcttcatcaacactgccgacaacgctttcctgaacttccgttctaaagagctgtacggcaaaaccgtcgtccaagactggggctatgccgtattcggtaaagtcgttgacggttttgacgttgtcgatgccatcgaaggcgtatccaccaaacgccacggctaccatgacgacgtaccgagcgaacctgtcgtcatcattaaagccgaagcggtataa

SEQ ID NO: 45487 - DNA, 948 bp, Neisseria meningitidis
atgaatatcctcagtaaaatcagcagctttatcggaaaaacattttccctctgggccgcgctctttgccgccgccgcttttttcgcgcccgacaccttcaaatgggcggggccttatattccttggctgttgggcattattatgttcggtatgggtttgacgctcaaaccttccgacttcgatattttgttcaaacatcccaaagccgtcatcatcggcgtaatcgcacaattcgccattatgccggcaaccgcctggctgctgtccaaactgttgaacctgcctgccgaaatcgcggtcggcgtgattttggtcggctgctgcccgggcggtacggcttccaatgtgatgacctatctggcgcgtggcaatgtggctttgtcggttgccgttacgtctgtttccaccctgatttccccattgctgactcccgccatcttcctgatgcttgccggtgaaatgctggaaatccaagcggccggtatgttgatgtccatcgtcaaaatggttttgctccccattgttttgggtttgattgtccataaggttttgggcagtaaaaccgaaaagctgaccgatgcgctaccgctggtttccgttgccgccatcgtgctgattatcggcgcggttgtcggggcaagcaaaggcaagattatggaaagcggcctgctgatttttgccgttgtcgcactccacaacggcatcggctacctgctcggcttctttgccgccaaatggaccggcctgccttatgatgcacaaaaaacgctggccatcgaagtcggtatgcaaaactcggggctggccgccgcgcttgccgccgcacactttgccgctgcgccggtcgttgccgttccgggcgcattgttcagcgtgtggcacaatatctccggctcgctgctggcaacttattgggcggccaaagccggtaaacataaaaaaccctaa

SEQ ID NO: 45488 - DNA, 465 bp, Neisseria meningitidis; identical to SEQ ID NO: 38372

SEQ ID NO: 45489 - DNA, 3486 bp, Neisseria meningitidis
atgcgcctgacccacatcaaactctccggcttcaaatcttttaccgacccgaccacgattcatgttccggggcagcttgtcgcggttatcgggccgaacggttgcggcaagtcgaatgtgattgacgcggtgcgctgggtgttgggtgaggcttcggcgaagcagcttcgcggcgagagtatgcaggacgtgatttttaacggtgcggcgacgcgccgtcctgcgccgagggcttcggtggagctggtgtttgacaacagcgaccacagtttgcagggggcgtgggggcagtatgccgaggtgagtatcaagcggcagctgacgcgtcagggcgaatcgacttatttcatcaataatcagaccgtgcgccgccgcgacattaccgatttatttttgggtacgggcgtgggcgcgcgcggttatgccgttatcgagcaggggatgatttcgcgcatcatcgaagcgcggccggaggaattgcgcgcctatatcgaggaggcggcaggtgtgtccaaatataaggaacgccgcaaggagacggaaggccgtctgaaagacacgcgcgagcatttgcagcgtttgggcgatttgcagaacgaattggcgcgtcaggtggaaaagctggagaaacaggcggaaaccgccgaacgctacaaatccctgaccgcgcagttgaaccggcaacaggatttgctcgattacgcccaatggcagcaatcgcttgccgccgccgacaaggcgaccgagcagcatcagtctttgcaggcgcagcaggacgaaaccgccgcgcaggttcaggcgttaaacgacgaagtacacgccttgcagaccgccgaacagtcgcagcaacaggcggtgcatgaattgagcaacaagcgcggcgtgttgcgcgagcagattgcccgtttggaagaacaaatccgccatcagcaaaacctgcaccaacgcatcgaacgcgacaagcaggcggcgcaggcgcagttgcagcgtattcatcaagagcagcagcaaatccgcgtgcagcttgaagaaaacgagttatacgtcgaagaaaagcaaaccgagctggcggagtgggcgatgcaggttgccgaacacgaagagcgtctgcccgaattggaagaaacccaaaccgcgctcaatgccgccttccaaacccagcaggacgaggcaaaccgcatccgccgcgaactggcgttgaagcagcagcagcttgcccatgccgaacaaaccgttgccaagcacgaagagcgcaaaggccgtctgaaacaggagaaccaagccctgaacctgcccgacgaagcggaaaccgccgccgcgcaggaggccgctgccttgttgcaaagccggcaagagcattacgaagaacaaatcatcgccgccgaagaagccttacacgccgcccgcgaggcgtttcagacggcctcaaaccgcttccaaagcctgaagcagcaacatatcaccttgcaggcgcagcagcaggcgttgtcgcaaatcctgtcgcaacagcaggaagcagccgatttctggcaggcaaccgaccacgccgccgcgccgcagctgtggcaacacatcaccgcgcctgccgagtggcagcacgccttgtccgtcatccttgcagaacgcctgcacgcccgcgccgtgccgcaaggtttcgtaccgcccgaacctttgccgcaggggcaggcggcgtggctttcagacggtctctccggcggcatcaaaaaatccctgcccgtacaggcattgctgaaccaaatccaagcgcagccgccgtttcagacggcattgcactactggctcgacggcgtattgtgcgcgcccgatttgagctatgccctcgcgcatcaaaacgatttgggcgcacaccaaatctggctcacgcccgaaggtcatcaggtcgataaagtcagcgtcctgctctatgccaaacccgcgcaggaaagcctgattgcccaaaaagcgcgcctcgacggcatcgcgtccgaactggaaaacctcgcccccgaactttccgccgccgaagccgcgttcaaacaggcggaagctgccgtgcgctcgtctgaagtgcaacataaaaacctgatgcagcagcaacagcagcacacgcgccaatacagtcaggcgcagcaacgcgccgccgaactcttagcgcgtaccaaccaagggcaaatccgccgcgaacacatcgagcgcgaactggcgcagttggcggaagaacagaccgtgttgcaacacacgtccgacgggctttcagacgacatcgttaccttgcaggaagccgccgccgaactcgaacaccagcagcaaaccaccgcgcacagccgccaagagcagcaaggccgtctgaaacaggcgcagcttgccctgttggaagccaaccgccaatatgggcttgccgaagtcgccgtccacaaactcaaccagcaaaaacaaaactaccggcagcaaatcgcccagcttgaacagcaaaccctcgactggcaggaacgccagcaagagcttgtcctcgcctatgaaaccgagttccaaaacgacgagcagcacatcaagctcgacgagctgaccgaatccgtacacacgctggacgaagaatacatcgccgtgcaggaaaaactcacgcagattcaggagcagggtagggaacaatacgcccgcgtacaaaccctgcaaacccagttgccacagcttcaggccgccacccaaaccgccctgttgcaacaacaggaagccctgatcaacgccaaacgctaccatcaaaacctgaccgaacgcgccgccgatttggatgcgctcgaagcgttggcgaaagaatcgccgaaagtattgaacagcagcatcggcagcctctcgcaacaaatcgaagccctcggcgcggtcaacctcgccgccctgcaagaactcgaagaagcgcgcgaacgcgacggctactaccgcagccaaagcgaagacgtgcaggccgccatcaccattttggaagaagccatcgcccaaatcgacgacaaaaccaaagcgcgtttcaaagaaaccttcgacgccgtcaacggcaaagtccaaaccttcttcccgaccctgttcggcggcggcgaagccactctcaaaatgataggcgacgacctactgaccgccggtgtgtccattatggcgcgtccgcccggcaagaaaaacagcaccatccacctcctctccggcggcgaaaaagccctcaccgccatgagcctcgtgttcgctctgttcagcctcaaccccgctccgttctgccttttggacgaggtcgatgccccgctggacgacgccaacacctcgcgtttctgcaacctggtcaaagaaatgtcggcgcaaacccagttcctctacatctcccacaaccgcctgaccatggaaatggcagagcagctggtcggcgtaaccatgcaggaaaaaggcgtatcgcgcgtcgtcgccgtggacatcaagcaggcgttggaaatggcggaagccgtttga

SEQ ID NO: 45490 - DNA, 177 bp, Neisseria meningitidis; identical to SEQ ID NO: 38352

SEQ ID NO: 45491 - DNA, 264 bp, Neisseria meningitidis; identical to SEQ ID NO: 37542

SEQ ID NO: 45492 - DNA, 2889 bp, Neisseria meningitidis
atgagtaacacaaccgtagaacaatttgccgccgagctgaaacgccccgtcgaagacctgttgaaacagttgaaagaagccggcgtcagcaaaaccggcggcggcgattccctgacgctggacgacaaacagcttctgaacgcctacctgaccaagaaaaacggcagcaacagcagcaccatcagcatccgccgcaccaaaaccgaagtcagcaccgttgacggcgtaaaagtcgaaacacgcaaacgcggacgcactgtcaacattccttctgccgaagagttggcagcacaggtaaaagccgcccaaacccaagccgcacctgtccggccggagcagacggcagaagacgcggcaaaagcccgagccgaagctgccgcacgtgcagaagcccgtgccaaggcagaagcggaagcggcaaaactgaaagcggcaaaagcaggcaacaaagccaaacctgccgcgcagaaacccaccgaagcaaaagccgaaaccgcacccgttgcggcggaaaccaaacccgccgaagaaagcaaagcggaaaaagcccaagccgacaaaatgccgtctaaaaaacccgccgagcccaaagaaaaagccgccaagccgaaacacgagcgaaacggcaaaggcaaagatgccaaaaaaccggcgaaacctgccgcacctgccgtgccgcaacccgtggtcagcgcggaagaacaggcgcaacgcgatgaagaagcacgccgtgccgccgcacttcgcgcccaccaggaagccctgttgaaagagaaacaggaacgccaggcacgccgcgaagccatgaaacaacaggcagaacaacaggcaaaagccgcacaggaagccaaaaccggcagacagcgtcccgccaaacctgccgagaaaccgcaggcagccgcgccggccgtcgaaaacaaacctgtcaatccggcaaaagcgaaaaaagaagaccgccgcaaccgcgatgacgaaggtcaaggccgcaacgccaaaggcaaaggcggaaaaggcggacgcgaccgcaacaatgcacgcaacggcgacgacgagcgcgtacgcggcggtaaaaaaggcaaaaaactcaaactcgagccgaaccaacacgccttccaagcaccgaccgaacctgtcgtacacgaagttttggtgcctgaaaccattaccgttgccgacttggcacacaaaatggcagtcaaaggcgtggaagtggtcaaagccctgatgaagatgggcatgatggttaccatcaaccaatccatcgaccaagacaccgccctgattgtcgtcgaagaactcggccacatcggcaaacccgccgccgccgacgatcccgaagccttcttggacgagggcgcggaagcggtggaagccgaagcattgccgcgtccgcccgtcgttaccgtcatgggccacgtcgaccacggcaaaacctcgctgctggactacatccgccgtaccaaagtggtacagggcgaagcaggcggcattacccaacacatcggtgcataccacgttgaaaccccacgcggcgtgattaccttcttggatactccgggtcacgaagcgtttactgccatgcgtgcgcgcggtgcgaaagcaaccgatatcgtgattcttgtggtcgccgccgacgacggtgtgatgccgcaaaccatcgaagcgattgcccacgccaaagcggcaggcgtaccgatggtggttgccgtcaacaaaatcgataaagaagccgccaacccagagcgtatccgccaagagctgaccgcacacgaagtcgtgcctgacgaatggggcggcgatgtacagtttatcgacgtttccgctaaaaaaggcctgaacatcgatgcattgctcgaggcagtcttgctcgaagccgaagttttggaactgaccgcacctgtcgatgcgcccgccaaaggcatcatcgtcgaggcgcgcttggacaaaggccgcggcgcggttgccacattgctggttcaaagcggcacgctgaaaaaaggcgatatgctgctggccggtacggcattcggcaaaatccgcgcgatggtcgatgaaaacggcaaatccattaccgaagccggtccgtccatccccgtcgaaatcctcggcttgtccgacgttccgaacgcaggcgaagatgcaatggtattggctgatgagaaaaaagcgcgcgaaatcgccctcttccgtcaaggcaaataccgcgatgtgcgccttgccaaacaacaggcggcgaagctggaaaatatgttcaacaatatgggcgaaacccaggcccaatctttgtcggtcatcatcaaggcagacgtgcaaggttcttacgaggctttggcgggcagtctgaaaaaactgtccacagacgaagtgaaagtgaacgtgttgcacagcggcgtgggcggcattaccgaatcggatgtcaaccttgccatcgcttcgggcgcgttcattatcggctttaacgtgcgtgcagatgcctcttcgcgcaaacttgccgaaaatgaaaatgtggaaatccgctactacaacatcatctatgatgccatcgacgacgtgaaagccgccatgagcggtatgctttccccggaagagaaagaacaggttaccggtacggtcgaaatccgtcaggtcatctccgtttccaaagtcggcaacattgcaggctgtatggttaccgatggtgtggtcaaacgcgattcccatgtccgcctcatccgcaacaacgtggtcatccacacgggcgaactggcttcgttgaaacgctataaagacgacgtaaaagaagtccgcatgggctttgagtgcggtctgatgctcaaaggctacaacgaaatcatggaaggcgaccaactggaatgcttcgacatcgtcgaagttgcccgcagcctgtaa

SEQ ID NO: 45493 - DNA, 492 bp, Neisseria meningitidis; identical to SEQ ID NO: 39850

SEQ ID NO: 45494 - DNA, 501 bp, Neisseria meningitidis; identical to SEQ ID NO: 37418

SEQ ID NO: 45495 - DNA, 201 bp, Neisseria meningitidis; identical to SEQ ID NO: 38240

SEQ ID NO: 45496 - DNA, 780 bp, Neisseria meningitidis
atgaaagaacacaaagcccgcaagcgtttcgggcagaattttttgcaggacacgcggattatcagcgatattgtcaacgccgtgcgcccgcaggcggatgatgtcgtgattgaaatcggtccgggtttggcggcgattaccgaacctttggcgaaaaagctgaaccgcctgcacgttgtcgaaatcgaccgcgacatcgtatgccgtctgaaaacgctgccgtttgcggataaactggtgattcacgaaggcgatgtattgcagtttgatttcaacggcatcgcaggcaaaaagaaaatcgtcggcaacctcccgtacaacatttccacaccgcttttgttcaagctggcggaggtggcggacgatgtcgtcgatatgcactttatgctgcaaaaagaagtggtcgagcgtatggttgccgcgccgaaaagcaacgactacggccgcttgggcgtgatgctgcaatattttttcgatatggaaatgctgattgacgtaccgcccgaatcgttcgaccctgcgccgaaagtggattccgccgtcgtccgtatgattccggtgaaacaccgcatcggcaaggcggacgatttcgagcatttcgccaaactggtgaaactcgccttccaccaacgccgcaaaaccatacgcaacaacctgaaagagcttgcaggcgacgatgatttgcaggctgtcggcatcaatccgcaagaccgtgccgaacacatcgcgccggaaaaatacgtagcgttgagcaattatctggcgggcaaggccgtctga

SEQ ID NO: 45497 - DNA, 1188 bp, Neisseria meningitidis
atgaataccttactcaaccaactcaaaccctatccctttgcccgactgcgtgaagcgatgcagggcatttccgcccccgaaggtctggaagccgtcccactgcatatcggcgaaccgaaacatccgacaccgaaagtcattacggatgcgctgaccgcctcattgcacgagttggaaaaatatccgctgacggccggtttgcctgaactgcgtcaggcgtgtgcgaactggttaaaacgccgttatgatgggttgacgctgaattccgacaccgaaattctgccggttttgggaagtagggaggcgttgttttcttttgtccaaaccgtgttgaaccctgtttcagacggcctcaaacccgtaatcgtcagcccgaatcccttttatcagatttatgaaggtgcgacacttttgggcggcggtgaaatccattttgccaattgccccgcgccgtctttcaaccccgattggcgtagtatttccgaagaggtttggaaacgcaccaaactggtgttcgtctgctcgcccaacaaccccagcggcagcgtgctggatttggacggatggaaagaagtttttgatttgcaggacaaatatggtttcattattgcctcggacgaatgctattccgaaatctatttcgacggcaacaagcctttgggctgcctgcaggccgctgcacagttggggcgaagcaggcaaaaactgcttatgttcaccagtttgtccaagcggtccaatgttccaggcctgcgttccggttttgtcgccggcgatgccgaactgcttaaaaattttctgctttacagaacctatcacggcagcgcaatgagcattcccgtacagcgtgccagtattgccgcctggaatgacgaacagcacgttattgacaaccgccgcctgtatcaggaaaagtttgaatgggttattcctatcctgcaacaggtatttgacgtcaaattaccggatgcctcgttttacatctggttgaaagtccccgatggcgacgatttggcatttgcacgcaatttatggcaaaaagccgctatccaagtattacccggacgctttttggcacgggataccgaacagggcaatcccggggaaggttatgtccgtatcgctttggttgccgatgtcgcaacttgtgtcaaagctgcggaagacatagtttcactgtatcggtaa

SEQ ID NO: 45498 - DNA, 330 bp, Neisseria meningitidis
atgctttcacaatcccaatggctggatgccgtcaaagggcggttacgggtgcgttccgattacgcgctttccaaaagatgggcggttacgccgtccgaggtgtcccaatatcggcgcaaccggttgcggtttccttttgccgtcgtcttggatattgccgacgtgatggatatagatccgattgaaattattgcaggtttggaatataggcggtgcagggaaaaggacatggagcgcgtcaaaggggcgtatttcaaagcccattgcgcgcattttgtctatccgaacaatccgggctttttccgccgtaaaaaacggtttttcggctag

SEQ ID NO: 45499 - DNA, 1071 bp, Neisseria meningitidis
  misc_feature 4, 5, 6, 7, 8: 'n' is a, c, g or t
gtgnnnnngccttatgtgccgccggtgcaaagcgcgccggtttatacgcctcctgcttatgttccgccgtctgcacctgccgtttcgggtacatacgttccttcttacgcacccgtcgacatcaacgcggcgacgcatactattgtgcgcggcgacacggtgtacaacatttccaaacgctaccatatctctcaagacgatttccgtgcgtggaacggcatgaccgacaatacgttgagcatcggtcagattgttaaagtcaaaccggcaggatatgccgcaccgaaagccgcagccgtaaaaagcaggcccgccgtaccggctgccgcgcaaccgcccgtacagtccgcacccgtcgacatcaacgcggcgacgcatactattgtgcgcggcgacacggtgtacaacatttccaaacgctaccatatctctcaagacgatttccgtgcgtggaacggcatgaccgacaatacgttgagcatcggtcagattgttaaagtcaaaccggcaggatatgccgcaccgaaaacctcagccgtagaaagcaggcccgccgtaccggctgccgtgcaaacccctgtgaaacccgccgcgcaaccgcctgtgcagtccgcgccgcaacctgccgcgcccgctgcggaaaataaagcggttcccgcgcccgccccgcaatctcctgccgcttcgccttccggcacgcgttcggtcggcggcattgtttggcagcgtccgacgcaaggtaaagtggttgccgatttcggcggcaacaacaagggtgtcgatattgccggtaatgcgggacagcccgttttggcggcggctgacggcaaagtggtttatgcaggttccggtttgaggggatacggcaatctggtcatcatccagcataattcttccttcctgaccgcatacgggcacaaccaaaaattgctggtcggcgaaggccagcaggtcaaacgcgggcagcaggtcgctttgatgggcaataccgacgcttccagaacgcagcttcatttcgaggtgcggcaaaacggcaaaccggttaacccgaacagctatatcgcgttctga

SEQ ID NO: 45500 - DNA, 2163 bp, Neisseria meningitidis
atgcaacaaaaaatccgtttccaaatcgaaggcatgacctgccaggcctgcgcttcgcgcattgaaaaagtgttgaacaaaaaagactttgtcgaatcggcgggggtgaacttcgccagcgaggaggcgcaggttacgtttgacgacagcaaaacttccgcagccgacattgccaaaatcattgagaaaaccggttacggcgcgaaggaaaaaacggaagatacattgccgcaagctgaagcagaacaccatatcggctggcggctgtggctgctgtccgccatcaatattccgttccttgtcggtatggcggggatgatgatcggtaggcacgattggatgattccgccgttgtggcagtttgcgctggcaagcattgtgcaactttggctggcaatcccgttttacaaaagcgcgtgggcgagcattaaaggcgggctggcgaatatggacgtgctggttactatcggcacggtgtcgatttacctgtattccgtttatatgttgtttttcagtccgcacgcggcacacggaatggcgcacgtgtattttgaagcgggcgtgatggtgattggttttgtgtcgctgggcaaatttttggaacaccgtaccaaaaaatccagcctgaacagcttgggcttgctgctcaaactcacgccgacccaagtcaacgtgcagcgcgatggcgaatggaaacagcttcccatcgaccaagtgcaaatcggcgaccttatccgcgccaaccacggcgaacgcattgccgccgacggcgttatcgaaagcggcagcggctgggcggacgagagccatcttaccggcgaatccaatcccgaagagaaaaaggcgggcggcaaagtgttggcgggcgcgctgatgaccgaaggcagcgtggtgtaccgcgccgcgcagctcggcagccaaaccctgctcggcgacatgatgaacgcactctctgaagcgcaaggcagtaaagcaccgattgcgcgcgtggcggacaaggcggcggcggtgttcgtgcctgccgtcgtgggcatcgcgttgttgacttttattgttacttggctgattaagggcgattggacggttgcgctgatgcacgccgtcgccgttttggtgattgcctgcccgtgtgcgctcggtctggctacacccgccgcgattatggtcggcatgggtaaagcagtgaaacacggcatttggtttaaagacgcagcggcaatggaagaagccgcccacgtcgatgccgttgtgttggacaaaactggcacgctgaccgaaggcaggccgcaggttgccgccgtttattgtgttcccgacagcggctttgacgaagacgatttgtaccgcatcgccgctgccgtcgaacaaaacgccgcccatccgcttgcccgagccatcgtttccgccacccaagcgcgcggtttggagattcccgccgcacaaaacgcgcaaaccgttgtcggcgcaggcattgccgccgaagtggaaggtgcgggattggtgaaagcgggcaaagccgaatttgccgaactgaccttgcccgagttttcagacggcgtttgggacattgcaagcattgttgcagtctcagtcgataacaaacctatcggtgcattcgcacttgccgacgcgttgaaagccgataccgccgaagccataggccgtctgaaaaaacacaatatcgatgtttacatcatgagcggcgacaaccaaggcacggtcgaatacgtcgcccaacaactgggtatcgctcacgccttcggcaatatgagtccgcgcgacaaagccgccgaagtgcagaaactcaaagccgccggcaaaaccgtggcgatggtcggcgacggcatcaacgacgcgcccgcgctcgccgccgcaaacgtcagcttcgccatgaaaggcggtgcggacgttgccgaacacaccgcgtccgccacgctgatgcagcattcggttaatcagctcgccgatgccctgctggtgtcgcaagccactttgaaaaacatcaagcaaaacctgtttttcgccttcttctacaatatcttgggcattccgctcgccgcgcttggctttttaaatcccgtcatcgcaggcgcggccatggcggcaagctcggtttccgtgttgagcaatgccttgcgcctgaaacgggtaaaaatcgattga

SEQ ID NO: 45501 - DNA, 201 bp, Neisseria meningitidis
atgatgcttaaaaccctgacttttgccgcactgcatttcagcaccgccttcagtataacctatgtactgacgggcagtataggcgtatcgggggcggtcgcgctggtcgagcctctaatcaacaccgtcgttttctatagtggattaacaaaaaccagtacggcgttgcctcgccttagctcaacgagaacgattctctaa

SEQ ID NO: 45502 - DNA, 462 bp, Neisseria meningitidis; identical to SEQ ID NO: 39618

SEQ ID NO: 45503 - DNA, 1227 bp, Neisseria meningitidis
atgatgaaaatcaaagccctgatgattgccgccgcattgctggcagcagccgatgtccacgccgcaccgcaaaaggcaaaaaccgcatccgccaaagctgccaaagctgccaaagctgccaaagctgccaaagctgccaaagctgccaaagttgccaaagttgccaaagttgccaaagttgccaaagttgccaaagttgccaaagttgccaaagttgccaaagttgccaaagttgccaaagttgccaaagttgccaaagttgccaaagttgccaaagttgccaaagttgccaaagttgccaaagttgccaaagttgccaaagttgccaaagttgccgccacggcgcaaaaagaagccgcacccgcacaacagcagggcggtatccgcttttcagacggcattgccgccgttgccgacaacgaagtcatcacgcgccgccggcttgccgaagccgtttccgaagccaaagccaacctgcccaaagacgcgcagataagcgaatccgagctgtcccgacaggtgctgatgcagcttgtcaaccaatccctgattgtacaggcgggcaaacgccgcaacattcaagcaagcgaagcggaaatcgatgccgtcgtcgcaaaaaatcccgccctcaaaaacctcagccccgcccaacgccgcgattttgccgacaacatcattgccgaaaaagtccgccagcaggcagtgatgcagaacagccgcgtgagcgaagctgaaatcgatgccttcctcgagcaggcgcaaaaacaaggcatcaccctgcccgaaggcgcaccgttgcgccaataccgcgcccaacacatcctgattaaagctgacagcgaaaacgccgccgtcggcgcggaaagcaccatccgcaaaatctacggagaggcccgcagcggcacagacttttccagcctggcgcgccaatattcgcaagacgcgagcgcgggcaacggcggagatttgggctggtttgccgacggcgtgatggttcccgcctttgaagaagccgtccacgcgctcaaacccggacaggtcggcgcgcccgtccgcacccaattcggctggcatatcatcaaattgaacgaagtgcgcgatgccggcacacctcaggaacgtatccgcaattccgtgcggcaatacatcttccaacaaaaagccgaacaggcaaccgtcaacctgttgcgtgacctgcattccggcgcgtatgtcgacatccgctaa

SEQ ID NO: 45504 - DNA, 1185 bp, Neisseria meningitidis; identical to SEQ ID NO: 37431

SEQ ID NO: 45505 - DNA, 357 bp, Neisseria meningitidis; identical to SEQ ID NO: 39963

SEQ ID NO: 45506 - DNA, 1980 bp, Neisseria meningitidis
atgcctaaaattttacaacaaacaaccttacatcgcttttttcgcgcaaacacgcaccatccgattagcccgtccgttttgcagcaggctggcgatttgataagatggttatgtttttcagacggcatttcagatttccgtccatgccgtctgaagccgcaaaacccgattggaggaactgttatgaataccgtatcgaattacctgtccgcattgcgcgaagccatgaaggcgcaaggcttggatgcactcgtcatcccttccgccgacccccacctgtccgaatacctgcccgagcattggcaggcgcgccgcgaattatcgggctttaccggctcggtcggcacattcgtcgttaccgccgacgaagcgggcgtatgggtggacagccgctattgggaacaagccgccaagcagcttgcgggcagcggcatcgaactgcaaaaaagcgggcaagtgccgccgtataacgaatggctcgcggcaaacctgcccgaaaacgccgccgtcggcatcccttccgatatggtctcgctcaccggcaaacgcactttggcgcaatcgctcgccgccaaaaacatccgcatcgaacacccaaacgatctgcttgaccaagtgtggacaagccgcccggccattcctgccgaaaccgtgttcatccacgaccccgcctacgtctccgaaaccgccgccgaaaaactcgcccgcgtgcgcgccgtgatggcggaaaaaggcgcggattaccacttggtttcctcgcttgacgacatcgcctggctgaccaacctgcgcggcagcgacgtgcctttcaaccctgttttcgtgtccttcctgctgattggcaaagacaacgccgtcctgtttaccgaacaatgccgtctgaacgccgaagccgccgccgcgctgcaaaccgcaggcatcacggtcgaaccttatgcccaagttgccgacaaactcgcgcaaatcggcggcgcgctgcttatcgaaccgaacaaaaccgccgtcagcacgcttgtgcgcctgcccgaaagcgtgtgccttatcgaaggcatcaacccgtccacgctgttcaaatcctgcaaatccgaagccgacatcgcccgcatccgcgaagcgatggaacacgacggcgcggcgttgtgcggtttcttcgccgagtttgaagacatcatcggcaacggcggcagcctgaccgaaatcgacgtggacaccatgctttaccgccaccgcagcgtgcgcccgggttttgtgtcattgagtttcgacaccatcgcaggcttcaacgccaacggcgccctgccgcattacagcgcaacgcccgaaagccacagcaccatcagcggcaacgggctgctgctcatcgactccggcgcgcaatacaaaggcggcacgaccgacatcacccgcgtcgtccctgtcggcacacccaccgccgaacaaaaacgcgacaacaccctcgttctcaaagcccatatcgcgcttgccgaagccgtgttcccagaaaacatcccctcgccgctgattgatgcgatttgccgcaaacccctgtggcaggcgcaatgcgactacggccacggcaccggacacggcgtaggctatttcctcaacgtccacgaaggcccgcagcgcatcgccttcgccgcccccgccacgcccgaaaccgccatgaaaaaaggcatggttacctccatcgaacccggactctaccgcccgggaaaatggggcatccgcattgaaaaccttgccgccaaccaagccgtcgccgcccctcaagaaaccgaattcggcagcttcctctgttttgaaaccctgaccctctgccccatcgacacccgcctgatagacaccgccctcatgaccgacggcgaaatcgactgggtcaaccgctaccacgccgaagtccgccgccgcctcgagccgctgaccgaaggcgcggcaaaagcgtggctgatcaaacgcaccgaaccgctggcgcgttaa

SEQ ID NO: 45507 - DNA, 2766 bp, Neisseria meningitidis
atgagatcttctttccggttgaagccgatttgtttttaccttatgggtgttatgctatatcatcatagttatgccgaagatgcagggcgcgcgggcagcgaggcgcagatacaggttttggaagatgtgcacgtcaaggcgaagcgcgtaccgaaagacaaaaaagtgtttaccgatgcgcgtgccgtatcgacccgtcaggatatattcaaatccagcgaaaacctcgacaacatcgtacgcagcatccccggtgcgtttacacagcaagataaaagctcgggcattgtgtctttgaatattcgcggcgacagcgggttcgggcgggtcaatacgatggtggacggcatcacgcagaccttttattcgacttctaccgatgcgggcagggcaggcggttcatctcaattcggtgcatctgtcgacagcaattttattgccggactggatgtcgtcaaaggcagcttcagcggctcggcaggcatcaacagccttgccggttcggcgaatctgcggactttaggcgtggatgacgtcgttcagggcaataatacctacggcctgctgctaaaaggtctgaccggcaccaattcaaccaaaggtaatgcgatggcggcgataggtgcgcgcaaatggctggaaagcggagcatctgtcggtgtgctttacgggcacagcaggcgcagcgtggcgcaaaattaccgcgtgggcggcggcgggcagcacatcggaaattttggcgcggaatatctggaacggcgcaagcagcaatattttgtacaaacaggcgggttgaaattcaattccaacagcggaaaatgggaacgcgatttgcaaaggcaattctggaaaaccagttactataaacaatacaaagacccccagaaactgaaaaaatacatcgaagaccaagataaagactggcgggaaaacctggcgccgcaatacgacatcacccccatcgatccgtccagcctgaagcagcagtcggcaggcaatctgtttaaattggaatacgacggcgtattcaataaatacacggcgcaatttcgcgatttaaacaccaaaatcggcagccgcaaaatcatcaaccgcaattatcaattcaattacggtttgtctttgaactcgtataccaacctcaatctgaccgcagcctacaattcgggcaggcagaaatatccgaaagggtcgaagtttacaggctgggggcttttaaaggattttgaaacctacaacaacgcaaaaatcctcgacctcaacaacaccgccaccttccggctgccccgcgaaaccgagttgcaaaccactttgggcttcaattatttccacaacgaatacggcaaaaaccgctttcctgaagaattggggctgtttttcgacggtcctgatcaggacaacgggctttattcctatttggggcggtttaagggcgataaagggctgctgccccaaaaatcaaccattgtccaaccggccggcagccaatatttcaacacgttctacttcgatgccgcgctcaaaaaagacatttaccgcttaaactacagcaccaataccgtcggctaccgtttcggcggcgaatatacgggctattacagctcggaaggcgaatttaagcgggcattcggagaaaactcgccgacatacaagaaacattgcaacccgagctgcgggctttatgaacccgtattgaaaaaatacggcaaaaagcgcgccaacaaccattcggtcagcattagtgcggacttcggcgattatttcatgccgttcgccagctattcgcgcacacaccgtatgcccaacatccaagaaatgtatttttcccaaatcggcgactccggcgttcacaccgccttaaaaccagagcgcgcaaacacttggcaatttggcttcaatacctataaaaaaggattgttaaaacaagatgatacattaggattaaaactggtcggctaccgcagccgcatcgacaactacatccacaacgtttacgggaaatggtgggatttgaacggggatattccgagctgggtcagcagcaccgggcttgcctacaccatccaacatcgcaatttcaaagacaaagtgcacaaacacggttttgagttggagctgaattacgattatgggcgttttttcaccaacctttcttacgcctatcaaaaaagcacgcaaccgaccaacttcagcgatgcgagcgaatcgcccaacaatgcgtccaaagaagaccaactcaaacaaggttatgggttgagcagggtttccgccctgccgcgagattacggacgtttggaagtcggtacgcgctggttgggcaacaaactgactttgggcggcgcgatgcgctatttcggcaagagcatccgcgcgacggctgaagaacgctatatcgacggcaccaacgggggaaataccagcaatttccggcaactgggcaagcgttccatcaaacaaaccgaaactcttgcccgccagcctttgatttttgatttttacgccgcttacgagccgaagaaaaaccttattttccgcgccgaagtcaaaaatctgttcgacaggcgttatatcgatccgctcgatgcgggcaatgatgcggcaacgcagcgttattacagctcgttcgacccgaaagacaaggacgaagacgtaacgtgtaatgctgatggcttgtgcaacggcaaatacggcggcacaagcaaaagcgtattgaccaattttgcacgcggacgcacctttttgatgacgatgagctacaagttttaa

SEQ ID NO: 45508 - DNA, 354 bp, Neisseria meningitidis
atgcctgaaatcaaaattttccacaatccgcgttgcagcaaatcgcgtgccgccttgtccctattggaagaacgcggcattgctgccgaagtggtcaaatatttggatacgccgcccgacttgtccgaattgaaggatattttcaacaaattgggcttggcatcggcgcgcgggatgatgcgtgtgaaagatgatttgtacaaggaattgggtttggacaaccccgatttggacaatgacgcgctgctgcgtgccatcgccgagcatcccgccctgttggagcgtccgattgttttggcgaacggtaaggcggctgtcggcaggcctctggaaaatatcgaagcgatattgtga

SEQ ID NO: 45509 - DNA, 750 bp, Neisseria meningitidis; identical to SEQ ID NO: 36645

SEQ ID NO: 45510 - DNA, 2388 bp, Neisseria meningitidis
atgcaactgctggcagccgaaggcattcaccaacaccaattgaatgttcagaaaagtacccgtttcatcggcatcaaagtgggtaaaagcaattacagcaaaaacgagctgaacgaaaccaaactgcccgtacgcgttatcgcccaaacagccaaaacccgttccggctgggataccgtactcgaaggcaccgaattcaaaaccaccctttccggagccgacatacaggcaggggtgggtgaaaaagcccgagccgatgcgaaaattatcctaaaaggcatcgttaaccgcatccaaaccgaagaaaagctggaatccaactcgaccgtatggcaaaagcaggccggaagcggcagcacggttgaaacgctgaagctaccgagctttgaagggccggcactgcctaagctgaccgctcccggcggctatatcgccgacatccccaaaggcaacctcaaaaccgaaatcgaaaagctggccaaacagcccgagtatgcctatctgaaacagctccaagtagcgaaaaacatcaactggaatcaggtgcagcttgcttacgacagatgggactacaaacaggagggcttaaccgaagcaggtgcggcgattatcgcactggccgttaccgtggtcacctcaggcgcaggaaccggagccgtattgggattaaacggtgcggccgccgccgcaaccgatgcagcattcgcctctttggccagccaggcttccgtatcgttcatcaacaacaaaggcgatgtcggcaaaaccctgaaagagctgggcagaagcagcacggtgaaaaatctggtggttgccgccgctaccgcaggcgtagccgacaaaatcggcgcttcggcactgaacaatgtcagcgataagcagtggatcaacaacctgaccgtcaacctagccaatgcgggcagtgccgcactgattaataccgccatcaacggcggcagcctcaaagacaacttgggcgatgccgcactgggtgcgatagtcagtaccgtacacggagaagtagcgagcaaaatcaaatttaatctcagcgaagactacattacccacaagattgcccatgccatagcgggctgtgcggcagcggcggcgaataagggtaagtgtcaggatggtgcgatcggtgcggctgtgggcgagatagtcggggaggctttgacaaacggcaaaaatcctgccactttgacagctaaagaacgcgaacagattttggcatacagcaaactggttgccggtacggtaagcggtgtggtcggcggcgatgtgaatacagcggcgaatgcggctaaagtcgcgattgaaaataacctattatctcaagaagagtatgctcttagagaaaaattgatcaaaaaagccaaagggaaaggcctattatctttagattggggcagcctgaccgaacaagaggcaaggcagtttatctatttgattgagaaagatcgatattctaatcaattgcttgaccgatatcaaaaaaatccaagtagtttaaataatcaagaaaaaaatattcttgcatattttattaaccaaacctctggaggtaacacagcttgggcagcttcgatactgaaaacgccccagtcaatgggtaatctcactattccttccaaagatattaataacaccttatcgaaagcctatcaaacattgagtcgttatgattcttttgattacaaatcagctgttgccgcacaacctgcactttacttattaaacggaccgcttggcttcagtgtcaaagcagctactgtggcagcaggaggatataacattggacagggagcgaaagcaatctctaatggagaatatctgcatggtacagttcaggttgttaatggcacattgatggttgcaggatctgtatctgcacaggctgcaatatcggccaagcctgcacctgttacccgttatctgagcaatgacagtgctcctgctttaagacaagctttaactgctgaaagccagagaatccgcatgaaactgccggaagagtatcgacaaatagggaatcttgcgatagcaaaaattgatgttaaaggattaccgcaaaggatggaagcatttagttctttccaaaaaggggaacatggatttatttcgttacctgaaacaaaaatttttaaacctatatctgttgataaatatcataatattgcctctcctcctagaggaacattaagaaatatagatggagaatataaattacttgaaactatagcacagcaactcggaaataatcgtaatgtatcaggtagaattgatctatttacagaattaaaggcctgtcaatcttgcagcaatgttattttagagtttagaaatcgctatccaaatattcaattaaatatttttacaggaaaatag

SEQ ID NO: 45511 - DNA, 1527 bp, Neisseria meningitidis
gtgaaaccgctgcgcagactgacaaacctccttgccgcctgcgccgtagcggccgccgccttcggacagcccgccctcgcagcggacttggcgcaagacccgttcattaccgataacgcccaacggcagcactacgaacccggcggcaaataccacctcttcggcgacccgcgcggcagcgtctccgaccgcaccggtcaaatcaacgtcatccaagactatacccaccagatgggcaacctgctcatccaacaggcggcaatccaaggcaatcttggttacaccgtccgcttttccggacacggacacgaagaacacgcccccttcgacaaccacgccgccgacagcgcaagcaaagaacaaggcaacgttgacgaaggctttaccgtgtaccggctcaactgggaaggacacgaacatcatcccgccgatgcctacgacggcccgaagggcggcaattaccccaaacctacgggcgcacgagacgaatacacctatcacgtcaacggcacagcccgcagtatcaaactcaatccgaccgacacccgcagcatcaaactcaatccgaccgacacccgcagcatccggcaacgcatatccgacaattacagcaacctcggcagcaatttctccgaccgcgccgatgaagccaacagaaaaatgttcgagcacaatgccaagctcgaccgctggggcaacagcatggagtttgtcaacggtattgccgccggcgcgctcaacccctttatcagcgcgggcgaagccttgggcataggcgacatactgtacggaacgcgctatgccatagacaaagccacaatgcgcaacatcgcccccttacccgccgagggcaaattcgccgccatcggcggcttgggcagcgtggcgggctttgaaaaaaatacgcgtgaagccgttgaccggtggatacaggaaaaccccaatgccgccgaaaccgtcgaagccctggtcaacgtcctgccgtttgccaaagtcaaaaacctgacaaaggcggcaaaaccggggaaggctgcggttagcggggatttttctgctgcatacaatacaagaacaactagaaaagttactacagaaacagaggggttaaatagaatcagacagaaccagaaaaatagtaatatacatgagaaaaattatggaagagataatcctaatcatattaatgttttatctggaaattctatacaacatatactgtatggagatgaagcaggaggtgggcatctttttcctggcaaacctggtaagacaacattcccccaacattggtcagccagtaaaataactcatgaaattagtgatatcgttacatccccaaaaacgcaatggtatgcacagactggaacaggcggcaaatatattgctaaaggaagaccagccaggtgggtatcatatgaaacgagagatggaattcgtatcagaacagtttatgaacctgcaacaggaaaagtggtaactgcattccccgatagaacctctaatcccaaatataaccctgtaaaataa

SEQ ID NO: 45512 - DNA, 2751 bp, Neisseria meningitidis
atgaccgacgcaaccatccgccacgaccacaaattcgccctcgaaaccctgccggtaagccttgaagacgaaatgcgcaaaagctatctcgactacgccatgagcgtcattgtcgggcgcgcgctgccggacgttcgcgacggtctcaagccggtacaccgccgcgtactgtacgcgatgcacgaattgaaaaacaactggaatgccgcctacaaaaaatcggcgcgcattgtcggcgacgtcatcggtaaataccacccccacggcgataccgccgtatacgacaccatcgtccgtatggcgcaaaatttcgctatgcgttatgtgctgatagacggacagggcaacttcggatcggtggacgggcttgccgccgcagccatgcgctacaccgaaatccgcatggcgaaaatttcccacgaaatgctggcagacattgaggaagaaaccgtcaatttcggcccgaactacgacggtagcgaacacgagccgcttgtactgccgacccgtttccccacactgctcgtcaacggctcgtccggcatcgccgtcggcatggcgaccaatatcccgccgcacaacctttccgataccgtcaatgcctgcctgcgcctgctcgatgcacccgacaccgaaatcgacgaactgatcgacattatccaagcccccgacttcccgaccggggcaaccatctacggcttgagcggcgtgcgcgaaggctataaaacaggccgcggccgcgtcgttatgcgcggtaagacccatatcgaacccataggcagaaacggcgaacgcgaagccatcgttatcgacgaaatcccctatcaggtcaacaaagccaagctggtcgagaaaatcggcgatttggttcgggaaaaaacactggaaggcatttccgagctccgcgacgaatccgacaaatccggtatgcgcgtcgttatcgagctgaaacgcaacgaaaatgccgaagtcgtcttaaaccaactctacaaactgactccgctgcaagacagtttcggcatcaatatggtggttttggtcgacggacaaccgcgcctgttgaacctgaaacagattctctccgaattcctgcgccaccgccgcgaagtcgttacccgacgtacgcttttccggctgaagaaggcacgccatgaagggcatattgccgaaggcaaagcggtcgcactgtccaatatcgatgaaatcatcaagctcatcaaagaatcgcccaacgcagccgaggccaaagacaaactgcttgcgcacccttggcgcagcagcctcgttgaagaaatgctgacgcgttccggtctggatttggaaatgatgcgtccggaaggattggctgcaaacatcggcttgaaagagcaaggttattacctgagcgagattcaggcagatgctattttacgcatgagcctgcgaaacctgaccggcctcgatcaagaagaaattgtcgaaagctacaaaaacctgatgggtaaaatcatcgactttgtggatatcctctccaaacccgaacgcattacccaaatcatccgcgacgaactggaagaaatcaaaaccaactatggcgacgaacgccgcagcgaaatcaacccgttcggtggcgacattgccgatgaagacctgattccgcaacgcgaaatggtcgttaccctgacacatggcggctatatcaaaacccagccgaccaccgactatcaggcgcagcgtcgcggcgggcgcggcaaacaggcggctgccaccaaagacgaagactttatcgaaaccctgtttgttgccaacacgcatgattatttgatgtgctttaccaatttgggcaagtgtcattggattaaggtttacaaactgcccgaaggcggacgcaacagccgcggccgtccgattaacaacgtcatccagttggaagaaggcgaaaaagtcagcgcgattctggcagtacgcgagttccccgaagaccaatacgtcttcttcgccaccgcgcagggaatggtgaaaaaagtccaactttccgcctttaaaaacgtccgcgcccaaggcattaaagccatcgcgctcaaagaaggcgactacctcgtcggcgctgcgcaaacaggcggtgcggacgacatcatgctgttctccaacttaggtaaagccatccgcttcaacgaatactgggaaaaatccggcaacgacgaagcggaagatgccgacatcgaaaccgaaatttcagacggcatcgaagatgaaaccgccgacagcgaaaacgcactgccgagcggcaaacacggtgttcgcccgtccggtcgcggcagcggcggtttgcgcggtatgcgcctgcctgccgacggcaaaatcgtcagcctgattaccttcgcccctgaaaccgaagaaagcggtttgcaagttttaaccgccaccgccaacggatacggaaaacgcaccccgattgccgattacagccgcaaaaacaaaggcgggcaaggcaatattgccattaacaccggcgagcgaaacggcgatttggtcgccgcaaccttggtcggcgaaaccgacgatttgatgctgattaccagcggcggcgtacttatccgcaccaaagtcgaacaaatccgcgaaaccggccgcgccgcagcaggcgtgaaactgattaacttggacgaaggcgaaaccttggtatcgctggaacgtgttgccgaagacgaatccgaactctccgacgcttctgtaatttccaatgtaaccgaaccggaagtcgagaactga

SEQ ID NO: 45513 - DNA, 1083 bp, Neisseria meningitidis
atgcaaaccgcaaacaaaaaaaccatcctcgttaccggcggtgcgggctttatcggttctgccgttgtccgtcatattatccgaaacacccaagattccgtcgtcaacctcgacaaactgacctacgcgggcaatctcgaatcgctgaccgacattgccgataatccccgctatgctttcgagcaagtggacatttgcgaccgcgccgaactcgaccgcgtattcgcacaacaccggcccgatgccgtgatgcacttggcggcggaaagccatgtcgaccgctctatcggttcggcaggcgagtttatccaaaccaatatcgtcggcacattcaatctgcttgaagcagcccgcgcctactggcaacaaatgccgtctgaacagcacgaagccttccgtttccaccatatttccaccgatgaagtctatggcgatttaggcggcacggacgatttgtttaccgaaaccgcgccctacgcgccgtccagcccctactctgcctctaaagtgtccagcgaccacctcgtccgcgcgtggttgcgtacttacggcttgccgaccattgtaaccaactgctccaacaactacggtccttaccattttccggaaaaactcattcctttgatgattctgaacgcgcttgacggcaaaccgctgcctgtgtacggcgacggtatgcaaatccgcgactggctgtttgtcgaagaccacgcgcgcgcactgtatcaggttgttaccgaaggtgttgtcggcgaaacctacaatatcggcggccacaatgaaaaagccaatattgaagtcgtcaaaaccatctgcgccctgctggaagaactcgctcccgaaaaaccggccggtgtggcgcgttatgaagatttgattactttcgtacaagaccgccccggccatgacgtacgctacgccgtcgacgcagccaaaatcaggcgggatttgggctggctgcctttggaaaccttcgagtccggcctccgcaaaaccgtgcaatggtatctggacaacaaaacctggtggcaaaatgtattgaacggcagctatcgtttggaacgtttaggtactggaaaatag

SEQ ID NO: 45514 - DNA, 1065 bp, Neisseria meningitidis; identical to SEQ ID NO: 39464

SEQ ID NO: 45515 - DNA, 900 bp, Neisseria meningitidis; identical to SEQ ID NO: 39788

SEQ ID NO: 45516 - DNA, 615 bp, Neisseria meningitidis; identical to SEQ ID NO: 39264

SEQ ID NO: 45517 - DNA, 999 bp, Neisseria meningitidis
atgaagattgcgatttacggtacgaaaagctatgaccgcgaacattttacccgcgccaaccggcatttcggcttcgagctggagttttttgattttatgctggatgcgaaaacggcgaaaatggcggaaggcgcggaagcggtttgtatttttgtaaacgacgacggcagccggcccgtgttggaaaaattggcgcaaattggcgtgaaaactgtggcgttgcgttgtgccggcttcaataatgtggatttaaaggcggctgaagagttgggcttgaaagtcgtgcgcgtgcctgcctattcgcccgaatcggttgcggaacatacggtcggtctgatgctgactttgaaccgccgtatccacaaagcctatcagcgtacccgcgatgcgaatttttcgctggaaggtctgaccggtttcaatatgtacggcaaaacggcgggcgttatcggcacggggaaaatcggtattgcaaccatgcggattttaaagggtttcggcatgaacctgctggctcacgatccgttttgcaaccccgaagcggaaaaaatcggcggcaggtatgtggatttggacgagctgtatgcccagtcggacatcatcacgctgcattgccccgccacgccggaaaaccactatatgctgaacgaagcggcgttcgacaaaatgaaagacggcgtgatgattatcaacaccagccggggcgggctgattgacagtgccgccgcgattgaggcgttgaaacgccggaaaatcggcgcattgggcatggatgtgtacgagaacgagcgcgagctgttttttgaagacaaatccaacgatgtgattaccgacgacgtgttccgccggttgtcgtcctgccataacgtgctgtttaccggtcatcaggcgtttttgacggaagaggcgttgggtaatatttcggaagttacgctgtccaatatccgcgaggtcggacagaccggcgattgcggcaatgcggttcgtgccgacggctga

SEQ ID NO: 45518 - DNA, 459 bp, Neisseria meningitidis; identical to SEQ ID NO: 39773

SEQ ID NO: 45519 - DNA, 585 bp, Neisseria meningitidis
atgcccaaatcaccgccacccaagccgccaccgttcccatcgtcggcaaaaatagaagtcgatgaagaaggacaaatcagcggccaaaccacaccgagtaaggacagcgatgctcgttggatcaagaaaaacggcctctacaaactcggttacaaacaacatacccgtaccgatgtggaaggctatatcgagaaactgcacattactcccgccaatgcccatgagtgcacacacctgtcgccgttgttggaaggactgcccaaaggtacgaccgtctatgccgacaaaggctatgacagtgcggaaaaccggcaacatctggaagaacatcagttgttggacggcattatgcgcaaagcctgccgcaaccgtccgctgacggaggcacaaaccaaacgcaaccgatatttgtcgaagacccgttatgtggtcgaacaaagcttcggtacgctgcaccgtaagttccgctatgctcgggcagcctatttcggactgattaaagtgagtgcgcaaagtcatctgaaagcgatgtgtttgaacctgttgaaagccgccaacaggctaagtgcgcccgctgccgcctaa

SEQ ID NO: 45520 - DNA, 936 bp, Neisseria meningitidis
atggaactctttaaaatcaaacgcgatattccgtttatgagctacggcaaactgacgaccttcatttcgttggttacgtttatcgctgccgtgttcttcttggtgaccaaaggcctgaatttctctgtcgaatttaccggcggtacggtaatggaagtccaatatcagcagggtgcggatgtcaataagatgcgcgaacgcctcgatacgctgaaaataggtgatgtacaggttcaggcattgggtacgaacaaacacatcatgatccgcctgccgaacaaagaaggtgttacttccgcacagttgtccaatcaggttatggatttgctgaaaaaagacagtcccgacgttaccttgcgccaagtcgaatttatcggcccgcaagtcggtgaggaattggtaagtaatggattgatggctttaggttttgtcgttatcggcatcattatttacctgtcgatgcgttttgaatggcgttttgccgtatctgccattatcgccaatatgcacgacatcgtgattattctcggctgctttgccttcttccaatgggaattttcgctgaccgtcttggcgggtatccttgccgtattgggctattctgtgaacgaatccgtcgtcgtcttcgaccgtatccgtgaaaacttccgcaagccggcgatgcgcggacatgccgtgccggaagtcatcgacaacgcgattaccgcaacgatgagccgcaccatcattacccacggttcgaccgaggcgatggttgtttctatgctggtgttcggcggtgcggccttgcacggcttttctatggcgttgaccattggcatcgtgttcggcatttattcttccgtattggttgccagcccgcttctgctaatgttcggtttgagccgcgacaatatcggtaaagaaccgaagaagaaagaagaaatcgtggtttga

SEQ ID NO: 45521 - DNA, 330 bp, Neisseria meningitidis
atgtcccgatgttgtctgaagcggcttcagacggcatcggctgtttcggcgttctccggcggcgttttggaggtggtaagattgtgctgccggcggctatccgtccttttcaatccgggcgtgatgctgtttgtgccggactgtcccgtcggcggcgcggccgggtttttccaatatgaaatgctttgcccgtttttctggcaggggcggttgcagaccggttcgaatcttgcttacgatgtttttatgtctgccggacgtttgaatggcgggcggaatcccccgcacagccgccgttttcttgccctgctttgctccgttgccttataa

SEQ ID NO: 45522 - DNA, 687 bp, Neisseria meningitidis
atgtacgcatttactgccgcacagcaacagaaggcactcttctggctggtgcttttccatatcctcatcatcgccgccagcaactatctggtgcagttccccttccaaattttcggcatccacaccacttggggtgcgttttcctttcccttcatcttcctcgccaccgacctgaccgtccgcattttcggttcgcacttggcacggcggattatcttttgggtgatgttccccgcccttttgctttcctacgtcttttccgttttgttccacaacggcagttggacaggcttgggcgcactatccgaattcaacacctttgtcggacgcatcgccttggccagctttgccgcctacgcgctcggacaaatccttgatatttttgtgttcaacaaattacgtcgtctgaaagcgtggtggattgcaccgaccgcatcaaccgtcatcggcaatgcactggacacgttagtgttttttgccgttgccttttacgccagcagcgatgaatttatggcggcaaactggcagggcatcgcttttgtcgattacctgttcaaacttaccgtctgcggtctgtttttcctgcccgcctacggcgtgattctgaatctgctgacgaaaaaactgacaaccctgcaaaccaaacaggcgcaagaccgccccgcgccctcgctgcaaaatccgtaa

SEQ ID NO: 45523 - DNA, 291 bp, Neisseria meningitidis; identical to SEQ ID NO: 38495

SEQ ID NO: 45524 - DNA, 780 bp, Neisseria meningitidis; identical to SEQ ID NO: 39156

SEQ ID NO: 45525 - DNA, 681 bp, Neisseria meningitidis
atgattttccaaacagtctggttttcagatgtggtactgtcggtttcgtggattgtccttatcctgatactggcagcttccgcgccgtccgcattccgctcgcttgcccgctaccgttccgcccttccactgtgtaccgtaattttttccgcagcatggtgtctgaacgcctctgccggcggcggacagcttgcccagatgaactaccatctgctcgccgtcaatctggttgcactgatggtgggcacttccgccgccttttggcttgccgcgctgctgatgctgccctactgcctgctgtttgccggttctgccggcgcatatccgccgaacgctttggtgctgattctgcccgcgcttgccgtcaaccgcctgtcgcgtatgctggtcaaccgcctgccgcccaatattttcatctttattttcgtcaacggctttctcgcttccgccgccggcattctgttgaccgggctggtgctgaccggtattttggatgctgcaaacgcttttccgtccgaaatattgtggacgaccgccctgcccgtctttattctgctggcgtgggcggaagcttttctcagcggcatttcaactgccatatttgttgcactgaagccccattggatcaacactttcgacgacaaccgctatctgaagtccgaccgcggcatatggcggtag

SEQ ID NO: 45526 - DNA, 147 bp, Neisseria meningitidis
atggcaaattccgcttccaaattctgcattgccaaaggcggcagacgggaagtaaaaaaagacgaaagcggcggcggatatgccctgtgccatttgccggacagcaggattgtcgaggagtgggaatatttccgttcacaacattga

SEQ ID NO: 45527 - DNA, 654 bp, Neisseria meningitidis
atgaagataacgcactgcaaattaaagaaaaaagtacagaaagaactgctccgtttttttgtgctggaagttaccgcccgttctgccgccgatattttgggtatccatcccaattcggcagcactgttctaccgtaaaatccgcacggttatcaaccatcatttggccttggctgccgatgaggtttttgagggccctgtcgagccggacgaaagcgatttcggcggacggcgtaaaggcagacgtggtcgcggtgcggcaggaaaagtggttgtcttcggcattctgaaacgcaacggacgggtctataccgttgtggtggataatgccaagtctgaaacgttactccctgtcatcaaaaagaaaatcatgccggacagcattgtttataccaatagtctgagcagctgcgacaagttggacgtgagcggttttatccattaccgcattaaccattccaaggagtttgcagaccgtcaaaaccacattaacggcattgagaacttttggaatcaggcaaaacgcgtcttgcgaaaatacaatggaatcgatcgcaaatctttcccgctgttcttgaaagaatgcgaatttcgatttaacttcggcacaccgtctcaacagcttaaaatcctgcgggattggtgtgggatttag

SEQ ID NO: 45528 - DNA, 192 bp, Neisseria meningitidis
atgaagatgattgcacgtgtaaccggtatgaaacgaagcaaaggcattacggaaaagggtcaatcttatgattctacgaagctctttattgagattcagtttcctgaaagccaagatatgtgcggatatgctagccaagagttcgcatacggcacatatgaaaactatgaaaaactgcttgcttcagcgtaa

SEQ ID NO: 45529 - DNA, 1137 bp, Neisseria meningitidis
atgaaaaacatatctctttctccgcccgccatgcttggcatcctcggcggcggacaattaggcagaatgtttaccgttgccgccaaaaccatgggctacaaagtaaccgttctcgaccccgatccggacgcgccggcagcagaatttgccgactgtcatttatgcgcgccgtttaacgaccaagctgctttggacgaattggcaaaatgcgcggcggtgaccactgaatttgaaaacgtcaatgccgatgcgatgcgttttctcgccaaacacaccaatgtttcccccggcagcgactgcgttgccatcgcgcaaaaccgcattcaggaaaaggcatggatacgcaaagcaggattgcaaaccgcgccgtatcaagcaatttgcaaagccgaagacatcactgaagaaagcatacaatttctgcccggcatcctgaaaacggctacgttgggctacgacggcaaaggtcaaatccgcgtaaaaacattggatgaactcaaagccgcgtttgccgaacacggcggcgtggattgcgttttggaaaaaatggtggatttgcgcagtgaaatttccgtaatcgtatgccgtttgaacaatgacaacgtgcaaactttcgaccctgccgaaaacatccacgaaaacggcatcttggcttattccatcgtccccgcgcgactgagtgccgacgtgcagcaacaggcgcggcagatggcgcaacgcttggcggacgaattggattatgtcggcgtattggcggtagaaatgtttgttgtcggtgacacgcatgaattggtcgtcaacgaaatcgccccgcgcccgcacaattccggacaccatacgatagatgcctgcgcagcagaccagttccagcagcaggtacgcattatgtgcaacctgccgcctgccgataccaaattactgagttcttgctgtatggcaaatattttgggcgacgtttggcaggaagacggcggcgaaccggattggctgcccttgcaaagccatccgaatgcacacctgcacctttacggcaaaaaaaccgcgcacaaagggcggaaaatgggacactttaccgttttaaccaccgattcggacaccgcatttcaagaagcaaaaaaactgcatcagtccctataa

SEQ ID NO: 45530 - DNA, 360 bp, Neisseria meningitidis; identical to SEQ ID NO: 39361

SEQ ID NO: 45531 - DNA, 876 bp, Neisseria meningitidis
atggcagtaggaaaagagattctcaccaaaatccgcagtgttcagaatacccaaaagatcactaaagcgatgcagatggtgtcaacctctaaaatgcggaagactcaggaacggatgcgtttggcgcgtccgtatgccgaaaaagtgcgtatggtgatgagccatcttgcgcaaaccaataccgatcatggtattccgttactggaatctcatcgggaaatcagacgtgtcggttttattttgattacgtctgataagggtttgtgtggcggtttgaacgccaacgtgttgaaaaagtttttggcacaagttcaagagtatcagaatcaaggtattgaagaggaaatcgtatgccttggcagtaaaggtctgatggcgtgtcagagcattggtctgaatgtggttgccagtgccgtaaatttgggcgataccccaaaaatggaaatgctgctcggacctttgacagaactcttccaacggtatgagaaacatgaaattgacagaatccatctggtgtattcgggttttgtcaataccatgcgtcaagaaccgagaatggaagtattgctgcctatcggtgagaacgtgattggcgattcagctcccaaatcaccgttcagctgggaataccgctacgaaccgactgcacttgcagtgttggaatatctggttcgccgctatttagagtctgtggtttatcaggcgttgagcgacaatatggcatccgaacaggcagcccgcatggttgccatgaaagctgcaacagacaatgcaggcaatgccatcaaagagttgcgtttggtatataacaaatcgcgtcaagctgcgattaccacggaattgtcagaaattgtagcaggtgcggcggctgtctga

SEQ ID NO: 45532 - DNA, 1458 bp, Neisseria meningitidis
atgaaaccaaccatcgcgcttgtcggccgccccaacgtcggcaaatctactttattcaaccgtttgacgcgcaccaaagacgcgctcgtacacgacctgcccggtctgacgcgcgaccgccattacggacacggcaaagtcggcagcaaaccttatttggtcatcgataccggaggtttcgagccggttgtggacagcggcattttgcacgaaatggcaaaacaaaccttgcaggctgtcgatgaagccgatgccgtcgtatttttggtggacggccgcaccggtctgaccccgcaagacaaaatcattgccgaccgtttgcgccaaagcccgcgccctgtttatctggcggtaaacaaaggcgaaggcggcaacagggccgtgcttgccgccgagttctacgaacttgctttgggcgacccttatgttatttccggtgcgcacggcgacggcgtgtattacctgattgaagaaattttagaaaacttccccgagccggaagtcgaagaagccgatgcaaaacatcccgtttttgccgtcatcggtcgtccgaacgtcggcaaatccacgctggtaaacgccattctcggcgaagagcgcgtgattgccttcgatatggccggcacgacgcgcgacagtatccatatcgatttcgagcgcgaaggcaaaccgtttaccatcatcgataccgcaggtgtgcgccgtcgcggcaaagtggatgaagcagtggaaaaattctccgttatcaaagcgatgcaggcggttgaagcggcaaacgtcgctgttttggtattggacgcgcagcaggacatcgccgaccaagatgcgacgattgcaggtttcgctttggaggcaggccgtgctttggtggtggcggtcaataaatgggacggcatcagcgaagaacgtcgcgagcaagtgaaacgcgatatcaaccgcaaactgtatttcctcgattttgccaagttccactttatttccgcattgaaagagcgcggtatagacggtttgtttgacagcattcaggctgcctacaacgcggcgatgattaagatgccgacgccgaaaatcacgcgcgtcctgcaaagcgcaatcgagcgtcagcaaccgccgcgtgccggcttggtgcgtccgaaaatgcgttatgcccaccaaggcggcatgaaccctcccgtaattgtggtacacggcaattcgctgcacgcgatttccgacagctatacgcgctatctgacccaaacgttccgcaaagccttcaacctgcaaggcacgccgttgcggattcaatacaatgtttcagaaaacccgtatgaaaacgccgacgacaaaccgaagaaaaaaccgctgcgccgcgtcagcctgagcaaccgtattgagaaacgcgaaggccgcaaagaagagaaaaaccgcttcaagaagaaaaccaaagtcagtgtgaaaaaacaattcagcaaataa

SEQ ID NO: 45533 - DNA, 447 bp, Neisseria meningitidis
atgaatttcagttttgttcccctgtttctggttacgctgattctgttgggggtggtcagcaacaacaattcgattaccatctcggcaaccatattgctgctgatgcagcagacggcattggtacagtttgtcccgttggtcgagaagcatgggttgaatctcggtatcattcttttgaccataggggttttgagtccgttggtttcaggaaaggcgcaggttcctcccgttgccgaatttttgaattttaaaatgatatccgccgtttttatcggtattttcgtggcttggctggcgggacgcggcgtgcctttgatgggacagcagcctgttttaattacagggctgttaatcgggacggttatcggggtggcatttatgggcggtatccctgtcgggccgctgattgcggccggcatcttgtcttttgtcgtcggaaagggttaa

SEQ ID NO: 45534 - DNA, 297 bp, Neisseria meningitidis; identical to SEQ ID NO: 38749

SEQ ID NO: 45535 - DNA, 1083 bp, Neisseria meningitidis
atgtttttatggctcgcacatttcagcaactggttaaccggtctgaatatttttcaatacaccacattccgcgccgtcatggcggcgttgaccgccttggcgttttccctgatgttcggcccgtggacgatacgcaggctgaccgcgctcaaatgcgggcaggcagtgcgtaccgacggcccgcaaacccacctcgtcaaaaacggcacgccgacgatgggcggttcgctgattctgaccgccattaccgtgtccactctgttgtggggcaactgggcgaacccgtatatctggattctcttgggcgtactgcttgccaccggtgcgctcggtttttacgacgactggcgcaaagtcgtctataaagaccccaacggcgtgtccgccaaattcaaaatggtgtggcagtcaagcgttgccattatcgccggtttggcattgttttaccttgccgccaattccgccaacaatattttgattgtcccgttcttcaaacaaatcgccctgccgctgggcgtggtcggctttttggtgttgtcctacctgaccatcgtcggcacatccaacgccgtcaacctcaccgacggcttggacggccttgcgaccttccccgtcgtcctcgttgctgccggcctcgccatcttcgcctatgccagcggccactcacaatttgcccaatacctgcaattaccttacgttgccggcgcaaacgaagtggtgattttctgtaccgccatgtgcggcgcgtgcctcggtttcttgtggtttaacgcctatcccgcgcaagtctttatgggcgatgtcggtgcattggcattgggtgccgcgctcggtaccgttgccgtcatcgtccgccaagagtttgtcctcgtcattatgggcggattatttgtcgtagaagccgtatccgttatgcttcaggttggctggtataagaaaaccaaaaaacgcatcttcctgatggcgcccatccatcaccactacgaacaaaaaggctggaaagaaacccaagtcgtcgtccgcttttggattattaccatcgtcttggtgttgatcggtttgagtaccctcaaaatccgctga

SEQ ID NO: 45536 - DNA, 123 bp, Neisseria meningitidis; identical to SEQ ID NO: 38480

SEQ ID NO: 45537 - DNA, 657 bp, Neisseria meningitidis
gtgaacaaacggctgttttgcagccgcaacggcttgcgctattacctgttgggcggtttctgtttgagtgtttttccgcttttgctggtgtttgcctcatccgtttgggcggtttatcggacgggcgggcaggttttgccgccgtatgtccgggcggatgccgcgctggtgttgggcgccgccgcgtgggacaaacgcccttccccggttttccgcgaacgcatcaaccacgccatcgcgctttatcagagccgcagggtaggcaaaatcgtgtttacgggagggcgaaccaaaaaaggctatatgaccgaagccgaggtcgggcggcggtatgcgctcaaacagggggttccggcgcgcaacatcctgtttgaaaacacttcgcgcaacacttatgaaaacctgaacaacatccgtccggttttgcgtgccaacggtattgacagcgtggtgattgtcagcgatccctaccatttggcgcgggcggcggaaatggcggaggatttgggtgtccgcgtttatatgtctgccaccccgaccacgcggtttgatgcgggaaataagaaaaaaatctttatgctgcaagagggatatgcgttatccctctaccgtttggaaaaatggggcagccgctttttgggatggctgtctgattga

SEQ ID NO: 45538 - DNA, 849 bp, Neisseria meningitidis; identical to SEQ ID NO: 37505

SEQ ID NO: 45539 - DNA, 864 bp, Neisseria meningitidis; identical to SEQ ID NO: 37982

SEQ ID NO: 45540 - DNA, 516 bp, Neisseria meningitidis; identical to SEQ ID NO: 38602

SEQ ID NO: 45541 - DNA, 489 bp, Neisseria meningitidis
atgaccccgttatttagaaaagccgtttggctgctgtttgccgtttcggtctgtgcatttgccggttctttggcggcacagtatgttttgggtatggagccttgcgttttgtgtatcagtcagcggttatgcgttttggcaaccgcattgtgtacggcaattgtcctgatgtgcagaccaagaagaagggcgggcggtttgttcggtgctgtctttatcagcattccggccgttacgggtatttctgttgcggcatatcagttgtggttgcagtcgctgccgccgggaaccgctccttcgtgcggtgcgccgtggacgttccgcttgaagggctggtctttgtttgattggttcgagcctgtcgtgcgcgggttcggaaattgtgccgaaccggattatctgttaggggttgctttgcctgtttggagcgcggcgtattttctggcggttgtcctgacggtttggtgggcgtgggcaagggctaaataa

SEQ ID NO: 45542 - DNA, 384 bp, Neisseria meningitidis
atgtcaaaaatccatagcaaagaaaccaaaccggaaatattggtaaggaaatttcttttctcccaaggttttcgttatcggaaaaacgataaacgctatgcaggcaaaccggatatcgttttgccgaaatataaaacagtcgtgtttatacacggctgtttttggtacgggcattcttgtaataaaggacatatcccgaaaagcaatacggatttttggttggaaaaaatcacaaaaaattgcgaacgtgatattaaaaatgaaaccgagctggaaaagatcggtttcaaagtgattgtcgtttgggagtgcgaattaaaaaataaagctattggtagggagcgattaaatcggttggtcagggaaataaaagatgccgtctga

SEQ ID NO: 45543 - DNA, 330 bp, Neisseria meningitidis; identical to SEQ ID NO: 37738

SEQ ID NO: 45544 - DNA, 1011 bp, Neisseria meningitidis
atgtccatcaaaatcctgattatttctcccagttggataggcgactgcgtgatgacccagcccttgttccgccgtttgaaggaacttcaccccggttgcacgattgatgtgttcgcaccgaagtggtcgatggcggtgtttgagcgtatgccggaagtgaatgagattcttgaaaatccgttcggacacggtgcgttggagttgaaacgccgctggcgggtcggtagggatttggggcggcgcggatacgatcaggttatcgtgttgcccggttctttgaaatcggcaatcatcgcgctggcgacaggtatcggtaaaaggacgggttatgtcggtgaaagccgttattttctgttgaacgatatacgcaggctggataaggaacgtctgcctttgatggtggacagatatacggctctcgcgcatccgagccaggaggattttgacgggcattcgggattccccgagttttccattgatgaacggcggcgggaaatttctgtcgaaacctttggcttggatattggaaagcctgttctggctttttgtccgggtgcggaattcgggccggcaaagcgttggccgacaaggtattttgccgagttgggcaaacattattcggcggcgggttggcaggtttggctgttcggttcgcaaaaagatgatgaaattgccgaggaaatcaactgcctttcagacggtatgtgtgtgaatttatgcggaaagaccgatttgtcgcaggcaatggatttgctgtcgttggcggacacggtcgtgtgcaacgacagcgggctgatgcacttggcggcggcattgggcaggaaggtggtggcggtttacggttcttccagcccgacgcatacgccgcctttgagcgacagggcgaaaatcgtcagcctgcacttggaatgttcgccctgttttaagcgggaatgtccgctggggcataccgactgcctcaacaggctgtatcccgagaagattgtgcaggcggttgaagaggcggtatga

SEQ ID NO: 45545 - DNA, 462 bp, Neisseria meningitidis
atgtctgattttcctcccgtttcccgattccttgccgacgaagccgccacactcgatttgggtgcggcgtggtcttcccgtttaaacgcaccgctggtcatttatctcgaaggggatttgggtgcgggcaaaaccacgctgacacgcggcatcctgcgcggattgggtcatcagggcgcagtcaaaagcccgacctacgccatcgtcgaatcttatccgctggaacgcttcaccctgcaccatttcgacctctaccgcttctcgttccccgaagaatgggaagacgcggggcttgacgaactgtttgccgcaaacagcgtctgcctgatcgaatggccgcaacagggaggcgaatttaccccgcccgccgacatcaccgcaacattgacacacgacggcggcggcagaaaatgcctgctgaccgcccataccgaacgaggacgcgaaagcctgccgctatga

SEQ ID NO: 45546 - DNA, 459 bp, Neisseria meningitidis
ttgttaactaagttgaaaattttgctatttttgttcttatttgtttttgtattggctattaatttgcttttcttcttttttagttcggatatcgagagtttcgggaactatcagtttgaatatgtttacgataaaggttggcctgctaattatattttagtcatgaaagatggaactgaagggaattttgataaaataatatccggattggttttagaatattataaggaggatgataacatttatttttcttatattgacgggcaaggatttgcttcagactcttgctattacaaaccggaaattttatatggaaaaattattttaaataaaaatcatatcattaatattaatagcatggaaaaaaataattttctttcagaagataaaataatgaagggaacaagaaattggctagcagaccctaaaaataaatgtaatatacagactctagactaa

SEQ ID NO: 45547 - DNA, 1488 bp, Neisseria meningitidis
atgctaaagaaaataaaaaaagctctttttcagcctaaaaagttttttcaagattcaatgtggttgacaacatctccattttatcttacccccccacgtaacaatttatttgtcatatctaatttaggtcagcttaaccaagtccaaagcctaattaaaatacaaaaattaaccaataatttactagtaattttatatacttctaaaaacttaaaaatgcctaagttagttcatcaatcagctaacaagaatctatttgaatctatttatctatttgagcttcctagaagccctaataatataactcctaaaaaattactttatatttatagaagttacaaaaaaatccttaatattatacagcctgctcatctctatatgctgtcttttacaggccactactcctatctgattagtattgcaaaaaaaaagaatattacgactcatttaattgatgaagggactggaacatatgctcctttattagaatcattttcatatcatccaacaaaattagaacgttatttgattggaaataatcttaatattaaaggatatatagatcattttgacatattgcatgtcccctttcctgaatatgctaaaaaaatatttaatgcaaaaaaatataaccggttttttgcgcatgctggaggaataagcattaataataacattgcaaacttacagaaaaaatatcaaatatctaaaaatgactatatttttgttagtcaacgctaccccatttcagatgatttgtattataagagtatagtagaaatcttaaacagcataagtttacaaattaaaggaaagatatttattaaactacacccaaaagagatgggtaacaactatgtaatgtctttatttctaaatatggtagaaataaaccctcggctggtagttattaatgaacctccttttctaattgagcccctaatatacttaacaaatcctaaaggaattataggcctggcctctagttctttaatttatacaccattactctcaccctcaacccaatgtctttctattggagagttaattattaacttaattcaaaaatattcaatggtggaaaacactgaaatgatccaagaacacttagagattattaagaaatttaattttattaatatactaaatgatttaaatggggtaataagtaaccctctctttaaaacagaagaaacatttgaaacacttcttaaatctgcagaattcgcatataaatctaaaaactactttcaggctattttttactggcaacttgccagcaaaaacaatattaccttattagggcataaagcattatggtactacaatgcactttataatgtaaaacaaatttataagatggaatattcagatattttttatatcgataatatctccgtagactttcatagtaaagataaattgacatgggaaaaaattaaacattattactattccgccgacaatagaattggtagagatagataa

SEQ ID NO: 45548 - DNA, 210 bp, Neisseria meningitidis; identical to SEQ ID NO: 39816

SEQ ID NO: 45549 - DNA, 1272 bp, Neisseria meningitidis
atgccgtctgaaacctcttccccacgcaaagaaaacgaaacagaagtacacattcctgccgctccttttatcgtcaaacagtccggcagcaacgctttggcaacctgcgccttggtattggcggcattgggtttgggcgcaagtggttttttgtttgtccaaggacagaatgtcttgaaaaaccaagagctggcattcaaccaaaaaatcgacaaagccgccttgggcgagtcggaaaacgccgccctgctcaaagacaacctcaaccgccaaagtgccatacagtccgaactcgaccgtttggacagcggtgtcaaagccaacggcgaacagattctgatgacgcaaaaatcctatcgcgagttgaccaaaggacgcgccgattggctggtggacgaaaccgagaccatactcaatctggcagcgcaacagctggtgttgaccggcaatatccaaacggcagtcggcgtgttggagcatatcgacagccgcctgtcccgtttcgatcaggcggagctcctgccgctcaagcaggcaatcagcagcgacttggcggaactgaaaaaccgtccttatgtcgatatttccggcacggcactgcgcatcgacaggctggaaaccgccgtatccggactgccgttgatgctcgacggcgtgctgaaaccgggcgtacaggcccgcaacgaagccgtttccgcttcatggtggaacgtatgggaaaaatccctcggcacattgaaagggctggttgaaatccgccgtttggaaaacaacgatgccatgctgatttctcccgaacaggcatattttgtacgcgaaaatctgcgcctccgccttttggatgcgcggactgcattaatgcagcgcaacagcgaagtctatcaaagcgatttgaacaatgccgaaaccgccgtcagacagtattttgatgccaaatcccccgccacgcagtcgtggttgaaggaattggcggaattgaaggcgttggatgtgcgcatgacggcggatgacggtttgaaggccagtttaaatgccgtccgcgcctatcgcgacggtacgcgcatgacggcggcggaaaatcaagaagcagaacaggcggcttccgaaccggcaaacgaaaagacagcttccgaatcggctgccgcatcggatgtgaagaccatagaagcaccgtccctgccttcggaacttaaaccggaacagcctgcaaaaaaacagaccgtaccggaaaaggcagggcgttcgccgtccgctaaaggagaacgcgcatga

SEQ ID NO: 45550 - DNA, 477 bp, Neisseria meningitidis
atgaacaccatcgcccccaaccttgacggcaaacacctccgcatcggcatcgtacaggcacgtttcaccaacgaaatcggcagcgaaatgctcaaagtctgctgccgcaccctccaagaattgggcgtggcagacgaaaacattaccgtcgccaccgtacccggcgcgcttgaaatccccatcgcgctgatgaaccttgcctcttctgaaaaatttgacgcactgattgccatcggcgtcgttatccgtggcgaaacctaccatttcgagctggtttccaacgaatccggagcaggggtcagccgcgtcgcactcgactacaacatcccgattgccaatgccgtcctgaccaccgaaaacgacgcacaggcaatcgaacggattgaagaaaaagcctcggatgccgccaaagtcgccgtcgaatgcgccaacctcgtcaacctgctgctcgaagaacagtttgaagacgaagaataa

SEQ ID NO: 45551 - DNA, 639 bp, Neisseria meningitidis; identical to SEQ ID NO: 39714

SEQ ID NO: 45552 - DNA, 183 bp, Neisseria meningitidis; identical to SEQ ID NO: 38466

SEQ ID NO: 45553 - DNA, 489 bp, Neisseria meningitidis
ttgattgacttggaaatttttgccgccgaagggcagaacctgcaaggcagttttctgctggaagaattggatgaacgcgtcagttcgcacgattatcccgccgacaggcagaccaaaatatcgtttacactgaccggcggtcgcgaccggctgcaacgcctgttcctcgacctgaacgtcaaagccgatatgcccctgatttgccagagatgtatcaaacccatgccgttcatgcttgatgaaagcagccgtatcgtcctgttttccaacgaagagtccttggacgaatccatgcttgccgacgaagaactcgaaggcatactgattgaaaaagaactcgacgtgcgcacattggtagaagaccaaatcctgatgtccctgcccttttcgccgcgacacgaagactgcggcgacaatgggacactggaagaagtcaatcgggacaaacccaacccctttgctgttttggcaggtttgaaaagcaattga

SEQ ID NO: 45554 - DNA, 777 bp, Neisseria meningitidis
atgtccgacaacgctttgacctcttcgcgacgcttcggcggcatcgccagactctacggagactctgccttggcgcacttttcacaggcacacgtctgcgtagtcggcgtgggcggtgtcggctcgtgggcggtcgaggctttggcgcggacgggcatcggacgtttgactttgattgatttggacaacgttgccgaatcgaatgtcaaccgccagctgcacgccctgaccggcgacttcggcaaagcaaaagttaccgccttgcgcgaacgcgtcgcccaaatcaacccaggatgccaagtgtttgaaattgaagatttcgttaccgaagacaatttgccggaatacttcggaaaaggttttgatttcgtcatcgacgcgatcgaccaagtgcgcgtcaaagcagcaatggcggcttattttgtggaacgcaaacaaccgtttgtcctcagcggcggcgcgggcggacaaaaaaatccggcgttaatccaaaccgccgatttgagccgcgtaacccacgacccgctgcttgccaacctgcgctacaccttgcggaaacgctacggattcagccgcgatacgaaagcaaatatgcgcgtgccttgcgtgtattcgaccgaaaatatcgtgccgccgcagtctagggaggcttgttcggcagatgccgctccgcaaggcttgtcgtgcgccggctacggtgcaagcatgctcgttaccgcttcgttcgggctatattgcgcacaggcggcggtggaacacatcgcagacaaaaaataa

SEQ ID NO: 45555 - DNA, 252 bp, Neisseria meningitidis
ttgtatattgttggacaccatgtaattttttgcggacatggttttttgtcagcatcaacggttgcttcttatttaagtttacttagcaataaattgagagagaacaatccggatattgttcaatttaatattgaattcaaagcagtaggcaattgcgacaagttgtcattgatacaacaacatggggtaaaaagtattcttttagatgcttcggcatatcaattatccagaaacaggcggattcgcatttga

SEQ ID NO: 45556 - DNA, 255 bp, Neisseria meningitidis; identical to SEQ ID NO: 39349

SEQ ID NO: 45557 - DNA, 948 bp, Neisseria meningitidis
  misc_feature 6, 7, 8, 9, 10: 'n' is a, c, g or t
gtgtgnnnnnaaaccctgctcctcctcatccccctcgtcctaaccgcctgcggcacactgaccggcatacccgcccacggcggcggcaaacgctttgccgtcgaacaagaactcgtcgccgcatcgtcccgcgccgccgtcaaagaaatggatttgtccgccctgaaaggacgcaaagccgccctttacgtctccgttatgggcgaccaaggttcgggcaacataagcggcggacgctactctatcgacgcactgatacgcggcggctaccaaaacaatcccgaaagtgccacccaatacagctaccccgcctacgacactaccgccaccaccaaatccgacgcgctctccagcgtaaccacttccacatcgctcttaaacgcccccgccgccgccctgactagaaacagcggacgcaaaggcgaacgctccgccggactgtccgtcaacggcacgggcgactaccgcaacgaaaccctgctcgccaacccccgcgacgtttctttcctgaccaacctcatccaaaccgtcttctacctgcgcggcatcgaagtcgtaccgcccgaatacgccgacaccgacgtattcgtaaccgtcgacgtattcggcaccgtccgcagccgcaccgaactgcacctctacaacgccgaaacccttaaagcccaaaccaagctcgaatatttcgccgttgaccgcgacagccggaaactgctgattgcccctaaaaccgccgcctacgaatcccaataccaagaacaatacgccctctggatgggaccttacagcgtcggcaaaaccgtcaaagcctcagaccgcctgatggtcgatttctccgacattaccccctacggcgacacaaccgcccaaaaccgtcccgacttcaaacaaaacaacggtaaaaaccccgatgtcggcaacgaagtcatccgccgccgcaaaggaggataa

SEQ ID NO: 45558 - DNA, 999 bp, Neisseria meningitidis
atgagcagacccgtacccgccgtattcggcagcgtttttcacagtcaaatgcccgtcctcgcctaccgcgaaggcaaatggcagccgaccgaatggcaatcttcccaagacctctccctcgcaccgggcgcgcacgccctgcactacggcagcgaatgtttcgagggactgaaagccttccgtcaggcagacggtaaaatcgtactgttccgtccgactgccaatatcgcgcgtatgcggcaaagtgcggacattttgcacctgccccgccccgaaacccaagcctatctcgatgctttggtcgaactggtcaaacgtgccgccgacgaaattcccgatgcgcctgccgccctgtacctgcgcccgaccttaatcggtaccgatcccgttatcggcaaggccggttctccttccgaaaccgccctgctgtatattttggcttcccccgtcggcgactatttcaaagtcggctcgcccgtcaaaattttagtggaaaccgaacacatccgctgcgccccgcatatgggccgcgtcaaatgcggcggcaactacgcttccgccatgcactgggtgctgaaggcgaaagccgaatacggcgcaaaccaagtcctcttctgcccgaacggcgacgtgcaggaaaccggcgcgtccaactttatcctgattaacgacgatgaaatcattaccaaaccgctgaccgacgaatttttgcacggcgtaacccgcgattccgtactgacggttgccaaagatttgggctataccgtcagcgaacgcaatttcacggttgacgaactcaaagctgcggtggaaaacggtgcggaggcgattctgaccggtacggcagccgtcatctcgcccgttacttccttcgtcatcggcggcaaagaaatcgaagtgaaaagccaagaacgcggctatgccatccgtaaggcgattaccgacatccagtatggtttggcggaagacaaatacggctggctggttgaagtgtgctga

SEQ ID NO: 45559 - DNA, 2940 bp, Neisseria meningitidis
atgagcggttttaattacgagaaaaaccagccgcaccaaatgcgggcggtttcggcggttttgggcgtgtttgacggggcaacgcccaaatatcggacggcagacgaaaatcccgaacttttgtttgctgcaaaacaatacgcaaacaatatcctgaaagtgcaaagccaaaacggtatagacggccgattccccgaccgttcggacgaccaaaatatccttgatatttccatggaaacgggcacgggcaaaacctatacctacacacaaaccatgttcgagctgcaccgttggctgggcgtgttcaaatttatcgtggtcgtgccgactttgtccattaaggcgggaacacagcagtttttgcaaagcaaggctttggcagagcattttgaacaggatttcggcggcgattatgaaggcgtgcgcctgaaaacctatgtggtggaaagcgcgaaaaagaataagggcaaaaagtccaatgcgcccataacgattgagcaatttgtcaaagcggaaaacaaaaaggaaatccatgtgctgctgattaacgcgggcatggttaattcgtcgtccatgaacgatacgggcgacaaggcattgaaagatttgtttgacaatcccgttgatgcattggccgccgtgcgcccgtttgtgattgtggacgaaccgcataaattcccgacccgggagagcgcgaaaacgtggggcaatatcaaacgcttaaaaccgcaatatattttgcgctacggtgcgacatttaacgatgaatattacaacttgctttaccgtttgacggcagtagacgcgtttaacgacgggctggtcaaaggcgtgcgcgtgtttcaggaagaaatgcagggcggcatggatgcggcggtaaaactggtgtcgtcgggcggcaaagaagcgaaatttgaattaaacgaaaaggacaaaaagcagacgttcaaactggcaaaaggcgaagatttggcgcaaatccatccggctatttcggatttgaaaatcgacaaaatgaataaaaccgtggtggtgttaagcaacggcttggagttgaaaacgggtgccgtcatcaacccttattcctattcgcaaacggtgcaggatgcgatgatgcagcgggcggttgccgaacatttcaagctggaacgcgcgcttttggcagaacgcgcgccacagcccaaaatcaagccgctgacgctgttttttattgacgatatcgcgggctaccgcagcggcaacgagctttcaggcagcctgaaagataaatttgaaagctggattcgcgtggaagcggcacgccgtctgaaaacggaaagcgacccgttttaccgcgattacctgcaaaagacgttggacgatgtatccgcctgccacggcggctatttttccaaagacaatacagacagcgacgatagaatcgagcaggaaatcaatgaaatcctgcacgataaggaaaaactgctgtctttggacaacccgcgccgctttattttttccaaatggacgctgcgcgaaggctgggacaatcccaacgttttccagatttgcaaactgcgttccagcggcagcacgacttccaagctgcaagaagtcggacgcggcctgcgcctgccggtaaacgagctgatggcgcgggtgcgcgatgtaccgtacaaactgaattattttgtcgatagcagcgaaaaagactttgtgaagcagcttgtcggcgaaatcaacgacaattcttttcaggaagaaatctccaaaaagtttaccgaagagctgaaacaaaaaatattgcaaaaataccccgatatcaaaccgctggtattggtaaaccaactgttttcagacggcatcattgacgacaatgaaaactttgccgaagacggctatgacaaattaaaagccgcctatcccgaagccttccccaaaggtttggacaaaggcaaagtcagcaacgccaaagacgagggcaaagacaccatcatcatgcgcgaaggcaaatatgaagaactcaaagccttgtgggagctgattcaccataaagccgttttgcagtacaaaatcaaggatgaagccgaatttgtcgatttatttaccgcctatttgcgtgaaaacgccgccaaattcccgcaggcaggcatacgcacggcggtaaacgaagcttatatcaacaacgggcttatgctttcccgccgcatagacagttttgaagatgaagattttatccgttttaacacaatgacttaccgtgagcttctggaaaaactggcacaaacggcaaaaatccgcatgcagactttgcatcaggcgttttatcgcgtccgcgacgaactgaacattggcgattttttgaatatgcagaccatcgcccaaatcaaaaacggcttcaaccggtttttgcttcatcattccttccataaatttgaactggattaccggcttgtcggcagcaaaatccatccgaccaaatttaccgataaagacggcaaaccgcgcgcggtgaaaaaagcagatttgggcagatttgaagatacggagcaccggcctgccgccggctatctcttcgacgaaattttctacgattcggatatagaacatgaaaatgtcgccaacaaccaaattgaaggcgtaaccgtattcaccaaaataccgagaaactccatcaaaatccccgttgccggcggcggcacgtattcgcccgattttgcctatatcgtgaaaaccaaaagcggcgagattctgaactttgtgattgaagccaaagggactgacggggcggaagatttgcgaaaaagcgaagagcggaaaatcaaacatgccgaaaagctgtttgccgagatttccaaagaaatcaaggtggtgttcaaaacgcagtttgacggcgagaggatagccgaactgatcgggcaaaatatgcccgcaggcgggcattctgaaaacggacactga

SEQ ID NO: 45560 - DNA, 618 bp, Neisseria meningitidis
atgccctatacggaagatatgcgcccgggcgataccgctaatccttatggcgcatccaaagcgatggtggaacggatgttaaccgacatccaaaaggccgatccgcgttggagcgtgattttgttgcgctatttcaacccgattggggcgcacgaaagtggtttgattggcgagcagccaaacggcatcccgaataatttgttgccttatatctgccaagtggcggcaggcaaactgccgcaattggcggtatttggcgatgactaccctacccccgacggcacggggatgcgtgactatattcatgtgatggatttggcagaaggccatgtcgcggctatgcaggcaaaaagtaatgtagcaggcacgcatttgctgaacttaggctccggccgcgcttcttcggtattggaaatcatccgcgcatttgaagcggcttcgggtttaaccattccatttgaaatcaaaccgcgccgcgccggtgatttggcgtgttcctttgccgacccgtcccataccaaacaacaaaccggctgggaaaccaaacgcggcttgcagcaaatgatggaagattcgtggcgttgggtcagccgcaaccccaacggatatggggattaa

SEQ ID NO: 45561 - DNA, 564 bp, Neisseria meningitidis; identical to SEQ ID NO: 36686

SEQ ID NO: 45562 - DNA, 723 bp, Neisseria meningitidis
gtgtttcccgacaaatacaagttgagtttgaaagaaaatatttttttggcaaagaaagtattggttgcccaaattcacaacctcagccgttttgagaattgtcagacgaccttattgcagaccgaacaaattatccatggcaaaaatgtagcctccgtgtcacttgaagacatccaaaccatcttgaacctgaaacgtgcctatcaatatgtgatttcgcatatttcaaatggcgaaccggtcaatatttcactccttaaaaaaatcaacaacattgttgccaaggacgattctttggcacccggtgatttccgtaccggttcggtcggcgtaacgctattggacggttcccgtcatgccccgaatccagtgaaggaaattgaagtggcccgcgtgttacaaaatatcggactgcaaagcggttcgacgacggaggcagccgtccgttttatgctttattgtatgcggcagcaggttttttgggacggcaacaaacgaacggcaaccttatttgccaacggtctgatgatggcggggggctgcggcatcttggaaatctccgaaatgcagatgccgcaattcaatgaaaaactgtccgcattctatcgctccggcgacgataccgatatttccaagtttgtgtatcaaaattgtatatcgggcatagactatttcggcacgcacgaagatatagatttccccgacccaccaaacatgggctaa

SEQ ID NO: 45563 - DNA, 1422 bp, Neisseria meningitidis; identical to SEQ ID NO: 38131

SEQ ID NO: 45564 - DNA, 192 bp, Neisseria meningitidis; identical to SEQ ID NO: 37158

SEQ ID NO: 45565 - DNA, 1557 bp, Neisseria meningitidis
atggatttcagttggttggcagaaccgcatacctggataggttttgccacgcttttggtgttggaagttgtattggggatagacaatcttgtctttgtggcgattttggcaaacaaggtccagcccgcacggcgcgaccgcgcacggattatcgggctggggctggcagtcgtcatccgcatcattatgcttgcttttatggcgcacatcatcacgctgaccgagccgctgttccaaatcggcggcctcgccgtttccggcaaggacatgattatgctcgcgggcggtattttcctgctttacaaagccaccaccgaactgcatgaacgcctcgaagggcacaaccgttttaccgttgccgacaaccaaaaaaaacacgcgccgttttggggcgtggtcgcgcaaatcctgatactggatgccgtgttttccatcgattcggtcattactgcggtggcgatggtcgatcatatcgtcgtggcgatgggtgcggtcgtcgtcgcgatggcggtgatgatttccgccagcaaactcttgaccgaatttgtagacagacaccctaccgtcgtgatgctctgccttggttttttgttgatgatcggtttcagcctgattgccgaagccttccatttccacattcccaaaggctacctctacgccgccatcggcttctcgattttaatcgaactgtttaaccagatttcccagcgcaacagccgcaaaaacgactacatcggcagctcgtggcgcaagcgcaccgccgaaaacgttttgggtatgatgggcatacgcgaaagcgtgcttgccgatgcgggcggcgaatccggggacgacgcgcattttgaagaaaacgaaaaatcgatgatacgcagcgtgctgacgcttgccgaacgcccgattatgggggtgatgatcccacgccgcgacatcgaacggctggacatttcccaaagccgcgaagaacagtgtgcccaactgcaaaacacgccttacagccgcctgctcgttgtcggtaaggcgggcgtggacgaacctttgggctacatcaacaaaaaagacctgctgtcccaactgctggaaacaggcggtctcgacattcagacggcattgcgccagccactcgtcctgcccgacagcaccaccgcgctgggcgcaatcgaactcttccgccaaagcagcgcggattatgctttggtggtggacgagttcggcgcggtattgggcatggtaaccatgaaagacctgctcgaaaccatcgcaggcgagttccccgaagaatttgagcgcgaagaagaaccagccgttcaggggaatcccgatgaaagcctgacggtggaaggcgcgttggaatatgtggaactcgcaccgcaactcaacctgccgcagcaggaggaagatgccgatttccatacggttgccgggctgattatggaagaattgcaaaccatccccgatgtcggcgattttgccgatttccacggctggcggtttgaagtggtcgaaaaagaagggcagcgcatcgagcgggtcaaaatcaccaaattgcccgaagaataa

SEQ ID NO: 45566 - DNA, 759 bp, Neisseria meningitidis
atgattaccatccgcaacgtcagcttccacatcggcacgcaccccatcctcgacaacatcagcctcgacatccctgaaggcggcattaccgcgctaatcggcccgaacggcgcaggcaaatccaccctgttttcctttatggcgcggctgcgcccgcttgaaagcggcagcatcgcctaccgcggcaaaaaccttgccggcacccccaccgccgaactcgcccgcacgctctccatcctcacccaagaaaacagcatcatgagccgcatcaccgtgcgcgacctgctgatgttcggccgttacccctaccatcaaggcagaccgactgccgaatgccgccgtatcgttaacggtgcaatcgaagaattccacctgcaagacctctccgaccgctatctgaccgaactctccggcggccaacgccaacgcgccatgattgcgatggtgttctgccaaagcaccgactacgtccttttggacgaaccgctgaacaacctcgatatgtatcacgcccgctcgctcatgcagattctgcaaaaactcacgcgcgaacacaaacgcaccaccgtcgccgtattgcacgacattaaccaggccgccgcttacgccgaccacgtcgtcgccatgaaaaacggcaaagtcgccctgaccggcacgcccgaagaagtgttcaccgtacacaacatcaaagaactgttcgacatggacgtggacgtactcgactacgaaggcaaaaaactcatcgtccaccatatctga

SEQ ID NO: 45567 - DNA, 684 bp, Neisseria meningitidis
atgtttgcccttttggaagccttttttgtcgaatacggctatgcggccgtgtttttcgttttggtcatctgcggtttcggcgtgccgattcccgaggatttgaccttggtaacaggcggcgtgatttcgggtatgggttataccaatccgcatattatgtttgcagtcggtatgctcggcgtattggtcggggacggcatcatgttcgccgccggacgcatctgggggcagaaaatcctcaagttcaaaccgattgcgcgcatcatgacgccgaaacgttacgcacaggttcaggaaaaattcgacaaatacggcaactgggttctgtttgtcgctcgtttcctgccgggtttgcggactgccgttttcgttaccgccggcatcagccgcaaagtatcgtatctgcgctttctgattatggacgggcttgccgcgctgatttccgtgcccgtttggatttacttgggcgagtacggcgcgcacaacatcgattggctgatggcgaaaatgcacagcctgcaatccggcatcttcatcgcattgggcgtgctggcggcggcgctggcgtggttctggtggcgcaaacgccgacattatcagctttaccgcgcacaattgagcgaaaaacgcgccaaacgcaaggcggaaaaggcagcgaaaaaagcggcacagaagcagcagtaa

SEQ ID NO: 45568 - DNA, 369 bp, Neisseria meningitidis
atgatagacggcgaactggtcgcgcttatccatcaaaccgtattggcggatgaagcgggtttgaaagggcgggcggatatggcgtgcttggacggcgcattgtcgcggattgccaactggcggcagtatgaaaaccttgaggacatctacgaaatcgccgccctctatgcacaagccatagccaaagcccacgcctttcccgacggcaacaagcgcaccgcgcttttaacaatgttgacctatctggatttgcagggcatcagcattgccgccgaccaagggcttgacgacttgattgtcagtttggcggcgggagaaaccgacttcaaacagctcgccgaaaccctgcgccggctggataaggaatag

SEQ ID NO: 45569 - DNA, 234 bp, Neisseria meningitidis
atgaaccgccgaaaaatctatctgttgtctgttgccctcttcacactggcatttatgctgctcgtcctcttgggtgcttatctgctgaccgtcggcagcaaagccttcgccgtcgcctcctttcttttcgcattcggcgcactgttcggacaaatcggcagcctcgccctctacctgcggcacaaatccctacgcgccgcccaatccgccgcaaaggaaaaccgctatgtctga

SEQ ID NO: 45570 - DNA, 1260 bp, Neisseria meningitidis
atgaaacagaccgtcctcaaaaataacctgcaaaacctgcttgaaagcgcagaaaatatcctgctgcttcaaggccctgtcggcgatttttttctgcgccttgccgactggctgactgcaaacggcaaaaccgtacataaattcaactttaatgcaggcgacgactatttttatccgcccactcaagcgcataccgttgtttttaacgacaactacgatgcctttcctgagtttttgcaagaatacatcactcaacatcacatccaggccgttgtctgctttggcgacacacgcccttatcacgtcattgcaaaacgcattgcaaacgaaaaccaagccagtttctgggcgtttgaagaaggctatttccgcccctactacatcaccttagaaaaagacggcgtcaacgcattttccccgttgccgcgccgtgccgacttttttcttgaacaattccctaagcttgcccagcaagaatataaagcgccaacgccggtacacggcggttttacgcccatggcaaaaaacgctatccgttactatatcgagttgttccgcaatccacgcaaataccccgactacatccaccaccgcgcacccaatgccggccattacctcaaaccgtggtcgctctccatcctcaagcgtttgaactactatattgaagacatccaaatcgccaaacgtgtggaagcaggcaaatacggcaagttttttattgttcccttacaggtattcaacgacagccaagtccgtatccattgcgactttcccagcgtccgcagcttcctgctccatgttttgagttcatttgccgagcacgcgcctgccgataccaacatcatcatcaagcatcatccgatggaccgcggttttatcgactactggcgcgacattaaacgctttatcaaagaacaccccgaactcaaaggccgcgtgatttatgtccatgatgtccccctgcccgttttcctgcgccacggtctcggcatggtcaccatcaacagcaccagcggcctgtccggactgattcacaatatgccagttaaggttctcggccgtgcctattatgatattcccggcattactgaccaaaataccttggcagaattttggaatcatccgacaccgcctgacaaagagctgttccatgcctaccgaatgtaccacctcaacgtgacccaaattaacggcaacttctacagtcaggtgtttttccccaacaaaaaaacctccaactcttccacaccagtaatctga

SEQ ID NO: 45571 - DNA, 186 bp, Neisseria meningitidis; identical to SEQ ID NO: 37143

SEQ ID NO: 45572 - DNA, 1296 bp, Neisseria meningitidis
atggcacaaaaaatccaatccgtcaaaggcatgaacgaccttctgcctgtcgagcaaaaagatttcaaactgacggctgcgttttggcaggcgtttgaggatacggtaaaccgctggacgcgcgcttacggctatcagcaaatccgtacgccgattgtcgagcaaaccggtttgtttgtccgctccatcggcgaggaaaccgatgtggtcggcaaggaaatgtacaccttttccgattcaaacgattctttgagtttgagcctgcgtccggaaggtacggcttcttgtctgcgtgcggtggtcgaacacaaccttctgtacaacagcccgcaaaagctgtggtatatggggccgatgttccgccgcgagcgtccgcaaaaaggccgttatcgtcaattccatcaggtcggtatcgaggctttgggttttgaagggccggatatcgatgcggaaatcatcgcgatgtctgccgacttgtgggaaaaattgggtatccgcgaatacctgactttggaaatcaacagcttaggcaaccgtgaggagcgagcggcacaccgtgcggcgttggttgaatatttgacacgctatgaagataaattggacgaagacagcaaacgccgtctgaaaaccaatcctttgcgtgttttagatacgaaaaaccctgatttgcaggaaatctgcaacgccgcgccgcgtttggtggattatttgggcgaggcttcgcaaaaccactatgcacgcttcaaggcgatgttggacggtttgggtatccaatatattgaaaatccgcgcttggttcgcggtttggattattacaatcagacggtttttgagtggacgaccgacaaactcggcgcgcaggcaactgtgtgcggcggcggccgttacgatggtttgattgaggaacttggcggcaaacctgcgccgtccatcggctttgcgatgggcatcgaacggctgctgcttttggtgagcgaatacggctcgctggaagtgaacgctgcgcctgatgtctatgcaatgcaccaaggcgaaagggcggacttgcaggtgatgaaatacgcgcaagccttgcgcgcgcaaggtttcaatgtaatgcagcattccggctatcaaagcctgaaagcgcaaatgaaaaaagccgacaacagcggcgcgcgctttgccctgattgtcgcgcaagacgaactggcgaacggtacggttacgctcaaagacatgaacggcgcacacggtcagcaaactgtcgccgccgaggatttaacccatactttacaacaatggaagaacgcataa

SEQ ID NO: 45573 - DNA, 312 bp, Neisseria meningitidis; identical to SEQ ID NO: 36570

SEQ ID NO: 45574 - DNA, 486 bp, Neisseria meningitidis
atgagtaataaaatggaacaaaaagggtttacattgattgagatgatgatagtcgtcgcgatactcggcatcatcagcgtcattgccataccttcttatcaaagttatattgaaaaaggctatcagtcccagctttatacggagatggtcggtatcaacaatactgtcaaacagcttattttgaaaaatcccctggacgataatcagaccatcaagagcaaactggaaatatttgtctcaggctataagatgaatccgaaaattgccaaaaaatatagtgtttcggtaaggtttgtcgataaggaaaaatcaagggcatacagcttggtcggcgttccgaaggcggggacgggttatactttgtcggtatggatgaacagcgtgggcgacggatacaaatgccgtgatgccgcttctgcccgagcctattcggagactttatccgcagatgccggctgcgaagctttctctaatcgtaaaaaatag

SEQ ID NO: 45575 - DNA, 330 bp, Neisseria meningitidis; identical to SEQ ID NO: 40782

SEQ ID NO: 45576 - DNA, 456 bp, Neisseria meningitidis
atgttcggcggcgcacacgaattaagcatcgacagtaaggggcggttggctgttcctgccaaattccgtgacattctgtcgcgcctctatacgcctgccgtagtggtaacgctcgagtcgaaacacaagctgttgatgtaccctgttgcggagtgggaaaaggttgcggcgcaacttttaaacttaaaagtggcggataaccctgttttgcggcggtttcaaaatcttttgctgcataacgcggaaattttggaatgggacagcgccggccgggtgctgcttcctgccggactgaggaaaagggtggatttcgaccgtgaagtcgttttggtcggtcgtgccaaccgtttggagctttggggtcgcgagcagtgggaggctgagatggttcaggctttggatgacgatcctgacgaacttgccttccagttgggtcagacggatttgcaattgtga

SEQ ID NO: 45577 - DNA, 1335 bp, Neisseria meningitidis
atgactgacctgaacaccctgtttgccaacctcaaacaacgcaatcccaatcaggagccgttccatcaggcggttgaagaagtcttcatgagtctcgatccgtttttggcaaaaaatccgaaatacacccagcaaagcctgctggaacgcatcgtcgaacccgaacgcgtcgtcatgttccgcgtaacctggcaggacgataaagggcaagtccaagtcaaccggggctaccgcgtgcaaatgagttccgccatcggtccttacaaaggcggcctgcgcttccatccgaccgtcgatttgggcgtattgaaattcctcgcttttgaacaagtgttcaaaaacgccttgaccaccctgcctatgggcggcggcaaaggcggttccgacttcgaccccaaaggcaaatccgatgccgaagtaatgcgcttctgccaagcctttatgaccgaactctaccgccacatcggcgcggacaccgacgttccggccggcgacatcggcgtaggcggacgcgaaatcggctatctgttcggacaatacaaaaaaatccgcaacgagttttcttccgtcctgaccggcaaaggtttggaatggggcggcagcctcatccgtcccgaagcgaccggctacggctgcgtctatttcgcccaagcgatgctgcaaacccgcaacgatagttttgaaggcaaacgcgtcctgatttccggttccggcaacgtggcgcaatacgccgccgaaaaagccatccaactgggcgcgaaagtgctgaccgtttccgactccaacggcttcgtcctcttccccgacagcggtatgaccgaagcgcaactcgccgccttgatcgaattgaaagaagtccgccgcgaacgcgttgccacctacgccaaagagcaaggtctgcaatactttgaaaaccaaaaaccgtggggcgtcgccgccgaaatcgccctgccctgcgcgacccagaacgaattggacgaagaagccgccaaaaccctgttggcaaacggctgctacgtcgttgccgaaggtgcgaatatgccgtcgactttgggcgcggtcgagcaatttatcaaagccggcatcctctacgccccgggaaaagcctccaatgccggcggcgtagcaacttcaggtttggaaatgagccaaaacgccatccgcctgtcttggactcgtgaagaagtcgaccaacgcctgttcggcatcatgcaaagcatccacgaatcctgtctgaaatacggcaaagtcggcgacacagtaaactacgtcaatggtgcgaacattgccggtttcgtcaaagttgccgatgcgatgctggcgcaaggcttctaa

SEQ ID NO: 45578 - DNA, 174 bp, Neisseria meningitidis; identical to SEQ ID NO: 42248

SEQ ID NO: 45579 - DNA, 714 bp, Neisseria meningitidis
atgatgtctcctgttttgtatttgattcctacgcctttgggtacgcctgacacgccgtgcctgttgccgcatgaacaacaggcgattgtcgggctgacggattttgtcgtggaggcggaaaaaacggcgcgtgcgcatttgaaacatttgggcgtgactacgcctatccgcgagctgaatctgcaaacgttgaatgaacatacggatttgaagactttgccggaattgctgaaacctttgcaagaagggcgcagtatgggcattgtcagtgaggcgggttgcccggctgtggccgatccgggtgcgaatttggtggcattggcgcataaacacggttttgaagtgcgtccgctggtcgggccttccagcctgctgctggctttgatggcttcgggtgcgaacgggcagagttttgcgtttaaaggctatctgccgtctgaaaaaaacgagcggattcaggcttttcgggctttggaacagcgttcgcgccagtgcggcgagacgcagatttttattgaaacgccttaccgcaatgatgcgctgcttgccgatgcggtggaaaacctgcatcctgaaacgcgtttatgcacggctacggatttgaccttgccgacacaggaaatcatcagtcaaacaatcgtgcagtggcgaaaaagaaaagaaatgcccaatctgaaaaaacgcccgacgatttttgtgatgtatgcgggttga

SEQ ID NO: 45580 - DNA, 1464 bp, Neisseria meningitidis
atgcgtatcgtagaaaaagcctatactttcgacgatgttttgttggttcccgcacattcgaccgtgctgccgcgagacgttaaacttcaaaccaagctcacccgcgaaatcacgctcaacctccccctgctttccgccgcgatggatactgttaccgaggcgcgcctcgccatttcgatggcacaggaaggcggcatcggcatcatccataaaaatatgccgccggagatgcaggcgcgcgccgtttccaaagtgaaacgccacgaaagcggcgtggtcaaagaccccgtaaccgttgcgccgacgacgctcatccgcgaagtcttggaaatgcgcgcgcagcgcaaacgcaaaatgtccggcctgcccgtcgttgaaaacggcaaagtcgtcggcatcgtaaccaaccgcgacctgcgttttgaaaaccgcgtcgatttgcccgtttccgccattatgaccccgcgcgaacgtctggttaccgtccccgaaggcacaagcatagacgaagcgcgcgaactgatgcacacgcacaaagtcgagcgcgttttggttctgaacgaaaaagacgaactcaaaggtctgattaccgtcaaagatattttaaaaaccaccgaatttcccaatgccaacaaagactccgagggccgtctgcgcgtcggtgcggcagtcggcaccggcggcgacaccgaagagcgcgtaaaagcattggtagaagcaggagtcgatgtcatcgtcgtcgataccgcccacgggcacagccaaggcgtgatcgaccgcgtgaaatgggtgaaagaaacctatccgcacatccaagtcatcggcggcaacatcgccactgccaaagccgcattggatttggtcgccgccggcgcggatgccgtcaaagtcggtatcggtccgggatcgatttgcaccacccgtatcgtggcaggtgtcggcgtgccgcaactgaccgccattcacaacgttgccgaagccctcaaaggcacgggcgttccgctgattgccgacggcggcatccgcttctccggcgacatcgccaaagccctcgccgcaggcgcgtacagcgtcatgctcggcggtatgtttgcaggcacggaagaagcgccgggcgaaatcgaactctaccaaggccgctcgtacaaatcctatcgcggtatgggttcattgggcgcgatgagccaaggttctgccgaccgctacttccaagacaaaaccgacagcaccgacaaatacgtccccgaaggcatcgaaggccgcgttccctacaaaggcccgattgtgaacatcatccaccaactgaccggcggactgcgctccagcatggggtatttgggttgcgccaatattgccgaaatgcacgaaaaagcagaatttgtggaaatcacttccgcaggtatgagcgaatcgcacgttcacgacgttcaaattaccaaagaagcaccgaactaccaccgctga

SEQ ID NO: 45581 - DNA, 849 bp, Neisseria meningitidis
atgttaagcaaaatcagcgaatcactggcaaacctttccggtgcggaacgcaaagtcgccgaatgtgcattggcggaacccaaatggttcgttcatgccgccgttgccgaaattgccgaacgtgcgtccgtcagccagccgaccgtcatccgattctgccgcagcttgggttataaagggctgcccgagttcaagctcgccttgtccgccagcatcggtcatgagggtatgccctatgtccacgaagaactcaatgccgacgacgatatggcaagcgtggtcgagaaagtgttgggcaatgccgccgcctcgctgttgggcgaacgccgcttcctgaaagagtcggagctggaaaacgccattgccacgctgatgcacgcccgtcgcgtcgagttttacggtgtcggcaattccggtatcgttgcgcaggacgcgcaacacaagtttttccgtttcggaatgtccacggtcgcctatgtcgatacgcacacgcagctgatggcagcatccgttttgagcgatcaggatgttttggttgccatttccaacacgggttcgtctatcgaacttttggatgcggtcagcatcgccaaagaaaacggcgcgtccgtcatcgcactgacccgcaacgattcgcctctggcgcaacttgccgactgcgtgttgagcgttgccacacaggaaaatgccgaactctacacgcccatggtttcccgcctcttgcagcttgccgtcatcgacattctcgccatcggacttgccctgcgcttgggcgatgctgccagcctgcaattgcagaaaagcaaaaaaagcatacacaacaagcacatcgattacgacaaagattga

SEQ ID NO: 45582 - DNA, 372 bp, Neisseria meningitidis; identical to SEQ ID NO: 36308

SEQ ID NO: 45583 - DNA, 1059 bp, Neisseria meningitidis; identical to SEQ ID NO: 40263

SEQ ID NO: 45584 - DNA, 903 bp, Neisseria meningitidis
atggacagcctgatgacattgctttcggtattggtaccgatgttcgccggattttttatccgtgtgcccaagccttacctgcccgctttggacaaggtgctgtcggttttggtgtatgccgtgctgctgctgatcggcgtatcgttgtcgcgcgtggaggatttgggttcgcggttggacgatatggcgttgacggttctgtggctgtttgtttgtacggtcggggcgaacctgcttgctttggcagtgttgggaaagttattcccgtggcggataaaggggaaagggaagggcgtttcggtcggcgtgtcgggcagtgtggggcagctcggatgcgtgctgctcggatttgcattcggcaaactgatgcgcgatatttggatgccgtctgaaagcgcgggcatgtattgtctgatgctgctggtgttcctcatcggcgtacagctcaaaagcagcggcgtatcgttgcggcaggttttggtcaaccgcaggggtattcggttgtcggtctggtttatgctttcatctctttcgggcgggctgctgtttgccgcatcgacagacggtgtgtcgtggacgaaaggtttggcgatggcttccggcttcggttggtattccctctcgggtttggtcatgaccgaggcttacggcgcggtatggggcagcatcatgctgctgaacgatttggcacgagagctgtttgcactggcatttatcccgctgctgatgaagcgttttccggatgcggcggtgggggttggcggtgcgaccagtatggattttacattgcccgtgattcagggtgcgggcggtttggaagtcgtgccggtagcggtcagcttcggcgtggtggtcaatattgccgccccgtttctgatggtggtgttttccacgctgggctga

SEQ ID NO: 45585 - DNA, 2472 bp, Neisseria meningitidis
atgaaaaaaacctgtttccactgcggtctggatgttcccgaacacctccacctgactgtccgttacgaaaacgaagaccgcgaaacctgctgcgccggttgtcaggcggtcgcacaaagcattattgacgcgggcttgggcagttattacaaacaacgcaccgccgacgcgcaaaaaaccgagctgccgccccaagaaatcctcgaccaaatccgcctgtacgacctgcccgaagtccagtccgactttgtggaaacccacggcggcacgcgcgaggcggttttaatgctcggcggcatcacctgcgccgcctgcgtctggctgatcgaacagcagcttttgcgtacagacggcatcgtccgcatcgacctcaattacagcacgcaccgctgccgcgtcgtctgggacgacggcaaaatccgcctttccgacattctgttgaaaatcaggcagataggctacaccgccgcaccctatgacgcgcaaaaaatcgaagccgccaaccaaaaagaacgaaaacaatacatcgtccgcctcgccgttgccgggctggggatgatgcagacgatgatgttcgcgctgccgacctacctttacggcggcgacatcgaacccgatttcctgcaaatcctccattggggcggctttttaatggtgctgcccgtcgtattctattgcgccgtcccgttttatcaaggcgcgttgcgcgacctgaaaaacctccgcgccggcatggatacgccgattgccgtcgccatcatcatgacctttatcgccggcgtttacagccttgcgaccaatgcggggcaggggatgtatttcgaatccatcgccatgctgctgtttttcctgctgggcggacgctttatggaacacattgcccggcgcaaggcaggcgatgctgccgaaaggctggtgaaactgatacccgccttctgccaccggatgcccggctatcctgccgtacaggatgtccgcgaagccgccgtcgtcaagctccaagcaggcgatgtggtactggtcaaaccgggcgaaaccatccccgttgacggcacggtgctggaaggaagcagtgccgtcaacgaatctatgctgaccggcgagagcctgcccgtcgccaaaatgccgtctgaaaaagtaaccgccggcacactcaacacgcaaagccccctgattatacgcaccgaccgcaccggcggcggcacgcgactgtcgcacatcgtccgcctgctcgaccgcgccttagcgcaaaaaccgcgcactgccgagttggcggaacaatacgcctcgtctttcatattcggcgaactcctgcttgccgtccccgtcttcatcggctggacgctgtacgccgacgcgcacaccgcattgtggattaccgtcgccctgctggtcattacctgcccctgcgccttatcgcttgccacgccgaccgcgctggcagcttctaccggtacgctggcgcgcgaaggtattttaatcggcggaaagcaggcaatcgaaaccctcgcccaaaccaccgacatcatcttcgacaaaaccggcacgctgacccaaggcaaacccgccgtccgccgtatctcattgttgagaggcacagacgaagcctttgttctcgcggtggcgcaggctttagaacaacagtccgaacatccccttgcccgcgccatcctcaactgccgcatttcagacggcagcgtccccgacatcgctattaaacaacgcctcaaccgcatcggcgaaggcgtgggcgcgcaactgaccgtcaacggcgaaacacaggtttgggcattgggcagggcatcctatgtcgccgaaatttcaggtaaagaaccgcaaacagaaggcggcggcagcgcggtttacctcggcagtcaaagcggtttccaagccgtgttctacctgaccgaccccttgaaagacagcgcggcggaggcggtgcggcagttggcaggcaaaaacctgaccctgcacatcctcagcggcgaccgcgaaaccgccgttgccgaaaccgcccgtgccctgggtgtcgcgcactaccgcgcccaagccatgcccgaggacaaactggaatacgtcaaagccttgcaaaaagaagggaaaaaagtgctgatgataggcgacggcatcaacgacgcgcccgttttggcgcaggcagacgtatccgccgccgcagcgggcgggacggatattgcgagggacggcgcggacattgtgttattgaacgaagatttgcgtaccgtcgcccacctgctcgatcaggcgcggcgcacccgccatattatccggcaaaacctgatatgggcgggcgcgtacaatatcattgccgtaccgcttgccgttttgggctatgtccaaccgtggatagccgcactgggtatgagcttcagttcgctggcggttttgggcaacgccctgcgccttcacaaacgggggaaaatgcagtctgaaaaaatgccgtccgaacaatga

SEQ ID NO: 45586 - DNA, 930 bp, Neisseria meningitidis
atgattcacgtttcggcagtgcaggcaccggcgcatattcaggataccggacgctacggacaccggcgttacggcatcggtcatgccggtgcgatggacacggttgctttggcggcgggtaatattttattgggcaacgacgaaggcacggccgcaatcgaaatcgctttgggcgggataatgctggtgtttgaacgggatacgccgttttgtctcaccggtgccgtgtatcaggcggaattggacggcgaaccggtctattcgtattggcgttataccgcccgcaaagggcagaccttgaaaatggtgcgtgccgtgcagggcatgtacggctatgtgtgcgtggcgggcggatttgatgtgccggaagtgatgggttcgagaagtaccgacctgaaagccggtttcggcggccatcagggcagaatgctgcaaaaaggcgattatctccccatcggcaaaggtgcgcaggaattgtccaaagtcggcattgccccgataccgtttaccgataccgtccaccttgttccttcgtcggaatatgccgctttcagtgaaaaagggcgtctgaatctggaacgggaaacgtggacgctgcaaagcgatagcaaccgcatgggctaccgcttcgacggacagccgctgaccctgtcgcaacctttggaaatgctgtcccacgctgttcaggcaggaaccgtgcaggtgccgcccggcggcaaaccgattatcctgctggccgatgcgcaaaccaccggcggttatccgaaaatcgctaccgttgccgccgccgatttgggcaggctggcacaggtgcgcttcggcagcaaagtcaaattcaaaataatcggcttgaaagaagccaccgccctgcggcgcaaaaaccaagcctatctgaaccaaatacggagaatcacccatgaagcaggttga

SEQ ID NO: 45587 - DNA, 1866 bp, Neisseria meningitidis; identical to SEQ ID NO: 39323

SEQ ID NO: 45588 - DNA, 1728 bp, Neisseria meningitidis
atgcagttatcaggcgcgcaaatcatagtgcagagtctcaaagccgaaggtgtcgagtacgttttcggttatcccggcggtgcggttatcgaaatctacgatgcccttttccaactcaataaattcaagcacattctgacccgtcacgagcaggcggcagtacacgcggcagatgcgtatgcgcgcgtcagcggtaaggtgggcgtggcattggttacatccggcccgggcgttaccaatgcactgaccggtattgctactgcctatacggattcgattccgatggtggtcatcagcgggcaggtaggcaattccctgattggtacggatgcgttccaagaagttgatacggtgggtattacccgtccgtgcgtcaaacacaatttcctggttacggacatcaatgagttggcggaaaccattaaaaaggcgttccaaattgccgcaagcggccgaccggggcccgtggtggttgatgtcccgaaagatgttacgcaggcgatggcgaaattcagctatcctcaggaagacatttttatccgttcgtatcaaccggttgttcaagggcatatcggtcagattaaaaaggccgtgcagatgttggcatctgccaaacgtccggtcgtctattttggcggcggcgtggtgttgggtaatgcttctgaagagctgacccgatttgtccgaatgacgggtgctccgtgcacgggtacgctgatgggcttgggcgcttatccttccggcgaccgccaattcctcggtatgctcggtatgcacggtacttacgaggcaaaccttgccatgcagaatgcggatgtcgttcttgccgtaggtgcgcgttttgacgaccgtgtggtttccgtaccgtccaaatttttcgagaaggcgaagaaggttatccatatcgatgtcgatccttccagcatcgccaaacgcgtgaaggtggacattccgattgtcggcgacgtgaaaaatgttttgtctgagatggttgcgctgtggcaaaaacaagagttcatgccgtctgaagatgctttgggcaaatggtggaaaaccatagaggaatggcgttcccaagattgcttgtggtttgacaacggcagcgaaattatcaagccacaatatgtgattcagaagcttgccgagattaccggcaattcggcaatcatcacatcggatgtagggcagcatcaaatgtttgcggctcaatattatcccttcgaacgtccgcgccaatggctcaattccggcggtttgggtacgatgggcgtgggtctgccttatgcgattggtgcaaaacttgccgccccggatcaagacgtattctgtattaccggcgacggctcgattcagatgaacatccaagagttgtccacctgtttccaatatcggattccggttaacgtcattacgctgaacaacggttatctcggtatggtacgccagtggcaggaaatatattacggcggccgagagtcggaaacttatttcgattctttgcccgatttcgtcaaacttgccgaggcatacggccatatcggtatccgcgtggacaagaagtctgatgtggaaggtgcgttgttggaagcattgaaccaaaaagacaggctggtgtttatcgacttcctgaccgaccagaaacagaatgtgatgcccatggtcggcaacggcaaaggtttggacgaaatggtacttccgccgcatatgcgtgcggacgaaaaggcgtaa

SEQ ID NO: 45589 - DNA, 1245 bp, Neisseria meningitidis
atgtccaacgaaaaccgtacctgttccttttgcggaaaatccaaatcacacgtcaaacatttaattgagggcgaaaacgcctttatctgtgacgaatgcgtctcaaactgtattgaaatattgcatgaagacggaaatgacggcacaccttcggaaagtgccggaggggagccggaagaatccggcaagctgcccacgcccgccgaaatcgtcgccaacctcaacgaccacgttatcggtcaggaacaagccaagaaagccttggcggtgtcggtgtacaaccattacaaacgcctgcgccacccgaaagccggagctaatgtcgaattgtcgaaatccaacatcctgcttatcggcccgaccggatcgggtaaaaccctgctggcgcaatctttggcgcgtaaactggacgtaccgttcgtgatggcggatgcaaccacgctgactgaagcaggttatgtcggcgaagatgtcgagcaaatcatcaccaaactgttgggcaaatgtgatttcgatgttgaaaaagcccagcgcggcatcgtctatatcgacgaaatcgataaaatttcacgcaaaggcgacaatccgtccatcacgcgcgacgtgtccggcgaaggtgtgcaacaagccttgctgaaactgattgaaggtacggtggcaagtgttccgccccaaggcggccgcaagcatccgaatcaggaatttatcaacgtcgataccaccaacatcctgtttatctgcggcggtgcgtttgcaggcttggaaaaagtcatccgccagcgcaccgagaaaggcggtatcggtttcggtgcgtccgttcacagcaaggacgaaaatgccgacattaccaagctgttcggcatcgtcgaaccggaagatttaatcaaattcggtctgattccggaattaatcggacgtttgcccgtgattgcaacgttagaagaactggatgaggacgcgctgattaatattttgaccgagccgaaaaatgctttggtcaagcagtatcaagccttgttcggtatggaaaatgtcgaactggagtttgaagaaggcgcattgcgttccatcgcgcgtcaggcaatggagcgcaaaaccggcgcgcgcggcctgcgttccatcgtcgaacgctgcctgttggatacgatgtaccgcctgcccgatttgaaaggcttgaaaaaagtggtggtcggtaaggcagtcatcgaagagggcagggaaccggaattggtgttcgagccctga

SEQ ID NO: 45590 - DNA, 1452 bp, Neisseria meningitidis
gtgaattatttccctattttcgccaacctcgccggccgccccgtattggtcgtaggcggcggcgcggtcgccgcacgcaaaatcagcctgctgctgaaggcgggcgcagaggtcagggttgccgcaaaacacctgaatgccgaactctccgcgttggcggcggaaaacaaaatcctgtggcttgccgaagaatttcgtgccgaacacatccgcacggttttcctcatcattgcggcaagcagcgaccaagccctcaaccggcgcgttttccatcttgccgaaagctgccaaaagccggtcaacgtggtggacgaccgcgaccattgcagcttcatcttcccgtcggttatcgaccgcaacccggttcagattgccgtttccagctccggcagcgcgcccgtcctcgcccgactgctgcgtgaaaggctggaagccctgctgccgccgtctttgggcgatatggcggaaatttcaggaaggtggcgcgatgccgtcaagggcaaactgaaatccgttaccgaacgccgccgcttttgggaaaagcagtttaacggacgtttcgccgccctcgtcaaaaaccggcaaaacacccttgccgaacgggaattggcaaagcagttggaacaaaattatcaaggcggttttgtgtctttggtcggtgcgggtcccggcgatgcggggctgctgacgctcaaagggctgcaggaaatccagcaggcagacgtggtgctttacgacgcgctggtttcagacggcatactgtccctcgtccgccgcgatgcggaacggatttttgtcggcaagcgcgcccggggcggccgcaccccgcaagaggacaccaatgcgcttatggtcaggctggcccgcgaaggcaggcgcgtggtgcgtttaaaaggcggagaccctttcgtgttcggacgcggcggcgaagaattggaaaccttggcacgccatcagatcccgttttcggtcgtccccggcattaccgccgccgtcggcgcgaccgcctatgccggcatcccgctcacgcaccgcgattatgcccaaagtgcggttttcgtaaccggccaccgcaaggcggatgcgcccgacatcgaatggcagaccctcgcccgcagccgccagaccttggtgatttatatgggtgcgctcaaagccgccctgattgccgaacggctgcaacagcacggacgctcgcccgacacgccggcagccgttatcagccaaggcacgctgccggctcaaaaaaccgcaaccggcacgctcgccaaccttgccgaactcgccgaaaccgcgccgaatccggcattgattgtcataggcgaagtggtggggctgcacgaaaaactggcttggttcggcgaaaacgccaaaaaagaaagcaatccggccgaacacgcgtattttgcattggacggactgggcaccggacaagaacaacaagccgcataa

SEQ ID NO: 45591 - DNA, 729 bp, Neisseria meningitidis; identical to SEQ ID NO: 39209

SEQ ID NO: 45592 - DNA, 582 bp, Neisseria meningitidis
atggaagaaaaaaacgactacaccgacgcggcatccgacaaccgcaacgggcaggaaattgaagtcggaattgccggcgcaggcgaccggatacttgccgcgctgctgaaccaattgtttacctttttggttttgttggtgccgtttgccggactgattgctttcgccatcaagaatgaaggcaggattggcggcagtgaggaaatattcgggctgcttttgggcatgacttccttttgggtaggactggcgggcattttggtttataccgtcgttcaaatctactatatgagtcgggacgggcagtcattgggtaagaaaatcatgagaatcagggtgttgaaaaccgacggccgcaatcccggttttgtcggcacggttttggtacgcgaaatcgcatggtcggttttggttgccattattgccgccgttatcggtcttgcagtaggtgacaacggagaaaacgccatcaacctgctggcattccttgccaactttgtcctgctctttatggtcaaacgcgatcgccgcacgctttacgacatactggcggatacggttgtcgtcaagctgcccaaataa

SEQ ID NO: 45593 - DNA, 1170 bp, Neisseria meningitidis
atgcgaaaaaaacttaccgcgctcgtattgtccgcactgccgcttgcggccgttgccgatgtcagcctgtacggcgaaatcaaagccggcgtggaaggcaggaacatccagctgcagttgaccgaaccgctccaaaatattcaacaacctcaggttactaagcgcaaaagccgcatcaggacgaaaatcagcgatttcggctcgtttatcggctttaaggggagcgaggatttgggcgaagggctgaaggctgtttggcagcttgagcaagacgtatccgttgccggcggcggcgcgtcccagtggggcaacagggaatcctttatcggcttggcaggcgaattcggcacgctgcgcgccggtcgcgttgcaaatcagtttgacgatgccagccaagccattgatccttgggacagcaataatgatgtggcttcgcaattgggtattttcaaacgccacgacgatatgtcggtttccgtacgctacgattcccccgaattttccggttttagcggcagcgtccaattcgttccggcccaaaacagcaagtccgcctatacgccggctcattttgttcagaataagcaaaatcagcaaaatcagccgcctactctcgttccggctgttgtcggcaagccggggtcggatgtgtattatgccggtctgaattacaaaaatggcggttttgccgggaactatgcctttaaatacgcgaaacacgccaatgtgggccgtgatgcttttgagttgttcttgctcggcagcgggagtgatgaagccaaaggtaccgatcccttgaaaaaccatcaggtacaccgcctgacgggcggctatgaggaaggcggcttgaatctcgccttggcggctcagttggatttgtctgaaaatgccgacaaaaccaaaaacagtacgaccgaaattgccgcgactgcttcctaccgcttcggtaatgcagttccacgcatcagctatgcccatggtttcgactttatcgaacgcggtaaaaaaggcgaaaataccagctacgatcaaatcatcgccggcgttgattatgatttttccaaacgcacttccgccatcgtgtctggcgcttggctgaaacgcaataccggcatcggcaactacactcaaattaatgccgcctccgtcggtttgcgccacaaattctaa

SEQ ID NO: 45594 - DNA, 1206 bp, Neisseria meningitidis; identical to SEQ ID NO: 38565

SEQ ID NO: 45595 - DNA, 2055 bp, Neisseria meningitidis
atgacacgcaaaatcctcgttacctccgccctgccctatgccaacggcagcatccacctcggccatatggtcgaacacatccaaaccgacgtttgggtgcgctttcaaaaactgcgcggccacgaatgctactactgctgcgccgacgacactcacggcacgcccgtaatgcttgccgcgcaaaaacaaggcatcgcgcccgaagacatgattgccaaagtgcgcgaagagcacctcgccgactttaccgatttcggcatcggttacgacaattattacagcacccattcccctgaaaacaaacagttttcccaagacatttaccgcgcgctgaaagccaacggcaagattgagagccgcgtcatcgagcagcttttcgaccccgaaaaacaaatgttcctgcccgaccgcttcgtcaaaggcgaatgcccgaaatgccacgcccaagaccaatacggcgacaactgcgaagtctgcggcacgacctattccccgaccgaactgatcaacccgtattccgccgtttccggcgcgaaacccgaattgcgcgaatccgaacacttcttcttcaaactgggcgaatgcgccgacttcctcaaagcatggacttccggcaacaacccgcacgacggcaagccccatctgcaagccgaagccctcaacaaaatgaaagaatggctgggcgaaggcgaagaaaccacgctgtccgactgggacatttcccgcgacgcgccgtatttcggctttgaaatccccgacgcgccgggcaaatacttctacgtctggctggacgcgcccgtcggctacatggcgtcgtttaaaaacctgtgcgaccgcatcggcgtcgattttgacgaatacttcaaagccgacagccaaaccgagatgtaccacttcatcggcaaagacatcctctatttccacgccctgttctggcctgccatgctgcacttctccggccaccgcgccccgaccggcgtgtacgcacacggctttttgaccgtggacggacaaaaaatgtccaaatcgcgcggcaccttcatcaccgctaaatcctatctggaacaaggtttaaaccccgagtggatgcgctactacatcgccgccaaactcaacagcaaaatcgaagacatcgatttgaacctgcaagactttatctcgcgcgtcaacagcgacctcgtaggcaaatacgtcaacatcgccgcccgcgcgtcaggttttatcgccaaacgctttgaaagccgtctgaaagacgttgccgacagcgcgttgctggcaaaactgactgcgcaaagcgaagccattgccgaatgctacgaaagccgcgaatacgccaaagccctgcgcgacatcatggcattggcagacattgtcaacgaatatgttgatgccaacaaaccttgggaactggcgaaacaagaaggccaagacgcacgcctgcacgaagtatgcagcgagctcatcaacgccttcaccatgttgaccgcctacctcgcccccgtgttgccgcaaaccgccgccaacgccgcgcgtttcctcaatctggacgcgattacttgggcgaacacaagggtaaccttgggcgaacacgccatcaacaaatacgaacatttaatgcaacgagtggagcaaaaacaagtggacgatttaatcgaagccaacaaacaaagtattcagacaacccccgcgcctgttgaagacagcaaatacgaaaaagtcgccgaacaggcgggtttcgacgactttatgaaaatcgatatgcgcgtcgccaaagtattgaactgcgaagccgtcgaaggcagcaccaaactcctgaaattcgacctcgatttcggttttgaaaaacgtatcatcttctccggcatcgccgcgttttaccccaaccctgccgagttaaacggaagaatggtcattgccgtcgccaacttcgccccgcgcaaaatggcgaaattcggtgtatccgaaggcatgattttgagtgccgccacggcagacgggaaactgaaactgcttgatgtcgacgcaggcgcgcaaccgggcgacaaagtcggttaa

SEQ ID NO: 45596 - DNA, 621 bp, Neisseria meningitidis
atgaaaccgcaattcatcactttggacggcatagacggtgccggcaaatccaccaaccttgccgtcatcaaggcatggtttgaacggagggggctgcccgtgctgttcacgcgcgagccgggcggaacgccggtcggtgagaccttgcgcgaaatcctgctcaaccctgaaaccaaagccggtttgcgtgcggaaaccctgatgatgttcgccgccagaatgcagcatattgaagacgtgatattgcccgcgctttcagacggcatccatgtcgtgtccgaccgttttaccgatgcaaccttcgcctatcagggcggcgggcgggggatgccgtctgaagacattgaaattttggaacattgggtgcagggcggtttgcgccccgatttgaccctgctgttggatgtgccgctggaagtgtcgatggcgcgtatcgggcagacgcgcgagaaagaccgtttcgagcaggaacaggcagatttcttcatgcgtgtgcgcagcgtttatctgaaccgtgccgccgcctgtccggaacgttacgccgttatcgacagtaacctcggcttggatgaagtcagaaacagcatagaaaaagtgttggacggacatttcggctgttaa

SEQ ID NO: 45597 - DNA, 1647 bp, Neisseria meningitidis
atgaaacactttcacgacttacccgcatggccgaaattgtggaaccactttgacgacagcaaaacattgcatatgcgcgaaatgttcgagcaagacccgcagcgtgcggaacgctactggctgcaagtcggcggactgacgctggactactccaaaaaccgcatcaacgacgaaaccatgtcgcttttgttcgagttggcgcgtgaagcaggcgtgccggagcggatgcggcagatgttccacggcgaaaaaatcaatacgacggaaaaccgcgccgtcctccacgtcgcccttcgcaaccgcaccaattcgccgattgtggttgacggtgaagatgtgatgccaaaagtcaaccgcgttttgcaacgtatgggcgaatttgcacacgaagtccgcagtggaagctggctgggctataccaaccaagtcattaccgacgttgtcaacatcggcatcggcggatcggatttgggcccgttgatgatgtgtaccgcgctcaaacctttcggtcatccacgcctcaatatgcacttcgtctccaacgtggacggctcgcaactgcgcgacgtattgtccaaagtccaccccgaaaccacgctgttcattatcgcctccaaaacctttaccacgcaggaaacgctgaccaacgcgctgaccgcgcgcgaatggtttttgaatcatgcgggcgatgaaagcgccgtcgccaaacatttcgttgctgtttccaccaaccaaaaagccgttgccgaattcggcatcgacaccgccaatatgtttgaattttgggactgggtcggcggccggtacagcctgtggtccgccatcggattgccgattatgctgtatctcggcgaagaaaacttcatcgaaatgctcaacggcgcgcacctgatggaccaacatttcatcaacactccgctcgagcgcaacctgcccgccatcctcgcccttatcggcatctggtacatcaactactacggcggcggaagccacgtcatcgcaccttacgaccaacacctccaccgcctgcccaaattcatccagcagctcgatatggaaagcaacggcaaacaggttacgttggacggcaaagcagtcggacacgaaacctcgccgattatttggggcgaaacgggcatcaacggccagcacgccttcttccaactgctgcaccaaggcacgcacatcacccccatcgacctcatcgcctcgcttgaaaaacgcagcaacctgcccggacaccacgaaatcctgcttgccaacgtcttcgcccaagcagaagcctttatgcgcggcaaaacccccgacgaagtccgcgccgaactcaaagcgcagggtatggatgaggcgcgtatcgaagagctggttccgcacaaaaccttctccggcaaccgcccgaccaacctcatcctgatggataaggtcaacccccgcaatatgggcagcctgattgccatgtacgaacacaaaaccttcgtacaaggcatcatttggggcatcaacagcttcgaccagtggggcgtggaactcggcaaacaactggctaaaaccattttgggcgaactgaccggcgaaaccgggccgcaaaagcacgacagttcgaccgaacgcctgatcaggctttacctgcaaaccaaccgcaaataa

SEQ ID NO: 45598 - DNA, 828 bp, Neisseria meningitidis; identical to SEQ ID NO: 38675

SEQ ID NO: 45599 - DNA, 1629 bp, Neisseria meningitidis; identical to SEQ ID NO: 38661

SEQ ID NO: 45600 - DNA, 1035 bp, Neisseria meningitidis
atgagcctgcctgcaatggatgccggtatttatctcgaagaaaccgccccgcgcgccctgattgaacacaacaatattttggataattcggtcggcgtatatctgcatggttctgccgatgcgatggtgcgcgagaacaaaattgttggcgatgcgactttgcgcgtgaacgagcgaggcaacggcgttaccgtttggaacgcgcccggcgcgcaggtcgtcggcaacgatatttccaaaggccgcgacggcattttttccaataccagcacgcacaacacctataaaaacaaccgcttcagcgatttgcgtttcgccgtccactatatgtacaccaacgacagcgaaatcagcggcaatatttccgtgggcaacaatatgggctatgtgctgatgttttccgagcggctcaaagtgtttgacaatatcgccgtcggcagccgcgaccaaggcatcatgctcaactatgtcaactattccgatattcacgacaacattatcaacaaagcgggcaagtgcgtttttgcctacaatgccaactacgataaactgtccgccaatcattttgaaaactgccaaatcggcatacactttaccgccgccatcgaaggcacgtccctgcacgacaattcctttatcaacaacgaaagccaggtcaaatacgtcagcacgcgctttctcgactggagcgagggcggacacggcaactattggagcgacaacagtgcgttcgatttgaacggcgacggcttcggcgacagcgcgtaccggcccaacggcatcatcgaccaaatcatctggcgcgcgcccgtattgcgcctcttgatgaacagtctcgcaatcagcatcgtcaaatgggcgcaggcgcagtttcccgccgttctgcccggcggcgtggtggacagcaaaccgctgatgaagccttatgtccccaaaattcaaacccgctatcaggcaatgaaggacgagttgctcaaagaagccgaaacacggcagtcggaatggggcagggcggaaaacggttctttgaactag

SEQ ID NO: 45601 - DNA, 2745 bp, Neisseria meningitidis
atgcaacagcaacatttgttccgattcaatattttatgcctgtctttaatgactgcgctgcccgcttatgcagaaaatgtgcaagccggacaagcacaggaaaaacagttggataccatacaggtaaaagccaaaaaacagaaaacccgccgcgataacgaagtaaccgggctgggcaagttggtcaagtcttccgatacgctaagtaaagaacaggttttgaatatccgagacctgacccgttatgatccgggtattgccgtggtcgaacagggtcggggcgcaagttccggctattcaatacgcggcatggataaaaaccgcgtttccttaacggtggacggcgtttcgcaaatacagtcctacaccgcgcaggcggcattgggcgggacgaggacggcgggcagcagcggcgcaatcaatgaaatcgagtatgaaaacgtcaaagctgtcgaaatcagcaaaggctcaaactcggtcgaacaaggcagcggcgcattggcgggctcggtcgcatttcaaaccaaaaccgccgacgatgttatcggggaaggcaggcagtggggcattcagagtaaaaccgcctattccggcaaaaaccgggggcttacccaatccatcgcgctggcggggcgcatcggcggtgcggaggctttgctgatccacaccgggcggcgcgcgggggaaatccgcgcccacgaagatgcaggacgcggcgttcagagctttaacaggctggtgccggttgaggataccaatcagtacgctcatttcgtggtcgaagaagaatgccctaatggatatgcggcttgtaaagacaaaccgaaaaaagatgttgtcggcaaagacgaacgtcaaacggtttctacccgagactacacgggtcccaaccgcttcctcgccgatccgctttcatacgaaagccggtcgtggttgttccgcccgggttttcgttttgaaaacaaacggcactacatcggcggcatactcgaacacacgcaacaaactttcgacacgcgcgatatgacggttccggcattcctgaccaaggcggtttttgatgcaaattcaaaacaggcgggttctttgcccggtaacggcaaatacgtgggcaaccacaaatacggcggtctgtttaccaacggtgaaaacggtgcgctggtgggcgcggaatacggtacgggcgtgttttacgacgagacgcacaccaaaagccgctacggtttggaatatgtctataccaatgccgataaagacacttgggcggattatgcccgcctctcttacgaccgtcagggcatcggtttggacaatcattttcagcagacgcactgttctgccgacggttcggacaaatattgccgtccgagtgccgacaagccgttttcctactacaaatccgaccgcgtgatttacggggaaagccacaggctcttgcaggcggcattcaaaaaatccttcgataccgccaaaatccgccacaacctgagcgtgaatctcgggtttgaccgctttggctctaatctccgccatcaggattattatcatcaaagtgccaaccgcgcctattcgtcgaaaacgccccctaaaaacggcaataaaaacatcagccccaacggcagcaaggaaaaaccctattgggtcagcataggcgggggaaatgtggttacggagcaaatctgccgcttgggcaataatacttatacggactgtacgccgcgcagcatcaacggcaaaagctattacgcggcagttcgggacaatgtccgtttgggcaggtgggcggatgtcggcgcggggttgcgctacgactaccgcagtacgcattcggacgacggcagcgtttccaccggcacgcaccgtaccctgtcctggaacgccggcatcgtcctcaaacctgccgactggctggatttgacttaccgcacttcaaccggcttccgcctgccctcgtttgcggaaatgtacggctggcgggcgggtgttcaaagcaaggcggtcaaaatcgatccggaaaaatcgttcaacaaagaagccggcatcgtgtttaaaggcgatttcggcaacttggaggcaagttggttcaataatgcctaccgcgatttgattgtccggggttatgaagcgcaaattaaaaacggcaaagaagaagccaaaggcgacccggcttacctcaatgcccaaagcgcgcggattaccggcatcaatattttgggcaaaatcgattggaacggcgtatgggataaattgcccgaaggttggtattctacatttgcctataatcgtgtccatgtccgcgacatcaaaaaacgcgcagaccgcaccgatattcaatcacacctgtttgatgccatccaaccctcgcgctatgtcgtcggcttgggctatgaccaaccggaaggcaaatggggtgtgaacggtatgctgacttattccaaagccaaggaaatcacagagttgttgggcagccgggctttgctcaacggcaacagccgcaatacaaaagccaccgcgcgccgtacccgcccttggtatattgtggacgtgtccggttattacacgattaaaaaacacttcaccctccgtgcgggcgtgtacaacctcctcaactaccgctatgttacttgggaaaatgtgcggcaaactgtcggcggcgcagtcaatcaacacaaaaatgtcggcgtttacaaccgatatgccgcccccggccgaaactacacatttagcttggaaatgaagttttaa

SEQ ID NO: 45602 - DNA, 573 bp, Neisseria meningitidis; identical to SEQ ID NO: 41560

SEQ ID NO: 45603 - DNA, 270 bp, Neisseria meningitidis
atgccgtctgaaacttttccgtttcagacggcatggttttacagcaatctaaacagggcggactggaatcaaaaacacaccttcgccattcccgcacaagcacttcccctatacgctcccaaccccaatccgccgcattccagacggcattgcctttccgacagccgaacaaaaccccgaatccgtctgcacggttcggggcatatctccaatacgggcatcgtgctccggaaaaccgtcaaatccgcatcggcatcacaatatatttga

SEQ ID NO: 45604 - DNA, 768 bp, Neisseria meningitidis; identical to SEQ ID NO: 39411

SEQ ID NO: 45605 - DNA, 960 bp, Neisseria meningitidis; identical to SEQ ID NO: 39447

SEQ ID NO: 45606 - DNA, 2259 bp, Neisseria meningitidis
atgtacacaagaattatggaaatcagcccttggacgctgcgttcggcaaagctggaaaaagaacacaaacggctgcaagagagcctgaccagtttgggcaacggctatatgggtatgcgcggcagctttgaggaaacctactccgccgacagccacttgggcacctacatcgccggcgtgtggttccccgacaaaacccgcgtcggctggtggaaaaacggctatcccaaatatttcggcaaagccatcaacgcgctcaatttcagcaaagtcaaaatctttgtcgatggtcaagaggtggacttggcgaaaaacgatgttgccggcttctccgtcgaactcgatatgcagcacggcgtgttgcgccgctcgttcaccgtattcggcgtgcgtttcgatgtgtgcaaattcctgtccgtcgcacaaaaagagctggctctcatccgctgggaagccgtatctatcgacggcaaaacccaccaagtccgcatcgattccatcatcgatgccgacgtgaaaaacgaagattccaactacgaagaaaaattctggcaagtattggacaaaggcgtttcagacgaccgctcctacattgccacccaaaccgtcaccaatcccttcggcgtggaacaatttatcgtcaacgccgagcaaactttcgccggcagcttcaaagccctcggcggcagccaaaccgactggcaggtctccaattctttcgaggccgaagtcggcggcacgcccaaaacctttgaaaaacgggttattgttaccaccagccgcgattatcagggcttggaagcagtgaaagccgcaggccgtgccttgtcggaaaaagtcgcaggcgttgcgtttgaaaccttgctggacgcgcacaaagcaggctggctgcaccgttgggaaatcgccgacgtggtcatcgaaggcagcgacgaagcgcagcaaggcatccgtttcaatctgttccaactgttctccacctactacggcgaagatgcgcgcctgaacatcggccccaaaggctttaccggcgaaaaatacggcggcgcgacctattgggataccgaagcctatgccgtaccgctctacctcgcactggcggaacccgaagttacccgcaacctgctgcaataccgccgcaaccaactgccgcaggcgcagcacaacgcgcgcgaacagggcttggcgggcgcactctatccgatggtaacgtttacgggtatcgagtgccacaacgaatgggaaatcaccttcgaggaaatccaccgcaacggcgcgattccttacgccatctacaactacaccaactacaccggcgacgagggctatcttgccaaagaaggcttggaagtcttggtcgaagtgtcccgcttctgggcggaccgcgtccacttctccaaacgcaacggcaaatacatgattcacggcgtaaccggcccgaacgaatacgaaaacaacatcaacaacaactggtacaccaacaccctcgccgcatgggtattggactacacccgcgaagccttggcgaaatacccgcgtccggatttgaacgtgcgtgccgccgagttggaaaaatgggcggacatcagcgcgaatatgtaccgtccgcatgacgaagaactcggcgtattcgtgcaacacgacggcttcctcgacaaagacatccgccccgtgtccgcgctttcgcccgacgatttgccgctcaaccagaaatggtcgtgggacaaaatcctgcgttcgccctttatcaaacaggcggacgtattgcaaggcatctatttcttcggcgaccgtttcaatatcgacgaaaaacgccgcaatttcgacttctacgaaccgatgaccgtgcacgaaagctcgttgtcgccgtgtatccactctattctcgccgccgaactgggcaaagaagaaaaagccgtggaaatgtaccggcgcaccgcacgcctggacttggacaactacaacaacgacaccgaagacggcctgcacattacttctatgactggctcgtggctcgccatcgtccaaggtttcgcccaaatgaaaacttggggcggtaaactcagcttcgcaccgttcctgccgagcgcatggacaggctacgccttccatatcaactaccgaggccgtctgattaaagtcgccgtcggcaaagaaaacgtcgtcttcaccctgctcaaaggcgagccgctcgatttgcaggtgtacggcaaagacatcacactcaacggcagccataccgccgcgttggaaaaataa

SEQ ID NO: 45607 - DNA, 612 bp, Neisseria meningitidis
atgaaattacaacaattggctgaagaaaaaatcggcgttctgattgtgttcacgctgcttgtagtcagtgtcggtctgttgattgaagttgtgcccttggcctttaccaaggcggcaacacagccggcaccgggcgtgaagccttacaatgccttgcaggttgccggacgcgatatttacatccgtgagggctgttacaactgccactctcaaatgattcgtccgttccgtgcggaaaccgagcgttacggtcattactctgttgccggagagtcggtttacgaccatcctttccaatggggttccaaacgtaccggtcctgatttggcacgtgtgggcggccgctattccgacgaatggcaccgtatccacctgctgaatccccgtgatgtcgtgcctgagtccaatatgccggcattcccatggcttgcacgcaataaagtcgatgtcgatgcaaccgttgccaacatgaaggctttgcgtaaagtaggtactccttacagtgatgaggaaattgcgaaagcgcctgaggctttggcaaacaaatccgagctggatgctgtagtcgcctatctgcaaggattgggtctggctttgaaaaacgtaaggtaa

SEQ ID NO: 45608 - DNA, 456 bp, Neisseria meningitidis
atggtcgacgcggtcgttaaaactcccgaatttttaccttttacttctgtaggaatattccgttttggtgctgatataacacagtacaaaaacatactggaaacttttatgtatgaacctcctgatgagtttggaacagaatattatgaatctcccgactcaaatttactcatttccgtcgaaaaaaacaaaattatttcgatattttgttatcaggagctatattttatgggcgttaatataataggtctgaattttgaagattttaaacagcttttccatcaccctaaatcatacggtgttgataaatattatttatcaaatgaatcttatccgacatatgtctatgagtttgatgaaataggagtacaagcttgggaagcaaaagggaaaattgttactatcattgccgggggcaaagacaattattcgacagaaccttactacgatgaataa

SEQ ID NO: 45609 - DNA, 1587 bp, Neisseria meningitidis
atggcacttttcctcagcatattccccatcgtcctgctgatttggctgatggtgaaaaaaaacagtatgccctcctacgtcgcgctgccgattaccgcagtgctgatttacgccatcaaacttttctacttcggcgatgcgggcatgctgctcaacgccaccgccgcttccggcctcgtcaaaacgctcacgccgattaccgtgattttcggcgcgattatgttcaaccgtatgatggaaaccacgggctgcatcgatgtcatccgcaaatggctggcgaccatcagccccaaccccgtagcgcaactgatgattatcggctgggcttttgcctttatgattgaaggcgcatccggcttcggcacgcctgccgcgattgccgcgccgattctgatgagcttgggcttcaacccgttgaaagtggcgattttcactttggtgatgaactccgtccccgtctctttcggcgcggtcggtacgccgacctggttcggtttcgcaccgctgaacctgagtgccgaagacatcctcgccatcggcaggcagaccggcgtaatgcacttcttcgcaggtttcgtcatccccgtcatcggcttgggcttcatcgtaccttggtctgaaatccgcaaaaacttgggcttcgtcgccattgccgtcttctcctgcaccattccttatgtcgcattggcgatggtcaacgaagaattcccgtcgctcgtcgccggcgcaatcggcctgatggtgtccgtattcgccgccaaccaaggctggggcttgagcaaagaccacgccaaagacccgaatgccgaaaaagtgccgttcgcccaagtcgccaaagcactcgcccctttgggtatgctgatcggcatgctggtggttacgcgcatcaaacagctcggcatcaaaggcattttgaccagcaaagaagaatggttcagcttccaactgccgtttgatttgtccaaaatcaccgtcagcgactccctgacgattaccttcggcaatattttcggacaagatgtcagcgcgtcttaccaaacgctgtacgtcccggcttggattccgtttgtgctgaccgtttggatttgcatcctgctgtataaaaccaaattcaaagatgcctggacgatttattccgtaactttcaatcaaaccaaaaaaccgctgcttgccctgatgggtgcgctgattatggttcagctgatgctggtcggcggcgacaattcgatggtgaaaatcatcggtaaggaatttgccgcaatggcgggcgaacactgggtttatttctcgccgtatctgggcgcgatcggtgcgttcttctccggctccaacaccgtgtccaacctgactttcggcccgattcagcagcaaatcgccttggataccggcctgtccgttaccctgattctggcgttgcagtccgtcggcggcgcgatgggcaatatggtgtgcctcaacaacatcatcgccgtatgtaccgtattggatgtgaaaaattccgaaggtgcgattatcaagaaaaccgttatcccgatggcgatttacggcgtgattgccgtcgtcgcggcaatgattttcttcctctag

SEQ ID NO: 45610 - DNA, 552 bp, Neisseria meningitidis; identical to SEQ ID NO: 37351

SEQ ID NO: 45611 - DNA, 1977 bp, Neisseria meningitidis
atgtccaaactcaaaaccatcgctctgaccgcatcaggtctgtccgtttgtccgggtttcctatacgcccaaaacacctcatcacaccaaatcggtttggcgattatgcgcttaaactcttcaatactcgacctgcccccgacaaaacaatatttccaatccggcagcctgtggagcgagctgcgccaaggcttccggatgggcgaagtcaatcccgaactggtacgccgccacgaaagcaaattcatcgcaagccacagctatttcaacagggtcatcaaccggagtagaccctatatgtaccatatcgccaacgaagtcaaaaaacgcaatatgcccgccgaagccgccctgcttcccttcatcgaaagcgcgttcgtcaccaaagccaaatcacacgtcggcgcatcaggattatggcagtttatgcccgctaccggcaggcattacggcctggaaaaaacaccggtttacgacggcaggcacgacgtttacgccgccaccgatgccgcactcaactatctgcaatacctctatggactgttcggcgactggccgcttgcctttgccgcctacaactggggtgaaggcaacgtcggacgcgccatcaaccgcgcccgcgcccaagggctcgaaccgacctacgaaaacctgcgtatgcccaacgaaacgcgcaactatgtccccaagctgctcgccgtgcgcaacattattgccactccccaatctttcggcatgaatatcagcgacatagacaacaaaccgtattttcaggcagtcgaaccggatcgtccgctcgacaacgaagccatcgcccggcttgccggcatcacgcaaagcgagctgctcgccctaaaccccgcattcaacgtccccgcgtttatccccaaaagcaaacgcaaactgctgcttcctgtcgcgtccgtacaaaccttccaaagcaactacctcaacgccgcacccgacagcctgttttcatgggaagtctatacgcctgccgccaaaaccagcctgtccgacatctcgacggcaaccggcatgagcattgccgacatcaaacgcctcaacaacctgaacggcaaccttgtcaacgcaggacgcagcatccttgtcgccaagaacggcaaaacccttcagacggcatcggaatccgtcgtttccatcgacatcgacaatacgcccgacacctaccgttccaatatgccggcaggcacggtgaacgtcggcattgcccgaatccgacccgccgccgcacagacagcggacattaccgtcgcacctttgccgcagaaaaccgtccgtacggaacccgatccccttgtccgtattgccgaacctgcccttgcgacagccgcagcgcaacctcaaaccgaaaaacagaccgccatgccgtctgaaacccaaaccgcaacactcgcgcagatcatcccccaaaacgacatgcaggcggcagacgaactcatgcagcttgttgcccgaaacaacctgcgccgacaggctgaagaaaccatctccgccgtcatcggcacgcctgacacagttgccgaacacaacatttcctcatctccgcaacataccgttgccgccgacggcaaacgccgggcacgtttggaaacgcgcgtagccaaagctgccgacggcgaagccgaaatctccccgctccatgccagcatccaccgcgttgtagaaggcgacaccctgttcaacattgccaaacgctacaacgtcagcgtagccgacctgattgtcgccaacaacatcaaaggcaacaccatccaaaaaggacaggtactccgcctggcgcaggcagcccctgcccaaacccgtattgaaaaagtatcctacaccgcgcgcaaaggcgacaccttcaaaagtatcgccgcgcgcttcaatatccatatcgacgacatccgccggctcaatcccaacctgaacaccatcaatccgggacagagggtcaaactgattggaagctga

SEQ ID NO: 45612 - DNA, 1164 bp, Neisseria meningitidis
gtgcatattaacttttcaatggaatataaagaatttaatgaaaattatttatataaaaagccgtttatttttaaaaaagctttagacgtaagttctatctcatggaaagaaattaatgagttgtatcaacgtgcagaccctactgattggcaatttaaatttcgcaaaggggaaataatccccaaagaagcctatgttgaatcattcaatgatgtgggtagaatacgtcatcggtttaataaaacagccgtatatcagtatctgcaagatggtgcaacaatggtttataaccgtattgataatgagccatttgttgacagtattgctaaacaaattgcccagtttgctcaagcacaaactgttgttagtggttatttggcgtttggtagttctccatcatatcgtaatcattgggatactcgtgatgtgtttgcggttcaattgattggcaaaaaacactggacagtttctgctccaaattttgatatgccattgtatatgcagcaagcaaaagatatgccgcacattactccgcctacaacagtagatatggaagtcattttagaagcaggagatattttatatatcccgcgtggttggtggcataatcctatgcctatgaattgtgaaacattccatttagctattggaacttttccgccaaatggttataattatatggaatggttgatgaaaaaaatacctgatatccagagtattcgtcaaaatttcatagactgggaacacgaccaaaaaaatatagataatgcggctcaggcagttactgaaatgatgaagaaccaagaaaattatcaagcattcatacaagattttttgggaaatcaacgcgtaaatactgcatttaatatgcaaatttttggaaatctggataatgacagattacctgaaaatagtacaattaaactcaattcgttggataaccgtacaattaaacaaggatatatcatagcgaatggcatcaaaaccaacttggacaatgatagccaaacgattttgcaatggattgctgacaaacatagtgttaagttaactcaactgtatgaattttgccaaaatcaaaacattaatttggaaaaagtggaaaaattagtgtttgatttgacaatgatcgatgtattggaatgtttaactgatgaaagataa

SEQ ID NO: 45613 - DNA, 294 bp, Neisseria meningitidis; identical to SEQ ID NO: 38053

SEQ ID NO: 45614 - DNA, 1809 bp, Neisseria meningitidis
atgaaacggcagtcggacgagctggcggagaagatgccgaaaaccctgccccaagtcagaccggggacggcgatgtcggctcaggcactggctgaagcggccaagctgttgaacgagaaacaacggtcggtggcggatgcgcgatgtgcggtggtggcggcggtgttggggattaaataccaatacgattgctctgccaaggctgcggtggctcagtttttgggcttgctggcagaaggtaaattggacgcggtcacgcttgggaacttggaaaaggccaatgaccgcagccggtcggcgaaggttggcgaacgtactttagacggctggatttctgcttatttgaaagcggaaaacgcgacggagcggttggttgctttggctccgaagacgacgaaggcggtcaagccgattgaaagttacggatggttgccgatgtttatgcagtttcacaatattccgtccgcgccaaagctggcgcacagctaccgccggtttgtgcagtgggcggaagcggaaaatatgccggtcaatgatgtgcctaacttgagtatggtgcggcgcgtttgggacaagctgccgctgattatgcaggagcgcggcaggaaaacgggggcggcttataaatcgctgctgccttatgtgaaacgtgattggggggctttgaagccgaacgatgtttggatcggcgacggccacagctttaaggcgaaggtggctcatccggtacacggcaggccgtttaagccggaagtgacggtgattattgatggttgtacgcggtttgtggtgggtttttcggtgtcgttggctgaaagttgtgtggcggtatcggacgctctgcgtatcggggtcaagcactttggtttgccgattatctactactcggataacggtggcggccaaaccggcaagacgatagaccatgaaatcacgggtattacgtcccgattgggtatccggcatgaaacgggtatcgcgggcaacccgcaaggccgaggcatcatcgagcgatggtggaaagacaatctgattgagatggcgcgccagtatgagacgtttgcgggcgcggggatggacagcagtaccaagaacctgatgtaccgcaagatggaaagtgcgtttaacgctttggaaaaaggcaaggatttgacggaggaacaacagaaatatttgaaaaaactgccgggctggtcgcgttttatcgcggatgtggtcaagtgtatcgacgaatacaacaaccgcccgcacggcgagctgccccgacatccggacggcgggcattattcgccgaaggcttatcgggaaatgaggctggaacaggacggtatcgcgccggatatgttgtcggcgcaagagctggcgacgatgtttatgccgcaagaggtgcgaaaggtacagcgcggttggctggatttgttcaacaactcttatttttcggtggagctggcggagtatcacaaagacgaggtacgggtcagctacgatttgagcgatgcgtcggcggtcaatgtgtttgatatggacggcaagtttatcactaaggcgcaggccaacggcaatacccgcgaggctttcccgacggctcgtatcgaccaactggcggaaaaacgccgaaaaggcaaaatcaagcgggcggaaaatgcaatcaagctcgcaaatgcagaagtcaatcctgctttggaacaggctgcggtttgggacgagctgggacatttgggcggaaacgtcatcgaggcggagtatgcggtattgccgaaaacgggcacggacgacgggattttcttgtttgaggcggatagaagttaa

SEQ ID NO: 45615 - DNA, 279 bp, Neisseria meningitidis; identical to SEQ ID NO: 44294

SEQ ID NO: 45616 - DNA, 990 bp, Neisseria meningitidis
atgaaaattaccgttatcggcgcaggttcgtggggtacggcgctcgccctgcacttttcccaacacggcaaccgcgtatccctgtggacgcgcaacgcagaccaagtccgccaaatgcaggaagcgcgtgaaaacaaacgcggactgcccggcttttcctttcccgaaaccttggaagtgtgtgcggatttggcagacgcgctcaaagacagcggacttgtccttatcgtaacctccgttgccggattgagaagcagcgcagagctgctcaaacagtacggcgcgggacacctccccgtcctcgccgcctgcaaaggattcgagcaggatacagggctgctgacctttcaagtattgaaagaagtattgcccgacaataaaaaaatcggcgtactttccggtccgagttttgcacaggaactcgccaaacaactgccctgcgccgtcgtcctcgcctccgaaaaccaagagtggattgaagaactcgtaccgcagctcaacacgaccgtcatgaggctttacggcagtaccgatgttatcggcgtggcagtcggcggcgcggtaaaaaatgttatggcgattgccaccggattgtccgacggtctagagtacgggcttaacgcccgtgccgcactggttacgcgcggattagctgaaatcacccgccttgcctccgcaatgggcgcacagcccaaaaccatgatggggctggcaggcatcggcgacctcatcttgacctgcaccggcgcactctcacgcaaccgccgcgtcggcttgggtttggcagaaggcaaggaactgcatcaggtgctggtcgaaatcggacacgtttccgaaggggtcagcacgatagaagaagtcttcaatactgcctgtaagtaccaaatcgacatgccgattacccaaaccctgctgcaactcatccgcaaagaaatgaccccgcaacaggtcgtcgaaaggctgatggaacgcagcgcgcgttttgaataa

SEQ ID NO: 45617 - DNA, 453 bp, Neisseria meningitidis
atgaatattgaagtagaaatgaaagtattggacgaacggatggcggatgttgtccctgtctatgcaacgaagggttctgcaggtttagatttgcgcgcctgtttggatgaggaagtcgttttgcagccgggtgaaacgtttcttgtgccgacgggtttggcaatttatttggcgaatcccgcatatgccgccgttttgctgccccgttccggcttggggcataaacacggcattgttttgggcaatttggtcggtttgattgactccgattatcaaggggaattgaaggtgtcgttatggaacagaagcagcgaaccgtttactgtcaaaccgtttgagcgtatcgcgcagatggttgtcgtgccaatcgtgcaggcgcgtttcaaacgtgtcgaggaatttgtcggaagcagccggggtgagggcggcttcggcagtacgggtttgcattga

SEQ ID NO: 45618 - DNA, 975 bp, Neisseria meningitidis
atgctcgaaaatctgccctatttccagcgacatctgcctgaagaccttgccaaagtcaatgaagtcatcaaccgtgcggtgcaatccgatgtcgcactgatttcgcaaatcggtacatatatcatcagcgcgggcggcaaacgcctgcgtccgattatgacgattttggcgggtaaggcggtcggttatgatgacgggaaactgtattcgctggcggcgatggtcgaatttatccacacttcgacgctgctgcacgacgatgtcgtcgatgaaagcgatttgcgccgtggacgggcaacggcaaacaatctgttcggcaatgcggcggcagtgttggttggcgactttttatacacgcgcgcctttcaactgatggttgactcggacagtatgcgcgttttggaagtgatggcggatgcaaccaacattattgccgagggcgaagtcatgcagctgatgaacatcggcaatacggacattaccgaagaacaatatatccaagtcatccaatataaaacggcaaaattgtttgaagctgccgctcaagtcggcgcaattttgggcaaggcttcccccgaacacgaacgggcgttgaaagactacggtatgtatgtcggtacggcattccaaattattgacgatgtgctggactattctggcgaaaccgaagaaaccggcaaaaacgtcggcgacgatttggcggaaggaaaaccgactttgcctttgatttatctgatgcgtcagggttccgaacaggttgcgaacgatgtgcgtactgctttggaaaatgcagatcgcagctattttgagaaaatccacgattatgtcgtccgttcggatgctttggcatattcgataggcgaggcgcgcaaagcagtcgattgtgccgttaccgccttggatgccctgcccgacagcgaagtgaaggatgccatgattcagctggcgaaggaatctttggtcagggtgtcttga

SEQ ID NO: 45619 - DNA, 1419 bp, Neisseria meningitidis
atggaaaatatattgtctgttctggtgggtacagtcaatcggttcctttgggactacctgctgatttacgcgcttttgggtatcggcctgttttttacgctgtatctcggtgcgccgcagattaccaagctgggtgcgggattcaaatctgtattcggcggcttgtttgccaaaggcgataaagacgataagtctttatcgcagtttcaggcgttggcggttgccatatccgcgcaaatcggtacgggcaacgtcgccggcgtggcgaccgccatcaccgcaggcgggccgggcgcgattttttggatgtgggtttctgccgttttggggatgtccacgatttttgcggaggcactgctggcgcagaaataccgcgtcgtcagccacggcaaatacatcggtgggccggcgttttatattacgcacggtctgactccgaaaatcggcaggggcgcggcgcgtttcctgtcgggctttttctccattgcgttgattatcgcattgggctttatcggtaatgcgacacaggcaaactccattgcttctgccgttaccattgcatttgatgtgccttctttggcagtcggtattgtgcttgccgtccttgcgggcatggttgtgattggcggcgtgaaccgtattgccaatattgcccagtttgtcgtgccgtttatggcggttgtttatattttgtgcgccgtcgttatcctgtttgaattttccgactatattgtgccgatgttcaaccacatctttaccgccgccttcaatcctgaagccgttttgggcggtgctgcgggtatcggtatgcgtgaagcgatacgtttcggcgtggcgcgcggtctgttttccaacgaagcaggtatgggttctaccccgcatgcacatgcaaccgctgatgtgaagcatcctgtgcagcaaggtatggcggcatttgtcggtgtgtttatcgatacgattttggtatgtacggctacggcattgattatcctgctgactgatgccaacctttcgggcgaacagggcgcggcggttacccagtttgcctttaacaaggcatttccgggcttcggttcgcaattgcttgccgtgtgtctgacctttttcgccttgacgaccattatcggctggtattatttcggtgagtccaacatccgttttcttttcaggggaagacacttgggcatctatcgcgcattggttctgcttgccatcgttttgggtacgctcggcaaagtcgatttggtttggagcctgtccgatatgttcaacggctttatggttatcccgaacttgatagccctgtttttgttgcgtaaggaaatccgtgccatttatgatgattatttggcacagaaaaaagcgggtcgggatttgtcctatcagtatgaatttcacgagttccacgacaagggctga

SEQ ID NO: 45620 - DNA, 1179 bp, Neisseria meningitidis; identical to SEQ ID NO: 38673

SEQ ID NO: 45621 - DNA, 393 bp, Neisseria meningitidis
atgaaagagcggatagtgggtcaaagcggcgagttgttttgtttcgggcaaatgcccgtatggaaggcggaaaacctgccggaagttttgttgtcgggctattcgtccgaggaaggggaatgggtctgcctgaatgtgttgcagggcgatgtcgaagtccgcacgcaggacggggcggcggaggtttggtcggcagaaagcggcgattgcgtgtttgcgccgcagcaggtgttttcggtcaaactgaaaacggacgatgccgaaatccgtttgtcgctgtattgcgcggcggcagactattttcacaaaaaatacgggatgagtgccacgcattctgcggtcgcggcggcacgggataccgtaccggcgggcagggcgttggatatgggttga

SEQ ID NO: 45622 - DNA, 573 bp, Neisseria meningitidis
atgacttatgaaattcaagcctctgttcgtgaagcacaaggcactggtgcgagccgccgcctgcgtcgcgaaggccaaatccccggcattttgtacggtgaaggccaagagcccgttgcaatcgctgtggatcacaaaactgtattctacgcattggaaaaagaatctttccatactgcgttgattaaattgtctctgaacggcgaaaccaaagacgttatcgtccgcgatttccaaatgcacccgttccgccgcgaagtccaacacatcgacttccaagctgtgaaagccgatcaacttgtacgtatccgtgttcccctgcacatcgttaacgctgaaaattcccaagcggtcaaactgcaaggcggccgcgtatctctgttaaacacttctgttgaagtagttgctttgcctgccaacatccctgctttcttggatttggattgtgccgaagtggttgccggcgacattctgcacttgtcagacatcaaactgcctgaaggtgtagaaagcgtttccctgaaacgtaacgaaaatctggctgttgccactgttaccggtaaaaaacgctaa

SEQ ID NO: 45623 - DNA, 696 bp, Neisseria meningitidis
atgaaagcgatgatactggcggcaggacgcggcgagcgtatgcgccctttgaccgataccactccgaagccgctgctcgatgtggcgggtaagcctctaatcggttggcacctatgccgtctgaagcaggcggggtttaccgaaatcgtcatcaaccacgcttggctgggccggcagatagaagatgctttgggcgacggctcggcttatggcgtgaacatcgcctattcgcccgaacccgcaggcggtttggaaacggcaggcggcatcgcgcaggcattgccgctgttgggtgggcagccgtttttggtggtcaacggcgacgtgctgaccgacatcgattttaccgccgcgtttcaggcggcatcgtccctgccggaacatatttccgcccatctgtggctggtggaaaatccgccgcacaaccccgacggcgatttttccctgctgcccgacggcagcgtgcggccggaagtaaatggcggcaacggattgacattcagcggcgtgggtatttaccgtcctgaaatgtttgacggaatcgaagcgggcagtgtggcgaaactcgcgcccgtattgcgtggcgaaatgcggcaaaaccgcgtgagcggtcagaagcatacgggcttgtggctggatgtcggcacggtatgccgtctgaaagaggctcaagcccttgcaggggcttggaagtga

SEQ ID NO: 45624 - DNA, 1266 bp, Neisseria meningitidis; identical to SEQ ID NO: 39430

SEQ ID NO: 45625 - DNA, 1404 bp, Neisseria meningitidis
atggatactacattgaaaaccaccttgacttctgttgcagcagccttcgcattatccgcctgcaccatgattccccaatacgagcagcccaaagtcgaagttgccgaaacgttcaaaaacgataccgccgacagcggcatccgcgccgtcgatttgggttggcacgactattttgccgacccgcgcctgcaaaagctgatcgacatcgcactcgagcgcaataccagtttgcgtaccgccgtattgaacagcgaaatctaccgcaaacaatacatgattgagcgcaacaacctcctgcccacgcttgccgccaatgcgaacggctcgcgccaaggcagcttgagcggcggcaatgtaagcagcagctacaaagtcggactgggtgcggcatcttacgaactcgatctgttcgggcgtgtacgcagcagcagcgaggcggcactgcaaggctatttcgccagcaccgccaaccgcgatgcggcacatttgagcctgattgccaccgttgccaaagcctatttcaacgaacgttacgccgaagaagcgatgtctttggcgcaacgtgttttgaaaacgcgcgaggaaacctacaagctgtccgaattacgttacaaggcaggcgtgatttccgccgtcgccctacgtcagcaggaagccctaatcgaatctgccaaagccgattatgcccatgccgcgcgcagccgcgaacaggcgcgcaatgccttggcaaccttgattaaccaaccgatacccgaagacctgcctgccggtttgccgctggacaagcagttttttgttgaaaaactgccggccggtttgagttccgaagtattgctcgaccgtcccgatatccgtgctgccgaacacgcgctcaaacaggcaaacgccaatatcggtgcggcacgcgccgcctttttcccatccatccgcctgaccggaaccgtcggtacgggttctgccgaattgggtgggttgttcaaaagcggcacgggcgtttggtcgttcgcgccgtctattaccctgccgatttttacctggggtacgaacaaggcgaaccttgatgtagccaagctgcgccaacaggcacaaatcgttgcctatgaatccgccgtccaatccgcatttcaagacgtggcaaacgcattggcggcgcgcgagcagttggataaagcctatgacgctttaagcaaacaaagccgcgcctctaaagaagcgttgcgtttggtcggtctgcgttacaaacacggcgtatccggcgcgctcgacttgctcgatgcggaacgcagcagctattcggcggaaggtgcggctttgtcggcacaactgacccgcgccgaaaaccttgccgatttgtacaaggcactcggcggcggattgaaacgggatacccaaaccgacaaataa

SEQ ID NO: 45626 - DNA, 1503 bp, Neisseria meningitidis
atggcaaaagtactcatcgtacccgtatctgccggactggacgcctccgccgccgcacaagcctttgcaaaagcactggacgcacaaattttccaagccgttgacgcaaccgccgaaaccctgctcgcgcaaggcaaaagcgacgactggttcgacgcactggtcggcaaagttgccgcactcgatgccgccaacctcgtcatcgaaggcatcgcgcccgatgccgacaaaatctacctcgcaggcaaaaacgtcgaactggcattgtcccttgacgcggcagccgtcttcgccgtccgttccgacaacgccgatgccgacgaactggcaaatcggctgaaccttgccaaacagttcttcgccgccgcgccgggcgtattggaaggttttgtcgtggacggcgcggcagcctccgttgccgaagcggcagccgaaaaaaccggcctgaccttcttcggttcgagcgacgcgctgaaagacgtatccgtattggcaggccgcgaagcaaaacgcctgtcgccggcgcaattccgctacaacctgatcgacttcgcccgccaagccgacaaacgcatcgttctgcctgagggcgcagaaccccgcaccgtccaagccgccgccatctgccacgaaaaaggcattgcccgctgcgtcctgcttgccaaacgcgaagaagtcgaagccgttgccaaagaacgcggcatcagcctgcccgactctttggaaatcatcgatcccgcctcattggtcgaacaatacgtcggaccgatgtgcgaactgcgcaaatccaaaggcctgacacccgaagacgcgcgcaagcaactgcaagacaccgtggtactcggtacgatgatgatggcgcaaaatgatgtggacggtttggtatccggtgcggttcacaccaccgccaacaccatccgccccgctttgcaactgattaaaaccgcaccgggcgcaagcctcgtgtccagcgtattctttatgctgctgcccaaccaagtcctcgtcttcggcgactgcgcggttaatccgaacccgaccgcgcaacagcttgccgacatcgccatccagtctgccgattccgcaaaagccttcggcatcgacccgaaagtggcgatgatttcctactccaccgtcaactccggcagcggccccgatgtcgataccgtcatcgaagcaaccaaacttgcccgggaaaaacgccccgacctcgccatcgacggcccgctgcaatatgatgcggcaaccgtgccgggcgtgggcaaatccaaagctccgggcagcccggtggcaggacaggcaaccgttttggtcttccccgacctgaacaccggcaactgcacctataaagccgtccaacgcagtgccaacgtcttaagcgtcggcccgctgctgcaaggcctgcgcaaaccggtcaacgacctgtcgcgcggcgcgctggtggaagacatcgtgttcaccatcgccctaactgccgttcaggcaaaacaaatggaaggctga

SEQ ID NO: 45627 - DNA, 375 bp, Neisseria meningitidis; identical to SEQ ID NO: 38650

SEQ ID NO: 45628 - DNA, 3963 bp, Neisseria meningitidis
atgtctgtcgttttgcccttgcgcggcgttaccgccctttccgatttccgtgtcgaaaaactcttgcaaaaagccgccgcactcggactgcccgaagtcaaattaagcagcgaattttggtatttcgccggcagcgagaaagcattggatgccgcgactgtcgaaaaactgcaagccttgttggcggcgcaaagcgttgaacaaacgccaaaagcgcgcgagggcttgcatttgtttttggtaacgccccgtttgggtacgatttcgccgtgggcttccaaggcgaccaatatcgcggaaaactgcggtttggcaggcatcgagcgcatcgagcgcggcatggcggtgtggctggaaggtgcgcttaccgatgaacagaaacggcaatgggcggcgttgctgcacgaccgcatgaccgaatcggtgctgcccgattttcagacggcatccaaattattccaccatctcgaatccgaaaccttttccaccgttgatgttttaggcggcggtaaagaggctttggtcaaagccaataccgaaatgggtttggcactctccgccgacgaaatcgattatctggttgaaaactatcaggctttgcagcgcaatccgtccgatgttgaattgatgatgttcgcgcaggcaaacagcgaacactgccgccacaaaatcttcaacgccgatttcatcctcaacggcgaaaaacagccgaaatccctgttcggtatgatacgcgacacgcacaacgcgcatcccgaaggcacggtcgtcgcttataaagacaattcgtccgtaattgaaggcgcgaaaatcgagcgtttctatccgaatgcggcggaaaaccaaggttaccgtttccacgaagaagacacgcatatcatcatgaaagtggaaacgcacaaccacccgaccgccatcgcgccgtttgcgggcgcggcaacaggcgcgggcggcgaaatccgcgacgaaggcgcgacgggcaaaggttcgcgtccgaaagcaggcttgaccggctttaccgtctccaacctcaacatccccgacctcaaacagccgtgggaacaagactacggcaagccggaacacatttcctcgccgttggacattatgattgaaggccccatcggcggcgcggcgttcaacaacgaattcggccgccccaacctcttgggctacttccgcacttttgaagagaagtttgacggtcaggttcgcggctatcacaaaccgattatgattgccggcggcttgggcagcattcaggcgcagcagacgcataaagacgaaatccccgaaggcgcattgctgattcaactgggcggcccgggcatgcttatcggcttgggcggcggcgcggcttcttcgatggataccggcacgaacgacgcgtctttagacttcaattccgtacaacgcggcaaccccgaaatcgaacgccgcgcgcaggaagtcatcgaccgctgctggcagctcggcggcaaaaacccgattatctccatccacgacgtgggcgcgggcggtttgtccaacgccttccccgaactcgtcaacgatgccggacgcggcgcggtattcaagctgcgcgaagtgccgttggaagaacacggtttaacgcctttgcaaatctggtgtaacgaatcgcaagagcgttatgtgttgtcgattttggaaaaagatttggacaccttccgcgccatctgcgaacgcgaacgctgcccgtttgccgtggtcggcacggcgaccgacgacggccatttgaaagtgcgcgacgatttgttcgccaacaaccccgtcgatttgccgctgaacgtcttgctcggcaaaccgcccaaaaccacgcgtaccgacaaaacggttacgccgtccaaaaaaccgtttcacgccgacgatatcgacatcaccgaagccgcctaccgcgttttgcgcctgcctgccgtagccgccaaaaacttcctgattaccatcggcgaccgcagcgtcggcggcatgacccaccgcgaccaaatggtcggcaaataccaaacccccgtagccgactgcgccgttaccatgatgggcttcaatacctatcgcggcgaagcaatgtctatgggcgaaaaaccgaccgttgccctgtttgacgcgcccgcctcgggcagaatgtgcgtcggcgaagccatcaccaacatcgcggcggtcaacatcggcgacatcggcaatatcaaactctccgccaactggatggcggcgtgcggcaacgaaggcgaagacgaaaaactctaccgcaccgtcgaagcggtttccaaagcctgtcaggcattggatttgagcattcccgtgggcaaagacagcctgtcgatgaaaaccgtatggcaggatggcgaagagaaaaaatccgtcgtttcgccgttaagcctgattatctccgcgttcgcgccggttcaagacgtacgcaaaaccgttacgcccgaattgaaaaacgtcgaggacagcgtattgctgtttgtcgatttgggcttcggcaaagcgcgtatgggcggctctgcattcggtcaggtatacaacaacatgagcggcaacgcgcccgatttggacgatacaggccgtctgaaagccttttacaacgtgattcaacagcttgtcgccgaagacaaactcttggcgtatcacgaccgcagcgacggcggcttgtttgccgttttggtagaaatggcgtttgcagggcggtgcggcttggatatagatttaaatttattgcttgcacaaacatttattaccaaccataccgctctgtctcaatcattgcggactgaagaggtaaaagcgttggctgaatggcaagaaaccattgcccgcacattatttaatgaagagttgggtgctgttatccaagttagaaaacaagatgttgccgatattatcaatttattctatcaacaacagctgcatcataatgtctttgaaatcggtacgttaactgatgagaacacgttaatcatccgcgacgggcaaacgcaccttatttctgacaacctaatcaaactgcaacaaacctggcaagaaaccagccatcaaatccaacgcctgcgcgacaaccctgcctgcgccgacagcgagtttgccctgattggcgacaacgaccgcagcgcattgtttgccaacctgaaattcgacgtgaacgaagacatcgccgcgccgtttatcaacagcggcgcgaaacccaaaatcgccatcctgcgcgaacagggcgtgaacgggcaaatcgaaatggccgccgcgttcacccgtgccggattcgatgcctacgacgtgcatatgtccgacctgatggcaggccgcttccgccttgccgacttcaaaatgctggcggcgtgcggcggcttcagctacggcgacgtactcggcgcgggcgaaggctgggcgaaatccatcctgttccaccctgctctgcgcgaccagtttgccgccttcttcgccgacccggacacgctgacattgggcgtgtgcaacggctgccaaatggtcagcaacctcgccgagattatcccgggtgcagaggcatggccgaagttcaaacgtaacttgagcgaacagttcgaagcgcgcctgagtatggttcacgtccccaaatccgcgtcgctgattctgaacgaaatgcaaggctccagcctgcccgtcgtcgtcagccacggcgaaggccgcgccgacttcgcgcttcacggcggcaacatttctgctgatttgggcatcgcgctgcaatatgtggacggacaaaaccaggttacccaaacctatccgctcaaccctaacggctcgccgcaaggcatcgccggtgtgaccaacgccgacggccgcgtgaccattatgatgccccaccccgaacgcgtgtaccgtgccgcgcaaatgagctggaaaccggaaggctggacggaactgtccggctggtaccgcctctttgccggcgcacgtaaagccttgggctaa

SEQ ID NO: 45629 - DNA, 354 bp, Neisseria meningitidis; identical to SEQ ID NO: 39564

SEQ ID NO: 45630 - DNA, 1263 bp, Neisseria meningitidis
atgacattatttcgccccgaagtattccaagctaaaaaaaatcgctggacagggcaaattgttttagtgcgtcctttttccttgcagtttttaacatttttcgcggtctcattagcggctattttagttgcttttttaatttttgggagctataccaataaaaccaccgtaacaggacaacttttgccgacaacaggggtagtacgcgtatattcgcaggatatgggggttattgctcatcaacacgttatgaatggcgattttgtgaaaaaaggcgatgtgttatttacattatctacttcacgaaatgacaataatggcagcatacaagcacgattactcgccgaagctgaattaaaaaaatcactatcagaacaagaaattattatgaaaaaacgtgttcatgcagcagaaaaaaccgcacaagaaaacacggtacaccgttttcagaaccaaatgcaacacgttagaaatcaaattatcatgcaagaaaaacgtattgcgatttctgaaaaaatgttagaaaaacagcgttatttagccaaaatggacgcaatttctgaattagaaaaaaatagttatgaaattgctttattggagctgaaagcaggtttagccgcttaccaacgagaagcagataatcttgctcgggaaataactgtacagcaaagcaatctaaaaaatctgcctgaacagcaagctactgaaatcagtcaattagaacgcgcagtatctgtctatcaacaagaaatattggattatcaacaacgtaacgaacaaactattcgcgcaaccatatcaggctatgtcagttctattaacacggaaattggtcagcaggtagatactaacaaactattgatgagtatcgtgccgaaagaaagtgaattactggctaatttatatgtccctagtcgcgcaatcggttttgtaaaaccaaatgacaaggtaattttgcgttatcaagcatatccttatcaaaaattcggacacgcagaaggacacgtcatttctattgctcaaacggcactaggggcgcaagaatggacaaatttaggcaatatttttactcaaacagcacaagtgaatgagcctgtttatttaatcaaagtaaaactggataatcagcatattcgtatatatggcacggagaagaaattgcaaattggtatgatactagaagccgatattttgcatgagaataaacggttatatgaatggatacttgaccctttgtatcaagtaatgggaaaaatatcatag

SEQ ID NO: 45631 - DNA, 1410 bp, Neisseria meningitidis
atgacctccacattcccccgccgcctcgcccgcaaaatccgccaaacccgccgcctgtcgcgcaaaagcatcgcctttctgttccttttggcaggttcggcactcgtcgccctgaccgcgctgttttttgcccatcttgccgattttgcgctggaactgaacgccaaactggttcaacaatacccgtggttcgcgtgggtcgcgcttcctttgggtttgccgcttattgcgtggctcacacgcaaattcgcccccttcaccgccggcagcggcatcccgcaggtcatcgcctcactgtcgctgccctacggcgcacagaaaacgcggctgatccgcctcgggcagacgctgctgaagattccgctgacctttttgggtatgctgttcggcgtgtccatcggacgcgaaggtccgtccgtgcaggtcggcgcggcagtgatgggcgcgtggggcgcgtggtgcaagaaacacggcttggcattcaaagggatgcaggaaaacgatttgatggcggcgggcgcggcgggcggtttggcagccgcgttcaacgcgccgctggcgggcgtgattttcgccattgaggaactcgggcgcggcatcatgttgcgctgggagaggcaaattcttttgggcgtgctcgcctccggtttcatacaggtcgccattcagggcaacaacccgtatttttccggcttcaacggcggcgtattggaacatatctttctgtgggtcgcactgtccggcctggtttgcggcgcggcgggcggcctgttcggacgtttgctctatcgcggtgcggcggcgtttgcaccgcgcaagatacgcggcttcatccgcaaccgtccgctgctgctggcggcactgatggggctgctgctcgccctgctcggcacgttctaccaaggcaaaacctacggcaccggctaccacgaagccgcccaagccctgcacggcatctacgaagcccccttcggactcgccgccgccaaatggctcgccaccgtattcagctattgggcaggcgttccgggcggcattttcactccctcgctgaccataggcgcggttttgggcgagcatatcgccgccatcgccgacatatcgcagggtgcaaacatcatcgtcctcatctgcatggcggcatttctggcgggcgcgacacaatccccgattacttccgccgtcgtcgtcatggaaatgacgggcggacaaagcctgctgttttggatgctaattgcctgcattttcgcctcgcaggtttcgcgccagttttcgccgcgtccgttctaccacgcatcgggaatgcgcttccgccagcgcgtgcttcaagaaaccgccgcccaaaccggcaatgcgcccgcaagaccgcaaacagcaaacagcaaaacgggaatgccgtctgaaaattaa

SEQ ID NO: 45632 - DNA, 537 bp, Neisseria meningitidis; identical to SEQ ID NO: 37832

SEQ ID NO: 45633 - DNA, 2829 bp, Neisseria meningitidis
atgatggacgaaaaactcaatttctcttacctgttcggttcaaacgcaccttacattgaggaattgtacgaggcttttttggaaaaccccgatgcggttgatgaaaaatggaagcagtatttcaccgatttgagcaaacagccggggacggttgctgtcgatgtcgcacacacaccgattcgcgaatcatttgttactttggcgaaaaagaaaattgcatctgccgttgcgggcggtgcggatgaggcaatgctgaaaaagcaagtcagcgttttacggctgatttccgcctatcgtatccaaggcgtgggtgcagcccaacttgatccgctcaaacgtatccccccgcgcgatattgaagccctcgatccgaaattccacggtctgtcagatgccgatatggcgcttcaattcaatatgggcgagggcgattttgccaatcgcggcaaactgcctttgtcccaaatcatcagcaacctcaaacaaacctactgcggccacatcgcattggaatatatctatattcccaataccgaagagcgccgctgggtacgcaattattttgaaagcgtattgtccacaccgcattacaatgccgatcaaaaacgccgtatcttgaaagagatgactgctgccgagactttggaacgttatctgcataccaaatatgtcggtcagaaacgtttcggtgtcgaaggcggcgaaagcgcgattgccggtttgaactacctgattcaaaacgccggtaaagacggcgtggaagaagtcatcatcggtatggcgcaccgtggccgtctgaatgttttggtgaacattttgggtaaaaaacccggagatttgttcgctgagtttgaaggccgtgccgaaatcaaattgcctagcggcgacgtgaaataccacatgggcttcagctccgacatcgccactccacatggtccgatgcacgtttctttggcgttcaacccgtcacacttggaaatcgttaacccggtagtcgaaggttctgcacgcgccaagcagaaacgtttgggcgaaaacggccgcgataaagtcttgcccgtattgattcacggcgactccgcatttatcggtttgggtgtcaaccaagcgacattcaatctgtctaaaacgcgcggttataccaccggcggtacggttcatatcgtcatcaacaatcaaatcggctttaccacttccgatatccgcgatacccgttcaaccgtacactgtaccgatatcgcaaaaatggtttccgctccggttatccatgtgaacggcgatgatcctgagcgtgtttgctttgccatccaagccgctttggattaccgcaaaaaattccataaagacatcgtgatcgacgttgtctgctaccgtaaatggggccacaacgagggcgacgatccgaccttgacccaaccgatgatgtacaaaaaagtatcgcaacacccgggtgcgcgtgctttgtacaccgagcaactgattgccgaaggcgtggtaacccaagccgaggctgacggttacatccaagcctaccgtgatgctttggataaaggcgaacacgtcgagcaaacaacgttgagcaacttccaacgcacacaaattgactggagcaaataccaaggtaaagattggcgcgaacacatcgaaaccgatttgcctgccgcggatattgagcgtcttaccgagaaatttaccgccgtaccggaaggctttgccctgcatccgactgcaaaacgtgtgattgaagcgcgtaaagccatggcatccggcaaacaagccatcgactggggtatggccgaaaccttggcatacgcaagccttgtaaccaaaggtcatggcgtgcgtatctccggtgaggactccgggcgcggtacattctcacaccgtcatgcagtattgcacgatcaaaaacgtgaaaaatgggatgacggtacttatgttcctctgcgccatatgggcgaaggtatgggcgagttcttggttatcgactccattttgaacgaagaagccgtgatggcgttcgagtacggctttgcctgctccgcgcctgacaagctgaccatttgggaagctcaatttggtgacttcgccaacggcgcgcaagtgactattgaccaattcctgtcttcaggcgaaaccaaatggggtcgtttgtgcggtctgaccaccatccttccgcacggctacgacggtcaaggtcccgagcactcttctgcacgcgtagaacgttggttgcaactgtgttctgagaacaatatgcaagtcatcatgccgtctgaagcgtcgcaaatgttccacctcttgcaacgtcaagtcttaggttcataccgcaaaccgctagtgattttcatgtccaaacgcctgttgcgattcaaaggggcaatgagcccgctggaaaacttcaccgaaggttcgactttccgtccggttatcggcgataccgccgaacgcgcaagcaacgacagcgtgaaacgcgtggcattgtgtgccggtcaggtttactatgacttggaagccggtcgagccgaacgtaaactggaagatgatgtcgctattgtccgcgttgagcagctgtatccgttcccatacgacgaggttaaagccgaactggcgaaatatccgaacgcaaaatctgtggtttgggcacaagaagagccgaaaaaccaaggcgcgttctaccaaatccgccaccgcatcgaagacgttatcagcgaagagcaaaaactgtcttatgccggtcgtccaagcagcgcatcgcctgcagtgggctactcaagcaaacacattgctcaattgaaacaattggttgaagacgctttggcattgtaa

SEQ ID NO: 45634 - DNA, 171 bp, Neisseria meningitidis; identical to SEQ ID NO: 41813

SEQ ID NO: 45635 - DNA, 1380 bp, Neisseria meningitidis
atggcaaaaacgcttaaaaccctttaccaatgcaccgaatgcggcggcacttccccgaaatggcagggcaaatgcccgcattgcggcgagtggaacacacttcaggaaagcttagccgcgcccgagccgaaaaacgcccgtttccaatcttgggcggcggatacctcgaccgtccagtccctctccgccgtgaccgccaccgaagtgccgcgcaatccgaccggtatgggcgaactcgaccgcgtattgggtggcggtttggtcgatggcgcggtcatcctgctcggcggcgatcccggcatcggcaaatccacgctgctgttgcaaaccatcgccaaaatggcgcaaagccgcaaagtgctgtacgtttccggcgaggaatccgcccaacaggtcgccttgcgcgcgcaacgtttggaactgcccaccgaaggcgtgaacctgcttgccgaaatccgcatggaagccattcagacggccttgaaacagcatcagcccgaagtcgtggttatcgattccatccaaaccatgtattccgaccaaatcacttccgcccccggctccgtgtcgcaggtgcgcgagtgtgcagcccaactgacgcgcatggcgaaacagatgggcatcgccatgatactggtcggacacgtgaccaaagacggcgcgattgccggcccgcgcgtgctggaacacatggttgataccgtgctgtatttcgagggcgaccaacattccaactaccgcatgatacgcgccatcaaaaaccgcttcggcgcggcaaacgaactgggcgtgttcgcgatgacggaaaacggtttgaaaggtgtgtccaacccgtccgccatcttccttgccagctaccgcgacgacacgcccggttcgtgcgttttggttacgcaggaaggcagccgcccgcttttggttgaaattcaggcattggtcgatgacgcgcacggcttcacgcccaaacgccttaccgtcggactggaacaaaaccgccttgcgatgctgctcgccgtcctcaaccgccacggcggcattgcctgtttcgaccaagacgtgtttctcaatgccgtcggcggcgtcaaaattggcgaacccgccgccgaccttgccgtcatccttgccatgctctccagcttccgcaaccgccccatgcccgaaaaaaccgtggttttcggcgaaatcggcttaagcggcgaagtccgccccgtcgcacgcggacaagagcggctcaaagaggcggaaaagctcggctttaaacgcgccatcgtcccaaaagccaatatgccgcgcaacgccaaagagtttccgaacctgaaaatctacggcgtttcgagtttgcaggaagccatcgatatttgtcgggaagatagggattga

SEQ ID NO: 45636 - DNA, 483 bp, Neisseria meningitidis
atgacgaacatccgtatcggacagggctacgatgtccaccaactgaccgaaggcagaaagctgatacttggcggagttgaaatcccatttgaaaaagggctgctcggacactccgatgccgatgcgctgctgcacgccgttaccgacgcgctgctcggtgcggcaggtttgggcgatatcggcagccatttccccgacaccgccgcagagttcaaagatgcggacagccgcgccctgctgcgcgatgcctatcggagcgttcaagctaaggggtggcatgtcgtcaatgtcgatacgaccgtgattgcacagaaacccaaactcgcgccgcacattccgcaaatgcgtgccaacatcgccgccgatttgggcatagacatttcgtgtgtcaacatcaaaggtaaaaccaacgaaaaactcggttatctcgggcgcatggaaggcatagaggcgcaggcggcggtattgctggtacggatttga

SEQ ID NO: 45637 - DNA, 1041 bp, Neisseria meningitidis
atgaacacacccatccccttctccgaacggctcatccgctggcaaaaacaacacggtcgccaccacctcccttggcaggtcaaaaacccttattgcgtctggctttccgaaatcatgctccagcaaacgcaagtcgccaccgtgttggactactatccgcgtttcttagaaaaattcccgaccgttcagacgcttgccgccgcgccgcaagacgaagtgttgtcgttgtgggcgggcttgggctattacagccgcgcgcgcaacctgcacaaagccgcgcaacaagtcgtcaggcaattcggcggcacgtttccatcggaacgcaaagacttggaaacgctctgcggcgtaggcagaagcaccgccgccgccatttgcgccttctccttcaaccgccgcgaaaccattttggacggcaacgtcaaacgcgtactctgccgcgtgttcgcccgcgacggcaatccgcaggacaaaaaatttgaaaactcgctctggacacttgccgaaagcctgctgccgtctgaaaacgccgatatgcctgcctatacacaaggtttgatggatttgggcgcgaccgtgtgcaaacggacgaaacccttgtgccaccaatgcccgatggcggacatctgcgaagcaaaaaagcaaaaccgcaccgccgagctgccgcgcaaaaaaaccgccgccgaagtaccgaccctgccgctttactggctgattgtccgcaaccgggacggcgcgattttgctggaaaaacgccccgccaaaggcatttggggcgggctgtattgcgtgccgtgttttgaaagtttgaacgggctttccgactttgccgccaaattctccctgaccatggcagatatggacgaacaaaccgccctgacccaccgtctgacgcaccggctgctgatgattacgccgtttgaaggacaaatgccgtctgaaagcccttcagacggcatttggataaagccggcgcatttgaaagattacggcctgcccaagcctttggaaatttatttaaacggtaataggttagaataa

SEQ ID NO: 45638 - DNA, 345 bp, Neisseria meningitidis; identical to SEQ ID NO: 39778

SEQ ID NO: 45639 - DNA, 543 bp, Neisseria meningitidis
  misc_feature 524, 525, 526, 527, 528: 'n' is a, c, g or t
gtgaaaccgctgcgcagactgacaaacctccttgccgcctgcgccgtagcggccgccgccttcggacagcccgccctcgcagcggacttggcgcaagacccgttcattaccgataacgcccaacggcagcactacgaacccggcggcaaataccacctcttcggcgacccgcgcggcagcgtctccgaccgcaccggtcaaatcaacgtcatccaagactatacccaccagatgggcaacctgctcatccaacaggcggcaatccaaggcaatcttggttacaccgtccgcttttccggacacggacacgaagaacacgcccccttcgacaaccacgccgccgacagcgcaagcaaagaacaaggcaacgttgacgaaggctttaccgtgtaccggctcaactgggaaggacacgaacatcatcccgccgatgcctacgacggcccgaagggcggcaattaccccaaacctacgggcgcacgagacgaatacacctatcacgtcaacggcacagcccgcagtannnnncacacacttaattaa

SEQ ID NO: 45640 - DNA, 876 bp, Neisseria meningitidis
atggcttacctgttaatcagcatcgtgttcagcgtgtcggtttccattttgctgaaaatggcaaggaagaaaaaaatcgacatcgcgcaggcggtcgccgtcaattatgtggtcgcggtcatactgaccctgctggtattgaagccggatatcggcaatatcggcgcatttttgccgacgtggccgctgtttgccgctttgggcgtgctgctgccgtccgtattcgtgataatgggcaaatctgtggaagccgccggtatcgtcaaatccgacgcggcgcagcgtttgtcgctgtttttgccgattgttgccgccttgacgctgtttggcgaaaaactcagcgaaggcaaactaatcgggctgtgcctcgcatttgccgcgctgttctgcctgctttggaaacacggcggcggcaaaaaatcaggcagcgcgtggcggcaggcggcattgctgctgggcgtgtgggcgggttacggcattatcgacatcctgttcaaacagcttgccaaaagcggcacggcattttcaggcaacctgctggttgcatttgtgctggcaggtgtgctgatgtttgcctgcctgtttgccaaatcggtcagatggcgcgttgagagtgtggtcggcggcatactcttgggcggtttgaacttcatgaacatcgtaacctacatcaccgcgcaccaaatgatgaaggacaatcccacgctggtttttgccggtatgaatatcggcgtgattgttttggggacgctttcgggcgcactgttttttaaggaaaaaatcaacacaatcaatacggcgggaatcgtgttggcactgtgttccatcgcctgcctgttttattgggcggaggtcaaggcactgttcggcatataa

SEQ ID NO: 45641 - DNA, 795 bp, Neisseria meningitidis
atgaccttacctatgcaggaaacccgtttttccatactgctagacgaattggcggcaaaacagaaggcagccatcgccccccacctgcttgccgacgggagcaaggtatggatacgcaaagcaggcaggcacaatgcgcgatggcgttacgcgctgctcggtatggttgcccgatatttgaaactgggggtgttgaagccggttcccagcctcggcggcgagcctgccattgcaaccgaatcaaaacgcctgtacgaattgcgcgcggcgaggatagccgttcccgaattgctcgccgtcaggaaaaatgcccttatgttcggcaatttggaaggcatcccgctcgatacgcaaatccgccaagaagccgaagccggaaaggcggacgcttggcttgccggtttggaagccattgcacgcgtgcataaaaaacagcagttcctcagtcaggcgtttgcgcggaatatgatgtcggacggaaaaaacatcagctttctagattttgaagacgacccttccgaagtcctgaccatagcgcaatgccaagcccgcgattggctctgctacatccattcgaccgcgctgatattgaaaaacggcggactgctggaagcggctgcggaaaaatggggcggcgtattgtcggatcagcctgccgaaatacaaaagctgattgccgccaccgtcaaaccgatcctcccgatacgcaggctggaacacccacgctggggacgggacgcactcaggctggcagcctcgatttccctgatttcccttgccgatatgccgccataa

SEQ ID NO: 45642 - DNA, 729 bp, Neisseria meningitidis
atgatcaaattcaaaaacgtacacaaacatttcaaagacctgcacgtcatcaacggcgtgaacttggaaatcaaaaaaggcgaagtggtcgtcgtctgcgggccttcgggcagcggcaaatccacactcatccgcaccgtcaaccagcttgaaagcatcgaaagcggcgagatttgggtggacggtgtcaacgttgccgacccaaaaaccgatttgaacaaaatccgcgaagaagtcggctttgtgtttcaaagtttcaacctctacccgcacctgaccgtgttggaaaacattaccctcgcaccgatgaaggttaaggggcaaaatgcggaacaggcggagaaaaaggcaatggagcttttggaacgcgtcggactggcacacaaaaaagacgccttcccttcccaactttccggcggccagcagcaacgcgtggcgattgcacgcggtttggcgatggaaccgcgcgtaatgttgtttgacgaaccgacctccgcactcgaccccgaaatggtcggcgaagtgttgaaagtgatgaaagacttggcagaaagcggcatgaccatgatgtgcgtaacccacgaaatggggtttgcccgcgaagttgccgaccgcgtgattttcgtcgataaagggcaaatcctcgaagacgaaacgccggaagcgttttttaccaacccgaaacacgaacgcgccaagcagttcctgcaacaggtcatgacccattga

SEQ ID NO: 45643 - DNA, 540 bp, Neisseria meningitidis; identical to SEQ ID NO: 44661

SEQ ID NO: 45644 - DNA, 285 bp, Neisseria meningitidis; identical to SEQ ID NO: 44271

SEQ ID NO: 45645 - DNA, 456 bp, Neisseria meningitidis
atggatttgcgcaaattaaaaaaactgattgatttggttgaagaatcgggtatcgccgaaatcgaagtaaccgaaggcgaggaaaaagtccgcatcacccgaaccatcgccgccgcacccgtttacgccgcgcccgtacctgccgccgcgccggccgtaacgcctgccgccgcacccgttgcggcatccgcgcctgccgccgcacctgccgcccgcgatttgtccgacgcgcaaaaatcacctatggtcggcacgttctaccgcgcacccggcccgaatgccgcgccttttgtcgaagtcggccaacaggttaaagtcggcgacacgctgtgcatcatcgaagcgatgaagctgatgaacgaaatcgaagccgaaaaatccggcacggtcaaagaaattttggtcgaaaacggtacgcccgtcgaattcggcgaaccgctcttcatcatcggataa

SEQ ID NO: 45646 - DNA, 555 bp, Neisseria meningitidis
atgaaaaaaatcatcgcctccgcgcttatcgcaacattcgcactcgccgcctgccaagacgacacgcaggcgcggctcgaacagcagcagaaacagattgaagccctgcaacagcagctcgcacagcaggcagacgatacggtttaccaactgactcccgaagcagtcaaagacaccattcctgccgaagcacaggcaaacggcaacaacgggcaacccgttaccggtaaagacgggcagcagtatatttacgaccaatcgacaggaagctggctgctgcaaagcctagtcggcgcggcggcaggcgcgtttatcggcaacgcgctggcaaacaaattcacacgggcaggcaaccaagacagtcccgtcgcccggcgcgcgcgtgcagcctaccatcagtccgcacatcccaatgcgcgcaccagcagggatttgaacacgcgcagcctccgtgcaaaacaacaggcggcgcaggcgcagcgttaccgcccgacaacgcgcccgcccgccaattaccgccgccccgccatgcgcggtttcggcagaaggcggtaa

SEQ ID NO: 45647 - DNA, 726 bp, Neisseria meningitidis; identical to SEQ ID NO: 38250

SEQ ID NO: 45648 - DNA, 492 bp, Neisseria meningitidis
atgatttttaaacaggatcaaaattattgggcagttttttatgcgaatgaagaagctctgattgttcaaacatgttcaggtttggggttaacggcaatagaccacctatatcccccccatatcctgccattggataccgacaatgaaactttaggcacaacggtcttgcaagcgttggcaaacagcaggacgttagacaacgaagctgaacgtattgattttttaaaacaggaaaattttaaaccacgctatgaggattgggttgccaagctatgcgggaacttgggctataaaaccaaacgcgccctatttaaaaacatgatgagcgtggatatttggctgcacaacggctgcctgaaaatcagcccgagccgccatgtcaagctggaagcgtgggatgccattgatgcagacgatgtaattttatcattggataacagccctgaagaaatcggagcaggtttaaagttggcattgagccgctgccgataa

SEQ ID NO: 45649 - DNA, 1302 bp, Neisseria meningitidis; identical to SEQ ID NO: 38582

SEQ ID NO: 45650 - DNA, 372 bp, Neisseria meningitidis
atgaataaaaccttgtctattttgccggtggcaatcttactcggcggctgcgccgccggaggcggtaacacattcggcagcttagacggtggcacgggtatgggcggcagcatcgtcaaaatggcggtcgggagccaatgccgtgcggaattggacaaacgcagcgaatggcgtttgaccgcgctggcgatgagtgccgaaaaacaggcggagtgggaaaacaagatttgcgcttgcgtcgcccaagaagcacctgaacggatgatcggcaacgatgtgatgcagatgctggatccgtccacgcgcaatcaggcacttgccgccctgaccgccaaaacggtttccgcctgcttcaaacacctgtaccgctaa

SEQ ID NO: 45651 - DNA, 504 bp, Neisseria meningitidis; identical to SEQ ID NO: 38844

SEQ ID NO: 45652 - DNA, 720 bp, Neisseria meningitidis
atgaaagacgatgttttgaaacagcaggcacacgcggcgatacagaagaaactgggctacgcgttccgcgatatttcgcttttgcggcaggctttgacgcacaggagccatcatgcgaagcacaacgagcggttcgagtttgtcggtgattcgattttgaattatacggtggcgcggatgctgtttgacgcgtttccgaagttgaccgagggcgagttgtcgcggttgcgggcaagtctggtcaatgagggcgtgctggcggaaatggcggcggaaatgaatgtcggcgacggcctgtacttgggggcgggcgagttgaagagcggcggcttcagacggccttcgatactggcagacgcgatggaggcgatgtttgctgccgtcagcttcgatgccgatttcaacacggcggaaaaggtggtgcgccatttgtttgccgatcgcgtccggcgcgccgattttcaaaatcaggcaaaagacggcaaaactgctttgcaggaggcgttgcaggcacgccgctttgctttgccgaaataccgtatcgaagagcaaatcggccatgccaacgacagtatgtttgtggtttcctgcgatttgggcgaactgggtttcgtgtgccgtgccaaagggacgagccgcaaggcggcggaacaggaggcggcgaaagaggctttgaaatggctggaagagaagctgccgctgaagaagaaaaagaaatga

SEQ ID NO: 45653 - DNA, 744 bp, Neisseria meningitidis
atgctcatcatccgcaacctgatttactggctgatactctgttccaccctgattttcctctttccctttatgctgctcgcctcgcctttccgagacggggcgcacaagatggcgcgggtctgggtcaaaatcctcaacctctcgctcaaacacatcgtcgggctcaaataccgcatcatcggcgcggaaaacatccccgaccgccccgccgtcatctgcgccaaacaccaaagcggctgggaaacgctcgcccttcaggacatttttccgccgcaggtttacgttgccaaacgcgagttgttcaaaatcccctttttcggctggggcttgaaactggtcaaaaccataggcatagaccgcaacaaccgccgcgaagccaacgagcagctcataaaacaggggttggcgcgcaaaaacgaaggctattggattaccattttccccgaaggcacgcgccttgcgcctggaaaacgcggcaaatacaaactcggcggcgcgcgcatggcgaaaatgtttgagatggacatcgtccccgtcgccctcaacagcggcgaattttggccgaaaaactcctttctgaaatatccgggggaaatcaccgtcgtcatctgtccgaccatcccgcacgcaagcggcagcgaagccgaattgatgggaaaatgcgaacacctcatcgaaacgcagcagccgctcatttccggcgcaggcccgtttgccgccaaaatgccgtctgaaaccgcatga

SEQ ID NO: 45654 - DNA, 492 bp, Neisseria meningitidis
atggcggggccgatttttgtcgtcatcgccagcgtcgctatgttttttgtcgcgcagcagcacgcgacagatttggttacggacgattattataaagacggcaaacatatcgacatccagcttcatcgggatgaagaagccgtcagacggcatatcggggtgcaggttctcatttcccccgatatgaatgcggcaaaagtgtttgtcggcggcgagtttgacggcaaacagcctttgaacctgctgctgatgcacccgacccgcaaggcggacgatcaaaccgtcgccctcaagcccgtcggcagcgcgcagaacggcagggcggaatatgaggcggtgttcaaaaccctttcgccgaccaaccactggtatgtgcgcgtggaggacgcggcaggcgtgtggcgcgtcgagaacaaatggattaccagccaaggcaatgcggtcgatttgaccccgatggacaagcttttcaataatactgaaagcaaataa

SEQ ID NO: 45655 - DNA, 525 bp, Neisseria meningitidis
atgaaaaaagcacttgccacactgattgccctcgctctcccggccgccgcactggcggaaggcgcatccggcttttacgtccaagccgatgccgcacacgcaaaagcctcaagctctttaggttctgccaaaggcttcagcccgcgcatctccgcaggctaccgcatcaacgacctccgcttcgccgtcgattacacgcgctacaaaaactataaagccccatccaccgatttcaaactttacagcatcggcgcgtccgccatttacgacttcgacacccaatcgcccgtcaaaccgtatctcggcgcgcgcttgagcctcaaccgcgcctccgtcgacttgggcggcagcgacagcttcagccaaacctccatcggcctcggcgtattgacgggcgtaagctatgccgttaccccgaatgtcgatttggatgccggctaccgctacaactacatcggcaaagtcaacactgtcaaaaacgtccgttccggcgaactgtccgtcggcgtgcgcgtcaaattctga

SEQ ID NO: 45656 - DNA, 630 bp, Neisseria meningitidis; identical to SEQ ID NO: 38143

SEQ ID NO: 45657 - DNA, 1215 bp, Neisseria meningitidis
atggataaatttcccaagtctgcaaagctcgatcacgtctgttacgacatacgcgggccggttcacaaaaaagcccttcagttggaagaggagggcaataaaatccttaaactcaatatcggcaaccctgcgccgttcggctttgaagcccctgatgaaatcttggtcgatgtcatccgcaacctgccgacttcgcaaggctattgcgattctaaagggctgtattccgcccgcaaagccattgttcactactatcagaccaaaggtttgcgcgatattacggttgatgatgtctatatcggcaacggcgtgtccgagctgattacgatgtctatgcaggcattgctcaacgacggcgacgaaatcctgattcccgcgcccgactaccctttgtggacggcggcggcaacgcttgcgggcggtacggtacgccattatctgtgcgacgaagaaaacggctggttccccaaccttgccgatatggaagccaaaatcacgcccaaaaccaaagccatcgtcgtcatcaatcccaataatccgacaggcgcggtgtacagcagggaaatcctgttggaaatcgccgaactggcgcgcaagcacggtttgattattttcgccgacgagatttacgataaaatcctttatgacggcgcggttcaccaccacatcgccgcgcttgcccccgaccttttgacggtaacgttcaacggtttgtccaaatcctaccgcgtcgccggcttccgccaaggctggatggtgctcaacgggccgaaacatcacgcaaaaggttacatcgagggtttggatatgctctcgtctatgcgcctgtgtgccaatacgccgatgcagcacgcgattcagacggcattgggcggctatcagagcatcaacgaatttattttgcccggcgggcggcttttggaacagcgcaacagggcgtgggaactggtcagccaaatccccggcgtgtcctgcgtcaaaccgatgggcgcgatgtatatgttcccaaaaatcgataccgaaatgtaccgtatccacgatgacatgaaattcgtttacgatttgctggtgcgcgaaaaagtcttgctggtacagggaacggggtttaattggattaaacctgaccatttccgcattgtcacgctgccttacgtccatcagattgaagaggcgatgggcaggttggcaagattcctgcaaacctaccgccaataa

SEQ ID NO: 45658 - DNA, 825 bp, Neisseria meningitidis
atggacggtacgcagtcgaaacccaagtttttcgaacgcctgatctcccgacttgccggcgagcccgactccgccgaagacgtattgaccctgctgcgccaagcgcacgagcaggaagtttttgatgcggatacgcttttaaggttggaaaaagtcctcgatttttccgatttggaagtgcgcgacgcgatgattacgcgcagccgtatgaacgttttaaaagaaaacgacagcatcgaacgcatcaccgcctacgttatcgataccgcccattcgcgcttccccgtcatcggtgaagacaaagacgaagttttgggtattttgcacgccaaagacctgctcaaatatatgttcaaccccgagcagttccacctcaaatcgatattgcgccctgccgtcttcgtccccgaaggcaaatcgctgaccgcccttttaaaagagttccgcgaacagcgcaaccatatggcgatcgtcatcgacgaatacggcggcacgtcgggtttggtcacctttgaagacatcatcgagcaaatcgtcggcgaaatcgaagacgagtttgacgaagacgatagcgccgacaatatccacgccgtttcttccgaacgctggcgcatccatgcagctaccgaaatcgaagacatcaacaccttcttcggcacggaatacagcagcgaagaagccgacaccattggcggcctggtcattcaagagttgggacatctgcccgtgcgcggcgaaaaagtccttatcggcggtttgcagttcaccgtcgcacgcgccgacaaccgccgcctgcatacgctgatggcgacccgcgtgaagtaa

SEQ ID NO: 45659 - DNA, 354 bp, Neisseria meningitidis; identical to SEQ ID NO: 39616

SEQ ID NO: 45660 - DNA, 1011 bp, Neisseria meningitidis
atgaacgacaatacacacacccttcccccgcgccgcctttccgtcgccccgatgctcgactggacggacaggcactaccgttatatggcgcgccagattacccgcaatacttggctgtacagcgaaatggtcaacgccggcgcgattgtttacggcgacaaagaccgctttttgatgtttaacgaaggcgagcagcccgtcgccctgcaactgggcggcagcgacccgtccgatttggcgaaagccgccaaagccgccgaagaatacggctacaacgaggtcaacctcaactgcggctgccccagtccgcgcgtccagaaaggcgcgttcggcgcgtgtctgatgaacgaagtcgggctggttgccgactgcctcaacgccatgcaggacgcggtcggtattcccgttaccgtcaaacaccgcatcggtgtggacaggcagaccgaataccaaaccgttgccgatttcgtcggcacgttgcgcgacaaaaccgcctgcaaaaccttcatcgtccacgcccgcaacgcttggctggacggtctttcccccaaagaaaaccgcgacgttcccccgttgaaatacgattacgtttaccgcctcaagcaggagtttcccgggctggaaatcatcatcaacggcggcatcaccaccaacgaagcaatcgccggacacctgcaacacgttgacggcgtgatggtcgggcgcgaggcgtaccacaacccgatggtgatgcgcgaatgggacagattgttttacggcgatactcgcagcccgatcgaatacgccgatttggtgcagtgcctctacacatacagccaagcccagatccaagccggacgcggcacaatcttgcgccacatcgtccgccacagcctcgggctgatgcacggtttgaaaggtgcgcggacttggcggcgtatgctttccgacgcaacgctcttgaaagacaacgacggcagcctgattctcgaagcgtggaaagaggtcgaacgggcaaatacgcgcgaatag

SEQ ID NO: 45661 - DNA, 1839 bp, Neisseria meningitidis
atgtgcggtatcgtcggcgccatccgcgcccatcacaatgtcgtcgattttctgaccgacggtctcaaacgcctcgaataccggggttatgattcatcaggcattgccgtcaacaccgacggcaacatcaagcgcgtgcgccgtgtcgggcgcgtgcagttaatggaagatgcggcgcgtgaaaagcatttgaacggcagtttgggcatcgggcatacgcgctgggcgacacacggcggcgttaccgagccgaacgcccacccgcacatcagcggcggtatgattgcggtcgtgcacaacggcatcatcgaaaactttgaaagcgaacgcaaacgtttggaagatttgggataccgttttgaatcgcaaacggataccgaagtcatcgcccacagcatcaatcacgaatacgcgcaaaacggcggcaggctgtttgaagccgtgcaggaagcggtcaaacgtttccacggcgcatacgccatcgcggttattgcccaagacaagcctgatgaattagtcgtggcgcgtatgggctgcccgcttttggtcgctttgggcgacgatgaaacctttatcgcttcggacgtatccgccgtcatcgcctttacgcgccgcgtggcgtacctcgaagacggcgacatcgcgctgctggcttcagacggcatcaaaaggctgaccgataaaaacggcctgcctgccgaacgcaaagtcaaggtatccgaactctcgctcgcctctttggaactgggaccgtacagccactttatgcaaaaggaaatccatgagcagccgcgcgcgattgcagacacggcggaggttttcctcgacggcggcttcatccccgaaaacttcggcaaaaacgccaaaagcgtgtttgaaagcatccgcagcgtcaaaatccttgcctgcggcacgtcctattacgccgcgctgaccgccaaatattggttggaatccatcgccaaaatcccggccgatgtcgaaatcgccagcgaataccgataccgcagcgtgattgccgatccggaccaactggtcattaccatttcccaatccggcgaaacgctggacacgatggaggcgttgaaatacgcaaaatccttgggacaccgccacagcctctccatctgcaacgtgatggaatccgccctgccgcgcgaaagcagcctcgtgctttatacccgtgccggtgcggaaatcggcgtcgcctcaaccaaagcatttaccacgcagctggttgcgctgttcggtttggcggtaacgctggcgaaagtgcgcggtttggtttccgaagaagacgaagcacgttacaccgaagaactccgccagcttcccggcagcgtgcagcacgctttaaacctcgaaccgcaaattgccgcctgggcgcaacagtttgccaagaaaaccagcgcgctgtttttggggcgcggcatccattacccgattgccctcgaaggcgcgttaaaactgaaggaaatcacctacatccacgccgaagcctatcctgccggcgaactgaagcacgggccgcttgccttggtggacgaaaacatgcccgtcgtcgtcatcgcacccaacgacagcctgttggacaaagtcaaagccaatatgcaggaagtcggcgcgcgcggcggcgaacttttcgtctttgccgacctcgacagcaattttaatgccaccgaaggtgtgcacgttatccgcgcaccgcgccacgtcggcaaactgtcccccgtcgtgcatactatccccgtgcagctcctttcctaccatgtcgccctcgcacgcggcaccgatgtagacaaaccgcgcaacctggcgaaatccgttacggtcgaataa

SEQ ID NO: 45662 - DNA, 1248 bp, Neisseria meningitidis; identical to SEQ ID NO: 39122

SEQ ID NO: 45663 - DNA, 843 bp, Neisseria meningitidis
atgattcaacacgcaggcttgggctaccgccgcgacttggcggaagactttctctcgctttccgaaaacagcccgatatgctttatcgaagccgcaccggaaaactggctgaaaatgggcggctgggcgcgcaaacagtttgaccgtgtggcggaacggctgccgctggcgttgcacggattgtctatgtcgctgggcgggcaagcaccgctggatactgatttgatagacggcatcaaagaaatgatgcgccgttacgattgcacgtttttctccgaccatttgagctactgccacgacggcggtcatctttacgatttgttgccgctgccctttaccgaggaaatggtgcatcatacggcgcggcgtatccgcgaagtgcaagaccgtttgggctgccgcatcgccgtggaaaacacgtcctactatctgcattccccgcttgccgagatgaacgaggtcgagttcctcaacgccgtcgcacgtgaggccgattgcggcattcatctggatgtgaacaatatctacgtcaacgccgtcaatcacggcctgttgtcgccggaggcttttttgaaaaacgttgacgcagatcgcgtgtgctatatccatattgccggacatgacgtggaaacgccggaattgttgattgatacacatggcgcggcagttttgccgactgtttgggacttgctcgaacttgcctatgccaagctgccgacgattccgcccaccctgttggaacgcgattttaatttcccgccttttgccgaactcgaagccgaagtcgccaaaatcgccgattatcaaacgcgtgccggaaaggaataccgccgtgcagcctga

SEQ ID NO: 45664 - DNA, 1050 bp, Neisseria meningitidis
atgcaaaacaacaacgaatttaaaattggtaatcgttcagtaggttacaaccacgaaccattgattatctgtgaaatcggcatcaatcatgaaggctctttaaaaacagcttttgaaatggttgatgctgcctataatgcaggcgctgaagttgttaaacatcaaacacacatcgttgaagacgaaatgtctgatgaggccaaacaagtcattccaggcaatgcagatgtctctatttatgaaattatggaacgttgcgccctgaatgaagaagatgagattaaattaaaagaatacgtagagagtaagggtatgatttttatcagtactcctttctctcgtgcagccgctttacgattacaacgtatggatattccagcatataaaatcggctctggcgaatgtaataactacccattaattaaactggtggcctcttttggtaagcctattattctctctaccggcatgaattctattgaaagcatcaaaaagtcggtagaaattattcgagaagcaggggtaccttatgctttgcttcactgtaccaacatctacccaaccccttacgaagatgttcgattgggtggtatgaacgatttatctgaagcctttccagacgcaatcattggcctgtctgaccataccttagataactatgcttgcttaggagcagtagctttaggcggttcgattttagagcgtcactttactgaccgcatggatcgcccaggtccggatattgtatgctctatgaatccggatacttttaaagagctcaagcaaggcgctcatgctttaaaattggcacgcggcggcaaaaaagacacgattatcgcgggagaaaagccaactaaagatttcgcctttgcatctgtcgtagcagataaagacattaaaaaaggagaactgttgtccggagataacctatgggttaaacgcccaggcaatggagacttcagcgtcaacgaatatgaaacattatttggtaaggtcgctgcttgcaatattcgcaaaggtgctcaaatcaaaaaaactgatattgaataa

SEQ ID NO: 45665 - DNA, 918 bp, Neisseria meningitidis
atgtctgtctataccagtgtttccgatgatgaaatgcgcggcttcctgagcggttacgatttgggggaatttgtttccctgcagggcatcgcgcaggggattaccaacagcaattattttctgacgacgacttcgggacgttatgtgctgaccgtgtttgaagtgttgaaacaggaagagctgccgttttttctggagcttaaccggcatttgagtatgaagggcgtggcggttgccgcgccggttgcgcgcaaagacggccggcttgattccgttttggcgggcaagcccgcctgcttggttgcctgcctgaaaggttcggatactgcgctgccgacggcggagcagtgtttccataccggtgcgatgttggccaaaatgcaccttgtcgccgccgatttccctttggaaatggaaaacccgcgttacgatgcgtggtggacggaggcgtgcgcccggctgctgcccgtcctgtcgcaagacgatgctgcgctgctgtgttccgaaatcgatgcgctgaaggacaatctcggcaatcatctgccttcgggcatcatccacgccgatttgtttaaagacaatgtgttgcttgacggcggtcaggtgtcgggctttatcgatttttattatgcctgccggggcaattttatgtatgacttggcgattgcggtcaacgattgggcaaggacggcggacaataagttggatgaggcgttgaaaaaggcgtttatcggcggttatgagggcgtgcgccccttgagtgccgaagaaaaggcgtattttccgaccgcccaacgcgccggctgcatccgtttttgggtgtcgcgcctgttggattttcattttccgcaggcgggcgagatgacgtttatcaaagacccgaacgcgttccgcaacctgctgttgagtttggattga

SEQ ID NO: 45666 - DNA, 477 bp, Neisseria meningitidis; identical to SEQ ID NO: 38649

SEQ ID NO: 45667 - DNA, 1371 bp, Neisseria meningitidis
atgccgcaaaacactttaaacatcgttatcctcgccgccggcaaaggcacgcgcatgtattccaaaatgcccaaagtgctgcaccgcatcggcggcaagcccatgctcgggcgcgttatcgacaccgccgccgcgctgaatccgcaaaacatctgcgtcgtcatcgggcacggcaaagaccaagttttaaacgctgtcaaacgcgatgtcgtttgggttgaacaaaccgaacagctcggtaccggccacgccgtcaaaaccgccctgccccacctttccgccgaaggccgcacgctggtactgtacggcgacgttcccctgattgacgttaaaaccctcaaaaccctgctcgaagccgccggcaacgaagtcggtctgttgaccgacgttcccgccgacccgacaggcttgggccgcatcatccgcgacggcaacggcagcgtaaccgccatcgtcgaagaaaaagacgccgacgccgcccaaaaagccgtaaaagaaatcaataccggcattttggttctgcccaacgccaaactggaaaactggctgaacagcctctccagcaacaatgcccaaggcgaatactatctgaccgacctcatcgccaaagccgttgccgacggtattaaagttcatcccgtccaagtgcacacctcctacctcgccgccggcgtgaacaacaaactccagctcgccgaactcgagcgtattttccaaaccgaacaggctcaagaattgctcaaagcaggcgttaccctgagcgacccggcacgtttcgatttacgaggccgtctgaaacacggacaagatgtcgtaattgatgtgaactgtatctttgaaggcgaagtcgaaatcggcgacaacgtcgaaatcggcgcaaactgcgtcatcaaaaacgccaaaatcggcgcaaacagcaaaatcgcccccttctcccacctcgaagactgcgaagtcggcgaaaacaaccgaatcggcccgtacgcccgtttgcgtccgcaagccaaactagccgccgacgtacacatcggcaacttcgtcgaaatcaaaaacgccgccatcggcaaaggcaccaaagccaaccacctcacctacattggtgatgccgaagtcggcagcaaaaccaacttcggcgcaggtacgattattgccaactacgacggcgtgcacaaacacaaaaccgtcatcggcaacgaagtgcgcatcggttcaaactgcgtactggttgcccccgttaccctcggcaacaaagtaaccacaggcgcaggcagcgcgattacccgcaacgtcgaagacggcaaactcgccctcgcccgcgcccgccaaaccgtcatcgaaggctgggtgaggccggaaaaagacaaacaataa

SEQ ID NO: 45668 - DNA, 1194 bp, Neisseria meningitidis
atgtaccgacacatcgaatactatcccggcgatccgattttgagtttggtcgaaaccttcaaaaacgacccgcgccccgaaaaagtcaatttgagcataggcatttatttcgacgacgaaggcaaaatgcccgtgttggaatccgtgagccgcgccgaaaccgcccgcgccgccactcctgtgccgtcgccctacctgccgatggaaggcttagacacttaccgcagcgcggtgcagcatttgttgttcggcaaagacaaccccgcgctcgcgcaaggacgcatcgctaccgtacaaaccttgggcggctcaggcgcgctcaaagtcggggcggactttctgcaccgctggtttcccgaagcgcgcgcctacgtcagcgacccgacttgggacaaccatcgcggcatttttgaaagcgcaggtttcgaggtcggcacttacccatattacgaccctgctgccgtcggcgtgaaattcgacgaaatgaccgcgtttttcaacaccctgcccgaaaacagcgtcctgatcctccatccctgctgccacaacccgaccggcgtggatatgtcggaacaacaatgggacgaagtgttgcacatcatcaaaacgcgcaaactgattccgtttatggacatcgcctaccaaggcttcggcggcgatttggacagcgatgcctacgccgtccgcaaagcggtggaaatggaattgcccttgttcgtcagcaattccttctcaaaaaacctgtcgctctacggcgagcgcgtcggcggcctgagcgtggtttgcccgaataaggaagaagcggatttggtgttcggacagctcaaattcaccgtccgccgcatctactccagcccgcccgcgcacggcgcgtatatcgccgccgacgtgatgaacagccccgaactttacgccttgtggcaaaacgaggtttatatgatgcgcgaccgcatccgtgcgatgcggcagaaactttatgatgtcttaactgcgcaaatccccgatcgcgatttcacttatttcatcaaacagcgcggcatgttcggctacacaggattgagcgtggaacaagtccgcaggctgcgcgacgaatttgccgtttacctgctggattccggcaggatgtgcgtcgccggactgaatacgtcgaataccgactatgttgcccgcgcatttgcggaagtcttgaaataa

SEQ ID NO: 45669 - DNA, 855 bp, Neisseria meningitidis
atggcagaaattactgcaaaaatggttgccgacctgcgcgctgctaccggcctgggcatgatggaatgcaaaaaagccttggttgaagccgaaggcaacttcgacaaagccgaagaaatcctgcgtattaaatctggtgcgaaagccggtaaactggctggccgtactgctgccgaaggcgtattggcttacgcgatcaacggcaatgtcggcgcattggtcgaagtaaactgcgaaaccgacttcgttgctaaagacgcgggcttcgtagaatttgccaacttcgttgcgaaaactgccgccgagaaaaaaccggcttctgttgaagaactgagcgaactggttgaagcagaacgcaaagccatcatcgccaaattgggcgagaacatgtctgtccgtcgcttccaagtgatcgacactgccaaccaactggttgcctacatccacggcgcattggcgaccgaaggcgtattggttgagtacaaaggctctgaagacgtagcacgcaaaatcggtatgcacattgttgccgctaaaccacaatgcgtaagcgaagccgaagtagatgccgaaaccgttgaaaaagaacgccacatctacaccgaacaagccatcgcttccggcaaacctgccgacatcgccgctaaaatggttgaaggccgtattcgcaaattcttggctgaaatcactctgaacggccaagcattcgtgatgaaccccgatcaaactgttgcccaattcgccaaagaaaacggcactgaagtggtcagcttcgtccgctacaaagtaggcgacggtatcgagaaagccgttgtcgactacgcagccgaagtagccgcagccgccaaagtgtaa

SEQ ID NO: 45670 - DNA, 1509 bp, Neisseria meningitidis; identical to SEQ ID NO: 41877

SEQ ID NO: 45671 - DNA, 1809 bp, Neisseria meningitidis
atgcgtaccaactattgcggtctgatcagtgagcaatacttagaccaaaccgttaccgtcaaaggctgggtacaccgtcggcgcgaccacggcggtgtgatttttatcgacctgcgcgaccgcgaaggcatcgtccaagtcgtgattgaccccgacacgcccgaagcgtttgccgctgccgattccgctcgcaacgaatacgttttgagcattaccggccgcgtacgcaaccgtcccgaaggtacgaccaacgacaaaatgatttccggcaaaatcgaaatccttgccaaagaaatcgaagtcttgaacgccgccgccacgccgccgttccaaatcgacgatgaaaacatcagcgaaaacgttcgcctgaccaaccgcgttatcgacttgcgccgtccggtgatgcaacgcaacctgcgcctgcgttatcaagtcgctatgggcgttcgccgttatctggacgcgcaaggcttcatcgacatcgaaacgccgatgctgacccgctccactccggaaggcgcgcgcgactacctcgtgccgagccgcgttcatccgggcgagtttttcgcgctgccgcaatcaccgcaattatttaagcaactgttgatggtggccggtttcgaccgttactatcaaattaccaaatgtttccgtgacgaagacttgcgtgccgaccgtcagcctgaattcactcaaatcgacttggaaacctcgttcttgaacgaggatgaaattatggacatcaccgaaggtatggcgaaacaagtcttcaaagatgctttaaacgtagatttaggcgacttcccgcgtatgccttacgccgaagccatgttctactacggctctgacaaaccggatatgcgtatcaacttgaaatttaccgagttgaccgacctgatgaaaacggaagaattcaaagtcttccgtggcgcggcagatatgaaaggcggccgtgtagtcgccctgcgcgtaccgaacggcgcaaaattcagccgcaaagaaatcgacgaatacactaaatttgtcggcatctacggcgcgaaaggtctggcatacatcaaagtaaacgatgtgggcaacctctcaaacggcgaagacagcggcctgcaatctccaatcgtaaaattcctgtctgagaatgccctgaaagaaatcatcgagcgtaccggcacacaaaacggcgatattattttcttcggtgcggacaaaaccaaagttgtgaacgaagccatcggcgcattgcgtatcaaagtcggcttggaacacggcaaagacaacggctacttcacagacgaatggaaacctttgtgggttgtcgatttcccaatgttcgaatacgacgaagaagccgaccgctacgttgccgtacaccatccgtttaccgcgcctaaagaaggtcatgaagacctgatggtttccgaccctgcaaactgcctggcccgtgcctacgacatggtattgaacggctgggaaatcggcggcggctctatccgtatccaccgtgcagacgtacaagagaaagtgtttgccgcgctgaaaatcagccctgaagagcaacaagagaaattcggcttcctcttggacaacctgaaattcggtgcgcctcctcacggcggccttgcattcggcctcgaccgtttggttaccctgatgaccggcgccgaatctatccgcgacgtgattgccttcccgaaaacacaacgtgcccaatgcctgctgaccaacgcgcccaacagcgtggacgacaagcagttgcgtgaattgagcctgcgcctgcgccaaaaggcggctgaaaccaaagaagcataa

SEQ ID NO: 45672 - DNA, 297 bp, Neisseria meningitidis; identical to SEQ ID NO: 38236

SEQ ID NO: 45673 - DNA, 300 bp, Neisseria meningitidis
atgaccgcatccatgtacatccttttgctgcttgccttgatttttgccaacgcccccttcctcacgaccaggctgttcggcatcgtaccgctcaagcgcaaacatttcgggcaccacttgatcgagctggcggcaggtttcgcgctgactgccgttcttgcctacatcctcgaatcccgtgcgggagcggtacacgatcagggttgggagttttacgccaccgtcgtctgcctgtacctgatttttgcgtttccctgtttcgtgtggcggtatttttggcacacgcgcaacagggaatag

SEQ ID NO: 45674 - DNA, 1344 bp, Neisseria meningitidis
atgattaaaatcaaaaaaggtctaaacctgcccatcgcgggcagaccggagcaagtcatttatgacggcccggccattaccgaagtcgcgttgcttggcgaagaatatgccggtatgcgcccctcgatgaaagtcaaggaaggcgatgccgtcaaaaaaggccaagtgctgtttgaagacaaaaagaatccgggcgtggtatttaccgcgccggcttcaggcaaaatcgccgccatccatcgcggcgaaaagcgcgtacttcagtcggtcgtgattgccgttgaaggcaacgacgaaatcgaattcgaccgctacgcgcccgatgccttggcaaaattgagcggcaaagaagtgcgccgcaatctgattcaatccggtttgtggactgcgctgcgtacccgtccgttcagcaaaatccctgccgtcgatgccgagccgttcgccatcttcgtcaatgcgatggacaccaatccgctggcggcagaccctgtggttgtgatcaaagaagccgccgaggatttcagacgaggtttgctggtattgagccgtttgaccgagcgtaaaatccatgtgtgtaaagcagcaggcgcagacgtgccgtctgaaaacgccgccaacatcgaaacacatgaattcggcggcccgcatccggccggtttgagtggcacgcacattcatttcattgagccggtcggtgcaaacaaaaccgtttggaccatcaattatcaagatgtaattgccatcggacgtttgtttgcaacaggccgtctgaacaccgggcgcgtggttgccttgggtggttctcaagtcaacaaaccacgcctcttgcgtaccgttttgggtgcgaaagtatcgcaaattactgcgggcgaattggttgacgcagacaaccgcgtgatttccggttcggtattgaacggcgcgattgcacaaggcgcgcacgattatttgggacgctaccacaatcagatttccgttatcgaagaaggccgcagcaaagagctgctcggctgggttgcgccgcagccggacaaatactccatcacgcgtacaaccctcggccatttcctgaaaaacaaactcttcaagttcaacacagccgtcaacggcggcgaccgcgccatggtgccgattggtacttacgagcgcgtgatgcccttggatatcctgcccaccctgcttttgcgcgatttaatcgtcggcgataccgacagcgcgcaggcattgggttgcttggaattggacgaagaagacctcgctttgtgcagcttcgtctgcccgggcaaatacgaatacggcccgctgttgcgcaaagtgctggaaaccattgagaaggaaggctga

SEQ ID NO: 45675 - DNA, 1893 bp, Neisseria meningitidis; identical to SEQ ID NO: 37559

SEQ ID NO: 45676 - DNA, 627 bp, Neisseria meningitidis
atgtatacaggcgaacgcttcaatacttacagccatttgagcggtttgattctggcggcggcaggtttggcgctgatgctgctgaaaaccataggacacggggacggctaccgtatcttcagcgtatcggtttacggcatcagccttcttctgctctatttgagttcctcgctgtaccacggaattgcagccggaaaactgaaaagcattttgaaaaaaaccgaccactgcatgatttatgtgctgattgccggaagctacacaccgtttgcactggtttctttgagaaacgggccgggctggacggtattttcactgtcctggctgctggcggctgcaggaatcgcacaagaactcaccatcggacggaaaagcgaaaaacgactgctgtctattgcgatttatgtcgtcatgggttggatggtcttggcggtaatgaaatccctgacagcctcactcccgctggcaggactggcttggctggcggcaggcggtatgctgtacagcgtcggcatttactggtttgtaaacgatgaaaaaatccgacacgggcacggaatctggcatctgttcgtattgggcggcagcatcacccaatttgtcagtgtgtacggttatgtaatctga

SEQ ID NO: 45677 - DNA, 1245 bp, Neisseria meningitidis
atgaccctattttgcgaacaagtcccctacccccgccttgccgaagcattcggcacaccgctttatgtgtacagccaatccgcgctgaccgaagcatttgaacactaccaaactgcctttgccgagctctccccgctcgtctgctatgcggttaaagccaatggcaacctgagcatcatcaaacactttgcttctttggggagcggttttgacattgtgtccggcggcgaattggcacgcgttttggcggcaggcggcgacgcggcaaaaaccatattttcaggcgtaggcaaaagcgaggcggaaatcgagttcgcgctgaatgcaggcgtgaaatgcttcaatatggaaagcatccccgaaatcgaccgtattcagaaagttgccgcgcgtttgggtaaaaccgcgcccgtctccctgcgcgtcaatcccgatgtcgatgcgaaaacccatccctacatctccacaggtctgaaagccaacaaattcggcatcgcctacgccgacgcgctcgaagcctaccgccacgccgcacaacagcccaatttgaaaatcatcggcatcgactgccacatcggctcccaactaaccgacttaagcccgctggtcgaagcctgcgagcgcattttgattttggttgacgcgcttgccgccgaaggcattgtgttggaacacttggacttgggcggcggcgtcggcattgtttaccaagacgaagatgtgcctgatttgggcgcgtatgcccaagccgttcaaaaactgatcggcacacgccgtctgaaactcattcttgagcccggccgcagcctggtcggcaacgcaggttcgctgctgacacgcgtcgagtttgtcaaatacggcgaagagaaaaactttgtgatggtcgatgcggcgatgaacgatttgatgcgcccggcgctttatgatgcctatcatcacatcgaggcggtcgaaaccaaagacatcgcgacgctgaccgccaacatcgtcggtccgatttgcgaaaccggcgacttcctcggcaaagaccgcaccatcgcctgcgaagaaggggatttgctgcttatccgcagcgcgggcgcatacggagccagtatggcgagcaattacaacgcgcgcaaccgtgcggcggaagtgttggttaacggtggcggatacaaactcatccgccgacgcgaaaccttagaacagcaaatggcaaacgaactcgcctgcctgcaagccgaacatcaaaatgccgtctga

SEQ ID NO: 45678 - DNA, 372 bp, Neisseria meningitidis; identical to SEQ ID NO: 39277

SEQ ID NO: 45679 - DNA, 1257 bp, Neisseria meningitidis; identical to SEQ ID NO: 38146

SEQ ID NO: 45680 - DNA, 531 bp, Neisseria meningitidis; identical to SEQ ID NO: 38478

SEQ ID NO: 45681 - DNA, 603 bp, Neisseria meningitidis
atgttcaacataccggctgttgctgtttcctatctgatcggctcactttctttcgccgtcatcgtgtccaagtattacggcatggacgacccgcgcacctacggatcgggcaatccgggggcaaccaatgttttacgcagcggcaaaaaaaaggcggccgtgctgacgctcttgggcgatgccgccaaaggtttggttgccgttttgcttgcacgcgtgcttcaagaaccgctcggtttatccgacagcgcaatcgctgccgtcgcactcgccgcgctggtcgggcatatgtggccggtgtttttcggatttaagggcggcaaaggcgtggcaacggcattgggcgtgcttttggcactctctcccgcaactgccttggtctgcgcgttgatttggcttgttatggcattcggcttcaaggtgtcctcccttgccgcattaaccgccacaatcgccgccccccttgctgcgctgttttttatgccccacctttcttggatttgggcgacgctccttatcgccctgctggtgttgttccgccacaaaagcaatatcagcaacctgcttaaaggcaaagaaggcaaaatcggcgaaaaacgctga

SEQ ID NO: 45682 - DNA, 4707 bp, Neisseria meningitidis
atgaaaaccaaacgttttaaaattaacgccatatccttatccatctttcttgcctatgcccttacgccatactcagaagcggcattggtcagagacgatgtcgattatcaaatattccgtgactttgcagaaaacaaaggcaaattttttgtcggcgcaaccgatttatcagtgaaaaacaaacaaggtcaaaacatcggcaacgcattatccaacgtaccgatgattgattttagcgttgcagatgtcaacagacgtacattaaccgtcatcgatccccagtatgccgtcagcgtcaaacatgtaaaaggagacgaaatctcttattacgggcatcacaatgggcacttagatgttagcaatgatgaaaacgaatatcgttcagttgcacaaaatgactacgaaccaaataaaaattggcatcacggtaatcaaggtcgtcttgaagactacaacatggcacgccttaataaattcgtaacagaagtcgcacctattgcaccaaccagtgcaggcggcggcgttgaaacctataaagataaaaaccgtttttctgagtttgtgcgagttggagcaggtacgcaatttgaatataacagccgctacaatatgacagagctttcacgagcttatcgttatgccattgcaggtacgccttatcaagacgtgaatgtcacatcgaatctaaatcaagaaggcttgattggcttcggtgataattcaaaacatcattccccagaaaaactcaaagaagttttatctcaaaacgcattgactaactatgctgtgttaggcgatagcggttcaccattatttgcttatgataaacaagaaaaacgctgggtctttttaggtgcttacgattattgggcaggctatcaaaaaaactcttggcaagaatggaatatctataaaaaagaatttgcagataaaatcaaacaacgcgataacgccggcaccatcaaaggtaatggagaacatcattggaacattacttttggcacaaacagcaagattggttctacagcggtaaggcttgccggcaatgaaaaggatgcaaacaacggacagaatgttacctttgaagacaacggcactttggtattggatcaaaacatcaaccaaggcgcgggcggtctgtttttcaaaggcgattacacagtcaaaggtataaataatgacatcacttggctaggtgcggggattgatgttaccgacggcaaaaaagtcgtttggcaagtcaaaaatccgaatggcgacagattggcaaaaatcggcaaaggcacattagaaataaacggcacaggcgttaaccaagggcaattaaaagtcggcgacggtacggttattctgaatcaacaagccgatgccgacaaaaaagtccaggctttctcccaagtcggcattgtcagcggacgcggtacattggtattaaatagttcaaatcagattaatcccgataacctatatttcggtttccgtggcggtcgtttggatgccaatggcaatgacttgacttttgaacacatccgcaacgtggatgaaggcgcgcgcattgtcaaccacaacacaagccacgcctccacaatcacgctaacgggtaaatctttaattaccaatccgaacagcctttcggtacatagcatacaaaatgactatgacgaagatgattatagttattactaccgaccaaggcgcccgattccgcaaggcaaagacctttattacaaaaactatcgttattacgccctaaaatccggcggcagcgtgaacgcaccgatgcccgagaacggtgtaacagaaaataacgactgggtctttatgggatatacgcaagaagaagccaagaaaaacgcgatgaaccacaaaaacaatcagcgtattagcggttttagcggtttctttggcgaagaaaacggaaaaggacataacggtgcattaaaccttaatttcaacggcaaaagcgcgcaaaaccgtttcttgttaacaggcggcactaatttaaacggaaaaataagcgtaactcaaggcaatgtcttgttatcaggtcgtccaacaccacacgcaagagattttgtgaacaaatcttcagcccgaaaagacgcacatttctccaaaaacaatgaagtcgtatttgaagacgactggataaaccgcacattcaaagccgcagaaattgcggttaatcaatccgcatcattctcttccggtagaaatgtatccaacattaccgccaacatcaccgcgacagacaacgccaaagtaaatttgggttacaaaaacggcgatgaggtttgcgtgcgctcggactataccggttatgttacctgcaacacaggcaacttatccgataaggctttaaacagctttggagcgacacagattaacggcaatgtgaatctgaaccagaatgcggcattggtcttgggcaaggctgcattatgggggcaaattcaagggcaaggaaacagccgtgtcagcctaaaccaacatagcaaatggcatttgactggcgacagccaagtacacaatctgtcattggcggatagccatattcatttgaacaatgcctccgatgcgcaaagtgcaaatcaataccacacgctcaaaatcaatcatttatccggtaacgggcattttcattatctgacgcacttggcggaaaatcttggggataaagtgcttgtgaaggaatccgcatccggtcattatcagctccatgttcaagataaaacaggcgaacccaatcaggaagggctgaatctctttgatgcatcatccgtacaagaccgctcccgcctttctgtttccttggcgaataaccatgtagatttaggcgcattgcgttatacaatcaaaacagaaaacggtattacccgattgtacaatccttatgccgagaaccgccgccgagtcaaaccggtcccgtctcctgccacaaacacggcttctcaagcacaaacggacagtgcacaaattgccaagcctcaaaatatcgtcgtcgcaccgcctagcccgcaggcaaatcaagccgaagaagcaaaacgccaacaagcaaaagcggagcaagtgaagcgtcagcaagcagaagcagagcgtaaatcggcagagttagcaaaacaaaaagcagaagccgaacgcgaagcaagagagctggcgacccgccaaaaagcagaacaagaacgcagcagcgccgaacttgcacgtcgacatgaaaaagaacgcgaagcggcagagttgtcggcaaaacaaaaagtcgaagccgaacgtgaggctcaagcattggcggtacgccgaaaagcagaagccgaagaggcaaaacgccaagctgcagagcttgcacgccaacaagaagaagcacgaaaagctgcagagttggctgctaagcaaaaagcggaaactgaacgcaaagcagcagaaattgccgagcaaaaagcggaagccgaacgtgaagccgccgaacttgccaagcaaaaggcggaagaagaaggtcgccaagcagcacaatctcaacccaaacgtcgtaaccgcagggctataccaccggaactgtcatctgatgcaacaacccgagctttgcctaggatagcgagaaattcaaatcctgatgccagcgattatgaagaaatccccttggatgcgttggaagatgaagatgtatccgaatcggttgacacatcagacaaacagcctcaagacaatacggaacttcatgaaaaagttgagacagtgagtttgcaaccaagagccgcgcagccgcgagctcaagccgccgcgcagccgcaagcccaagccgccgcgcagccgcaagcccaagccgtcgcgcaagccgatgcagtcagcaccaataccaactcggctttatctgacgcaatggcaagcacgcaatctatcttgttggatacaggtgcttcattaacacggcacattgcacaaaaatcacgtgctgatgccgaaaaaaacagcgtttggatgtcgaacatcggttatggccgtgattatgcttccgcacaatatcgccggtttagttcgaaacgcacgcaaacacaaatcggcattgaccgcagcttgtccgaaaatatgcagataggcggcgtattgacttactctgacagtcagcatacttttgatcaggcgagcggcaaaaatacttttgtgcaagccaacctttatggtaagtattatttaaatgatgcttggtatgtggccggcgatattggtgcaggcagcttgagaagccggttacaaacacagcaaaaagcaaactttaaccgaacaagtatccaaaccggccttactttgggcaatacgctgaaaatcaatcaattcgagattgtccccagtgcgggaatccgttacagccgcctgtcatctgcagattacaagttgggtaacgacagtgttaaagtaagttctatgtcagtgaaaacactgacggccggactggattttgcttatcggtttaaagtcggcaaccttaccgtaaaacccttgttatctgcagcttactttgccaattatggcaaaggcggcgtgaatgtgggcggtaattccttcgcctataaagcagataatcaacagaaatattcagcaggtgccgcgttactgtaccgtaatgttacattaaacgtaaatggcagtattacaaaaggaaaacaattggaaaaacaaaaatccggacaaattaaaatacagattcgtttctaa

SEQ ID NO: 45683 - DNA, 2121 bp, Neisseria meningitidis
atgttcaataaacacgttaagaccttccaatacggtaatcaaaccgttactttggaaaccggcgaaatcgcccgccaagccgccgctgccgttaaagtatctatgggcgacaccgtcgttttggttgccgttaccaccaataaagaagtgaaagaaggtcaagacttcttccccctgaccgtcgattacctcgagcgtacttacgccgcaggcaaaatccccggcggcttcttcaaacgcgaaggcaaacaaagcgaaaaagaaatcctgaccagccgtctgatcgaccgtccgattcgtcctttattccctgaaggtttctaccacgacatccaaatcgtagcgatggtggtgtctgtcgatccggaaatcgattccgacattcctgcaatgttgggcgcatctgccgcgctggtgttgagcggcgtaccgtttgccggtccgattggtgcggcacgcgtgggttatgtaaacggcgtgtacgttttgaacccgactaaagccgaattggctaaatcgcaattggacttggtggtcgccggtacttcaaaagccgtgttgatggtggaatccgaagccaaaatcctgcccgaagacgtgatgctgggcgcggtggtttacggccacgatcaaatgcaggttgccatcaatgcaatcaatgaatttgccgacgaagtcaatccggaactttgggattggaaagcacctgaaaccaatgaggaactggttgccaaagtccgcgggattgccggcgaaaccattaaagaagcgttcaaaatccgtcaaaaacaagcgcgttctgccaagttggacgaagcttggaatgccgtgaaagaagcgttgattaccgaagaaaccgacactttggcagccaacgaaatcaaaggcattttcaaacacttggaagccgatgtcgtccgcagccaaattttggatggccaaccgcgcatcgacggccgcgacacccgcaccgtccgtccgctgaacatccaaaccagcgtattgccgcgcacgcacggttctgcattgtttacccgtggcgaaacccaagctttggccgttgcaactttgggtacttcgcgcgacgagcaaatcatcgacgcgctgtccggcgaatacaccgaccgctttatgctgcactacaactttccgccgtactctaccggcgaagtgggccgcatgggcgcaccgaaacgccgtgaaatcggtcacggccgtttggctaaacgtgcattgttggccgtattgccgaaacctgaagatttcagctacaccatgcgcgtggtctccgaaattaccgaatccaacggctcttcctctatggcttccgtctgcggcggctgcctgagcctgctgtctgccggcgtgcctttgaaagcacacgttgccggtatcgcgatgggtctgattctggaaggcaacaaatttgccgtcctgaccgacattttgggcgacgaagaccacttgggcgatatggactttaaagtggccggtacgaccgaaggcgttaccgcgctgcaaatggacatcaaaatccaaggcattaccaaagaaattatgcaaatcgctttggcacaggccaaagaagcgcgtctgcacatcttggatcagatgaaagccgccgttgcgggcccgcaagagctgtccgcacacgcgccacgcttgttcacgatgaaaatcaaccaagacaaaatccgcgaagttatcggtaagggcggtgaaaccatccgttcgattaccgctgaaaccggtacggaaatcaatattgccgaagacggtacgattaccattgccgcaaccactcaagaagccggcgatgcggcgaaaaaacgcatcgagcagattactgccgaagtggaagtgggcaaagtgtacgaaggcactgtggtgaaaatcctcgacaacaatgtcggcgcgattgtcagcgtgatgccgggcaaagacggtttggtacacatcagccaaatcgcccacgagcgcgtacgcaatgtcggcgactacctgcaagtcggtcaggtggtgaacgtgaaagcattggaagtggacgacagaggccgtgtccgtctgtccatcaaagccctgctggacgcgcctgcccgtgaggaaaatgccgccgagtaa

SEQ ID NO: 45684 - DNA, 282 bp, Neisseria meningitidis; identical to SEQ ID NO: 38303

SEQ ID NO: 45685 - DNA, 936 bp, Neisseria meningitidis
atgaacccgaaaaaactcgtcatcgccagccgcgaaagcctgcttgctatgtggcaggcaaagcatatccaaggccgtctgaaggctctgtatcccgattgcgaagtcgagattttgggcatgaccacgcgcggcgatcagattttggacaaaactttgtcaaaagtcggcggtaaaggcttgtttgtcaaagagttggaacaggctttatatgacgggcgcgccgatttggcggtgcattcgattaaggacgtgccgatggatttgcctgaaggtttcgcgcttgccgccatcggcgaacgcgccaatccgtttgacgcgtttgtgtccaaccaatacgcgcgtttggaagaaatgcccaaaggcgctgtcgtcggtacatccagcctgcgccgcgaagcccagttgcgcgcgcgctatccgcatttgcttatcaaacctttgcgcggcaatgtgcaaacccgtttgtccaaactcgataacggcgaatacgacgcaattattttggccgccgccggtttgcagcgtctgaaattggacggacgcatccgcatgattttgtcggaatccgacagcctgcctgccgccggacaaggcgcattgggtatcgaaattgccgcgcaccgcgaagatttgtatgaggttttaaaaccgctaaaccacgataccacacacgcctgcgttacggccgaacgagctttggcgcgcgctttgggcggaagctgccaagtgccgctggccgcatattgcacggaagaaaacggcttgctgaccttgcgcggactggtcggacaccccgacggttcggttgtgttgcaggcggacgcgcaagcccctgccgaatatgccgacgcgctcggacgcgctgtcgctaagaaattggcggacgacggtgcgcgggaattgattggagcagtattgaatacggaaaattga

SEQ ID NO: 45686 - DNA, 603 bp, Neisseria meningitidis; identical to SEQ ID NO: 36499

SEQ ID NO: 45687 - DNA, 279 bp, Neisseria meningitidis; identical to SEQ ID NO: 40180

SEQ ID NO: 45688 - DNA, 786 bp, Neisseria meningitidis
atgagcagaatccggcaggcttttgccgctttggatggcggaaaggcattgattccctatattacggtgggcgaccccgatattcggacaactttggcattgatgcacggcatggttgcaaacggtgcggatattttggagttgggcgtgccgttttccgatccgatggcggatggaccggttattcagcgtgcggcggagcgggcgttggcaaacgggatttcgctgcgcgatgtcttggatgtcgtcagaaaattccgtgaaaccgacacgcaaacgccggttgttttgatgggatatttgaaccctgtacataagatgggttatcgggagtttgctcaggaagccgcaatggcgggtgtggacggcgtgttgacggtggattcccctgtcgaaaccatcgatccgctctatcgcgagctgaaggataacggggtcgactgtattttcctgattgcgccgacgacgacggaagaccgtattaaaaccattgccgagctggcaggcggatttgtctattatgtttcgctcaagggcgtaacgggcgcggcaagtttggatacggatgaggtttcgcgtaaaatagagtatttgcatcagtatatcgatattcccatcggtgtcggtttcggcatcagcaatgcggaaaacgcgcgcaaaatcggccgggttgccgacgcggtcattgtcggcagccggattgtgaaagagattgaaaacaatgcgggcaacgaggctgcggccgtcggtgctttggtcaaagagttgaaggatgccgtgcgctga

SEQ ID NO: 45689 - DNA, 1509 bp, Neisseria meningitidis
atgcaaaccgattgcgacgtattgattgccggaaacgggctggcggcactgacgctcgccctgtcgctgcctgaatcgttccgcatcgtcattttgtgcaaaaaccggctggacgacaccgccagccatcatgcgcaaggcgggattgcggcggcgtggtcgagagaggacgacatcgaaaaacacgttgccgatactttggaagcgggcgcaggtttgtgcaacgaagccgccgtccgcaccatcctgtcgcagggcaaaccggcaatcgaatggctgctggcgcagggcgtggcgttcgaccgaaattatgacggtctgcacctgacacgcgaaggcgggcacacctgccgccgaatcgcccacgtcgccgactacacgggcgaagccgtcatgcagagcctgattgcccaaatacgccgccgcccgaacatccgcgtttgcgagcggcagatggcgttggacattcaaaccgaatcaggcgcggcgtgcggactgaccgtcctcgactgccgaacgcaagaaacccaccgcatccgcgcccgccataccgtactcgcaggcggcggcttggggcagatttacgccgccaccaccacgccgcccgaatgcacgggcgacgccatcgctatggcgatacgcgcaggctgcgcagtcgaaaacctcgaatttatccaattccaccctacaggcttggcaaggccgtctgaaaacggccgcaccttcctgatttccgaagccgtgcgcggcgaaggcggcatcctgaccaaccaagcgggcgaacggtttatgccgcattacgaccgccgcgccgaactcgcaccgcgcgacatcgttgcccgcgccattgccgccgaaaccgccaaacaaacgcaagacttcgtctcgctcgacatcagccatcaacccgcagcgttcgtccgccagcattttccgtccatccatcgacactgtttatcccaatgcggcttggacatcacgcgccaagccatccccgtccgccccgtgcaacactacacctgcggcggcatccaaaccgaccccagcggcagaacttccctgccgcagctctacgccttaggcgaaaccgcctgcacagggttgcacggagccaaccgcctcgccagcaactccctactcgaatgcgtcgttaccgccaggcttgccgcccaaaccatcgcggatggacaagcgttccaaaccgtaccgtccaaaaggtcgtctgaaaacacctccgccgaagcagacatcttttcagacggcatccaaaacacattcagccgccccgccctgcaagcgttcaaccaacgccatctcggcatcctccgcaacgataccggcctgcgccgcgccatcgcccaactgcggctttggaagcaaaaccaaaccgaaccgcacaccgtgtccgaatacgaaaaccgcaacctgctcgaatgcagcctcgccgtcgcccaagccgcatacaggcggagacagaacatcggcgcgcattttaatagtgattgttaa

SEQ ID NO: 45690 - DNA, 435 bp, Neisseria meningitidis
atgactgagccgaaacacgaaatgccgacggaagagcaggttgccgcgcgcaaaaaagcaaaagccaaaatccgcaccatccgcatttgggcatgggtcattttggcgttgctcgcttcaaccgccctgctctcccaatgcgcgatgtccaaaccgcaggcaaaacagaaaattgtcgagtcttgcgtgaagaatattccgtttgccgaaaaatggcaaaacgatttacgggcccgcggtttagattcaaacaatacccgccttaccgtcgactactgcaaatgtatgtgggagcagcctttggacagattgagcgagaaacagattagatccttcggcaaactcggcgcacaagaacagcttgacctgctcggcggcgcaaatgcctttgaagcacgtgacaagcagtgtgttgccgatttgaaatcagaataa

SEQ ID NO: 45691 - DNA, 465 bp, Neisseria meningitidis
atgcaaggcaatcaagctgttgttgattatatgaacgaattgctgtctggcgagctggcggcacgcgaccaatactttatccactcccgcctctactccgaatggggctacaccaaactttttgaacgtctcaaccacgagatggaagaagaaaccacacacgccgaagacttcatccgccgcatcctgatgctgggcggtacgccgaaaatggcacgcgccgaactgaatatcggcacggacgtggtttcctgcctcaaagccgacctgcaaaccgaatatgaagtacgtgatgcgttgaaaaaaggcatcaaactgtgcgaagaggctcaagactatgttacgcgcgacctgatggttgcccaactgaaagataccgaagaagaccacgcccactggctggaacagcagctgcgcctgatcgagctgattggcgaaggcaactactaccaaagccaactgtaa

SEQ ID NO: 45692 - DNA, 1086 bp, Neisseria meningitidis; identical to SEQ ID NO: 38486

SEQ ID NO: 45693 - DNA, 486 bp, Neisseria meningitidis
ttgttgattcaatcggcattatgttttgaggcggaagcccatgaatatactaatattcaagagatggaatgggtgtctttattttctgatccgcaaagagacgatgatagtcttataacccttaaagatgaaaaaatcactgtaaaaaactatattgtgccttggtggaaaaaaggtgaaaactttagaaaattagaacttattaccactggtaaaaatgataatggaaatttaacggtaaatggaatttacggcatccaatcttttgcagactctcaattgggatatacgcctgaattattggtaaaaagcaataatgatattctatttaaaaataatctccaatctgttgacgtgaaaccccattccggaaatatccatttggatgccaaaggaaaaattcaatttaatttgaatgttcccgatgttgatggggtacaagatgtagccagtggaaaaaaataccgacaaacaatagtgccttag

SEQ ID NO: 45694 - DNA, 2151 bp, Neisseria meningitidis
atgctcaccgatttagaaaaaaacgccatccgcgaccattaccaaaacatcggcaaaaacctgcccggtttccgtccgcgcgcttcgcagcgggaaatgattgcggcggttgccaacgctttttcgcggacgttggcgcgcgaagaaggcggcgagccgcccaagcgcgagggcgagagcatcgccgtaatcgaagggccgaccggcgtgggcaaatcgcttgcctacctgctggcgggcggcatcatggcgcagacgcgcggcaagcggctgattgtgagcagcgcaacggttgccttacaggagcagttggttgaccgcgacctgccgtttctggtcgaaaaaagcggtttggaactgaccttcgcgcttgccaaagggcgcggccgctatctctgcccttacaaactctaccaactgacgcaaaacaacgcccagcaaaacctgcttggttttgaagcaccggaagtattgtgggacagcaaacccaagcccgaagaattgaagctgctgcacgacattgccgacgaattttccgcccgacggttcaacggcgaccgcgacacttggccggaaaaaatcgatgacgcgatttggctcaaagttaccaacgaccgccacggctgcctgaaaaccgcctgtcccaaccgtccggaatgtccgttttacctggcacgcgatgtcttggaaaccgtcgatgtcgtcgttgccaaccacgaccttctgcttgccgacatcagtatgggcggcggcgtgattctgcccgcgcccgaaaacagtttctattgcatagacgaagcgcaccacctgcccaaaaaagccctcagccgttttgccgccgaacattcgtggaatattgccgtttggacgctggaaaaactgccgcagctgaccggcaagattgccgcgcttaccgataaagccgaacttgccaaccttgccgatgaagccgccgcatccttgctcgacagcctgcacgaatggcagttccatttggcggaagagccgtctttgagcttggggccgtctgaaaacgacaggcgaaccaacagcgaaccgacttggctgtgggaagacggcaaaatccccgaaggcctcgaaaccaccgtttccaacaccgccgttgctgtgcgcagcctgctcaaacacgttatcgggctgaacgatgcgctttctgccgcacgccgcgaaaaagaacaggacggcgcgctcctcgaccgcctgaccggcgatttcggcatcttcatcgcccgtatcgaacaaatcagcgcggtttgggatttgctctccaccgtccccctcgaaggcgaagagccgctggcaaaatggataacccgccgcgccgacgacaaaaacgactacattttcaacgccagccccatcagcagcgcgtcccacctcgccaacagcctgtggcggcgcgcggcaggcgcggtattgacctccgccaccctgcaatccttgggcaactttaacctgatgctgcgccaaaccgggctgcaatggctgcccgagaccaccaccctcgccctcaaaagcccctttgactttgaaaaacagggcgaactctacatcccccccatatacgccagccccaaagaccccgaagcccacaccgccgccatcatcgagtggctgcccaagctcatttcgcccggcgaagccatcggcacgctcgtcttgttttcctcgcgcaaacaaatgcaggatgtcgccctgcgcctgcccggagactacctgccgctcttgctcgtacaaggcgaattacccaaagccgttctcctgcaaaaacaccaccgggccatagaagaaggcaaagccagcatcatcttcggactcgacagctttgccgaaggactcgacctgcccggcaccgcctgcgtgcaagtcatcatcgccaaacttcccttcgccatgcccgacaaccccatcgaaaaaacccaaaaccgctggatagaacagcgcggcggcaaccctttcatcgaaatcaccgtccccgaagccggcatcaaactcatccaggccgtcggccgcctcatccgcaccgaacaagactacggccgcgtaaccatcctcgacaaccgcgtcaaaacacagcggtacggccaacaattattagccggcctgccaccgtttaaaaggatagggtaa

SEQ ID NO: 45695 - DNA, 528 bp, Neisseria meningitidis; identical to SEQ ID NO: 39057

SEQ ID NO: 45696 - DNA, 426 bp, Neisseria meningitidis; identical to SEQ ID NO: 36185

SEQ ID NO: 45697 - DNA, 252 bp, Neisseria meningitidis
atgggcagcatcgaacagcgtttggaatatctggaagaggcgaacgacgtgctgcgtatgcagaaccacgtcctgtccaccgccttcaaagccttaatccgcgcccttcccgccgacaccgccgaagtcgcgctcgagtccatccagcttgcttttgaggacgccttggcagaattgagctatgaggacagcccgcatacggatttgttccacgacgttacttatgcgtttttccgtgaaaaagaacgttaa

SEQ ID NO: 45698 - DNA, 1287 bp, Neisseria meningitidis
atgacggcacaacaccaggccccgctccgcttcattaccgccggcagcgtcgatgacggcaaaagcaccctgatcggacgactgctctacgacagcaaagccctgctgtccgaccaaatcaaaaccttggaatccggcaaaagcaaaggtttgaaagaaaccatagacttctccatcctgaccgacggactggaagccgaacgcgaacagggcattacgatcgatgtggcataccgctatttttccacggcgaaacggaaattcatcatcgccgacacgccggggcacgaacaatacacgcgcaatatggttacgggcgcaagcaccgcttcggcggcagtcgtgctggttgacgcatcccaactggatttcggcgcgcagcccttgcagcttctgccgcagaccaaacgccattccgccatcctccgccaactcaactgcccgcatattgtggtggcggtcaacaaaatggacctgctggattacagcgaagacaaattcaacgccattgtggaggcataccgccgacttgccgaacagctcggtttgaaagacgtgcatttcgtaccggtgtccgcactcttgggcgacaacctcgtttaccccggcggcaatatgccgtggtatcggggcgaaccgctgctggtcatcttggaaaacctgccgggggcggacgaaaccggtcgttccgctgccgatttttatttccccgtccaactggtcgtccgccaagatgccgacaaggccgatgatttccgaggctatcaggggcgcatcgaacgcggttcggtcgccgtcgggcaaaccgtccgcatcgaaccgaacgggctgaccgccgaagtgtccgaaatcatcacgccgaaaggggaagtggcgcaggcttttgccggcgaggcggcaaccctccggctggaccgcgacatcgatgtttcgcgcggcgacctttttgtcgataaaaattccccgctcgccccgcaaaaacatctggaagccacgctttgctggtttgacgaacgtccgctcaacaccgcgcgcaaatacctgctcaagcacggcacgcaaaccgtgccggcaaaagtcggggaaattgaaagcgttttagatgtccgcacgctggaacaagaggccggcgcggaatccttgaagatgaacgacatcgccaaagtccgcatcaaccttcaaaaacccgttacggcaacgccttatgcggaaaacaccgccgccggttcgtttatcctgatagacgaagcgacatacggcactgttgcggcaggtatgattttatga

SEQ ID NO: 45699 - DNA, 387 bp, Neisseria meningitidis
atgaacgaacaagaactgcaagacctgcaaaaaatggtcggggtcgccgtcaacgccctcgaagacatcaaagccaaagacatttccgttctcgaaacgcaagacaaaacttcgctgtttgccagaatgattatcgccagcggcgacagtacgcgccaagtcaaagcactggccaacaacgttgccgtcgatttgaaagaagccggttttgaaatcctcagcaccgaaggcgacagcggcgaatggacgttggttgatgcaggagacctcgtcgtccacgttatgctccccgccgtgcgcgacttctatgatatcgacaccctttggggcggcgagaaaccgagtttccacgccggaatgcagaagccgtggcacgcggcagactga

SEQ ID NO: 45700 - DNA, 360 bp, Neisseria meningitidis
  misc_feature 345, 346, 347, 348, 349: 'n' is a, c, g or t
gtggaaggctatatcgagaaactgcacattacccccgccaatgcccatgagtgcaaacacctgccgcctttgctggaagggatagctgaaggtacgaccgtctatgccgacaaaggctatgacagtgcggaaaaccggcaacatctggaagagcgtcagttgttagacggcattatgcgcaaagcctgccgcaaccgtccgctgtcggaagcgcaaaccaaacgcaaccgatatttgtcgaagacccgttatgtggtcgaacaaagcttcggtacgctgcaccgtaaattccgctatgcgcggtcaacctatttcggactgattaaagtgagtgcgcaaagccannnnncacacacttaa

SEQ ID NO: 45701 - DNA, 285 bp, Neisseria meningitidis; identical to SEQ ID NO: 44271

SEQ ID NO: 45702 - DNA, 1134 bp, Neisseria meningitidis; identical to SEQ ID NO: 38450

SEQ ID NO: 45703 - DNA, 276 bp, Neisseria meningitidis
atgaatgagggtgaagttgttttaacaccagaacaaatccaaaccttgcgtggttatgctttccgtggcgatacctatggcggttggcgttatttggctaatttgggtgaccgttatgcggatgatgctgctgcaattgtcggtaaggatgcaaacttaaatggtttgaatttatggatgaaaaaaggtgtggaaaacctatgggatgatacggtcggtaaaaagacccgtttaatgtgtatttccgttttttggattgttgttttcaatttgtag

SEQ ID NO: 45704 - DNA, 258 bp, Neisseria meningitidis; identical to SEQ ID NO: 40560

SEQ ID NO: 45705 - DNA, 1770 bp, Neisseria meningitidis
atgaacaaaatataccgcatcatttggaatagtgccctcaatgcctgggtagtcgtatccgagctcacacgcaaccacaccaaacgcgcctccgcaaccgtggcgaccgccgtattggcgacactgctgtccgcaacggttcaggcgaatgctaccgataccgatgaagatgaagagttagaatccgtagtacgctctgctctggtgttgcaattcatgatcgataaagaaggcaatggagaaatcgaatctacaggagatataggttggagtatatattacgacgatcacaacactctacacggcgcaaccgttaccctcaaagccggcgacaacctgaaaatcaaacaaagcggcaaagacttcacctactcgctgaaaaaagagctgaaagacctgaccagtgttgaaactgaaaaattatcgtttggcgcaaacggtaataaagtcaacatcacaagcgacaccaaaggcttgaattttgcgaaagaaacggctgggacgaacggcgaccccacggttcatctgaacggtatcggttcgactttgaccgatacgcttgcgggttcttctgcttctcacgttgatgcgggtaaccaaagtacacattacactcgtgcagcaagtattaaggatgtgttgaatgcgggttggaatattaagggtgttaaaactggctcaacaactggtcaatcagaaaatgtcgatttcgtccgcacttacgacacagtcgagttcttgagcgcagatacgaaaacaacgactgttaatgtggaaagcaaagacaacggcaagagaaccgaagttaaaatcggtgcgaagacttctgttattaaagaaaaagacggtaagttggttactggtaaaggcaaaggcgagaatggttcttctacagacgaaggcgaaggcttagtgactgcaaaagaagtgattgatgcagtaaacaaggctggttggagaatgaaaacaacaaccgctaatggtcaaacaggtcaagctgacaagtttgaaaccgttacatcaggcacaaaagtaacctttgctagtggtaatggtacaactgcgactgtaagtaaagatgatcaaggcaacatcactgttaagtatgatgtaaatgtcggcgatgccctaaacgtcaatcagctgcaaaacagcggttggaatttggattccaaagcggttgcaggttcttcgggcaaagtcatcagcggcaatgtttcgccgagcaagggaaagatggatgaaaccgtcaacattaatgccggcaacaacatcgagattacccgcaacggcaaaaatatcgacatcgccacttcgatgaccccgcaattttccagcgtttcgctcggcgcgggggcggatgcgcccactttaagcgtggatgacgagggcgcgttgaatgtcggcagcaaggatgccaacaaacccgtccgcattaccaatgtcgccccgggcgttaaagagggggatgttacaaacgtcgcacaacttaaaggtgtggcgcaaaacttgaacaaccgcatcgacaatgtggacggcaacgcgcgcgcgggtatcgcccaagcgattgcaaccgcaggtttggctcaggcctatttgcccggcaagagtatgatggcgatcggcggcggtacttatcgcggcgaagccggttacgccatcggctactcgagcatttctgacactgggaattgggttatcaagggcacggcttccggcaattcgcgcggtcatttcggtacttccgcatctgtcggttatcagtggtaa

SEQ ID NO: 45706 - DNA, 807 bp, Neisseria meningitidis
atgaatatgaaaaaatggattgccgccgcccttgcctgttccgcactcgcgctgtctgcctgcggcggtcagggcaaagatgccgccgcgcccgccgcaaaccccgacaaagtgtaccgcgtggcttccaacgccgagtttgccccctttgaatctttagactcgaaaggcaatgtcgaaggtttcgatgtggatttgatgaacgcgatggcgaaggcgggcaattttaaaatcgaattcaaacaccagccgtgggacagccttttccccgccttgaacaacggcgatgcggacgttgtgatgtcgggcgtaaccattaccgacgaccgcaaacagtctatggacttcagcgacccgtattttgaaatcacccaagtcgtcctcgttccgaaaggcaaaaaaatatcttcttccgacgatttgaaaaacatgaacaaagtcggcgtggtaaccggctacacgggcgatttctccgtatccaaactcttgggcaacgacaatccgaaaatcgcgcgctttgaaaacgttcccctgattatcaaagaactggaaaacggcggcttggattccgtggtcagcgacagcgcggtcatcgccaattatgtgaaaaacaatccgaccaaagggatggacttcgttaccctgcccgacttcaccaccgaacactacggcatcgcggtacgcaaaggcgacgaagcaaccgtcaaaatgctgaacgatgcgttggaaaaagtacgcgaaagcggcgaatacgacaagatttacgccaaatattttgcaaaagaagacgaacaggccgcaaaataa

SEQ ID NO: 45707 - DNA, 909 bp, Neisseria meningitidis
atgattgcctgggatatgttttcgctgaagaaaaacggcagccataaagtcggcgtcaaagaagccttggcatggagcggcttgtgggttgccgtatcctgcctgttcgcgggctggctgtatttcgaactcgccggcaatctcggctacggcgcggcagtcgcaaaagaaaaagtattggaattctttaccggctacattttggaaaaatcgttggcagtcgacaatattttcgtgttcctgatgatattcggctacttcaaagtcgcaccacagtttcagcaccgcgtgctgctgtacggcgtattgggcgcattggtattgcgcactgtcatgattttcgtcggcgcggcactggttcggcagttcgagtggattctgtatctgttcggcgcgttcctgctctataccggcatacacatgatgaagcccgaaggcgatgaggaagaggatttggcaaacagcaggctgctgaatgccgtcaagaaagtcgttccggtcggcacggaatttcacggcgagaaattttttaccgtcgaaaacggcaaaaaaatcgccacgccgctgtttttggtgctagtcatgattgaattgagcgatgtcgtgtttgccgtggacagcatccccgccgtctttgccgttaccaccgatccgtttatcgtgctgacctccaatattttcgccattttgggtttgcgggcgatgtatttcctgctggcggatgtggcggaacgctttatcttcctgaaatacggcttggcattcgtgttgggttttatcggtgtgaaaatgctggtaatgcattgggtgcatatcccgatttccgtttcactgtcggtcgtgttcggcgcgttgggtgcatcgatactgacctcgttaatttatacgaaaaaacagcctgataaataa

SEQ ID NO: 45708 - DNA, 711 bp, Neisseria meningitidis; identical to SEQ ID NO: 38308

SEQ ID NO: 45709 - DNA, 1266 bp, Neisseria meningitidis
atgtctgaagcccttgcaaaagaaaccctcaatccgtttgaaatcgcgcgcaaacaggtcaaaaccgcctgcgaccggctgaaaaccgatccggccgtttatgaaatcctgaagagtccgacccgcgtgttggaagtcaatttccccgtcaaactcgacgacggcacggtcaaaaccttcacgggctaccgttcgcaacacaacaacgccgtcggcccctataaaggcggcgtgcgcttccatcccggagtgaatctggacgaagtcaaagccctgtcgatttggatgaccatcaaatgctgcgttgcgggtattccttacggcggcggcaaaggcggcgttaccttgaatccgcgcgattattccgaggcggaactggaacgcatcgcccgcgcttattccgaagccatttctccgctgatcggcgagaaaatcgatattcccgcacctgatgtgaacaccaacggcaaaatcatgtcttggatggttgatgcctatgaaaacgtggtgaaacattctgcaccgggcgtatttaccggtaaaccggttgagttcggcggctctttggcgcgtaccgaggctaccggttacggcgtgaacctcgccgccgtccaagccttggaaaaactgggcaaagacgtgaagggtgccacttacgccatccaaggcttcggtaatgtcggttaccacacaggttattacgcgcatcaatccggcgcgaaagttgttgcggtttctactgttgacgttgccatttacaacgaaaacggcttggatatggaagcaatcatcaaagaattccaaaccaaaggtttcatcaccaatgaagccggctacggcaaggaaattaccaacgccgaacttttggctctggaagtggacgtacttgccccttgcgcactggaaaaccaactgacttctgaaaatgccggtaaagtccgcgcgacaatcgtggtcgaaggcgcgaacggcccgactacgcccgaagccgacgttatcctgcgtcaaaacggcgtattggtcgtgcccgatattttggcgaactgcggcggcgtggtggtatcttattttgaatgggtacaaaatctgcaaggctattattgggagtttgacgaagttcaggaaaaagaaaccgtcgtcctgcgccgtgcgttccgcgatatatggaacttggcgcaagagtatgatgtcgatttgcgaaccgcgtcttacatgatgagtatccgccgtgttgaaaaagcgatgaaactgcgcggttggtattga

SEQ ID NO: 45710 - DNA, 1407 bp, Neisseria meningitidis
atgaaactgttccaacgcattttcgccacattttgcgcagttatcgtctgtgcaatctttgtggcgagtttttctttttggctggtgcagaacacccttgccgaaaaccagttcaaccaacgccgcaccatcgaaaccactttgatgggcagcatcatttccgcattccgggcacgcggggacgcgggcgcgcgcgaaatcctgacggaatggaaagacagccccgtctcatcgggcgtgtacgttatacagggcgacgagaaaaaagatatcctgaaccggtatatcgacagctacaccatcgaacgcgcccggcttttcgccgccggacacccgcattccaacctcgtccatatcgaatacgaccgcttcggcgaagaatacctgttcttcaccaaagactgggacaaactccaagcccgccgcctgcccagccccctgttgatccccggcctgccgctcgccccgatttggcacgaactcatcatattgtccttcatcatcgtcgtcggactgctgatggcgtacatcctcgccggcaatatcgccaaacccatcagaatcttaggcaacggcatggacagggtggcaaacggagaacttgaaacccgtatctcccaacaggtcgacgaccgcgacgacgaattgtcccatcttgccatccaattcgacaaaatggtggaaaaactcgaaaaactcgttgccaaagaacgccacctgctccaccacgtttcccacgaaatgcgctccccgcttgcccgtatgcaggcgattgtcggactgattcaggcgcagccccaaaaacaggaacaatatctcaaacggctggaaggcgaactgacccgcatggatacgctggccggggaactgttaaccctgtcccgtctcgaaacttccaatatggctttggaaaaagaaagcctgaaactcctgcccttcctgggcaacctggtagaagacaatcaaagcattgcccagaaaaacggacaaacggttaccctgtctgccgacggaaaaatccccgaaaacacaaccatccttgccaacgaaagctacctgtaccgcgccttcgacaacgtcatccgcaacgccgtcaactacagtcccgaaggcagcaccatcctgatcaacatcggacaagaccacaaacactggataatcgacgttaccgacaacggccccggcgtggacgaaatgcagctcccgcacatcttcaccgctttctaccgtgcagactccagtgccaacaaacccggaacaggactggggcttgcattgacccaacatattattgaacagcactgcggcaaaatcatcgccgaaaacatcaaaccgaacgggctgcggatgcgcttcatcctacccaagaaaaaaaccggttccaaaacagaaaaaagtgcgaactga

SEQ ID NO: 45711 - DNA, 297 bp, Neisseria meningitidis
atgcgcaaagcctgccgcaaccgtccgctgtcggaagtgcaaaccaaacgtaaccgatatttgtcgaagacccgttatgtggtcgaacagagcttcggtacgctgcaccgtaagttccgctatgcgcgggcagcctatttcggactgattaaagtgagtgcgcaaagccacctgaaggcgatgtgtttgaaccttttgaaagcggccaacaggctaagtgcgcccgctgccgcccaaaaggcgaccggatgcctgattatcgggtatccggggaggattaagggggtatttgggtag

SEQ ID NO: 45712 - DNA, 780 bp, Neisseria meningitidis; identical to SEQ ID NO: 39421

SEQ ID NO: 45713 - DNA, 924 bp, Neisseria meningitidis
atgaaaaaacgcaataatcctcttcctctgttgaacggtgtcaaacccagttatttggtgctgccgcatgaaaagcagttttacgggctgccgctgctgcattttctgtgcatccgctttccttttgtgggcgcggacgattggcgtaggcggttgaacagtggttttgtggtcggttcggatggtgcggcgttggatgaacatactttgttcgagccgggtaaggtgatgttttattatcgggaaaccagtcgcgagagcgagccgcgtattccgtttgaagaaaagattttgcatattgatgaacatttgattgtggtggacaagccgcattttctgcccgtcatccccagcgggcgttttttgagggaaacgctgctcacacgtctgcgcctgcgtcctgaattgcagcatttgaatgttgaggacattacgccgctgcaccgcttggacaaggatacggcaggcgtgatgctgctgtcgcataatcctgccacgcgcggagcctatcagacgatgtttcaaaacaaaacggtatggaaaacgtatgaggcgcttgcgccgacaaggacggatttgctgtatccgctcgatgtggtttcgcgtttggtaaggggtgaaaaattttttacgacgcaagaggcggaaggcgtaccgaatgcgcacacgacggtcgaactgattgaaaacagggggggattcagcctttaccgccttacgccgcataccggcaagaaacaccagttgcgcgtacacatgatgggcttgggtatgccgttgttgaatgacgcgctctatcccgtgccgtctgaagcgggaagcgaggattatcggaaacctttgaagctattggcaaaaaagattgcgtttgcagatcctttgtcgggtctggaaagggtgttttacagtaggttttgcctataa

SEQ ID NO: 45714 - DNA, 321 bp, Neisseria meningitidis
atgttcggcaagcagctttttgaggaagtcggctcgaaaatcagcgaaaccatcgccaacagccctgccaaagatgtggaaaaaaatattaaggcgatgctgggcggcgcgttcaaccgtatggatctggttacgcgcgaagaattcgacatccagcagcaggttttaatcaaaacccgtaccaaactggcggctttggaagcgcgtttggcaaaactcgaagccgcgcaaaatcccgaacgggcagcattggaagcggctgaagccgctgccgaagaagccgtcgccgaaatcaggcagcaaaccgaagccggcgaataa

SEQ ID NO: 45715 - DNA, 924 bp, Neisseria meningitidis; identical to SEQ ID NO: 37161

SEQ ID NO: 45716 - DNA, 480 bp, Neisseria meningitidis
atgaaacacatactccccctgattgccgcatccgcactctgcatttcaaccgcttcggcacatcctgccagcgaaccgcaaacccaaaacgaaaccgctatgaccacgcataccctcacctcaaaatacagttttgacgaaaccgtcagccgccttgaaaccgccataaaaagcaaagggatggacatttttgccgtcatcgaccatcaggaagccgcccaccgaaacggcttaacgatgcagccggcaaaagtcatcgtcttcggcacgcccaaagccggcacgccgctgatggtcaaagaccccgccttcgccctgcaactgcccctgcgcgtcctcgttaccgaaacagacggcaaagtacgcgccgcctataccgatacgcgcgccctcatcgccggcagccgcatcggttttgacgaagtggcaaacactttggcaaacgccgaaaaactgatacaaaaaaccgtaggcgaataa

SEQ ID NO: 45717 - DNA, 534 bp, Neisseria meningitidis
atgtttccccccgacaaaacccttttcctctgtctcagcgcactgctcctcgcctcatgcggcacgacctccggcaaacaccgccaaccgaaacccaaacagacagtccggcaaatccaagccgtccgcatcagccacatcgaccgcacacaaggctcgcaggaactcatgctccacagcctcggactcatcggcacgccctacaaatggggcggcagcagcaccgcaaccggcttcgattgcagcggcatgattcaattcgtttacaaaaacgccctcaacgtcaagctgccgcgcaccgcccgcgacatggcggcggcaagccgcaaaatccccgacagccgccttaaggccggcgacctcgtattcttcaacaccggcggcacacaccgctactcacacgtcggactctatatcggcaacggcgaattcatccatgcccccagcagcggcaaaaccatcaaaaccgaaaaactctccacaccgttttacgccaaaaactacctcggcgcacatactttctttacagaatga

SEQ ID NO: 45718 - DNA, 1356 bp, Neisseria meningitidis; identical to SEQ ID NO: 38945

SEQ ID NO: 45719 - DNA, 567 bp, Neisseria meningitidis
atgccgtctgaagcctgttggcgtttcagacggcatattctgattgaaaagatgatgatactgaaaaccgccccgctcaaacgccgctttgccgccatgctgtatgagatgctgctggtcggtgcggcaacctgtttggcagcattgtttgccggtattgccgccatttttctgaatcccgtttctatcgcggtttctgcattggtaacgagtatcctgataatgggatcatggtggctttattttcgcgccaactggcacggtcaggggcagaccttggcgatgaggacatggaaaatcggcttgtgcgaccttaacggcatacagccgtctttgtacctgttgcgcctgcgctttatttgggcgtgcatattcatcgtcttcattcctatgcttgcttatgccggattgcgccacttcctcggcattccgcccaagggcgcggccggcgcggcattgatttggctgattttaccgtgggggttcgcactgctgaatcccgaccggcagtttctgtatgattttcttgcaggaacaagattggtggcggtcaaaggaaagccttaa

SEQ ID NO: 45720 - DNA, 246 bp, Neisseria meningitidis
atgtgtgcttcccgcgatgtcagcaaaagcgccaaaggttggagtgtcggtatcggtctgaatgtaggcaaacagttgaccgacagcgtcggtctcgagtttgatccatactaccgtcacaaaacaatctacaaaccccgtgagattgtcttggacggtgacaaaaccaaaatgggccgctccaaatccaacgagtacggcttccgcgtagccgcaacgttctatagtcaattaaaatcaaaatag

SEQ ID NO: 45721 - DNA, 2589 bp, Neisseria meningitidis
atgaaaaatcaatatagtaaatcattgcatggcgtgttttaccttgccttctatgataaaatacacgcattttttgcagagcagttgtttcaactcatcataaatatgaacaaaaaacccacctacatcagtttatttagcagtgcaggcgttggttgctatggttttaaaaccaatggttttgaatgcgtagcaaccaacgaacttttagaaaaacgcctaaaaatccaaaaatataatcaaaaatgccgctttgattcaggttatattgccggcgatattaccctgcctgaaacccaagccaaattgtttgccgaaattcgacgctggaatactgaaattgatgttgtgattgccacaccgccttgccaaggaatgtcggttgccaaccataaaaaaaataatgaaatggcaagaaattctttggtcgtggaatcaatcaaaatcgttcgggaagttcagcccaagttttttatttttgaaaacgtcaaagcctttttaaaaacaccctgcaccgataccgattatcaagaaaagccgattgaggaagccatttggtcaaatttgggcggacattacaacattctatccaatgtactaaattttaaagattatggtgcaaattccagtcgtaccagaacgctggtgattggcgtgcgaaaagatattcatcacattacgccgtacgatattttccccaagcaaacaccgccaaaaaccttgcgtacattgctggctgatctgccgcctttaatgcaaatgggcgaaattagcgatgatgatatttaccatagctatcgtgaatttgatcgccgtatgttgccgtggattgcacagcttaaagaaggcgagtcagctttccaaaatactgattctgcacgcattccccatcaaattaaaaatggtgaaattatctacaatcaaaacaaaaatggagacaaatacgcccgttggtttttagatcgtgagggtccgtgcatccatacccgtaatgacattttagccagccaaaacaccatccatcccactgaaaaccgtgtattttccgtgcgtgaactcatgcgtatgatgtcaattccgccatcatttaaatggacggcacaagatgaaaaacagcttaatgcactgtcatttgatgagaaaaaaacctttttgaaaaaagaagagctgaatatccgccattgtatcggtgaatctgtgccaaccgctgttttggccaatgtcgcacaaaacattcaggcagccttgcaacagtccgaactgtcaatgacggaaattcaaaatttaatcaaacgagaaaatttatcccttgccgataatctctaccgatttattgagcaacattttgacgcatatccattcagtcggcttttgcaaattgctgaatacgctaatgctgcccgtagcgaaacggctgcttattttacccgtattgatattgctttcggactggttaatgctcttcctgatttcaaaaagaaaaaaaacttacggattttagaaccctctgtcggcattggtaatttcattccactactggcaaaaaaatatgcagacaaagaaaaagttatttttgatttggtggatattgactcaaacagtttaaatctcctgtcattgctgctgaaaaaattaaatttaggcagtaaatttgagttcaatattattcatcaggattttttaaccgcaacgctgcctgaaaactatgatctagtcatcggcaatccaccatacggcaaagttaaggcaagtgataaaaatttggcactataccgtaaaaatgctaccaataaagatacgcaaaatattttttcattttttattgataaggctctgacgctcagtaaaaccgtggctttggttgttcccaaaagtgtgattaacgcccccgagtttcaaataacccgacaacaacttatcacagccaatatcaaccgcattattgattacggcgagaaagcatttaaaggcgtaaaaatagagacgattgcctttattgccgatcaaaccgacaaagacaatcaacatattacgatagaaagccatatccaagaaacgttgatacaaaactgtaaaaactattttttttctgataattttccctattggttgatttatcgtaatagtgaatttgatcaaattgcacaaaaattggaatttaatgtatttcaatcattccgagatcgccaaattaccaaagcgcatacacagaatagtggcaatgttcgggttttaaaatcccgtaatatcggtaacaacgagattattgatattgagggttatgatagttatgtggattcagttgcccctttttctgtcggcaaatttattaaccgtaaaaatgtcgtgatgattcccaatctgacttacaaacctcgggcagcatttttgcctgaaaacagtattgctgatggctcggttgccctactgacaatgaaaaaacacgaaaaaatcctaacccaacgagatctcgcatactatgcaactcccgaatttgagcagttttaccgtgttgcccgtaattatggttctcgttcaatgaatatagacaatcattctgtgttttttttcggattgctaaaagattag

SEQ ID NO: 45722 - DNA, 384 bp, Neisseria meningitidis; identical to SEQ ID NO: 38550

SEQ ID NO: 45723 - DNA, 327 bp, Neisseria meningitidis
atgaacatcaaacaccttctcttgaccgccgccgcaaccgcactgatgggcatttccgcccccgcactcgcccaccacgacggacacggcgatgacgaccacggacacgccgcacaccaacacagcaaacaagacaaaatcatcagccgcgcccaagccgaaaaagcagcgttggcgcgtgtcggcggcaaaatcaccgacatcgatctcgaacacgacaacggccgtccgcactatgatgtcgaaatcgtcaaaaacggacaggaatacaaagtcgttgtcgatgcccgtaccggccgcgtgatttcctcccgccgcgacgactga

SEQ ID NO: 45724 - DNA, 1101 bp, Neisseria meningitidis
atgacccgtatcgccatcctcggcggcggcctctcgggaaggctgaccgcactgcagcttgcagaacaaggttatcagattgcacttttcgataaaggctgccgccggggcgaacacgccgccgcctatgttgccgccgccatgctcgcgcctgcggcggaagcggtcgaagccacgcccgaagtggtcaggctgggcaggcagagcatcccgctttggcgcggcatccgatgccgtctgaacacgcacacgatgatgcaggaaaacggcagcctgattgtgtggcacggacaggacaagccattatccagcgagttcgtccgccatctcaaacgcggcggcgtagcggatgacgaaatcgtccgttggcgcgccgacgacatcgccgaacgcgaaccgcaactcggcggacgtttttcagacggcatctacctgccgaccgaaggccagctcgacgggcggcaaatattgtctgcacttgccgacgctttggacgaactgaacgtcccttgccattgggaacacgaatgtgcccccgaagacctgcaagcccaatacgactggctgatcgactgccgcggctacggcgcaaaaaccgcgtggaatgcttctgccgaacacggcagcaccctgcgcggcatacgcggcgaagtggcgcgggtttacacacccgaaatcacgctcaaccgccccgtgcgtctgctccatccgcgttatccgctctacatcgccccgaaagaaaaccacgtcttcgtcgtcggcgcgacccaaatcgaaagcgaaagccaagcccctgccagcgtgcgttccgggctggaactcttatccgcactctatgccgtccatcctgccttcggcgaagccgacatcctcgaaatcgctaccggcctgcgccccacgctcaaccaccacaaccccgaaatccgttacagcctcgcccgacgcctgattgaaatcaacggccttttccgccacggcttcatgatttcccccgccgtaaccgccgccgccgtcagattggcagtggcactggttgacggaaaagacgcgcccgaacgtgatgaagaaagcggtttggcgtatatccgaagacaagattaa

SEQ ID NO: 45725 - DNA, 225 bp, Neisseria meningitidis
ttgcagaaattctatgtgattgattttctttctttaaagtctatttttttaaataaatttgcgttaaaatatagtggattaaatttaaatcaggacaaagcgacgaagccgcagacagtacagatagtacggcaaggcgaggcaacgccgtactggtttaaatttaatccactatacagaaaatttatccaatggattgaccgtgaagaaaataaggtcgtctga

SEQ ID NO: 45726 - DNA, 489 bp, Neisseria meningitidis; identical to SEQ ID NO: 39373

SEQ ID NO: 45727 - DNA, 1083 bp, Neisseria meningitidis
atgaaaaaatccctgattgccctgacactggctgccctgcctgttgcagcaatggctgacgttaccttgtacggtacaattaaagcaggcgtagaagtttctcgcgtaaaagatgctggtacatataaagctcaaggcggaaaatctaaaactgcaacccaaattgccgacttcggttctaaaatcggtttcaaaggtcaagaagacctcggcaacggcatgaaagccatttggcagttggaacaaaaagcctccatcgccggcactaacagcggctggggtaaccgccagtccttcatcggcttgaaaggcggcttcggtaccgtccgcgccggtaatctgaacaccgtattgaaagacagcggcgacaacgtcaatgcatgggaatctggttctaacaccgaagatgtactgggactgggtactatcggtcgtgtagaaagccgtgaaatctccgtacgctacgactctcccgtatttgcaggcttcagcggcagcgtacaatacgttccgcgcgataatgcgaatgatgtggataaatacaaacatacgaagtccagccgtgagtcttaccacgccggtctgaaatacgaaaatgccggtttcttcggtcaatacgcaggttcttttgccaaatatgctgatttgaacactgatgcagaacgtgttgcagtaaatactgcaaatgcccatcctgttaaggattaccaagtacaccgcgtagttgccggttacgatgccaatgacctgtacgtttctgttgccggtcagtatgaagctgctaaaaacaacgaggttggttctaccaagggtaaaaaacacgagcaaactcaagttgccgctactgccgcttaccgttttggcaacgtaacgcctcgcgtttcttacgcccacggcttcaaagctaaagtgaatggcgtgaaagacgcaaattaccaatacgaccaagttatcgttggtgccgactacgacttctccaaacgcacttccgctctggtttctgccggttggttgaaacaaggtaaaggcgcgggaaaagtcgaacaaactgccagcatggttggtctgcgtcacaaattctaa

SEQ ID NO: 45728 - DNA, 1095 bp, Neisseria meningitidis; identical to SEQ ID NO: 38108

SEQ ID NO: 45729 - DNA, 966 bp, Neisseria meningitidis
atgaaccttaataaactgaaaaacaaactgttccgccgcccggggcagcgtgtggtgattgccgtaccgtatatttggcttttggtgctgtttctgattccgttcgccatcgtgctgaaaatcagctttgccgaacaagaaatcgccattccgccgtttacgccgctgaccagcatcgacgaagatttaggtcgtctgaatatcaccatcagttatcaaaactatgccgatattttccaaaatttttggcatacccttaacccgttcggcgacagtgaaaacagcaatatctatctgatgacctactggtcttcaatcaaaaccgcattgatgacgacagtgatttgcctgttggtcggttatccgaccgcctatgcgatttctcgtgccaatccttctgtccgcaatggtttgctgcttgccattatgctgcccttttggacatcgttcctgttgcgcgtctatgcgtggatgggtctgctcgggcataacggtattgtaaacaacctgttgattaaaatgggtattatcagcgagcctttggatttgttctacaatgccttttcgctcaatttggtgatggtttacgcctatctgccgtttatgattctgccgctatacacgcaactggtgaaactcgacaaccgcctgcttgaagcggcttccgatttgggcgcggggccggtcaaatcgttcttgacgattaccctgcctttgtcgaaaaccggcattattgcaggctccatgctggttttcgtccctgctgtcggcgagttcgtcattcccgagctggtcggcggttcggaaaacctgatgattggtaaagtcttgtggcaggcgttcttcgatcaaaacaactggccgctggcttccgccgtcgccgtcgtgatggtcgcgctgctggtcgtgccgattgccctgtttcagcattatgaaaaccgcgaattggaagaaggagccaaataa

SEQ ID NO: 45730 - DNA, 495 bp, Neisseria meningitidis
atggaaaatagatttaaaaaaatcgttaaggatattcttagttttgcccaatttgtttccgaagcggaaaataaaattcctaaccaatcctctcgttattacgattgctggtgggaattggaaatcttgaatgcttccgcattggaagattgggaaatatcgggaaagcctgaaaaatgggagaaatggacagaaaaatatcagaccgaagcgttacagtcagtcaagcatctatttgccgaagaagttcctgaaaataatatagtttgcgatatttctcattttttgcattttgccgattgggcagaagccgacattcccaatcaatcacgtttatatgccgaatattggtgggaaatggaaatgttcaaaatgtcggttttagaagattgggaacgctcgggaaaaccgttagattggaaaaaatggcaaaggcaatatcgatctgaagcatttgaattagttaaaaaattgaaccgaagcaaacaagagtaa

SEQ ID NO: 45731 - DNA, 5490 bp, Neisseria meningitidis
atgaatgagggtgaagttgttttaacaccagaacaaatccaaaccttgcgtggttatgcttcccgtggcgatacctatggcggttggcgttatttggctaatttgggtgaccgttatgcggatgatgctgctgcaattgtcggtaaggatgcaaacttaaatggtttgaatttatggatgaaaaaaggtgtggaaaacctatgggatgatacggtcggtaaaaagacccgtttagagaaatttgatcgggttgcactgcaacatttcaggcaatatgcgcgtctaattaatcaaaataatggtagattacccaatactagtgaaattgagagaagttactataaagccgttaccgataatggcgtttcttccagtgcagctattgatttagttattaatcgttcacttccggatatggcggatggttattgggcattaggtttggggatagaagccgaacgtatccacaatgagcaagcagtaaataatccgaacggtagcgaaagggataatagaaagcagttaatatctgctttagataaaggatttgatggatcttttaaagagaagcattttacttttttacaatctgtgatgatggatctaacaaagttaggtgttgaatatacaatagatggttggcaaaaaattggaggttggggtaatgggataatcaatgatttatataaaagtgttgtaaaaagagagtggactggaatatttgagatcgttaataataacatcaagcaaggaaatgaagcttttaaaaatgaaatcaatagcttggttcatgatatgaaagctgctggcaaggaatttggagatgacttaaatacacagtggaataatctcactcaggctgccgaaataatctataatgacatagtagacaatactagtcaaggaatagaaaaaggtgtcaaagccattaaagaattgtctgaaaaaatgaaaaatgctgcttccgatttggctgacggttcagcagagaaagctaaacaagtagtggaagatttggctcaagccgccaaagaagcatacgaaaatgccaaatccacagccgagaaggctgctcaagcagctcgagaattttttaagggcttgcccagttttaaagatctggccgaaaaatttagagatctgttcccaaatccggaaggctggatcgatgatggtcaccaatgtttagctccttgggttaaagaaactaaaaaacgcaatggcaaatatcatgtctacgacccccttgccctagacctagatggcgacggtatagaaaccattgccaccaaaggctttgcaggtgcattgttcgaccaccgcaatcaaggcatccgcaccgccaccggttgggttgctgccgatgacggtctgcttgtgcgcgatttgaacggcaacggcatcatcgacaacggcgcggaactcttcggcgacaacaccaaactggcagacggttcttttgccaaacacggctacgcggctttggccgaattggattcaaacggcgacaacatcatcaacgcggcagacgccgcattccaaaccctgcgtgtatggcaggatctcaatcaggacggcatttcccaagctaatgaattgcgtacccttgaagaattgggtatccaatctttggatctcgcctataaagatgtaaataaaaatctcggtaacggtaacactttggctcagcaaggcagctataccaaaacagacggtacaaccgcaaaaatgggggatttacttttagcagccgacaatctgcacagccgcttcaaagacaaagtggaactcactgccgaacaggcaaaagccgccaatcttgcgggcattggtcgtctgcgcgatttgcgcgaagctgccgcattgtccggcgatttggccaatatgctgaaagcttattctgccgccgaaactaaagaagcacagttggcattgttagataatttgattcacaaatgggcggaaaccgattcgaactggggcaaaaaatcgccaatgcgactttcaaccgattggacgcaaacggctaacgggggtgtggctcttaccccgtctcaagtaacgcgactaaaacagaacgctttagtttctctttccgacaaagccaaagcagctatcgatgccgcccgcgaccgcattgccgtgcttgatgcctacacggggcaggattccagcacactctattacatgagcgaagaagacgcgcttaatatcgtcaaagtaaccaacgatacatacgaccatctcgccaaaaacatctaccaaaacctgttgttccaaacccgtttgcagccatatttgaatcaaatcagtttcaaaatggaaaatgatacgttcactttggattttagtggtcttgttcaagcatttaaccatgtcaaagaaactaatccgcaaaaagcttttgtggatttggccgagatgcttgcatatggcgaacttcgttcttggtatgaaggtcgaagactaatggccgattatgtggaggaggcaaaaaaagcaggtaaatttgaagattaccagaaagtgttgggtcaggagaccgttgcattattagctaaaacatcgggtacgcaagcagatgatatcctgcaaaatgtaggctttggtcataataaaaatgtttctttatatggtaatgacggcaacgacactctaatcggcggcgccggtaatgactatttggagggcggcagcggttcggatacttatgtcttcggcaaaggcttcggtcaggatacggtctataattacgactacgctaccggacgcaaagacatcatccgctttaccgacggtattacagccgatatgctgacttttacccgagagggcaaccatcttcttatcaaggcaaaagacggcagtggacaagtgactgttcagtcctatttccagaacgatggctcaggtgcttaccgtatcgatgagattcatttcgataacggcaaagtactggatgttgccactgtcaaagaactggtacagcaatccaccgacggttcggacagattgtatgcctaccaatccggaagtaccttaaacggcggattgggcgatgactatctgtacggtgccgacggggatgacctgctgaatggtgatgcaggcaacgacagtatctacagtggcaatggcaatgatacgctcaatggaggagaaggcaacgacgccctgtacggctataatggtaacgatgtactgaatggtggcgaaggcaatgatcatttgaacggcgaagacggtaacgacactctaatcggcggtgcaggcaatgattacttggagggcggcagcggttcggatacttatgtcttcggcaaaggcttcggtcaggatacggtctataattacgactacgctaccggacgcaaagacatcatccgctttaccgacggtattacagccgatatgctgacttttacccgagagggcaaccatcttcttatcaaggcaaaagacggcagtggacaagtgactgttcagtcctatttccagaacgatggctcaggtgcttaccgtatcgatgagattcatttcgataacggcaaagtactggatgttgccactgtcaaagaactggtacagcaatccaccgacggttcggacagattgtatgcctaccaatccggaagtaccttaaacggcggattgggcgatgactatctgtacggtgccgacggggatgacctgctgaatggtgatgcaggcaacgacagtatctacagtggcaatggcaatgatacgctcaatggaggagaaggcaacgacgccctgtacggctataatggtaacgatgtactgaatggtggcgaaggcaatgatcatttgaacggcgaagacggtaacgacactctaatcggcggtgcaggcaatgattacttggagggcggcagcggttcggatacttatgtcttcggcaaaggcttcggtcaggatacggtctataattacgactacgctaccggacgcaaagacatcatccgctttaccgacggtattacagccgatatgctgacttttacccgagagggcaaccatcttcttatcaaggcaaaagacggcagtggacaagtgactgttcagtcctatttccagaacgatggctcaggtgcttaccgtatcgatgagattcatttcgataacggcaaagtactggatgttgccactgtcaaaaaactggtacagcaatccaccgacggttcggacagattgtatgcctaccaatccggaagtaccttaaatggcggattgggcgatgactatctgtacggtgccgacgggaatgacctgctgaatggtgatgcaggcaacgacagtatctacagtggcaatggcaatgatacgctcaatggaggagaaggcaacgacgccctgtacggctataatggtaacgatgtactgaatggtggcgaaggcaatgatcatttgaacggcgaagacggtaacgacactctgatcggcggtgcaggcaatgattacttggagggcagcagcggttcggatacttatgtcttcggcgaaggcttcggtcaggatacggtctataattacgactacgctaccggacgcaaagacatcatccgctttaccgacggtattacagccgatatgctgacttttacccgagagggcaaccatcttcttatcaaggcaaaagacggcagtggacaagtgactgttcagtcctatttccagaacgatggctcaggtgcttaccgtatcgatgagattcatttcgataacggcaaagtactggatgttgccactgtcaaaaaactggtacagcaatccaccgacggttcggacagattgtatgcctaccaatccggaagtaccttaaacggcggattgggcgatgactatctgtacggtgccgacggggatgacctgctgaatggtgatgcaggcaacgacagtatctacagtggcaatggcaatgatacgctcgatggaggagaaggcaacgacgccctgtacggctataatggtaacgatgtactgaatggtggcgaaggcaatgatcatttgaacggcgaagacggtaacgacactctgatcggcggtgccggtaatgattacttggagggcggcagcggttcggatacttatgtcttcggcaaaggcttcggtcaggatacggtctataattaccatgtggataaaaactctgacactatgcactttaaaggatttaaagcagcagatgttcattttatccgttccggaagtgatttggtgcttagcgcttctgaacaagacaacgtacgtatttccggattcttctatggtgaaaaccatcgtgtagatacatttgtctttgatgatgcagctatcagtaatccagattttgccaagtatattaatgctggcaataatttggtacagtctatgtctgtgttcggttctaatactgcggcgacaggaggaaatgtggatgccaatacacaatccgtacagcagccgttattggtaacgccatctgcataa

SEQ ID NO: 45732 - DNA, 1635 bp, Neisseria meningitidis
atgataaaaccgaacctgaggccgaagctcggctcttccgcgctgattgccttcctttccctgtattcctcgctggtattgaattacgccttttttgccaaagttgtcgagcttcatccttttaacggcaccggggcggatatcttcctctatacgatgccggtggtgctgttttttttaagtaatttcgtttttcacgtcattgccttgcctttcgtgcataaggtattgattccgttgatattggttatcagtgcggcggtgtcttaccaagaaatatttttcaatatctatttcaacaagtcgatgttgaataatgtcttgcaaaccacggcggcggaaagcgcgcgcctgattacgccgggctatgtgctgtggattgtatgtttgggcgtattgcccgcgctggcgtatatcgccgtcaaggttaaataccgcgtttggtataaggagcttttgacgcgccttgtgcttgccgccgtttcctttttgtgcgcgttgggcatcgcaatgttgcaatatcaggattacgcctcgtttttccgcaacaataaatcagtaacccatctgattgtgccgtctaatttcatcggcgcgggcgtgtcgaaatacaaagattggaagcgttccaatattccttatacgcaattggatatggcggtcgtgcaaaaccgcccggtcggcagcctgcgccgtttcgtggtgctggtcgtgggcgagaccacgcgtgccgccaactggggtttgaacggttacagccgccaaactacgccgctgcttgccgcgcgcggcgatgaaattgtcaatttcccgcaggtcagaagctgcggcacatcgaccgcgcactccctgccgtgtatgttctcaaccttcgaccgcacggattatgacgaaatcaaagccgaacaccaagacaacctgctggacatcgtgcagcgcgccggcgtggaagttacttggttggaaaacgattccggctgcaagggcgtgtgcggcaaagtgccgaataccgacgttacctcgctcaacctgcccgaatactgccgcaacggcgagtgcctcgacaatatcctgctgactaagttcgacgaagtcctcaacaaaaacgataaagacgcggttttaatcctgcataccatcggcagccacgggccgacgtattacgaacgctataccgaagccgaacgcaaattcacgccgacctgcgacaccaacgaaatcaacaaatgcacccgcgccacgctggtcaacacttacgacaatacggttttgtatgtggaccagtttatcgacaaggttatccgcaaacttgaaaaccgcgacgatttggaaagcgtggtgcattatgtttccgaccacggcgaaagtttgggcgaaaacgggatgtacctgcacgccgcgccttacgccatcgcgccttccgggcagacgcatatcccgatggttatgtggttttccaaagccttccgccaacacgggggcatagatttccaatgcctcaaacaaaaagcggcggaaaacgaatattcgcacgaccactatttcagcacggtattggggctgatggacatttccaacagtcaaacctatcggaaggaaatggatatattggcagcctgccgccgtccgcgctga

SEQ ID NO: 45733 - DNA, 465 bp, Neisseria meningitidis
atgattgagatgagtaaagattaccgaaacgatttgtacgatgtatatgtttcctacccgcccaaagtggattgcgggcttatccgggagtgtctcagggagaatctcggcgaagaaaaggcggaaggattgattgagtccctcgattccaaaccgcaagtgctggttgaggaaaaatgtacctgggaaaagcgggcagagttgcacgattatttcagctatttgggtttggatattattactcggagatatatggagttagaaacggtcgtgccgccggaggaaggggagggcgaaggagaaggcggggatggggaaatacccgaatatcttgaacttcatagcgaacgggaagatgatatttccgcaccttcgcaagccgaaccgccgccccgcaatatcaaaccgctggttttcgggctgctgatagcctttttgggctatctgctcggtaagattttttga

SEQ ID NO: 45734 - DNA, 2262 bp, Neisseria meningitidis; identical to SEQ ID NO: 39273

SEQ ID NO: 45735 - DNA, 384 bp, Neisseria meningitidis; identical to SEQ ID NO: 38957

SEQ ID NO: 45736 - DNA, 324 bp, Neisseria meningitidis; identical to SEQ ID NO: 37971

SEQ ID NO: 45737 - DNA, 966 bp, Neisseria meningitidis; identical to SEQ ID NO: 39761

SEQ ID NO: 45738 - DNA, 642 bp, Neisseria meningitidis; identical to SEQ ID NO: 38943

SEQ ID NO: 45739 - DNA, 1131 bp, Neisseria meningitidis; identical to SEQ ID NO: 39043

SEQ ID NO: 45740 - DNA, 669 bp, Neisseria meningitidis; identical to SEQ ID NO: 39796

SEQ ID NO: 45741 - DNA, 1494 bp, Neisseria meningitidis; identical to SEQ ID NO: 40700

SEQ ID NO: 45742 - DNA, 381 bp, Neisseria meningitidis
gtgcagcccagtcaaattaccgaaaccgtcgttgatatggtggacaagatgtttgacgaaattgcgacctgccatgagcgcatcaggccgatggcggtgttggcagacggtattgcaggaagtattgtcaaacttgcgccaaacgaaattccgcttatttttgggaattcgtcgtttggaagctatctgaaaagtaaaacccgtgatgaagtgtttaaagtgttgaagcaaagcaaggttaataatgccggtaaagtccttgaggcattttacgaaagctggttaaagtacactgcaaaagaccgccgtctgaaagtctgcatcgtaaccgcgcaatcccgttggcgttcgcgctttgaaatggaattgctgggaatttaa

SEQ ID NO: 45743 - DNA, 288 bp, Neisseria meningitidis; identical to SEQ ID NO: 36767

SEQ ID NO: 45744 - DNA, 186 bp, Neisseria meningitidis
gtggacgtagggtgggcttcagcccaccaatcccaccattccaccaactccgccaatcttaccggtgccggcaaaccgatgccgtctgaaggcggcggaatcggcggaggcggtgggctgaagcccaccctacagccaccccccccaaaaaaaaaacaaaaaaaaacccaatctgacaaaatctga

SEQ ID NO: 45745 - DNA, 1635 bp, Neisseria meningitidis
atggcagcaaaagacgtacaattcggcaatgaagtccgccaaaaaatggtaaacggcgtgaacattttggcaaacgccgtgcgcgtaaccttgggtcccaaaggccgcaacgtggtggttgaccgcgctttcggcggcccgcacatcaccaaagacggcgtaaccgtcgccaaagaaatcgaactgaaagacaagtttgaaaatatgggcgcgcaaatggtgaaagaagtcgcgtccaaaaccaacgacgtggcgggcgacggtacgactaccgccaccgtattggcgcaatccatcgttgccgaaggtatgaaatacgttaccgccggtatgaacccgaccgacctgaaacgcggtatcgacaaagccgtcgccgctttggttgaagagctgaaaaacatcgccaaaccttgcgacacttctaaagaaatcgcccaagtcggctctatttccgccaactctgacgaacaagtcggcgcgattattgccgaagcgatggaaaaagtcggcaaagaaggcgtgattaccgttgaagacggcaaatctttggaaaacgagctggacgtggttgaaggtatgcaattcgaccgcggctacctgtctccttacttcatcaacgatgcggaaaaacaaatcgccggcttggacaatccgtttgtattgctgttcgacaaaaaaatcagcaatatccgcgacctgctgcctgttttggaacaagtggccaaagccagccgtccgctgttgattatcgctgaagacgtagaaggcgaagccttggcgactttggtcgtgaacaacatccgcggcattctgaaaaccgttgccgttaaagctccgggcttcggcgaccgccgcaaagcgatgctgcaagacatcgctatcctgaccggcggcacagtgatttccgaagaagtcggcctgtctttggaaaaagcgactttggacgacttgggtcaggccaaacgcatcgaaatcggtaaagaaaacaccaccatcatcgacggcttcggcgacgcagcccaaatcgaagcgcgtgttgccgaaatccgccaacaaatcgaaaccgcaaccagcgattacgacaaagaaaaactgcaagagcgcgttgccaaactggcaggcggcgtggcagtaatcaaagtcggtgccgcgaccgaagtggaaatgaaagagaaaaaagaccgcgtggaagacgcgctgcacgctacccgcgcagccgttgaagaaggcgtggttgcaggcggcggcgtagccctgttgcgcgcccgtgccgctctggaaaacctgcacaccggcaatgcagaccaagacgcaggcgtacaaatcgtcttgcgcgccgttgagtctccgctgcgccaaatcgttgccaacgcaggcggcgaacccagcgtggttgtgaacaaagtgttggaaggcaaaggcaactatggttacaacgctggcagcggcgaatacggcgacatgatcgaaatgggcgtactcgaccccgccaaagtaacccgttccgcgctgcaacacgccgcgtctatcgccggcctgatgctgaccacagactgcatgattgctgaaatccctgaagacaaaccggctatgcctgatatgggcggcatgggtggtatgggcggcatgatgtaa

SEQ ID NO: 45746 - DNA, 1149 bp, Neisseria meningitidis; identical to SEQ ID NO: 39038

SEQ ID NO: 45747 - DNA, 1314 bp, Neisseria meningitidis; identical to SEQ ID NO: 41251

SEQ ID NO: 45748 - DNA, 330 bp, Neisseria meningitidis
  misc_feature 311, 312, 313, 314, 315: 'n' is a, c, g or t
atgctttcacaatcccaatggctggatgccgtcaaagggcggttacgggtgcgttccgattacgcgctttccaaaagatgggcggttacgccgtccgaggtgtcccaatatcggcgcaaccggttgcggtttccttttgccgtcgtcttggatattgccgacgtgatggatatagatccgattgaaattattgcaggtttggaatataggcggtgcagggaaaaggacatggagcgcgtcaaaggggcgtatttcaaagcccattgcgcgcattttgtctatccgaacaatccgggctttttccgccgtannnnncacacacttaattaa

SEQ ID NO: 45749 - DNA, 807 bp, Neisseria meningitidis
atgaacaccattttcaaaatcagcgcactgaccctttccgccgctttggcactttccgcctgtggcaaaaaagaagccgcatccgaacctgccgccgcttctgccgcgcagggcgacacctcttcgatcggcagcacgatgcagcaggcaagctatgcgatgggcgtggacatcggacgctccctgaagcaaatgaaggaacagggtgcggaaatcgatttgaaagtctttaccgaagccatgcaggcagtgtatgacggcaaagaaatcaaaatgactgaagagcaggctcaggaagtcatgatgaaattccttcaggaacaacaggctaaagccgtagaaaaacacaaggcggacgcgaaggccaataaagaaaaaggcgaagcctttctgaaagaaaatgccgccaaagacggcgtgaagaccactgcttccggcctgcaatacaaaatcaccaaacagggtgaaggcaaacagccgtccaaagacgacatcgttaccgtggaatacgaaggccgcctgattgacggtacggtattcgacagcagcaaagccaacggcggcccggtcaccttccctttgagccaagtgattccgggttggaccgaaggcgtacagcttctgaaagaaggcggcgaagccacgttctacatcccgtccaaccttgcctaccgcgaacagggtgcgggcgacaaaatcggcccgaacgccactttggtatttgatgtgaaactggtcaaaatcggcgcacccgaaaacgcgcccgccaagcagccggctcaagtcgacatcaaaaaagtaaattaa

SEQ ID NO: 45750 - DNA, 1407 bp, Neisseria meningitidis
gtggaatttagcacaaaaaccgaaatcttgcaggaacagcaggcaggcgcacagttatttgtctgcaccgaagaggcgcaattaaaccatccgaccgcccttgcccttttgtcttcgcttgaagaaggtcaaaattttgccgacacaaaaatcccgacaggcaacggtttgcaggctgttgccgtatgctgtctgaaaagcaccggccgcgccgcattgaacaaggccgccgccgaagccgccaaatgggcgcaaaatcaggaaacggtcaatgtggacatccatgccttcgatgaagcgcaagccgccgccgtagccgaagcgtttgcgattgcgttcggcaacgccgcctaccgtttcgaccgctacaaaaaagaagccaagcccgccaaatttgaaaccgccgtgttccacagcgcacacgaagccgtcgttaaagaagccttgcgcgtcgccgaagcgcaagtttacggacaaagcctctgccgcgacttgggcaacgccgcgcccaacgaatgcacgcccgaatttttagcgcgcaccgccaaagccgaagccgaaaaactgggcgcgcacgccaaaatcatcgaaaaagactacatcaaagaaaacatgggttcgttttggtcggtcgccaaaggcagtgtcgaagatccctatttggtcgaactgagctatttcggtgcggcggacaaagaagccgcgcctgtggtattggtcggcaaaggcattaccttcgacaccggcggcatttccctcaaacccggcctgaacatggacgaaatgaagtttgatatgtgcggcgcggcaaccgtcatcagcaccttctgcgccgccgtcaaactgcaactgccgattaacctgattgccgtcgtcgccacttgtgaaaatatgccttccggcgcggcaaacaaaccgggcgatgtcgtgaaaagtatgaaaggtctgaccatcgaagtgttgaacaccgatgccgaaggccgtctgattttgtgcgacgcgctcacttacgccgaacagttcaaacccaaagccgtcatcgacgtcgccaccctgaccggcgcgtgtattgtcgccttggggcacgatgtcagcggcgtgatgggcaacaatcaagatttggtcgacagcctgcttgccgcttcctacaacgtggacgacaaagcgtggcaactgccgctctttgaaacctacaaagaccagctcaaatccaactttgccgacatccccaatatcggcacgcccggcgcgggcacgattaccgccgcaacattcctgtcttacttcaccgaaggctacccgtgggcgcaccttgacatcgcgggtacggcgtggaaatccggagcggaaaaaggtgcgactggccgtcccgttcccttgctgctgaactatctgcggaatctttaa

SEQ ID NO: 45751 - DNA, 681 bp, Neisseria meningitidis; identical to SEQ ID NO: 42970

SEQ ID NO: 45752 - DNA, 306 bp, Neisseria meningitidis
atgattaccttgacgcattatctggtattgggtgcgctcctgttcggtatcagcgcgatgggtatcttcatgaaccgcaaaaacgtgctggtattgttgatgtccattgagctgatgcttttggcggtgaacttcaactttatcgccttttcgcaacatttgggcgatactgccggacaaattttcgtatttttcgtactgaccgttgctgctgccgaatctgccatcggtttggcaattatggtgctggtgtaccgcaaccgacaaacgattaacgttgccgatttggacgagttgaaagggtaa

SEQ ID NO: 45753 - DNA, 171 bp, Neisseria meningitidis; identical to SEQ ID NO: 39149

SEQ ID NO: 45754 - DNA, 1923 bp, Neisseria meningitidis
atgattgaaatcaaaaacctcaccctgcaacgcggtttgaaagtcctgctcgacaaagccaacgctaccgtcaatcccggtcagcgcgtcggtttgatcggcaaaaacggaacgggcaaatcgagcctgtttgccttaatcaagggtaaaatcactcaggacggcggcgatgtctcgattccgaaaaactggcggctcgcttccgtttcccaagaaacgcccgatttggatatttccgctttggattacgttttgcagggcgatgccgagttgcaggcttttcagacggcattgaggcaggcggaagcgcaaaatgacggcatgaagcaggcggaatatcatgccaaattggaagaaatcgacgcttataccgcgccggcccgcgcggcaaaattgttgaacgggctgggtttttcgcaagaagaacacagccgccccgtcaaatccttttccggcggctggcgtatgcgcttgaatcttgcgcaagccctgatttgccgcgccgatttgctcttgcttgacgaaccgaccaaccacttggatttagaaaccgtcttgtggctggaaaaccaccttgcctctttaccctgcacgcaaatcatcatttcccacgaccgcgattttctcaacgcggcaactacccaaaccattgaattatcgcagcaaaaactcacgcaatacggcggcaattacgatttttaccaaaacgaacgcgcgcagcgtctcgcgcaacaacaagctgcctatgtcaaacagcaggcgcaaatcaaacatctgcaatcctttatcgaccgcttcaaagccaaagccaccaaagccgttcaagcgcaaagccgcatgaaggctttggcaaagctagaacgcgttgcgcccgcgcatctggacagcgagttttcctttgagttttaccatcccgaccatctgcccaatcctttgttaaagctagaacacgctgatttgggttacgaaggcaaaaccgttctgcatgacattaccctgtcgctggaaagcggcgcacgctacgggctattgggtgtcaacggcagcggtaaatctacctttatcaaagccttggcgggcaaaatcgatttgctttccggcagcatcgtccgttccgaaaaactcaatatcggctattttgcccaacaccaactcgacaccatccgcgccgaccaaaaccctgtttggcatattcagcagctttctcccaaagtacgcgaacaagaaatccgaaatttcctcggcggcttcaattttgttggcgatatggcgttacagaaaaccgaacctttttccggcggagaaaaagcccgccttgcccttgccatgattatctggcaaaagccgaacctgttgctgcttgacgaaccaaccaaccatctggacttggatatgcgccacgccctgacgctcgctctgcaaagtttccaaggcgccttaatcatcgtatcgcacgaccgcagcctgcttgaagcgactaccgacagcttcctcctgatcgacaaaggccgtctgaagaacttcgacggcgatttgaacgattaccgccaatggcgtttggcacaggaaaacgccgccgccgcacccgcagcatccgcacaaagccaaagccgcaaagacaccaagcgcatcgaagcgcaaatccgtcaggaaaaagcccgacgcggcaagccgatacagcagaaaatagaccgtgccgaaaaagaaatggcgcagctttccgaaattcagacggcatgtgaagcatttttagcacaagaagacgcttaccttgaagcaaacaaagaaaaattgcaaaataccttatcccagctggcaaaagtcaaaacacaacttgcccaaatcgaagaggtttggctggcttgtcaagaagaattggaacggattgaaactgaaatcgagaaacagtttgccgagcgataa

SEQ ID NO: 45755 - DNA, 1155 bp, Neisseria meningitidis
atgaaatttaccaagcaccccgtctgggcaatggcgttccgcccattttattcgctggcggctctgtacggcgcattgtccgtattgctgtggggtttcggctacacgggaacgcacgagctgtccggtttctattggcacgcgcatgagatgatttggggttatgccggactggtcgtcatcgccttcctgctgaccgccgtcgccacttggacggggcagccgcccacgcggggcggcgttctggtcggcttgactatcttttggctggctgcgcggattgccgcctttatcccgggttggggtgcgtcggcaagcggcatactcggtacgctgtttttctggtacggcgcggtgtgcatggctttgcccgttatccgttcacagaatcaacgcaactatgttgccgtgttcgcgctgttcgtcttgggcggcacgcatgcggcgttccacgtccagctgcacaacggcaacctaggcggactcttgagcggattgcagtcgggcttggtgatggtgtcgggttttatcggtctgattggtacgcggattatttcgttttttacgtccaaacggttgaatgtgccgcagattcccagtccgaaatgggtggcgcaggcttcgctgtggctgcccatgctgaccgccatgctgatggcgcacggcgtgatgccttggctgtcggcggctttcgcgtttgcggcaggtgtgatttttaccgtgcaggtgtaccgctggtggtataaacccgtgttgaaagagccgatgctgtggattctgtttgccggctatctgtttaccggattggggctgattgcggtcggcgcgtcttatttcaaacccgctttcctcaatctgggtgtgcatctgatcggggtcggcggtatcggcgtgctgactttgggcatgatggcgcgtaccgcgctcggtcatacgggcaatccgatttatccgccgcccaaagccgttcccgttgcgttttggctgatgatggcggcaaccgccgtccgtatggttgccgtattttcttccggcactgcctacacgcacagcatacgcacctcttcggttttgtttgcactcgcgcttttggtgtatgcgtggaagtatattccttggctgattcgtccgcgttcggacggcaggcccggttga

SEQ ID NO: 45756 - DNA, 570 bp, Neisseria meningitidis
ttgtactgtctgcggcttcgtcgccttgtcctgatttttgttaatccactatatctgcatcagtttcatgaaacgcaagtcggaagcgtcaaacaactgattgcccattttgaccggctgattgacgaattggacaaacaaatcgacgaccacacccacacgcattttgacggcaaagcccaagtggcggagcaaatcaaaggcatcggttcgataacgacggctacgctgatggcgatgctgcccgaattggggcggctgtcgcacaaacggatagcgagtttggccggcattgccccgcacccgagggagagcggggaaaccaaattcaaaagccgctgctttggcggaaggtctgcggtgcttaaggcactgtatatggctaccgtggcagcgacacgttttgaaccgcttattcgggatttctaccaacgcctgccgtccgagggtaagccgtataaggttgccgttacggcatgtatgcgcaaactgctgacgatatcgaatgcccggatgcgtgattattttgccgaaaacgataccgccgaaaatggtatccaaacggcttga

SEQ ID NO: 45757 - DNA, 894 bp, Neisseria meningitidis; identical to SEQ ID NO: 36738

SEQ ID NO: 45758 - DNA, 657 bp, Neisseria meningitidis; identical to SEQ ID NO: 42491

SEQ ID NO: 45759 - DNA, 810 bp, Neisseria meningitidis
atgcccgatttttcgatgtccaatttggccgttgccttttccattacgttggctgccggtttgtttaccgtattaggcagcggcttggtgatgttttccaaaacgcctaatccgcgcgtgttgtcgtttggtttggcatttgccggcggtgcgatggtgtatgtttctctgacggagattttcagtaaatccagcgaggcgttcgctgaaatttatgataaagaccacgcgtttgcggcggcgaccatggcatttttggccggtatgggcggcattgcgctgattgaccgcctggtgccgaacccgcatgaaaccttggacgcgcaagatccgtcgtttcaagaaagcaaacgccgccatatcgcgcgagtcggcatgatggcggcgtttgcgattacggcgcacaactttcccgaaggcttggcgacattttttgccaccttggaaaatccggcggtcgggatgcctttggccttggcgattgccatccataatattccggagggcatttccatcgccgcgccggtttattttgccacccgcagccgtaagaaaacggtatgggcgtgtctactatccggcttggccgaacctttgggagcggctttgggctatttggttttgcagccgtttttgtcgcctgccgtgtttggttcggtattcggcgtgatagccggtgtgatggtgtttttggcgttggacgaactgctgccggccgccaaacgctattcagacggccacgaaaccgtttacggcctgacaacgggtatggcggtgattgccgtcagcctggtattgttccgtttttaa

SEQ ID NO: 45760 - DNA, 1098 bp, Neisseria meningitidis; identical to SEQ ID NO: 36189

SEQ ID NO: 45761 - DNA, 654 bp, Neisseria meningitidis
atgttttccgtaccgcgttcctttttgccgggcgttttcgtacttgccgcgcttgccgcctgcaaacctcaagacaacagtgcggcgcaagtcgcttcttcaagtgcatccgcgtcggctgcggaaaatgcggcaaagccgcaaacgcgcggtacggatatgcgtaaggaagacatcggcggcgatttcacgctgaccgacggcgaaggcaagcctttcagcctgagcgatttgaaaggcaaggtcgtgattctgtctttcggctttacgcactgtcccgatgtctgcccgacagagcttttgacgtacagcgacacgttgaagcagttgggcgggcaggctaaggacgtgaaagtggtgttcgtcagcatcgatccggaacgcgacacgcctgaaatcatcggcaagtatgccaaacagttcaatccggactttatcggtctgacggcaacgggcgaccaaaacctgccggtcatcaagcagcaataccgcgtggtttctgccaaagtcaatcaaaaagacgacagcgaaaactatttggtcgaccactcttccggtgcgtatctcatcgacaaaaacggtgaggttgccattttctcgccttacggaagcgagccggaaacgattgctgccgatgtaaggaccctgctctga

SEQ ID NO: 45762 - DNA, 312 bp, Neisseria meningitidis; identical to SEQ ID NO: 39058

SEQ ID NO: 45763 - DNA, 372 bp, Neisseria meningitidis
atgagaaaaccccaacgcggctacgcccgccaagaccgtgtcaaagaacaaatcatgcgcgagcttgccgaactcgtccgtaccggactgaaagacccgcgcgccggcttcattaccgtcaacgaagtcgaagttacccgcgattacagccacgccaccgtgttctacaccattttaaaccaagacgcgcgcgaaattacggaagaagtgctggaacacgcgcgcggacacctccgcagcgaattggccaaacgcatcaagctgttcaaaacgcccgaactgcatttcaaatacgacgaatctttggaacgcggtttgaacctgtccgcccttatcgaccaagtagcggcggaaaaaccggttgaagactga

SEQ ID NO: 45764 - DNA, 687 bp, Neisseria meningitidis
atgacggtgttgcaagaacgttattgtgaggtgtccgaccgtatcggaaaattggttctgcaggcgggcagggagccgcattccgtcagcctgattgccgtcagtaagactttcccttcagacggcatccgcgaagtttacgccgccggacagcgtgatttcggcgagaactatattcaggagtggtacggcaaaacggaagagttggcggatttgaccgacatcgtgtggcacgtcatcggcgatgtgcagtccaacaaaaccaaatttgtcgccgaacgcgcgcattgggtgcataccgtatgccgtctgaaaaccgccgtccggctgagcgggcaacgtccttcctcaatgccgcctttgcaggtgtgtatcgaggtgaacattgcgggcgaggcggcaaaacacggtgtcgcgcccgaagaagcggtcgtgcttgcggtcgaagtggcgaagctgccgaatatcgtcgtacgcggcttgatgtgtgttgccaaagccaacagcagtgaaacggagttgaaggtgcaatttcaaacgatgcggaaactgcttgccgacctcaatgcggctggcgttaaggcggacgtgctgtctatggggatgtcggacgatatgcctgccgccattgcgtgcggtgcaacacatgtccgtatcggcagcgcgattttcgggaaaaggggctga

SEQ ID NO: 45765 - DNA, 324 bp, Neisseria meningitidis; identical to SEQ ID NO: 38414

SEQ ID NO: 45766 - DNA, 378 bp, Neisseria meningitidis; identical to SEQ ID NO: 36770

SEQ ID NO: 45767 - DNA, 723 bp, Neisseria meningitidis
atggacaaagatttgtatgccgtattgggcgtgtcgccgcaggcgggggcggacgaaatcaaacgcgcctaccgcaagctggcgatgaaataccatcccgaccgcaatccgggtaatccgcaggcggaagaaaagttcaaagaaatccaacgggcttacgatacgctttccgacctgtcgaaacggacgcaatacgacgcgtctttcagagggcatgaggaacgcgggcggcaggaagaggcattccgccgtgaacaggcgcgcagggagcagttttaccgcgaacagatgcgccgcgaacaggcgttaagacaggcgtttgaacggcaggcctcacgttcgcgccatgcttacgaaccgtccggcggcggaagcgggcgcaactatgtcctcgccgcctacatcctgttcggtttgggtgcaatcatgctgttcatgcccatagtcggcgtgattttcgcctatatgcccatagtcggcgtgattctcgcctatatgaaacggaacagtttggacagcattgtctatgccgcacataccgaatacctgattaaaaccttttggcgcacattttggctttatattttgggtgcgctgactgcccttttgggtatcggcgtgctgattattattgcaacgaacgtctggtatttctaccgcatcatcgccggctttatccgcttcaacggcggcagggcggttgcacccgagaaatggatatag

SEQ ID NO: 45768 - DNA, 609 bp, Neisseria meningitidis; identical to SEQ ID NO: 39049

SEQ ID NO: 45769 - DNA, 1860 bp, Neisseria meningitidis
atgccagaataccgctccaaaacctccacccacggccgcaatatggcgggcgcacgtgcattgtggcgcgccaccggcgtgatggaaaccgacttcggcaagcccatcatcgccgttgccaactccttcacccaattcgtgcccggccatgtccacctgcacaatatgggccagctggttgcccgcgaaatcgaaaaggcgggcgccatcgccaaagaattcaacaccatcgccatcgacgacggcatcgctatgggacacagcggtatgctgtattccctgcccagccgcgatttgattgccgactccatcgaatatatggtcaatgcccactgcgccgacgcgctggtgtgcatttccaactgcgacaaaatcaccccgggcatgctgattgccgcgatgcgcctgaacatcccgaccatcttcgtttccggcggtccgatggaagcaggtaaagttatcggcgtggcaaacatccagcccgaacgccgtttggacttgattgacgcgatgattgaatcggcggacgacaatgtcagcaaccggcaagtcgaggaagtcgaacaaaacgcctgcccgacctgcggctcgtgttcgggtatgtttacggcaaactcgatgaactgcctgaccgaagcactcggtctgtccctacccggcaacggttcgtatttggcgacccacgtcggccgcaaagaactgttcctcgaagccggccgtatgattgtcgaaatcaccaaacgctattacgagcaaaacgatgaaaccgtgttaccgcgcagcattgccaccaaaaaagcgtttgaaaacgctatgacgatggatattgcgatgggcggcagcaccaataccattttgcacctgttggccgttgccaacgaagccggtgtcgatttcaaaatggccgacattgaccgcttaagccgcgttgtgccctgcatctgcaaaaccgcacccaacaaccacgactactatatggaagacgtgcaccgcgccggcggcattttcgccatcctgaaagaattggacaaagcgggcaagctgcacaccgacgtgcacactatccacgcaccgacgctgaaagacgcgattgaaaaatgggacataaccaaccctgaaaacacccgcgccatcgaacgcttcaaagccgcgcccggcggcgtacgcaccacccaagcgttctcgcaaaaccgtatgtggaaaaccctcgacctcgaccgcgaaaaaggctgtatccgcgacgtggcacacgcctactcgcaagacggcggtttggcggtcttgttcggcaacatcgccgagcgcggctgcgtggtaaaaaccgcaggcgtggacgagagcatcctcaaattcaccggccgcgcccgcgtgtttgaaagccaagaagacgcagtagaaggcattttgggcaaccaaatcgtcgccggcgacatcgtcatcatccgctacgaaggcccgaaaggcggcccgggcatgcaggaaatgctgtatccgacttcctacctgaaatctaaaggcctcggcaaagcctgcgctctcttaaccgacggacgcttctccggcggcacatcaggtttgtccatcggacacgcctcgcccgaagcggcggaaggtggcgcgatcggtttggtacacgaaggcgataccgtcgaaatcgacatccccaaccgcagcatccaccttgccatttccgatgaagagcttgccgcccgccgtgccgaaatggaagcgcgcggcagcaaagcgtggaaaccggaaaaccgcgaccgctacgtctccgcagccctgcgtgcttacggcgcgatggcgacttccgccgacaaaggcgcggtgcgcgacgtagcgcaaatcgaaagataa

SEQ ID NO: 45770 - DNA, 687 bp, Neisseria meningitidis
atgtttgatttcggtttgggcgagctggtttttgtcggcattatcgccctgattgtcctcggccccgaacgcctgcccgaggccgcccgcaccgccggacggctcatcggcaggctgcaacgctttgtcggcagcgtcaaacaggaatttgacacgcaaatcgaactggaagaactaaggaaggcaaagcaggaatttgaagctgccgctgctcaggttcgagacagcctcaaagaaaccggtacggatatgcagaacagtctgcacgacatttccgacggtctgaagccttgggaaaaactgcccgaacagcgcacgcctgctgatttcggtgtcgatgaaaacggcaatccctttcccgatgcggcaaacaccctatcagacggcatttccgacgttatgccgtccgaacgttccgatacttccgccgaaatccttggggacagcgggcaaaccggcagtacagccgaacccgcggaaaccgaccaagaccgcgcatggcgggaatacctgactgcttctgccgccgcacccgtcgtacagaccgtcgaagtcagctatatcgatactgctgttgaaacgcctgttccgcacaccacttccctgcgcaaacaggcaataagccgcaaacgcggtttgcgtccgaaacaccgcgccaaacctaaattgcgcgtccgtaaatcataa

SEQ ID NO: 45771 - DNA, 1467 bp, Neisseria meningitidis; identical to SEQ ID NO: 39873

SEQ ID NO: 45772 - DNA, 690 bp, Neisseria meningitidis
atgagcgtaggtttgctgaggattctggttcaaaaccaggtggttactgttgagcaggccgagcattactgcaatgagtcgcaggcgggtaaggaagtgttgccgatgctgttttcagacggtgtcatttcgcccaagtcgcttgcggcattgattgcgagggtgttcagttattcgattcttgatttgcgtcattatccgcgccacagggtgctgatgggggtgttgacggaggagcagatggtggagttccactgtgtgccggttttccgtcggggcgacaaagtattttttgcggtttccgatccgacacagatgccgcaaattcagaaaaccgtttctgccgcagggattgaggttgagttggtcattgtcgaggatgaccagttggcgggtttgctcgattgggtgggttcgcgttcgacatcgctgcttcaggagcttggggaggggcaggaggaagaggaaagccacaccctgtatatcgacaacgaggaggcagaagacggccctgttccgaggtttatccataagactttgtcggatgccttgcgcagcggggcatcggacatccatttcgagttttacgaacacaatgcccgtatccgtttccgtgtggacgggcagctccgcgaggtggttcagccgcccattgcggtaagggggcagcttgcttcccggattaagtaa

SEQ ID NO: 45773 - DNA, 621 bp, Neisseria meningitidis
atggctgtacgttccaaatcctcaaaagcgtggctgcacgaacacgtcaacgaccactacgtccatatggcgcaaaaagacggctaccgcgcccgtgccgcatacaaacttttggaaatcaacgaaaaagacaaattaatcaaacccggcacggtacttgccgacttgggcagcgcaccgggaagctggtcgcaggttgccgccaagctgacgggtacttccggagcagttttcgccttggacatcctgcctatggaagccatagggggcgtctccttcattcagggcgacttcagggaaaacgacgttttggcgcaatttgaaggcttattaaacaaccgccccttagaccttgtaatctgcgatatggcgcccaatatgtcgggaaacgccgtaagcgatcaggcgcgcagcttttatttgtgcgaactggctttggacttcgcctcgcaacacctgaaaaccggcggcagctttttggtcaaagtctttcagggtgcaggctatcaggaatacatggcagccatgcgcgaaattttcggcacggtgcagacgcgcaaacccgaagcctcgcgcaatcgctccagtgagatttatttattgggcaaaaataaacgctga

SEQ ID NO: 45774 - DNA, 693 bp, Neisseria meningitidis; identical to SEQ ID NO: 39347

SEQ ID NO: 45775 - DNA, 336 bp, Neisseria meningitidis
atgttcggaaaagccggattaggcggcctgatgaaacaggcgcagcaaatgcaggaaaatatgaaaaaagcgcaagccaaacttgccgaaaccgaaatcgaaggcgaagcaggcaacggcctggtcaaaatcacaatgacctgcgcgcacgaagtacgcaaaatcgacatcagccccgatttgattcaagaagccgccgacgacaaagaaatgctcgaagacctcatcctcgccgccctcaaatccgcccggggcaaagccgaagaaaccgcaaacaaaacaatgggcgcattcacgcaaggtctaccccccggagtgggcgacttcttccgctga

SEQ ID NO: 45776 - DNA, 222 bp, Neisseria meningitidis
atgaacttcctattgtccaaactcctgctgggactgatacggttctaccaatattgcatcagcccgctgattccgccgcgctgccgctatacgccgacctgttcgcaatacgccgtcgaagcagtcaaaaaatacggcgcattcaaaggcggccggctcgccatcaagcgcattgcacgctgccaccccctcggcggacacggacacgaccccgttccctga

SEQ ID NO: 45777 - DNA, 1602 bp, Neisseria meningitidis; identical to SEQ ID NO: 39640

SEQ ID NO: 45778 - DNA, 435 bp, Neisseria meningitidis
atgcccgcctgtttctgcccccactgcaaaacccgtctctgggtcaaagaaacccaactcaatgtcgcccaaggcttcgtcgtctgccaaaaatgcgaaggactgtttaaagccaaagaccatctggcaagcacgaaagaacccatattcaacgatttgcccgaggctgtttcggatgtcaaactcgttcaccgtatcggcacgcgcgccatcggcaagaaacagatttcccgtgacgaaatcgccggcatcctcaacggcggcacaacccagcccgatattccgcccgcaaccgccgccacccctgctgccgcaccgcaggttaccgtaccacccgccgcgcccgcccgtcaggaagggttcaactggacgattgcaaccctgtttgcccttatcgtcctcattatgcagctttcctacctcgtcatcctatga

SEQ ID NO: 45779 - DNA, 1047 bp, Neisseria meningitidis
atgccgtctgaagccttcagacggcatcgtgcctatcgggagaataaattgcagcctttagtcagcgtattgatttgcgcctacaacgtagaaaaatatttcgcccaatcattagccgccgtcgtgaatcaaacttggcgcaacttggatattttgattgtcgatgacggctcgacggacggtacgcttgccattgcccagcgtttccaagaacaggacggccgcatccgcatcctcgcgcagccgcgcaattccggtctgattccctctttaaacatcgggctggacgaattggcaaagtcaggaatgggggaatatattgcacgcaccgatgcagacgatattgctgcccccgattggattgagaaaatcgtgggcgagatggaaaaagaccgcagcatcattgcgatgggtgcgtggctggaagttttgtcggaagaaaaggacggcaaccggctggcgcggcaccacgaacacggcaaaatttggaaaaaaccgacccggcacgaagatattgccaccgtttttcctttcggcaaccccatacacaacaacacgatgattatgcggcgcagcgtcattgacggcggtttgcgttacaacaccgagcgggattgggcggaagattaccaattttggtatgatgtcagcaaattgggcaggctggcttattatcccgaagccttggtcaaataccgccttcacgccaatcaggtttcatccaaatacagcgtccgccaacacgaaatcgcgcaaggcatccaaaaaaccgccagaaacgattttttgcagtctatgggttttaaaacccggttcgacagccttgaataccgccaaataaaagcagtagcgtatgaattgctggagaaacatttgccggaagaagattttgaacgcgcccgccggtttttgtaccaatgcttcaaacggacggacacgccgcccgccggcgcgtggctggattttgcggcagacggcaggatgcggcggctgtttaccttgaggcaatacttcggcattttgcgccgattgttgaaaaaccgttga

SEQ ID NO: 45780 - DNA, 6081 bp, Neisseria meningitidis
atgaataaaggtttacatcgcattatctttagtaaaaagcacagcaccatggttgcagtagccgaaactgccaacagccagggcaaaggtaaacaggcaggcagttcggtttctgtttcactgaaaacttcaggcgacctttgcggcaaactcaaaaccacccttaaaaccttggtctgctctttggtttccctgagtatggtattgcctgcccatgcccaaattaccaccgacaaatcagcacctaaaaaccagcaggtcgttatccttaaaaccaacactggtgcccccttggtgaatatccaaactccgaatggacgcggattgagccacaaccgctatacgcagtttgatgtcgacgctaaaggtgctgtactgaacaacgatcgcaacaacaacccgtttctggccaaaggcagtgcgcagttgattttgaacgaggtgcgcggtgcggccagcaaactcaatggcatcgttaccgtaggtggtcaaaaggccgatgtgattatcgccaaccccaacggcattaccgtgaacggcggcggctttaaaaacgtcggccgcggtatcttaactaccggtgcgccccaaatcggcaaagacggtgcactgacaggatttgatgtgcgtcaaggcacattgaccgtaggagcagcaggttggaatgataaaggcggagccgactacaccggggtacttgctcgtgcagttgctttgcaggggaaattacagggtaaaaacctggcggtttctaccggtcctcagaaagtagattacgccagcggcgaaatcagtgcaggtacggcagcgggtacgaaaccgactattgcccttgatactaccgcactgggcggtatgtacgcagacagcatcacactgattgccaatgaaaaaggcgtaggcgtcaaaaatgccggcacactcgaagcggccaagcaattgattgtgacttcgtcaggccgcattgaaaacagcggccgcatcgccaccactgccgacggcaccgaagcttcaccgacttatctctccatcgaaaccaccgaaaaaggagcggcaggcacatttatctccaatggtggtcggatcgagagcaaaggcttattggttattgagacgggagaagatatcagcttgcgtaacggagccgtggtgcagaataacggcagtcgcccagctaccacggtattaaatgctggtcataatttggtgattgagagtaaaactaatgtgaacaatgccaaaggctcggctaatctgtcggccggcggtcgtactacgatcaatgatgctactattcaagcgggcagttccgtgtacagctccaccaaaggcgatactgaattgggtgaaaatacccgtattattgctgaaaacgtaaccgtattgtccaacggcagtattggcagtgctgctgtaattgaggctaaagacactgcacacattgaatcgggcaaaccgctttctttagaaacctcgaccgttgcctccaacatccgtttgaacaacggtaacattaaaggcggaaagcaggtggtactgatggctgatggcgacattcaggcaaaagcctccaatctgaatgcatccggccatctgtatattcatgcaggtaaggatctggatttgaatgccgataaagacttatcaacacaaagtatcagcctgagggcagacaacaccgccctcatcagtagcaacggtaacaccttgactgcagaaaagaatctggatattcaggcaggtagcttgagtgtgcgtcaaagtaatctgcaatccagtggcggtaatgtgcagatgagcgcgactaaaggcaacatcagcttgaatcagagttggataaatgccagtcagaatattgatacggcagcacttcaaggcaatattatttcagacggtctgactgctgttgccgaagttggacgcgtatctcttcttgccaacggcaatgttgatttcaacggtctaaataccttgattgcggaaggagacattaatgctggttcagtcggtaaaggccgtctgaaaatggacaataccgatatttatgcttctgcaggcgatgtgaaactggttgccggaggtcaattagatttaggcaacggcaccgttaacggcggtcatatcagcttagacagcaataaaggcagcatggtggtgcaggatgtacacctgaatgcccgcgcatcactgaaagtggatgcggatcaaactttaaccattaataacagcaagctcaattccggtcacaatacccagattaatacaaatcatggtcatatgacgcttaatcagcttgatgctcattcacgtcgtcatatgagtatcagtgcacagggtaaaggcaaaggaaaagacagcggtcaaattttacaaaacgaccagcaaaacagtaaaagtactttggcggcagatggtgtattgtcattgaacagcagcgcattacaggttttggacaatactaccctgcgcggtggcgcgataaacatcaaagctggcggaggcatcatcaaacggggctatatcgattgggaaacccaagatacggctactatgcgttcagcggaactgaaaccactgtctggtatgatgtcgatagaatcgggcggtgataaccctttaaccgttgaacccggtaaccgtatcgtttctgcaggtgatttggccgtgaaccacaacggcacattccaaatcagtgccagagcaggaaataacggcaatccgagtgcgcaaacagccagcgtttcagctaaaggcaatatcgggattgtggcgggagaggtggatattgatgcagcaaatattgccgcagggaaagatttggctttagtggcaactaaagggaatatttcactaaacagtattaggaatacgtttagtaactatcaattgaaaacagataaacacaatatcacacagcaacttactgatgtagagcaggagcttagtaagttaacgagcgatcctaaatatcgtaaagcacaggatcttccacaaatgttgaggcgtaaatataagaggcgtgacaaagtattcggtgatagtgaggccagattacgtggtttacgagcagagataaatgctgctgatgaggcttgggcagaactccaatccccagtaaaagcgttacttgaacgtaaacaattgttacaacaagcccttttaacagtttcccaaccgggtagtggtcacgaaaaccaaggtagcacccttagcggtcaaaatatcaaactgctcgctgcaggtggtatccgtatccagggctccaaagttgctgccacccaacaggcaaatatccaagctgcaggatttttacctgcaccagccgcagaggaactgcaagaaggtcgacttcaatcagccattgacatcagcggtgtatttgatacttttgaatatggtcagcaaggcagcgataaatacggctatgccattttcagcaggccatctgaaatttcaggaaaaacaggtgttaccctctctgcaccaaatgccaatgagaacagccgcatcagtctgagtgcggcaaacatcgaagctgaaaacggcaaaatcaaactgcaatcctacggcgaccaatcctattacgccgggcagggcgaactctataccttagaacgccgcagctacaaaaccggcaaatggtacaaccgcaaacacattaccgaagtcaaagaacacaaaaacgccaagcccgacgcagtaaacctcagcgcatcccaaggcatcgacatcaaatctggtggcaacatcgacgcctacgccaccgcattcgatgcccccaaaggcagcattaacatcgaagccgggcggaaattgacactctatgccgtagaagagctcaactacgacaaacttgacagccaaaaaaggcgcagatttctcggcatcagctacagcaaagcacacgacaccaccacccaagtcatgaaaaccgcgctgccctcaagggtagttgcagaatcagccaacctccaatcgggctgggataccaaactgcaaggcacacagtttgaaaccacactgggtggcgcaaccatacgcgcaggcgtaggcgagcaggcacgggcagatgccaagattatcctcgaagggatcaaaagcagcatccacacagaaaccgtgagcagcagcaaatctactctatggcaaaaacaggcaggacggggcagtaacatcgaaaccttgcaattgccgagtttcaccggtcccgttgcgcccgtactgtccgctcccggcggctatatcgtcgacattccgaaaggcaatctgaaaaccgaaatcgaaaagctgtccaaacagcccgaatacgcctacctgaaacagcttcagacggccaagaacgtcgattggaaacaggtgcagctggcctacgacaaatgggactataaacaggaaggcttgaccggagccggtgcagcgattgtggtgattattgtaaccgctctaacttatggatacggagcggctgcagcgggtagcgtaactgccgcaggaagtagtacagccgcagctgcaacaacgacagcggcagcaactaccactgtttctactgcagctgccatgcaaaccgcagctttagcctccttgtatagccaagcagctgtagccatcatcaataataaaggcgatgtaggcaaagcattaaaagatctcggcaccagtgatacggtcaagcagattgttacttccgcactgacggcgggtgcattaaaccagatgggagcagatattgcccaattgaacagcaaggtaagaaccgaactgttcagcagtacgggcaatcaaaccattgccaaccttggaggcagattggccaccaacctcagcaatgcaggtatctcagctggtatcaataccgccgttaacggcggcagcttgaaagacaacttaggcaatgccgcattgggagcattggttaatagcttccaaggggaagccgccagcaaaatcaaaacaaccttcagcgacgattatgttgccaaacagttcgcccacgctttggcgggttgtgttagcggactggtacagggaaaatgtaaagatggggcaattggcgcagcagttggggaaatcgtagctgaatccatacttggcggcagaaaccctgctacactcagcgatgcagaaaagcataaagttatcagttactcgaagattattgcgggcagcgtggcggcactcaacggcggcgatgtgaatactgcggcgaatgcggctgaggtagctgtggtgaataatgctttgaattttgacagcacccctaccaatgcgaaaaagcatcaaccgcagaagcccgacaaaaccgcactggaaaaaatcatccaaagtattatgcctgcacatgcggcaggtgcgatgactaatccgcaggataaggatgctgccatttggataagcaatatccgtaatggcatcacaggcccgattgtgattaccagctatggagtttatgcagcaggttggacagctccgctgatcggtacagctggtaaagcagctatcagcacctgtatggctaatccttctggttgtactgtcatggttacgcaggctgctgaagcgggcgcgggaatcgccacgggtgcggtaacggtaggcaacgcttgggaagctccagtaggagcgttgtcgaaagcgaaggcggctaagcaggctataccaacccagacagttaaagaacttgatggcttactacaagaatcaaaaaatataggtgctgtaaatacacgaattaatatagcgaatagtactactcgatatacaccaatgagacaaacgggacaaccggtatctgctggctttgagcatgttcttgaggggcacttccataggcctattgcgaataaccgttcagtttttaccatctccccaaatgaattgaaggttatacttcaaagtaataaagtagtttcttctcccgtatcgatgactcctgatggccaatatatgcggactgtcgatgtaggaaaagttattggtactacttctattaaagaaggtggacaacccacaactacaattaaagtatttacagataagtcaggaaatttgattactacatacccagtaaaaggaaactaa

SEQ ID NO: 45781 - DNA, 1380 bp, Neisseria meningitidis
atgctgctcgacctcaaccgcttttccttttccgtcttcctgaaagaagtccgcctgctgaccgcccttgccctgcccatgctgttggcgcaggtcgcgcaggtgggcatcggttttatcgatactgtgatggcgggtggtgcaggcaaggaagacttggcggcggtggctttgggcagcagcgcgtttgccacggtttatattacctttatgggcattatggcggcgctgaacccgatgattgcccagctttacggcgcgggtaaaaccgacgaagtgggcgaaacggggcggcaggggatttggttcgggctgtttttgggcgtgttcggcacggtattgatgtgggcggcgattacgccgttccgcaactggctgaccttgagcgattatgtggaaggcacaatggcgcagtatatgctgttcaccagcttggcgatgccggcggcaatggtacaccgcgcactgcacgcctacgcctccagcctgaaccgcccgcgcctgattatgttggtcagctttgcggcgtttgtgttgaacgtgccgctgaactatattttcgtttacggcaaattcggtatgcccgctttgggcggcgcaggctgcggactggcgacgatggcagtgttgtggttcagcgcgctggcattgtggatttatatcgccaaggaaaatttcttccgcccattcggactgacggcgaaattcggcaaaccggattgggcggtgttcaaacagatttggaaaatcggcgcacccatcgggctgtcttattttttggaagccagcgcgttttcgtttatcgtgtttttgattgcgcctttcggcgaggattatgtggcggcgcagcaggtcggcatcagtttgtcggggattctctatatgattccgcaaagcgtcggctcggcggggacggtgcgcatcggcttttcgcttgggcggcgcgaattttcgcgggcgcgttatatttcgggcgtgtcactggtgttaggatggatgctcgccgtgattaccgtgctttccttggtattattccgttcgccgctggtaagtatgtacaacaatgatccggcggttttaagcatcgccgccaccgtcttactgttcgccggcttgttccaaccggcagacttcacccaatgtatcgcctcctacgccttgcgcggctacaaagttacaaaggtgccgatgttcatccacgccgccgccttttggggctgcggtctgctgccgggctacctgctcgcctaccgtttcgatatgggcatttacggcttctggacggcattgattgcctcgctcaccatcgccgccatcgccttggtgtggtgcttggaattgtgcagtagggagatggtcagatcgcataaggctgtctga

SEQ ID NO: 45782 - DNA, 795 bp, Neisseria meningitidis
atgaaagcctatttggacttgatgcgccacgtcctcgacaacggtacggacaaatcagaccgcaccggtacgggcacgcgctccgtattcggttatcagatgcgttttgacttgggcaaaggttttccgctgctgacgaccaaaaagctgcatctgcgttcgattatccacgagctgctttggtttctcaaaggcgataccaatatcaaatacctaaaggacaacaatgtttccatttgggacgagtgggcggacgaaaacggcgacttgggcccggtttacggctaccagtggcgtaactggcccgcgcccgacggcaggcatatcgaccaaatcgccaatgtggtggaacaaattaagaaaaaccccgactcgcgccgcctgattgtatcggcgtggaatccggctttggtcgacgaaatggccttgccgccctgccacgcgctgtttcagttttacgttgccgacggcaaactgtcctgccagctttaccagcgtagtgcagatattttccttggtgtgccgtttaatattgccagctacgcattgttgaccatgatgatggcgcaagtgtgcggattggaggcgggcgagtttgtccatacgtttggcgacgcgcatttgtaccgcaaccatttcgagcaggccgcattgcagttggaacgcgaaccgcgcgccttgccagtgatgaaaatcaatcctgaagtcaaagatttgttttccttcaagtttgaagatttcgagttggaaggttacgacccccatccgcacatcaaggcggcagtgtcggtttag

SEQ ID NO: 45783 - DNA, 444 bp, Neisseria meningitidis
atgtatttgacacaacatacggactacgggctgcgcgtccttatctacactgccatcaacgacgatgcgctggtcaacatcagtaccatcgccgtaacctacggcatttccaaaagccatctgatgaaggtcgttaccgcgctggtcaaaggcggcttcctccacagcgtgcgcggaaaaggcggcggtctgcggcttgccgcaccgcccgaccgcatcaacatcggctcggtcgtccgccacctcgaaccgatgcagctggtcgagtgcatgggcgagaacaacgaatgcctgatcacaccgtcctgccgtctgacaggcatactcggcggcgcgatgaagtcgtttttcacgtatttggacggtttcacgctccaagacctgctcaacaagccgacctacgacctgctctacgaaccgagaattccgattgcggtgcagtaa

SEQ ID NO: 45784 - DNA, 600 bp, Neisseria meningitidis
atgcgcaaacagaacactttgacgggaatcccgacttctgacggacagagggggtttgcactgtttatcgtgctgatggtgatgatcgtcgtggcttttttggttgtaactgccgcgcagtcttacaataccgagcagcggatcagtgccaacgaatcagacaggaaattggctttgtctttggccgaggcggctttgcgggaaggcgaacttcaggttttggatttggaatatgatacggacagtaaggttacatttagcgaaaactgtgaaaaaggtctgtgtaccgcagtgaatatgcggacaaatacaaataatggtaatgaagaggcttttgacaatatcgtggtgcaaggcaagcccaccgttgaggcggtgaagcgttcttgccctgcaaaatctacaggcctgtgcattgacaataaagggatggaatataagaaaggcacgagaagcgtcagcaaaatgccacgttatattatcgaatatttgggcgtgaagaacggagaaaatgtttatcgggttactgccaaggcttggggtaagaatgccaataccgtggtcgtccttcaatcttatgtaagcaataatgatgagtaa

SEQ ID NO: 45785 - DNA, 285 bp, Neisseria meningitidis
atgaaaaaactgttattggctgccgttgtttccctgagtgccgcaaccgcatttgccagcgactctgccgagcgtcagatttacagtgatcccaattttgaacagaaccgcgtaaaagctgtgaaaatgttggaacagcgcggttatcaggttcacgatgtcgatgccgacgaccattggggtaagcctgtgctggaagtggaagcctataaagacggccgcgaatacgacatcgtgttgtcttaccccgacctgaaaatcatcaaagagcagctcgatcgctga

SEQ ID NO: 45786 - DNA, 540 bp, Neisseria meningitidis; identical to SEQ ID NO: 44661

SEQ ID NO: 45787 - DNA, 1173 bp, Neisseria meningitidis; identical to SEQ ID NO: 44658

SEQ ID NO: 45788 - DNA, 267 bp, Neisseria meningitidis; identical to SEQ ID NO: 37278

SEQ ID NO: 45789 - DNA, 585 bp, Neisseria meningitidis
atgatcagcagactgaccggcaaactggttgaaaaaaaccctccgcaaatcgtcatcgatgtcaacggtgtcggctatgaggccgacgtatcgatgcagaccttctacaacctgccgcccgtgggtgaaagcgtacaactgtttacccagcttatcattcgggaagacgcacatcttttatttggttttgccactgcggaagaacgcaagaccttccgccaactgattaaggtcggcggcatcggcgcgaaaacggctttgggcattttgtcagcgatgacggcagacgagctggcgcgggcggttgccgaagaagatgtcaaacgcctgtcttccgcgccgggaatcggcaaaaaaaccgccgaacgtatggtcttggaactgcgcggcaagctggtcgcgcatacggtaacggacgggctgtttgccgccgcacccgccgccgacgaaacggaagacatcgtcagcacgctgcttgcgctgggttacagcgaacgcgaagcaaaagcggcggtcaaaggcgttccggaggggacggacgtgggcgaaggcgtgcgccttgctttgaaaaacctgctgaaataa

SEQ ID NO: 45790 - DNA, 1554 bp, Neisseria meningitidis
atgacacaggccaaccgcgttatcattttcgacaccaccctgcgcgacggcgaacaatcgcccggcgccgctatgaccaaagaggaaaaaatccgcgtcgcccgccagctggaaaaattgggtgtggacatcatcgaagcgggttttgccgctgccagcccgggcgatttcgaggcggtcaatgcgattgcgaaaaccattaccaaatcaacggtctgttcattgtcccgtgccatcgagcgggacatccgtcaggcgggtgaggccgttgcgcccgcgccgaaaaaacgcatccacaccttcatcgccaccagccccatccatatggagtacaaattgaagatgaagccgaagcaggtgattgaggcggcggtcaaagcggtgaaaatcgctcgtgaatacaccgacgatgtggaattttcctgcgaagacgcgttgcgttcggaaatcgatttccttgccgaaatctgcggcgcggtaattgaagcgggcgcgaccaccatcaatattcccgataccgtcggctattccatcccgtacaaaaccgaagaatttttccgcgaactgattgtcaaaacgcccaacggcggcaaagtcgtttggtcggcacactgccacaacgatttgggcttggcggttgccaattcgcttgccgcattaaaaggcggtgcgcgtcaggtggaatgtactgtcaacggcttgggcgaacgtgcaggcaatgcttcggttgaagaaatcgtgatggcgttgaaagtgcgccacgacttgttcggcttggaaaccggcatcgataccacgcaaatcgtgccttcgtccaaactggtgtccaccattacgggctatcccgtgcagcccaacaaagccattgtcggtgccaatgcctttttgcatgaatcgggcatccatcaggacggggtgctgaaacaccgcgaaacttacgagattatgtccgccgaatcggtcggctgggcaacaaaccgtttgagcttgggcaaattgtccggccgcaacgccttcaaaaccaagctggcggatttgggcatcgagttggaaagcgaagaggcactgaacgccgcgtttgcccgcttcaaagaactcgccgacaaaaaacgcgaaatcttcgatgaagacctgcacgcactggtatccgacgaaatgggcagcatgaatgccgagagctacaaattcatctcccaaaaaatcagcaccgaaaccggcgaagagccgcgcgccgacatcgtgttcagcatcaaaggcgaagaaaaacgcgcttccgcaaccggttccggtccggttgatgcaattttcaaagcgattgaaagcgtggcgcaaagcggcgcgactttgcagatttattccgtcaacgccgtcacgcaaggtacggaaagccaaggcgaaaccagcgtccgtctggcacgcggcaaccgcgtcgtcaacggtcagggcgcggataccgacgttttggttgccactgccaaagcctacctttccgctttgagcaaactggaatttagtgccgccaaaccgaaagcgcaaggcagcggtacgatttga

SEQ ID NO: 45791 - DNA, 567 bp, Neisseria meningitidis; identical to SEQ ID NO: 41762

SEQ ID NO: 45792 - DNA, 966 bp, Neisseria meningitidis; identical to SEQ ID NO: 39761

SEQ ID NO: 45793 - DNA, 1398 bp, Neisseria meningitidis
atgactgtccgtatcgaacacgatttattgggcgaccgcgagattcccgccgaagtgtattggggcatccacactctgcgcgccattgaaaactttaaaatctccacacaaaaaatttccgacgtgccgcagtttgtccgcagtatggtgatggtgaaaaaagcaaccgcgcaggcaaacggcgaattgggtgcagtaaaacccgaaatcgccgccgccattgaaaaggcttgcgacgaagttctgctgaacaaccgctgcctcgaccaattcccctccgacgtgtatcagggcggtgcgggaacttcggtcaatatgaacaccaacgaagtcatcgccaacctcgcattggaagccttgggatacgaaaaaggccgctacgacatcgtcaatccgatggatcatgtcaatgccagccaatcgaccaacgatgcctatcccacgggcttccgccttgccgtgtattacagcatcggcgaattgctcgacaaactgaccgtcctgaaaaacgcctttaccgccaaagccgaagaatttaaagacgttttgaaaatgggtcgcacccagcttcaagatgccgtaccgatgacggcaggacaagaattccaatctttccaagtgttgttggaagaagaaatcctcaacctcgaccgcacgcgccaactgcttttagaagtcaatttgggcgcaacggcaatcggcacgggcgtgaacacgcccaaaggctacgccgaactggtggtcaaaaaactctccgaagtcagcggcttgccttgcaaactgaccgaaaacctgattgaggcgacctccgactgcggcgcatatgtgatggtacacggcgcattgaagcgcacggcggtcaaactctccaaaatctgcaacgacttgcgcctgctctcttccggcccgcgtgccggcttgaaagaaatcaacctgcccgaattacaggccggttcttccattatgcctgccaaagtcaatcccgtgattcccgaagtggtcaaccaagtctgcttcaaagtcatcggcaacgacacgacgattaccttcgccgccgaagccgggcaactgcaattaaacgtgatggagccggtcatcgcccaatgtatgtttgaaaccatttccctcttgggcaatgccgcagtcaacctgtccgacaaatgcgtcaaaggcattacggtcaaccgcgaaatctgcgaacgttacgttttcaactccatcggtttggtgacttatctgaatccgtatatcggacaccacaacggcgatttggtcggcaaaatctgcgcccaaaccggcaaaggcgtgcgcgaggttgtcttggaacgcgggctgttgagcgaagaagaactcaaccgcatcctctctcccgagaacctgatgaacccccatctgtaa

SEQ ID NO: 45794 - DNA, 1005 bp, Neisseria meningitidis
atgagcaccttctttcaacaaaccgcgcaagccatgattgctaaacacatcgaccgtttccctctattgaagttggatcaagtgattgattggcagccgatcgaacaatacctgaatcgtcaaaaaacccgttaccttcgagaccaccgcggccgtcctgcctatcccctgctgtccatgttcaaagccatcctgcccggacaatggcacagcctctccgatcccgaactcgaacacagcctcattacccgcatcgatttcaacctgttttgccgttttgacgaactaagcatccccgattacagcaccttatgccgttaccgcaactggctggcgcaagacgacaccctgtccgaattgctggaactgattaaccgccaactgaccgaaaaaggcctaaaaatagagaaagcatccgccgtcgttggcgccaccattattcaaaccgccggcagcaaacagcgccaggccatagaagtcgatgaagaaggacaagtcagcggccaaaccacaccgagtaaggacagcgatgcccgttggataaagaaaaacggcctctacaaactcggttacaaacaacatacccgtaccgatgcggaaggctatatcgagaaactgcacatcacccccgccaatgcccatgagtgcaaacacctgccgcctttgctggaagggatagctgaaggtacgaccgtctatgccgacaaaggctatgacagtgcggaaaaccggcaacatctggaagagcgtcagttgttagacggcattatgcgcaaagcctgccgcaaccgtccgctgtcggaagcgcaaaccaaacgcaaccgatatttgtcgaagacccgttatgtggtcgaacaaagcttcggtacgctgcaccgtaaattccgctatgcgcggtcaacctatttcggactgattaaagtgagtgcgcaaagccacctgaaggcgatgtgtttgaacctgttgaaagccgccaacaggctaagtgcgcccgctgccgcctaa

SEQ ID NO: 45795 - DNA, 1305 bp, Neisseria meningitidis
atgaagccgtttgccgaaaatatcccccacagccttcgcggcaactgccgcgacgaagccctaccgccgcatacggtagattgcccggaatgcggctgccgcgcggatgtgcctcggttggacaggggggaggcggcgttctgcccgcgctgcggctataagctcttcagggtgggcaggcatcctttttccgccccgcccgcttatgcggcggcttcgctgattttgatggcgtttgcttacggtatgacgtatatcgaggtcgggataccgggtgcggcatccgtcctttcgctgcccgagatgatgcgcctgatggtgtttcaggattatggttttttggccgaagtgatgtttgtgctgaccttcggcgcgccggttctgtttctgctgctgtgcctgtatgtctatgccgcgctgatacggaaacgggtgtatcctgcgctgcgtttggcaacgcgtgtgatggtgcgcttgaggcaggcgatgatggtggatgtgttttttgtttccacgctggtggcgtatatcaagctctcgtctgtggcagaggttcgcttcgggtcggcgttttatctgatgttcgcgctgtcggttatgctgattcggacttcggtatccgttccccagcattgggtgtattttcaaatcgggcggctgacgggggataatgcggttcagacggcatcggaaggcaaaacctgttgcagccgctgcctgtatttccgcgacagtgccgaatccccctgcggtgtgtgcggcgcggaactgtaccgccgacggccgaaaagtctgagtatttcgtcggcgtttctgacggcggcggttattttgtatttccctgccaatatcctgccgattatgatttcgtccaatcctgccgccacggaggtcaataccatccttaacggcatcgcttatatgtgggacgagggcgacaggctgattgcggcggttattttcagcgcgagtattttggtgccggtgctgaagattgcggcaatgtcggttttaattgcgtccgcccgcttcgctttgccgacaggcgcaaagaaattgtcacacctctaccgcatcaccgaagcggtcggccgctggtcgatgattgatatttttgtgattattattttaatgtgttcgttccacacttatgccgcgcgcgtcattccgggcagtgcggcagtctatttctgcctggtcgtgattctgacgatgctgtccgcctattatttcgacccgcgcctgctttgggacaaacgcgcttcagacggcattgctttcaacgaaacggaaaaacatgactga

SEQ ID NO: 45796 - DNA, 315 bp, Neisseria meningitidis
atgtttgatggcgaagtagaagcagatgaaagttattttggcggacaacgcaaaggcaaacgtggtcgcggtgctgccggtaaagtcgccgtattcggtcttttgaagcgaaatggtaaggtttatacggttacagtaccgaatactcaaaccgctactttatttcctattatccgtgaacaagtgaaacctgacagcattttttgtagctatgatgtattagatgtgcgcgaatttagccattttagcttcgctgaaacttcgttttcgtatcaatcacagcacacattttgccgaacgacaaaaccatattaa

SEQ ID NO: 45797 - DNA, 1980 bp, Neisseria meningitidis
atgtctcaactggcaaacgcaatccgcttcctctcggccgatgccgttcaaaaagccaattccggccaccccggcgcgcctatgggtatggcggaaatggcggaaacattgtggacgaaattcctcaatcacaaccccgccaaccccaaattctacaaccgcgaccgcttcgtcctctccaacggccacgcgtctatgctgttgtacagcctgctgcacctgaccggctacaacctaagcattgaagacttgaaaaacttccgccaactgcacagcaaaacccccggccatcccgaatacggctacaccgacggcgtggaaaccacgaccggcccgttggggcaagggattgccaacgcggtgggtatggcattggcagaaaaaatccttgccgccgaatttaataaagacggtttgaacatcgtcgatcattacacctacgtctttatgggcgacggctgtctgatggaaggcgtatcgcacgaagcctgttcgctcgccggcaccttgggcttgggcaaactgattgttttatatgatgacaacaatatttccattgatggtaaagtggacggctggtttaccgaaaacatcccgcaacgctttgaaagctacggctggcacgtcgttcctaacgtaaatggtcatgacaccgccgccattcaagccgccatcgaagccgcacgtgccgaaaccggcaaaccgtccatcatctgctgtaaaaccttaatcggcaaaggcagtgccaataaagaaggcagccacaaaacccacggcgcacctttgggtgcggacgaaatcgaagccacgcgcaaacatttgggctggacttaccctgcctttgaaatcccgcaagaaatttacgatgcgtggaatgccaaagaaaaaggcgcgaaactggaagccgaatgggacaaactgttcgcgcaataccaagccaaatatcctgccgaagccgcagaatttgtgcgccgtatggataaaaaactgccggaaaactttgacgggtacgttcagacggcattgaaagaagtgtgcgccaaagccgaaaccgtcgccacccgcaaagccagccaaaacagcatcgaaatcttggcaaaagagctgcccgaactggtgggcggctctgccgacctgaccccgtccaatctgaccgactggtcaaacagcgtctccgttacccgcgacaaaggcggcaactacatccactacggcgtgcgcgagttcggcatgggtgcgattataaacggcttggtattgcacggcggcgtgaaaccctttggcgcgaccttcctgatgttcagcgaatacgagcgcaacgccctgcgtatggcggcactgatgaaaatcaaccccgtgttcgtgttcacccacgattccatcggtttgggcgaagacggcccaacccaccagccgattgagcaaaccgccaccctgcgcctgattccgaatatggacgtatggcggccgtgcgacaccgccgaatccttggtcgcttgggcagaagccgtcaaagccgccgatcacccgtcctgcctgattttcagccgtcaaaacctgaaattccaagcgcgcagcgaacaacaactgaacgacatcaaacgcggcggctacgtcatcagcgaagcccaaggcaacgcccaagccgtcatcattgccaccggttccgaagtcgagctggctttggaagcgcaaaaagcactcgccgcgcaaaacatcgccgtgcgcgtcgtttccatgccgtccaccaacgtattcgaccgccaagacaccgcctatcaagccgccgtcctgcccgaaggcctgccgcgcattgccgtagaagccggacacgccgacggctggtacaaatacgtcggcctgaacggcgcagtcgtcggcatcaaccgcttcggcgaatccgcccctgccgatctgctgttcaaagaattcggctttaccgtggacaatgtggtcgatacagtgaaatcagtgctgtaa

SEQ ID NO: 45798 - DNA, 966 bp, Neisseria meningitidis; identical to SEQ ID NO: 39761

SEQ ID NO: 45799 - DNA, 747 bp, Neisseria meningitidis
gtgcagcctgaaacctccgcccaataccagcaccgtttcgcccaagccatacgcgggggcgaagccgcagacggtctgccgcaagaccgactgaacgtctatatccgcctgatacgcaacaatatccacagctttatcgaccgctgctataccgaaacgcggcaatactttgacagcgaagaatggagccgtctgaaagaaggtttcgtccgcgacgcgcacgcccaaacgccctattttcaagaaatccccggcgagttcctacaatattgccaaagcctgccgcttttagacggcattttggcactgatggattttgaatatacccaattgctggcagaagttgctcaaattccggatattcccgacattcattattcaaatgacagcaaatacacaccttcccctgcggcctttatccggcaatatcgatatgatgttaccgatgatttgcatgaagcggaaacagccttgttaatatggcgaaacgccgaagatgatgtgatgtaccaaacattggacggcttcgatatgatgctgctagaaataatgggttcctccgcgctttcgtttgacaccctcgcccaaacccttgtcgaatttatgcctgaggacgataattggaaaaatattttgcttgggaaatggtcaggctggactgaacaaaggattatcatcccctccttgtccgccatatccgaaaatatggaaggcaattccccgggccaaaaccatctatccgcataa

SEQ ID NO: 45800 - DNA, 738 bp, Neisseria meningitidis
atgggtggacaaaaaacgcatttcgggttcagcacggtcaacgaagatgagaaagccggcaaagtggcggaagtgttccactccgtcgccaaaaactacgacattatgaatgatgtcatgtcggcagggctgcacagggtgtggaagcatttcaccatcaacacggcgcacctgaaaaaaggcgataaagtgttggacattgcgggcggtacgggcgatttgtcgcgcggttgggcgaaacgggtcggcaaggaaggcgaggtttggctgaccgatattaattcctctatgctgaccgtcgggcgcgaccgtctgttgaacgaaggcatgattttgcccgtgtcgcttgccgatgcggaaaaactgcctttccctgacaattatttcaacttagtttccgtggcgttcggcttgcggaacatgacgcataaagatgccgcgctgaaagagatgtatcgtgttttgaaacctggcggcacgttgctggtgttggagttttccaaaatctacaagccgctcgaaggcgcgtatgatttctattcgttcaagctgctgccggtcatgggcaaactgattgccaaagatgcggacagctaccagtatctcgccgaatccatccgtatgcaccccgatcaggaaactttgaaacagatgatgctggatgcgggcttcgacagcgtggattatcacaatatgagtgcgggcatcgtcgcgctgcataagggcgtgaaattttaa

SEQ ID NO: 45801 - DNA, 1263 bp, Neisseria meningitidis
atgtcaaacacacaaaaacagcttgcccttgccaaagcggcaaaaaaatccgtcaacacggcggatacggaagaaaaaaaccgcgcgctgcttgctatggcggacagtctggaagcggcggcggcagatattttggcggcaaaccgtcaagacttggaagccgcggcaggcaaaattcccgaaagcatgaccgaccgccttttgttggacggcaaacgcatttgcgcgatggcggacggcattagggcggttgccgcactgcccgaccccgtgggcgaaatactggaaacctcgactctgcccaacggcttggaaatcgtcaaaaagcgtgtggcgatgggcgttatcggcattatttacgaaagccgcccgaacgttacgtccgatgcggcggctttggcactgaaaagcggcagcgcggtcgtactccgcagcggcaaagatgcattccaatccgcacgcgccatcgttgccgccctgaaaacggggttggcacaaacccgcatcgaccccgacgcgctccagttgattgaagacaccgggcgtgagggcagttacgaaatgatgagggcgaaagattatctagacctgctgattccgcgcggcggggcggggctgatacgggcggtggttgagaatgccgtcgtgccggtcattgaaacggggacgggcattgtccacatctacgtcgataaagatgcggacttagaaaaggcaatccgcattgtccgcaacgccaaaaccagccgtccgtccgtgtgcaactcgatggaagtgctgctggtgcatgaagacattgctgccgacttcctgcccaagctcgaacggctgttggttcgcgaccgtatagaagccggactgccgcccgtccgcttccgtttggatccgcaggcggcgcggcatatcggcggcgaagcggcgggtgcagacgatttcgataccgagtttttagactacatcctcgctgtgaaaaccgtcgcatcggtcgaagaggcggtcgggcacatcgaagcccacggcacacaccattcagacggcatcgttaccgaaaaccgccacgctgcggactatttcacgacccatatcgattctgccgccgtgtatgtcaacgcgtccacgcgctttaccgacggcggcgaattcggcttgggttgcgaaatgggcatctccacgcaaaaactccacgcccggggcccgatgggtttgaaagagctgacgagttacaaatacatcgtacaaggcacgggacaggttagggaataa

SEQ ID NO: 45802 - DNA, 924 bp, Neisseria meningitidis
atgccgtccgaacacccgttttcagacggcatttccacacccaaccccaaagaaaccatgaacgacaccgcccaaattaccgccagctacggccgccgctacatcgtgcgcacgcccgacggcacaacctacgaagccagcacgcgcaaaaaacgcgtcgatttcgcctgcggcgaccgtgtccgcatcagccccgtcaacgccgaacaagttgtgattgaagattttttaccgcgccaaagcctgctctaccgccaagacgcgtggaaaaccaaactcattgccgccaacgttacccaactcctcatcgtaaccgccgccgtcccgagtccgagcgtgcggctgctacagcgcgccctgcttgccgccgaagccgccggcatccgcgccgtcatcgtcctgaacaaagccgacctgcccgaaaccgccctttggcgcgaaaaactcaaattctacgaaacgctgggttatcccgtcatcgaaacccgcgcactggaaaacgccggcagcctgcgccccgccctgcaagggcacagcaacatcctgctcgggcagagcggtatgggcaaatccaccctgaccaacgcccttttgggcagccaaaccgcccgcaccggcgacatttccgccgcactcgactcgggaaaacacaccaccacccacgcccggctttatgatttgaacggcgaaacccaactcatcgactccccgggtttgcaagaatttggtttacaccacctccaagccgccgatttgccgcgctatttccccgatttccgccaccttgtcgggcaatgccgcttccacaactgcacccaccgcgccgaacccggctgcgccttcaaagccgccgccgaaaccggggcggcaagccccgaacgcctcgcctttttgcagggcatcaccgacgaactgcccgggtaa

SEQ ID NO: 45803 - DNA, 588 bp, Neisseria meningitidis
atggaacataagctgccgcaactgccttatgaactggacgcattgtccccgcatctgagcaaagagactttggaattccactacggcaaacaccatcaaacctacatcaccaacctgaacaatcaaatcaaaggcaccgaatttgaaaacctgcctttggaagagattgtgaaaaaatcttcgggcggcgtgttcaacaacgcggcacaaacttggaaccacaccttctactggctgggtttcacgtccaaaggtcaaggcaaacctgccggcgaactggccgccgccatcgacgcgaaatggggcagcttcgagaaattccaagaagcgttcaatgcctgcgcggccggtactttcggctccggttgggcgtggctggtaaaaacccctgccggcggattggatttggtttccacttccaacgccgctacgccgctgaccactgaaaacacgccgctgctgacctgcgacgtgtgggaacacgcctattacatcgactaccgcaacagccgtcccaactacctgaaaggtttctgggaaatcgtcaactgggacgaagtcgccaaacgcttcgccgccttgtcctga

SEQ ID NO: 45804 - DNA, 1185 bp, Neisseria meningitidis; identical to SEQ ID NO: 38307

SEQ ID NO: 45805 - DNA, 1413 bp, Neisseria meningitidis; identical to SEQ ID NO: 38542

SEQ ID NO: 45806 - DNA, 1296 bp, Neisseria meningitidis
ttggcaggagtcggcaaacttgcccgcttaggcgcgaaattcagcacaagggcggttccctatgtcggaacagcccttttagcccacgacgtatacgaaactttcaaagaagacatacaggcacgaggctaccaatacgaccccgaaaccgacaaatttgtaaaaggctacgaatatagtaattgcctttggtatgaagacgaaagacgtattaatagaacctatggctgctacggcgttgacagttcgattatgcgccttatgtccgattacagcagattccccgaagtcaaagaattgatggaaagccaaatgtataggctggcacgtccgttttggaattggcataaagaagaactgaataaattaagttctttggattggaataattttgttttaaatcgttgcacatttgattggaacggcggagattgtgtggtcaataaaggtgatgattacagaaatggggctaatttttcccttattcgcaattcaaaatacaaagaagaaatggatgccaaaaagctggaagagattttatcgttgaaagtcgatgccaatcccgacaaatacataaaggcaaccggatatcccggttattccgaaaaagtagaagtcgcacccggaacaaaagtgaatatgggacccgtcacggacaggaacgggaatcccgttcaggttgtcgcaacattcggcagggattcgcaaggcaacaccacagtggatgttcaagtaattccgcgtcccgacttaacccccggaagcgcggaagcgccgaacgcacagccgctgcccgaagtatcgcccgctgaaaaccccgcaaacaacccggcccccaatgagaaccccggcacgcgtcccaatcccgaacccgaccccgatttgaatcccgatgcaaatcccgatacggacggacagcccggaacaagccccgattccccggccgttccggaccgcccaaacggcagggacggcaaagatggcgggcttttgtgcaaattcttccccgacattctagcttgcgacaggctgcccgagcccaatccggcagaagatttaaatctgccgtctgaaaccgtcaatgtagagtttaagaaatccggaatctttcaagattccgcacagtgtcccgcccccgttacgttcactataaccgtgcttgattcaagcaagcagttcgcgttcagctttgagaacgcatgtaccatagccgaacggctaaggtacatgcttctcgcccttgcttgggcggttgccgcctttttttgtatccgcacagtatcccgtgaagtctag

SEQ ID NO: 45807 - DNA, 198 bp, Neisseria meningitidis; identical to SEQ ID NO: 36305

SEQ ID NO: 45808 - DNA, 1431 bp, Neisseria meningitidis
atgacctgggaaaccgtaatcggcttggaaatccacgtccaattgaacaccaaatccaaaatcttcagcggcgcatcgaccgcattcggcgcagaacccaacgcgcacgccagcgtagtggaatgcgcgctgccgggcgtactgccggtaatgaaccgagaagtcgttgaaaaagccatcaaattaggcttggctttggatgcgaaaatcaaccggaaaaacgtgttcgaccgtaaaaactacttctatcccgacttaccaaaaggctatcaaatcagccagttggatttgccgattgtcgaacacggcaaattggaaatcgtagtcggcgacgatgtgaaaaccatcaacgtaacccgcgcccatatggaagaagacgcgggcaagtccgtgcatgaaggcttgaacggcgcgaccggtatcgacctgaatcgcgccggcacgcctttattggaagtcgtatccgaaccggaattgcgctccgccgccgaagccgttgcctacgccaaagccttgcacagcttggtaacctggctggacatttgcgacggcaatatggcggaaggttcgttccgcgtcgatgccaacgtatccgttcgcccgaaaggtcaagcggaattcggcacgcgccgcgagattaaaaacctcaattccttccgtttcttggagcaggcgattaattacgaagcggaagcgcaaatcgagattttggaagacggcagcaaagtgcagcaggcgacgatgctgttcgacccagaaaaaggcgaaacccgcgtaatgcgcctgaaagaagacgcgcaagactaccgctacttccccgacccggatttgttgcccgtcatcatttcagacgctcaaatgcaaaaagccaaagcagaaatgcccgagctgccgaaagaaatggcggcacgtttcgtggcagattacggcgtgtccgaatacgacgcgcgcctgctcaccgcaagccgcgcacaggccgcctattttgaagaagccgccaaagcaagcgggcaaggcaagccgactgccaactggatgaacggcgaactcgccgccgcgctgaacaaagccggcctggaacttgccgacagcccgattaccgccccgcgcctcgccgcgctggtgggcaaaatcgccgacggcacattaagcagcaagttagcgaaaaaagcctttgaagccatgtgggcagaacccgaatccaccattgccgaaatcattgaaaaacacggcttgcagcaaatgaccgataccggcgcagttgaagcgatggtggacgaagtgctggcaaacaacgccaaagccgtggaacagtttaaatccggcaacgaaaaagccctgaatgcgattgtgggacaagtgatgaaagccagcaaaggcaaagccaaccccgcgcaagttcaagaactgattaaagccaaacttgcctga

SEQ ID NO: 45809 - DNA, 141 bp, Neisseria meningitidis
atgagcaccttctttcagcaaaccgcacaagccatgattgccaaacacatcgaccgcttcccactattgaagttggaccaggtgattgattggcagccgatcgaacagtacctgaatcgtcaaagaacccatttaccttag

SEQ ID NO: 45810 - DNA, 303 bp, Neisseria meningitidis; identical to SEQ ID NO: 39628

SEQ ID NO: 45811 - DNA, 1254 bp, Neisseria meningitidis
atgcagacttacctcgtcggcggcgccgtccgcgattatcttttgggcttgcccgtcaaagaccgcgattgggtggtcgtcggcgcagacgcacaaaccatgctggcgcaaggcttccagccggtcggcaaagattttcccgtgtttctccatcccgaaacgcacgaagaatacgccctcgcccgcaccgagcgcaaaaccgccaaaggttacgtcggtttcagtttccacgccgacaaagacgttacgctggagcaggacttgatgcgccgcgacctgaccatcaacgcgatggcgcaagatgcggacggcaagattatcgaccctttcggcggacaacgggatttggcggcaggcattttgcgccacgtttccccggccttcgccgaagaccccgtccgcatcctgcgtactgcccgctttgccgcgcgttacaggtttgaaatcgccgaagaaaccataaagctgatgcggcagatggtggaaaacggcgaagcggacgcattggttgccgaacgcgtctggcaggagtttgcgaaaggtttgatggaaaaaaatccgcgcaaaatgattgaagtgttgcgcgaatgcggcgcgctcaaagtcttgctgcccgaagtcaatgccctcttcggcgtgccgcaacgcgccgactaccatcccgaaatcgacagcggcatccataccctgatgacgctgcaacgcgccgccgatatgggtttgagcctgcccgaacgctatgccgccctgctgcacgacttgggcaaagccaaaacaccgtccgacatcctgccgcgccaccacggacacgacctcgccggtgtcgaacccgtgcgcgaagtcaatcagcggctgcgtgcgccgaaacattgcgccgagcttgccgaattggtttgccgttggcacattattttccaccaagtcggacagcttaaaagccaaaccattctgaacgtattgaaaaaaaccgatgccttccgccgtcccgaacgctttcagacggcattgaacgtctgcattgccgacacgcaaggccgtctgaaccgcgaacacacgccctacccgcaacgcgcacactggttcgccctgctcgaagccgccaatcaggcggattcgggcaaaatcgccgccgaatgccgcgcgcagggaaaagcgcaccttatcgccgaacaaatcgaccgggcgcggctggcacaaatcgccccattgcaaaaaacgtttcgagcggcgcaagacaaaacagaaaaacattaa

SEQ ID NO: 45812 - DNA, 762 bp, Neisseria meningitidis; identical to SEQ ID NO: 39551

SEQ ID NO: 45813 - DNA, 396 bp, Neisseria meningitidis
atgaagcggcaacaggataaaaaaatgttatttgaagaaaatccgatagacgaacattttgcagagtatgaccgccgcacgggtgaaatccggctgtccggcagacatttcaataagcctgtgctgctgcatagggattctgccggcctctcgaaatggcagtcattgtcagaactgactccggataatctgttgtctgatgtcaaagcggatgactatccggaaatattgattatcgggacgggcgcggctcaggagtttatccatcccaaaatcatggcggatttttcccgaatcggaatcggcgtggaatgtatgaataccgattcggcattcaggacattggttttcctgcactcggaagggcgcagggcttgggcttggcttcagccgtaa

SEQ ID NO: 45814 - DNA, 954 bp, Neisseria meningitidis
atgacacataccgtccacctgcatttagaagaaaccgacaacttggcgttgcagcgtctgtgcggttcttttgacaacaaccttgatttacttgctaaagcactcgatatccacatcagccgccgttttgaacatttcactttcaacggcgcatttgcacacgccggcaaacgcgcactgctcaaactcttggaaacggcgcagacgcgcgacctaaacgacggcgacatcaggcttgccgccgtcgaagcccaaaccgaagatgccggtcatcaagaaaaaaaccatgaccacgcctattatttccgcaccaagcgcggcagcatcggcggcagaacgccacggcagaacggctatatccgcgccctactcaaccacgacatcgtattcggtctcgggccggcaggtacgggcaaaacctatcttgccgtcgccgccgccgtcgatgcgatggaaaaacaccaagtcgaacgcatcattttagtgcggcctgccgtcgaagccggcgagaaactgggctttctgcccggagacctgacccaaaaagtcgacccctacctccgtccgctttatgacgcgctttacgacctgatgggcttcgaccgcgtcagcaaactgattgaaaaaggcctgattgaaatcgccccgctcgcctatatgcgcggcaggacgctcaacggcgcatacatcatcctcgacgaagcgcaaaacaccacgcccgaacaaatgaaaatgttcctgacccgcatcggcttcggcgcgaaagccgtcattaccggcgacaccagccaaatcgacctgcccaaaaacatcaaatcgggattaaaagatgcgcgtgagaaactgcacaacgtggaagggctgtatttccacacctttaccggcgaagacgttgtccggcatcctctggtgcaaaaaatcgtcgaagcctacgaatcggcagaacacgactga

SEQ ID NO: 45815 - DNA, 597 bp, Neisseria meningitidis
atgaaacagacagtcaaatggcttgccgccgccctgattgccttgggcttgaaccgagcggtgtgggcggatgacgtatcggattttcgggaaaacttgcaggcggcagcacagggaaatgcagcagcccaatacaatttgggcgcaatgtattacaaaggacgcggcgtgcgccgggatgatgctgaagcggtcagatggtatcggcaggcggcggaacaggggttagcccaagcccaatacaatttgggctggatgtatgccaacgggcgcggcgtgcgccaagatgataccgaagcggtcagatggtatcggcaggcggcagcgcagggggttgtccaagcccaatacaatttgggcgtgatatatgccgaaggacgtggagtgcgccaagacgatgtcgaagcggtcagatggtttcggcaggcggcagcgcagggggtagcccaagcccaaaacaatttgggcgtgatgtatgccgaaagacgcggcgtgcgccaagaccgcgcccttgcacaagaatggtttggcaaggcttgtcaaaacggagaccaagacggctgcgacaatgaccaacgcctgaaggcgggttattaa

SEQ ID NO: 45816 - DNA, 966 bp, Neisseria meningitidis; identical to SEQ ID NO: 44673

SEQ ID NO: 45817 - DNA, 1410 bp, Neisseria meningitidis
atggatacacaaatcaaaactgaagccgacaatcagagcaaccggcgttatctgaccgtttggcggtggcatttttatgccggtctgctggttatgccttttcttaccctgcttgccgttacgggtttgggtatgctgctgtttgccaatattaccggtaaggagggcgagcggattcatgttgtgccgcaggcaacggtacaacctctgtctgttcaggcggaagcggcacgcagtgccgttaatccggaaacttcgtccgtcgttcagtatattgcgccgcgtgccgatgatatggttgccgtgttccgtgtcaacaatgagggcaaggcaacgatggtcgcggtcgatccttatacggcaaaagtggtcagtaccatgccgcgcaatcagggttggtattacgcgatggatgaaatccacagcgatatgatgctcggttcgacaggtgattatcttttggaaacggctgcatcgctgacgattatcatgataatcagcggtttgtacctttggtgggtgaaacggcgcggcatcaaggcgatgctgctgccgccaaaaggcagggcgcgttcttggtggcggaatctgcacggcgcgtttggaacttgggtgtcgttgattttactgttgttctgcctgtcgggtattgcttgggcaggtatttggggcggcaagttcgtgcaggcttggagtcagttcccggcaggcaaatggggtgtcgaaccgaaccctgtttcagtcgtgccgacccacggcgaggtattgaatgacggcaaggttaaggaagtgccgtgggttttggagcttacgcctatgcctgtttcagggacgactgtgggcaaagacggtattaaccctgacgagccgatgacattggaaaccgtcgaccgttttgcgcgggaaatcggtttcaaagggcgttatcagttgaatttgcccaaaggcgaggacggagtgtggactttgtcccaagactctatgagttacgatatgattagtccgtttgccgaccgcacggtgcatatcgaccagtacagcggcaaaatccttgccgacatccgctttgacgattacaacccgttcggcaaatttatggcggcaagcattgcgctgcatatgggtactttgggctggtggagcgtgttggcgaacgttttgttctgccttgccgtcatttttatcggtatcagcggctgcgtgatgtggtggaaacgccgtccgaccggagcggtgggcatcgttccgccggcgcagaaagtcaagctgccggtttggtggatgatggcattgccgctattggcaatcgcactgctcttcccgaccgcactgcttgccattgccgtgatttggctgttggataccttgctgctgtcgcggattcctgttttgaggagatggtttaaatga

SEQ ID NO: 45818 - DNA, 588 bp, Neisseria meningitidis; identical to SEQ ID NO: 38394

SEQ ID NO: 45819 - DNA, 792 bp, Neisseria meningitidis
atggcaagacatccctaccgccgcctgcgtcctgcaaaatccagctttcccgaagtcggcatttccgaagaaggcaatatccgttcgcttcacttgggcagcgacaccatccaaagctcaatgaacctcgaccacccgtccgagctggtactctcttacagccgtgccatgatgggatggctgctgtttaccgacgctcttccgcagcatatcacccaaatcggcttgggcggcggttcgtttgcacgctggatagacacctacctgcccgacacgcgccaaaccgccgtggacatcaacccgcaggttatcgccattgcccgcaacctgtttgagttgcctttcgagggcgagaaatttgaaattattgaagcagacggtgcggaatatatcaaagtcttccgccacaacaccgatatcatcttggtggacgggttcgacggcgaacaaatcatcgatgcgctggttgaagaaccgtttttccgagactgccgaaacgcactctcttcagacagcatattcgtaaccaactggtggagcggcgacaaacgctaccaacgcttcatcgaacgcctgttaaacgtctttgaagggcgcgtcttggaacttcctgccgaaagtcacggcaatgtcgcggtaatggcattccaaagcagccccaaagagcaaaacatagacaaactcaagaaacgcgccgacaaactgagcaacacatacggattggacttccaccgtatgctcgccggcctgaaagcatccaaccccaacaacggcaagcatttccacctttaa

SEQ ID NO: 45820 - DNA, 216 bp, Neisseria meningitidis; identical to SEQ ID NO: 39553

SEQ ID NO: 45821 - DNA, 402 bp, Neisseria meningitidis
atggttgcccccgtatatgcacaggggcaaccggatgcggtcaacgcttatattcaaaagaaaaaagtcatcgtaaacacatccaaagcggaactctgttttgccgatgacaggcagtgccaccccgtcctcatcggtgttgccacgcccaaggggacgttcgggctgacgctgaacagtaccgacaagcctggatacggcggcgaagtcatcggtttcaagcaggagggtgattttcttttcgccctgcaccgcgtttggaatcagataccgtcggaaaggcggaacgaacgcatcgcctccccgtccgtgtccgacaggattatgaccaacggctgcatcaacgtcagcgatgcggtgtacgaaaaactgcgtcattattttgtgttggaagtgatttga

SEQ ID NO: 45822 - DNA, 1362 bp, Neisseria meningitidis
atgctgaaaaaatggttgaataagatgctgccttccggtcggagcagtaaaaaagcggaaagtaaaacggtcattcctgccgaaagacacaacatccgtgccgaaatgttgagctttgccgccgaaaacgtcatacgccgtctgaaaggggcggggtttcaggcttatgtggtcggcggcgcggtcagggatctgctgctcggcatcgaacccaaagatttcgatgtcgcaaccgatgccacgcccgaacaggtgcacaaactcttccgccgcagccgcatcatcggcaggcgttttcaaatcgtccatgtgatgaacggtgcggagattatcgaagtaacgacgtttcgcggcggtgcgaaggttcatcagaacgcgcacggcagaatcatgaaagacaacacctacggcagcatcgaagaagatgcgatgcggcgcgattttacctgcaatgccttgtattacgatcctgaaaaagaagagattttggatttccacaacgggattgccgatgttgccgcccgcaggctggttatgattggcgatgccgccgaacgctatcaggaagaccctgtcaggattttgcgcgccatccgcctgtcgggcaaattgggctttgagctgtcggaagaaaccaccgcaccgattgccgaatcgatatgccgtctgaagcacgaaccggtagcgaggctgtttgacgaaatcatgaaactgctgttttcagggcacgcgcgcgagtgtctgaaacgtttgaacggatttgacataccggacgacatccatccgctgctcaatgccttgcgcgtttcagacggcatcgccggaaaaatgacggtgcttgccctgaaaaataccgatgagcggctgcgtgctgacaaatcggtttcggtcggttttgtactggcggctctgatgtggcccgagttggaacgccattggaaaagcaatctgcaacagggtttgaaacctgcgcccgccctgtccgatgcaatcaatacgatgcgtgaaaccgtcgaacgcggttggggcgtgccgcaacgcttttccgccacgatgcgcgaaatttggatgtttcagccgcagtttgagaaccgcaaaggcgcacgtccgcataaactgtttgcacaggcgcgtttccgtgccgcctatgatttcctgctcttgcgcgccgaaaccggcaatgcggaccgcgcccttgccgagtggtggacggcgtttcagacggcatcgcaggaacaacggacggaaatgaccaaaaacgaggctgctgcccggcacgaaaaaaacgaaggacaggcgaaaaaacgccgccgtcgcaggcgcaaacccaagccgaaggttgagggaacggattgggaataa

SEQ ID NO: 45823 - DNA, 417 bp, Neisseria meningitidis
atgaaaacatcgacggtcgtttttggcggattttttatggcagacaacggagagcgaatccaaatccccgttttggaaaatcctgacattagggaaatcaatcactttttttccgtatcaaattttgagaaaaaaaccggcgtccttgttttcagaatcatccccgagccggaatttggcaataccgaattaactgtctattttgaaaaaggatattatttgccaatgattcaaacaattttagaaggcggggatattgaagtcaaaaaccttaaaacggaaaattatagtggaaatacaatggaaatttggggagattcctaccctattgagcatatctctaaaaatatttctacaattcaaaatataatttctgaatttatgatacaaaaacaaacaccggcaccaataatttga

SEQ ID NO: 45824 - DNA, 576 bp, Neisseria meningitidis
atgttattgctgtcggcatttgtgcttgctgcgtgtaatgcccaaaaccggcaatccggtgtacggcatcaggatttcgcgcgtgtagccgtcgatttgtttcggagtgcctgcgtcctgactcaaggcagttttgaatcggtttccaagtttgccgctgtcggacattttgtccctgtcggaaaggaagacctgtcccatctgccgcccactgttgcagaacccgatgtacaggcgttgtggacgcttgaacgcgatggcggcatttattatttgagcctgacgcgcgacagttgcagtgtgaaagccgagcgggcagacagtgccgcgctgttggaacattttgacggacttgtccgacagccgccgaaaaatgccaatatagaattgagggcggaacagtcggtgcaggcatcatttgaaatccgccaagtcagctatgcctggcgggaagcaggcagctccgaagaaaccgtattgaccgcacaaaccgccgattccccggatttacccgtacaggcagttttgaacctgacgcaccgttcccacaacgggaaacccctaattctcccctaa

SEQ ID NO: 45825 - DNA, 729 bp, Neisseria meningitidis
atgcttttaggtgtcaacatcgaccacatcgctaccgtccgcaatgcgcgcggcacgacttatcccagccccgtggaggcggcactggttgccgaaacgcacggtgcggatttgattaccatgcacctgcgcgaagaccgccgccacatcaaagacgcggatgtgtttgccgtcaaaaacgccatccgcacgcgcctgaaccttgaaatggcgttgacggaagaaatgctcgaaaacgcgcttaaagtgatgccggaagacgtgtgcatcgtgcctgaaaaacgtcaggaaatcacgaccgaaggcggcttggacgtattggcgcaacaggaaaaaatcgccgggttcaccaaaatcctgaccgacgcaggcatccgagtctctctctttatcgatgccgacgacaggcaaatccaagccgcctatgatgtcggcgcgcccgttgtcgagctgcacacaggcgcgtatgccgacgcgcgcagccacgccgaacaactcaagcaattcgagcgtctgcaaaacggcgcgcattttgccggcgatttgggcttggtcgtcaacgccggacacggactgaccatacacaacgttacccccatcgcccaaatcctcgccatccgcgaactgaacatcgggcattcgctgattgcccaagccctcttcctcggactgcccgaagccgtgcgccaaatgaaggaggcgatgttcagggcaaggctgctgccgtaa

SEQ ID NO: 45826 - DNA, 1119 bp, Neisseria meningitidis; identical to SEQ ID NO: 39438

SEQ ID NO: 45827 - DNA, 1563 bp, Neisseria meningitidis; identical to SEQ ID NO: 39009

SEQ ID NO: 45828 - DNA, 1542 bp, Neisseria meningitidis; identical to SEQ ID NO: 39823

SEQ ID NO: 45829 - DNA, 987 bp, Neisseria meningitidis
gtgagtggagcagaaagttaccggcatatcacggtcttgctgaatgaggcggtggatgcgcttgccgtgcgcgaagacggtgtctatgtggacggtacgttcggcaggggagggcattcccggctgattttgtcgcgtttgggcgatgcggggcggttgattgttttcgacaaagaccctcaggcgattgctgtggcagaagagctggcgcgttcggacaaacgggtcggtgtcgtgcatggcggttttgcttcgtttcaggcggcattggacggtttgggtatcggcaaggtggacggtgcgctgtttgatttggggatttcgtctccgcaaatcgatgacggcagccgcggtttcagcttccgtttcgatgcccctttggatatgcgtatggatacgacgcgcggtatgtctgccgcagagtggatagcggttgcgtcggaacaggatttgcacgaggtaatcaagaattatggtgaagagcggtttagccgccagattgcgcgcgccattgttgcgcaacgggcggaaagtccaatcgatacaacccgcaagctggcgcagatcgtggcacaaaacgtccgtactcgcgagcgggggcaggatcctgcgacgcgcaccttccaggcggtccgcatctttattaaccgcgagcttgaagaagtaggggcagtattgccgcaggtcatgtgtcgtctgaaagagggcggacgtttggcggtcattgctttccattcgttggaagaccgcattgtgaagcagtttgtcaaaaaatattcgcaacacgcgcccctgccgcgctgggcggcggtcagggaagcggatttgcccgagctgcccctgaaaatcgtgggcagggcattaaagccgggtgaggcggaaattgccgccaatccgagggcgagaagtgcggttttgcgtgtggcggagcggactgccggtccgataccggaacaatcacagagaaaaacgtctgaatggcaatga

SEQ ID NO: 45830 - DNA, 369 bp, Neisseria meningitidis
atgcgtcattacgagatcgtgtttatcgttcatcctgatcaaagcgagcaagtgcctgctatggttgaacgttacaaaaccatgattgccgaagcaaacggtaagattcaccgtttggaagattggggtcgccgccaactggcttacccgattaacaaaatccataaagcccattacgttttgatgaacatcgaaaccactcccgaagtggttgaagagctggaaaccgcattccgcttcaatgatgccgtattgcgccatctaaccatcaaaaccaaacacgccgttactgaagcatcccctatgttgggtggtgaaaaggctaagaacctgttgagcggtgcgtctgaagaagcggtcgcccaataa

SEQ ID NO: 45831 - DNA, 1722 bp, Neisseria meningitidis
atgccgtctgaagccatctgttcaaagaaaactatgctcaataaagaccaatttgcggacaaccattttatccgcaccttcatcgaagaagacctcaaaagcggcaaacacgaaaccatccaaacccgttttccgccggagcccaacggctacctgcacatcggacacgccaaatccatctgcctgaacttcggtttggcgtatatttacgacggcttgtgcaacctgcgttttgacgataccaaccccgaaaaagaaaacgacgaatacgtcaacgccatcaaagaagacgttgagtggctcggtttccattgggcgggcgagccgcgtttcgcttccaactatttcgaccagctttatgactacgccgtcggtttggttaaagacggcaaagcgtatgtcgatgatttgacgccagaagaaatgcgcgaataccgcggtacgctgaccgaagcaggcaaaaacagcccttatcgcgaccgcagtatcgaagaaaacctcgacctgttcacgcgcatgaaaaacggtgagttccccgacggcagcaaaaccctgcgcctgaaaatcgacatggcatccggcaacatcaatatgcgcgatccggtcatctaccgcatccgccgcgcccatcaccacaacaccggcgacaaatggtgcatctatccgatgtacgactacacgcattgtatttccgatgccatcgaaggcatcacgcattccttgtgtacgctcgaatttgaagcccatcgtccgctgtatgactgggtgttggacaacatccccgcgccgcacgccacacgtccgcgccaatacgagttttcacgcttggagcttttgtacaccattacctccaaacggaaattgaatcagttggttgtggaaaaacacgtttccggctgggacgatccgcgtatgccgaccatttccggtatgcgccgacgcggctacacgcccgaagggctgcgcctgtttgccaaacgcgccggtatttccaaatctgaaaacatcgtcgatatgagcgtgttggaaggcgcgattcgcgaagagttggaaaattccgccccacgcctgatggcggtgttgaacccgctcaaagtgaccctgaccaactttgaaaccggcagaacccaaagccgccgtgccgcgttccatccgaaccacgaggaaatgggcgagcgcgaagtacctatttcacaaaccatctatattgaagccgacgactttgccgaaaatccgcccaaaggcttcaaacgcctgattcccggcggcgaagtacgcttgcgccacggctatgtcatcaagtgcgatgaagtcgtcaaagacgaagcaggcaatgtggttgaactcaaatgcagcatcgaccacgacaccttgggcaaaaatccagaaggccgtaaagttaaaggcgtgattcattgggtttccgccgaacacgccgccgaaatcaaagtccgtctgtacgaccgcctctttaccgtcgagcgtcccgatgccgtgcgcggcgaagacggcgaatacctgccgttcaccgatttcctcaatccggaatccgtcaaggaaatcaccgcctacgccgaacctgccgccaaagatttgccggcagaaagccgttggcagttcgagcgtatcggctacttcgtaaccgaccgtaaagaccacggcaaagacacgtcggtgtttaaccgcacggtcacgctgaaagattcttggcagcctaagtaa

SEQ ID NO: 45832 - DNA, 543 bp, Neisseria meningitidis
gtgcagagttggaaagcgcggcgggatttcaatattgtaaagcaggatttggatttttcctgcggggcggcttcggtggcgacgcttttgaacaatttttacgggcaaacgctgacggaagaagaagtgttgaaaaagctggataaggagcagatgcgcgcgtcgtttgaggatatgcggcgcattatgccagatttgggttttgaagcgaaaggctatgccctgtctttcgagcagctcgcgcagttgaaaatccccgtcatcgtgtatctgaaataccgtaaggatgatcatttctcggtattgcgcggtatagacggcaatacggttttgcttgccgacccgtcgctgggtcatgtttcgatgagcagggcgcagtttttggatgcttggcaaacccgtgagggaaatttggcaggtaagattttggcggtcgtgccgaaaaaagccgagacaatttcaaataaattgtttttcacacatcatcccaagcggcagacagagtttgcagtccgacaaatcaggcaagcacgtgcagagtaa

SEQ ID NO: 45833 - DNA, 237 bp, Neisseria meningitidis
atgttgcgtgtccaaaaatgggggaactcggcggccgtccgactgcctgccgacatgctgaaacaattggattttaaaatcggcgacgctttggtagcggaagtacataacggcgaactccgtgtgcgtgctgcccgacgtttccgcttggcagacttgcttgccgaaatggaagaaaccccgccgcgcgtagaaggctgggaaatcttggatgatgtcggcaacgaggtcgtctga

SEQ ID NO: 45834 - DNA, 795 bp, Neisseria meningitidis
atgatgtccgaacaccgagtcaaccacgaacccgtcttcctgttggcttcctcgccctggcgcgaaagcagcctgcgggtcgaagcgttcagccgccgttacgggcgtgtggcacttttggcaagaagcgcgcgcaaacggcagagcgaattgcgcggcgtgttggtgccgtttgtgccggtgagtgcgtcttggtatggttcgcaagagttgaagaccctacatcgcgccgaatggataggcgggtggccgcagccgcagggtagggctttgttcagcggattgtatgtgaacgagttgatgctgaagttgaccgtccgcgaagatccgttgcccgagttatacgacgcgttggcggaagtgatggaggcggtgtgctgcaaagccgcttatatcgacgacttgcgccgtttcgagtggcggctgctgaacctgttgggcgttgcccccgatttgcacgccgacggcacgggcggcgatattttggcggacaaaacctaccggctgatgcccgaagaggcggtcatgcccgtatgcgaggacgcagacgcgctttcgcacgaagccggcgcaattgtcgaagggcaaagcctgatcgatttgcgcgaaggcagtttccgcaccgccgaaagcctgcaacaggcattgaaaatcacacggctttttatccgccacctgttgcccgaggggctgaaatcgcggcaggtgttggaacagatacggcagtttgaccgcaaagaaaccgcccgggaaaccgtcccgacttcggacggcacggcttcaaatgccgtctga

SEQ ID NO: 45835 - DNA, 501 bp, Neisseria meningitidis
ttgccacaatgccgtctgaagcctttcagacggcatcgtcctgccaaatgctcaaacaatatgccgaaagccaccttttacacgcacgttgcccaagttccgattttcacctgccgcctgattgcccgtgcgattcgggacggcggcaggatactggtgtggtccgattcgttcgggcggcttcaggaattggacaaaatgctttggcaatacgaagccgagagtttcattccgcacgaaatttgggaaatggaagaagccatgccgtctgaaacatccgtcctgcttgcttgcggcggcaatccgccccgaattcccgaaggcatgactgttttgaacctgtccgacggtttttggaacaccgctccggtcttgcccgcgcgcgttttggaaatcgtcggcaacagcttggaagatctcgccgacgcgcgcgaacgctttaccgcctaccgccgaagcggttttgccatcgaacatcacggcatggagggcaaggcataa

SEQ ID NO: 45836 - DNA, 417 bp, Neisseria meningitidis; identical to SEQ ID NO: 39888

SEQ ID NO: 45837 - DNA, 1173 bp, Neisseria meningitidis
atggcaacacacggagacgaagtgaaaattcaaaacagacaagaagccgatagcgcaaaagccaaacgcaaacgccgcctgacggcattgacgctgctgttcgcgcttgccgccgcagccgccgggtcggcgttttttttatggtggcagcacgaagaagaaacggaagacgcttatgttgctgggcgcgtggttcaggttacgccgcaaaagggcggtacggtgcggaaggttttgcacgacgatacggatgccgtgaaaaaaggcgacgtgctggcggtattggacgacgataatgatgtgctggcttacgagcgggcaaaaaacgagctgattcaggcggtgcggcaaaaccgccggcaaaatgccgccacttcgcaggcgggggcgcaggttgccttgcgccgtgcggatttggcacgcgcgcaggatgatttgcgccgccggtctgctttggcggaatcgggcgcggtgtccgccgaagagctggcacacgcccgtgcggcagtgtctcaggcgcaggcggcggtcaaagcggctttggcggaagaatcttcggcacgcgcggctttgggcggtcaggtttctttgcgcgaacagccggcggttcagacggcaatcggcaggttgaaagatgcgtggttgaaccttcagcggacgcaaatccgcgcgccggcggacggtcaggtggcgaagcgttcggtgcaggtcgggcagcaggtggcggcaggcgcgccgctgatggcggtggtgccgctgtcggatgtgtgggtggatgccaattttaaagagacgcagttgcggcatatgaaaatcggacagcctgccgagctggtgtccgatttgtacggcaaacaaattgtttatcgcggcagggtggcagggttttcggcaggtacgggcagcgcgttttcgctgattccggcgcaaaacgcaacgggcaactggattaaagtggtgcagcgcgtccccgtccgtatcgtgctgaaccgcgaagatgtggacaggcatcccttgcgcatcggtttgtcgatgacggttaaagtggatacttctgccgcaggcgcgcctgtttcaaaaacgccgggtgcggcattgccggaaatggaaagtaccgactggtcggaagtcgatcggacggtcgatgaaatcctcgggcaatccgcgccctga

SEQ ID NO: 45838 - DNA, 285 bp, Neisseria meningitidis
atggcttttcatcacggccgccgatgccgtattacgccgcttcccgaaaccgagtcattacaggagagtaaaaaaatgaacatcaacgaactgggcgcaaggatagaccgcccgaccatccgcgaactgattgcctacgcaacctgccgcaaccgccccatttcaaactcgacactgctgcgtatggaaaaagacggacggataccgtgccgtctgaaaaccccactcacatcctccgtatgggacacccgcgaagttttggaagccctggggttacagcaataa

SEQ ID NO: 45839 - DNA, 843 bp, Neisseria meningitidis; identical to SEQ ID NO: 39914

SEQ ID NO: 45840 - DNA, 375 bp, Neisseria meningitidis; identical to SEQ ID NO: 41186

SEQ ID NO: 45841 - DNA, 549 bp, Neisseria meningitidis; identical to SEQ ID NO: 36303

SEQ ID NO: 45842 - DNA, 291 bp, Neisseria meningitidis; identical to SEQ ID NO: 39909

SEQ ID NO: 45843 - DNA, 906 bp, Neisseria meningitidis
gtggcacgggatttttacaaagaatacaaccccttatttatcaaaacataccaatccgaacaccccggcacatccgtcagcatccaacagtcccacggcggctccagcaaacaggcattatccgtagccaacggccttcaagccgatgtcgtaaccatgaaccaatcctccgacatcgacctgctcgaaaaaaaaggactggtagaaaaaggctggcaacaagccctccccgaccacgccgcgccctacaccagcactatggttttccttgtccgaaaaaacaaccccaaacagatccgcgattggaacgaccttgccaaagacggcgttaacatcgtcatcgccaatcccaaaacctcgggcaacggacgctacgccttcctcggcgcatacggttacggtctgaaaaccaccaacggcaacgaacaggaagcccaaaaactcgtcgcatccatcctcaaaaacacccccgtttttgaaaacggcggacgcgccgccaccaccaccttcacacaacgcaacatcggcgacgtactcattacttttgaaaacgaagccaactacgtcagcaaaaaactgacccaaggacagtttgaaatcgtctatccgagctacaccatttccgccgaaagccccgtcgccgtcgtcaacagcgtcgtcgcgaaaaaaggcacgcaaaaaaccgcccgcgcctatctcgaatacctttggagcgaaccggcgcaagaactcgccgcctcactctacctgcgcccccgcaaccccgaagtattggcaagacacaaagccgacttcccagacttagactcattctctcccgaagaaaaattcggcggatgggacaacatcatgaaaacctacttcgccgacggcggcatattcgaccgcctgaccgcacaaaaatga

SEQ ID NO: 45844 - DNA, 879 bp, Neisseria meningitidis
atgatgagtcaacactctgccggagcacgtttccgccaagccgtgaaagaatcgaatccgcttgccgtcgccggttgcgtcaatgcttattttgcacgattggccacccaaagcggtttcaaagccatctatctgtccggcggcggcgtggcagcctgttcttgcggtatccctgatttgggcattaccacaatggaagatgtgctgattgacgcgcgacgcattacggacaacgtggatacgcctctgctggtggacatcgatgtgggttggggcggtgcattcaatattgcccgtaccatccgcaactttgaacgtgccggtgttgcagcggttcacatcgaagatcaggtagcgcaaaaacgctgcggccaccgtccgaacaaagccattgtatctaaagatgaaatggtcgaccgtatcaaagctgccgtagatgcgcgcgttgatgagaacttcgtgattatggcgcgtaccgatgcgctggcggtagaaggtttggatgccgctatcgaacgcgcccaagcttgtgtcgaagccggtgcggacatgattttccctgaagccatgaccgatttgaacatgtaccgccaatttgcagatgcggtgaaagtgcccgtgttggcgaacattaccgagtttggttccactccgctttatacccaaagcgagctggctgaaaacggcgtgtcgctggtgctgtatccgctgtcatcgttccgtgcagcaagcaaagccgctctgaatgtttacgaagcgattatgcgcgatggcactcaggcggcggtggtggacagtatgcaaacccgtgccgagctgtacgagcatctgaactatcatgccttcgagcaaaaactggataaattgtttcaaaaatga

SEQ ID NO: 45845 - DNA, 1110 bp, Neisseria meningitidis
atgttttcggacacagatatatccatgatggaaaccgccctccgacttgccgctttgggacgtttttccacttcgcccaatccgcgcgtcggctgcgttatcgcacacggcagccaaattgtcgggcaaggcttccacgtcaaagcgggcgaaccgcacgccgaagtccacgccctgcgtcaggcgggcgaaatggcacaaggcgcgaccgcctttgttaccctcgaaccgtgcagccattacggacgcacaccgccctgcgccgaagctctgctccgttccggtgtaacacgcgtcgtcgccgccatgcgcgaccccaacccgctggttgcaggcaaagggcttgccctgctcgaagcagcaggcatcaagacggaatgcggtttactcgaacatcaggcaagggaactcaaccgaggcttcctgtcgcgcatcgaacgccgccgccccttcgtccgcctcaaatgcgccgtttcgctggacggcaaaaccgccctttcagacggcagcagcttttggattaccggcgaagacgcgcgtgccgacgtacaggttttgcgtgccgaaagctgcgcggtgctgaccggcatcggcacggtgttggcggacaatccccggctcaacgtccgcgcttttccaactttgcgccaacccgcacgcatcgtgttagacagccgcctgcgcctgcccttggacagccaccttctgaccgacggacaatctccaacctacatcgccaccttggaacgcgatgaagataaactccgcccctatcgggaacacgcacacatccgcatcctgatgccgtctgaaacggcaggcggcaaaatcgacctgaaccacctgatgcgcctccttgccgacgaaggtttcggagaaatcatggtcgaagcaggctccgaactcacatccgcatttctggcagaagatctggcggacgaaatcgtgctgtaccgttcgcccaaaatcctcggcagcggcaaagacctgctttccctgcccgaaaaccgcgccgccctttccgcaccgcccttgtggacacccgtttcaagcgaaatcctcggacacgacatcaaaaccgtgttccggaaaaacgataacgccttttaa

SEQ ID NO: 45846 - DNA, 390 bp, Neisseria meningitidis
atgttatataaatgtaaaatcaaaaagttagataacaccattgaagaggcagtattgattgaaataaatggttatgaactacattgttttatatcgtactgcccattcaaaatatttgaaaatcaattttatgaagtggaattatcctatgaaatctttaatgattacatactggataaatcaacttcaaatattggatttagaaaaatagatgatagtttcaagtatgaaataacggcagaattaaaaaataatcatctaaccctacaaaatatacaatttgaagaagatgagtatttaataaactactcttatcttgataattgtttggttacattaacggctgatagaataagtgtttcatttattagagaaattcaggcagcctga

SEQ ID NO: 45847 - DNA, 843 bp, Neisseria meningitidis
atgtgtcaactgctgggcatgaactgcaatacgccgaccgatattatgttttcctttgaaggcttccgccggcgcggcggcattaccgaccatcatgccgacggtttcggcatcggctttttcgaaggcaaaggcgtgcgcctgttccacgacgacaagccgagcgcaaattcccccgtcgccgacctcgtgcgtgcctaccaaatcaaatcggaaaacgtcatcgcacatatccgcaaagcatcgcaaggacaaacctcgctggcgaacacccatccctttatgcgcgaaatgtggggcggctactggctgtttgcccacaacggacatttgattgattttttccccgaacagggcgaatttttccaccccgtcggcacaaccgattccgaacgcgcgttctgccacatcctcaaccgcctgcgcacccgctttgccgcccgtcccgacgacgacacgctgtttgacgcgattgcggggctgacgcacgaaatccgcaagttcgggctgtttaactttatgctttcagacggcattgccctgtttgcccacgccagcacactgctgcactacatcgtccgccaagccccgttcggcaaggcgcgcctgctcgacgacgacgtgatggtcgattttgccgaagtaaccacgccctccgaccgcgtcgccgttatcgccaccctgccactgacccgcgacgaatcatggtcccaacttgccgtggacgaactggtcatgttccgcgaaggcaacatcgtccgacacgaccgtcccgaaaaccccgtctatatgagtgccgaagaaggtctggaaatcgcccgcgccgccggcgtatcggtttga

SEQ ID NO: 45848 - DNA, 324 bp, Neisseria meningitidis
atgatgaccgaaagcgagtttatccgcgcgagcgaagcattatttgaacacatcgaagaccaaatcgacgaaaacggctgggatttcgactgccggtttgccggaaacgtcctgaccatcgaagccggagacggcacgcaaatcatcgtcaaccgccacacgcccaatcaggaattgtggattgccgcaaaaagcggcggctaccatttcgccgaacaaaacggcaaatggctggcaacgcgcgacagccgcgatttttatgatgttttgaacgaagcactgagcgcggcttcgggcgaagcggttgagattgaggaattgtga

SEQ ID NO: 45849 - DNA, 522 bp, Neisseria meningitidis; identical to SEQ ID NO: 39913

SEQ ID NO: 45850 - DNA, 768 bp, Neisseria meningitidis
atgagaccatatgctactaccatttatcaactttttattttgtttattgggagtgtttttactatgacctcatgtgaacctgttaatgaacaaaccagtttcaacaatctcgagccaatgacaggatttgaacatacggttacatttgattttcagggcatcaaaatggttatcccttatggctatcttgcacggtatacgcaagacaatgccacaaaatggctttccgacacgcccgggcaggatgcttactccattaatttgatagagattagcgtctattacaaaaaaaccgaccaaggctgggttcttgagccatacaaccagcaaaacaaagcgcactttatccaatttctacgcgacggtttggatagcgtggacgatattgttatccgaaaagatgcgtgtagtttaagcacgactatgggagaaagattgcttacttacggggttaaaaaaatgccatctgcctatcctgaatacgaggcttatgaagataaaagacatattcctgaaaatccatattttcatgaattttactatattaaaaaaggagaaaatccggcgattattactcatcggaactatcataggtatggagagaacgattacagcactagcgtaggttcctgtattaacggtttcacggtacggtattacccgtttattcgggaaaagcagcagctcacacagcaggagttggtaggttatcaccaacaagtagagcaattggtacagagttttgtaaacaattcaagtaaaaaataa

SEQ ID NO: 45851 - DNA, 810 bp, Neisseria meningitidis
atgacgagaattggggattttgccgccaaatccatgatagagatacggagcaaacgaatgattaccctgccttccttaaacaatctgccgtcaaaatgggatgaaatccgccattgcctcgaaacccgggtttttgagtgcggcgttatgccgcatcccaatctgacggaatgcgaagccgggcagttcgatcgggatttttgggacaataccggctgcgcgcctgaagaatatgtccgtatccgccgagccatccgtctgttggaagtgcgttatcccgacagcttgaacgagctggtgtgtgccgccattgccacgcctttgggcgagatgctggcggtgttcggaaataagggattgtgtctgctggagtttgtcggacagaagcatttggaacaggaaattgccgccgtccaaaaagccttgcgcggacggtttgtgtttcgggaggatgagcggacgcaacttttgcggcaggaattggacttatacttcaagggtcgtctgaaaacctttgccacgcctttggagcagattggcaccgagtttcaaaagcaggcatgggacgcgctcttggcgattccttacggcgaaacgcgcagctacaaggagcaggcgcagcgtttgggcaaccccaaagccgtccgcgccgttgccgccgccaacgggcagaacaaagtatctatcctgattccctgccaccgcgtcatcggcagcgacggcaaactgaccggctacgcgggcgggttgaaccgcaaacagtttttactggctttggaacgcggcgaagttcagacggcattgttttaa

SEQ ID NO: 45852 - DNA, 789 bp, Neisseria meningitidis
atgatggaaaacggaaaaacagtcccgagatggcgttttgccttgaaaagtgcgggttggcatctcttaatcagcctgtcggttgcagggctggcggcattgctggtttttaaggtttggtatccttatccttatgccgagctgacgggagggctgtcgctttatcagctggtggtggctgtcgatattgtatgtggtccgctgctgactttaattttggcaagcccgaagaaaaagacaaaggcacgcatggtcgatttttccatggtcggcatcatccagctggcggctttggtgtacggtctgcacagcgtttcgctggcgcgtcctgtggtggaagcgtttgaacaggatcgtatgaccattgttacggcggcggaagtcgtggtcgaagatttgcacaaagcccccgaagggctgcaaagcctgtcgtggttcggcatccgccgcattgcattgaaagaacctgaggatgcggatgagaagaacaagacgctggatttgtccctgaaaggtatcgagccgagtatgcgtcccgaccagtggctgccgtattccgacaaggaagcagaagaaatccgcaaacatctgaaaccgctgaaagtcttggcggatgcgagaaaaacgacggttgcggacattctgaaacaggcaggtctcgccgaaggggaggagctgtattacctgccgtttaccagcagcaggcagaaagagtggatagtcattaccgataaagagggcaacaccaaaggctacgcgccgatagacggcttcatcatcaccccttaa

SEQ ID NO: 45853 - DNA, 534 bp, Neisseria meningitidis; identical to SEQ ID NO: 39841

SEQ ID NO: 45854 - DNA, 727 bp, Neisseria meningitidis
atggcatttgcctcactatttaccctgccggacgacatcaccgccgttttggacgatgttgccctgatgaccaaagccgccgcaaagaaaaccgccggcgtggtcggcgacgatttggcacccaatgccaaccgtgttacgggcgtatcggcagaacgcgagttgccgattgtttggtcgatggcgaaaggttctttttccaacaagccggttttggtgcctgcggccctgctgctttccgccttcctgccgcaactcattacgccgcttttgacggcaggcggcatttatctgtgctttgaaggcgtagaaaagctgctgcacaagtttctgcaccgacatgacgcgcatgcccgtaatggcggcaatcggcatcggcatgactgttttggtgtacggaatcgttgccgtcatcgtcaaactcgacgacttaggcatgctgctgatgcgccgcccacaaaccttttcgcgcagtttggggcaaatgctgactgcctttatgccttgctttatgcgcggtttgagcgtggtcggcacgcttgccatgtttcttatcggcggcgtactggtcgcccacaacctcggccttctgcacgatttcctgcacgcgcaacactgggacgctggctgggcggagtacttcgccaacctcgttgtcgggctgctttccggttcgattgcctgcgcccccgccttgccgctgatgaatcgtttcggcaggcattga

SEQ ID NO: 45855 - DNA, 318 bp, Neisseria meningitidis; identical to SEQ ID NO: 39936

SEQ ID NO: 45856 - DNA, 510 bp, Neisseria meningitidis; identical to SEQ ID NO: 39924

SEQ ID NO: 45857 - DNA, 752 bp, Neisseria meningitidis
atggcgagaaccgcaataactgacaacatatgggaacaattacaaacaaccatgaaagcgcacggctgtcatcaatggaagaacgaccgtaccgtgatggaagccatactatggaagctaagaacaggtgcaccatggcgagacatacctattgagctagggtcatggaaaaccgcttataaccgctttaaccgatggtctaaaaaaggcttgtggcagaatttttttttgatctacgaaaagaaattgacaaagaatgggtattcatcgacggaagttatgtacggtgtcatcaacatgcaagtggagctcggcgtggtttcgatagagcaattggacaaagccgtggcggaaacacgacaaaaatacacctatgtgtggactcgcatggaaatccgctcgattttaaagtcactgggggtaacgtgcacgacggtcaagttgcaaacgacttgatagaagtcatacaagaagcccagtattttatcgctgacaaagggtatgactcgcaagaaatcagagataaagcgatagaacacggtatgaaagctattataccaaagcgtaaaaatgccaagaaacctaaccctgattttgatagctacctttataaattacgccacttagtcgagaatgcatttgcacgattaaagcagtttcgtagtattgctactcgctatgagaaattagctcgtaattttaaatcgatgctttacttggcttgctctattattcatgctaagttaaattga

SEQ ID NO: 45858 - DNA, 129 bp, Neisseria meningitidis; identical to SEQ ID NO: 43085

SEQ ID NO: 45859 - DNA, 492 bp, Neisseria meningitidis; identical to SEQ ID NO: 39917

SEQ ID NO: 45860 - DNA, 919 bp, Neisseria meningitidis
ttggcagccgatcgaacagtacctgaaccgtcaaaaaacccgttaccttcgagaccaccgcggccgtcccgcctacccgctgttgtccatgttcaaagccgtcctgctcggacaatggcacagcctttccgatcccgaactcgaacacagcctcatcacccgcatcgatttcaacctgttttgtcgttttgacgaactgagcatccccgattacagcaccttatgccgctaccgtaactggctggcgcaagacaacaccctgtccgaattgctggaactgattaaccgacaactgaccgaaaaaaacctaaaaatagagaaagcatccgccgccgtcattgacgccaccattattcagaccgccggcagcaaacagcgtcaggctatagaagtcgatgaagaaggaaaagtcagcggccaaaccacaccgagtaaagataaagatgcccgccggacaaagaaaaacggcctctacagactcagttacaaacaacatacccgtaccgatgaggaaggctatatcgagaaactgcacatcactcccgccaatacccatgagtgcaaccacctgtcgcctttgttggagggcattgccgaagatacgaccgtctatgccgacaaaggctacgacagtaaggaaaaccggcaacacctgaaagaacatcggttgctggacggcattatgcgcaaagcccagcgtaaccgtccgctgacggaagcgcaaaccaaacgtaaccgatatttgtcgaaaacccgttatgtggtcgaacaaagcttcggtacgctgcaccgtaaattccgctacgcccgggcagcctatttcgggctgattaaagtgagtgcgcaaagccatctgaaggcgatgtgtttaaacctgttgaaagcagctaacaggctaagtgtgcctgttgccgcctaa

SEQ ID NO: 45861 - DNA, 318 bp, Neisseria meningitidis
atggtagtacgcggcggaatctatctggtctccttagacccgaccgtaggaagcgaaatcaaaaagacacgtccttgtgtcgtagtatctcctcctgaaatacacaactatctcaagactgtgctgatcgttcctatgacgagcggaagccgtcctgccccgttccgcgtcaatgtccgctttcaggataaagacggtttgcttttgcccgaacagattagggctgtggataaagccagattggtcaagcatcttggaaatttagacaacagtacggctgaaaaactgtttgcagtattgcaggagatgtttgcctga

SEQ ID NO: 45862 - DNA, 441 bp, Neisseria meningitidis; identical to SEQ ID NO: 38836

SEQ ID NO: 45863 - DNA, 453 bp, Neisseria meningitidis
atgtttatggctattgcgaacaataaaaaagcatttcacgattttttcattgaagaccggattgaagccggtttggtcttggaaggctgggaagtcaaagcaatccgcgccgcgcgcgtacagcttaaagagagttatatctattggaaaaaagacgcgttttatctggtcggctgccatattacggctttgcccacagcctcgacacacattaaaccagatgccgtacgtccgcgcaagctcttgttgaaccagtcggaaatcaacaaattaatcggcaaaaccgaacgtgccggctacaccatcgtgccgctggatttgcatttttcgcgcggaaaaatcaagatggaaatcggtttggcaaaaggtaagaaacagcacgacaaacgtcagagtatgaaagaggcggattggaaacgcgagaaacagcggttgattaagcatacgcgctga

SEQ ID NO: 45864 - DNA, 402 bp, Neisseria meningitidis
atgcgcgcaataaaacatcttgcaatggcgttattgcttatgtttacggtagccggctgtcagttggcaggttggtataagtgttcgtccctgtccggctggtgtaagccgagaaaacctgccgccatcgatttttgggatattgtcggcgagagtccgccgtctttagaggactacgagataccgctttcagacggcaatcgttccgtcagggtaaacgaatatgaatccgcacaacaatcttacttttacaggaaaatagggaagtttgaagcctgcgggttggattggcgtaggcgtgacggcaaacctttgattgagacgttcaaacaggaaggttttgattgtttgaaaaagcaggggttgcggcgcaacggtctgtccgagcgcgtccgatggtaa

SEQ ID NO: 45865 - DNA, 1311 bp, Neisseria meningitidis
atgaacacgccgcatccgcgcccgaaaatcgccgtcatcggcgcaggctgggcaggactgtccgccgccgtcaccttggcgcggcacgccgacgttaccctgtttgaagccggccggcaggcgggcggcagggcgcgcgcactggccggaaataccgacggtttcggttttttggacaacgggcagcacattttgctcggcgcataccggggcgtgttgcgcctgatgaaaaccatcggttcagacccccgtgccgcctttttgcgcgtaccgctgcactggcatatgcacggcggtttgcagttccgcaccctccccctgcccgcgccgctgcatattttgggcggcgtgctgcttgcccggcgcgtaccgtccgcattcaaagccaaactgcttgccgatatgtccgatttgcagaagtccgcacgcctcggacagcccgacacgacagttgcacaatggctgaaacagcggaacgtgccgtgtgccgccgtgatgcagttttggcagccgctggtgtggggtgcgctcaacacgcctttggaaaccgcaagcctgcgcgtgttgtgcaacgttttgtccgacggcgtgctgacgaaaaaatccggcagcgactatcttctacccaagcaggatttgggcgcaatcgtcgccgaacccgccttggcggagcttcaacggctcggcgcggacatccgcctcgaaacgcgcgtatgccgtctgaacaccctcccggacgggaaagtgctcgtcaacggcgaagctttcgatgccgccgtccccgccaccgcgccctaccacgccgccgcgctcctgcccgaaggcacgcccgaacacgttcagacggcatatcaaaaccttcgctaccacgccatcaccaccgtctatctgcgctacgccgaacccgtccgcctgcccgccccgctgaccggccttgccgacggcacggtgcaatggctgctttgccggggcaggctcggactgcctgaaaacgaagtgtccgccgtcatcagcgtttccgaccgcgtcggcgcgtttgcaaaccgggcgtgggcggacaaagcccacgccgacctcaaacgcatccttccgcatttgggcgaacccgaagccgtgcgcgtcatcaccgaaaaacgcgccacaaccgcagccgatgccccgccgccggacttgtcgtggttgcaccggcaccgcatcttccccgccggcgactacctccacccggactaccccgccacgctcgaagccgccgtacaatcaggtttcgcgtcggcggaagcctgcctgcaaagcctgagcgatgccgtctga

SEQ ID NO: 45866 - DNA, 369 bp, Neisseria meningitidis; identical to SEQ ID NO: 37026

SEQ ID NO: 45867 - DNA, 306 bp, Neisseria meningitidis; identical to SEQ ID NO: 36883

SEQ ID NO: 45868 - DNA, 138 bp, Neisseria meningitidis; identical to SEQ ID NO: 39930

SEQ ID NO: 45869 - DNA, 2451 bp, Neisseria meningitidis
atgacacaaaaagaaaagcattttgaggaatatgccgccttggcaacccttcctttgcgggatgtcgtcgtttacccgcatatggttctgccgctgtttgtcggcaggccgaaatccatcgccgcactggaaaacgccattacccgcgaggaaccggttttcctattggcacaaaccgatgcggcgctagaagaaccggttgccgccgacctgtatcagaccggtaccgtcgcacaagtcttacaggtattgaaactgccggacggcacggtaaaagtattggtcgaaggtctgtatcgcggacgtgttctgaccatcgaagacacgggcggtctgttcgtttcccatatagaggcggtcgtggaagaagacacgggcggcaataccgacctcgaagccgtgcgccgcaccctgttggcgcagtttgaacaatacgccaaactcaataaaaaaatccccgccgaaattatcggcagcatcaacggcattgccgaaaacagccggctaaccgatacggtcgcagcgcatttgcagttgaaactggcgcaacgccaacagattttggaaattcccgaaatcggcaaacggatggaattcctgctggcacagctggaatccgaactcgacattatgcaggccgaaaaacgcatacgcggacgcgtcaaacgccaaatggaaaaatcccagcgcgaatattatctgaacgaacagattaaagcgatacacaaagaattgggcgaagaagacgaaaacggcgaactggatgccttggaagcaggcatcaaaaaggcggggatgagcaaagaagcggaagaaaaatgcctgtccgaactgaaaaaactcaaaatgatgccgccgatgtctgccgaatccaccgtcgtacgcaactacatcgacaccctgctcgaactgccgtggaagaaaaaatcccgcgtcagcaaagacatcgccaaagccggattggtgctggataccgaccactacggcctggaaaaagtcaaagaacggattttggaatacctcgccgtccaaaaacgtatggacaaactcaaaggcccgattctgtgcctggtcggccctccaggcgtgggcaaaacctctttgggcgaatccatcgccaaagcaacggggcggaaatatgtccgcatggctttgggcggcgtgcgcgacgaaagcgaaatccggggacaccgccgcacctatatcggctccatgcccggtaagattttgcagaatatggcaaaagccggcgtaaaaaacccattgttcctgctcgacgaaatcgacaaattgggtagcgacttccggggcgatcccgccagcgcgttgctcgaagtgcttgatcccgagcaaaacaacaagttcgccgatcattatgccgaagtggattacgatttgagcgatgtgatgtttattgcgacttcaaacagcctgaatatcccgacaccgctgctcgaccgtatggaaatcatccgtctgtccggctataccgaagacgaaaaaatcaatatcgcgatgcagtacctcgtgccgaagcaaatgaagcgcaacggcgtaaaagaaggggaattggcaatcgaagaaagcgcggtgcgcgatattatccgttactacacccgcgaggcgggcgtgcgttcgctcgaccgcgagattgccaaaatctgccgcaaggtggtgatgcagattaccttggacgaagactcaaaaaccaaaaaaaccggaaaagccaagcccagggcggttaaagtaaatgagaaaaatctgcacgactatttgggtgtgcgccgcttcgattacggcgttgccgaaagcgaaaaccgtatcggacaagtaaccggtttggcgtggacggaagtcggcggcgaattgctgaccgtcgaagccgcagcattgccgggtaagggcgtgattcagtgcaccggccagttgggcgatgtgatgaaggaatccgtgtccgcagcgtggtcggttgtccgctcccgtgcggaatcagtgggtttggctcctgatttttacgagaaaaaagacatccacatccacgttcccgaaggcgcgacgccgaaagacggccctagtgcgggtattgcgatgaccttggcggcggtatctgcctttaccaaaatcccggtacgcgccgatgtggcgatgacgggcgaaattaccctgcgcggcgaagtcctgccgattggcggtctgaaggaaaaactgttggctgcgcttcgcggcggcatcaaacacgttttaattccaaaagacaacctcaaagacttggaagaaatccctgaaaacgtgaaaaccggcctgaccatccatccggtcaaatggatagacgaggtattggctctgggtttggaaagccagcctgagccttgggcagaaccttctggtgcggaagcggcggcggaatccgcttcaaaaccaaaaccccgcagcagggcaaccaaacattga

SEQ ID NO: 45870 - DNA, 363 bp, Neisseria meningitidis; identical to SEQ ID NO: 37674

SEQ ID NO: 45871 - DNA, 1125 bp, Neisseria meningitidis; identical to SEQ ID NO: 39926

SEQ ID NO: 45872 - DNA, 651 bp, Neisseria meningitidis
atgcccgtgacccgccccgccaaaatcaatacttacacacgcatcatcgacgccagccttgcgcttttcaacgaggaaggcgagcgcaacatcagcaccaaccatattgccgcccacttgggcatcagtccgggcaacctctattaccacttccgcaacaaagacgaaatcatcgtccaactgttcaaacgttacagcgaagccctgctggaatacctcaacgaagccgtgttgccgtctgatgtggaagactccatcaattatatggcgggcatttacgacgtgatgtgggaataccgcttcctattcagcgacgtgaacaccctgcttgcacgcagtgccgaactattgggcgaacacaataccttcacccaagccaaagtctccccgctcttggtcaacctgctgacccagctcaacggtctgaacatcatccaagccgaccaaaccgccatgaacgacctcgccgtcaatatgtggatgatcacgaaatactggttcgacttcgacagctccctgcgcggccgcaccaagctgaccgaagactccaaagcacgcggcatccgccgcaccttaagcctccttcgtccttatcttttgcccgaacaccgcgagaaatacgaccggaaaatcggcaacggcaacccgtaa

SEQ ID NO: 45873 - DNA, 462 bp, Neisseria meningitidis
atgaatattattatggactcaacaagaaaatttgggattttatgggaagaaaactctgaatgtaatggttttatttatggaaaaattcagataataataggagagaatatatatcctaagatatgcccatatggatattttacgctaaatgcagtttttaatagtttgaagtcatcctttgaagagaagtattatgcaggtggaaacaatggtttagattttggagagcaactatttgatatagataaatataattctctggaattatgcaatatattttctattgatactacatatatgagtggagggagtaattgtgaaatagattgtttagtattagaaatgggatattctggtgaggaagagagacttttttatagttttgacaatgggaaaaactttaaagaaatcaggtataagaaaggtacagttgaatctgttatttttcaattgaatctataa

SEQ ID NO: 45874 - DNA, 192 bp, Neisseria meningitidis
ttgccgaaattcggagaatgccctctccccagccctcccccacgggggagggagtaggtttcagcagattttgcggttgcaggcggtttgagaaagaatgcccgaaatatcaacagtgggaatttttcaggcagcctttatcgcaaggcagatgtaacaaacgccgcgagcgttttttcagacgacctttga

SEQ ID NO: 45875 - DNA, 1128 bp, Neisseria meningitidis
atgtacactttccgcccgtttcccaaactgcacacagaaacacacattatgaacatacaaaacatccgcaccctcctcgacaccgtcgccgttccgaatacggcacgcacgctcggcggcgaaaaggccgtccgttcggtcgaacagcgttcagacggcatccatatcgccctgcatttcggcttccctgtcgcgcacatcgccgccgccgtcgccgattccgtacaagaaatcctgatgcccgaaacaggcggcgcgcacatccatctgtccatagacaccgaaatcggcacacataaagtccaacctggcgttaccaccatcaaaggtgtgaaaaacatcattgccgtcgcctccggcaaaggcggcgtgggcaaatcaacaaccaccgccaaccttgccgccgcaatggcgcggatgggcgcgcgcgtcggcgtgctcgatgccgacctttacggcccgagccaaccgaccatgttgggtgtggacgaccgcaaacccgatcagaaaaaccaaaaactcattcccgtcgaatcttcagacggcatacaggtcatgtctatcggctttctcgtcgataccgaccaagccgtcgtctggcgcgggccgatggtcagccaagccttgcagcaactgatgtttcaaagcgagtgggacgaagtggactacctgtttatcgacctgccccccggcacgggcgacatccaactcacgctgtcccaacgcatccccgtaaccggatcggtcatcgtaaccacgccgcaggacatcgccctgatagacgcgcgcaaagccgtggatatgttccgaaaagtcaacattcccattttaggtgtattggaaaatatgtccgtccacatctgctccaactgcggacacagcgaagcactgttcggcacagacggcggcaaagacttggcggcacgcctcaacgtccccctgctgggacagcttccattaagcctgcccgtgcgcgaagccatggacggaggggcgacggcgcaactgttcgacgaacaccccgccatcgcccgaatctacaccgatgccgcattccaaatcgccctgggcattgccgacaaaggcaaagacttcagcagccgcttccccaaaattgtcgtcgaataa

SEQ ID NO: 45876 - DNA, 1296 bp, Neisseria meningitidis
gtgattgccatgatttacatcgtactgttcctcgccgccgtcctcgccgttgtcgcctacaatatgtatcaggaaaaccaataccgcaaaaaagtgcgcgaccagttcggacactccgacaaagatgccctgctcaacagcaaaaccagccatgtccgcgacggcaaaccgtccggcgggtcagtcatgatgccgaaaccccaaccggcggtcaaaaaaacggcaaaaccccaagaccccgccatgcgcaacctgcaagaacaggatgccgtctacatcgccaagcagaaacaggcaaaagtatcaccgttcaaaaccgaaatcgaaaccgccttggaagaaagcggcattatcggcaactccgcccacaccgtttccgaaccccaaaccggacattccgcaccgaaacctgccgacgcgccggcaaaacctgcacccgttccgcaaacacctgcaaaaccgctgattacgctcaaagaactgtcaaaagtcgaattaccctggtttgacgtgcgcttcgacttcatctcctatatcgcgctgaccgaagccaaagaactgcacgcactgccgcgcctttccaaccgctgccgctaccagattgtcggctgcaccatggacgaccatttccagattgccgaacccatcccgggcatccgctatcaggcatttatcgtgggtattcaggcagtcagccgcaacggacttgcctcgcaggaagaactctccgcattcaaccgccaggtggacgcattcgcacaaagcatgggcggtcagacgctgcacaccgaccttgccgcctttatcgaagtggcttccgcactggacgcattctgcgcgcgcgtcgaccagaccatcgccatccatttggtttccccgaccagcatcagcggcgtagaactgcgttccgccgtaacgggcgtgggtttcgttttggaagacgacggcgcgttccactataccgacacgtcgggctcaaccatgttctccatctgctcgctcaacaacgagccgtttaccaatgcccttttggacaaccagtcctacaaaggcttcagtatgctgctcgacatcccgcactctccggcaggcgaaaaaaccttcgacgatttgtttatggatttggcggtacgcctgtccggccagttgaacctgaatctggtcaacgacaaaatggaagaagtttcgacccaatggctcaaagacgtgcgcacttatgtattggctcgtcagtccgagatgctcaaagtcggtatcgaaccgggcggcaaaaccgcattgcgcctgttctcctaa

SEQ ID NO: 45877 - DNA, 1404 bp, Neisseria meningitidis; identical to SEQ ID NO: 39890

SEQ ID NO: 45878 - DNA, 1359 bp, Neisseria meningitidis
atgaaaccactggacctaaatttcatctgccaagccctcaagcttccgatgccgtctgaaagcaaacccgtgtcgcgcatcgtaaccgacagccgcgacatccgcgcgggcgatgtgtttttcgcattggcgggcgggcggtttgacgcgcatgattttgttgaagacgtattggctgctggtgcggcggcggttgtggtttcgcgcgaagattgtgctgcaatggatggcgcgttgaaagtcgatgacacgcttgccgcattgcaaacgctggcaaaggcgtggcgtgaaaatgtgaatccgtttgtgttcggcattaccggttcgggcggcaagacgacggtgaaggaaatgctggctgcggtattgcgccgccgtttcggcgatgatgccgtgttggcgacggcaggcaacttcaacaaccatatcggattgccgctgactttgttgaagttaaacgaaaaacaccgctatgccgtgattgaaatgggcatgaaccatttcggcgaactggcggttttaacgcaaatcgccaaaccaaatgccgcattggtcaacaacgccatgcgcgcccatgtcggctgcggtttcgacggagtgggcgatattgccaaagcgaaaagcgagatttaccaaggtttatgttcagacggcattgcactgattcctcaagaagatgccaatatggctgtcttcaaaacggcaacgcttaatttgaatacgcgcactttcggcatcgatagcggcgatgttcacgcggaaaatattgtgctgaaaccgttgtcgtgcgaatttgatttggtgtgcggcgacgaacgcgccgccgtggtgctgcctgttcccggccgccacaatgtccacaacgccgccgctgccgccgcgctggctttggctgcgggtttgagtctgaacgatgtggcggaaggtttgaaaggtttcagcaatatcaaaggccgtctgaacgtcaaatccggaatcaagggcgcaaccctgattgacgatacttataatgcgaacccggacagcatgaaagccgcgattgacgtgttggcgcgtatgcctgcgccgcgtattttcgtaatgggcgatatgggcgaactgggcgaggacgaagccgccgctatgcacgccgaagtcggcgcgtatgcctgcgaccaaggcatcgaagcggcttattttgtcggcgacaacagcgtcgaagcggcggaaaaatttggcgcggacggtttgtggttcgccgccaaagacccgttgattcaagtgttgcgccacgatttgcccgaacgcgccaccgtgttggtgaaaggttcgcgctttatgcagatggaagaagtggtcgaggcattggaggataagtga

SEQ ID NO: 45879 - DNA, 606 bp, Neisseria meningitidis; identical to SEQ ID NO: 39881

SEQ ID NO: 45880 - DNA, 186 bp, Neisseria meningitidis; identical to SEQ ID NO: 37303

SEQ ID NO: 45881 - DNA, 759 bp, Neisseria meningitidis
atgaatcccaaaatttcctccgaccatacagaagatgccgtgcgcctctccaaacgcatggcgcaactggggctttgttcgcgccgcgaagccgacggctacatcgaacagggctgggtaacggtcaacggcaaaaccgccgtactcggtcagaaagtttcaccggccgaccgtatcgaactgaacaagaaagcccacgaacagcaggcggcacgcattaccatcctgctgaacaaacccgtcggctatgtcagcgcacaagcggaaaaaggctataaatccgccgccgaactgattacccctgaaaaccgctgggaaggcgacaccggccgcatccgtttcgatccgaaacacaaaatcggcctcgcccccgccggcaggctcgatatcgattcagtcggattactggtattgacgcaggacggccgtatcgccaagcagcttatcggcgaaaacagcggcagtgaaaaagaatatttggtgcgcgtgcgcggcaaattggacgaaaaaggacttgccttactgaatcacggattgagtttggacggcgagaaactgcgtcccgcccaagtagaatggcaaaacgaagaccaactgcgcttcgtgttgaaacagggtaaaaagcggcaaatccgccgtatgtgcgaactggtcggactgcgcgtcgtcgggctgaaacgcatccgcatgggcaaggtcaaactcggcaggctgccgcccggcaaatggcgttatcttgctcccggcgaatcgttttaa

SEQ ID NO: 45882 - DNA, 285 bp, Neisseria meningitidis; identical to SEQ ID NO: 39838

SEQ ID NO: 45883 - DNA, 369 bp, Neisseria meningitidis; identical to SEQ ID NO: 39932

SEQ ID NO: 45884 - DNA, 1083 bp, Neisseria meningitidis
atgccgtctgaagccgcttcagacggcattttgccgctttaccctacccgcactatttttcagaaaccgatcatgcttccattctttccagaaccctccctttcctatacgcaacaaaaccgtaccgccgttttgctgttgaacctcggcacgcccgacgcgccgaccgcgcaggcggtacgaccttatctgaagtcctttctgaccgaccggcgcgtcgtcgaactgcccaaatggctgtggtatcccattctgcatggtctggtactgacgctccgccccaaaaaaagcgcgcacgcctatgaaaaaatctggtttaaggaaggttcgcccttagaagtttacacagcacgccaagctgccgcgcttgccaaacgtatgcccgacctcatcgtccgccacgccatgacctacggcaatccttcggtggcagacgtattgtcggaactgaaggcgcaaggcgcgggcagactgctggtcatcccgatgtacccgcaatatgccgcttccagcagcggagcggcagtagataaggtgtgcgaacaattactgctgcaacggaaccaaatgagcgtccgcaccgtttcgcgcttttatgacgataccggctacattgatgcgatgaaaaaccacatcctccgatattgggcggaacacgggcgcgggaaaaaactgatgttgagttttcacggcgtaccgcagaagcaccacgacctcggcgacccctatcccgacgagtgccgccacaccgccaaactgcttgccgaagcactggaactgaccgaagaccaatatgtcgtatcgttccaaagccaattcggcagggcaaaatgggttacaccgagcacgcaggatttgttcggcaaactgcccaaacagggggtaaccgagctggacgtattttgcccgggctttttggcagactgtttggaaaccatggaagaaatcgccctgatggggcgggaacagttttacgaagcaggcggcaaaagctaccgctacatcccctgcctcaacgacaaccccgactggatagacgcactcgtcgcacttgccgaagaaaaccttggcggctggcgttga

SEQ ID NO: 45885 - DNA, 1467 bp, Neisseria meningitidis
atggttattttttatttttgtgggaagacatttatgcctgcacgaaacagatggatgctgctgctgcctttattggcaagtgcggcatatgccgaagaaacaccgcgcgaaccggatttgagaagccgtcccgagttcaggcttcatgaagcggaggtcaaaccaatcgacagggagaaggtaccggggcaggtgcgggaaaaaggaaaagttttgcagattgacggagaaaccctgctgaaaagtcccgaattgttgtcccgcgcgatgtattccgcagtggtctcaaacaatattgccggtatccgcgttattttgccgatttacctacaacaggcgcagcaggataagatgttggcactttatgcacaagggattttggcgcaggcagacggtagggtgaaggaggcgatttcccattaccgggaattgattgccgcccaacccgacgcgcccgccgtccgtatgcgtttggcggcggcattgtttgacaacaggcagaacgaggcggcggcagaccagttcgaccgcctgaaggcggaaaacctgccgccgcagctgatggagcaggtcgagctgtaccgcaaggcattgcgcgaacgcgatgcgtggaaggtaaatggcggcttcagcgttacccgcgaacacaatatcaaccaagccccgaaacggcagcagtacggcaaatggactttcccgaaacaggtggacggcacggcggtcaattaccggctcggcgcggagaaaaaatggtcgctgaaaaacggctggtacacgacggcgggcggcgacgtgtccggcagggtttatccggggaataagaaattcaacgatatgacggcaggcgtttccggcggcatcggttttgccgaccggcgcaaagatgccgggctggcagtgttccacgaacgccgcacctacggcaacgacgcttattcttacaccaacggcgcacgcctttatttcaaccgttggcaaaccccgaaatggcaaacgttgtcttcggcggagtgggggcgtttgaagaatacgcgccgggcgcgttccgacaatacccatttgcaaatttccaattcgctggtgttttaccggaatgcgcgccaatattggatgggcggtttggatttttaccgcgagcgcaaccccgccgaccggggcgacaatttcaaccgttacggcctgcgctttgcctgggggcaggaatggggcggcagcggcctgtcttcgctgttgcgcctcggcgcggcgaaacggcattatgaaaaacccggctttttcagcggttttaaaggggaaaggcgcagggataaagaattgaacacatccttgagcctttggcaccgggcattgcatttcaaaggcatcacgccgcgcctgacgttgtcgcaccgcgaaacgcggagtaacgatgtgttcaacgaatacgagaaaaatcgggcgtttgtcgagtttaataaaacgttctga

SEQ ID NO: 45886 - DNA, 1968 bp, Neisseria meningitidis
gtggggaacacctttaaatcaatccttgtctgggtcgccttgggtatcggcctgatggctgcgttcaacgctttagacggtaaaaaagaagacaacgggcaaatcgaatattctcagttcatccaacaggtcaacaacggcgaagtatccggcgtcaacatcgaaggatccgtcgtcagcggctacctgattaagggcgagcgcaccgacaaaagcaccttcttcaccaacgcgcctttggacgacaacctgattaaaacactgctcgacaaaaacgtccgtgtaaaagtaacgccggaagaaaaaccgagcgcgctggctgccctgttttacagcctgctgcccgtcctgctgctgattggcgcgtggttctactttatgcgtatgcagacgggcggcggcggaaaaggcggcgcattctcattcggcaaaagccgcgcccgcctactggacaaagatgccaacaaagtgacctttgccgatgtcgccggctgcgacgaagccaaagaagaagtgcaggaaatcgtcgattacctcaaagcgccgaaccgctatcaaagcctgggcgggcgcgtgccgcgcggcatcctgctggcgggcagcccgggtacgggtaagacgcttttggcgaaagcgattgcaggcgaagccggcgtgccgttcttcagcatttcaggttccgactttgtcgaaatgttcgtcggtgtcggtgcaagccgcgtccgcgatatgttcgagcaggcgaagaaaaacgccccctgcatcatctttatcgacgagattgacgcagtcggccgccaacgcggcgcaggtttgggcggcggcaatgatgagcgcgagcaaacattaaaccaattgttggttgaaatggacggttttgagagcaatcagactgtaattgtgattgcggcaaccaaccgccccgacgtactcgatcctgcgctgcaacgccccggccgtttcgaccgccaagtcgtcgtccccctgccggacatccgggggcgcgaacagattttgaacgtccattctaaaaaagtgcctttggacgaatctgtggatttattgtccctcgcgcgcggcacgccgggtttttccggtgcggatttggcaaacctggttaacgaagccgccctgtttgccggccgccgcaacaaagtcaaagtcgatcaaagcgattttgaagacgcaaaagacaaaatctatatgggtccggaacgccgcagtatggtgatgcacgaagacgaaaaacgtgcgacggcgtatcatgagtccggacacgcgattgttgccgaaagcctgccctttaccgaccccgtccacaaagtaaccattatgccgcgcggacgtgcgctgggtctgacttggcagcttccggagcgcgaccgcatcagtatgtataaagatcagatgttgagccagctctccatcctgttcggcggacggattgccgaagacatcttcgtcggacgcatctccaccggcgcatcaaacgactttgaacgcgcaacccaaatggcgcgcgaaatggtaacgcgctacggcatgagcgacaaaatgggcgtgatggtttatgcggaaaacgaaggcgaagtcttcttaggacgcagcgtaacccgttcgcaaaacatttccgagaaaacccagcaggacatcgatgcggaaatccgccggattttggacgagcagtatcagattgcctacaaaatcctcgatgaaaaccgcgacaagatggaaaccatgtgcaaagccctgatggaatgggaaaccatcgaccgcgatcaggtactggaaatcatggcgggcaaacaacccagtccgcccaaggattacagccacaacctgcgcgagaatgcggacgcggcggaagataacgcgccgcacgctccgactcgggaagaaaccgaagcacctgccccggcagacaccgcttcgacagagtccgagcagcagcctgaaaacaaggcttaa

SEQ ID NO: 45887 - DNA, 1929 bp, Neisseria meningitidis
atggcaaaagtaatcggtatcgacttaggtacaaccaactcttgtttggccatttccgaaaacggtcaaaccaaagtgatcgaaaacgcagaaggcgcacgcaccacgccgtccgttatcgcttatttggacggcggcgaaatcctcgtcggtgcgcctgccaaacgccaagcggtaaccaacgccaaaaacactatttacgccgccaaacgtttgatcggccacaaatttgaagacaaagaagtccaacgcgacatcgaatctatgcctttcgaaatcatcaaagccaacaacggcgacgcatgggtaaaagcacaaggcaaagagctgtctcctcctcaaatttccgcagaagtcctgcgtaaaatgaaagaagccgccgaagcttacttgggcgaaaaagtaaccgaagccgtgattaccgtccctgcctacttcaacgacagccaacgtcaagccaccaaagacgcaggccgtatcgccggtttggacgtgaaacgcatcatcaacgagccgaccgcagccgctttggcattcggtatggacaaaggcgacaacaaagaccgcaaagtagccgtatatgacttgggcggcggtactttcgatatttccatcatcgaaatcgccaacctcgacggcgacaaacaattcgaagtattggcaaccaacggcgataccttcttgggcggtgaagacttcgaccaacgcctcatcgaccacatcatcgccgagttcaaaaaagaacaaggcattgatttgaaacaagacgtgatggctctacaacgcctgaaagaagctgccgaaaaagccaaaatcgaattgtccagcggccagcaaaccgaaattaacctgccgtacatcaccatggacgcaaccggcccgaaacacttggcgatgaaaattacccgcgccaaattcgaaagcctggttgaagacctgattgcccgctctatcgagccttgccgcaccgcattgaaagatgccggcttgagcaccagcgacatcgacgacgtaattttggtcggcggtcagtcccgtatgccgaaagtacaagaagccgttagagatttcttcggcaaagaaccgcgcaaagacgtgaaccctgacgaagccgttgccgtaggcgcagcgatccaaggcgaagtattgagcggcggccgcagcgacgtattgctgctggacgtaacccctctgtccttgggtatcgaaaccatgggcggcgtgatgaccaagctgattcaaaagaacacaactatcccgactaaagcgtcgcaagtgttctctaccgccgaagacaaccaaagcgcagtaaccatccacgtactgcaaggcgaacgcgaacgcgcttctgccaacaaatctttgggtcagttcaacttgggcgacatcgcacccgcaccgcgcggtatgccgcaaatcgaagtcaccttcgacatcgacgccaacggcatcctgcacgtttccgccaaagacaaaggcactggcaaagcagccaacatcaccatccaaggttcttcaggtttgagcgaagaagaaatcgaacgcatggtgaaagatgccgaagccaatgccgaggaagataaaaaactgactgaattggtcgcttcccgcaaccaagctgaagccctgattcactctgtgaaaaaatctttggccgactacggcgacaaactcgacgcagccgagaaagaaaaaatcgaagccgcgctgaaagaagccgaagaagcagttaaaggcgacgacaaagccgctatcgatgccaaaaccgaggcgctgggcgcagccagccaaaaactgggggaaatggtttacgctcaagcacaagctgaagcccaagcaggcgaaagcgaacaagccaatgcttctgcaaagaaagacgatgatgtcgtagatgccgactttgaagaagtaaaagacgacaaaaaataa

SEQ ID NO: 45888 - DNA, 696 bp, Neisseria meningitidis; identical to SEQ ID NO: 39886

SEQ ID NO: 45889 - DNA, 438 bp, Neisseria meningitidis; identical to SEQ ID NO: 40938

SEQ ID NO: 45890 - DNA, 1077 bp, Neisseria meningitidis
atgcaagaatggttccaaaacctctttgccgcaacgctcggtctgggcgatttgggtatcaccgtgggcttggtggtatccgtcatcgtcaaaatcgtgattatcctgattccgctgattctgaccgtcgcctacctgacttatttcgaacgtaaagtcatcggcttcatgcagcttcgcgtcggcccgaacgtaaccggcccgtggggcctgatccagccgtttgccgatgtgttcaaactcttgtttaaagaggtaacccgtccgaagctgtcaaacaaagccctgttctacatcggcccgattatgtcgcttgctccgtctttcgcggcatgggcagtgattccgttcaacgaagaatgggtgctgaccaacatcaatatcggtcttttgtacattctgatgattacctcgctgtcggtttacggcgtaatcatcgcgggctgggcttccaactccaaatattcgttcttgggtgcaatgcgtgcttccgcacaaagcatttcctacgagattgccatgagtgccgcgctggtgtgtgtcgtgatggtgtcgggcagcatgaacttctccgacatcgttgccgcgcaggcaaaaggtatcgcgggcggttccgtattctcgtggaactggctgccgctgttcccaatcttcatcgtctatctgatttccgccgttgccgaaaccaaccgcgcaccgtttgacgtggcagagggcgagtccgaaatcgttgccggacaccacgttgaatattccggcttcgcattcgcgctgttcttccttgccgaatacattttcatgattctgattgccgcgctgacatcgctgatgtttctcggcggctggttgtctccgttcccgcaaagctggggctttatcggtacgccttccgcattctggatgtttgtgaaaatggcggcagtgttgtactggtacctgtggatccgtgcaaccttcccgcgctaccgttacgaccaaatcatgcgtttgggctggaaagtgctgattccgatcggcttcgcctacatcgtgattttgggcgtgtggatgatttcaccgctgaatttgtggaaataa

SEQ ID NO: 45891 - DNA, 174 bp, Neisseria meningitidis; identical to SEQ ID NO: 36913

SEQ ID NO: 45892 - DNA, 546 bp, Neisseria meningitidis; identical to SEQ ID NO: 39943

SEQ ID NO: 45893 - DNA, 435 bp, Neisseria meningitidis; identical to SEQ ID NO: 36184

SEQ ID NO: 45894 - DNA, 2256 bp, Neisseria meningitidis; identical to SEQ ID NO: 39911

SEQ ID NO: 45895 - DNA, 297 bp, Neisseria meningitidis; identical to SEQ ID NO: 37913

SEQ ID NO: 45896 - DNA, 1024 bp, Neisseria meningitidis
ttggcagccgatcgagcagtacctgaaccgtcaaaaaaaccgttaccttagagaccaccgcggccgtcccgcctacccgctgttgtccatgttcaaagccgttctgctcggacaatggcacagcctctccgatcccgaactcgaacacagcctcattacccgcatcgacttcaacctgttttgccgttttgacgaactgagcatccccgattacagcaccttatgccgctaccgcaactggctggcgcaagacgacaccctgtccgaactgttggaactgattaactgccaactgaccgaaaaaggcttaaaaatagagaaagcatccgccgccgtcattgacgccaccattattcagaccgccggcagcgaacagcgtcaggccatagaagtcgatgaagagggacaagtcagcggtcaaaccacactgagtaaggacaaaaatgcccgttggacaaagaaaaacagcctctacaaactcggttacaaacaacatacccgtaccgatgcggaaggctatatcgagaaactgtacatcactcccaccaatgcccatgagtgcacacacctgtcgccgttgttggaaggactgcccaaaggtacgaccgtctatgccgacaaaggctacgacagcaaggaaaaccggcaacatctgaaagaacatcggttgcagaacggcattatgcgcaaagcctgccgcaaccgtccgctgacggaaacgcaaaccaaacgtaaccgatatttatcgaagacccgttatagtggattaaatttaaatcaggacaaggcgacgaagccgcagacagtacaaatagtacggcaaggcgaggcaacgccgtactggtttaaatttaatccactatatgtggtcgaacagagcttcggtacgctgcaccgtaaattccgctatgcgcgggcagcctatttcgggctgattaaagtgagtgcgcaaagccacctgaaggcgatgtgtttgaacctgttgaaagcggccaacaggctaagtgcgcccgctgccgcctaa

SEQ ID NO: 45897 - DNA, 492 bp, Neisseria meningitidis; identical to SEQ ID NO: 39942

SEQ ID NO: 45898 - DNA, 549 bp, Neisseria meningitidis; identical to SEQ ID NO: 39944

SEQ ID NO: 45899 - DNA, 201 bp, Neisseria meningitidis; identical to SEQ ID NO: 36765

SEQ ID NO: 45900 - DNA, 846 bp, Neisseria meningitidis; identical to SEQ ID NO: 39931

SEQ ID NO: 45901 - DNA, 918 bp, Neisseria meningitidis; identical to SEQ ID NO: 39874

SEQ ID NO: 45902 - DNA, 1272 bp, Neisseria meningitidis
gtgggcgacggtgtccacactctgctgctcgacaggccgattgtgcgcgacggcaggaaattcgacgcgccgcttttgtggatggtagtgctgatgacggcgttcagcctgctgatgatttattcggcttctgtgtatttggcatcaaaagaaggcggcgatcagtttttctatttgaccagacaggcggggttcgtcgttgccggcttgatagcgagcggttttttatggtttctttgcaggatgaggacatggcggcggcttgtgccgtggatttttgccctatccggcctgttgctggtagtcgtattgattgccgggcgcgaaatcaatggcgcgacccgttggatacctttgggtccgttgaatttccagccgaccgagctgttcaagctggcggtcatcctttatttggcaagcctgttcacgcgccgtgaagaagtgttgcgcagcatggaaagtttgggttggcagtcgatttggcgggggacggccaatctgatcatgtccgccaccaatccgcaggcacgtcgtgaaacattagaaatgtacggccgtttccgggcgatcatcctgccgattatgctggtggcgttcggtttggtgctgataatggtacagccggatttcggttcgtttgtcgtcattaccgtcattgccgttggaatgctgtttctggcaggattgccgtggaaatattttttcgtcctggtaggcagcgtcttgggcgggatggtgctgatgattaccgccgctccctaccgtgtgcagcgggtagtggcatttttggacccgtggaaagaccctcagggtgccggctaccagcttacccactctctgatggcaatcgggcgcggagagtggttcggtatgggtttgggtgcgagtttgagcaaacgcggctttctgccggaagcgcataccgattttatttttgccatcatcgccgaagaattcggtttcttcggtatgtgtgtgctgatattctgttacggctggctggtggtgcgggcgttttccatcggcaagcagtcgcgcgatttgggtttgactttcaacgcctatatcgcttcgggtatcggcatttggatcggtatccaaagtttcttcaatatcggtgtgaacatcggtgctttgccgaccaaaggtctgacgctgccgttgatgtcctatggcggttcgtcagtctttttcatgctgatcagtatgatgctgctgttgcgtatagattatgaaaaccgccggaaaatgcgcggttatcgggtggagtaa

SEQ ID NO: 45903 - DNA, 285 bp, Neisseria meningitidis; identical to SEQ ID NO: 39839

SEQ ID NO: 45904 - DNA, 396 bp, Neisseria meningitidis; identical to SEQ ID NO: 39895

SEQ ID NO: 45905 - DNA, 537 bp, Neisseria meningitidis
atgtcgaaaaaatggtatgttgtacaggcgtattcggggtttgagaagaatgtccaacgaatattggaagagcgtattgcccgtgaggagatgggagattatttcggacaaattctggtgcctgtagagaaagttgttgatatccgcaatggtcgtaagactattagtgaaagaaagtcatatcctggttatgtgctagttgagatggaaatgacagatgactcttggcatcttgtaaaaagcaccccccgtgtttccggttttattggagggagggctaatagacctacgccgattagtcagagagaggctgaaattattttacagcaggttcagaccggcatagagaagccgaaaccaaaagttgaatttgaggtcggtcaacaggttcgtgtaaatgaagggccgtttgcggattttaacggggtggttgaggaggtcaattatgaacggaataagttacgcgtgtctgttcagatatttggtagagaaacacccgttgagctggagttcagccaggttgaaaagattaactga

SEQ ID NO: 45906 - DNA, 423 bp, Neisseria meningitidis; identical to SEQ ID NO: 39423

SEQ ID NO: 45907 - DNA, 114 bp, Neisseria meningitidis; identical to SEQ ID NO: 42949

SEQ ID NO: 45908 - DNA, 501 bp, Neisseria meningitidis; identical to SEQ ID NO: 37882

SEQ ID NO: 45909 - DNA, 144 bp, Neisseria meningitidis; identical to SEQ ID NO: 39918

SEQ ID NO: 45910 - DNA, 360 bp, Neisseria meningitidis; identical to SEQ ID NO: 37430

SEQ ID NO: 45911 - DNA, 291 bp, Neisseria meningitidis
atggatgatctaatactatattttttatcaggtatattcggaaatcaagttgctgaatatattataaaaaacaaccgtgagataaaagttccctttattgtgctttacgcaatattttttacgttgatttatactgtggctttgttgtttctcagtctgatctattgggtcaatggtgcggagattgcatggaaggggataggtattttcagtatgtcggtcagtttttgtatagtcttctgtctttatttgattgacaaggcaggaagatgtaaggataagaaacaatag

SEQ ID NO: 45912 - DNA, 219 bp, Neisseria meningitidis; identical to SEQ ID NO: 36291

SEQ ID NO: 45913 - DNA, 345 bp, Neisseria meningitidis; identical to SEQ ID NO: 36231

SEQ ID NO: 45914 - DNA, 1155 bp, Neisseria meningitidis; identical to SEQ ID NO: 39954

SEQ ID NO: 45915 - DNA, 552 bp, Neisseria meningitidis; identical to SEQ ID NO: 39879

SEQ ID NO: 45916 - DNA, 714 bp, Neisseria meningitidis; identical to SEQ ID NO: 37885

SEQ ID NO: 45917 - DNA, 1869 bp, Neisseria meningitidis
atgcaagctgtccgatacaggcctgaaattgacggattgcgggccgttgccgtgctatccgtcattattttccacctgaataaccgctggctgcccggagggtttttgggggtggacattttctttgtcatctcgggattcctcattaccggcatcattctttctgaaatacagaacggttctttttctttccgggatttttatacccgcaggattaagcggatttatcctgcttttatcgcggccgtgtcgctggcttcggtgattgcctctcaaatcttcctttacgaagatttcaaccaaatgcggaaaaccgtggagctttctgcggttttcttgtccaatatttatctggggtttcagcaggggtatttcgatttgagtgccgacgagaaccccgtactgcatatctggtctttggcggtagaggaacagtattacctcctgtatcctcttttgctgatattttgctgcaaaaaaaccaaatcgctacgggtgctgcgtaacatcagcatcatcctatttctgattttgactgccacatcgtttttgccaagcaggttttataccgacatcctcaaccaacccaatacttattacctttcgacactgaggtttcccgagctgttggcaggttcgctgctggcggtttacgggcaaacgcaaaacggcagacggcaaacagcaagcggaaaacggcagttgctttcattactctgcttcggcgcattgcttgcctgcctgttcgtgattgacaaacacaatccgtttatcccgggaatgaccctgctccttccctgcctgctgacggcactgcttatccggagtatgcaatacgggacacttccgacccgcatcctgtcggcaagccccatcgtatttgtcggcaaaatctcttattccctatacctgtaccattggatttttattgccttcgcccattacattacaggcgacaaacagctcggactgcctgccgtatcggcggttgccgcattgacggccggattttccctgttgagctattatttgattgaacagccgcttagaaaacggaagatgaccttcaaaaaggcatttttctgcctctatctcgccccgtccctgatacttgtcggttacaacctgtacgcaagggggatattgaaacaggaacacctccgcccgttgcccggcgcgccccttgctgcggaaaatcattttccggaaaccgtcctgaccctcggcgactcgcacgccggacacctgcggggttttctggattatgtcggcagccgggaagggtggaaagccaaaatcctgtccctcgattcggagtgtttggtttgggtggatacgacactggcagacaacccgttatgtcgaaaataccgggatgaagttgaaaaagccgaagccgttttcattgcccaattctatgatttgaggatgggcggccagcccgtgccgagatttgaagcgcaatccttcctaatacccgggttccaagcccgattcagggaaaccgtcaaaaggatagccgccgtcaaacccgtctatgtttttgcaaacaacacatcaatcagccgttcgcccctgagggaggaaaaattgaaaagatttgccgcaaaccaatatctccgccccattcaggctatgggcgacatcggcaagagcaatcaggcggtctttgatttggttaaagatatccccaatgtgcattgggtggacgcacagaaatacctgcctaaaaacacggtcgaaatacacagacgctatctttacggcgaccaagaccacctgacctatttcggttcttattatatggggcgggaatttcacaaacacgaacgcctgcttaaatcttcccgcggcggcgcattgcagtag

SEQ ID NO: 45918 - DNA, 561 bp, Neisseria meningitidis
ttgttaccttcacacaggtcgcccgattcggcaacacacgacagaatcaggaaaatgaccatgaatgcaatgccccaaaccgccgcacaaaacgaaaccctgcacacttgtagcattattgtcgatgatgcacaggatttttcccccatgcttctcgatgcagggcgggacgacacacttatcagcgaatcgatgattccgcaaatccgcactgttgccgccctgatagccgccgaacggcacgacttcagccgcagcagccccgccgagtttaccgatgccgccgatttttttgccgcacggattctcgtattgggcgtgcgacgcttccatctggacgtatcgctgcttcagattttgaaaaccgccaacagccgcgcccgccgctttgccgaaaaacaccgcctgtttttcacacccgcacaagccgaattgagcctgaacaaacacaaaaaccgccgcctgctgaccgtagaaaccgaacacgaagtcgaaaacaaaggcaacccagtcgccaacagcctcgcatttgtccgcaaactgcacaccctgcccctgtaa

SEQ ID NO: 45919 - DNA, 1521 bp, Neisseria meningitidis; identical to SEQ ID NO: 39047

SEQ ID NO: 45920 - DNA, 1437 bp, Neisseria meningitidis
ttggaaaactcattaattatcggtttggcactggcggtattgctgatgcttttggttatgcgtgcgaagcagggtaagaaaacaccgaagcgcaaatcccaaggtgtcggcaatacgcaggggcagacacccggaagcaatgattcggactgggtcgatcagattggacaatcggtttcagacggcacgcaacccgactggtcttggaacgaaagtgccgagaccgcatccgccgccgtatccgcgcaagaagtcgatccgcttacggagtatcaggtttataagcaattcggttatcagggcaaggctgccgaatctttggctgcctatctggacggcattccggatggtgaagcgaaacctgaaaaccttatccgcgagctgctcgatatcaatctcgaagtgggggatgtcgatgttttggcagacaatctgcaaaaatacggcaaactgattccttccgaacttttggcaaaatatatcgaacaggcattacagcgcgattcaaaccatttgcgtatccgcgtcttggcggaagaaggtttgggatggggtactcaggagattgaaaaacgtgcggaaggcggttctgcgacggcagcttccgcatcgcccccgccggatgccggcggtaaggcttatgaagccgaagaaatcaagcgcatcccgattgtgcggggcaaaaaagacgtgtccggaatcagtcaagaggaaatcggtgcgattgccggtttggtccgtgccgatcaaggtgcgaaaatccttaaagacaaagtcagctatgaaacggcatcgaaacaatacgaccgtgccatccaaacttccgaaaaacctgcaaacctgattatcgatgcgttgaaactcgattaccaacacgcggacatagaccgttttgccggacatttgtggaaactttaccaaacgttgggcaactacggcaggcaggttaaagagcggatgctggggtgggggtacagcttgggttaccatgaagttttcgatgatttggaaaaagggccgaacgaccggcaaatcaaagacatcggtatggggcacgggtatctgccgaaaaatatacagaaattcaaatcgcaacatcgggatttggtgcttcaagattcttcgttgatcaacaccggttcgtctccggcagacgatgcggttaaagaagtagagtcgttgctgatgtatggtcagattgaagcggcaatggatgtgttggagcaggcggtattgaaatatcccgacgagtcccagctttatattacgttgatcgatatttatgaacgtactgaagattgggataggttggggcagtttttaagggtattgagggaacgtgcggacaggcttcctgaagaggtcgttatgctgatgagccggctgctgcagcgtatgaatcaaaatattaaaaaaataaaacggtacggaaaataa

SEQ ID NO: 45921 - DNA, 234 bp, Neisseria meningitidis; identical to SEQ ID NO: 40733

SEQ ID NO: 45922 - DNA, 1029 bp, Neisseria meningitidis; identical to SEQ ID NO: 39876

SEQ ID NO: 45923 - DNA, 666 bp, Neisseria meningitidis
atgatgatgcacgcttctgtccaaagccgtttcgcaccgatactttatgttttgattttctttgccggttttttgaccgcgcaaatttggttcaatcagaaagcctatactgaagagctgcctccgcttctgtccgcattgtccgccgtcgcgctggtgtggctggcgtgggcgttcgtgtcggcgcgttcaaaggctaaggcggaaaagttctaccgcgaaaaaatgatacagaacgaaagcatacaccccgtcctgcacgcttctttgcaacacttggaacacaagccgcaaatgctcgccctgctggtcaaaaaccacggcaaagggatggcggaacaggtcaggttcaaggcggaagtgctgcccgacgacgaagacgcgcgcacgattgccgccgagttggcaaaaatggatatgtttgcattggggacggacgcggtcgcctcgggcgaaacctatggacgcgtgttcgccgatattttcgagttgtcggcggctttggaagggcgcgcgttcaaaggaatgttgaaactgacggcggaatataaaaacatcttcggcgatgcctgccgttcggaaacggcgttggatttgggcgcgctcaatcaggcgttgcaggagatttcaaaaacatcggaaaagtccaaacggatattttattga

SEQ ID NO: 45924 - DNA, 300 bp, Neisseria meningitidis
atgcattatttcagtattcatgaccaatcgggacggcatataggctttttcatcctgcttgccgacgacgaatcggaagcacggccgcaaagcgggcgttttgccgtcaaacttgaaggcggaatggaaaatcatgtcctgtcgccgttcggtcagacggaaatcccccaatattggcgcgtggtcaaagaccgtatcgagctgttttttgacgaagcacctgtcggaactttgcgtaacgaatatctgaccgtgtcggggcagacttttgttttgaacgatttgacagggaatatgtga

SEQ ID NO: 45925 - DNA, 393 bp, Neisseria meningitidis
atgagtatgcatgatcctatttccgatatgttgactcgtatccgcaatgcgcaacgtgctaataaagcagcagttgcaatgccttcttcaaaattaaagtgtgctattgcaaaggtattgaaagaagaaggatatattgaggacttcgcagtttcatctgacgtaaagtctatattggaaattcaattaaaatactatgcaggtcgtcctgtaattgaacaaatcaagcgtgtatctcgccccggtttgcgtatttataaagcgtctagtgagattccaagtgttatgaatggcttgggtattgctattgttagtacttctaaaggtgtaatgactgatcgtaaagcacgttctcaaggtgttggtggtgagttgttatgcattgtagcctag

SEQ ID NO: 45926 - DNA, 297 bp, Neisseria meningitidis; identical to SEQ ID NO: 39905

SEQ ID NO: 45927 - DNA, 882 bp, Neisseria meningitidis
atgtgtatcgagatgaaatttatattttttgtactgtatgttttgcagtttctgccgtttgcgctgctgcacaaacttgccgacctgacgggtttgctcgcctaccttttggtcaaaccccgccgccgtatcggcgaaatcaatttggcaaaatgctttcccgagtgggacggaaaaaagcgcgaaaccgtattgaagcagcatttcaaacatatggcgaaactgatgcttgaatacggcttatattggtacgcgcctgccgggcgtttgaaatcgctggtgcgttaccgcaataagcattatttggacgacgcgctggcggcgggggaaaaagtcatcattctgtacccgcacttcaccgcgttcgagatggcggtgtacgcgcttaatcaggatgtaccgctgatcagtatgtattcccaccaaaaaaacaagatattggacgcacagattttgaaaggccgcaaccgctacgacaatgtcttccttatcgggcgcaccgaagggctgcgcgccctcgtcaaacagttccgcaaaagcagcgcgccgtttctgtatctgcccgatcaggatttcggacgcaacgattcggtttttgtggattttttcggtattcagacggcaacgattaccggcttgagccgcattgccgcgcttgcaaatgcaaaagtgatacccgccatccccgtccgcgaggcggacaatacggttacattgcatttctacccggcttgggaatcctttccgagtgaagatgcgcaggccgacgcgcagcgcatgaaccgttttatcgaggaacgcgtgcgcgaacatcccgagcagtatttttggctgcacaagcgtttcaaaacccgtccggaaggcagccccgatttttactga

SEQ ID NO: 45928 - DNA, 582 bp, Neisseria meningitidis; identical to SEQ ID NO: 39957

SEQ ID NO: 45929 - DNA, 666 bp, Neisseria meningitidis
atggattcatggtttgaagatacggcgatggggcggtatgttgcaaaattggaacaggatttcttcgggcggtatctagattcataccgtttttcgggaatgtgtgcggttcaggtgggcggtccgtggctgagcctgtctgaagatgttgtctgtgtgccgcgagatatgtcgatgtcggcggaaaatatggctttggcggatgtttctgcggatatgctgctttttccgcatacgcttgaaggcggtgttccttcgcaaatcctgtccgaggcgcaccggatattgaaaccgtccggacgtttgatgctgacgggtttcaatccgtattcgctctggggattcagccgttggtttgacggcgaacgcctgccggaaaaacgcttctgtctgccgctgcccgagttgaaaaggcagcttgcggatgtcggtttcgatattgaatttgggaaatttatggtgtatctgccgcccgtttcgtcgctcgggcaaatacgcttttggcggtttatggaaaaggcgggcgaccgttggtggccgcagtgtgccgcagtgtacggtttggttttggtcaaaagggcggcgggcgtaacgcccctgcccgcgtgggacgggtatttgggcggcaaagcccttgcggcgggtgcggcaaggattgcggattag

SEQ ID NO: 45930 - DNA, 207 bp, Neisseria meningitidis
atggatgaagcggtttttgccgattgggcgttgaaaatctgcctgaccggtttgattatttttttgggttttatcgtttggaatttgggcaaggagtccaaagcgggcaaattcggcatcgccattttgtttttggttttgggcttgggcgtgttcggttttgtatttaaagaactgctaatcaagtttttggtattgcccaaatag

SEQ ID NO: 45931 - DNA, 4176 bp, Neisseria meningitidis
atgaatttgttgaacttatttaatccgttgcaaactgccggcatggaagaagagtttgatgccatcaaaatcggcattgcttctcccgaaaccatccgttcatggtcttacggcgaagttaaaaaacctgaaaccatcaactaccgtacgttcaaacctgagcgtgacggtctgttctgcgccaaaatctttggtccggtcaaagactacgaatgcttgtgcggaaaatacaaacgcttgaaatttaaaggcgtaacctgtgaaaaatgcggcgtagaagtgaccctgtccaaagtgcgccgcgaacgcatgggccacattgaattggcagcacccgttgcccatatttggttcttgaaatccctgccttcccgcttgggtatggtactggacatgactttgcgcgacatcgaacgcgtattgtactttgaagcatttgtggtaaccgaccccggtatgactccgctgcaacgccgccaattgctgactgaagacgattactacaacaaactggacgaatacggcgatgacttcgatgccaaaatgggtgcggaaggtatccgcgaattgctgcgtaccttgaatgtggcgggcgaaatcgaaatcctgcgccaagagttggaatcgaccgggtccgacaccaaaatcaaaaaaatcgccaaacgtttgaaagtattggaagccttccaccgttccggtatgaagctggaatggatgattatggatgtgctgccggtattgccgcctgatttgcgtccgttggttccattggatggcggtcgttttgccacttccgatttgaacgatttgtaccgtcgcgtcatcaaccgtaacaaccgtctgaaacgtctgttggaactgcatgcgcccgacattatcgtccgcaacgaaaaacgtatgttgcaagaagcggtcgactctctgttggataacggccgtcgcggtaaagccatgaccggcgccaacaaacgcccgctgaaatcattggcagacatgattaaaggtaaaggcggtcgcttccgtcaaaacctgttgggcaaacgtgtggactactccggccgttccgtgattaccgtaggcccatacctgcgtctgcaccaatgcggtctgccgaaaaaaatggctttggaactgttcaaaccgttcattttccacaaattggaaaaacaaggtttggcctctaccgttaaagcagcgaaaaaattggtagagcaagaagtaccggaagtatgggacatcttggaagaagtcatccgcgaacatccgattatgctgaaccgtgcgccgaccctgcaccgtttgggtattcaagcgttcgaacctatcttgattgaaggtaaagcgattcagttgcacccattggtgtgtgctgcgttcaacgccgactttgacggcgaccaaatggcggtacacgttccattgagcttggaagcacaaatggaagcacgcacgctgatgctggcttcaaacaacgtattgtctcctgccaacggcgaaccgattatcgtaccttcccaagacatcgtattgggcctgtactacatgacccgcgaccgtatcaatgccaaaggcgagggcagcctgtttgccgatgtgaaagaagtgcatcgcgcataccataccaaacaggttgaactgggtacgaaaattaccgtacgtctgcgcgaatgggtgaaaaacgaagcaggtgagtttgagcctgtcgttaaccgttacgaaacaaccgtcggccgtgcattgttgagcgaaatcctgccgaaaggcctgccgtttgaatatgtcaacaaagcgttgaagaaaaaagaaatttctaaactgattaacgcatcgttccgcctgtgcggcttgcgcgatacggttatctttgctgaccacctgatgtacaccggtttcggatttgcggcaaaaggcggtatttccattgccgttgacgatatggaaattccaaaagaaaaagtggccttgctggctgaagccaatgccgaggttaaagaaatcgaagaccaataccgtcaaggtttggttaccaacggcgaacgctacaacaaggtggtcgatatttggggtcgtgccggcgataagattgctaaagcgatgatggacaacttgtccaaacaaaaagttatcgaccgtgacggcaacgaagtcgatcaagagtcattcaactccatttatatgatggcggactccggtgcccgtggttctgcagctcagattaaacagttgtccggtatgcgtggcttgatggcaaaacctgacggctcgattattgaaacgccgattacctcaaacttccgtgaaggtctgaccgtattgcaatactttattgcgacccacggtgcgcgtaagggtttggcggataccgcattgaaaaccgcgaactccggttacctgacccgtcgtctggtagacgtaactcaagatttggtcgttgttgaagacgattgcggtacttcagacggctttgtcatgaaggcagtggtacaaggcggtgatgtgattgaagcattgcgcgagcgtattttgggccgtgttactgcgtctgacgttgtcgatccgtcaagcggcgagaccttggttgaagcaggcacgttgttgactgaaaaactggtggatatgattgaccaatccggtgtcgatgaagtcaaagtccgtactccgattacttgtaaaacccgccacggtttgtgcgcgcactgttacggccgcgacttggcgcgcggcaaactggtcaatgccggagaggcagtcggcgtgattgccgcccaatcaatcggcgaaccgggtacccagctgactatgcgtacgttccacatcggtggtgcggcatcccgtgcggcagcagccagccaagtggaagccaaatccaacggtacggcacgattcagcagccaaatgcgttatgttgccaacaataaaggcgagttggttgtcatcggccgttcttgtgaagtcgtgattcacgatgacatcggccgtgaacgcgaacgccacaaagtaccttacggtgccatcctgctggtacaagacggtatggccattaaagccggtcaaaccttggcaacctgggatccgcatacccgtccgatgattaccgaacacgcaggtatggtgaaattcgaaaacgtggaagagggcgttaccgttgccaaacaaaccgatgatgtaaccggtttgtccactttggtagtgatcgacggtaaacgtcgttcctctagtgcttccaaactgctgcgtccgactgtgaaactcttggacgaaaacggcgtggaaatctgtattcccggtacttctactccggtatccatggcattccccgttggtgcggtgattaccgtacgcgaaggtcaggaaatcggtaaaggcgacgtattggcgcgtatcccgcaagcctcttccaaaacccgcgacattaccggtggtctgccgcgcgttgccgaattgtttgaagcacgcgtgccgaaagatgccggtatgttggcggaaattaccggtaccgtttccttcggcaaagagaccaaaggcaagcaacgtctgattattaccgacgtggacggcgtagcatacgagactttgatttccaaagagaaacagattttggtacacgacggtcaagtggtaaaccgcggcgaaaccattgtggacggcgcggtcgatccgcacgatattctgcgtctgcaaggtatcgaagcactggcacgctacattgtccaagaggtgcaagaggtttaccgtctgcaaggtgtgaagatttccgacaaacacatcgaagtcatcatccgtcaaatgttgcgccgtgtgaacattgcggatgccggcgaaaccggcttcattaccggcgagcaggtcgaacgcggcgatgtgatggctgccaatgaaaaagctttggaagaaggcaaagaaccggcacgttacgaaaacgtattgctgggtattaccaaagcctccctgtctaccgacagcttcatttctgccgcatcgttccaagaaacgacccgcgttctgaccgaagccgcgattatgggcaaacaagacgagctgcgcggtctgaaagagaacgtgattgtcggtcgtttgattcctgctggtactggtttgacttaccaccgcagccgtcatcaacaatggcaagaggtggagcaggagactgctgaaacccaagtaacggatgaataa

SEQ ID NO: 45932 - DNA, 354 bp, Neisseria meningitidis
atggataaacatacaacccgactccgtcgtgcacgcaaaacccgtgctcgtattgcggacttgaaaatggtaagattatgtgtgttccgaagcaataatcatatttatgctcaagtaattagtgctgaaggtgataaagtattggctcaagcctctacattggaagctgaggtgcgcggtagtctgaaatttggaagcaatgttgaagcagctgcaatagttggtaaacgtatcgctgagaaggctaaagcagcaggtgtagaaaaggttgcttttgatcgttcaggtttccaatatcacggtcgtgtgaaggctttggctgaagctgctcgtgaaaatggtttaagcttctaa

SEQ ID NO: 45933 - DNA, 564 bp, Neisseria meningitidis
atgccttggaatctccctatcttcctcacatggttgagggtcttgctcattcctgtcatgacagcccttttttacctgccttttccgtggttcgcggaggaaacgattaatctcaccgccgccgtcatttttgccgttgccgccttaaccgactggtttgacggatttttggcaagactgtggaaacaaacttccgatttcggcgccttcctcgatcccgtcgccgacaagctgatggttgccgtatcgctacttttactggtcaaactcgaccggacctatgttttgtttgccatgatcattatcggcagggaaattaccatttccgcattgcgcgaatggatggcgcaaatgggcaaaaggaacagcgttgccgtcgccaccgtcggtaagttcaaaaccgccgcgcaaatgctggcaattttcctgctgctgctgaatattcccgatttttacggatttaatcttgttgttatcggcaatgtattgatgtttatcgcatctttgctgacagtctggtcgatgctgtattatctgaaaatggcgtggaaagaaatcgcctga

SEQ ID NO: 45934 - DNA, 438 bp, Neisseria meningitidis; identical to SEQ ID NO: 39862

SEQ ID NO: 45935 - DNA, 1410 bp, Neisseria meningitidis
atgatgaaaaatcgagttaccaacatccattttgtcggtatcggcggcgtcggcatgagcggcatcgccgaagtcttgcacaatttgggttttaaagtttccggttcggatcaggcgcgtaatgccgctaccgagcatttgggcagcctgggcattcaagtttatcccggccataccgccgaacacgttaacggtgcggatgtcgtcgttacctctaccgccgtcaaaaaagaaaatcccgaagttgtcgctgcgttggagcagcaaattcccgttattccgcgcgccctgatgttggcggagttgatgcgcttccgtgacggcatcgccattgccggcacgcacggcaaaaccacgaccaccagcctgaccgcctccatcctcggcgcggcaggacttgacccgactttcgttatcggcggcaaactcaacgccgcaggcaccaacgcccgcttgggcaaaggcgaatacatcgttgccgaagccgacgagtcggatgcatcctttctgcacctgacaccgattatgtccgtcgttaccaatatcgacgaagaccatatggatacctacgggcacagcgtcgaaaaactgcatcaggcgtttatcgatttcatccaccgtatgcccttctacggcaaagcctttttgtgtattgacagcgaacacgtccgcgcgattttgcccaaagtgagcaaaccttatgctacttacggtttggacgataccgccgacatctacgccaccgacatcgaaaacgtcggcgcgcaaatgaaattcaccgtccatgttcaaatgaaaggacatgagcaggggtcgtttgaagtcgtgctgaatatgcccggcagacacaacgtgctgaacgcattggcagccatcggcgtggcgctggaagtcggcgcatcggttgaagcgatccaaaaaggcttgctcggctttgaaggtgtcggccgccgcttccaaaaatacggcgacatcaagttgccaaacggcgggaccgcgctcttggtggacgactacggacaccaccccgtcgaaatggcggcgacccttgccgccgcacgcggcgcgtatccggaaaaacgtttggtactcgccttccagccgcaccgctatacccgcacgcgcgatttgtttgaagactttaccaaagtcctcaataccgttgacgcgctggtgctgaccgaagtttatgccgccggtgaagagccgattgccgccgccgattcccgcgctcttgcccgcgccatccgcgtgttgggcaaactcgagccgatttactgcgaaaacgttgccgatctgcccgaaatgctgttgaacgttttgcaggacggcgacatcgtgttgaatatgggtgcgggaagcatcaaccgcgtccccgccgcgctgctggaattgtcgaaacagatttga

SEQ ID NO: 45936 - DNA, 484 bp, Neisseria meningitidis
atgtttgtgaacgagaaatatccttatgcggctctgtttgcgggactggtgtttttgacgctgccgtttgcgttggcggtgcatgatgcctttgcgcttgcgttcggacggacggggttgctggtgtcggtgtcggacggcggattcggctggcgaggaggctgggacggcgtggtgtggtttgtgttcggagtgtttgcgtttttgaatgtggttgtgtcggcgggtctgacgaaactggcgtacaaaaagatgatgcggcggcattcgcgttacacactgtttctgtcgggcgtggcggcttgcgcggcggcagcggtggcttggattttcgagctgctgcttggcagtggggctttgggcgggctgcgtggggaggcggtgttggaatatgcgtttgccgtgtggctggtggcgatgctgacgctgcccaaacgcctgacgcgcgcgccggtgcagccggtggtgtttcacaggaaaaaat

SEQ ID NO: 45937 - DNA, 915 bp, Neisseria meningitidis
atgcagaattttggcaaagtggccgtattgatgggcggtttttccagcgaacgagaaatctcgctggacagcggcaccgccattttgaatgctttaaaaagcaaaggcatagacgcatatgccttcgatcctaaagaaaccccattgtctgaattgaaggcacaaggttttcagacggcattcaacatccttcacggtacttacggcgaagacggggcggttcagggtgcattggaactgttgggcattccctataccggcagcggtgtcgccgcatccgccatcggcatggacaaataccgctgcaaactgatttggcaggcattgggactgcccgttcccgagttcgccgtcctgcacgacgacactgatttcgatgccgtcgaagaaaaattgggcctgccgatgtttgtgaaaccggcggccgaaggcagcagcgtaggcgtggtaaaagtcaaaggaaaaggccgtctgaaaagcgtttacgaagaattgaaacaccttcagggcgaaatcattgccgaacggtttatcggcggcggcgaatattcctgccccgtcttgaacggcaaaggcctgcccggcatacacatcatccccgcgaccgagttttatgactacgaagccaagtacaaccgcaacgacaccatttatcaatgtccttcggaagatctgaccgaagccgaagaaagcctgatgcgcgaactggcggttcgcggcgcgcaggcaatcggtgcggaaagctgcgtgcgcgtcgatttcctcaaagataccgacggcaaactctatctgttggaaatcaacaccctgcccggtatgacgagccatagtttagtaccgaaatccgctgccgttacgggcgtgggttttgccgatttatgtattgaaattttgaagaccgcacatgtgggataa

SEQ ID NO: 45938 - DNA, 171 bp, Neisseria meningitidis; identical to SEQ ID NO: 39871

SEQ ID NO: 45939 - DNA, 1035 bp, Neisseria meningitidis
atgagtacttcattgagttaccgcgatgcaggtgtcgatatcgacgcaggcgaccaactggtcgaaaacatcaaaccgtttgccaaacgcaccatgcgtccggaagtattgggggatttgggcggttttggcgcattggtcgaaatcggcaagaaatataaaaatcccgtattggtcagcggtacggacggcgtgggtaccaagctcaaacttgcctttgattgggataaacacgatacggtgggcatcgaccttgttgcaatgagtgtcaacgatattttggttcaaggagcagaacctctgtttttcttggattatttcgcctgcggcgaattggatgttccgcgcgcaaccgatgtcatcaaaggcattgcacaaggttgcgaagaatccggctgcgccctgattggcggggaaactgccgaaatgccgggtatgtatcccgtcggagaatacgatttggcgggttttgccgtcggcgtagtggaaaaagagaatgtcattaccggccgcagcatcggcgcgggcgatgtggtattgggtttggcttccaacggcgcacattcaaacggctattcccttatccgtaaaatcatcgaacgcgacaatcccgatttggatgccgagtttgataatggcaaaaccttgcgtgaggctgttattgcgccgacccgtctgtatgtgaaaccgattcttgccgctttggaaaaatttaccattaaaggtatggcacacattaccggcggcggcattaccgaaaacgtgccgcgcgtgttgcctgaaaacacggttgcacaaatcgatgctaaatcgtgggaattgcccaagctcttccaatggcttcaaaaggcgggcaatgtggaaacccaagaaatgtaccgaacctttaactgcggcatcggcatggtcgttattgttgctgccgaagatgccgatgcggttcaggatctcttgggtgaacaaggtgaaacagtttaccgtttaggtttgatccgtgagcgtcagggagacgagcatcaaacccaggttgcctga

SEQ ID NO: 45940 - DNA, 1443 bp, Neisseria meningitidis
atgaaacaattggccatgtacatcaacggacgctttgaaaacgatttcaacggcgaatggcgcgacgtattgaacccatccaccgaagaaaccatcgcccgcgaacccaaaggcggcaaggcggacgttgaccgcgccgtcgcggcggcgcgtgcggcgcaaccggcttgggagcgtctgcctgcggtcgaacgcggcgcgtatttgcgcaaaatcgcccaaggcatacgcgaacgcgccgacgagctgaccgacaccatcgttgccgaaggcggcaaaaccaaagacttggcgcgcgtggaagtcatgttcactgccgattatctcgattaccaagccgaatgggcgcgccgttacgaaggcgaaatcatccaaagcgaccgcccgcgcgaaaacattttattgttcaaacgtccgctgggcgtcgtggcaggcattttgccgtggaacttccccttcttcctgattgcccgcaaaatgggcccggctttggtaacgggcaataccatcgtcgtcaaacccagcagcgtaaccccgatcaactgccacatcttcgccgaaatcgtcgatgcggtcggactgcccgcaggcgtgttcaacgtagtgaacggccctggtgcggaaatcggcaatgccttgtccgcccatccgcaagtcgatatggtcagcctgaccggctccgtcgaagcaggccgccaagtgatggaagccgcctccgccaacatcaccaaagtttcgttggaactcggcggcaaagcccctgccatcgttttgaaagacgcggatttggatttggcagtgaaatccatcttggcttcgcgcgtcggcaacaccggtcaaatctgcaactgcgccgagcgcgtctatgtccacagcagcctgaaagacgcattcattgaaaaaatgaccgccgcgatgaaaggcgtgcgctacggcaaccctgccgaagccgaagccggcgcgctggaaatgggtccgctgattgaagagcgcgccgtcaaagccgttgccgaaaaagtggaacgggcagtcaaacaaggtgcgaaattggtttgcggcggcaaacgcgccgaaggacgcggctatttcttcgagccgaccctgctgaccgacaccgacaacagtatggacattatgaaagaagaaaccttcggccccgtcctgcctgtttccactttcgacacgctcgaccaagtcatcgcactggctaacgattgcgagtttggtctgaccagttctgtttatacgactaatttaaacgaagccttctacgttacccgccgcctgcaattcggcgaaacctacatcaaccgcgaaaactttgaagcgatgcagggtttccacgccggttggaaaaaatccggcatcggcggtgcggacggcaaacacggtttggaagaatatctgcaaacccaagtcgtttatttggaaaccgacatttaa

SEQ ID NO: 45941 - DNA, 621 bp, Neisseria meningitidis; identical to SEQ ID NO: 39955

SEQ ID NO: 45942 - DNA, 1383 bp, Neisseria meningitidis
atggcaaatatcgcccacgacattttcaaagcctacgacatccgaggcatcgtcggtaaaaccctgaccgacgaagctgcctatttaatcggcaaagccattgccaccaaagcctccgaaaaaggcattacccgcatcgccctcggccgcgacggccgtttgagcggccccggcctgatggcacaaattcaacacggttttacagacagcagcatcgacgtcctcaacgtcggcatgattgccactcctatgctctacttcgcagccatcaacgaatgcggcggcagcggcgtgatgattaccggcagccacaatccgcccgattacaacggtttcaaaatgatgctcggcggcgacacgctcgcaggcgaagccattcaagaacttttagctattgttgagaaagacggttttgttgccgccgacaaacaaggcagcgtaaccgaaaaagacatctccggcgaataccacaacaacatcgtcggccacattaagctcaaacgtccgatgaaaatcgtgattgacgcgggcaacggtgtcggcggcgcgtttgccggcaaactctacaaaggtttgggcaatgaagtggccgaacttttctgcgaagtggacggcaattttcctaatcaccaccctgatccttccaaacccaaaaacctgcaagatttgattgccgcgctgaaaaacagcgatgccgaaatcggcttggcttttgacggcgatgccgaccgcttgggcgtggtcaccaaagacggcaacattatttatcccgaccgccaattaatgctgttcgcccaagacgtgttgagccgcaatcctaaagcaaaagtgattttcgatgtcaaatccacccgcctgctgaccccgtggattaaagaacacggcggcgaacctgtgatggaaaaaaccggccacagctttatcaaatccgccatgaaaaaaaccggcgcgctggttgccggcgaaatgagcggacacatcttcttcaaagaacgctggttcggcttcgacgacggtctgtacgccggcgcacgcctcttggaaatcctgtctgcctccgataatccgtccgaagtgttaaacaacctgccgcaaagcatttccacgcccgaactcaacatcgccctgcccgaaggcagcaacggccatcaggttatcgacgaactcgccgccaaagccgaatttgaaggcgcaaccgaaatcatcaccatcgacggtctgcgcgttgaatttcccgacggcttcggtctgatgcgtgcttccaataccacgccgattctggtgttgcgttttgaggcggatacgcaagaagccatcgagcggattcaaaaccaattcaaagccgtcatcgaaagcaatccgaatctaatctggcctctgtaa

SEQ ID NO: 45943 - DNA, 258 bp, Neisseria meningitidis
atggtattgttattaattgtaaataaatattggaaggtaaatgatatgaaaaatgaaattcaaaaaattatggacaaatatgatccatggcatgaagatgattttgagtcgtatgaagacattgccaaagatgtatcgttgatgacagataaaacgttcattgaacattatttgttagaagtttattcagaagaaaacggacattttgaccaagagaatgtccatgcaatgatagaagaaattaaaaatgcaatttag

SEQ ID NO: 45944 - DNA, 279 bp, Neisseria meningitidis; identical to SEQ ID NO: 37183

SEQ ID NO: 45945 - DNA, 1545 bp, Neisseria meningitidis
atgaatatggtttccaaactggacaaatactggcagcaccccgccctctactggcctttgctcatcctttttgccgccgccaccccctttaccttcgcaccctactaccacttttggctgatgcccttgattttcggtgccttcgtccgcctcatcgaactgcgtccgcgttttgctgtctcttccgcctacctgttcggcctgaccgcatacacgacacagttctactggatacacaccgccctgcacgacgtttccggcctgcccgacctctatgccgtaccgctgaccttcctactccccgcctaccttgccctttatccggcactgtgtttctggctgtggaaaaaatttaccctgcctcggggcataaaaatcggtttggtactgcccatcctgtggacactgaccgagtttgcccgcgaacgtttcctgaccggattcggctggggcgcaatcggctactcccaaatcaccccggacagcccgctcgccggctttgccccattgggcggcatccacatggttacactggcaaccgcctttctcggtgtctggctggttttggcgagtgataacaccgcacgttcgggcaaacgcctgcttccaattatcctgattgccgccctgcttgccgcaggctacaccgcccgacaaaccgacttcacccgccccgacggcagccgcagcaccgtcgccctgcttcaaggcaacatcgaccaaaccctcaaatggcgtgaagaccaagtcatcccgaccatacagaaatattacgaacaggtcggcaaaaccactgccgacatcgtcatcctgcccgaaaccgccatccccgttatgcgccaaaacctgccggaaaacatactggcaaaatttgccgaacaggcgcaaaacaacggcagcgcgctcgccgtcggcatcagccaatacacttcggacggcaacggttacgaaaacgccgtcatcaacctgaccggttatcaggaaaacaatcaggacggcatcccctactacgccaaaaaccacctcgtccccttcggcgaatacaaaccgctgcccttcctgaccacgccgctttacaaaatgatgaatatgcccctttccgacttccgcaaaggcggcggtaagcaatccgccctgctgatgaaaaaccaaaaaatcgccttcaacatctgttacgaagacggattcggcgacgaactgattgccgccgccaaagatgccacactgcttgccaatgccagcaatatggcgtggtacggaaaatccaacgccatgtaccagcacctccaacaatcgcaggcgcgggctatggaactcggacgctatatggtccgtgccaccaacaccggcgcaaccgccatcatctcccccaaaggcaacatcatcgcccaagcccaacccgatacggaaaccgtattggaaggacacatcaaaggctatgtcggcgaaacgccctatatgaaaaccggcagttcatggtggttgatgggcatattgaccctagccgcactgattcttttcatcttccgaaacaaagaacactga

SEQ ID NO: 45946 - DNA, 372 bp, Neisseria meningitidis; identical to SEQ ID NO: 36794

SEQ ID NO: 45947 - DNA, 1047 bp, Neisseria meningitidis
atgaaaatgcaggcagttgttgtgaataaaaatgtagcgggcgatgtggaaatagtcgaacgcgaggttcgcccgttggaatacggcgaggcgttggtcgaagtcgaatattgcggcgtgtgccacaccgacctgcacgttgcggcaggcgactacggcgaaaaaccgggccgcgtgctgggacacgagggcatcggtttggttaaagaagttgccgacggtgtgaaaaatctgaaagtcggcgaccgcgtcagcatcgcctggctgttccaaagctgcggctcttgcgaatactgcaataccggccgcgaaaccctgtgccgctctgtattgaacgctggctatactgccgacggcggcatggcgacccactgtatcgtgagtgccgattacgcggtcaaagtcccagaaggcttggatcctgcgcaagcttcgagcattacttgtgccggtgtaaccacttataaagccattaaagtttccagtgttcgtccgggacagtggattgccatctacggcgcgggcggtttgggcaacttgggggtccaatacgcgaaaaaagtatttggcgcacacgtcgtcgccatcgacatcaacgatgaaaaactggcttttgccaaagaaagcggcgcagatttagtcatcaacgctgccaaagaagatgccgccaaagtgattcaggaaaaaaccggcggtgcacacgtagccattgttaccgccgtatccgccgccgcattcaactctgccgtgaattgcgtccgcgcgggcggacgtgtggttgccatcggactgccgccggaatcgatggatttgtccatcccgcgtttggttttggacggcatcgaagtggtcggctctttggtcggcacgcgcaaagatttggaagaagccttccaattcggcgcggaaggtttggttgtgccgaaagtccaactgcgtgctttggatgaagcacccgccattttccaagaaatgcgcgaaggcaaaatcaccggccgtatggtgatcgatatgaaaaaagaatgcggctgcggtcatcaccactga

SEQ ID NO: 45948 - DNA, 525 bp, Neisseria meningitidis
atggaaatgaaacaaatgcttttagccgtcggcgtggtggcggtgttggcgggctgcggcaaggatgccggcggttacgagggttattggcgcgaaaagtcggacaaaaaagagggcgtgattgccgtcaaaaaagaaaaaggcaattacttccttaataaaatcaacgtatttacaggcaaggaggagtctttgcttttgtctgaaaaagacggcgcgctttcgataaacacggggataggggaaatcccgatcaaactttccgacgacgggaaagagctgtatgtcgaacgcaggcagtatgtcaaaaccgatgcggcgatgaaggacaaaatcatcgcccatcagaaaaagtgcggacaaacggcacaggcatacctcgacgcgcgaaaggcgttgccgtcaaaccaaacgtatcagcagcgtcaggcggcgatcgagcagttgaaacggcggtttgaagccgagtttgacgaattggaaaaagaaatcaaatgcaacggcaaaccgacattgttgctttag

SEQ ID NO: 45949 - DNA, 534 bp, Neisseria meningitidis
atgtcacgtgtcgcaaaaaacccagtgactgttcccgctggtgtagaagtaaaatttggaacagaggcattagttattaagggtaagaacggtgaattgtcttttcctttgcattctgatgtagccattgaatttaatgatggcaaattgacttttgttgcgaataacagcagtaaacaagcaaatgcaatgtctggtactgctcgcgcattagtcagcaatatggttaaaggtgtttcagaaggttttgagaaaagattgcaattgataggtgtgggttatcgtgctcaagcacaaggtaaaatcttgaatctgtctttgggtttttctcatccgatcgtatatgaaatgcctgaaggtgtctccgttcaaactcctagccaaacagagattgttttaaccggctcggataaacaagttgttggtcaagttgctgctgagattcgtgcgttccgtgctcctgagccttataaaggtaaaggtgttcgctatgtaggagaagtagtggtaatgaaagaagccaagaaaaaataa

SEQ ID NO: 45950 - DNA, 1173 bp, Neisseria meningitidis
atgaaacgtgatttgagcaaaatgacctgcatcgaagacttgcgccgcgttgccaagcgcaaaatgccgcgtatgttttacgattacatcgattcgggttcgtggacggaaacgacttatcgggaaaatacttcggatttcaaagacatccgcttccgtcaaaaagtattggtcaatatggagggacgcagccttgagactaaaatgatcgggcaggatgtgaaaatgccggtggcgattgcgccgacgggttttaccggcatggcacacgcagacggcgaaattttggcggcgcgggcggcggagaagttcggtattccgtttacgttgtccaccatgtccatctgctcgattgaagacgttgccgagaacaccagtgcgccgttttggtttcagctttatgtgatgcgcgaccgcgagtttatggaaaacctgattaagcgcgcgaaggatgccaaatgttcggcattggtattgaccgccgatttgcaggttttgggtcaacgccacaaagacatcaaaaacggcctgtccgcgccgccgaaaccgaccatcgccaatttaatcaatctggcgaccaaaccggaatggtgcatgaaaatgctgaacacggaacgccgcacgttccgcaatatcgtcggacacgcgaagaacgtcggcgatttgtcttcgctgtcttcatggacttccgaacaattcgacccgcgcctgagctgggacgatgtggcgcgcattaaagatttgtggggcggcaagctgattatcaaaggcattatggaacccgaagacgcggaaaaagcagcgaaaagcggcgcggacgcattgattgtttccaaccacggcggccgacagctcgacgataccgtgtctgccatcaaagccttgcccgacatcgtcagcgcagtgggcagcgacatcgaagtttggatggacagcggcatccgcagcggtcaggatattttgaaggcgtgggctttgggcgcgaaaggtacaatgataggtcgggcgttcctgtatggcttgggcgcgtatggcgaagaaggcgtaacccgtgcgctggaaattctatataaagaaatggatatatctatggcgtttacgggacaccgcgatattcaagatgtcgatgcctcgattttaaggggtaaagattggggtagggaaacggtttag

SEQ ID NO: 45951 - DNA, 486 bp, Neisseria meningitidis; identical to SEQ ID NO: 37367

SEQ ID NO: 45952 - DNA, 2133 bp, Neisseria meningitidis
atgtctatcgtatccgcaccgctccccgccctttccgccctcatcatcctcgcccattaccacggcattgccgccaatcctgccgatatacagcatgaattttgtacttccgcacagagcgatttaaatgaaacgcaatggctgttagccgccaaatctttgggattgaaggcaaaggtagtccgccagcctattaaacgtttggctatggcgactttacccgcattggtatggtgtgatgacggcaaccatttcattttggccaaaacagacggtgagggtgagcatgcccaatttttgatacaggatttggttacgaataagtctgcggtattgtcttttgccgaattttctaacagatattcgggcaaactgatattggttgcttcccgcgcttcggtattgggcagtttggcaaagtttgactttacctggtttattccggcggtaatcaaataccgccggttgttttttgaagtattggtggtgtcggtggtgttgcagctgtttgcgctgattacgcctctgtttttccaagtggtgatggacaaggtgctggtacatcggggattctctactttggatgtggtgtcggtggctttgttggtggtgtcgctgtttgagattgtgttgggcggtttgcggacgtatctgtttgcacatacgacttcacgtattgatgtggaattgggcgcgcgtttgttccggcatctgctttccctgcctttatcctatttcgagcacagacgagtgggtgatacggtggctcgggtgcgggaattggagcagattcgcaatttcttgaccggtcaggcgctgacttcggtgttggatttggcgttttcgtttatctttctggcggtgatgtggtattacagctccactctgacttgggtggtattggcttcgttgcctgcctatgcgttttggtcggcatttatcagtccgatactgcggacgcgtctgaacgataagttcgcgcgcaatgcagacaaccagtcgtttttagtagaaagcatcactgcggtgggtacggtaaaggcgatggcggtggagccgcagatgacgcagcgttgggacaatcagttggcggcttatgtggcttcgggatttcgggtaacgaagttggcggtggtcggccagcagggggtgcagctgattcagaagctggtgacggtggcgacgttgtggattggcgcacggctggtaattgagggcaagctgacggtggggcagctgattgcgtttaatatgctctcgggacaggtggcggcgcctgttatccgtttggcgcagttgtggcaggatttccagcaggtggggatttcggtggcgcgtttgggggatattctgaatgcgccgaccgagaatgcgtcttcgcatttggctttgcccgatatccggggggagattacgttcgaacatgtcgatttccgctataaggcggacggcaggctgattttgcaggatttgaacctgcggattcgggcgggggaagtgctggggattgtgggacgttcggggtcgggcaaatccacactcaccaaattggtgcagcgtctgtatgtaccggagcagggacgggtgttggtggacggcaacgatttggctttggccgctcctgcctggctgcggcggcaggtcggcgtggtcttgcaggagaatgtgctgctcaaccgcagcatacgcgacaatatcgcgctgacggatacgggtatgccgctggaacgcattatcgaagcagccaaactggcgggcgcacacgagtttattatggagctgccggaaggctacggcaccgtggtgggcgaacaaggggccggcttgtcgggcggacagcggcagcgtattgcgattgcccgcgcgttaatcaccaatccgcgcattctgatttttgatgaagccaccagcgcgctggattatgaaagtgaacgagcgattatgcagaacatgcaggccatttgcgccaaccggacggtgctgattatcgcccaccgtctgtccactgttaaaacggcacaccggatcattgccatggataaaggcaggattgtggaagcgggaacacagcaggaattgctggcgaagccgaacggatattaccgctatctgtatgatttacagaacgggtag

SEQ ID NO: 45953 - DNA, 1551 bp, Neisseria meningitidis
atgaaaaaacctttgatttcggttgcggcagcattgctcggcgttgctttgggtacaccttattatttgggtgtcaaagccgaagaaagcctgacgcagcagcaaaaaatattgcaggaaacgggcttcttgaccgtcgaatcgcaccaatatgagcgcggctggtttacctctatggaaacgacggtcatccgtctgaaacccgagttgctgaataatgcccgaaaatacctgccggataacctgaaaacagtgttggaacagccggttacgctggttaaccatatcacgcacggcccttttgccggcggatttggcacgcaggcgcacattgaaaccgagttcaaatacgcgcctgaaacggaaaaagttttggaacgcttttttgggaaacaagctccggtttcccttgccaataccgtttattttaacggcagcggtaaaatggaagtcagtgttcccgccttcgattatgaagagctgtcgggcatcaggctgcattgggaaggattgacgggaaaaacggtttatcaaaaaggtttcaaaagctaccgcaacagctatgatgcgcccttgttcaaaatcaagctggcagacaaaggcgatgccgcgtttgaaaaagcgcatttcgattcggaaacttcagacggtatcaatccgcttgctttgggcagcagcaatctgaccttggaaaaattctccctagaatggaaagagggtgtcgattacaacgtcaagttaaacgaactggtcaatcttgttaccgatttgcagattggcgcgtttatcaatcccaacggcagcatcgcaccttccaaaatcgaagtcggcaaactggctttttcaaccaagaccggggaatcaggctcatttatcaacagtgaagggcagttccgttttgacacgctggtgtacggcaatgaaaaatacggcccgctggacatccatatcgccgccgaacatctcgatgcttctgccttaaccgtattgaaacgtaagtttgcacaaatttccgccaaaaaaatgaccgaggaacaaatccgcaatgatttgattgccgccgtcaaaggcgaggcttccggactgttcaccaacaatcccgtattggacattaaaacttttcgtttcacacagccgtcgggaaaaatcgatgtgggtggaaaaatcatgtttaaagacatgaagaaggaagatttgaaccaattgggtttgatgctgaagaaaaccgaggcagacatcagaatgagtattcctcaaaaaatgttggaagacttggcggtcagtcaggcaggcaatattttcagcgtcaatgccgaagatgaggcggaaggcagggcaagtcttgacgacatcaacgagaccttgcgcctgatggtggacagtacggttcagagtatggcaagggaaaaatatctgactttgaacggcgaccagattgatactgccatttctctgaaaaacaatcagttgaaattgaacggtaaaacgttgcaaaacgaaccggagccggattttgatgaagccggtatggtttcagagccgcagcagtaa

SEQ ID NO: 45954 - DNA, 1470 bp, Neisseria meningitidis
ttgaaagcggttatcctacataccggaggacacgaaatgaacgaatattcccaattaatcaagcatcccgatatttccctttccccgatttcagacggcatcggggtcggcaatccggcgacgggtgaaattttggcgtatgtccgcaagacggattcggacaaactgaaaaacctgattcaaaaggcggcggcagcgcaaaaattatgggcggcgaaaactgctttggaacgcgccgacatattgtggtgttggtattttttagttaaagaaaacaaagaagcactggcgcgcctgatgacgatggagcagggcaaaagcctgaccgagtcgcgcggcgaaattgattatgcggcttcgtttgtgcgctggtttgccgaagaggcgcggcggattgacggcgatgtgctgacaagcgtgaaagcgtcgcaaaaactggtcgtgttgaaacagcccgtcggcgttaccgctgcgattacgccgtggaactttccgtccgcgatgattgcgcgcaaggccgcgcctgctttggcggtgggttgcgcgatgatcatcaaacccgcatcgctcacgcctttgagtgcgtatgccttggcttcgttggcttacgaagcgggcgtaccacaggatttgttgcccgtcgtcagcggccgcgcatcggaaatcggccgtgaatttgccacgaacccgattatccgcaaaatcagcttcaccggctctaccgaagtcggtgcgaaaatttttgccgacagcgcggcggacattaaaaaactcagtttggagctgggcggcaacgcgccgtttatcgtgtttgacgatgccgatttggacaaagccgtcgaaggtgcgctcgccagcaagttccgcaacagcggtcagacctgcgtctgcaccaaccgcgtttacgcccaatcgggcatttacgacgcattttgccgcaaattgagtgaaaaagcagccgcgctcaaattgggcaacggcttggaggatggcgtaaaccaagggccgttgattgaggaaaaagcggtggaaaaagtcgagcagcacatcgccgacgcgctctcaaaaggcgcgatctgtctgaccggcggcaaacgcagcgcgttgggcggaacgttttttgagccgactgtcttaagcggcattacggcacaaatggcggtggcacgcgaagaaaccttcgggcctttgtgtccggtattccgttttgaaaccgaagccgaggtcatcgaggctgcgaacaatacggaatacggtttggcagcttaccttttcaccgccgacaccgcccgccaatggcgcgtcggcgaagccttggaatacggcatggttggcatcaatacgggcttaatcagtaatgaagcggcaccgtttggcggcgtgaaacgcagcggtttgggacgtgaaggcagcaaatacggtgcggacgaatatctagaattgaaatatctgtgtatggatgtcgggtga

SEQ ID NO: 45955 - DNA, 1149 bp, Neisseria meningitidis
atgccgacaatgggggcggagatgaatacacggaatatgcgctatattcttttgacaggactgttgccgatggcatccgcttttggagagaccgcgctgcaatgcgccgctttgacggacaatgttacgcgtttggcgtgttacgacaggatttttgcggcacagcttccgtcttcggcagggcaggaagggcaggagtcgaaagccgtactcaatctgacggaaaccgtccgcagcagcctggataagggcgaggcggtcattgttgttgaaaaaggcggggatgcgcttcctgccgacagtgcgggcgaaaccgccgacatctatacgcctttgagcctgatgtacgacttggacaaaaacgatttgcgcgggctgttgggcgtacgcgaacacaatccgatgtaccttatgccgctctggtacaacaattcgcccaactatgccccgggttcgccgacgcgcggtacgactgtacaggaaaaattcggacagcagaaacgtgcggaaaccaaattgcaggtttcgttcaaaagcaaaattgccgaagatttgtttaaaacccgcgcggatctgtggttcggctacacccaaagatccgattggcagatttacaaccaaggcaggaaatccgcgccgttccgcaatacggattacaaacctgaaattttcctgacccagcctgtgaaggcggatttgccgttcggcggcaggctgcgtatgctcggtgcgggttttgtccaccagtccaacggacagagccgtcccgaatcgcgttcgtggaacaggatttacgccatggcaggcatggaatggggcaaattgacggtgattccgcgcgtgtgggtgcgtgcgttcgatcagagcggcgataaaaacgacaatcccgatattgccgactatatggggtatggcgacgtgaagctgcagtaccgcctgaacgacaggcagaatgtgtattccgtattgcgctacaaccccaaaacgggctacggcgcgattgaagccgcctacacgtttccgattaagggcaaactcaaaggcgtggtacgcggattccacggttacggcgagagcctgatcgactacaaccacaagcagaacggtatcggtatcgggttgatgttcaacgacttggacggcatctga

SEQ ID NO: 45956 - DNA, 342 bp, Neisseria meningitidis
atgatggataaaaatcagttagaacaagaatttcataaagccatgttaaatatttatcaggaggctttgaatttgccgcaaccttacaaggcgacacgatttttacaaattgtaaatgaatttggtggtaaagaggcggcggataaattattaagtacgggggaaaagaagactcagaccggttttacagagctgattttgagtggtggcggagtccacgccttgaaatacagtatggaatatctggtgttacaaaagccgtggtgtgatttatttactgaagagcaattagctgtggcacgcaaacgattggagcgtgttggatttgtttctccgaagtaa

SEQ ID NO: 45957 - DNA, 435 bp, Neisseria meningitidis; identical to SEQ ID NO: 43108

SEQ ID NO: 45958 - DNA, 654 bp, Neisseria meningitidis; identical to SEQ ID NO: 39949

SEQ ID NO: 45959 - DNA, 1446 bp, Neisseria meningitidis
atgagtacacaaacaaattttgatttggtgttgttcggtgcgaccggcgatttggcgatgcgcaagctgttgccctgtctgtaccaggcgcatgttgccggtctgcttcatcccgaagggcgtattttaggggtcagccgcagcgagttggataccgaaggttttctggcgaaggtggaaaccagttccaaaatccatgtgaaagaaaatttttccgatgaggcttgggcatcgtttgtcgaacgtctcgcatatctcaaagtcgatgttacgcagccggacgattttgccgctttgggcgatttggtcaaagcgcgcaaagaaaccgacaatgtcgtcatctatctttccaccgcgccgaaattcttcgcgcaaacatgtgaaaaccttgccaaaatcggtttgaacgccgacaacgtgcgtgtggttttggaaaaaccgttgggtacggatttggcttcttcccagcaaatcaataccgatgttgcgcgttatttcaaagaagggcaaatttaccgcatcgaccactaccttggcaaagaaagcctgcaaaacctgcttgcgctgcgttttgccaatgtaatgttcgagccgctgtggaacaataaatacatcgaaagcgtgcagttgaccatcgccgagcagttgggcgtggaagagcgcggcgagttttacgacattaccggcgcgttgcgcgatatggtgcaaaaccatttgatgcagatgctgtgcatgactgcgatggaagcccccgccagcttggatgccgacgcggtgcgcgatgaaaaagtcaaagtcatcaagtcattgaagccgctgaccgtcgagtctgtcaatgaaaacgtcgtgcgcggacaatataccgccgccagaggcatgaacggctatcttgaagaaatcaacgttccgcaagacagctttaccgaaacctacgtcgccattaaagccgaaatcgaaaacgaacgctggaagggcgttcccttctacctgcgtaccggcaaacgcatggcgggcaaagtggcggaaatcgttttgaacttcaaagatttgaacagccatatttttgaaggcagccgcaccgcgcccaaccggctcgttatcgagttgcaaccatatgaatccgtgcgcctctatacgcagatgaaaaccccgggggcaggaaataaggtcgaaaccgtgccgctggcaaccgatttgggcaaagcattggaaagccgccgcgcggaagcttacgagcgcctgctgctggatgtgattaacggcaaactcgctttgtttaaccgccgcgacgaactcgaagccgcgtgggaatatgtgatgccgattttggaaaactggacaaataacaccacgccgccgcacggctacggcgcacactcgtgggggcctgaagccgcgcgcgaactattggcgcgcgacggacacaagtggcacgaagagcagtaa

SEQ ID NO: 45960 - DNA, 411 bp, Neisseria meningitidis; identical to SEQ ID NO: 39860

SEQ ID NO: 45961 - DNA, 453 bp, Neisseria meningitidis
ttggttatgtatgtagtaaaatcagccaatgatggaggtaattccctatttttaagttcatcagatattgtcaatcagttatctaaaacagaaaccggtaaaaaacacttaaaaacattaacgggcaatttatatccatttaaagcaccagcatcatttgataaaaaacaaggtgtgagatggggtaatatcttatcggtcaatactcaaatgattagatttagaagtgattgtatctataaaggtattgaagaaaatagaaataaagtatcaaaggaaatggtacttgcacttgattatcttgtaaagattataaaaaatgcgagtgatattcaagaattttctgcacaagatgatggtttgattattattgacaatgtcaatggcttgcatgccggaactgattatacggataaaaacaggcattatattagagcaagaattactgtataa

SEQ ID NO: 45962 - DNA, 933 bp, Neisseria meningitidis
atgaatacaggcaaaccccaaaaacgtgccgtcaacggtgttttgctcttggacaaacccgaaggcctttccagcaacaccgcgctgcaaaaagcgcggcgtttgtttcatgccgaaaaagccggacataccggcgtgctcgaccctttggcaaccggacttttgcccgtctgcttcggtgaagcgaccaagttcgcccaatacctgctggatgccgacaaagcctacaccgccacgctgaaactcggcgaagccagcagcacgggtgatgccgaaggcgaaatcattgccaccgcccgcgccgatatttccttagccgaatttcagacggcctgccaagcactgacaggcaacatccgccaagtgccgccaatgttttccgcgctcaagcacgaaggcaaaccgctgtacgaatacgcccgcaaaggcatcgtcatcgaacgcaagccgcgcgatattaccgtttacgccatcgatattgccgaatttgacgcacccaaagccgtgataagcgtgcgttgcagcaaaggcacctatatccgcaccctcagcgaagacatcgccaaacacatcggcacgttcgcccacctgaccgccctgcgccgcaccgaaaccgccggctttaccatcgcccaaagccacacgctcgaagccttggcaaatttgaacgaaacagaacgcgacagcttgctgctgccctgcgacgtattggttgcccattttccccaaaccgttttaaacgattatgccgtccatatgctccaatgcgggcaacggccgcgtttcgaggaagacctgccttccgatacgccggtacgcgtttacacggaaaacggccgctttgtcggactggcggaatatcaaaaagaaatatgccgtctgaaagccttgcgcctgatgaacacggcggttaaaaatacgggctgtgtttga

SEQ ID NO: 45963 - DNA, 312 bp, Neisseria meningitidis; identical to SEQ ID NO: 39965

SEQ ID NO: 45964 - DNA, 396 bp, Neisseria meningitidis; identical to SEQ ID NO: 39968

SEQ ID NO: 45965 - DNA, 318 bp, Neisseria meningitidis; identical to SEQ ID NO: 41968

SEQ ID NO: 45966 - DNA, 744 bp, Neisseria meningitidis
atgcctgatgccgtcaaaaaagtttacctgatacacggttggggggcgaaccgccacatgttcgacgatttgatgccgcgcctgcctgcaacgtggccggtgtccgccgtcgatttgcccggacacggcgacgcgcccttcgcgcaacccttcgatattgaggcagccgccgacgctgttgccgcacaaatcgatacgcccgccgacattctcggctggtcgctcggcggattggtcgcgctgtatctggcggcgcgccatcccgacaaagtccgttcgctctgcctgacggcgagtttcgcacggctgacggctgccgaagattatcccgaagggcttgccgcgcctgcactgggcaaaatggtcggcgcgttccgttcggattatgccaaacatatcaaacagtttctacaactccagcttctgcacacgcctgatgcggacggaatcataggcagaatcctgcccgatttggcacggtgcggcacgccctccgccttacaggaagctttggacgcggcggaaagggcggatgcgcggcatttgttggacaagatagatgttccggtactgctggtgttcggcggcaaagacgcgattacgccgccgcgtatgggcgagtatctgcaccggcatttgaaaggcagcaggctggttgtgatggaaaaggcggcacacgcgccgtttttgagccatgcggaagcgtttgccgcgctgtaccgcgactttgttgaaggggtttga

SEQ ID NO: 45967 - DNA, 981 bp, Neisseria meningitidis
atggcaatggcagaaaacggaaaatatctcgactgggcgcgcgaagtgttgcacaccgaagaggaaggcttgcgcgaaattgcaacggaattggacgaaaacttcgtccttgcggcagacgcgttgttgcactgcaagggcagggtcgttatcacgggcatgggcaagtcgggacatatcgggcgcaaaatggcggcaacgatggcctcgaccggcacgcccgcgttttttgtccaccctgcggaagcggcacacggcgatttgggcatgattgtggacaacgacgtggtcgtcgcgatttccaattccggcgaaagcgacgaaatcgccgccatcatccccgcgctcaaacgcaaagacatcacgcttgtctgcatcaccgcccgccccgattcaaccatggcgcgccatgccgacatccacatcacggcgtcggtttccaaagaagcctgcccgctggggcttgccccgaccaccagcaccaccgccgtcatggctttgggcgatgcgttggcggtcgtcctgctgcgcgcacgcgcgttcacgcccgacgatttcgccttgagccatcctgccggcagcctcggcaaacgcctacttttgcgcgttgccgacattatgcacaaaggcggcggcctgcctgccgtccgactcggcacgcccttgaaagaagccatcgtcagcatgagtgaaaaagggctgggcatgttggcggtaacggacgggcaaggccgtctgaaaggcgtattcaccgacggcgatttgcgccgcctgtttcaagaatgcgacaattttaccggtctttcgatagacgaagtcatgcatacgcatcctaaaaccatctccgccgaacgtctcgccaccgaagccctgaaagtcatgcaggcaaaccatgtgaacgggcttctggttaccgatgcagatggcgtgctgatcggcgcgctgaatatgcacgacctgctggcggcacggattgtataa

SEQ ID NO: 45968 - DNA, 1332 bp, Neisseria meningitidis
atgaacacaacatcccaatttaccagtaatttctggaatatatatattgcagttattgtcttactgagctttatcgctttggcttggctgctgctgtctcaaaatgttgtcaaacgtccgaagaagggcgaagaagtacaaactacgggtcatgagtgggacggcattgccgaatacgacaatccgctgccccgctggtggttttggctgtgtgttttgacgtggctgttcggtatcggttatctggttatgtatccgggtgtcggcgactacaaaggtctgctgaaatggaccagccataaccaatatgaaaaagaggtcaaaaaagccgatgagcaatacggcaaactgtatgccaagtttgcggatatgccgattgaaaaagtggcaaaagaccctcaagccaagcaaatcgcccaaaacctgtttaacacttattgtatccagtgccacggctctgatgctaaaggctctaaaggttttccgaatctgaccgatagcgattggttgtggggcggtgatcccgataaaatccacgagaccatcgaaaaaggccgtgttgcgactatgcctgcctggggccctgctttgggcgaagaaggcgtgaaagacgttgcccattatgtgatgtccctttcaaaacccgaaggtcagtatgatgaggaacgtgccgcgcgcggacaagccttgttcagcggtccgcctgccaactgtttcacttgccacggcgataagggacaaggtatccaaggtttgggtccgaacctgactgatgacgtgtggttgtggggcggtacgcaaaaatccattatcgaaaccattaccaacggtcgcagcagccaaatgcccgcttggggacatttcttggataaagacaaactgcatattatgactgcttatgtatggggtctttccgataaagacggtaaagctccggtgaaaaaagccgagcctgcaccgactcccgcaccggcggcagaacccgcagcctctgctcctgcagaagcagcacaagccgcgtccgaagccaaacctgccgcagcagaacctaaagccgaggaaaaagctgcacctgctgccaaagcggacggcaaataggtttatgaaaccgtttgtgccgcctgccatggcaatgcgattccgggtattccccatgtaggcatcaaagccgattgggccgaccgcatcaaaaaaggcaaggacacgttgcacaaacacgcgatcgaaggtttcaatacgatgcccgcaaaaggcggtcgcggcgatttgagcgatgatgaggttaaagctgcggttgactatatggtcaaccagtcaggcggcaaattctaa

SEQ ID NO: 45969 - DNA, 822 bp, Neisseria meningitidis
atgacgtttgacgaatggttgggcttgtcaaaactgcccaaaaatgaagcaagaatgctgctgcaatatgcttcggaatatacgcgcgtgcagttgttgacgcggggcggtgaagaaatgccggacgaagtccgacagcgggcggacaggctggcgcaacgccgtctgaacggcgagccggttgcctatctgttgggctggcgcgagttttacggacggcgtttcgccgtcaacccgaatgtgctgattccgcgccccgaaaccgaacatttggtcgaagccgtattggcgcgcctgccggaaaacgggcgcgtgtgggatttggggacgggcagcggcgcggttgccgtaaccgtcgcgctcgaacgccccgatgcgtttgtgcgcgcatccgacatcagcccgccctcccttgaaacggcgcggaaaaatgcggcggatttgggcgcgcgggtcgaatttgcacacggttcgtggttcgacaccgatatgccgtctgaagggaaatgggacatcatcgtgtccaacccgccctatatcgaaaacggtgataaacatttgtcgcaaggcgatttgcggtttgagccgcaaatcgcgctgaccgacttttcagacggcctaagctgcatccgcaccttggcgcaaggcgcgcccgaccgtttggcggaaggcggttttttattgctggaacacggtttcgatcagggcgcggcggtgcgcggcgtgttggcggagaatggtttttcgggagtggaaaccctgccggacttggcgggtttggacagggttacgctggggaagtatatgaagcatttgaaataa

SEQ ID NO: 45970 - DNA, 375 bp, Neisseria meningitidis; identical to SEQ ID NO: 39975

SEQ ID NO: 45971 - DNA, 624 bp, Neisseria meningitidis
atgaaggcagccgccgcctttgcggcaggtttggatgcacaggctgttcgcatcgtcatcgacatttacggctcgctcgcactgaccggatacggacacggtacatttgacgcgctgatgctcggtttggaaggcagcctgccgcacgacatcccgcttgccggcattcccgaacgcctcgaacgcatccgcacgcagcacatcctccggctcaacgggcaagaaatccgcttcatccccgaccgcgacctgaacatactcggcaatcaagtgctgcccaaacaccccaacagcctgcgttttaccgcctatgcttcagacggcacggtattgaatgaacaggtttattattcggtcggcggcggctttgtcgttaccgaagaagattttgaccggcaggcggaaacggaaaaagccgttccctatccctataccagttgcgccgaactgcttgcccgatgccgtctgaaccggctcgacatctccgaagtcgtgttggcaaacgaagccgcgcttgccggatgcggcgaagccgaaatccgccgccgcgccgctgccgttgccgaggttatggaaggctgcatcaaacgcggcttgggtgcggacggcgaactgcccggctga

SEQ ID NO: 45972 - DNA, 300 bp, Neisseria meningitidis
atgaagaaaatgttcgtgctgttctgtatgctgttctcctgcgccttctcccttgcggcggtaaacatcaatgcggcttcgcagcaggagttggaggcgctgccgggcataggccctgcgaaggcgaaggccattgcggaataccgtgcgcaaaacggtgcgttcaagtctgtggacgatttgaccaaggtaaagggcatcggccctgcggtgctggcgaagctgaaggatcaggcttctgtcggcgcgcccgcaccaaaaggcccggcaaaaccggctctgcccgcggataaaaaatag

SEQ ID NO: 45973 - DNA, 300 bp, Neisseria meningitidis
atgaagaaaatgttcgtgctgttctgtatgctgttctcctgcgccttctcccttgcggcggtaaacatcaatgcggcttcgcagcaggagttggaggcgctgccgggcataggccctgcgaaggcgaaggccattgcggaataccgtgcgcaaaacggtgcgttcaagtctgtggacgatttgaccaaggtaaagggcatcggccctgcggtgctggcgaagctgaaggatcaggcttctgtcggcgcgcccgcaccaaaaggcccagccaaaccggtgctgcccgcggataaaaaataa

SEQ ID NO: 45974 - DNA, 867 bp, Neisseria meningitidis; identical to SEQ ID NO: 37866

SEQ ID NO: 45975 - DNA, 939 bp, Neisseria meningitidis
atgcatcaatattatgacgcagtaattttatcggttggaaatgggttgttaaaaaggttctttaagcagaatgcgcaattaaatattgcttcaaggccattgattattaccttgtttccaggtgtagtattcggtgatcaggcaagtattctatctcgtatgggggctgatattgttttatataataataagcatgattttagaattgcagaggaatataagaaacaatataaattaagttgtcaaaatatactttatggttatccaatttttcgccacgcatcaaaaggtcgtcatggagagaaaatttactttattgaccaagttaaaatcccatttaaaaaagaagaaagaatttatacattaaaaaaattgattgccttggctgaaaaataccctgagaaagaatttactattttgctaagggttgcagataaagatattactgtgcatcaggataaacattcgtatatagagctggcaaagcagtttcagttgccgagtaatttgacaatagagcgaaaaagtaccgcgcaagccttccaagaaatggggtattgtttatcttattcatctactatgctttttgaagctgaatgtaagggtatccctgttggtgttgttgcagacttaggcttttctaaatcctatgcaaatcagcattttttaggtagtggggttttagtttattttgatcaaatagatttcacttccccaaaaatagcagatccggattggcttgattgctatgctactaaaaaggtgattacaactgatgagtttaataagctattaaagcaggttgtgccattgcaacatgattaccaagaatatttatctgcggtgaatagtatagaatcaactaaaactatttttttaagaaaatttaaaaagttaattagggatcctaaaaagttttttatgattctaaatggttga

SEQ ID NO: 45976 - DNA, 1176 bp, Neisseria meningitidis; identical to SEQ ID NO: 38454

SEQ ID NO: 45977 - DNA, 1164 bp, Neisseria meningitidis
atgtctgagcaacttcctgtggcagttgccactgaaaccaaagccgagcgtaaaaagccgaaaaagaaaagttggattaaaaagctaagccctttattttgggtaacggtgattatccctacggtaatttcgttggtgtatttcggcttcttcgcttccgatcgttttacgtcgcaatcgagctttgtggtgcgctcgcctaaaagccaatcttctctcaatggcctgggtgccattttgcagggcacaggttttgcccgtgcgcaagatgatatttacacggttggggagtatatgcgttcgcgctcgtctttggatgaactgcgtaaaatcttgccggtgcgtgaattttatgaaactaagggcgatgtatttagccgatttaatggttttggattccgtggcgaggaagaggctttttatcaatactataaaaatcaggtgatgatcaattttgatacggtttcgggtatttccacgttgaatgtaacttcctttgatgcgctggaatctaagaaaatcaatgaggctttgttaaaacaaggtgaagcattgattaaccagttgaacgatcgtgcacgtgctgatacggtgcgctatgcggaagaagtagtgaaaacggcggcagagcgggtaaaggaagcctctcagaatctgacggattaccggattgccaatggcgtttttgatttgaaagcgcaatcggaagtgcaaatggggttggtttccaagctgcaagatgaattgattgtgattcaaacccagctggatcaggtgaaagcagtcactccggagaatccgcagattccgggtttgcaggcgcgtgagcagagcttgcgtaaagaaattgaccaacagttacgtgccatttcgggcggtgggcattcttcgttgtctaatcaggctgccgaatatcagcgtgtgtatttggaaaaccagttggcagagcagcagttggcagccgccatgacttctttggaaagtgccaaggttgaagcagaccgtcagcagctttatttggaagtgatctcgcaaccgagcctgccggatttggcacatgagcctaaacggttatacaacattgttgccactctgattatcggcttgatggtttatggtattttgagcctgttgactgccagcattcgtgagcataaaaactga

SEQ ID NO: 45978 - DNA, 558 bp, Neisseria meningitidis
atgatgcaaaaacacaaatgtctaatagattttattttgactgttgccagccaaattgcttatgctgacttacctttaagtttggaagaattattgactgacaagggtaaattcaaactagaaagcagtattagctacatcaacactgaacgcaatcaaagcgaatttgctaatcctatttatgtgcaaaccagcgcaacgaaaattgcaactgtaatggctatgatgattacacctgtaatggcgcaaaatttagacagccaagtttttgacagccaaaatgtgaaagcaattcaattatcacaggctgaaatgaaagaaacacaaggtgaatttgttcccattattgcagccgctgcttttggcggtgcattaggtgcatgggagtatcatggtgctaatttgtataatcatggtaaattaggaactgcgcaaggcgcggctactgcggcaggaatcggtgcggcaacaggagtagcggcaaaacagggctggctgctgctgccggaggcggattggctggaaatttggcatggagaccgggtattcatgcactag

SEQ ID NO: 45979 - DNA, 1218 bp, Neisseria meningitidis
atgcaacgtcgtattataaccctgctctgcgcggcaggtatggcattctcaacacaaactttggcggcaaatttggaggtgcgcccgaacgcgccggaacgctacacggtcaaacagggcgacaccctgtggggcatttcgggcaaatacctgtacagcccgtggcaatggggccgcctgtgggacgcgaaccgggatcaaatccacaatcccgacctgatttatccggaccaggtattggtgttgcgccacgttgacggcgaaccgcgcctcggcttggaacagacagacggcatccccgtcgtcaaaatgagtccggataaggaagtgtccggatacggtattcccgccatcgatgtcaacttctaccgcatctttatgcggcacccgcaaatcgtttcccgcaaagaaaccgctgccgcgccgcgcctgctctcgggcccggaaggcaggctgctgtacaccaaaggcaccagggtttacaccaaaggcctgaaagagccgggccgctacctgacctaccgaatcaataaaaacatcaccgatccggatacgggtaaattcctcgggcaggaagtcgcattcagcggcatcgtgcgctccctcgactataccgactctgtcctcgaacaacgctcgaaacaggctggagaacggccgaaagacaacgaataccatacccgcacccatcctttgattaccccgctgcgcaccccttcgatacagccgctggtggtcgaaaccgccatttccgaaatacagcagggcgactacctgatgaaaatgccggaagacaccgaccgcttcaacatgatgccgcacgaaccgtcccgcccggttcaggctaaaatcgtttccgtgtttgaaggtacaaggattgccggccagtttcaaaccatcaccatcgacaaaggcgaggcggacggtttggacaaaggcacggttttgagcctctacaaacgcaagaaaacgatgcaggtcgacctctccaacaatttcaaaagcagggataccgtcgagctgatttccactcctgccgaagaagtgggcttggcaatggtttaccgcacctccgaacacctgtcgtccgccatcattttggaaaacatctccgatatttccgtaggcgacaccgccgccaatccgggacgcgatttggacaatataccggatcagggccgcagccgcgtgaagtttggcttcgaccgctccgaataa

SEQ ID NO: 45980 - DNA, 927 bp, Neisseria meningitidis
atgaaagtcatctttgccggcacgcccgattttgccgccgccgccttaaaagccgttgccgccgccggttttgaaatcccgctggtgctgacccagcccgaccgtccgaaagggcgcggtatgcaactgaccgccccgcccgtcaaacaagccgcgctggaactcggtttgcgcgtggcacagcccgaaaaactgcgtaacaacgccgaagccctgcaaatgctcaaagaggtcgaggcagacgtaatggtggttgccgcctacggtttgattctgccgcaggaagtgttggatacgccgaaacacggctgcctcaacatccacgcttcgctgttaccccgttggcgtggcgcggcgccgattcaacgcgcgattgaagccggcgatgccgagacaggcgtgtgtattatgcagatggacatcggtttggacaccggcgatgtggtcagcgaacaccgctacgccatccaaccgaccgataccgccaacgaagtccacgacgcgctgatggaaatcggtgcggcggcggttgttgccgatttgcaacagcttcaaagcaaaggccgtctgaacgcggtcaaacagcccgaagaaggtgttacttacgcccaaaaactaagcaaagaagaggcgcgtatcgattggagcgaaagcgcggcggttatcgaacgcaaaatccgcgccttcaaccccgtgcctgccgcgtgggttgagtatcagggcaagccgatgaaaatccggcgggcggaagtggtggcgcaacaaggcgcggcaggcgaagtgttgtcctgttcggcggacggtttggtcgttgcctgcggcgaaaacgcgctgaagattaccgaattgcagcctgccggcggcaggcgtatgaatatcgcggcgtttgcagcaggacggcatatcgaagcagggacgaagctgtaa

SEQ ID NO: 45981 - DNA, 321 bp, Neisseria meningitidis; identical to SEQ ID NO: 39983

SEQ ID NO: 45982 - DNA, 483 bp, Neisseria meningitidis; identical to SEQ ID NO: 39984

SEQ ID NO: 45983 - DNA, 924 bp, Neisseria meningitidis; identical to SEQ ID NO: 39986

SEQ ID NO: 45984 - DNA, 873 bp, Neisseria meningitidis
atggaaatatggaataggttggacacttggctcggtgccgtcccgatacgtgcggaggcggtcgaatccgtggcggcggttgcggctttgctgctggcgtgcgcccttctgttgaatatccacttcaaacggcatccggatttcggcatcgaaagcaagcggcggtttttggttgccagccgcaatataacgctgcttttggtgctgttttcgctggcatttatctggtcggcgcaaatccaaacgctggctttgtcgatgtttgcggtggcggcggcggtcgtcgtggcgacgaaggaactgattatgtgtctgtcgggcagtattttaaggtctgccacccagcaatactcggtcggcgactatatcgaaatcaacggcctgcgcgggcgcgtggtcgacatcaacctgttgaacacgctgatgatgcaggtcggtccgaaccccttggtcggacagcttgcgggaaccaccgtttctttccccaacagcctgttgttgagccaccccgtgcgccgcgacaatattttgggcgactatgtcatccatacggtcgaaatccccgtccccatccatttggattcggatgaagccgtatgccgtctgaaagccgtactcgagcccttgtgcgcgccctacatccccgccatccaacggcatttggaaaacgtgcaggcggaaaaactgtttatcacgcccgccgccagaccgcgcgttacccgcgtgccgtacgatgacaaggcataccgcatcatcgtccgcttcgcctcccccgtttcaaagcggctggaaatccaacaggcggttatggacgaatttttgcgcgtacaataccgcctgttaaattaccccgccggctccgaaacactttaa

SEQ ID NO: 45985 - DNA, 1452 bp, Neisseria meningitidis
atgctttctttccttagcggcttattgagcttgggtatagaagtcttgtgggtaaggatgttttcgttcgcagcacagtccgtgcctcaggcattttcatttactcttgcctgttttctgaccggtatcgccgtcggcgcgtattttggcaaacggatttgccgcagccgctttgttgatattccctttatcgggcagtgcttcttgtgggcgggtattgccgactttttgattttgggtgctgcgtggttgttgacgggtttttccggcttcgtccaccacgccggtatcttcattaccctgtctgccgtcgtcagagggttgattttcccgctcgtacaccatgtgggtacggatggcaacaaatccggacgacaggtttccaatgtttatttcgccaacgttgccggcagtgcattgggtccggtccttatcggctttgtgatacttgatttcttgtccacccaacagatttacctgctcatctgtttgatttctgctgctgtccctttgttttgtacactgttccaaaaaagtctccgactgaatgcagtgtcggtagcagtttccctaatgttcggcatcctcatgttcctactgccggattctgtctttcaaaatattgctgaccgtccggataggctgattgaaaacaaacacggcattgttgcggtttaccatagagatggtgataaggttgtttatggggcgaatgtatacgacggcgcatacaataccgatgtattcaatagtgtcaacggcatcgaacgtgcctatctgctaccctccctgaagtctggcatacgccgcattttcgtcgttggattgagtacaggttcgtgggcgcgcgtcttgtctgccattccggaaatgcagtcgatgattgttgcggaaatcaatccggcataccgtagccttatcgcggacgagccgcaaatcgccccgcttttgcaggacaaacgtgttgaaattgtattggatgacggtaggaaatggctgcgtcgccatcctgatgaaaaattcgacctgattttgatgaatacgacttggtactggcgtgcctattccaccaacctgttgagtgcggaatttttaaaacaggtgcaaagccaccttaccccggatggtattgtaatgtttaataccacgcacagcccgcatgcttttgctaccgccgtacacagtattccctatgcataccgctatgggcatatggtagtcggctcggcaaccccggtagttttccctaataaagaactgctcaagcaacgtctctcccggttgatttggccggaaagcggcaggcacgtatttgacagcagcaccgtggatgctgcagcacaaaaggttgtctctcgtatgctgattcagatgacggaaccttcggctggggcggaagtcattaccgacgataatatgattgtagaatacaaatacggcagagggatttaa

SEQ ID NO: 45986 - DNA, 2025 bp, Neisseria meningitidis
atgaacgacatgactttatatctcatcattgcccttgtgcctttggcaggctcgctgatcgcgggtttgttcggcaacaaaatcggacgtgccggtgcgcatacggttacgatactcggcgtggcggtgtccgccgtgctgtcggcttatgtgttgtggggctttattgacggcagccgcgccaagtttgacgaaaacgtctatacctggctgacaatgggcggcttggatttctccgtcggctttttggtcgatacgatgacggcgatgatgatggtcgtggtcaccgacgtatcgctgatggtacatatctataccatcggttatatgcacgatgaaaaaatcggctaccaacgcttcttcagctatatttctttgtttactttcagcatgttgatgctgattatgagcaacaacttcatccagctcttcttcggttgggaagcggtgggcttggtgtcgtatctcttgatcggtttctatttcaaacgtccgagcgcgacatttgccaacctgaaagcctttttgatcaaccgtgtcggcgacttcggctttttgctcggtatcggcttggtgcttgcctatttcggcggcagcctgcgctatcaagatgtattcgcttatctgcctaatgttcagacggccaccattcaattgttccccagtgtggaatggtctttgattactgtaacctgtttgctcctgtttgtcggtgcgatgggtaaatcggcacaattcccgctgcacgtctggctgcctgattcgatggaaggcccgaccccgatttctgcattgattcacgccgcaaccatggttaccgccggtctgttcatggtatcgcgtatgtcgccgatttatgagatgagcagcactgcgctgtctgtcatcatggtaatcggtgcgattaccgccctgtttatgggtttcttgggcgtgattcaaaacgacatcaagcgcgtggttgcgtattccaccctgtcgcaactgggctatatgactgtggctctgggcgcgtctgcctattccgtggcgatgttccatgtgatgacccacgctttctttaaagccttgttgttcttggccgcaggtagcgcgattatcggtatgcatcacgaccaagacatgcgccacatgggcaacctgaaaaaatacatgccgattacttggttgaccatgttgatcggtaacttgtcgctgattggtacgccgttcttctccggcttttactccaaagattcgattatcgaagcggcgaaatacagcacccttcccggcagcggctttgcctattttgccgtccttgccagcgtgttcgttaccgcgttttacgcgttccgccaatactttatggtgttccacggcgaagagaaatggcgcagcctgcccgaacaccattcagacggacatggcgaagaacatcacggcttgggcaaaaacgacaatccgcacgaaagcccgctgttcgttaccctgcctttgattttgcttgccattccgtccgtcatcatcggctatgttgccatcgggcctatgctttacggcgatttcttcaaagacgtgattttcgtcaataccgacgcgcatccgaccatgcacatcatgaaggaagagttccacggcgcattggcaatggtgtcgcacagcctgcattctcctgtactctacctcgctatcgcaggtgtattgagcgcatggcttttgtacgtcaaactgccgcacctgcctgcgaaaattgcacaggcgttccgtccggtttacgttttgtttgaaaacaaatactacctcgacgccctgtatttcaacgtcttcgctaaaggcacgcgcgcactgggtaccttcttctggaaagtcggcgataccgccattatcgataacggcatcgtcaacggctctgccaaactggtcggcgcgattgccgcgcaagtgcgtaaagcccaaaccggctttatctacacctacgccgccgctatggtgttcggcgtattggtactgctcggcatgaccttctggggattgttcagataa

SEQ ID NO: 45987 - DNA, 2379 bp, Neisseria meningitidis
gtgctggcattgggcttctgtttcggcacgcattgcgccgccgccgatgccgttgcggcggaggaaacggacaatccgaccgccggaggaagcgttcggagcgtgtccgaacccatacagcctaccagcctgagcctcggttcgacctgcctgttttgcagtaacgaaagcggcagccccgagagaaccgaagccgccgtccgaggcagcggcgaagcatccatccccgaagactatacgcgcattgttgccgacaaggtggaaggacagtcgcaggtgcaggtgcgtgccgaaggcaacgtcgtcgtcgaacgcaaccggacgaccctcaataccgattgggcggattacgaccagtcgggcgacaccgttaccgcaggcgaccggttcgccctccaacaggacggtacgctgattcggggcgaaaccctgacctacaatctcgagcagcagaccggggaagcgcacaacgtccgtatggaaaccgaacacggcggacggcggctgcaaagcgtcagccgcaccgccgaaatgttgggcgaagggcattacaaactgacggaaacccaattcaacacctgttccgccggcgatgccggctggtatgtcaaggccgcttccgtcgaagccgatcgggaaaaaggcataggcgttgccaaacacgccgccttcgtgttcggcggcgttcccattttctacaccccttgggcggacttcccgcttgacggcaaccgcaaaagcggcctgcttgttccctcactgtccgccggttcggacggcgtttccctttccgttccctattatttcaaccttgcccccaatctcgatgccacgttcgcgcccagcgtgatcggcgaacgcggcgcggtctttgacgggcaggtacgctacctgcggccggattatgccggccagtccgacctgacctggctgccgcacgacaagaaaagcggcaggaataaccgctatcaggcgaaatggcagcatcggcacgacatttccgacacgcttcaggcgggtgtcgatttcaaccaagtctccgacagcggctactaccgcgacttttacggcaacaaagaaatcgccggcaacgtcaacctcaaccgccgtgtatggctggattatggcggcagggcggcgggcggcagcctgaatgccggcctttcggttctgaaataccagacgctggcaaaccaaagcggctataaagacaaaccgtatgccctgatgccgcgcctttccgccgattggcgcaaaaacaccggcagggcgcaaatcggcgtgtccgcacaatttacccgcttcagccacgacagccgccaagacggcagccgcctcgtcgtctatcccgacatcaaatgggatttcagcaacagctggggttacgtccgtcccaaactcggactgcacgccacctattacagcctcaaccgcttcggcagccaagaagcccgacgcgtcagccgcactctgcccattgtcaacatcgacagcggcgcaacttttgagcggaatacgcggatgttcggcggcggagtcctgcaaaccctcgagccgcgcctgttctacaactatattcctgccaaatcccaaaacgacctgcccaatttcgattcgtcggaaagcagcttcggctacgggcagctctttcgcgaaaacctctattacggcaacgacaggattaacaccgcaaacagcctttccgccgccgtgcaaagccgtattttggacggcgcgacgggggaagagcgtttccgcgccggcatcggtcagaaattctatttcaaggatgatgcggtgatgcttgacggcagcgtcggcaaaaaaccgcgcaaccgttccgactgggtggcatttgcctccggcagcatcggcagccgcttcatcctcgacagcagcatccactacaaccaaaacgacaaacgcgccgagaactacgccgtcggtgcaagctaccgtcccgcacagggcaaagtgctgaacgcccgctacaaatacgggcgcaacgaaaaaatctacctgaagtccgacggttcctatttttacgacaaactcagccagctcgacctgtccgcacaatggccgctgacgcgcaacctgtcggccgtcgtccgttacaactacggttttgaagccaaaaaaccgatagaaatgctggcgggtgcggaatacaaaagcagttgcggctgctggggcgcgggcgtgtacgcccaacgctacgttaccggcgaaaacacctacaaaaacgctgtctttttctcacttcagttgaaagacctcagcagtgtcggcagaaaccccgcagacaggatggatgtcgccgttcccggctatatccccgcccactctctttccgccggacgcaacaaacggccctga

SEQ ID NO: 45988 - DNA, 450 bp, Neisseria meningitidis; identical to SEQ ID NO: 39994

SEQ ID NO: 45989 - DNA, 1008 bp, Neisseria meningitidis
atgagcaccttcttccaacaaaccgcccaagccatgattgccaaacacatcgaccgtttcccgctattgaagttggaccaagtgattgattggcagccgatcgaacaatacctgaaccgtcaaagaacccgttacctccgagaccaccgcggtcgtcccgcctatcccctgttgtccatgctcaaagccgtcctgctcggacaatggcacagcctctccgatcccgaactcgaacacagcctcatcacccgcatcgatttcaacctgttttgccgttttgacgaactgagcatccctgattacagcaccttatgccgctaccgcaattggctggcgcaagacgacaccctgtccgaattgctcaaactgatcaaccgccaactgaccgaaaaaggtttaaaaatagagaaagcatccgctgccgtcgttgacgccaccattattcagaccgccggcagcaaacagcgtcaggccatagaagttgacgaataaggacaaatcaacggccaaaccacaccgagtaaggacagcgatgcccgttggatcaagaaaaacggcctctacaaactcggttacaaacaacatacccgtaccgatgcagaaggctatatcgagaaactgcacattacccccgccaatgcccatgagtgcaaacacctgtcgccgttgttggaagggttacccgaaggtacgaccgtctatgccgacaaaggctacgacagtgcggaaaaccggcaacatctggaagaacatcagttgttggacggcattatgcgcaaagcctgccgcaaccgcccgctgtcggaagtgcaaaccaaacgcaaccgatatttgtcgaagacccgttatgtggtcgaacaaagcttcggtacgctgcaccgtaaattccgctatgcgcggtcaacctatttcggactgattaaagtgagtgcgcaaagccacctgaaggcgatgtgtttgaacctgttgaaagccgccaacaggctaagtgcgcccgctgccgcctaa

SEQ ID NO: 45990 - DNA, 687 bp, Neisseria meningitidis; identical to SEQ ID NO: 36558

SEQ ID NO: 45991 - DNA, 951 bp, Neisseria meningitidis
atgaccaaacaggaaaagcaagaagaccgcgaaaaaaaatataaaattatttctttatttagcggttgtggcggaatggatttgggttttctggggggctttgagtttttaaaccgtacttatgacaaacatgattttgatattatttgggcgaacgaaatcgacgaacacgctgttagaacctaccgccacaacttaggaaatcacattgtacatggtgatatttggcagcatttggatgaaatacccactagcgcagacatcattatcggtggctttccttgtcaggatatttctattaatggtaaaggtgcaggtatttcaggcagccgcagcgggctgtataaagccatgttgtctgctgttgaacgcgttcgccccaaaatatttgttgctgaaaatgtcaaagggctactgatgaagcatcatcggaaagatttggaaacagtgctttcagattttcgcaatttgggttatcaggtagattactacttgctgaatgcagccgattacggtgttccacagactcgggagcgagttatcatcgttggaaggctacctgaaattcccgaaatacagattgaaaaaacaaataccagcaacagctatgtaacagctagacaggctataggcgatttggtcgacaaagtagaagacgaaattgccaaccatatttggagtagagcagaaaaaagccccgatcaaggtagtcgaaaattggatgccgaaagggcgggctacactattagggcagaatgccatggaaacatacagtggcattacgaattaccccgccgcatctccatgcgtgaggcggcgcgcatccaatcgtttcccgacaattttattttccaggcaaaattgcgtgccacagaacggcaaattggcaacgccgtccctcctgttttagggtggcacatcgccgccgccgttagtaaggcacttaaataa

SEQ ID NO: 45992 - DNA, 999 bp, Neisseria meningitidis
atgcacacaccacttacctatattgaccttttctcaggagcaggaggcctatccttgggttttgaacaagccggattccaacaattgctttctgttgaaatggagtctgattattgtcagacttaccgtaccaacttcccccatcatcaattactgcaaaaagatttaaccacactaaccgaacaagatttaatcaattgtcttaacggacaagcagttgatttgattattggaggaccaccttgtcaaggttttagtatggcaggaaagattggacggacatttacagatgacccacgcaaccatttatttaaagagtttgtccgaatagttaaaattgtccaaccatatttttttgttatggaaaatgtagcgcgactctatacacacaattcaggtaaaacacgtattgagattattcaagcatttcagaatatcggttattcggtggaatgtaagatactgagtgcagccgatttcggtgttcctcagatacgtagccgagtgatatttatcgggaggagggataaaggcaaaatttcctttcccgaacctttgcagatttcccatcagactgttggatcagcaataggacattttccaaaactggctgctggcgaaagcaatccacacgttgcaaatcatgaagctatgaatcattcggcacaaatgttagaaaaaatggcatttgttaaaaatggaggtaaccgtaacgatattcctgaaccattacgtccgaaaacaggtgatatccgtaaatacatccgttacaacagcaacaaaccagccgtttgtattacaggagatatgcgcaaagtttttcactatgaacagaatcgggctttaaccgttcgtgaattagctgccttacaatctttccctgataattttattttttgcggcagcaaaattgcccagcagcaggttggtaacgccgtaccgcctttattggcaaaagctattgctgaaagtattttaaaaatgagtgaaaatgaataa

SEQ ID NO: 45993 - DNA, 207 bp, Neisseria meningitidis; identical to SEQ ID NO: 39999

SEQ ID NO: 45994 - DNA, 378 bp, Neisseria meningitidis
atgtgcgagttcaaggattttagaagaaacatcccttgttttgaagagtatgacgaaaattcatttattggcaaatggtatgatgacggggtgtgggatgatgaagaatattggaaattggagaatgctttaatcgaggttaggagaaaatatccttatccgatggatataccaagggatatcgtgattggaatcggtaccattattgagtttttaatggttccaaattggaaactttttacaattaaatcttccccttggttgcctaaaagtgtcaaaattgatgagcgttatgaaaggttcagagtaatgctccgttatatttttaccgagatagacatagtcaacgtgcgatttgattattacaacaaaaaatag

SEQ ID NO: 45995 - DNA, 378 bp, Neisseria meningitidis
atgtgtgagttcaaggatattataagaaacgttccttattttgaggggtatgacgaaaattcatttattggcaaatggtatgatgacggggtgtgggatgatgaagaatattggaagttggagaatgatttaatcgaggttagaaaaaaatatccttatccgatggacataccaagatatgttgtcattggaatcggtaccattattgatttcttaatggttccaaattggaaactttttgaaattaaagcttccccttggctacctgatagcgtgggaattaacgaacgttatgaaaggcttaaaacaatgctccgttatatttttaccgagaaagacatagtcaacgtgcgatttgattattacaacaaaaaatag

SEQ ID NO: 45996 - DNA, 408 bp, Neisseria meningitidis
atgtgcgagttcaaggattttagaagaaacatcccttgttttaaggagtatgacgaaaattcatttattggcaaatggtatgatgacggggtgtgggatgatgaagaatattggaaattggagaatgatttaattgaggttagaaaaaaatatccttatccgatggatataccaagggacatcgtgattggaatcggtaccattattgattttttaatggttcaaaattggaaactttttgaaattaaagcttctccttggttgcctaaaagtgtcaaaattaatgagcgttatgaaaggttcagggtaatgctccgttatatttttactgatctagatgtagaggactggaaatttttttactttccaatacaaaatagtaaaggtagattgagacgaaaagtttaa

SEQ ID NO: 45997 - DNA, 1107 bp, Neisseria meningitidis
atgtccttgacccgcctaatcttgaaattctatgcactgttgcgcctttttttgggcaaaaacgcccgcaccgcatggatttcgcatcccgcctgtgccgggcacgaacccggcgcaaaccatcccgattcgcccgaccgcatcctctgcatcgagcaggcattgcgccgcgccggtatttggcagcacctccaaaccatagaggcggaagaaatcagcgatacgcgcctcgcacttgtccactcgagcaaatatctgaaccgtttggaatcttgcctgccccaaaaaggcaagattttccgcctggataacgacactgcaatcagcacaggctcgctgtctgccgcacactttgccgccggttcggcagttcaggcagtcgacatggtcatgaaccgtaaagcatggcatgccttttgcgccgcccgcccgcccggacaccatgcgggcagcggcaaagccggcggattctgcctgctgaacaacgttgccgccggcgtcatgcatgccattgccgaataccgcctgaaacgcattgccgtcatcgatttcgatgtccactacggcgacggtacggcagaaatattcaaagacgatccgcgcatcctgtttttcaacctgtttgaaaccgaccttttccccttccccgaaaacaacgatatgcccgacggcggcaatatggtgcacctgcccttgccgccgggaacgggcagccgcacattccgcgaagccgtccgcaggcagtggctgccccgacttgccgcattcaaacccgaactggtgctgctgtcggcaggattcgacgcacaccgtctagacgaatcgggcaggctcaacctgcacgaggcggattttgcctggctgacacacaaaatcattcagacggcatcgggctgccccggcaaaatcgtatccgtactcgaaggcggctacacccttgaacctctggcacaatctgctgccgagcatatccgagtgctggcagggctgggcaaatccgatgccgcaaccgcctatcagaaaacactggacccaacaaaaaaacggtttgccaaaccgaaaaccggacaggtgcgccaacctacccaatccgaccgttacgacata

SEQ ID NO: 45998 - DNA, 642 bp, Neisseria meningitidis
atgagatgttttatgattcaaaatgttgttacttcaataatcctgtattctgggacagccgtagacttacttattatcctaatgttattttttgccaaaagaaaaagcagaaaagacatcattaacatctatttaggacaatttctaggctctgttagcctgatattgctaagtttgctttttgcatttgtcttagattatattcctagtaaagagattttaggtttgctcggcttgattccaattttcctaggcatcaaagttttgctgttaggagattctgatggagaggctattgccaaagagggtttgcgcaaagataataaaaacctgatttttctagtcgctatgattacttttgcaagttgtggtgctgacaatattggtgtctttgtcccatattttactaccttaaatttagcgaatttgatagtggctttacttacctttctagtcatgatttatctcttggttttttctgcccaaaaattagcacaagtcccttctgttggagaaactttggaaaaatatagcagatggtttgttgctgttgtttatttaggattgggggtatatatcctgattgaaaacaacagttttgatatgctatggactgtgtcgggccaggaaaaaatattatga

SEQ ID NO: 45999 - DNA, 543 bp, Neisseria meningitidis
atgaggacacaccgcaagacctgctctgcggtgtgttttgcttttcagacggcatcgaaacccgccgtttccatccgacatcccagcgaggacattatgagcctgaaaatccgccttaccgaagacatgaaaaccgcgatgcgcgccaaagaccaagtttccctcggcaccatccgcctcatcaacgccgccgtcaaacagtttgaagtggacgaacgcaccgaagccgacgatgccaaaatcaccgccatcctgaccaaaatggtcaaacagcgcaaagacagcgcgaaaatctacactgaagccggccgccaggatttggtagacaaagaaaacgccgaaatcgaggtactgcaccgctaccttccccaaatgctctctgccggcgaaatccgtactgcggtcgaagccgccgttgccgaaaccggcgcggcaggtatggcggatatgggcaaagtgatgggcgtattgaaaacccgacttgccggcaaagccgatatgggcgaagtcaacaaaatcctgaaagccgtactgaccgcctga

SEQ ID NO: 46000 - DNA, 432 bp, Neisseria meningitidis; identical to SEQ ID NO: 40005

SEQ ID NO: 46001 - DNA, 486 bp, Neisseria meningitidis
atgcaaatagataatatatccgatgaacaggttgtgattgtcagaatgtcttgttatcttcagaatgtcttgttatcttaagaaagatgaaatttttaagaatatagaaagatatggatatcagtcatcagatattaagaaaattagtcctccttttccattaaatattttacctgttcccaaaccttattatttttatctttatgatacccatttgaatcaaatttatgatttggcttggtcatgtaatgattttttaatgtttgaatatttattttggatagggaaagcatcaaatatatagataaagataaactttttaaatctggagaaacactatattcgaattttaaatctattaaaaatcaatgcaaaaattattttttttgcggttttgattttgatgccccttactttaaaagcggtgtgagtcaggtggcagattataattttgttcctgatgcattttctttattctttatttaa

SEQ ID NO: 46002 - DNA, 315 bp, Neisseria meningitidis; identical to SEQ ID NO: 37950

SEQ ID NO: 46003 - DNA, 561 bp, Neisseria meningitidis
atgaatatgaaaaccttattagcactagcggttagtgcagtatgttcagttagtgttgcgcaagcacacgagcataatacgatacctaaaggtgcttctattgaagtgaaagtgcaacaacttgatccagtaaacggtaacaaagatgtgggtacagtgactattactgaatctaactatggtcttgtgtttacccctgatttacaaggattaagcgaaggcttacatggtttccacatccatgaaaacccaagctgtgagccaaaagaaaaagaaggtaaattgacagctggtttaggcgcaggcggtcactgggatcctaaaggtgcaaaacaacatggttacccatggcaagatgatgcacacttaggtgatttacctgcattaactgtattgcatgatggcacagcaacaaatcctgttttagcaccacgtcttaaacatttagatgatgttcgcggtcactctattatgatccacacgggtggtgataatcactccgatcatccagctccacttggcggtggcggcccacgtatggcatgtggcgtgattaaataa

SEQ ID NO: 46004 - DNA, 1197 bp, Neisseria meningitidis
ttgcccacttttccgaaccacaccatgcacaccatttcctttccaaaccgcacccgactcaccgccctgccgcccctgtcgctttacatccacatcccgtggtgcatcaaaaaatgcccgtattgcgacttcaattcccacagcctgaaaaacggattgcccgaagccgcctatatcgacgcgctgctgaccgatttgcagcttgaattgcccaatatttggggcaggccggtggaaacgatctttttcggcggcggtacgcccagcctgtttcaggcggaatcgattgaccgtttgttaagcggcgtgcgttcgctgttgcgcttgcagccggaagcggaaattaccttggaagccaatccggggacatttgaaatcgagaagtttcaaggatttaaagacgcgggtattacgcggctttctatcggcgtacagagtttcaacgacgatatgctctcaaggctggggcgcgtccacaacggtaaggaagccttaaccgctatcgataccgccttgaaattatttgataaagtcaatatcgacttgatgtatgccctgccgaaccaaaccgttcagacggcattggacgacgtacaaaccgctatcgctacgggcgcgacccacatcagcgcgtatcatctgacgatggaaccgaacacgccgttcggtcatacgccgccgaaaggtttgccgcaagacgaagccgccctcgacatcgaagacgcggtacacggcgcgctggaaggcgcgggttttgtccactacgaaacatcggcttttgcgaaaccagccatgcagtgccgccacaatttgaactactggcagttcggcgattatttaggcataggcgcgggcgcgcacggcaaaatttcctatcccgaccgcatcgagcgcaccgtccgccgccgccaccccaacgactacctcgccttaatgcaaagccaaccgagtgaagccgtcgaacgcaaaaccgtcgctgccgaagatttgccgttcgaattcatgatgaacgccctgcgcctgaccgacggcgtacccgccgcgatgttgcaggagcgcacgggcgtaccgagtgccaaaatcatggcgcaaatcgaaacggcaaggcaaaaaggcctgctggaaaccgaccctgccgtattccgcccgaccgaaaaaggacgcttgtttttaaacgatttgctgcagtgtttttta

SEQ ID NO: 46005 - DNA, 261 bp, Neisseria meningitidis
ttgctccttccacggcagcaccttggtcaaaacggcagacggctgaaaagcaaacaccgtccgtcgtgttgccgtttgcggatgagtacgggtcaaccccaatgccgccgaaaccgtcgaagccgccttcaacattgccgccgccaaagccgcaaagttggcaaaaacggtaaaaccggggagataaaagccgatggcaggaaagtaaatgtgaggatagacagtacggaggcagacctgctttatctggcagggcaataa

SEQ ID NO: 46006 - DNA, 390 bp, Neisseria meningitidis; identical to SEQ ID NO: 40011

SEQ ID NO: 46007 - DNA, 546 bp, Neisseria meningitidis
atgattatagttgaacatttagaacattatttgggtgaaatcgaaagcggtataaaatgcttggatcgacgttatcatctcagcgtttccgtcttcccatcacaaccatataaaggggtaactactttttctactttaggcttgaatcgatatgacttgaactataagagtaggtttgaattaatttttacctgttctgaagaatggaataaagaaaatattgcagcttttctatcaggagtggctgaatatttgattgacaatagacaacctattttaagaggtgaaattattcaattacccagggtaattatcgaaggtagcaaaatggatgcactgtatgtttccgccccattttatttcgacgatgattttcaggtctgttatggcgaacactacaatatcgttttccctttgcttgtcccgttgtataaacaggaagcagaattggtggaaaaaaagggttggaatgcttttgagcagttcttgctggataatgaagttggcaacctttcggatatgaatcggaaaccgtttacttggtaa

SEQ ID NO: 46008 - DNA, 318 bp, Neisseria meningitidis
atgaatatattaccaagctggctgcgagtcggtatgaatatagcaatgctgggcatgatacactcagatatcaggttaattaccgtagattacgaggaaagaagaaggtttttaaaaatcaaaaattatttatcaagagaagccatcacagaagaccatgaagatatggaatatttgattacagagttatggtctatgtgtggagaatattttgatgaagctgactttgaatgtatttattctaatcattcttctatggagttaaaccaaataaatggtgcagtattcaggagaaaggaattaatttcgcaagcgtag

SEQ ID NO: 46009 - DNA, 351 bp, Neisseria meningitidis; identical to SEQ ID NO: 40014

SEQ ID NO: 46010 - DNA, 435 bp, Neisseria meningitidis; identical to SEQ ID NO: 40438

SEQ ID NO: 46011 - DNA, 465 bp, Neisseria meningitidis; identical to SEQ ID NO: 36919

SEQ ID NO: 46012 - DNA, 957 bp, Neisseria meningitidis
ttgttaattcactatatcgacatcgccaaacgaaacttcgtcatcgccgtttcgtctttgtctaaaaccaaaaccgaaaccaacaaccccaaaggtatcgcccatactatcgaataccttaaaaaacacaaggtcgccctcgtcgtgacggaaagtactggcggtctcgaaatccccgccgccaaagccatccgccgagcaggcatagccgtgattatcgccaacccgcgtcagacgcatcagtttgcccaatcgcagccgctgaccaaaaccgacgccaaagatgccaaaatgcccgccttcttcgcacagatgacggcacagaaagaagattcgcaaaccatgccctaccaaccgcccaccgaagcggaagaagtgttggaagccttggttaaccgccgcaaccaaccggcggatatgcggactgccgagaaaaaccgtctgcatcaggttcacgaaacgcaagtcggaagcgtcaaacaactgattgcccattttgaccggctgattgacgaattggacaaacaaatcgacgaccacacccacacgcattttgacggcaaagcccaagtggcggagcaaatcaaaggcatcggttcgataacgacggctacgctgatggtgatgttgcccgaattggggcggctgtcgcacaaacggatagcgggtttggccggcattgccccgcacccgagggagagcggggaaaccaaattcaaaagccgctgcttcggcggaaagtctgcggtacgtaaggcgctgtatatggctaccgtggcagcgacacgttttgaaccgcttattcgggatttctaccaacgcctgctgtccgagggtaagccgtataaggttgccgttacggcatgtatgcgcaaactgctgacgatatcgaatgcccggatgcgtgattattttgccgaaaacgatactgccgaaaacggtatccggacggcttga

SEQ ID NO: 46013 - DNA, 225 bp, Neisseria meningitidis; identical to SEQ ID NO: 40020

SEQ ID NO: 46014 - DNA, 435 bp, Neisseria meningitidis; identical to SEQ ID NO: 40019

SEQ ID NO: 46015 - DNA, 1536 bp, Neisseria meningitidis; identical to SEQ ID NO: 40021

SEQ ID NO: 46016 - DNA, 264 bp, Neisseria meningitidis
atgtccaagtggcggggtttcaaccgaaaaggaaacacgatgaagaaaaacgccccgaaatcgtttgaagaagccttgtcgcgccttgaatcgctgacgcagtctatgcagggcgaaatgcccttggaagacgcgcttgccgcctatcaggaaggcaacgagctggtcaggtactgccaaaccaagctggcacaagtcgaacagaaattacaggttttggatgcggacgggctgaaggagttgaaccttgaatccgacgaatga

SEQ ID NO: 46017 - DNA, 198 bp, Neisseria meningitidis
atgccgtctgaaaaaatctattacggcgtattgattttcttatgtatcgcttctatgctgctgtcgccgtttttttatgcgggtgctttgaagcccaagaaggcggcattgcggaaggacgggcagtggaaactcatcttattgtccaataccgtggcggcggcggttttggcttgggtgtggtggaaatggttttga

SEQ ID NO: 46018 - DNA, 306 bp, Neisseria meningitidis
atgcgcgtatctaaaataattggaagtatgttgcttgttacagcggttcagaccgtattttcggcaaatgtttacgcgtgccgccataatggtaaaaccagttacagccaaactccgggaaaacattgtaccaacgcgggtttggggcgggacctggtgtacagttcggttagaccggcagtaaaagacagggcggaagacgcaggggtcggcgattattcggacacggtgagggacgaacacgtccaaaatccgagagagaatacgcataaggatgcttcgaataccggtgcaaagacgcattga

SEQ ID NO: 46019 - DNA, 354 bp, Neisseria meningitidis
atgaaaaattgcgaatttttttatgacccgacaagggcaatctatgatagcggtgcagattacttaactagggaaaaacatagattagtcgtaattgcaaatagtgcttgggggctattgcttaatttatcttgttattatgacgaggttttggaaaagcggaaaataccgttcggcaaacaggaaattgatgacgatatggacaaagtgtccgcccttaagcggaagtttaaagatatttctgaaatcaaagtaggggatggttgggaatacccgttcaattatgagcagggaatgaaagaattagatgaagtgctattgaaatacattcccttttttgaagaagaacgataa

SEQ ID NO: 46020 - DNA, 216 bp, Neisseria meningitidis
ttggatgcgggcgaatttagccatttccgtatcaatcacagcacacattttgccgaacgacaaaaccatattaatggaactgagaacttttggaatcaagcaaaatgtcatttacgcaagtttaacggcattcccaaagcgcattttgagctgtatttaaaggagtgcgaatggcgttttaacaacagtgaaataaaagttcttgttccattttaa

SEQ ID NO: 46021 - DNA, 429 bp, Neisseria meningitidis; identical to SEQ ID NO: 41701

SEQ ID NO: 46022 - DNA, 216 bp, Neisseria meningitidis; identical to SEQ ID NO: 37963

SEQ ID NO: 46023 - DNA, 393 bp, Neisseria meningitidis; identical to SEQ ID NO: 40756

SEQ ID NO: 46024 - DNA, 732 bp, Neisseria meningitidis; identical to SEQ ID NO: 40027

SEQ ID NO: 46025 - DNA, 339 bp, Neisseria meningitidis; identical to SEQ ID NO: 40029

SEQ ID NO: 46026 - DNA, 1356 bp, Neisseria meningitidis
atgtctgattttttccattctgacgtgttgtccgtttccgagttgaacgcatttgccaaaagtattttggaaaaccaccttgccggtctgtggattgcgggcgaagtgtccaacctgacccgtgccgccagcgggcattattatttctcgctcaaagacagccgcgcgcaggtgcgttgcgcgatgttcaagggtgcggcggcgcgtttggcgaaacctttgaaagaaggcgaccatatcgaagtggcgggcaaaatcagtatttatgaaacgcggggcgaatttcagattaccgtgaacgaagtgcggctcaagggcttggggcagctttacgaagcctacgagcggttgaaggcgcagttgcaggcggaaggcgcgtttgcggcggaacgcaagaaacctttgcccgcccgaccgcaatgtatcggcatcgtaaccagtctggcggcggcggctttgcgcgatgtcgttactaccttgaaacgccgcgcacccgaaatccccgttatcgtttatccgacacctgttcaaggcacaggcagcgagttacaaatcgcacaagcgattaaaaccgcctcgcaacgcgccgaatgcgacgtgttgattgtctgtcgcggcggcggcagcattgaagacttgtgggcgtttaacgaagaaccggtcgtgcgcgcaatcgaagcctgcacggttcccgtcgtcagtggcgtgggacacgaaaccgatttcacgcttgccgattttgtcgccgacgtgcgcgcgcccacgccgaccggtgcggcggagctggtcagccccaaccgccaagaatcgctacatcgtctcgctcaggcgcaaggccgtctgaaaaccgttttggaacaacgctatttcgatgccagccaaaaactcgactggcttgcgcggcaaatccgtcatccgcgccaaaaacttgatgagcagcgcgcttcaatcggcaagctggcgcaaacgctgtcttactctatgaagcaaaacctccgtgcccacaccgcccgttttgaacgccaaacccaagccctgcaacattaccgtcctgatgtttccgtttgcaaaaacaacatcgtccgccttcagacggcattgcccgccgccttcagccaactgcttacccaccgccgccaaagcctgaccgcccaagccgcattgctcgaagccgtttcgccgcagcacattttggaacgcggcttttccgtcgtcaaagatacacgcggacaagtcatccgcaacgccgatgttttgaagcaggggcagaagctgcacattaccttcgccgacggcgaaaccgacgtgcgcgtaagcaaagaacaagggcagcaggatttgttcgattgcatttaa

SEQ ID NO: 46027 - DNA, 354 bp, Neisseria meningitidis; identical to SEQ ID NO: 40032

SEQ ID NO: 46028 - DNA, 273 bp, Neisseria meningitidis; identical to SEQ ID NO: 43985

SEQ ID NO: 46029 - DNA, 111 bp, Neisseria meningitidis; identical to SEQ ID NO: 40033

SEQ ID NO: 46030 - DNA, 279 bp, Neisseria meningitidis; identical to SEQ ID NO: 40034

SEQ ID NO: 46031 - DNA, 1242 bp, Neisseria meningitidis
ttgaacggcaggaacgacagtgggacgcagaaaactttggtttgccctggcagcagcaggcgttatcggcggtttggtcggcattgtgctgacggaactgatgcacttcatacagcatacggcaacggttatggcgcggacggcgtgtacacttcgttccgcgaaggcgtggcacaggcttccggtatgcggcgcgttgccgtgctgacgctgtgcggcgcggtcgcaggcagcggctggtggttgctgaaacgtttcggcaagccgcaaatcgaaatcaaagccgccttgaaacagccgttgcaggggctgccgtttctgacgacggttttccatgttctgctgcaaatcataacggtcggactcggttcgccgctcggacgcgaagtcgcgccgcgagaaatgaccgccgcgtttgcttcggcaggcggcaaacgcttgggtttggacgaaggcgaaatgcgcctcttgattgcctgtgcgtccggcgcgggtttggcggcggtgtataacgtgccgctcgcctccacgctgtttatcctcgaagcgatgttgggcgtgtggacgcagcaggccgccgccgccgcgttgctgacttcggtcattgccaccgccgtcgcgcgcatcggcttaggcgacgtgcagcaatatcatcccgccaaccttgccgtaaacacctcattactttggttttccgccgtcatcggcccgatactgggcgcaacggcggtatatttccggcgcagtgccgaaaagttccccttcctcaagcgcgacaatccgagaattattcctttggcgattgctttgtttgcactcatcggcgcgattgccgtttggtttcccgaaattttgggcaacggcaaagcaggcaaccaactgacctttggcggattgaccgactggcaacacagccttgagctgaccgccgtcaaatggctggttgtcttgatggcgttggcggcaggcgcatacggcggactgattacgccgtctatgatgctcggcagcaccatttcttttgcagccgccgccgcgtggaacagcgttttccccgaaatgccgtctgaaagcgcggcagtcgtcggcgccgccgttttcctcggcgtttccctcaatatgccgctgaccgccgccgtctttattttggaactcacctacgcccccgccgctttgttgatgcctttatgtacgggtatggcgggcgcggtatggacggcaaggaaaatgggatgtaaataa

SEQ ID NO: 46032 - DNA, 658 bp, Neisseria meningitidis
atgggcaggcatttcgggcgcaggcgttttttgacagttgccgccgttgcggcggcgggcgcggcggtttctttcctgccgaatccttttgccgccgatgatgaaaaacgcaataaagatgaaaaacgcaatgaaaatgtgttcttctggaaaggtgtcgcgctgggttccggtgcggagctgcgcctgttcggtgtggacgacagacaggcggcggatttggtcaacaaggttttggcggaagtggcgcgtttggaaaaaattgttcagcctttaccgtgaagacagcctgatcagccgcctgaacagggacggttatctgacttcgccgtcggcggattttttggaactgttgagcctgtgccgcgatattcacgcgctgacggacggcgcgttcgatccgacagtgcaggcgttgtggaaactgtatgccgattattttgccgcccgtcccgatgcggaaacgccgcctcctcaaaacagcgtgaaggaagccctgaaacgggtcggcttcggcaaagtctcgtttgacgaccgtgaaatccgttttgccgaaaagggtatgggtttgtccttgaacggcatcgcgcaagtctatagtggattaacaaaaaccagtacggcgttgcctcgccttagctcaaagagaacgattctc

SEQ ID NO: 46033 - DNA, 612 bp, Neisseria meningitidis
atgcgccgcaccgccctcctgctgctcgcactcaccgccggcacgtcccttgctgccggcttcaaccaaaaagacacgccgatcaacacccgctaccgcgaaacgcccgaagaagccgccgcccgcgaatttaaagaacataccgccaaactgccgccgctgcccgatacgcactcggacggctggttcgacatttatgtggatgaaaattacggcaaacagccgaaaatcctgctcgacagcctgcaaattatgcccgcgcccgacggcagcatccgctacattctcaatatccgctccgacaaaggctacgacaacctgactgccgaaggcatattctgcgcccgcttctccatcaggttcggcaacggcaaaccttcctcctataaagtgttcggctacggcgacacggtcaaccgccgctggatacagccccgaaacgccgaatggaaaccgataggcggtacattaagccgcaacgacgcactgcgcaccgtcctgtatcaggcattctgcgagggcgatgtacccgccgacacgaaaggtttggtacaacgcctgaaagaacgtgccggacgctatgccccgtcgataaagccgcacaacaaataa

SEQ ID NO: 46034 - DNA, 1074 bp, Neisseria meningitidis
atgaaaatcatcctgaccacttctatgtcgggcttgggcggcacggaaaccgccaccgtccgcctcgggcggctgctcaaacggcgcgggcacgacatcatccttgcttcttcggacgggccttttgtcggagaggcgcaagcatcgggcatccgttggcagccggttgatttttaccggggcgggcttgccggctacctcaaaagcacctttgcctacgcccggatgctgcgccgcgaacaacccgacatcatcgactgccaaatggcgcgcgttgttccagcctgcgcccttgccgccaaaatcgtttcgccgaaaaccaaaatcatctaccactcgcacggtttggacgcggcaacctaccccaaaatcgccaagctcttcgacaagctgggcgtgtacatcatcggcaactgtaaacacgagcgcgaaaaactcatccgccacggcttccccgccggccggattgcctacgcctacaacgcactccccccccccccggaatttcatttccggaaaaccaaaaaagaatgcgccgtactcggcacactttcccgtttggacaccgtccgcgccgtgcatctgatgttggatattttgaagaaaatggttgaccgcggtatgcctgtacgcctcaacgttgcaggtatcggcgaagaaatggacaacctcaaagcccaagccaaacgtttgggcattgaagacaaagtcaccttcctcggcggcgtccgcgatttgaccggctacttcaaagaagtcgatattttggtgaacacgccgcattgcgtgggcgatcacggcgcaggtgtcggcaacaatattttggaagccggcctttacgacacgcctgtcgtgacctacaacatggcgggcatttccgaaatggtcattaccggccaaaccggctactgcattcctttcggcgacgacgaagcatttatcgaagccttcgatacactcatcaagcatccagagttgcgcagccaaatgggcaaagccctgcacaaacatgtcgaaaccttatgctccgacgacgaaatctaccgcaccaccatggctgcgtacgaaatgtaa

SEQ ID NO: 46035 - DNA, 1266 bp, Neisseria meningitidis
atgcaacaaattaaatttattgacttattttccggaatgagtggcatcaggaaaggattcgaacaagcctgtcggaaacagtcggttgcttgcgaatgtgtttttacttcagaaatcaaaccggcagctttggaagtattgaagcaaaactaccctgatgaagtgccgtatggagacataacgaaaattgaaacaggggatattcccgattttgacattctgttggcaggcttcccttgtcaggctttttctttcgccggaaaaagattgggctttgaagatacacggggaacgcttttctttgatgtggcaaggattttaaaagcaaaaaaaccaaaaggttttattttggaaaatgtggaaggattggtgacacacgatagaaaagattcgacacaaaaatggcgcaccctgaccgttattttggaaaccttggaagcattgggctactatgtttcttggaaagttttaaatgcaaaagatttcggcattccccaaaacaggaagcgcatttatctgacaggcagtttgaaatccaaacccgacttatctttcgaaacaagcccaagtccgaaattaaaaaatattttggaatcgggactgcctactgaaagcagccctttcatcaagaaattgctaaaaaaatttcccccgtccgaactgtacggaaaatcagtaaaagacaaacggggagggaaaaacaatattcacagttgggatattgaattaaaaggcgcagtaaccgaagaagagaagcaattgttaaatatccttctaaaagaacagaggaaaaaaagggcttcagaaatcggcatagattggatggatgggatgcctttgacaaaagcgcaaatttcaactttctataaacaccccgatctccaaaatattttggacagcctgacagataaaggctatttggttttagagcatccgaaacaaaaaattggcgggcaaagaatcaaagatgaatccctgcccaaaggctacaatattgtttcaggtaaaaaatcttttgaaatcaataaaatattagatccaaacgatgttgcgccaaccttggttgcaatggatatggagcaccttttcgtcgttgacaacggcggtttgcgtacacttaccggaaaagaagggttgcgcttattcggctatccggacgattattcgtttgatattcccaaaaaagacagatgcgatttattgggtaataccgttgccgtccctgtgattaaggcggtatctgaaagacttctgcatactttataa

SEQ ID NO: 46036 - DNA, 3207 bp, Neisseria meningitidis
atgcgaacgaccccaaccttccctacaaaaactttcaaaccggctgccatggcgttagctgttgcaacaacactttctgcctgcttaggcggcggcggaggcggcacttctgcgcccgacttcaatgcaggcggtaccggtatcggcagcaacagcagggcaacaacagcgaaatcagcagcagtatcttacgccggtatcaagaacgaaatgtgcaaagacagaagcatgctctgtgccggtcgggatgacgttgcggttacagacagggatgccaaaatcaatgccccccccccgaatctgcataccggagactttacaaacccaaatgacgcatacaagaatttgatcaacctcaaacctgcaattgaagcaggctatacaggacgcggggtagaggtaggtatcgtcgacacaggcgaatccgtcggcagcatatcctttcccgaactgtatggcagaaaagaacacggctataacgaaaattacaaaaactatacggcgtatatgcggaaggaagcgcctgaagacggaggcggtaaagacattgaagcttctttcgacgatgaggccgttatagagactgaagcaaagccgacggatatccgccacgtaaaagaaatcggacacatcgatgtggtctcccatattattggcgggcgttccgtggacggcagacctgcaggcggtattgcgcccgatgcgacgctacacataatgaatacgcatgatggaaccaagaacgaaataatgtctgcagccatccgcaatgcatgggtcaagctgggcgaacgtggcgtgcgcatcgtcaataacagttttggaacaacatcgagggcaggcactgccgaccatttccaaatagccaattcggaggagcagtaccgccaagcgttgctcgcctattccggcggtgataaaacagacgagggtatccgcctgatgcaacagagcgattacggcaacttgtcctaccacatccgtaataaaaacatgcttttcattttttcggcaagcaatgacgcacaagctcagcccaacacactgaccctattgccattttatgaaaaagacgctcaaaaaggcattatcacagttgcaggcgtagaccgcagtggagaaaagttcaatggctccaaccattgcggaattactgccatgtggtgcctatcggcatcctatgaagcaagcgtccgtttcacccgtacaaacccgattcaaattgccggaacatccttttccgcacccatcgtaaccggcacggcggctctgctgctgcagaaatacccgtggatgagcaacgacaacctgcgtaccacgctgctgacaacggctcaggacatcggtgcagtcggcgtggacagcaagttcggctggggactgctggatgcgggtaaggccatgaacggacccgcgtcctttccgttcggcgactttaccgccgatacgaaaggtacatccgatattgcctactccttccgtaacgacatttcaggcacgggcggcctgatcaaaaaaggcggcagccaactgcaactgcacggcaacaacacctatacgggcaaaaccattatcgaaggcggttcgctggtgttgtacggcaacaacaaatcggatatgcgcgtcgaaaccaaaggtgcgctgatttataacggggcggcatccggcggcagcctgaacagcgacggcattgtctatctggcagataccgaccgatccggcgcaaacgaaaccgtgcacatcaaaggcgatctgcagctgggcggcgaaggtacgctgtacacacgtttgggcaaactgctgaaagtggacggtacggcgatgaccggcggcaagctgtacatgtcggcaggcggtaagggggcaggctatctcaaccgtaccggacaacgtgttcccttcctgagtgccgccaaaatcgggcgggattattctttcttcacaaacatcgaaaccgacggcggtctgctggcttccctcgacagcgtcgaaaaaacagcgggcagtgaaggcgacacgctgtcctattatgtccgtcgcggcaatgcggcacggactgcttcggcagcggcacattccgcgcccgccggtctgaaacacgccgtagaacagggcggcagcaatctggaaaacctgatggtcgaactggatgcctccgaatcatccgcaacacccgagacggttgaaactgcggccgccgaccgcacagatatgccgggcatccgcccctacggcgcaactttccgcgcagcggcagccgtacagcatgcgaatgccgccgacggtgtacgcatcttcaacagtctcgccgctaccgtctatgccgacagtaccgccgcccatgccgatatgcagggacgccggctgaaagccgtatcggacgggttggaccacaacgctacgggtctgcgcgtcatcgcgcaaacccaacaggacggtggaacgtgggaacagggcggtgttgaaggcaaaatgcgcggcagtacccaaaccgtcggcattgccgcgaaaaccggcgaaaatacgacagcagccgccacactgggcatgggacacagcacatggagcgaaaacagtgcaaatgcaaaaaccgacagcattagtctgtttgcaggcatacggcacgatgcgggcgatatcggctatctcaaaggcctgttctcctacggacgctacaaaaacagcatcagccgcagcaccggtgcggacgaacatgcggaaggcagcgtcaacggcacgctgatgcagctgggcgcactgggcggtgtcaacgttccgtttgccgcaacgggagatttgacggtcgaaggcggtctgcgctacgacctgctcaaacaggatgcattcgccgaaaaaggcagtgctttgggctggagcggcaacagcatcactgaaggcacactggtcggactcgcgggtctgaagctgtcgcaacccttgagcgataaagccgtcctgtttgcaacggcgggcgtggaacgcgacctgaacggacgcgactacacggtaacgggcggctttaccggcgcgactgcagcaaccggcaagacgggggcacgcaatatgccgcacacccgcctggttgccggtctgggcgcggatgtcgaattcggcaacggctggaacggcttggcacgttacagctacgccggttccaaacagtacggcaaccacagcggacgagtcggcgtaggctaccggttctga

SEQ ID NO: 46037 - DNA, 942 bp, Neisseria meningitidis; identical to SEQ ID NO: 40047

SEQ ID NO: 46038 - DNA, 777 bp, Neisseria meningitidis
atgaatagacccaagcaacccttcttccgtcccgaagtcgccgttgcccgccaaaccagcctgacgggtaaagtgattctgacacgaccgttgtcattttccctatggacgacatttgcatcgatatctgcgttattgattatcctgtttttgatatttggtaactatacgcgaaagacaacagcggagggacaaattttacctgcatcaggcgtaatcagggtgtatgcaccggatacggggacaattacagcgaaattcgtggaagatggagaaaaggttaaggctggcgacaagctatttgcgctttcgacctcacgtttcggcgcaggaggtagcgtgcagcagcagttgaaaacggaggcagttttgaagaaaacgttggcagaacaggaactgggtcgtctgaagctgatacacgggaatgaaacgcgcagccttaaagcaactgtcgaacgtttggaaaaccagaaactccatatttcgcaacagatagacggtcagaaaaggcgcattagacttgcggaagcagtggcaaaaacggcactgggcagacaggaattgtcgggattgggcatggtatcctcctatttggcgaagagcaacgaacctgtttatctcgtgaaaataaaacccgacaaaccaaccatcactgcatacggtgaggaaaaaccgctgcaaatcggcatgacgttggaagcagacatcctgcacgagaaacggcggctgtacgaatgggtattggagctgatttatagtatgtcgggcaaactgtaa

SEQ ID NO: 46039 - DNA, 966 bp, Neisseria meningitidis; identical to SEQ ID NO: 40049

SEQ ID NO: 46040 - DNA, 1197 bp, Neisseria meningitidis; identical to SEQ ID NO: 40050

SEQ ID NO: 46041 - DNA, 870 bp, Neisseria meningitidis
atgtccgcaaacgaatacacacaaatcggctggataggcttagggcaaatgggtctgcctatggtaacgcggctcttggacggcggcatcgaagtcggcgtatacaaccgctcgcccgacaaaactgcccccatctccgccaaaggcgcaaaagtttacggcaacaccgccgaactcgtccgcgactatcccgtcattttcctgatggtttccgactatgccgccgtgtgcgacatcctgaacggagtccgcgacggattggccggcaaaatcatcgtcaacatgagcaccatctccccgaccgaaaacctcgccgtcaaagcacttgtcgaagccgcaggcggacagtttgccgaagcacccgtttccggatcggtcgggcccgccaccaacggcacgctgctgattctgttcggcggcagcgaagccgttttaaacccgctgcaaaaaatattttccctcgtcggcaaaaaaaccttccatttcggcgatgtcggcaaaggttcgggcgcgaaactcgtcttgaactcgctcttgggcattttcggcgaagcgtacagcgaagcgatgctgatggcgcggcagttcggcatcgataccgacaccatcgtcgaagccatcggcggctcggcaatggactcgcccatgttccaaaccaaaaaaaccctgtgggcaaaccgcgaattcccacccgccttcgccctcaaacacgcctccaaagacctcaacctcgccgtcaaagagcttgaacaggcaggcaacaccctgcccgccgtcgaaaccgttgctgccagctaccgcaaagcagtcgaagccggctacggcgaacaggacgtttccggcgtttacctgaaattggcagaacactga

SEQ ID NO: 46042 - DNA, 1571 bp, Neisseria meningitidis
atgaaaaaatcccttttcgttctctttctgtattcgtccctacttactgccagcgaaattgcttatcgctttgtattcggaattgaaaccttaccggctgcaaaaatggcagaaacgtttgcgctgacatttgtgattgctgcgctgtatctgtttgcgcgttataaggcgacgcgtttgttgattgcggtgtttttcgcgttcagcattattgccaacaatgtgcattacgcggtttatcaaagttggatgacgggcatcaattattggctgatgctgaaagagattaccgaagttggcggcgcgggggcgtcgatgttggataagttgtggctgcctgcgttgtggggcatgttggaagtcatgttgttttgcagccttgccaagttccgccgtaagacgcatttttctgccgatatactgtttgccttcctaatgctgatgattttcgtgcgttcgttcgacacgaaacaagagcacggtatttcgcccaaaccgacatacagccgcatcaaagccaattatttcagcttcggttattttgtcggacgcgtgttgccgtatcagttgtttgatttaagcaggattcccgcctttaagcagcctgctccaagcaaaatcgggcagggcagtgttcaaaatatcgtcctgattatgggcgaaagcgaaagcgcggcgcatttgaagctgtttggctacggacgcgaaacttcgccgtttttaacccggctgtcgcaagccgattttaagccgattgtgaaacaaagttattccgcaggctttatgactgcagtgtccctgcccagttttttcaatgcgataccgcacgccaacggcttggaacaaatcagcggcggcgatactaatatgttccgcctcgccaaagagcagggctatgagacgtatttttacagcgcgcaggcggaaaacgagatggcgattttgaacttaatcggtaagaaatggatagaccatctgattcagccgacgcagcttggctacggcaacggcgacaatatgcccgatgagaagctgctgccgctgctcgacaaaatcaatttgcagcagggcaggcattttatcgtgttgcaccaacgcggttcgcacgccccatacggcgcattgttgcagcctcaagataaagtattcggcgaagccgatattgtggataagtacgacaacaccatccacaaaaccgaccaaatgattcaaaccgtattcgagcagctgcaaaagcagcctgacggcaactggctgtttgcctatacctccgatcatggccagtatgttcgccaagatatctacaatcaaggcacggtgcagcccgacgctatctcgtgccgctggtgttgtacagcccggataaggccgtgcaacaggctgccaaccaggcttttgcaccttgcgagattgccttccatcagcagctttcaacgttcctgattcacacgttgggctacgatatgccggtttcaggttgtcgcgaaggctcggtaacgggcaacctgattacgggtgatgcaggcagcttgaacattcgcgacggcaaggcggaatatgtttatccgcaa

SEQ ID NO: 46043 - DNA, 2178 bp, Neisseria meningitidis
atgaaggcagacattcaaaccgaattaacccaagccctgctatcacacgaaaaagtatgggcgaacgaagaaaaaaccattttagccaaaaacattctgttggatttggtggaaaaaaccgacccggccattatcggtttgttattggggaatgatgagttaaaacgccatttttttgtggaagtgaatggtgttttggtgtttaaattgcaggattttcgttttttcttggacaaacacagcgtcaataattcctacacaaaatacgccaaccgcattggtttgacggacggcaaccgctttttgaaagacagttcggatattgtgttggattttccgtttaaagattgcgtattgaatggcgggcaaagcagcgaagaaggcgaagagatttattttaaacacagtaatagccagccagccagccagccagccagccagccagccagccagccaatatacactaaattaacccgaaaaagacaagaaatcttttttaatcaaacgcttgcttttgatgaaattgaccggctttttgacgcaaaagcattctcaaaattctctcgccacaccgcagacggcaaacaagcggttggcgaaatcaaacgacattcagacggcacaccagccgaaaatctcattatcaaaggcaataatctgattgccctgcattcgcttgccacgcagtttaaaggtaaagtgaagctgatttatattgatccgccttattattttgttaaaaagaaacaacaagatagttttggttataacactaactttaaattatctacttggcttacatttatgaaaaatcgtttatcaattgccaaagaattattaactgatgatgggattattgttatttccattgatgatgacggaaatgcttatttaaagattttgttagatgaaatttttggatttgaaaattttatcggaaatttacccactattatgaatttaaaaggtaataatgatgaatatgcttttgcaggcactcacgaatacacactagtctttgctaaaaataaagataaatctactttttatgaatttccaatagatgaagataattttttagagaaatgggaagaagatgaaattgggttttataaaaaaggagctccaatgcgagcaacaggaaccgaagataaaagagaagatagacctgaaatgttctatccttttttggtaaaaaataacacagttagtacaattacagatgaagaattttctcaaatctataataaagatttagaagtattcaatgatgattttattcaaaaactaaaagagaaatacgaaaatcttggatacaattttattttacctattgctgataaacaatgggggcgttggcgttgggggtattcaataaagaataaggcaaggctgcagacggatattattgttagccaatctaaaaatggaatttccttgtataaaaaacaaagacctgaattagatgatttacctacaaaaaaacctaaaactattttttataaacctgaatacagtagtggtaatggaactgaacagatgaaaaatctttttggtgaaaaggcatttaaaaatcctaaaccagaagaacttatccaagattttattaccatcacaaccaacgaatccgacatcgtcttagactaccatcttggtagtggcacaaccgccgccgttgcccacaaaatgaaccgacaatatatcggtattgaacaaatggattatattgaaacgcttgccgttgaacgcttgaaaaaagtgattgatggcgagcaaggcggtatttccaaagccgtgaattggcaaggtggtggcgagtttgtttatgccgaacttgccccatttaacgaaaccgcaaaacaacaaattttggcttgcgaagattcagacggcatcaaaacgctgtttgaaggtttatgcgaacgctatttcttgaaatacaacgtcagcgtaaatgaatttagtcaaatcattcaagagcctgaatttcaatccttggcattagacgaacaaaaacaaatggtgcttgaaatgttggatttaaatcaaatgtatgtttcattatccgaaatggatgatgagcaatttgcaggttgcttaaatgatgacgataaagcgttaagccgtgaattctatcaatcagcaaaaaatcaagcggagaaaaaagatggcgaataa

SEQ ID NO: 46044 - DNA, 984 bp, Neisseria meningitidis; identical to SEQ ID NO: 36472

SEQ ID NO: 46045 - DNA, 1524 bp, Neisseria meningitidis
atggattatccaccgcttaagggtgcggcattggcatggattacgctgtctttggggcttgccgtatttatggaagttttagatacgactatcgccaatgtcgccgttcccgttatcgccggcaacctcggtgcggcaaccacgcaggggacgtgggtcattacttcttttgctgtggcaaacgccgtttccgtgccgttaacgggctttttggcaaaacgtatcggcgaggtcaaattgtttaccgccgccgccgtcggtttcgtcatcacatcgtggctgtgcggcatcgcgcccaaccttcaggctttggtgtttttccgcattttgcagggctttatcgccgggccgctgattcccctgtcgcaaagcctgttaatggcatcctatccgcccgcaaaacggacgctggcactggcattgtgggcaatgaccgtcgttgtcgcccctgttctcgggccgatactcggcggctggatttccggaaactggcattggggttggattttcttcatcaacatccccatcggcatcatatcggcatggattacatggaaacatttgaaatatcgggaaacggaaaccgttaaaatgccgaccgactatgtcgggcttacattgatggtagtcggtatcggcgcgttacagatgatgctggacaggggtaaggaactcgactggttcgcttcgggagaaatcattaccttgggcgtaaccgcattggtgtgcttgtcgtattttattgtttgggaattgggagaaaaatatccgattgtcgatttatcgctgtttaaagatcggaattttaccgtcggcgtcattgccacgtcattgggttttatggtgtatatggggacgctgaccctgctgccgttagtgttgcagaccaacctgggctatacctccacgtgggcagggcttgccgccgcgcccgtcggcatcctcccagttttcctgtcccccattatcggcaggttcggcaataaaatcgatatgcgcctgctcgtaaccgccagcttcctgacttttgccttcactttctattggcgcaccgatttttatgccgacatggatatcggcaacgtcatctggccgcagttttggcagggggcaggcgttgccatgttcttcctgccgctgaccaccatcacactgtcgcatatgaagggcggacagattgccgccgccggcagcctgtcgaatttcttgcgcgtgctgatgggcggtgtcggcgtatcattcgtcagtaccctgtgggaacggcgcgaagcgttgcaccacacacgctttgccgaacacatcacgccctattccgcaacattgcacgaaacggcggcgcatttgtcccaacaaggcatttccgacattcaaaccctaggtatcatcaacaataccattacccagcagggcttcatcatcggatcgaatgaaatctttatggcaggcagcctgctgttcatcatcatgattcctgtcatatggctggcaaaaccgccgttccacaacggcggcggtggacattga

SEQ ID NO: 46046 - DNA, 630 bp, Neisseria meningitidis
atgagtgaaaccgaaaatcaagccctgacgtttgccaaacgtctgaaggcggataccacggcggttcacgacagcgtggataacctcgttatgtctgtccaaccgtttgtcagcaaagaaaactacatcaaatttttgaaactccaatccgttttccacaaggccgtcgaccacatctataaagatgccgaattaaacaaagccattcccgagctggaatacatggcgcgatacgatgccgtaacgcaagacttgaaagatttgggcgaagagccttacaaattcgacaaagaattgccatacgaaactggcaacaaagcaatcggctggctttattgcgccgaaggatccaatttgggcgcggcgtttttgttcaaacacgcccaaaaactcgattacaacggcgaacacggcgcgcgccacctcgctccgcatcccgacgggcgcggcaaacactggcgcgccttcgtcgagcatctgaacgcattgggcttaagccccgaagccgaagccgaagccatccaaggcgcgcgcgaagcctttgcattctacaaagtcgtgttgcgcgaaaccttcggcttggcagccgatgccgaagcccccgaaggtatgatgccgcacaggcactaa

SEQ ID NO: 46047 - DNA, 1368 bp, Neisseria meningitidis; identical to SEQ ID NO: 40055

SEQ ID NO: 46048 - DNA, 4476 bp, Neisseria meningitidis
atgcgcttcacacacaccaccccattttgttccgtattgtccaccctcggtctttttgccgtttcccctgcttactcatccattgtccgcaacgatgtcgattaccaatattttcgcgactttgccgaaaataaaggcgcgttcgccgtaggtgcaagcaatatttccatccaagacaagcaaggcaaaatattaggcagggttctcaacggcatccccatgcccgacttccgagtcagcaaccggcaaaccgccatcgccaccctgattcacccccaatacgtcaacagtgtcaaacacaacgtcggctacggttccatacaattcggcaacgacacccaaaatccagaagaacaagcctatacctaccgcctcgtatcacgcaacccgcacccggactacgactaccaccttccccgcctcaacaaactggttaccgaaatctcacctgccgcactcagcagcgtacccttgcttggaaacggccagccaaaggccaatgcctacctcgataccgaccgcttcccctactttgtacgactcggctcaggcacgcaacaagtccgcaaagcagacggcacgcgtacacgaaccgccccggcataccaatacctgaccggcggcacgccgctgaaagtattggggttccaaaaccacggcttactcgtcggcggcagcctgaccgaccaaccccttaacacctacgcaatcgccggagacagcggttcccccctgtttgccttcgacaagcatgaaaaccgctgggtgcttgcgggcgtactcagcacctacgccggcttcgataatttcttcaacaaatacatcgtcacgcaacccgaattcatccgttccaccatccgccaatacgaaacccggctggatgtcgggctgaccaccaacgaactcatatggcgcgacaacggtaatggcgacagcaccctgcaagggctcaacgaacgcatcaccctgcccattgcaaacccttcgcttgccccacaaaacgacagcaggcacatgccgtctgaagatgccggcaaaacgctcatcctatccagcaggttcgacaacaaaacactgatgctggcagacaatatcaaccaaggcgcaggcgcattgcagttcgacagcaacttcaccgtcgtcggtaaaaaccacacatggcaaggtgcaggcgttatcgtagccgacggcaaacgcgtcttctggcaagtcagcaaccccaaaggcgaccggctctccaaactgggcgcaggcacgcttatcgccaacggacaaggcatcaaccagggcgacatcagcatcggggaaggcactgtcgtactcgcccaaaaagctgcttcagacggcagcaaacaagcattcaaccaagtcggcatcaccagcggcaggggtacggccgtcctcgccgacagccagcaaatcaaatccgaaaacctctatttcggcttcaggggcggacggctcgacctcaacggcaacaaccttgcctttacccatatccgccatgcggacggcggcgcgcagatcgtcaaccacaaccctgaccaagccgcgacactgacgctgaccggcaaccccgtcctcagtcctgagcatgtcgagtgggtgcaatggggcaaccgtccgcaaggcaacgcggcggtttacgaatacatcaacccgcaccgcaaccgtcggaccgactacttcatactcaaacccggcggcaacccgcgcgaatttttcccgttaaatatggaaaactcaacaagctggcaatttatcggcaacaacaggcaacaggccgccaaacaagtcgcccaagccgaaaatgcccgccccgacctaattaccttcggcggatacttgggtgagaacgcgcaaacgggcaaagccgcaccgagttacagcaaaaccaatatcgaatgggtgaatggtccaaacaccccacacaagccctcgccctatacgaatacgccaacccgcacaggggcaggcgtaccgacgattaccgcctcaaagaaggcggcaaccccggcgcctacttcccatggaatgcctacagcacccaagactgggaatttctcggacatgaccggcgaagcagccatagaaaaaaaccgccatatcgcaaatgccgccgtatacggccggcccgaataccgttacaacggcgcactcaacctgcactatcgtcccaaacgcaccgacagcacgctgttgctcaacggcggcatgaaccttaacggggaagtcttgattgagggcggcaatatgattgtgtcaggcaggcccgtaccccatgcctacgaccaccaggccaaacgcgaacccgttcttgaaaacgaatggaccgacggcagcttcaaggctgcacggttcaccctacgaaaccatgcccgactgacagcagggcgcaataccgcgcatctggacggcgacataaccgcatacaatctgtccggcatcgacctcggctttatccaaggcaaaacaccggaatgctaccgctcctaccatagcggcagcacccactgcacacccaacgccgttttaaaagccgaaaactatcgtgcactacctgtaacgcaagtacgcggcgacattacccttaacgaccgttcagagctccgcctgggcaaagcacacctgtacggcagcatccgtgccggcaaagacaccgcagtccgcatggaagcagacagcaactggacactttcccagtccagccacaccggcgcactgacgcttgacggcgcacaaattaccctgaaccccgatttcgccaataatacacacaacaaccgcttcaacacactgaccgtcaacggcacacttgacgggttcggcacattccgattcctgaccggcatcgtccgaaaacaaaatgccccccccctcaaactggaaggggacagccgcggcgcattccaaatccacgtcaaaaacaccggacaagaacctcaaacaaccgaatcgcttgcacttgtgagcctcaatccgaaacacagccaccaagcccgattcaccctccaaaacggctatgccgatttgggtgcctaccgctacatcctccgcaaaaacaacaacggatacagcctgtacaacccgctcaaagaggccgaacttcaaattgaagccacgcgtgcggaacatgagcgcaaccaacaggcatacaaccaattacaggcaaccgacatcagcagacaggttcaacatgactctgacgcgaccaggcaggcactacaggcctggcagaacagtcaaaccgaacttgcccgcatcgacagccaagtccaatatctgtccgcccaattgaaacagacagacccgctgaccggcattctgacgcgtgcccaaaacctgtgtgccgcacaaggatacagtgtcgatatctgccgtcaggttgccaaagccgccgacacgaacgacctgacactcttcgaaaccgaactggatacgtatatagaacgtgtagaaatggccgaatccgaacttgacaaagcacggcaaggcggcgatgcgcaagccgtcgaaacagcccggcacgcctacctgaacgcactcaaccgtctgtcccgacaaatccacagtttgaaaaccggcgttgccggcatccgtatgccgaacctggccgaactgatcagccggtcggccaacaccgccgtttccgaacaggccgcctacaataccggccggcaacaggcgggacgccgcatcgaccgccaccttaccgatccgcagcagcaaaacatctggctggaaaccggtacgcaacaaaccgactaccatagcggcacacaccgtccctaccaacaaactaccaactatgcacatatcggcatccaaaccggcatcaccgaccgtctcagtgtcggtacgattttaaccgatgagcgcacaaacaaccgttttgatgaaggcgtatccgcccgaaaccgcagcaacggcgcacatctgttcgtcaaaggggaaaacggcgcactctttgccgcggcagatttaggctacagcaacagccgtacccgatttaccgattatgacggggctgccgtccgccgccacgcatgggatgcaggcatcaacaccggcatcaaaatcgataccggcatcaacctcagaccctatgccggcatccgtataaaccgcagcaacggcaaccggtacgtactcgacggcgcagagataaacagcccggcgcaaatccaaaccacatggcatgccggcatccgtctcgataaaaccgtcgaactgggtcaagccaagctgacccccgctttcagcagcgattactaccatacccgccaaaacagcggttccgccctcagcgtcaacgaccgtaccttactgcagcaagccgcccacggcacactgcataccctgcaaatcgacgccggatacaaaggctggaacgccaaacttcatgccgcttacggcaaagacagcaacaccgcccgccacaaacaggcaggaatcaaaataggctacaactggtaa

SEQ ID NO: 46049 - DNA, 1878 bp, Neisseria meningitidis
atgagccaagccttaccctaccgcccggacatcgacacattgcgcgccgccgccgtcttgtccgtcatcgtgttccatatcgaaaaaaattggctgccgggcgggtttctcggtgtcgatatatttttcgtgatttcaggctttttgatgacgatgattcttcaccgcgaaatgtgggggggggggaggttttccctgaaggcattttatatccgccgcatcaaacggattttgcccgcatttttcgccgtattggcggcaacgctgataggcggcttctttttattcaccaaagatgatttctttcttttgtggaaatccgcgctgaccgccttgggtttcgcctccaacctgtattttgcaagggggaaggattatttcgatcccgcgcaggaagaaaagcccttgctgcacatttggtctttgtcggtcgaagaacaattttactttgtctttccgatattgctgctgcttgtcgcccgcaaaagcccgcgcgtacagttcggcttcctcgccgcattgtgcgccttaagccttgccgcttcctttatgccttccgcgttcgataaatattacctgccccacctgcgcgcctgcgaaatgctggtcggatcgctgaccgccgtgtggatgcggtaccggcaacagcggaatctcgccgttggcagatgctgtgccgccgccggcgcattgttttccgcgtgcatactgtccgcctgcctgtttgcctattcgaaacaaaccgcctatttcccgggacccgccgctttgattccctgtctggctgttgccgcgctgatttatttcaatcattacgaacacccgcttaaaaaatttttccaatggaaaatcactgttgccgccggtttgatttcctattcgctttatctgtggcattggccgatattggcctttatgcgctatatcggcccggacaacctgccgccttattcaacagcggcagcaatcgtcctgatattgctgctttccctgatttcttatcacggcatcgaaaagccgtttaaaaaatggaaaggttcgttcgcacaatccgttttatggatttatgccttgcctatgctcattttgggggcgggctcgtttttcgcgatgaggctgccgtttatggcgcaatacgaccgcttggggctgacgcgttccaacacctcctgccacaacaataccggcaaacaatgcctgtggggggatacggaaaaacagccggagctgctggttttgggcgactcccacgccgaccattacaaaacattcttcgatgccgtgggcaaaaaagaaaaatggtccgccactatggtttccgccgacgcttgcgcctatgtggaaggctacgcgtcccgtgtgttccaaaactgggccgcctgccgcgccgtttaccgctatgccgaagaacacctgcccctgtattcaaaagtggttttggcgatgcgctggggcagccaaatgcccgaaaacagccgctcccttgcctacgatgccggttttttccaaaaattcgaccgtatgctgcacaaactctcatccgaaaaacaagccgtttacctgatggcggacaaccttgcctcgtcttacaacgtacaacgcgcctatatcttgtcttcacgcataccgggttaccgccaaaccctgcgcccggacgacgaaagcactctgaaagccaatgcacgcatcagggaattggcagccaaataccccaacgtctatattattgatgccgccgcctatatccccgcaaatttccaaatcggcggattgccggtttactcggacaaagaccacatcaacccttacggcggcacggaattggcgaagcgtttttccgaaaaacaacggtttctcgatacgcgccataaccattga

SEQ ID NO: 46050 - DNA, 1404 bp, Neisseria meningitidis
atgaacaatcccgacttaccctatcggcagaccttagaatgcctttctcaaaaacaatataactttaccgaagtccgccgactgctgacagaagcggccttggcaggtcatcccgccgccgcattcgagttggcaaaacacctgatggatgcggacagcccctaccaagaccgcgaacaaggtatggaaatgctccgcatcgccgccgaacaggggcatccctacgcgcgttacaatctggcatatatccaagaattggaaggcgcgcccccctaaaccctgatatcgctttacaggcctccggcagaagcaggagtgcccgaagcgcaagtccgcctgatgtacctgctgtacgcgtcccggcattttgaagaagcactcgaatgggcaaaaaccagcgcaaaaaacaacaacccccacggacaatatctgctcgcccaatactgccggtacggcacaccgccggattttgaaacggcgcacctgctctaccgaaaagcggcggcacaaggcttgccggaagcacattggcagctcgggctgcaataccgtttcgggcaagggacgaaagtcgacacggcacaggccgtcaatcatttgcgcgccgccgcgcaacaaggatacattcccgcctacaccccgcttgccgaactcatcctacctacggctcccgatgaagccgtttaccggttccaacaggcggcacaggaaaatgaccccgattcccatgccgcactggccgacatctacctacaaggcaaatatcaggaaagaaaccacaaacttgccctgcatcatgccgaagcagccgcagcagaacgccatcccgaaggtttgcggatactgggcgacatctgccgctacggtttgggcatagcccccgatacggaaaaagcccggcattattaccggcaggcagccgaagccggcagcctttccgcctatcagaaactcatatccgacagcgcgttaaaccatcccgaccaatacggcggcatcaaagattccgccatcaggcggcaaagggcagaacagctttatcaaaaagcccaagccctgcattacggattacaatgtgcgcccgaatacgcagccgcgctcaaactctacacagaagccgcagaactcggacacagcaaagcccaaaccaatctgggcagtatgtactacttcggacagggcatagccgccgactacggcaaagcccgcaaatggtttgaacaagccgccgcgcaaaaagacagtatggcgttctacaacctcgcctgcatccattacagcggacacggtgtcgggccggacaaagaaaaagcctgccgctacctgcaagaagccataaacaacggatacgggcaaaaaagcgtcctgcaagaactgctgcaacaatggcaaaatgccgtctga

SEQ ID NO: 46051 - DNA, 1041 bp, Neisseria meningitidis
atgaaagcaatggtttatcacggcgcaaacgacatccgttttgaagaaaaaccccgtccgcagattatcgatccgaccgatgcggtggtgaaaatcgtcaaaaccacgatttgcggtaccgatttgggtatttggaaaggcaaaaaacccgaagtcgccgacggtcgtattctcggtcatgaaggcatcggtattgtagaagaagtcggcgatgctgtaaaaaacatcaaagtcggcgataaagtcattatttcatgcgtcagcaaatgctgtacttgcgacaactgcaaaatccaactttattcgcattgccgcaacggcggctggattttgggctacatgattgacggcacgcaggcagaatacgtccgcacgccttatgccgacaacagcctcgtgccgctgcccgacaacgtcaacgaagaagtcgccctgttgttgagcgacgctttgccgaccgcacacgaaatcggcgtgcaatacggcgatgtcaaacccggcgacaccgtattcatcgcaggtgccgctcctgtcggtatgtccgccttgttgaccgcccaactgtatagccccgccgccattatcgtgtgcgatatggacgaaaaccgtttgaaactggcgaaagagttgggcgcgacccataccatcagccccgcttccggcgacgtctccaaacaagttttcgccatcgtcggcgaagacggcgtagattgtgccatcgaagcggtcggtatccctgcaacttggaatatgtgccaagacatcgtgaaacccggcggccatatcgccgttgtcggcgtacacggtcaatccgttgatttcaaactggaaaaactgtggattaaaaagcttgccatcactaccggcctggtaaacgccaataccaccgaaatgctgatgaaggcaatttccagcagctccgtcgattacaccaaaatgttgacccaccgtttcaaattcagcgaattggaaaaagcctacgacgtgttcaaacacgccgccgaaaatcaagcgatgaaagtggttttggaagcggattaa

SEQ ID NO: 46052 - DNA, 510 bp, Neisseria meningitidis
atgggatcaaaattctttttcctgctgctgcgttttgccggttcggtgttgccgccgtcgcatatgcgcggcatcggcatcgtcggcagacgggtgcgcggttttctggcacggcggatttctccgcatatcggacgcggggtcaatatcgaacgcggggcgtatgtgttcccggatacggttttgggcgacggctcgggcatcggggcaaactgtgaaatctgccgtgggccggtggtcggcaaaaatgtgatgatggagccggaatgtctgttttattcaaataaccacaagtttgaccgcaaaaaacgctttgagggctacacggaaatccgtccgattacgttggaggacgatgtctggccggggcgcagggtgattgtaatggcgggcgtaaccgtcggacgcggttcggtcgtgggcgcaggcgcggtggttacaaaagacattccgccctactctttggcggcaggcaatccggcagtggtgaaaaagaatctgccggaaggt

SEQ ID NO: 46053 - DNA, 1077 bp, Neisseria meningitidis
atgaaacactttcaatccaaagtactgaccgcagccatccttgcctccttctgtagcggcgcgctggcggcatcaaacagtcgaccacacgctcgagaagttgccacagccgccctggttggagcctacaacaatgcccaagaaatcaacggtttcaaagtcggagacaccatctacgacattaatggaagcggcgaaattaccccaaaagaagcaacccaagaagatgtcgataacgacgactttaaaggtctgggtctgaaagaagtcgtggctcaacacgaccaaagccttgccgacctgaccggaatcgtcgaggaaaacagcgaagcattggtaaaaaccgccaaggttgtcaatgacatcagtgccgatgtcattgacaacacagcagctatcggggaaaacaaagctgctatcgccaaaaaggcagatcaaaccgcattggatgcagtatccgaaaaggtaaccgcaaatgaaactgctatcgctacaaaagcagacaaaaccgaactggataaagtgtccggcaaagtaaccgcaaacgagactgctatcgctacaaaagcagacaaaaccgaactggataaagtgtccggcaaagtaaccgcaaacgagactgctatcgctacaaaagcaaacagtgccgacgtgtacactaaagctgaggtgtacaccaaacaagagtctgacaacagatttgtcaaaattggtgacagaatcggtaatctgaacactactgccgatggattggatacacgcttgaagactgccgaaaaaaccattaccgaacacggtacgcgcctggacggcttggataaaacagtgtcaaacctgcgtaaagaaacccgccaaggccttgcagaacaagccgcgctctccggcctgttccaaccttacaacgtgggtcggttcaatgtaacggctgcagtcggcggctacaaatccgaatcggcagtcgccatcggtaccggcttccgctttaccgaaaactttgccgccaaagcaggcgtggcagtcggcacttcgtccggttcttccgcagcctaccatgtcggcgtcaattacgagtggtaa

SEQ ID NO: 46054 - DNA, 267 bp, Neisseria meningitidis
ttgtactgtctgcggcttcgccgccttgtcctgatttttgttaatccactatatgctgatgccggagacgtatattgcgtctataacatcagactgaagcagtacactgcctgccaggttacccgagttgaagaacacggtggcaaaaaaacacatgcgaccctgctggctttggactggcagggcaacaaaccgcttggggcggaggagctggcggatttgaaaccactttacaaagacttaaagaataatattggaaatattgta

SEQ ID NO: 46055 - DNA, 423 bp, Neisseria meningitidis
atgtattgggaacgcggtctgcacatgtataaggcaagtgctgtcgtgccaacgggatatgtacgggttgggaataccgcgccgctggtcggcgaagacacgcaacggtatgcctctttttggggcgacggctacgacgtgtaccgtcagttgagatggcagcagatacccgaaaaacagagaaaggcattcaaaaaagccgccaaaagcaaaaagaccgtgatgtttgccggacgggaatacggcatatccaaacagaatttgagcgatgtttgggatgattttgaagacgcgatggaactgaaggcgtttccctgcctgtcttcgctgtttctgaccaagtggcataaaaatctatatgatagtggattaacaaaaaccagtacggcgttgcctcgccttagctcaaagagaacgattctc

SEQ ID NO: 46056 - DNA, 345 bp, Neisseria meningitidis
atgaataagcaatatccgaaaattaactatatcggtaataaagagaaaatagcttcctggatttgtgaccagcttccgtctgatgtagatacagttgcagatgtatttagtggaggctgttcctttgcctatgaagccaaaaaacgcggctatcgtgtgattactaacgatattttggcaattaattaccaaattgctttagcattaatagaaaacaaccatgaaacattaaatgacgatgatggcgcaatgattttttcaggtagcccgcatgccggttttatgagtcagcgttatgccgaaaaattctattttcacgatgaataccaacaacttgatttgtaa

SEQ ID NO: 46057 - DNA, 369 bp, Neisseria meningitidis
atggaccaatactatatggagttaaagaataagttatctaacagaccaatcctactggataatactaatgattttctttttgttttagtaaatacagtgaaagctatgatagaaaatactgataaaagtcagctttcagagttagataaaattttagacggtgtcacaagtcaagaattgaaacttgcctatgatttttgtcaagggaaattcggtcaagcaggtttttcttatcgtaggcacccgaattatttttatttgtccagtttaattgcgacttttccagaatttgagttgtctaaagcagaccgagattacctcaaaggaatcataaattttgataactaccttttatatgagttagattag

SEQ ID NO: 46058 - DNA, 321 bp, Neisseria meningitidis; identical to SEQ ID NO: 40070

SEQ ID NO: 46059 - DNA, 567 bp, Neisseria meningitidis
gtgaattataaaatatacgatggtgcaaagattattaaaaaagaaaatttatcaattggggattattctcaaattgatgattttgtattttttaattgtggagagaaaagtattttaggaagttttgttcatatatcatcatttaccagtattattggtggtggagaattttatatggatcatttttcaggattaagcgcagggtgtagaattattaccggtagcgatgattttatggggggggggttaaccaatccaacagtcccatctaaatatactaatgttaaaaaatctagtgttagaattggaaaacatgcaattttaggaacaaatgtaacagtattaccaggcgttactattggtgatggggttgctgttggagcaggggctatagtgagaaaaaatcttgagccgtggactatttatgtcggggtagattgtaaaccactgaagcgcagatcacaagataaaatattggagttagagaaacatcttgtagcagaatttaatctagatttatgtcctataatcccatccccgaacctgcccaaaccaaaggaaacgcga

SEQ ID NO: 46060 - DNA, 174 bp, Neisseria meningitidis; identical to SEQ ID NO: 40073

SEQ ID NO: 46061 - DNA, 294 bp, Neisseria meningitidis; identical to SEQ ID NO: 40076

SEQ ID NO: 46062 - DNA, 372 bp, Neisseria meningitidis
gtggcgggaatgacgaagtttcagacggcatcgcccgcctgttttgatatggcggcaccccccccccgacaaaaaaaaacaatccggaacgcatctgaccgttccggcttgttttcaggcgaatccgccgcatcagaacatactgcgcacgcccatattgacctgccaagtctggcgcatcgtgtgcatcgaagacctttgcgcctcaaaataaagctgccttccgttgtcggcattaccacgcaaaaaaatgaattgcttgatattccaatgttttttatatgtttttatattgtgatgcgatcagacaaacgcccccctgacatttgtttagacggcatcgtattgctaaatttctataagtatgtataa

SEQ ID NO: 46063 - DNA, 228 bp, Neisseria meningitidis; identical to SEQ ID NO: 40081

SEQ ID NO: 46064 - DNA, 228 bp, Neisseria meningitidis; identical to SEQ ID NO: 39542

SEQ ID NO: 46065 - DNA, 219 bp, Neisseria meningitidis
atgttcccagaataccgtgatttgatttccaaattgaaacaggaaaattcccgcttcgcccgtctgttcgacgaacacaacgagctggacgataaaattaccggtctggtcaacaatccggttaccagcggtgcggaaaccatcgatgagctgaaaaaagccaaattgaaactgaaagacgagttgtacgccatcctgcaaaaagcagcgggcaaataa

SEQ ID NO: 46066 - DNA, 198 bp, Neisseria meningitidis
gtggataccgttggcagtttagcgattggttatgccacaggcggcaatgctggggcttttactgatgcgaatgcagattggaataatcggcagttgcattcgagtgaatataaattagcagaacaatatgcagacatagtagcttctcgtctaaacatttcaaaagaaacttgtacggcaatttatttgggaataaac

SEQ ID NO: 46067 - DNA, 228 bp, Neisseria meningitidis
ttggaaatttgcggcatccgccgcaaacgtaaacccgtaatgtatttgaccgtggttttttttacttcggttcgccttcttaccagcaagcggcgtgccaaaaaggggttcggctcgacattttacagaatattttttatttgtctatttggtattggtatttttttatatcaacgcggcgcggcctgcggcggaataatgcggcgggctgacgttttttgtcagttg

SEQ ID NO: 46068 - DNA, 480 bp, Neisseria meningitidis
atgacacacataagctcgccccgtaacgaatttatacgcggcatcaaagaaagttcgcccatgctgatcgggcttttgccttgggcattaatactcggtatgcagggtggacaaaaaggcatgagctggctggaaatgttgttgatgaccggtatgaacttcgccggcggctccgagtttgccacggtcaacctgtgggcggaacctctgccgatactgcttatcgccaccgtaacctttatgattaattctcggcatatcctgatgggggcggcacttgccccgcacctgaaagaaataccgctgaaaaaagccgtgcccgcactgttttttatgtgtgatgaaagctgggcgatggcattctccgaaatccaaaaacggaaagcagccggtttgcccgcattcaatatgcctttttatagtggattaacaaaaaccagtacagcgttgcctcgccttagctcaaagagaacgattctc

SEQ ID NO: 46069 - DNA, 417 bp, Neisseria meningitidis
atgtctttcggctatttgattgcaacatcgcaaccttgcgaattgttgacaaaatctcgaggtgaaactttttctttaattatggataagatggatttatggatttatttcagattttgtgaaggaaatatttatacaataaggaagaatgaaactgaatcttgtcttacagaaagaggaggcaaatggttgaaacatatttatgaatttaatcggggaagttttattttttcttatgtgcttctaaaaaagagagaaagcgaagagaattttgcagaaattgttttaaaatcaataaaaaataataaaattttgacagttaaggtacggtcaggcttgcattttgacttaagaaatatttatcgtattgagatgtatagcggattaaatttaaaccagtacggcgttgcctcgcct

SEQ ID NO: 46070 - DNA, 243 bp, Neisseria meningitidis; identical to SEQ ID NO: 44059

SEQ ID NO: 46071 - DNA, 312 bp, Neisseria meningitidis
atgtttaatcaaaaccaaactgtaacttatcctgcgacttttttgggagccaaaaaattcaaaggtgaaattgatggctctaacattgacacttgttccgtattggttgcaacacctttaccggcacagtcgggtaatgctgttggatttacggcagcacaaatgaagttcggggatagtaagaatttctcaaggttagagaatctcaaatatccgtgcgaagttatggtaatggttgaaatgacttcgacaggtaaaggcatggttccgtcattaattgattttcaggtggcggaaaagccgaaaggttga

SEQ ID NO: 46072 - DNA, 207 bp, Neisseria meningitidis
atgaatattattggtaaattgaaagaagctgcttcctattttcttacaaaattgattggagaaaatcctagtaatgagcaggtaaaccgcgcacttatacagatgccaaatgttcgtccgatacacacctatccacgcccaaatttaagaaactcaggcgtggcagccgcaaaacgggcggcgcgtaaacgcaagaatcgtcgttaa

SEQ ID NO: 46073 - DNA, 204 bp, Neisseria meningitidis; identical to SEQ ID NO: 40089

SEQ ID NO: 46074 - DNA, 195 bp, Neisseria meningitidis
gtgaagcataagctctcgtcttggtggaaaaccatcaagctgacagcaaacttgatggcaggcgtgcccgattatgaaaactacgttgcacagcagcgcaaacataatcccaacgcccctgtgatgaccaagctgcagtttcaagactattgccgcaaacgccgctgcggcgcaaacggcggacgctgctgttaa

SEQ ID NO: 46075 - DNA, 441 bp, Neisseria meningitidis; identical to SEQ ID NO: 40090

SEQ ID NO: 46076 - DNA, 195 bp, Neisseria meningitidis; identical to SEQ ID NO: 40091

SEQ ID NO: 46077 - DNA, 396 bp, Neisseria meningitidis; identical to SEQ ID NO: 40092

SEQ ID NO: 46078 - DNA, 183 bp, Neisseria meningitidis
gtgaaaaaaggcgtacattccgctacacagaattacagacgcagcggagcaatgccgtctgaaaggattttccggtcagtcttgcgattggtcggggtttcatcggaaacggtgaaacgaaagtttgccggcgtagagttgagctacgcgggcaaagccgcaggcgaaagcctgtattgtttg

SEQ ID NO: 46079 - DNA, 303 bp, Neisseria meningitidis; identical to SEQ ID NO: 40930

SEQ ID NO: 46080 - DNA, 219 bp, Neisseria meningitidis; identical to SEQ ID NO: 40094

SEQ ID NO: 46081 - DNA, 216 bp, Neisseria meningitidis; identical to SEQ ID NO: 40095

SEQ ID NO: 46082 - DNA, 183 bp, Neisseria meningitidis
gtgccggaacaggcacgcgcccgcccgattcaaaccgcgatgacgctttgccgccggttcggggcaggatggcggcacacacgccgtctgccgcgtttcatttcacaccgcccttccgaaacccgaaacccgcccggtccgacgtgcggtatgaaacgcttaagctggcgcgaagtcttttac

SEQ ID NO: 46083 - DNA, 222 bp, Neisseria meningitidis; identical to SEQ ID NO: 40096

SEQ ID NO: 46084 - DNA, 2121 bp, Neisseria meningitidis; identical to SEQ ID NO: 40097

SEQ ID NO: 46085 - DNA, 213 bp, Neisseria meningitidis; identical to SEQ ID NO: 40098

SEQ ID NO: 46086 - DNA, 414 bp, Neisseria meningitidis
ttgacagaagaaatgatgaaaaagcagcggcatatcctgtgtgtcggctgcctgtatattatattgaaggtcaacgtatttcccaataccggctggatggaagcgtcgaaagggatgcagggcatgtcgttcagtaccttcggatacgcggatgctccgggctatacattcagccgcattggccatactttaattttcctacttggaaagaccacagggacacgtacaactgtttccgatagttcgcataatgacaagttacgtctttttctaagaatattacaggttttggcaaaggtttctgttgcgacccgaatgtcttatttttttaggcgtatctcagtccggtatcactccgttagtgggtttccggtattgaaaaacagttcagaaaaaaggaaaagggggtattcg

SEQ ID NO: 46087 - DNA, 1230 bp, Neisseria meningitidis
atgccttctgcccattatcctgaaatgagcgaaaaactgatggcggttttgatggcgatgctggttacgctgatgccgttttccatcgatgcctacctgcccgcgattcccgaaatggcgcagtcgctgaacgcggatgtccaccgcatcgaacagagcctgagtttgtttatgttcggcacggcgttcggacaggtggtcggcggttcggtgtccgacatcaaagggcgcaaacccgtcgcgctgaccggactgaccgtctactgccttgccgttgccgccatcgtatttgcttcgagtgccgaacagctcctcaacctgcgcgtcgtgcaggcattcggtgcgggcatgactgtggtcatcgtcggcgcaatggtgcgcgattattattccggacgcaaagccgcccagatgtttgcccttatcggcatcattttgatggttgtgccgctggtcgcatccatggtcggcgcattgttgcagggcttgggtggctggcaggcgatttttgtttttctggcggcgtattcgctggtgctgctcggtttggtgcagcatttcctgcccaagcctgccgtcggcggcaaaatcggacgggacgtgttcgggctggtggcggggcggttcaagcgcgtattgaaaacccgtgccgcgatgggttatctgttttttcaggcattcagcttcggttcgatgttcgcctttctgaccgaatcttccttcgtgtaccagcagctctaccgtgttacgcctcatcaatacgcttgggcgtttgcactcaacatcatcacgatgatgtttttcaaccgcattaccgcgtggcggctcaaaatcggcgtgcatccgcaaagcatcctgctgtgggggattgtcgtccagtttgccgccaacctgtcccaactcgccgccgtgctgtttttcgggttgcccccgttttggctgctggtcgcgtgcgtgatgttttccgtcggtacgcagggcttggtcggtgcaaacacgcaggcgtgttttatgtcctatttcaaagaagagggcggcagcgcaaacgccgtattgggtgtattccaatctttaatcggcgcgggggtgggtatggcggcgaccttcttgcacgacggttcggcaaccgtgatggcggcaacgatgaccgcgtccacctcttgcggcattgcgcttctgtggctctgctcgcatcgtgcgtggaaagaaaacgggcaaagcgaatacctt

SEQ ID NO: 46088 - DNA, 399 bp, Neisseria meningitidis
ttgtttgtatgctttgaaaaatgtttgtttccggattttgccattcccatccggttttgcgctgtacgatgtgttttagcgcggacttgctcaaaatcggatgtggttccggtatttgaggctttgattagggatgcggactttcaatatatttttctcagctacaacaacgaaggcttgatgtctgtcgggcaggtaagggagatttttgagtgtttcggcaaatataatttggttcaaacggaataccggcgttttaaggcagataagacagaaaaccgtaatcataaggcaaattcgatattcgaatatctgcatattttagaaaagaccttttatagtggattaacaaaaaccagtacggcgttgcctcgccttagctcaaagagaacgattctc

SEQ ID NO: 46089 - DNA, 411 bp, Neisseria meningitidis; identical to SEQ ID NO: 40101

SEQ ID NO: 46090 - DNA, 258 bp, Neisseria meningitidis
atgccctctccccagccctcccccacgggggagggagaaggttgcagcagattttgcggttgcaggcgatttgaaaggcaacttagatttgcagctgttgtttcaggtcatctgaaaaataaaaagcagcctgcacaacctgttttccttgcagaacccttaatcccaaccgccaccacgtcctctctcccatgggagagagtcagagagagggcaacaaactgtaaggcttacacaaacagtaacccgacaacagaa

SEQ ID NO: 46091 - DNA, 213 bp, Neisseria meningitidis
atgaaaaccctgctcctcaccttcggcatcttcctgaccgtcatcatcggtatggcggtcggctatatcttctccaaacgcaccatcaaaggcagttgcggcggcattaccgccttgggtatgaaaaaaatgtgcgactgcgacacgccttgcgacaccctgcaaaagaaactggatgaagaaaaacaggcaggcggcatacgggttgaccgt

SEQ ID NO: 46092 - DNA, 1005 bp, Neisseria meningitidis
atgagcaccttcttccagcaaaccgcccaagccatgattgccaaacacatcaaccgcttcccgctattgaagttggaccaggtgattgattggcagccgatcgaacagtacctgaatcgtcaaagaacccgttaccttcgagaccaccgaggccgtcccgcctatcccctgttatccatgttcaaagccgtcctgctcggacaatggcacagcctttccgatcccgaactcgaacacagcctcatcacccgcatcgatttcaacctgttttgtcgttttgacgaactgagcatccccgattacagcaccttatgccgctaccgtaactggctggcgcaagacaacaccctgtccgaattgctggaactgatcaaccgccaactgaccgaaaaaggtttaaaaatagagaaagcatccgctgccgttgttgacgccaccattattcagaccgccggcagcaaacagcgtcagaccatagaagttgacgaagaaggacaagtcagcggccaaaccacaccgagtaaggacagcgatgctcgttggatcaagaaaaacggcctctacaaactcggttacaaacaacatacccgtaccgatggggaaggctatatcgagaaactgcacattacccccgccaatgcccatgagtgcaaacacctgtcgcctttgctggaagggatagccgaaggtacgaccgtctatgccgacaaaggctacgacagtgcggaaaaccggcaacatctggaagaacatcagttgttggacggcattatgcgcaaagcctgccgcaaccgcccgctgtcggaagtgcaaaccaagcgtaaccgatatttatcgaagacccgttatgtggtcgaacaaagcttcggtacgctgcaccgtaaattccgctacgcccgggcagcctatttcggactgattaaagtgagtgcgcaaagccacctgaaagcgatgtgtttgaacctgttgaaagccgccaacaggctaagtgcgcccgctgccgcc

SEQ ID NO: 46093 - DNA, 1014 bp, Neisseria meningitidis
atgattttctccatcatcgtccctatttacaatgtggaaaaatacctccgctgctgcgtggattccgtgcttgccgaaaattttgccgattatgaaatgattttggtcgatgacggttcgccggacggctgcgggaagatttgcgacgaatatgcaggcaaatatccgcatataaaagtgattcatcaagaaaacggcgggctgtcggatgcccgcaacgccggtatccgggcggcaaaaggcgattacctaatctttttggacagcgacgactattgggccgacaccaatcgttcaaaaaacggcgggggggggattctctttgatttacaacaacttgcagacaaaaaggttgatttgatcctgcatccctcgtccttcaattaccgcgacatccccaaaggggcggacttttcggataatgattttgtccgccattttgaaacgctggtggaggggcggtactatatcgccaacgcgtggacaaaaatcgtcaggcgggaaataatcatcaaaaacaatctgtttttcccaaaaggatacattcacgaggatttcccgtacagtttgcaattggcgcgttttatcaagacttttgccttttacgataaccctttttaccagtaccgcgttctcggcggctctatcagccacaacatcaaatacaaaaatttcagcgatgtgctgacgcatctcgaccggggtgtggattttttagtcgaaaacaaaaattcccccatctacggcggtttgcaaaaatttgtcttcgacaatatcggctatctgaggtctatattggtaaggctttatttttccaaaaacattatcctcatctaccggaaatatttttcatttaaagaaaaatgcagaaagatattcggcgcgaaggcaatccgtccggtttttatcgggaagaccgcattcatcataggattgccgatattgcgcctgctcgtaccgcctatgctgtacccggcaatcaaggccgtttatcagaaatttttttcggaataa

SEQ ID NO: 46094 - DNA, 402 bp, Neisseria meningitidis
atggcaaaccgatttcggcagcgcaaatccgcataccgccgccttagcggcaagccgttgttttcagacggcattgcggccaacctttgcggcgggcgaaaaaccttgtcctataatttatcccgcttcaaaatcagcatacggtcggaaatgcaaaaaatatctttcaatttgttgaaacctgcaaccccctaaatagggaaacgccgccccggtttgaacggtgcgccgcatattccgatgccctccccccgataccttccggcaagcccagaaatgcccggcaacaatatccatccggcaaaaatccgaaacaacacacccggtggcaggcagagtcaaaccgccccgcaaagcatccgccatcagaaaaacaaaccgcctccgagggcttcatcctaa

SEQ ID NO: 46095 - DNA, 1083 bp, Neisseria meningitidis
atggatttaagtatcgtagttcccatttataatgtcgaaagttatttggaagcgtgtttaagttccatagaacctatattaagtaatgaaaatgtcgaacttatccttgtgaatgacgggtcaaaagacggaagtgaagatatatgttataaatatatagataaaacaacaaacaacaaacaacaaacaacaaacaacaaacaacaaacaacaaacaacaaacaacaaacaacaaacaacaaacaacaaacaacaaacaacaaacaacaaacaacacgataccgaacaccaaacatcaaatatatatatcaggataaccaagggacggcagaagctaggaataccggaataaaaaattcaaacggaaaatatatagtctttattgattcagatgattttattaattgtcaggtcttgctggattttcttagtaaagatgatattgatatgccggatgtggtttttttaaatgcggttaaatatgataagggaagtgtttcacattttggcgaagattatcagcctgaaaaaatactcaatcaatccaaagtcgaagttttgaaaggattatgccgatttagaaaatttccgggttcggcgtgtaataagattataaaaagggaattgattatcaaagaaaaactgttttttgaaaaagaggtttatgccgaagatatcgaatggtcaatgagattatttaatgcggcaacaactttttcttatttggacggttgttattactattatcggcagggaagaaaagattctaaaacaggaactgtttcggaaaaaagtataaagtcattattatatattttggagaaaaatgcggaaatggaatttaatagggatatatcaagttatctttattcttttctttcctacgaatatctcgttttgctttttatcatgacgagtaaaaatatagagtgtgatgctgatataaaaagaagggcgtatcatttaaggtttatgctgttaaagtccaataaattgatatataagctgatattcccgataatcacattattcggggttgatattacaggcaggattttaaaagcaatcagggggaatatttaa

SEQ ID NO: 46096 - DNA, 1158 bp, Neisseria meningitidis
atgaaacgccaagccttagctgcaatgattgcttccttattcgcattagccgcctgcggcggcgaacctgccgcgcaagcccctgccgcttccgcagaagccgcaagttccgccgcacaaaccgccgccgaaacgccgacaggcgaactgcccgttatcgatgcagttaccacccacgctcctgaagtacctcccgcaatcgaccgcgactatcctgccaaagtccgcgtaaaaatggaaactgtcgaaaaactgaccatggaagacggtgtggaataccgctactggacatttgacggcgacgttccgggtcgcatgatccgcgtacgcgaaggcgatacggttgaagtggaattttccaacaacccgtcttctaccgttccccataacgtcgacttccacgccgcaaccggtcagggcggcggtgcagccgcaacctttaccgccccgggccgcacttccacattcagcttcaaagccctgcaaccgggtctgtacatctaccactgcgccgtcgcgccggtcggtatgcacatcgccaacggtatgtacggtctgattttggtcgagcctaaagaaggtctgccgaaagtggataaagagttctacatcgtccaaggcgacttctacaccaaaggcaaaaaaggcgcgcaaggcctgcaaccgttcgatatggacaaagccgttgccgaacagcctgaatacgtcgtattcaacggtcatgtaggttctatcgccggcgataacgcgctgaaagccaaagcaggcgaaaccgtgcgtatgtacgtcggtaacggcggtccgaacctagtgtcttccttccacgtcatcggcgaaatcttcgacaaagtttatgtggaaggcggcaagctgattaacgaaaacgtacaaagcaccatcgttcctgccggcggttccgccatcgtcgaattcaaagtcgacatcccgggcagctacactttggtcgaccactccatcttccgcgcattcaacaaaggcgcgttgggccaattgaaagtagagggtgcggaaaaccctgaaatcatgactcaaaaattgagtgataccgcttacgccggtaacggtgcagctcctgctgcttccgctcccgcagcttctgccccggcagcctctgcatccgaaaaaagcgtttattaa

SEQ ID NO: 46097 - DNA, 1848 bp, Neisseria meningitidis
atgcacgacacccgtaccatgatgatcaaaccgaccgccctgctcctgccggctttatttttctttccgcacgcatacgcgcctgccgccgacctttccgaaaacaaggcggcgggtttcgcattgttcaaaaacaaaagccccgacaccgaatcagtcaaattaaaacccaaattccccgtccgcatcgacacgcaggacagtgaaatcaaagatatggtcgaagaacacctgccgctcatcacgcagcagcaggaagaagtattggacaaggaacagacaggcttcctcgccgaagaagcaccggacaacgttaaaacgatgctccgcagcaaaggttatttcagcagcaaagtcagcctgacggaaaaaggcggggcttatacggtgcacatcacaccggggccgcgcaccaaaatcaccaacgtcggcgtcaccatcctcggcgacatcctttcagacggcaacctcgccgaatactaccgcaacgcgctggaaaactggcagcagccggtaggcagcgatttcgatcaggacagttgggaaaacagcaaaacttccgtcctcggcgcggtaacgcgcaaagcctacccgcttgccaagctcggcaacacccgggcggccgtcaaccccgataccgccaccgccgatttgaacgtcgtcgtggacagcggccgccccatcgccttcggcgactttgaaatcaccggcacacagcgttaccccgaacaaatcgtctccggcctggcgcgcttccaaccgggcacgccctacgacctcgacctgctgctcgacttccaacaggcgctcgaacaaaacgggcattattccggcgcgtccgtacaagccgacttcgaccgcctccaaggcgaccgcgtccccgtcaaagtcagcgtaaccgaggtcaaacgccacaaactcgaaaccggcatccgcctcgattcggaatacggtttgggcggcaaaatcgcctacgactattacaacctcttcaacaaaggctatatcggttcggtcgtctgggatatggacaaatacgaaaccacgcttgccgccggcatcagccagccgcgcaactatcggggcaactactggacaagcaacgtctcctacaaccgttcgaccacccaaaacctcgaaaaacgcgccttctccggcggcatctggtatgtgcgcgaccgcgcgggcatcgatgccaggctgggggcggagtttctcgcagaaggccggaaaatccccggctcggatgtcgatttgggcaacagccacgccacgatgctgaccgcctcttggaaacgccagctgctcaacaacgtgctgcatcccgaaaacggccattacctcgacggcaaaatcggtacgactttgggcacattcctgtcctccaccgcgctgatccgcacctctgcccgcgcaggttatttcttcacgcccgaaaacaaaaaactcggcacgttcatcatacgcggacaagcaggttacaccgttgcccgcgacaatgccgacgttccttcggggttgatgttccgcagcggcggcgcgtcttccgtgcgcggttacgaactcgacagcatcgggcttgccggcccgaacggatcggtcctgcccgaacgcgccctcttgacgggcagcctggaataccaactgccgtttacgcgcaccctttccggcgcggtattccacgatatgggcgatgccgccgccaatttcaaacgtatggagctgaaacacggttcgggactgggcgtgcgctggttcagcccgctcgcgccgttttccttcgacatcgcctacgggcacagcgataagaaaatccgctggcacatcagcttgggaacacgcttctaa

SEQ ID NO: 46098 - DNA, 816 bp, Neisseria meningitidis; identical to SEQ ID NO: 40126

SEQ ID NO: 46099 - DNA, 804 bp, Neisseria meningitidis; identical to SEQ ID NO: 40127

SEQ ID NO: 46100 - DNA, 357 bp, Neisseria meningitidis
atgaccgaccgtccgagcctgctgtggataaagcccggacaggctgaaatcatggaatattgcgaacctgaagaagcatccgacccgtacgcaacatacaggcgtgccaacctgatggcgaggctgccgctgtttgtcgtgattttggttctgctcaatattgttccgcttccggcgcatcccttagcttggctggtgcctgcaggtttcatggttttggtcggcggctttcccttatcgctgccgcttgtggcgctgcttgtcctgacctgctgcattctggcgcattgtccgccattatcccgtcttttgtgctacccttgcccgaatcatccgatgtctaaaaattctgcctga

SEQ ID NO: 46101 - DNA, 195 bp, Neisseria meningitidis; identical to SEQ ID NO: 40129

SEQ ID NO: 46102 - DNA, 1578 bp, Neisseria meningitidis
atgaataaatttttcaaacgcctgtttgacattattgcctccgcctcagggctaattatcctgtcgcctgtgtttttgattttggtgtacctcatccgcaaaaacttaggctcgcccgtgttcttcatccaagagcggccgggcaaggatggcaggccgtttaaaatgattaaattccgctccatgcgcgatgcaatcgataaagacggcaacccgctgcccgacagcgagcggctcacacccttcggcaaaaaactgcgtgccgctagtttggacgaactgcctgaattatggaatgtcttaaaaggcgacatgagcctggtcggcccgcgcccgctgctgatgcaatatctgccgctgtacgacaacttccaaaaccgccgccacgaaatgaaaccgggcgtgaccggttgggcgcaagtcaatggccgcaacgccatttcatgggatgaaaaattcgcccacgatgtttggtacatcgacaacttcagcttttggctggatatcaaaattttgttcctgacggttaaaaaagtcttcgtcaaagaaggcatctcagccgaaggagaagccaccatgccttatttcacgggtaataaaactgatgaaaaaaataatatactgattctgtcggcaggtcgccgtgtcgaattggtgcaggacttccaaaccgaagccgcacgtttttcagacggcatcagcgtttttgccactgacctcaacccccgcatgtcttctgcctgccatgtttcggacggttcatttgaagtgccgccgattagtgccgattcatatatcgacagcattttcaatctggcggtacgcgaaaatatcggtttaatcatcccaaccatagacaccgaactgcaaaagctggcagacgagcgcgaacgctttgaagcggcaagtgtccacatcgtcgtttccgattcggacttcatcgcacaatgccgcgacaaacggaaaaccgccaccttgtttgcccgctacggcatacgctcacccgaaatttacgaccgcaagaagttggttttcccttgcttcgccaagccttatgacggcagccgcgccatcggtgcaaaacggattgacacacctgccgacctgacaccggaagtcttggcagacaccaaattaatgttctgtcagtttatcgacatcgaaaataaattttccgagtttaccgtcgatatgtattacgaccgtcaatgccgtctgaaatgcgccatcccgcgaaaacgcttggaagtgcgctccggcgaaatcagcaaaggcgttacctgcaaaaacagcctctaccaaacgctgctggaaaaaatgtcggtattgcagggcgcgcgcggctgtatcacggcgcagttcttctacaacgaagaaaccggcgaattctacggcgtggaaatcaacccccgcttcggcggtggcttcccgctgacgtatgccgcaggcggcaattatccgagccggttgatgcgcgaatacctcggcgacgaagaaatcccgttttcagacgactgggaaaacaacctcattatgttgcgctacgatgccaaggtcttggttcatgaaaacgattaa

SEQ ID NO: 46103 - DNA, 426 bp, Neisseria meningitidis; identical to SEQ ID NO: 40133

SEQ ID NO: 46104 - DNA, 276 bp, Neisseria meningitidis; identical to SEQ ID NO: 40134

SEQ ID NO: 46105 - DNA, 1035 bp, Neisseria meningitidis
atggggcgtgtgtcgtatttgtgcgtcgatgcggcggagcaggctttgacggatgccggtttgctcggagacgaaagcattactgacggacgcatgggcgttgcctgcggctcttccagcggcagcaccaaagacatcggcgatgtaggcgaattgttgctgaccggcatgtcgcgcaacttcagtgccaacacctatgtgcgtatgatgccgcacaccgccgccgccaatatcggcatctttttcgggctgaaaggacgcatcatcccgacatcgagcgcgtgttcgtccggcagccaaggcataggttatgcctacgaagccatcaaatacggtctgaccgatatgatgctggcgggcggaggcgaagaatttttcccgtccgaagtgtatgttttcgactcgctttatgccgccagccgccgcaacggcgaaccggaaaaaaccccgcgcccatacgacgcgaaccgcgacgggctggtcatcggcgaaggcgcggggattttcgtgctggaagaattggaacacgccaaacggcgcggtgcgaaaatttacgccgaactcgtcggctacggagccaacagcgatgcctaccatatttccacgccccgccccgacgcgtaaggcgcaatccttgcctttcagacggcattgcaacacgcaggtcttgcgcccgaagacatcggctggattaatctgcacggcaccgggacgcaccacaacgacaatatggaaagccgcgccgttgcagcggttttcggcaacaatacgccctgcacgtccaccaagccgcaaaccggacacacgctgggcgcggcggacgcaatcgaagccgcgttcgcgtggggcattgccaaccggcaaagcaatcccgaaggaaaacttccgccccggctttgggacgggcagaacgaccccaacctgcccgccatcaacctgaccggcagcggcagccgctgggaaaccgaaaaacgcattgccgccagctcatcgtttgccttcgggggaagcaactgcgtcttaatcatcggatga

SEQ ID NO: 46106 - DNA, 1953 bp, Neisseria meningitidis
atgctgccaacccaacccaacccaacccaacccaacccaacccaacccaacccaacccaaccagcccctgatctaatcgacacagccggggtgaacaccgaggcaatctacacttcagacggcattaccgccaactctacccaactcgaacagctcaaaaaactgtttcccgcctgttttgacgcagacggaaatttccttatcgacagattacaagccgaaattgcgccacagaccgacatcggacgcgaattttacgaaatgaactggctgggcaaatcatatgctcgcctgcttcgcaacctgccgcccgaaaccctgataagtgaagacaagacgcacaacgccaaacccgaaaatgcaggcagccaaaacctactgattcgtggcgacaatctagaagtgttgaaacacttaaaaaacgcctacacaaacagcgtgaagatgatttacatcgacccgccctacaacaccggatcagacggctttgtctatcaggacgaccgcaaattcacaccagccgaacttgcctgcttagccaatattgacgaagacgaagccgcgcggattttagatttcaccgacaaaggctcaaactcgcacagtgcatggttgacctttatgtatccgcgcctgtatatcgcccgcgaactgttaaaggacgacggcgtgatttttatctcgattgacgataacgaagcggcgcagttgaagttgttgtgtgatgaagtgtttggggaagggaattttattaaagatttaattgttaatacatcagaaggtggtggtaatgcaaaatatgttgtaaatgggcatgaaactgttttagtttatgcgaaagatattactcattttgacaatctaaaaagaccaaaagatatacgcggcaaaaaaattgtaatcaatgatgaattatattggatacaggaagatgccgttcgcgaacagtttggcaaatatgggaacttgcattacgaagatattattgaaataaaaggaattgagtttaaaaacaaaattgataaagatattgaaaataatgaatatatcttaattccgaagtcttatgggaaaacaattattggaaaacttagaaaagtatccgatgatttttccaaatttcatagcatcttaaatattggaaatataagtaaaaatcttactaaagatggtattcgtgaattagaagagttgtttgaaactggaaaaggttattctccttttgaaacaccaaaaccattagatttattgaaaagattagttctttctgcaactttcaagggaaatcaaactgacctaatcctagacttcttcgcaggcagcggcacaaccgcccacgccgtgatgcagcttaacgccgaaggacaaaacggtaaccgccgctatatctgtgtacagcttcccgaaaaaaccgctgaaaaatccgaagcccgtaaagcaggctacccgaccatcttcgacatcaccaaagcccgcatagaaaaagccgccgccaaaatccgcgtcgaacatcccgattacacgggcgattcgggcttcaaaatctttcaaacggcagacaatttcaggcagcatccggacaaggatttttcgcccgaacaaccggatttgccgcttaacgatgaattaagcgaagaacagctgcaaacgcttctgaccacctggacgctgtatgacggggcggcactgaccacgccggttgagcctgtgcggttaggggcttacacggcgtatctgtgcgaaaaacggctgtatctgatgaatgccggttttacttctgccgatttgttggcgtttatccgcaagctggacgacgatgcggctttcaatcccaaccgcgtgattgtattcggcagcaatatggcaagcgccatgcagcacgaacttgaccaggcggttcgcggttatgccaataaaaaagagattgagttgaatgtggttatcagggtttga

SEQ ID NO: 46107 - DNA, 2034 bp, Neisseria meningitidis
atgaaactcgaagcaagcaagcacaagcagaagtttaaaaaatcatttattataagtctatttttttctattctttatacctctccgcttttggctgttgattacgtttacgacaattctaaattaacaaatgagcaaattgatcgcttaaaaaaacttagagataaaagcagcgaatactggaaacaagaaacttatcttctaaaaccgacgaatggtagctctcagaactctctcaaagttcccgcactatactctaaaacacaccaattcaaaaacatcaacaactcaaaaaagatttctttttatgacaaggaatacactgaagattaccttgttggcttcgcccgaggtttcggggttgaaaaaagaaatggggaagaagaaaaaacactccagcaatattttaaggactgtgtaaatactgggaattccaataatgataagtgtgaacaaccatccttcgaaaactctggcccaagattaataaagagcgatattttcgccttagctccacaaataaaaaatagccatatcaacagcgaaattttatctgtaggtaattatatcgaatggcttcgcccaacacttaataagcttcctagttggcaagagcatctctattctggtttagatccattccactatattgaggttacagacaactcacacgttatcggacaaacaattagtttggatgaattccgcttagaaaattctctctgggaaccccgttgggattctgatgttggggaattaaaaacaacgaatgcagacatccgttttaatactaaaagtgaaagtttactcgtaaaagaagattatgctggcggagctcgttttcgttttgcttacgatctaaaagataaagtctctgaaacaccagttttaacttttgaaaaaaatataactggcacttccgacatcatcttcgaaaatccaatagacgatttaaaaagtctcgacgggcatcaaattatcaaagtaaatggcacagcagataaacacgcattccgtctttctggcaaacaccaaaagggaatttatacgctttctttacaacaacgcccagaaggcttttttaccaaagtgcaagaacgcgatgatatttcgatttatgcacaacaggctcaagccgccaataccttattcgccttgcgtttgaacgacaaaaacagcgatatttttgaccgcactttaccacgcaaaggcttgtggttgcgtgtgattgacggacattccaaccaatgggtgcaaggcaaaacagcacctgtagaaggctatcgtaaaggtgtgcaactcggtggcgaagtattcacatggcaaaacgaaagtaatcaactttccgttggcttaatgagcggacaagcagaacaacgcagcactttccgcaatccagatacagacaatcttacaacgggaaatgtgaaaggctttggggcgggcatttatgccacttggcatcagcttcaggacaaacagacaggtgcgtatgcggatagctgggtacaatatcaacgcttccgccaccgcattaacactgaagatgctacagaacgttttacttcaaaaggtattaccgcctcaattgaagcgggttacaatgctttattggcagaacacttcactaaaaagggcaacagccttcgtgtttacctacaaccacaggcacaattgacttatttgggggtaaacggaaaattcagcgatagcgaaaatgcccacgtgaatttacttggctcccgccaattacaaactcgggttggcgttcaagctaaagctcaattttcactctataaaaatatcgctattgaacctttcgccgctgtgaacgcgctttaccacaacaaacctttcggtgtggaaatagacggagagcgtcgagtgataaacaataagacggcaattgagagccaattaggtgtagcagtgaaaatcaaatctcacttaactttacaagcctcattcaaccgccaaacaagcaaatatcatcaggctaaacaaggtgcgttgaatttgcagtggacgttttaa

SEQ ID NO: 46108 - DNA, 2085 bp, Neisseria meningitidis
atgacactgaaagcaagcaagcaagcaagcaagcaagcaagcaagcaagcaagcaagcaagcaagcaagcaagcaagcggtcgggttaatctattaacattatctgttttatcgctgttttgcacgccatatgtttgaggttcggatgcgtacgatcccgtcaaagaagccgagattaaaaacaaatttattttagaagcggcggaagacagaaattcccacgtttggcgcggcccgtgcagcatatcttttgattgcttcggtatgttcagagctcagcttggttcaaatactcgttctaccaaaatcggcgacgatgccgatttttcattttcagacaagccgaaacccggcacttcccattatttttccagcggtaaaaccgatcaaaattcatccgaatatgggtatgacgaaatcaatatccaaggtaaaaactacaatagcggcatactcgccgtcgataatatgcccgttgttaagaaatatattacagatacttacggggataatttaaaggatgcggttaagaagcaattacaggatttatacaaaacaagacccgaagcttgggaagaaaataaaaaacggactgaggaggcgtatatagaacagcttggaccaaaatttagtatactcaaacagaaaaaccccgatttaattaataaattggtagaagattccgtactcactcctcatagtaatacatcacagactagtctcaacaacatcttcaataaaaaattacacgtcaaaatcgaaaacaaatcccacgtcgccggacaggtgttggaactgaccaagatgacgctgaaagattccctttgggaaccgcgccgccattccgacatccatacgctggaaacttccgataatgcccgcatccgcctgaacacgaaagatgaaaaactgaccgtccataaggattatgcgggcggcgcggatttcctgttcggctacgacgtgcgggagtcggacgaacccgccctgacctttgaagacaaagtcagcggacaatccggcgtggttttggaacgccggccggaaaatctgaaaacgctcgacgggcgcaaactgattgcggcaaaaacggcggattccggttcgtttgcgtttaaacaaaattaccggcagggactgtacgaattattgctcaagcaatgcgaaggcggattttgcttgggcgtgcagcgtttggctatccccgaggcggaagcggttttatatgcccaacaggcttatgcggcaaatactttgtttgggctgcgtgccgccgacaggggcgacgacgtgtatgccgccgatccgtcccgtcaaaatatacggggtggcgcggctgcggacgggcggcgcaaaggcgtgcaaatcggcggcgaggtgtttgtacggcaaaatgaaggcagccggctggcaatcggcgtgatgggcggcagggtcggccagcacgcatcagttaacagcaaaggcggtgcggcaggcagtgatttgcatggttatggcgggggtgtttatgctgcgtggcatcagttgcgcgataaacaaacgggtgcgtatttggacggctggttgcaataccaacgtttcaaacaccgcatcaatgatgaaaaccgtgcggaacgctacaaaaccaaaggttggacggcttctgtcgaaggcggctacaacacgcttgtggcggaaggagttgtcggaaaaggcaataatgtgcggttttacctgcaaccgcaggcgcagtttacctacttgggcgtaaacggcggctttaccgacagcgaggggacgggggtcggactgctcggcagcggtcagtggcaaagccgcgccggcattcgggcaaaaaaccgttttgctttgcgtaatggtgtcaatcttcagccttttgccgcttttaatgttttgcacaggtcaaaatctttcggcgtggaaatggacggcgaaaaacagacgctggcaggcaggacggcgctcgaagggcggttcggcattgaagccggttggaaaggtcatatgtccgcacgcatcggatacggcaaaaggacggacggcgacaaagaagccgcattgtcgctcaaatggctgttttga

SEQ ID NO: 46109 - DNA, 450 bp, Neisseria meningitidis
atgagtatttacgcacttgcacacatcgtccatctgtattgcgccattgcctttgtcggcggcgtgttttttgaagtgctggttttgtccgtcctgcatacgggacgggtgtcgtgcgaggcgcggcgcgaagtggaaaaggcaatgtcttaccgcgccgtcagggtgatgccgtttgtggtcggactgctgttcgccagcggcgtcgtgatggcggcaaaccgctaccttcctatattgggcgaaccgtttgccacttccttcggtacgatgctgacgctgaaaatcctgttggcgttcagcgtgttggcgcacttcgccatcgccgtcgtcaaaatggcgcgttccacactgacggtcggctggtcgaaatacatacacgccgtcgtctttacccatatgctgctgattgtctttttggcaaaagcgatgttttatatcagctggtaa

SEQ ID NO: 46110 - DNA, 201 bp, Neisseria meningitidis
ttgcggcatttatcggaaaaaacagaaaccgctctgccgtcattcccgcgcaggcgggaatccagccttgtcggtacggaaacttatcgggaaaacggtttcttgagattttacgttctagattcccactttcgtgggaatgacgggattttaggtttctgtttttggttttctgtttttgagggaatgatgaaaatttaa

SEQ ID NO: 46111 - DNA, 276 bp, Neisseria meningitidis
ttgtcggtacggaaacttatcgggaaaacggtttctttagattttacgttctggattcccactttcgtgggaatgacggcatcagtctgccgtttacagcacggtttctttagattttacgttctagattcccgcctgcgcgggaatgacgaatccatccatacggaaacctgcaccacgtcattcctacgaacctacatcccgtcattcccacaaaaacagaaaaccaaaaacagaaaccgctctgccgtcattcccgcgcaggcgggaatctag

SEQ ID NO: 46112 - DNA, 204 bp, Neisseria meningitidis
atgtatagtggattaacaaaaatcaagacaaggcgacgaacccgcctccctcctgaaaaacgcaaaaaatgccgtccgaaaacctttcggacggcattttcgcgtgaaccgtcattcccacaaggacataaaaccaaaacagaaaaccaaaaacagaaacctaaaattcgtcattcccacgaaagtgggaatctagttcgttga

SEQ ID NO: 46113 - DNA, 1449 bp, Neisseria meningitidis
atgaaaggcgatattggcgtaatcggtttggcggttatggggcaaaacctgattttgaatatgaacgattgcggatttaaggttgtcgcctacaaccgaacaatcggtaaggtggacgaatttttaaacggcgcggcaaaagggacgggcattatcggcgcgtattccctgcaagacttggtcgataagctggaaaaaccgagaaaaatcatgatgatggttcgcgcaggttcggtggttgacgactttatcgaacaactgcttccgttgttggaaaaaggcgacatcattatcgacggtggcaatgccaattaccccgacacgacacggcggacacattaccttgccgaaaaagggattttgtttgtcggcatgggggtctccggcggagaggaaggtgcgcggcacggcccgtctatcatgccgggcggagatgagcgcgcatgggaagctgttaaaccgattttccaggcgattgctgcgaaaacccctcaaggtgagccgtgttgcgattgggtcggcagggatggtgcgggacatttcgtcaaaatggtgcataacggcatcgaatacggcgatatgcagttgatttgcgaagcgtaccagttcatgaaagacggtttgggactgtcctacgacgaaatgcaccgcgtgtttgccgagtggaacaaaaccgagctggattcttatctgattgaaatcacagcggcaattttgggctataaggacgaaggcggcgaaccgctggtcgagaaaatcctcgatacggcagggcaaaaaggcacgggcaaatggacgggcatcaatgctttggatttgggtattccgttgacgctgatttccgaagcggtattcgcccgctgcgtttcgtcgttcaaagaacagcgcgtgcagaccggcaagctgttcgcccgaaccgttacgcccgtcgaaggcggcaaacaagaatgggttgaggcgttgagacaggccctgcttgcatccaaaatcatttcctacgcacaaggctttatgctgatccgcgaagcgggcgaaagctacggctgggatttggactacggcaacactgcgctgctgtggcgcgaggggtgcatcattcgcagcgcattcttaagcaatatccgcgacgcgtatgaaaacaatcccgatttggtgttcttgggtgcggatccgtatttcaaaaatattttggaaaactgcctgccggcgtggcgcaaggtggttgctaaggcggtcgaatgcggcatccctatgccttgcatggcttcggcgattacgttcttggacggctacacgaccgaacgtctgcctgccaatctcttgcaggcacagcgcgactacttcggcgcgcacacttacgaacgcaccgacaaaccgcgcggcgagtttttccataccaactggacgggcaagggcggagataccgcttcgacaacctacgatatttga

SEQ ID NO: 46114 - DNA, 117 bp, Neisseria meningitidis
atgatttttaaaataaaaaaaagttacccacagaaaatttctcctatcaatataatcatcgtttttttatttaatttttatattttatttataagccttcagggaaacgcacggtaa

SEQ ID NO: 46115 - DNA, 1212 bp, Neisseria meningitidis
ttggacaaacgctccggaagtgccccggcatatcgggcgcatcggggcgagcgtttcggcaagccgtatccgaatcccgttaccggcgcggtttggatacacgccgtttcggtcggggaaacgcgtgccgcccaacctttgatacgcgagttgcggcagcgttttcccgatgcgccgctgctgatgacgcagatgaccccgacgggacgggaaaccgcgcaagttctgtttcccgatgcgcaatgccgctatcttccgtatgacaaaaaaacgtgggtacggcagtttttgcgcgaacaccgcccgatgttcggcgtattgatggaaacggaaatctggcccaacctaatgaaggaatgccggcgcgcgggtgtgccgctgtttttggcgaatgcgcggctgtcggaaaaatcgttgaacggttatctgaaagtccgcagcctgatccgtcctgctgtcgcttcgctgacgggctgtctggtacagacggaggcggatgcggcgcggttggcgaaattgggcgcggcatccgtgcaggtgtgcggcaataccaaatacgacctgatgccgtcggaacagatgaaaacgctggcggggcagtttgaaaaacgcatcggagaccggccggttgccgtgtgcggcagcacgcgcgtttatcggggtgaagacgaggcggagaaactgctggcggcgtggcaacaatatcgcggcgatgccctgctggtcgtcgtgccgcgccatcccgagcattttcagacggcatttgaaacggcaaaacgcttcgggtttaaggttcagcggcgcagcgacggtttgccggtcgaacccgatacgcaggtgtggataggcgacagtatgggcgagctgtatgcgtattacctgtgcgccgatgttgcttttgtcggcggcagtctggtcgattcgggctgtcagaacatcatcgaaccgctttcctgcggcgttccgacgatattcggcttttcgacctacaatttttccgaagcctgccggcacgccttggcatcgggtgcggcggttcaagtcgaatcggcggacgcgtggcgggaagccgttgaaaaaaccttatcgtacgaggggggcggaatgcagatgcaggcgcgcgtggacggctttatcgcacaacatcgcggagcgggcgcgagaatcgccgaggcggtgcgggaagcggtatgcggacatcgggggcgatag

SEQ ID NO: 46116 - DNA, 189 bp, Neisseria meningitidis
atgacggcagagcggtttctgttttttccgataaatgccgcaatctcaaatcccgtcattcccactttcgtgggaatgacggaatgtaggttcgtgggaatgacgcggtacaggtttccgttacgtatccccatccgaaagtttatttatacacaagcaatccaaagttatctgactgaaatattgtga

SEQ ID NO: 46117 - DNA, 153 bp, Neisseria meningitidis
  misc_feature 138, 139, 140, 141, 142: 'n' is a, c, g or t
ttgataacggacgcgccgtttcctgccgcccgaaaggtttcagacggcaggggttgcggttatttgcccgctttgagcccttgccacagcttcacgcccagtttggcggattccgcggatttgggcgatacgatgaannnnncacacacttaa

SEQ ID NO: 46118 - DNA, 768 bp, Neisseria meningitidis
  misc_feature 745, 746, 747, 748, 749: 'n' is a, c, g or t
atgacagaatatcccggcatcgggtcgccgttgttttacggcgttttttttgcggcagtgctggtcatgattgccttggatatgttttcgctgaagaaaaacggcagccataaagtcggcgtcaaagaagccttggcatggagcggcttgtgggttgccgtatcctgcctgttcgcgggctggctgtatttcgaactcgccggcaatctcggctacggcgcggcagtcgcaaaagaaaaagtattggaattctttaccggctacattttggaaaaatcgttggcagtcgacaatattttcgtgttcctgatgatattcggctacttcaaagtcgcaccacagtttcagcaccgcgtgctgctgtacggcgtattgggcgcattggtattgcgcactgtcatgattttcgtcggcgcggcactggttcggcagttcgagtggattctgtatctgttcggcgcgttcctgctctataccggcatacacatgatgaagcccgaaggcgatgaggaagaggatttggcaaacagcaggctgctgaatgccgtcaagaaagtcgttccggtcggcacggaatttcacggcgagaaattttttaccgtcgaaaacggcaaaaaaatcgccacgccgctgtttttggtgctagtcatgattgaattgagcgatgtcgtgtttgccgtggacagcatccccgccgtctttgccgttaccaccgatccgtttatcgtgctgacctccaatattnnnnncacacacttaattaattaa

SEQ ID NO: 46119 - DNA, 924 bp, Neisseria meningitidis
atgctgcaaagaactttggcgaaatccatcagcgttaccggagtcggcctgcattccggcgaacgggtcgcactgaccctgcaccccgcgcctgaaaacagcgggatttccttccgccgtaccgatttggacggcgagatgggcgaacaaatcaagctgaccccttatttgatcaacgatacccgcctttcctccaccatcgttaccgacaaaggcgtgcgcgtcggcacgatcgaacacattatgtccgcgctgtccgcctacggtatcgacaacgcgctgattgagctgaacgcacccgaaatcccgattatggacggctccagcctgccgtttatttaccttttgcaagatgcgggcgtggtcgatcaaaaggcgcaaaagcgttttttgaaaatcctcaagcctgtcgaaatcaaagaagcgggcaaatgggtgcgctttacgccgtatgacggctttaaggtaacgctgaccatcgaattcgaccatccggctttcaaccgcagctcgcccacttttgaaatcgatttcgccggcaaatcctacatcgacgaaatcgcgcgcgcgcgcaccttcggctttatgcacgaagtggaaatgatgcgcgcccacaatctgggtttgggcggcaatttgaacaacgccatcgtgattgacgacacggatgtcctgaatcctgaaggcttgcgctatcccgatgagtttgtgcgccacaaaatccttgatgccatcggtgatttgtatatcgtcggacatccgattgtcggcgcgtttgaaggctacaaatcgggacacgccatcaacaacgcactcttgcgcgcggttttggcagacgaaacggcttacgaccgggtggaatttgccgacagcgatgatttgcccgacgcatttcacgagctgaacatcagaaattgtggataa

SEQ ID NO: 46120 - DNA, 504 bp, Neisseria meningitidis
  misc_feature 489, 490, 491, 492, 493: 'n' is a, c, g or t
ttgctggattttcttagtaaagatgatattgatatgccggatgtggtttttttaaatgcggttaaatatgataagggaagtgtttcacattttggcgaagattatcagcctgaaaaaatactcaatcaatccaaagtcgaagttttgaaaggattatgccgatttagaaaatttccgggttcggcgtgtaataagattataaaaagggaattgattatcaaagaaaaactgttttttgaaaaagaggtttatgccgaagatatcgaatggtcaatgagattatttaatgcggcaacaactttttcttatttggacggttgttattactattatcggcagggaagaaaagattctaaaacaggaactgtttcggaaaaaagtataaagtcattattatatattttggagaaaaatgcggaaatggaatttaatagggatatatcaagttatctttattcttttctttcctacgaatatctcgttttgctnnnnncacacacttaa

SEQ ID NO: 46121 - DNA, 126 bp, Neisseria meningitidis
ttgtggataacgctttctgttttttccggtaaattcctaaaacttaaattttcatcattcctacaaaaacagaaaaccaaaatcagaaacctaaaattcgtcattcccacgaaagtgggaatctag

SEQ ID NO: 46122 - DNA, 354 bp, Neisseria meningitidis
atggatttaagtatcgtagttcccatttataatgtcgaaagttatttggaagcgtgtttaagttccatagaacctatattaagtaatgaaaatgtcgaacttatccttgtgaatgacgggtcaaaagacggaagtgaagatatatgttataaatatatagataaaacaacaaacaacaaacaacaaacaacaaacaacaaacaacaaacaacaaacaacaaacaacaaacaacaaacaacaaacaacaaacaacaaacaacaaacaacaaacaacaccagataccgaacaccaaacatcaaatatatatatcaggataaccaagggacggcagaagctaggaataccggaataa

SEQ ID NO: 46123 - DNA, 159 bp, Neisseria meningitidis
atggtcgcgccggtgcgcccgaatccgccgaaagacggcaagacggccacgctgttggaacacgccgccgagtttggcggctatgttgccgaactggaaaatcaaaatcaggcttggcgcgactgggcgggcaatcactcccgcaaagtcggaaactga

SEQ ID NO: 46124 - DNA, 1143 bp, Neisseria meningitidis; identical to SEQ ID NO: 39151

SEQ ID NO: 46125 - DNA, 1794 bp, Neisseria meningitidis; identical to SEQ ID NO: 45016

SEQ ID NO: 46126 - DNA, 1641 bp, Neisseria meningitidis
ttgtctttaccgtacaaacgctggcactatttcaacctgataaaaaacagccttcaaaaaggttgcttaaaacagcagcagacacttaccgccacaaccttgaaaaggaacacaatcatgaccgtcatcaaacaggaagactttatccaaagcatttgcgatgccttccaattcatcagctactaccatccgaaagactacatcgacgcgctttataaggcgtggcagaaggaagaaaaccccgccgccaaagacgcgatgacgcagattttggtcaacagccgcatgtgtgccgaaaacaaccgccccatctgccaagataccggtatcgcgaccgtcttcctcaaagtcggtatggatgtgcagtgggatgcggacatgagcgtcgaagaaatggttaacgaaggcgtgcgccgcgcctacacttgggaaggcaacaccctgcgcgcctctgtcctcgccgatccggccggcaaacgtcaaaacaccaaagacaacacccccgccgtcatccatatgagcatcgtgccgggcggtaaagtcgaagtaacctgcgcggcaaaaggcggcggctctgaaaacaaatccaaactcgccatgctcaatccttccgacaacatcgtcgattgggtattgaaaagcatcccaaccatgggcgcaggctggtgtcctcccggcatcttgggcatcggcatcggcggcacgcccgaaaaagccgtgctgatggcaaaagagtccctgatgagccacatcgacattcaagagttgcaggaaaaagcagcgtcaggtgcagaattgtccaccaccgaagccctgcgcctcgaactctttgaaaaagtcaacgcgctaggcatcggcgcgcaaggcttgggcggtctgaccaccgtgttggacgtgaaaatcctcgattacccgacccacgccgcctccaaaccgattgccatgattccgaactgcgccgccacccgccacgtcgaatttgaattggacggctcaggccctgtcgaactcacgccgccgcgcgtcgaagactggcccgatttgacttacagccccgacaacggcaaacgcgtcgatgtcgacaagctgaccaaagaagaagtggcaagctggaaaaccggcgacgtattgctgttgaacggcaaaatcctcaccggccgcgatgccgcacacaaacgcctcgtcgatatgctcaacaaaggcgaagaattgcccgtcgatttcaccaaccgcctgatttactacgtcggccccgtcgatccggtcggcgatgaagtcgtcggtccggcaggtccgaccacagccacccgcatggacaaattcacccgccaaatgctcgaacaaaccggcctcttgggcatgatcggcaaatccgagcgcggcgtggccacctgcgaagccatcgccgacaacaaagccgtgtacctcatggcagtcggcggcgcggcgtatctcgtggcaaaagccatcaaatcttccaaagtcttggcgttccccgaattgggcatggaagccatttacgaatttgaagtcaaagacatgcccgtaaccgtcgccgtagatagcaaaggcgaatccatccacgccaccgccccgcgcaaatggcaggcgaaaatcggcatcatccccgtcgaatcttga

SEQ ID NO: 46127 - DNA, 219 bp, Neisseria meningitidis
atgcttaaaaccctgacttttgccgcactgcatttcagcaccgccttcagtataacctatgtactgacgggcagtataggcatatccggggcggtcgcgctggtcgagcccctaatcaacaccgtcgttttctatttccatgaaaaagcatggaacctttacgaaaaaaataaaacagtccaacaaacacagccgtttcagctgcaccgatgcagctga

SEQ ID NO: 46128 - DNA, 1545 bp, Neisseria meningitidis; identical to SEQ ID NO: 45945

SEQ ID NO: 46129 - DNA, 1014 bp, Neisseria meningitidis; identical to SEQ ID NO: 44478

SEQ ID NO: 46130 - DNA, 201 bp, Neisseria meningitidis; identical to SEQ ID NO: 40425

SEQ ID NO: 46131 - DNA, 357 bp, Neisseria meningitidis
atggataaaatctttttgcacggcatgaaggcagatacgcttatcggcgtgtacggctgggaacgcgaacggttgcagaccctgattgtcgatttggacatcggcgttcccgagaaagcgggttcggacgacgatattgccaatacggtgcattatgccgaggtatgcgaaacgctgcgccgacatctgaaagaacaggatttcctgcttttggaagcgttggcggaatatattgccgatttagttttgggatatttcggcgcggtgtgggtgcgcgtgaaaatcgtcaagccgggtattttggaaggcgtgcgcgaggttggcgtggaaatcgagcgcggcaagcgtgaagattga

SEQ ID NO: 46132 - DNA, 1935 bp, Neisseria meningitidis
atgagcttgatcgaatgtaaaaacatcaaccgctatttcggcagcggcgagaaccgcgtccatattttgaaagacatcagcctgtcgatagagaagggcgattttgtcgccatcatcgggcagtccggttcgggcaagtccacgctgatgaacatactcggctgtttggataccgccggttccggttcgtaccgaatcgacggcatcgaaactgccaaaatgcagcctgacgagctggcggcattgcgccgcgaacgcttcggtttcatcttccaacgctacaacctcttaagctcgctgaccgcaagggacaacgtcgcgctgccagccgtgtatatgggcgcgggcggcaaagagcgttccgcgcgtgcggagaagttgttgcaggatttgggtttggcaagcaaagagggcaacaagcccggcgaactctcgggcggacagcagcagcgcgtctccatcgcccgcgccctgatgaacggcggagaaatcatcttcgccgacgagccgaccggcgcgctcgataccgccagcggcaaaaacgtgatggaaatcatccacaagctgcacaaagccgggcataccgtcattatggtcacgcacgaccccggcatcgccgccaatgccaaccgcgtcatcgaaatccgggacggcgaaatcatttccgacacctcgaaaaatcccgaaatccccgcaagcaatgtcgggaggattcgggaaaaagcctcgtggtcgttttattacgaccagtttgtcgaagccttcagaatgtcggtgcaagcagtattggcgcacaaaatgcgttcgcttctgacgatgctcggcatcatcatcggtatcgcttcggttgtctccgtcgtcgcattgggcaatggttcgcagaaaaaaatccttgaagacatcagttcgatagggacgaacaccatcagcatcttcccggggcgcggcttcggcgacaggcgcagcggcaggattaaaaccctgaccatagacgacgcaaaaatcatcgccaaacaaagctacgttgcttccgccacgcccatgacttcgagcggcggcacgctgacctaccgcaataccgacctgaccgcttctttgtacggcgtgggcgaacaatatttcgacgtgcgcggactgaagctggaaacggggcggctgtttgacgaaaacgatgtgaaagaagacgcgcaggtcgtcgtcatcgaccaaaatgtcaaagacaaactctttgcggactcggatccgttgggtaaaaccattttgttcaggaaacgccccttgaccgtcatcggcgtgatgaaaaaagacgaaaacgctttcggcaattccgacgtgctgatgctttggtcgccctatacgacggtgatgcaccaaatcacaggcgagagccacaccaactccatcaccgtcaaaatcaaagacaatgccaatacccaggttgccgaaaaagggctgaccgatctgctcaaagcgcggcacggcacggaagatttcttcatgaacaacagcgacagcatcaggcagatagtcgaaagcaccaccggtacgatgaagctgctgatttcctccatcgccctgatttcattggtagtcggcggcatcggcgtgatgaacatcatgctggtgtccgttaccgagcgcaccaaagaaatcggcatacggatggcaatcggcgcgcggcgcggcaatattttgcagcagtttttgattgaggcggtgttaatctgcgtcatcggcggtttggtcggcgtgggtttgtccgccgccgtcagcctcgtgttcaatcattttgtaaccgacttcccgatggacatttccgccatgtccgtcatcggcgcggtcgcctgttcgaccggaatcggcatcgcgttcggctttatgcctgccaataaagcagccaaactcaatccgatagacgcattggcacaggattga

SEQ ID NO: 46133 - DNA, 1131 bp, Neisseria meningitidis; identical to SEQ ID NO: 39043

SEQ ID NO: 46134 - DNA, 756 bp, Neisseria meningitidis; identical to SEQ ID NO: 45394

SEQ ID NO: 46135 - DNA, 156 bp, Neisseria meningitidis
ctaaaagaaaattttgcccaaaacggccaaacgctggcgcagtgggcaagagagaacggctttaagccgcgcgatgtgtatctggtggtcggcggacagcgcaaaggcaattacggcaaggggcatgaaattgccaagaagctgggactgaaataa

SEQ ID NO: 46136 - DNA, 369 bp, Neisseria meningitidis; identical to SEQ ID NO: 45830

SEQ ID NO: 46137 - DNA, 1302 bp, Neisseria meningitidis; identical to SEQ ID NO: 38582

SEQ ID NO: 46138 - DNA, 1209 bp, Neisseria meningitidis; identical to SEQ ID NO: 38616

SEQ ID NO: 46139 - DNA, 579 bp, Neisseria meningitidis; identical to SEQ ID NO: 45203

SEQ ID NO: 46140 - DNA, 1788 bp, Neisseria meningitidis; identical to SEQ ID NO: 44498

SEQ ID NO: 46141 - DNA, 627 bp, Neisseria meningitidis
atgacgcaagaacgtttacccgaatttttcgaccgcgccccgacgctgaccgtacaagacccgcttgccgcattcctcggcgcggcgcaagacggcatcctcacttaccgctacgccgatgccgtgcgcctgtgcggacattcctgcccgaccgtcgcgggcgcgtacctgatggttatcaaaggtctgaaagccctttacggcgaagagctgcccgaacgcggcggcatcgaagccgccatgcagggagcgcgcgacgaaggcacggtcggcgtaaccgcgtccgtcgtccaactcctcaccggcgcagcccccgaaaccggcttcggaggcatcggaatgcagggacgcttcgcccgccgtaacctcttatcctttggtgcaggcgaaatcaacggcacactgaccctgcgccgcaaagacaacggtaaaaccgtcgccgtcagcatcaacgccgccctgaaacccttcgcacccgaaatgcgcgaacttatgcccaaagccgtcggcggcagcgcaagcacagaagaactcgaacgcttcggacaactctggcaggcgcgcgttaaagcatttttgaccgaatcggcggacgacccgcagttcgtcatcgtccgcgaagtgtga

SEQ ID NO: 46142 - DNA, 1443 bp, Neisseria meningitidis
atgaaacaattggccatgtacatcaacggacgctttgaaaacgatttcaacggcgaatggcgcgacgtattgaacccatccaccgaagaaaccatcgcccgcgaacccaaaggcggcaaggcggacgttgaccgcgccgtcgcggcggcgcgtgcggcgcaaccggcttgggagcgtctgcctgcggtcgaacgcggcgcgtatttgcgcaaaatcgcccaaggcatacgcgaacgcgccgacgagctgaccgacaccatcgttgccgaaggcggcaaaaccaaagacttggcgcgcgtggaagtcatgttcactgccgattatctcgattaccaagccgaatgggcgcgccgttacgaaggcgaaatcatccaaagcgaccgcccgcgcgaaaacattttattgttcaaacgtccgctgggcgtcgtggcaggcattttgccgtggaacttccccttcttcctgattgcccgcaaaatgggcccggctttggtaacgggcaataccatcgtcgtcaaacccagcagcgtaaccccgatcaactgccacatcttcgccgaaatcgtcgatgcggtcggactgcccgcaggcgtgttcaacgtagtgaacggccctggtgcggaaatcggcaatgccttgtccgcccatccgcaagtcgatatggtcagcctgaccggctccgtcgaagcaggccgccaagtgatggaagccgcctccgccaacatcaccaaagtttcgttggaactcggcggcaaagcccccgccatcgttttgaaagacgcggatttggatttggcggtgaaatccatcttggcttcgcgcgtcggcaacaccggtcaaatctgcaactgcgccgagcgcgtctatgtccacagcagcctgaaagacgcgttcattgaaaaaatgaccgccgccatgaaaggcgtgcgctacggcaaccctgccgaagccgaagcaggcgcgctggaaatgggtccgctgattgaagagcgcgccgtcaaagccgttgccgaaaaagtggaacgggcagtcaaacaaggtgcgaaactggtctgcggcggcaaacgcgccgaagggcgcggctatttcttcgagccgaccctgctgaccgacaccgacaacagtatggacattatgaaagaagaaaccttcggccccgtgctgcccgtttccgctttcgacacgctcgaccaagtcatcgcactggctaacgattgcgagtttggtctgaccagttctgtttatacgactaatttaaacgaagccttctacgttacccgccgcctgcaattcggcgaaacctacatcaaccgcgaaaacttcgaagccatgcagggtttccacgcgggctggaaaaaatccggcatcggcggcgcggacggcaaacacggtttggaagaatatctgcaaacccaagtcgtttatctggaaaccgacatttaa

SEQ ID NO: 46143 - DNA, 924 bp, Neisseria meningitidis; identical to SEQ ID NO: 37161

SEQ ID NO: 46144 - DNA, 1431 bp, Neisseria meningitidis; identical to SEQ ID NO: 45808

SEQ ID NO: 46145 - DNA, 1494 bp, Neisseria meningitidis
atgtttaaacgcagtgtgattgcaatggcttgtattgttgccctttcagcctgtgggggcggcggtggcggatcgcccgatgttaagtcggcggacacgctgtcaaaacctgccgcccctgttgttactgaagatgtcggggaagaggtgctgccgaaagaaaagaaagatgaggaggcggtgagtggtgcgccgcaagccgatacgcaggacgcaaccgccggaaaaggcggtcaagatatggcggcagtttcggcagaaaatacaggcaatggcggtgcggcaacaacggataatcccgaaaataaagacgagggaccgcaaaatgatatgccgcaaaatgccgccgatacagatagttcgacaccgaatcacacccctgcaccgaatatgccaaccagagatatgggaaaccaagcaccggatgccggggaatcggcacaaccggcaaaccaaccggatatggcaaatgcggcggacggaatgcagggggacgatccgtcggcaggggaaaatgccggcaatacggcagatcaagctgcaaatcaagctgaaaacaatcaagtcggcggctctcaaaatcctgcctcttcaaccaatcctaacgccacgaatggcggcagcgattttggaaggataaatgtagctaatggcatcaagcttgacagcggttcggaaaatgtaacgttgacacattgtaaagacaaagtatgcgatagagatttcttagatgaagaagcaccaccaaaatcagaatttgaaaaattaagtgatgaagaaaaaattaataaatataaaaaagacgagcaacgagagaattttgtcggtttggttgctgacagggtagaaaagaatggaactaacaaatatgtcatcatttataaagacaagtccgcttcatcttcatctgcgcgattcaggcgttctgcacggtcgaggcggtcgcttccggccgagatgccgctgattcccgtcaatcaggcggatacgctgattgtcgatggggaagcggtcagcctgacggggcattccggcaatatcttcgcgcccgaagggaattaccggtatctgacttacggggcggaaaaattgtccggcggatcgtatgccctcagtgtgcaaggcgaaccggcaaaaggcgaaatgcttgcgggcacggccgtgtacaacggcgaagtgctgcatttccatatggaaaacggccgtccgtccccgtccggaggcaggtttgccgcaaaagtcgatttcggcagcaaatctgtggacggcattatcgacagcggcgatgatttgcatatgggtacgcaaaaattcaaagccgttatcgatggaaacggctttaaggggacttggacggaaaatggcggcggggatgtttccggaaggttttacggcccggccggcgaagaagtggcgggaaaatacagctatcgcccgacagatgcggaaaagggcggattcggcgtgtttgccggcaaaaaagagcaggattga

SEQ ID NO: 46146 - DNA, 624 bp, Neisseria meningitidis; identical to SEQ ID NO: 36421

SEQ ID NO: 46147 - DNA, 864 bp, Neisseria meningitidis; identical to SEQ ID NO: 39125

SEQ ID NO: 46148 - DNA, 288 bp, Neisseria meningitidis
ttggcactttataaatatcagccgtctagcaagtattttgggcaatcgatggcattaattgctcagaaagaatttgaagaatttgttaataacgtaaaagagtacgatattttagagagtttctcttatttcttaaataagagagtcgcacataatatttggaagatttatttttctgatgaatctgttatttttataagaaaatcagaagagaacggaaaaactgttcatgaattcgtttatcaagagtacaccgatagttctgattttaattctatgttcgagtaa

SEQ ID NO: 46149 - DNA, 1311 bp, Neisseria meningitidis
atggacacttcaaaacaaacactgttggacgggatttttaagctgaaggcaaacggtacgacggtgcgtaccgagttgatggcgggtttgacaacttttttgacgatgtgctacatcgttatcgtcaaccctctgattttgggcgagaccggcatggatatgggggcggtattcgtcgctacctgtatcgcgtctgccatcggctgttttgttatgggttttgtcggcaactatccgattgcactcgcaccggggatggggctgaatgcctatttcacctttgccgtcgttaagggtatgggcgtgccttggcaggttgcgttgggtgcggtgttcatctccggtctgatttttatcctgttcagcttttttaaagtcagggaaatgctggtcaacgcactgcctatgggtttgaaaatgtcgattgctgccggtatcggtttgtttttggcactgatttccctgaaaggcgcaggcattatcgttgccaatccggcaaccttggtcggtttgggcgatattcatcagccgtccgcgttgttggcactgttcggttttgctatggtggtcgtattgggacatttccgcgttcaaggcgcaatcatcatcaccatcttgaccattaccgtcattgccagcctgatgggtttgaatgaatttcacggcatcatcggcgaagtaccgagcattgcgccgacttttatgcagatggattttgaaggcctgtttaccgtcagcatggtcagtgtgattttcgtcttcttcttggtcgatctatttgacagtaccggaacgctggtcggcatatcccaccgtgccgggctgctggtggacggtaagctgccccgcctgaaacgcgcactgcttgcagactctaccgccattgtggcaggtgcggctttgggtacttcttccaccacgccttatgtggaaagcgcggcgggcgtatcggcaggcggacggaccggcctgacggcggttacagtcggcgtattgatgctcgcctgcctgatgttttcacctttggcgaaaagtgttcccgcttttgccaccgcgcccgccctgctttatgtcggcacgcagatgctccgcagtgcgagggatattgattgggacgatatgacggaagccgcacccgcattcctgaccattgtcttcatgccgtttacctattcgattgcagacggcatcgccttcggcttcatcagctatgccgtggttaaacttttatgccgccgcaccaaagacgttccgcctatggtatggattgttgccgtattgtgggcactgaaattctggtatttgggctga

SEQ ID NO: 46150 - DNA, 441 bp, Neisseria meningitidis; identical to SEQ ID NO: 45265

SEQ ID NO: 46151 - DNA, 1218 bp, Neisseria meningitidis; identical to SEQ ID NO: 36335

SEQ ID NO: 46152 - DNA, 1296 bp, Neisseria meningitidis; identical to SEQ ID NO: 44491

SEQ ID NO: 46153 - DNA, 1257 bp, Neisseria meningitidis
ttgggttattgccagggtatagaatccgagctgcctttgatcggctttatttatatcgtattaaaaatattcggaattggaataatggcaacacacggagacgaagtgaaaattcaaaacagacaagaagccgatagcgcaaaagccaaacgcaaacgctgcctgacggcattgacgctgctgttcgcgcttgccgccgcagccgccgggtcggcgttttttttatggtggcagcacgaagaggaaacggaagacgcttatgttgccggacgcgtggttcaggttacgccgcaaaagggcggtacggtgcggaaggttttgcacgacgatacggatgccgtgaaaaaaggcgacgtgctggcggtattggacgacgataatgatgtgctggcttacgagcgggcaaaaaacgagctgattcaggcggtgcggcaaaaccgccggcaaaatgccgccacttcgcaggcgggggcgcaggttgccttgcgccgggcggatttggcacgcgcgcaggatgatttgcgccgccggtctgctttggcggaatcgggcgcggtgtccgccgaagagctggcacatgcccgtgcggcagtgtctcaggctcaggcggcagttaaggcggctttggcggaagaatcttcggcgcgtgcggctttgggcggtcaggtttctttgcgcgaacagccggcggttcagacggcaatcggcaggttgaaagatgcgtggttgaaccttcagcggacgcaaatccgcgcgccggcggacggtcaggtggcgaagcgttcggtgcaggtcgggcagcaggtggcggcaggcgcgccgctgatggcggtggtgccgctgtcggatgtgtgggtggatgctaattttaaagagacgcagttgcggcatatgaaaatcggacagcctgccgagctggtgtccgatttgtacggcaaacaaattgtttatcgcggcagggtggcaggtttttcggcaggtacgggcagcgcgttttcgctgattccggcgcaaaacgcaacgggcaactggattaaagtggtgcagcgcgtccccgtccgtatcgtgctgaaccgcgaagatgtggacaggcatccgttgcgtatcggtttgtcgatgacggttaaagtggatacttccgccgcaggcgcgcctgtttcaaaaacgccgggtgcggcattgccggaaatggaaagtaccgactggtcggaagtcgatcggacggtcgatgaaatcctcgggcaatccgcgccctga

SEQ ID NO: 46154 - DNA, 1560 bp, Neisseria meningitidis
ttggcatcagtaaatgttccgggtaaatttgatagggttgaagtttatgatgatggcagatatttaggtattcgaggttcagatgacaaaagaagaagagtttgggaaggtgtatttgataaagaatcgggaagatatttaaattcagaagctcaagatttaacagttaggcatgtatctactggggcatcaagtactggtaaagttagtgcggttgtatcttcatcagtttcccgcgccggagtcttggcaggagtcggcaaacttgcccgcttaggcgcgaaattcagcacaagggcggttccctatgtcggaacagcccttttagcccacgacgtatacgaaactttcaaagaagacatacaggcacaaggctaccaatacgaccccgaaaccgacaaatttgtaaaaggctacgaatatagtaattgcctttggtacgaagacgaaagacgtattaatagaacctatggctgctacggcgttgacagttcgattatgcgccttatgtccgattacagcagattccccgaagtcaaagaattgatggaaagccaaatgtataggctggcacgtccgttttggaattggcataaagaagaactgaataaattaagttctttggattggaataattttgttttaaatcgttgcacatttgattggaacggcggagattgtgtggtcaataaaggtgatgattacagaaatggggctaatttttcccttagccgcaatccgaaatacaaagaagaaatggatgccaaaaagctggaagagattttatcgttgaaagtcgatgccaatcccgacaaatacataaaggcaaccggatatcccggttattccgaaaaagtagaagtcgcacccggaacaaaagtgaatatgggacccgtcacggacaggaacgggaatcccgttcaggttgtcgcaacattcggcagggattcgcaaggcaacaccacagtggatgttcaagtaattccgcgtcccgacttaacccccggaagcgcggaagcgccgaacgcacagccgctgcccgaagtatcgcccgccgaaaaccccgcaaacaacccggcccccaatgagaaccccggcacgcgtcccaatcccgaacccgaccccgatttgaatcccgatgcaaatcccgatacggacggacagcccggcacaagacccgattcccccgccgttccggatcgcccaaacggtaggcatcgcaaagaaaggaaagaaggcgaagacggcggccttttgtgtaaattcttccccgacattctcgcttgcgacaggctgcccgagcccaatccggcagaagatttaaatctgccgtctgaaaccgtcaatgtagagtttcagaaatccggaatcttccaagattccgcacagtgtcccgcacctgtcactttcacagtgactgtgcttgattcaagcaggcagttcgcgttcagctttgagaacgcatgtaccatagccgaacggctaaggtacatgcttctcgcccttgcttgggcggttgccgcctttttttgtatccgcacagtatcccgtgaagtctag

SEQ ID NO: 46155 - DNA, 768 bp, Neisseria meningitidis; identical to SEQ ID NO: 45850

SEQ ID NO: 46156 - DNA, 582 bp, Neisseria meningitidis; identical to SEQ ID NO: 37778

SEQ ID NO: 46157 - DNA, 312 bp, Neisseria meningitidis; identical to SEQ ID NO: 38411

SEQ ID NO: 46158 - DNA, 840 bp, Neisseria meningitidis; identical to SEQ ID NO: 36521

SEQ ID NO: 46159 - DNA, 1227 bp, Neisseria meningitidis
atgccgtctgaaactttccggagtaagaaaatgtcccaaaaattgatcttggttttgaactgcggcagctcgtccctcaaaggcgcggtcctggataacggcagcggcgaagtcctgctcagctgccttgccgaaaaactcaacctgcccgatgcctacatcacattcaaagtaaacggcgaaaaacacaaagtcgatctgtccgcacatcccaaccacaccggcgcggtcgaagccctgatggaagaactcaaagcccacggcctcgacagccgcatcggcgccatcggccaccgcgtcgtcagcggcggcgaactgtacagcgaatccatcctcgttgacgacgaagtcattgccggcatcgaaaaatgcatcccgctcgcccccctgcacaaccccgcccacctcttgggcctgcgtgccgcgcaaagcattttcaaagacctgcccaacgtcgtcgtattcgatacctccttccaccaaaccatgcccgaagtcgcctacaaatacgccgttccgcaggagttgtatgaaaaatacggcctgcgccgttacggcgcgcacggtaccagctaccgcttcgtcgccgacgaaaccgcgcgcttcctcggcaaagacaaaaaagacctgcgtatggtcattgcccacttgggcaacggcgcgtccattaccgccgtcgccaacggcgaatcgcgcgacaccagtatgggcctgaccccgctggaagggctggtaatgggtacgcgcagcggcgacatcgatccttccgtattcggctttctcgccgaaaacgccaatatgaccatcgcccaaatcactgaaatgctgaacaaaaaatccggtctgctcggcatttccggcctgtccaacgactgccgcaccattgaagaagaagccgccaaggggcataaaggcgcgaaattggccttggatatgtttatctaccgccttgccaaatacatcggcagtatggcggttgccgcaggcggtttggacgcactggtctttaccggcggcatcggcgaaaactccgacatcatccgcgaacgcgtgatcggctacttgggcttcctcggtctgaacatcgaccaagaagccaacctgaaagcccgcttcggcaacgccggcgtgattaccactgccgacagcaaagccgttgccgtggtcattccgaccaacgaagagctgatgattgcccacgacactgcccgtttgagcggtctgtaa

SEQ ID NO: 46160 - DNA, 843 bp, Neisseria meningitidis
ttgatacaattccgcctttccaacacgcgcaatcatctttatatgaaaaccaagttaatcaaaatcttgaccccctttaccgtcctcccgctgctggcttgcgggcaaacgcccgtttccaatgccaacgccgaacccgccgtcaaagccgaacccgccgtcaaagccaagtccgccggcaaatccgttgccgcctctttgaaagcgcgtttggaaaaaacctattccgcccaagatttgaaagtgttgagcgtcaatgaaacaccgattaaaggcatttacgaagttgtcgtcagcggcaaacaaatcatctataccgatgccaaaggcgactatatgcttgttggcgacctcatcaacgtcaacacgcgccaaagcctgactgaagaacgcgccgccgatttgaacaaaatcgactttgcttccctgcctttggacaaagccatcaaagaagtgcgcggcaacggcaagctgaaagtcgccgtcttctccgaccccgattgtccgttctgcaaacgcttggaacacgagtttgaaaaaatgaccgacgtgacggtttacagctttatgatgcccattgccggcctgcaccctgatgccgcgcgcaaggcgcaaatcttatggtgtcagcccgaccgcgccaaagcgtggacggattggatgcgtaaaggcaaattcccggtcggcggcagcatctgcgacaatcccgtcgcggaaaccacttccttgggcgaacaattcggcttcaacggcacgccgaccctcgtcttccccaacgggcgcagccaaagcggctacagcccgatgccccaactggaggaaatcatccgcaaaaatcaataa

SEQ ID NO: 46161 - DNA, 330 bp, Neisseria meningitidis
ttgcaagcgttggcaaacagcaggactttcgtttatgacagttcggaagaccaagatttttttgataccgaaaaatttcggcaacgctatgaggattgggttgccaaactatgcgggaacttgggctataaaaccagacgcgccctatttaaaaacatgatgagcggggatatttggctgcacaacggctgcctgaaaatcagcccgagccgccatgtcaagctggaagcgtgggatgccattgatgcagacgatgtcattttatcattggataacagccctgaagaaatcggagcaggtttaaagttggcattgagccgctgccgatag

SEQ ID NO: 46162 - DNA, 546 bp, Neisseria meningitidis; identical to SEQ ID NO: 45159

SEQ ID NO: 46163 - DNA, 1485 bp, Neisseria meningitidis
atgtcgaaacctgtttttaagaaaatcgcactttatactttgggtgcaatcagcggcgtggccgtcagtctggcggtgcagggttttgccgccgagaaggacaggcgggataacgaagtcctgccggtgcaatccatccgcacaatggcggaggtttacggtcaaatcaaggcaaactactatcaggacaaacccgatgccgatttgtttgaaggtgcgatgaagggtatggtggccggtttggatccgcattccgaatatatggataaaaaaggttatgccgagataaaggagtccaccagcggcgaatttggcggcttggggatggaaatcgggcaggaagacggatttgtcaaagtggtttcgccgattgaggacacgcctgcggaacaggcgggggtgaaaagcggcgatttcattgtgaaaatcgataatgtttcgacacgcggcatgacggtcagcgaagcggtgaagaaaatgcggggcaagccgggtacgaagattactttgacgctgtcgcgcaaaaatgccgacaagccgatagtcgtcaacctgacccgtgccattattaaagtgaaaagcgtccgccatcacctgatcgaacccgattacggctatatccgcgtgtcgcagttccaagagcggacggtcgaaagcgtcaataccgccgcaaaagagctggtaaaggaaaataaaggaaaaccgctcaaggggctggtgttggatttgcgcgacgaccccggcgggcttttgaacggcgcggtcggcgtgtcggcggcgtttttgccgcctgaagcagtcgtcgtcagcaccaagggacgcgacggcaaagaccgcatggtactgaaagccgttcctgaggattatgtgtacgggatgggcggcgatccgttggcgggcattcctgccgagttgaaaaccgttccgatgacggtgttgattaattccggttcggcttccgcgtcggagattgtcgcaggtgcattgcaggatcacaaacgcgcggtcatcgtcggtacgcagagcttcggcaaaggttcggttcagactttgattcctttgtccaacggcagcgcggtcaagctgacaacggcactgtattatacgccgaacgaccgttctattcaggcgcaggggattgttcccgatgtcgaagtaaaagataaggaacgcatttttgaaagccgcgaggcggatttggtcggacacatcggcaatcctttgggcggcgaggatgtgaacagtgaaacccttgccgtgccgcttgaaaaagatgcggataagcccgctgtaaaagaaaaaggtaaaaagaaaaaggacgaggatttgtcttcaaggcggattcccaaccctgccaaagacgaccagttgcggaaagctttggatttagtcaagtcgcccgagcagtggcagaagtctttggggctggcggcgaaaaagccggtttcaaataaagataagaaagataaaaaagataagaagtag

SEQ ID NO: 46164 - DNA, 237 bp, Neisseria meningitidis
atgatggaagcaacagtctatcttgaagataatgaatacatcgctttatgcgacctgttgaaactggccggtcttgctgaaagcggcggacaggcaaaagcgtttatcgccgaagggctggtgttgcgcaacggcgaaaccgaaacccgtaaaaccgccaaaatacgcggcggcgaagtgattgaatttgacggcgcacgcttggaaattgccgatggatacgaccctgaagaataa

SEQ ID NO: 46165 - DNA, 2703 bp, Neisseria meningitidis
atgcaactgcatattctgaacaatccgaaggacgcggctttggcggcggacgcggaatttctgaaacaatccctgttcaacctcctgcacgaagaagcctcgccattggttgtcgaaacggtcaaactcttgtccacttccgacgacagcgcggcattgattgaaaaagtattgccgcaattggacgaacaacaaacccacgatttaaccttggcctgcggcctgttcgcccagattttgaatatcgccgaagacgtgcaccacgaacgccgccgccaaatccacgaagaagccggacgcggcggcgcggaaggcagcctgacggaaaccgtccgcaggctcaaagcggggaaagccgacggcaaatcggtgcagcggcagttggacaatacgtccgttaccgccgttttgaccgcgcacccgaccgaagtgcaacgccaaaccgtcttaagcttcaaccgccgcatccgcgcactgttgccgcaacgcgaacgctgcaccaatgccgacgcgctggcacggctgcgccgcgaaatcgacactatcctgctgggcttgtggcagaccagcgaaacgcgccgccacaaactcagcgtcaacgacgaaatcaacaacggcgtgtccatcttcccgatgagctttttcgaagccctgcccaagctctaccgcaatatggaacacgactttcagatggtctatcccgatgtctgcgttccgaatatcctcaaaatcggcggctggatcggtggcgaccgcgacggcaatccgttcgtttctgccgaaaccttgcgttttgccttccgccgccacgccgatgccgtgttccgtttttaccgtggcgaactcgacaaactttaccgcgaactgccgctctccatccgccgcgtcaaagtcaacgacgacgtaatggcactggcagccctctcgcctgacgaagaacttgcccgcacggaagaaccctaccgccgcgccattgcttacatcatggcgcgcgctatgggcaaagcgcgcgcgctcggtttgggcatgggctgcaaattcggctttctcgagccgtatgcttcggcacaagaatttctcgatgatttgaaaaaattgcaacgttcccttatcgacaacggcagccgcctgcttgccgaaggccgtttggcagacctcatccgttccgtgtccgtgttcggcttccacatgatgccgctcgacctgcgccaacacgcaggcaaacacgccgatgtggttgccgagcttttccaacacgcaggcttggaagactacaacagcctgaacgaagaacaaaaacaagccgtcctgttgcgagaattgagccatcaacgtccgctgtacagcccgttcatcacatacagcgaccatacccgccacgaactggcaattttcaacgaagcgcgcaaaatcaaagacgaatttggcgaagatgccgtaacacaaagcattatttccaactgcgaacaacccagcgacctgctcgccttggcattgctgctgaaagaaagcggcctgttggcggtggaaaacggcaaaccgcacagccgcatcaatatcgtgccgctgtttgaaaccatcgaagcactcgaaaacgcctgtccggtcatggaaaccatgttccgcctcgattggtacgatgccctgctcgaaagccgcggcaacatccaagaaattatgctcggctactccgactccaacaaagacggcggctatgttaccagctcatggtgtctgtatcaggcggaattgggcttggtcgaactcttcaaaaaatacgatgtccgcatgcgcctgttccacggtcgcggcggcagcgtcggacgcggcggcggcccgtcttaccaagccattctcgcccaaccggcgggcagcgtggcgggacaaatccgcattaccgaacaaggcgaagtcattaccgccaaatacgccgaccccggcaatgcccaacgcaacttggaaaccttggttgccgcgactttggaagccagcatcctgccggataaaaaagaccctgatgccaaactgatgcaggcattgtcggacgtatcgttcaaatactaccgcgaactgattacccatcccgacttcatcgactacttcctgcaaaccagcccgattcaggaaatcgccaccctcaacctcggcagccgtcctgccagccgcaagaccttagcgcggattcaagacttgcgcgcgattccgtgggtattttcctggatgcagaaccgcctcatgctgcctgcttggtacggtttcggcagcgcggtggaaaccttgtgcgaaggcaatcccgacacactgaccgccctgcgcgaacatgcccaaagcaatccgttcttccaagccatgctctccaatatggagcaagtgatggcgaaaaccgacatcaccctcgcggaaaactatgccggcttgagcgaatcgcccgataaggcaaaaatcatcttcgggatgattaaggaagaataccgccgcagccgcaaagcactgctcgacctgctgcaaaccgaagagcttttgcgcgacaaccgcagcctcgcccgttcgctcgctttgaggattccatacctgaacgcgctcaacggtttgcaagtcgccatgctcaaacgcctgcgtaaagaacccgacaatccgcacgcccttctgatggtgcacctgaccatcaacggcgtggcgcaaggtttgcgcaatacaggctga

SEQ ID NO: 46166 - DNA, 855 bp, Neisseria meningitidis
atgccgcccatccctgccccatccgcaccatccgagcacactgtcgcatgggtattcggccaacccgttaccgatttgccgcaggatttgtttatcccgcccgacgcgctgaaagtcgtattgggcagttttcaaggccctttggatttgctgctctaccttatccgcaagcagaacatcgatgttctcgatattccgatggtgaagattaccgagcagtatctgcactacatcgcccaaatagaagcctatcagtttgatttggcggcggaatacctgcttatggcggccatgctgattgaaatcaaatcgcgcctgctgctgccgcgtaccgaaaccgtcgaagacgaagaagccgacccgcgtgccgagttggtgcgccgcctgctggcttacgaacagatgaagctggcggcgcagggtttggacgcgctgccccgagccggacgggatttcgcgtgggcttacctgccgctggaaattgccgtcgaagccaagctgcccgaagtctatattaccgacttgacgcaagcgtggctgggtattttgtctcgggcaaaacacacgcgcagccacgaagtaatcaaagaaaccatctccgtgcgcgcgcaaatgacggcaatcctgcgccgtttgaacggacacgggatatgcaggtttcacgacctgttcaatcccgaacagggcgcggcttacgtggtcgtcaacttcatcgcactgttggagcttgccaaagaaggtttggtcggaatcgtacaggaagtcggtttcggagaaatccgaatcagcctcaatcatgagggggcacattcagacggcatttccggcacacggggcgggcgcgatgtgttctaa

SEQ ID NO: 46167 - DNA, 624 bp, Neisseria meningitidis
atgaacagaagaaccttcctcctcggcgcaggcgcgttgctccttaccgcctgcggcagaaaatccgcccgaacccacgccaaaattcccgaaggaagcaccgtacttgccttgggcgattcgcttaccttcggctacggcgcaaaccctggcgaatcctaccccgcgcaactgcaaaaactgacgggttggaatattgtcaacggcggcgtatcgggcgatacatccgcccaagccctgtcgcgcctgcccgcgctgttggcacgcaaacccaagcttgtgattgtcggcataggcggcaacgactttctgcgcaaagttcccaaggagcagacccgcgccaatatcgcgaaaatcatcgaaaccgtgcagaaggaaaacatccccgccgtcctcgtcggcgtgccgcacatcacactgggcgcgttgttcgggcatttgagcgatcatccgctgtatgaggatttgtccgaggaatacggcattccgctgttcggcggcgcgtgggcggaaattttgggcgataataatctgaaatccgaccaaatccacgccaacggcaaaggctatcggaaatttgccgaagatttgaatcaatttttgagaaaacaggggtttagataa

SEQ ID NO: 46168 - DNA, 225 bp, Neisseria meningitidis
atgaaaaaaattaccccgaaatcgtttgaagaagccttgtcgcgccttgaatcgctgacgcagtctatgcagggtgaaatgcccttggaagacgcgcttgccgcctatcaggaaggcaacgagctggtcaggtactgccaaaccaagctggcacaagtcgaacagaaattacaggttttggatgcggacgggccgaaggagttgaaccttgaatccgacgaatga

SEQ ID NO: 46169 - DNA, 1020 bp, Neisseria meningitidis
atgaaaaaaattctcgttaccggcggcaccggttttatcggctcgcataccgttgtttctttgctgaaaagcggccatcaagtcgtgattttggataacctatgcaattccagcatcaatatcctgccacgcttgaaaacgattaccggccaagagattccgttttatcaaggcgatatccgcgatcgtgagattttgcgccgtatttttgcggaaaaccgcattgattcggtgattcattttgccggcttgaaagcggtgggtgaaagtgtggccgagccgatgaaatattatgataataatgtttccggcagcttggtgttggcggaagaaatggcgcgtgccggcgtatttaagattgtgttcagctcatcggctacggtttacggcgatccgggcaaagtgccttatacggaagatatgcaaccgggggatacgaccagcccttacggcacatctaagtctatggtggagcgcattttgacggatatccaaaaggccgatccgcgttggagcgtgattttgttgcgctatttcaacccgattggggcgcacgaaagtggtttgattggcgagcagccaaacggcatcccgaataatttgttgccttatatctgccaagtggcggcaggcaaactgccgcaattggcggtatttggcggcgattatccgacccccgacggtacgggaatgcgcgactatattcatgtgatggatttggcagaaggccatgtcgcggctatgcaggcgaaaagcaatgtagcaggcacgcatttgttgaacttaggttccggccgcgcttcttcggtattggaaatcatccgcgcatttgaagcagcttcgggtttgacgattccgtatgaagtcaaaccgcgccgtgccggtgatttggcgtgcttctatgccgacccttcctatgcaaaggcgcaaatcggctggcaaacccagcgtgatttaacccaaatgatggaagactcatggcgctgggtgagtaataatccgaatggctacgacgattaa

SEQ ID NO: 46170 - DNA, 1296 bp, Neisseria meningitidis; identical to SEQ ID NO: 44273

SEQ ID NO: 46171 - DNA, 435 bp, Neisseria meningitidis; identical to SEQ ID NO: 40706

SEQ ID NO: 46172 - DNA, 291 bp, Neisseria meningitidis; identical to SEQ ID NO: 39909

SEQ ID NO: 46173 - DNA, 1047 bp, Neisseria meningitidis
atgccgtctgaagccttcagacggcatcgtgcctatcgggagaataaattgcagcctttagtcagcgtattgatttgcgcctacaacgtagaaaaatatttcgcccaatcattagccgccgtcgtgaatcagacttggcgcaacttggagattttgattgtcgatgacggctcgacagacggtacgcttgccattgccaaggattttcaaaagcgggacagccgtatcaaaatccttgcacaagctcaaaattccggcctgattccctctttaaacatcgggctggacgaattggcaaagtcaggaatgggggaatatattgcacgcaccgatgccgacgatattgccgcccccgactggattgagaaaatcgtgggcgagatggaaaaagaccgcagcatcattgccatgggtgcgtggctggaagttttgtcggaagaaaaggacggcaaccggctggcgcggcaccacgaacacggcaaaatttggaaaaagccgatccggcacgaagatattgccgactttttccctttcggcaaccccatacacaacaacacgatgattatgaggcgcagcgtcattgacggcggtttgcgttacaacaccgagcgggattgggcggaagattaccaattttggtacgatgtcagcaaattgggcaggctggcttattatcccgaagccttggtcaaataccgccttcacgccaatcaggtttcatccaaatacagcatccgccaacacgaaatcgcgcaaggcatccaaaaaaccgccagaaacgattttttgcagtctatgggttttaaaacccggttcgacagccttgaataccgccaaataaaagcagtagcgtatgaattgctggagaaacatttgccggaagaagattttgaacgcgcccgccggtttttgtaccaatgcttcaaacggacggacacgccgcccgccggcgtgtggctggattttgcggcagacggcaggatgcggcggctgtttaccttgaggcaatacttcggcattttgcaccgattgctgaaaaaccgttga

SEQ ID NO: 46174 - DNA, 273 bp, Neisseria meningitidis; identical to SEQ ID NO: 44810

SEQ ID NO: 46175 - DNA, 312 bp, Neisseria meningitidis; identical to SEQ ID NO: 39965

SEQ ID NO: 46176 - DNA, 1263 bp, Neisseria meningitidis; identical to SEQ ID NO: 45630

SEQ ID NO: 46177 - DNA, 321 bp, Neisseria meningitidis; identical to SEQ ID NO: 41574

SEQ ID NO: 46178 - DNA, 1356 bp, Neisseria meningitidis; identical to SEQ ID NO: 46026

SEQ ID NO: 46179 - DNA, 390 bp, Neisseria meningitidis; identical to SEQ ID NO: 39501

SEQ ID NO: 46180 - DNA, 405 bp, Neisseria meningitidis; identical to SEQ ID NO: 38321

SEQ ID NO: 46181 - DNA, 2664 bp, Neisseria meningitidis; identical to SEQ ID NO: 44229

SEQ ID NO: 46182 - DNA, 279 bp, Neisseria meningitidis; identical to SEQ ID NO: 40400

SEQ ID NO: 46183 - DNA, 600 bp, Neisseria meningitidis; identical to SEQ ID NO: 38221

SEQ ID NO: 46184 - DNA, 297 bp, Neisseria meningitidis; identical to SEQ ID NO: 37913

SEQ ID NO: 46185 - DNA, 1509 bp, Neisseria meningitidis; identical to SEQ ID NO: 41877

SEQ ID NO: 46186 - DNA, 1413 bp, Neisseria meningitidis; identical to SEQ ID NO: 45127

SEQ ID NO: 46187 - DNA, 1578 bp, Neisseria meningitidis; identical to SEQ ID NO: 44304

SEQ ID NO: 46188 - DNA, 666 bp, Neisseria meningitidis; identical to SEQ ID NO: 42538

SEQ ID NO: 46189 - DNA, 1701 bp, Neisseria meningitidis
atgtcagtcaaaatccaaacccgatccatcaataccgacgtttttaatcatttgctcaccgccggtgccgatcctttaatcgcccggctttgtgcttcgcgcggtgtgcaaagtcctgccgaattggacgacaagcttgctgcgcttttgccgtatcaaacgctgacaaactgcgaagccgccgccggacgtttggcggatgcggttgggcgcaaggaaaaaatcctgattgtcgccgactacgatgccgacggcgcgacggcgtgtgccgtcggtttggacggtttggcggcgatgggggcaaaagtggatttccttgtgcccaaccgctttgaacacggctacggcttaacgcccgaacttgccgaaatcgctgccgcgcagggcgtggatttgctgattacggtggataacggtatcgccagcatcgcaggcgtggcgagggcgcaggctctgggtttggatgtgattgtaaccgaccaccatctgcctgccgataccgtgcccgactgcatcatcgtcaatccgaaccaaaaaggctgcggtttccaaagcaaaagcttggcgggcgtgggcgtgattttttatgtgttgacggcgttgcgtgccgaactgcgccgccgcaattatttttcagacggcctgaaagagccgaatctgggcgatcttttggatttggtcgcactcggcacggttgccgatgtcgtccctctcgaccacaacaaccgcatcctcgtgtcgcaaggtttgaaacggatgcgttcgggcaaaatgcgccccggcatccgcgccttgtttgaagtggcgcggcgcgactggcgcaaggcgcagccgtttgatatgggttttgcgttgggcccgcgcatcaatgccgccggacggctggacgatatgtcggtcggcatcgcctgcctgttggcgcgagatgattccgaagctcaggaactggcggctcagttaaacaacctcaatatcgagcgtcgcgaaatcgagcagtctatgctgcaagacgcgctgaacgcctttcctgaaaccctgccttcaggtcagacgactttggtggcgtatcgcgacgacttccatcaaggcgtggtcggcatcgttgccagccgcctcaaagaccgtttttatcgtccgaccatcgtgtttgcgcctgccgacaacggcgaagtgcgcggttcggggcgttccattcccaacctgcacctgcgcgatgctttggacttggtgtccaaacgccatcccgatttgattttgaaattcggcggacacgcgatggcggcgggcttgagcatactcgaacacaatatccccgcgtttcagacggcctttgaagaagccgtgcgcgagatggtgtgcgaagacgatttgtcgcaaaccttcatcaccgacggcagcctgaaagcctgcgacatcacgctggaacaggctcaaaaccttgcccgacacgtttgggggcagggcttcgcgccgccaagctttaccgacgagttccacgtcgtccgccagcagcctttgggcgcggagggtaaacacaaaaaagcgtggctgcaaaaagacggctgcgaatttgaagccatgttttggcgttgcagcgaagacatccccgaatacatccgcacggtttaccgccccgttgccaacgaatggcgcaacaatctcgaattgcagctgtatatcgattactgggaagcggtgtag

SEQ ID NO: 46190 - DNA, 411 bp, Neisseria meningitidis
gtgaaactgctggcgaataactggcaaccgattgccatcatcgcgcttgtcggcacgctcttggcggtgtcgcaccatcaaggctacaagtcggcttttgcgaagcagcaggcggtcattgacaagatggaaaaagacaaagcgcaagccctgctgttgtcggctcaaaactacgcccgcgagctggaacaggcgcgtgcggaagctaaaaaatatgaagtcaaggcgcacgccgtcggcatggctttggcgaaaaaacaggcggaagtcagccgtctgaaaacggaaaataaaaaggaaatcgaaaatgtccttactcaagaccgtaaaaatgcaggcggcggttgtattgacggctttggccatcacggcttgcagctctacaagcgcgccctcggctacggaaattaa

SEQ ID NO: 46191 - DNA, 942 bp, Neisseria meningitidis; identical to SEQ ID NO: 40047

SEQ ID NO: 46192 - DNA, 246 bp, Neisseria meningitidis; identical to SEQ ID NO: 39751

SEQ ID NO: 46193 - DNA, 306 bp, Neisseria meningitidis
atgtcccgtaaggcagaaacacctttaatattcaaaccaaggagtttaaccatgaacaaacttttcattaccgccctgtccgccctcgccttgtccgcctgcgccggcacttgggagggcgcgaaacaagacaccgcccgcaaccttgacaaaacacaggccgccgccgaacgcgccgccgaacaaacaggcaacgccgtcgaaaaaggctgggacaaaaccaaagaagccgtcaaaaaaggcggcaatgccgtcggacgcggcatttcccatctcggcggaaaaatcgaaaacgccaccgaataa

SEQ ID NO: 46194 - DNA, 312 bp, Neisseria meningitidis; identical to SEQ ID NO: 38411

SEQ ID NO: 46195 - DNA, 999 bp, Neisseria meningitidis; identical to SEQ ID NO: 44423

SEQ ID NO: 46196 - DNA, 2229 bp, Neisseria meningitidis
atgcgttctgctgttttatttatatatttctttctacttaatatattccttttccagccagccgttatccacatccaatctaactatattttatttatgtctatcgtatccgcaccgctccccgccctttccgccctcatcatcctcgcccattaccacggcattgccgccaatcctgccgatatacagcatgaattttgtacttccgcacagagcgatttaaatgaaacgcaatggctgttagccgccaaatctttgggattgaaggcaaaggtagtccgccagcctattaaacgtttggctatggcgactttacccgcattggtatggtgtgatgacggcaaccatttcattttggccaaaacagacggtgagggtgagcatgcccaatttttgatacaggatttggttacgaataagtctgcggtattgtcttttgccgaattttctaacagatattcgggcaaactgatattggttgcttcccgcgcttcggtattgggcagtttggcaaagtttgactttacctggtttattccggcggtaatcaaataccgccggttgttttttgaagtattggtggtgtcggtggtgttgcagctgtttgcgctgattacgcctctgtttttccaagtggtgatggacaaggtgctggtacatcggggattctctactttggatgtggtgtcggtggctttgttggtggtgtcgctgtttgagattgtgttgggcggtttgcggacgtatctgtttgcacatacgacttcacgtattgatgtggaattgggcgcgcgtttgttccggcatctgctttccctgcctttatcctatttcgagcacagacgagtgggtgatacggtggctcgggtgcgggaattggagcagattcgcaatttcttgaccggtcaggcgctgacttcggtgttggatttggcgttttcgtttatctttctggcggtgatgtggtattacagctccactctgacttgggtggtattggcttcgttgcctgcctatgcgttttggtcggcatttatcagtccgatactgcggacgcgtctgaacgataagttcgcgcgcaatgcagacaaccagtcgtttttagtagaaagcatcactgcggtgggtacggtaaaggcgatggcggtggagccgcagatgacgcagcgttgggacaatcagttggcggcttatgtggcttcgggatttcgggtaacgaagttggcggtggtcggccagcagggggtgcagctgattcagaagctggtgacggtggcgacgttgtggattggcgcacggctggtaattgagggcaagctgacggtggggcagctgattgcgtttaatatgctctcgggacaggtggcggcgcctgttatccgtttggcgcagttgtggcaggatttccagcaggtggggatttcggtggcgcgtttgggggatattctgaatgcgccgaccgagaatgcgtcttcgcatttggctttgcccgatatccggggggagattacgttcgaacatgtcgatttccgctataaggcggacggcaggctgattttgcaggatttgaacctgcggattcgggcgggggaagtgctggggattgtgggacgttcggggtcgggcaaatccacactcaccaaattggtgcagcgtctgtatgtaccggagcagggacgggtgttggtggacggcaacgatttggctttggccgctcctgcctggctgcggcggcaggtcggcgtggtcttgcaggagaatgtgctgctcaaccgcagcatacgcgacaatatcgcgctgacggatacgggtatgccgctggaacgcattatcgaagcagccaaactggcgggcgcacacgagtttattatggagctgccggaaggctacggcaccgtggtgggcgaacaaggggccggcttgtcgggcggacagcggcagcgtattgcgattgcccgcgcgttaatcaccaatccgcgcattctgatttttgatgaagccaccagcgcgctggattatgaaagtgaacgagcgattatgcagaacatgcaggccatttgcgccaaccggacggtgctgattatcgcccaccgtctgtccactgttaaaacggcacaccggatcattgccatggataaaggcaggattgtggaagcgggaacacagcaggaattgctggcgaagccgaacggatattaccgctatctgtatgatttacagaacgggtag

SEQ ID NO: 46197 - DNA, 966 bp, Neisseria meningitidis
atgagctacacgcaactgacccaaggcgaacgataccacatccaatacctgtcccgccactgcaccgtcaccgaaatcgccaaacagctgaaccgccacaaaagcaccatcagccgcgaaatcagacggcaccgcacccaagggcagcaatacagcgccgaaaaagcccagcggcaaagccggactatcaaacagcgtaagcgacaaccctataagctcgattcgcagctgattcagcacatcgacacccttatccgccgcaaactcagtcccgaacaagtatgcgcctacctgtgcaaacaccaccagatcacgctccaccacagcaccatttaccgctaccttcgccaagacaaaagcaacggcagcacgttgtggcaacatctcagaatatgcagcaaaccctaccgcaaacgctacggcagcacatggaccagaggcaaagtccccaaccgtgtcggcatagaaaaccgacccgctatcgtcgaccagaaatcccgtatcggcgattgggaagccgacaccattgtcggcaaaggacagaaaagcgcattattgaccttggtcgaacgcgttacccgctacaccatcatctgcaaattggatagcctcaaagccgaagacactgcccgggcagctgttagggcattaaaggcacataaagacagggtgcacaccattaccatggataacggcaaagagttctaccaacacaccaaaataaccaaagcattgaaagcggagacttatttttgtcgcccttaccattcttgggagaaagggctgaatgagaacaccaacggactcatccggcaatacttccccaaacaaaccgatttccgtaacatcagtgatcgggagatacgcagggttcaagatgagttgaaccaccgaccaagaaaaacacttggctacgaaacgccaagtgttttattcttgaatctgttccaaccactaatacactag

SEQ ID NO: 46198 - DNA, 960 bp, Neisseria meningitidis; identical to SEQ ID NO: 44506

SEQ ID NO: 46199 - DNA, 303 bp, Neisseria meningitidis
atgggctttcgtgtcggtatgaattgttttgatacaagattgcaggcagacgactatttattgtcgtcccttccccctactgttacccaggacggaaaaatcatcaggccggaaagggtgggcgaaaaatgggtcttgaacggaaagccggtaatgttgtcctatccgaaatgttccaattttgagcagatcaaacagggttcttatgtcggttcgacggttttaattctgttcgtagtcatttacggcttcaggcttttgattaattttttaaaagacataggcaaggttggtactgattga

SEQ ID NO: 46200 - DNA, 870 bp, Neisseria meningitidis; identical to SEQ ID NO: 44344

SEQ ID NO: 46201 - DNA, 324 bp, Neisseria meningitidis; identical to SEQ ID NO: 45848

SEQ ID NO: 46202 - DNA, 420 bp, Neisseria meningitidis
atgagtgttttattgaagaacacaaaaattttaatcaatatatcctcaatctctttcattttattgaacgcatatattgtatacagtaaagttagatttaatttatcaactataccttttgcaaatcatgtttctatattaatagtatctttgtttacaatttcaacattgtttttgatttataaaatggtaatctttgcaaggagaatgactaaaaatacaaataaaatagaatatataaaaatattttctttttatgttgtagctgttttatattgtttattaataaatctatttaaacaggaaaatttttatttcaatataaatatctattctattattattgtgataattaccttctgtttagctcatttcttttttgttattaaatcttattttggagtaaataaaaatgtatga

SEQ ID NO: 46203 - DNA, 261 bp, Neisseria meningitidis; identical to SEQ ID NO: 39662

SEQ ID NO: 46204 - DNA, 972 bp, Neisseria meningitidis
atgattgccaaacacatcgaccgtttcccgctattgaagttggaccgggtgattgattggcagccgatcgagcagtacctgaaccgtcaaaaaacccgttaccttagagaccaccgcggccgtcccgcctacccgctgttgtccatgttcaaagccgtcctgctcggacaatggcacagcctctccgatcccgaactcgaacacagcctcatcacccgcatcgatttcaacctgttttgccgttttgacgaactgagcatccctgattacagcaccttatgccgctaccgcaattggctggcgcaagacgacaccctgtccgaattgctcaaactgatcaaccgccaactgaccgaaaaaggtttaaaaatagagaaagcatccgctgccgtcgttgacgccaccattattcagaccgccggcagcaaacagcgtcaggccatagaagttgacgaaggacaaatcaacggccaaaccacaccgagtaaggacagcgatgcccgttggatcaagaaaaacggcctctacaaactcggttacaaacaacatacccgtaccgatgcagaaggctatatcgagaaactgcacattacccccgccaatgcccatgagtgcaaacacctgtcgccgttgttggaagggttacccgaaggtacgaccgtctatgccgacaaaggctacgacagtgcggaaaaccggcaacatctggaagaacatcagttgttggacggcattatgcgcaaagcctgccgcaaccgcccgctgtcggaagtgcaaaccaaacgcaaccgatatttgtcgaagacccgttatgtggtcgaacaaagcttcggtacgctgcaccgtaaattccgctatgcgcggtcaacctatttcggactgattaaagtgagtgcgcaaagccacctgaaggcgatgtgtttgaacctgttgaaagccgccaacaggctaagtgcgcccgctgccgcctaa

SEQ ID NO: 46205 - DNA, 3486 bp, Neisseria meningitidis; identical to SEQ ID NO: 45489

SEQ ID NO: 46206 - DNA, 357 bp, Neisseria meningitidis
atggccgaacgtaacaatgccgcccttcaagaagccataaccatagtaaacgggctggcaaaaacagacggatgcatactcgccacctatacatcggataccccggacaagaagaaagaccgtgaagccatactgacagttttaaaccagcgcgaatttgtctgtgcgggcgtattgggcggagcactgcacgagaaaatgtataaagatttcgaatactccatgctgttacgtgactgggacaacctaagcagcttcatttttgaaatacgccgtatcaggagcgcaccgacggcctttcaagaatttgaagccgtagcccgaaaatggaagaaaaagcctctgaaaaccaaatag

SEQ ID NO: 46207 - DNA, 669 bp, Neisseria meningitidis
ttggtcaaaacggcagacggctacaaagccatcgcccatattcaagccggagaccgcgtcctttccaaggacgaggcaagcggagaaacaggatacaaacccgttaccgcccgatacggcaatccgtatcgggaaaccgtttacattgaagtttcagacggcatcggcaacagccaaacccttgtttccaataaaatccacccgttttacagtcaaggaaaatggatacaggcaggtcgtctgaaaaaaggcgacaccctgctttccgaaagcggtgcaaaacagacggttcaaaacattactctcaaacagcagccgctcaaagcctacaatctgaccgttgccgattggcatacttacttcgttaagggtaatcaggcggaaacggaaggggtttgggttcataattcttgtcctcccaaaagagctcccgaataccatgcaggaactgtatctgaatctaattttttaaatgcagctgagaaatggctaggggaaaactataagtcatatccaaatggtcgatatgtatcacaagatggaatgcggcaggtacgatatggttatcatgaaacaaattcatctacgcatcatggtcattttgaatcatatgacaaacctaatggacgtgtaatagaaaatagtgcggtaacaattattcgggattga

SEQ ID NO: 46208 - DNA, 732 bp, Neisseria meningitidis; identical to SEQ ID NO: 44931

SEQ ID NO: 46209 - DNA, 738 bp, Neisseria meningitidis; identical to SEQ ID NO: 39629

SEQ ID NO: 46210 - DNA, 849 bp, Neisseria meningitidis
ggcgaggcaacaccgtactggtttaaatttaatccacgatattacgaacaatgcaaaaacatcagccaaaccgcagcaacgtttaacttgtcaagaaacacgctttacctgtggattcgccttaaaaaacaaacaggcagcctaaaacatcaagttaccggtctaaatgccgtcaaatcggataggcaaaaaccggctcaatatattgggcaacaccaggatgcctatctgcatgaaatcgccaaacattttgattgtacggcagccaccatttgctatgcactcaaacagatggggataacgcgcaaaaaaaagaccaccacttacaaagaacaagacccggccaaagtaacgcattatttgacacagccggccgaattttccgactaccaacgtgtttatttggatgaaacaggatttgaccgctacctgttccgtccctatgcccgcagcctgaaagggcaaatagtgaaagcgcagataagtggaaaaagataccaacgcttatctttggtgtccgcacaagtcggcaaccggctgattgctccgatggtttatcaaaatacgatgaccggagtcttttttgaagcgtggtttcagcaatgcctactgcccgcattgactcaaaaatcggtgattattttagataatgcgcgatttcaccgtatgggtgtcttacgggaaatggcggaaaaattgggacataaggtattgcctcttgcaccttattcacctgagctcaacccgattgagaaagtgtgggcgaatattaagcagtatctgcgaaccgttttgtctgattacgcccgatttgacgatgcactactgtcctattttgattttaattga

SEQ ID NO: 46211 - DNA, 621 bp, Neisseria meningitidis; identical to SEQ ID NO: 39955

SEQ ID NO: 46212 - DNA, 174 bp, Neisseria meningitidis; identical to SEQ ID NO: 36913

SEQ ID NO: 46213 - DNA, 498 bp, Neisseria meningitidis; identical to SEQ ID NO: 39756

SEQ ID NO: 46214 - DNA, 273 bp, Neisseria meningitidis; identical to SEQ ID NO: 44450

SEQ ID NO: 46215 - DNA, 2115 bp, Neisseria meningitidis
atgttcctcttttcagacggcctacaatccattaataacaataatcgacgaaaacgcattgtgaaaaacgcctacatcccctctcgtggcatccgcaaaatcccccatctcttcaccctattgcctgagtttcatatctgcaaggatgggaaaggagcagaggctgttatcggctggggtttgcgcccgacgacacacaaagcgcgtgcttttgccgctgaacaccagcttccctttattgctttggaagacggctttttacgctcgcttggcctgggcgttgccggctatcctccctattccatcgtctatgacgacatcggcatctactacgacactacccgcccttctcgtttggaacaactgattcttgccgccgataccatgccgtctgaaaccttggctcaggcgcaacagacgatggatttcatcctgcaacaccacctgtccaaatacaaccacgcgcccgaactttcagacgatcatcctttacgctccccatccaagcctgaaactgtcctcattatcgaccaaaccttcggcgatatggccatccaatatggcggcgcagatgcctctacgtttgaactgatgtttcagacggccttgaatgaaaacccgcaagccgatatctgggtaaaaacccatcccgatgttttgtgcggcaaaaaacaaggctatctgacccaactggcgcagcaacaccgcgtccatcttctggcagaagacatcaacccgatttctttgttgcaaaacgtcgataaagtttattgcgttacctcgcaaatgggttttgaggcgcttttgtgcggcaagccgctgaccaccttcggcctgccgtggtatgccggatggggtgtaagcgacgaccgccatcctgaaatcaaccgccttgttcaaacccaacgccgcgccacccgcaacttgctgcagctcttcgccgcagcctatctgcaatacagccgctacctcaaccccaataccggcgaagcaggcagcctctttgatgtcatcgactatttggcgacggtcaaacgtaaaaacgacaaattgcgtggcgagttatattgcgtcggtatgtctttgtggaaacgcgcggttgccaaaccgttctttaacgtaccctcttgccgtctgaaatttatctcttccacccaaaaactggcaagggtcaaactgtccgacgatgcacgcatcctggcttggggcaacggcaaagaggccatcgtccgctttgccgaacaacaccacatccccctgctgcgcatggaagacggctttatccgctcggtcggactcggctccaacttagtgccgccgctgtcgctcgttaccgacgatatgagcatttatttcaatgccgaaaccccgtcccgtcttgaatacatcctacaaaaccaaaacttcgacgatcaagactttcagacggccttgaagctgcaaaaaatgctgactgaaaaccacatcagcaaatacaacgtcggcaactcagacttcagcgccccatcaaccgacaaaaccgtgatcctcgttcccggccaggttgaagatgatgcgtctatccgctacggttcgccccaaatctaccgcaatctggatttgctccgtaccgtacgcgaacgccatcccgatgcctatatcatctacaaaccgcatcccgatgtagtcagcggtaaccgcatcggccatatttcccctgaagatgctgcacgatatgccgaccaaaccgccgaacaagccgacatcctgacctgtctccaatacgcagacgaaatacataccatgacttcgctgaccggttttgaagccttgttgcgcggcaaaaaagtcagctgctacggcctgcctttttacgcaggctgggggcttacccaagatctgctccccatcccgcgccgtagccgcagacttgagctttggcagctgattgccggcacgctcatccactatcccgactacatccaccccgaaacccatcaggccataaatgcagaaaccgcagcccaaatcctgatacgacaaaaaaatatgcaaaaaaacaacaacggattacatcgcgggtactttgccaaaaaattaggtaaaatcaaacaactatatcgatctttcaaataa

SEQ ID NO: 46216 - DNA, 993 bp, Neisseria meningitidis
atgaaacagaaaatttttgtcctttataccggcggcaccatcggcatgacgcaaagcagcgaaggcctgcgccccgataccgcgctggtcgggcaggcactcgcgccgttttcaaacggcatggatttcgattggcacgtttgtgggacgctgattgattcttccgccgtccaactgcaaaactggtgcgcttggctggacatcattgccgccgcgctgccgcagtacgacggcgttttggtgctgcacggtacggacacgctcgcctataccgccaatctgttcgccctcgcgctgcagggtttggacaagccaatcgtcctgaccggttcccaatggccgtacaacgccgtgggcagcgacgcgccgcgcaatctggcgactgccgttgccgcattcccactcggattgaagcagacgcttattgcctttgacggcaaactttatcccgccgtcggcagcagcaaagtcagcaccgaaaccgccgccggtttcgacaatccgcatttcggcgcactggcggagtgggacgaaacccagggctggcacaatgtccgcatcccgaatcaggacgcggcagatgtttcagacggcctcaaaatccgttatcccgacccgcaggcaaaaatcgccgtccgcacgcttatccccggctttgccgtccaagaacttgccgacggactcggacagcttcccgcccaagcccttatcctgcaaagctacggacacggcaacacgcccgcagacgaaggtttcatccgcgccgtgcaagactttacgcagcaaggcaaactgctgctcaacatcagccaagtccgacaaggcagaaccgctgccgtttacgcgcaaggcaacgcgttccgcaactcaggcatcatcaacggcggcaaatgcaatttggaaaccgcaaccgcattgatgacgcttgccgtttctgaaggatggggcgcggacgaggtgaaacacgagttgcagcggttggggctggtgtga

SEQ ID NO: 46217 - DNA, 462 bp, Neisseria meningitidis
ttgaaaaggggaaacatctatactctaccgcctgaaatgaagacaaatatcaaaggagcttttatgtccgattgctgcaaccgtatccaaccggttttgctttctgttttgcgtatcgtaaccgcttacctgtttttgttgcacggtacgtcgaaaatcttcgccttccccattgaaatgggcagcggttcgcccggcgggctgttgctgcttgccggtattttagaaattgtcggcggcattttgctggtgttgggcctgtttgcgcgccctgccgcgtttgttttgtccggccagatggcggttgcctattttatggcgcacgcttccggaaatgctttgttcccgattgccaacggcggcgagtccgcagtgctgttctgcttcgtattcctctatatcgcggcggcgggcggcggagcatggtcgctggacaggctgtttttcaagcgtaaagcctga

SEQ ID NO: 46218 - DNA, 126 bp, Neisseria meningitidis
ttgtttatgagtgataagccaattttattgagccctgcggcgaaaaaagaggctttggcacgggcggtaaaggaaatccgtgcgaaatatggcgataaggcgattgtgaaaggatgtgtgaaatga

SEQ ID NO: 46219 - DNA, 201 bp, Neisseria meningitidis; identical to SEQ ID NO: 39739

SEQ ID NO: 46220 - DNA, 564 bp, Neisseria meningitidis; identical to SEQ ID NO: 45112

SEQ ID NO: 46221 - DNA, 1179 bp, Neisseria meningitidis
atggaatttgtttacgacgtggcagaatcggcagtcagccctgcggtgattaaagtaatcggcttgggcggcggcggttgcaatgcaatcaataacatggttgccaacaatgtgcgcggtgtggagtttatcagtgccaatacggatgcgcagtctctggcaaaaaaccatgcggcgaagagaatccagttgggtacgaatctgacacgcggtttgggcgcgggcgcgaatcccgatatcggccgtgcggcagcccaggaagaccgggaagccattgaagaagccattcgcggtgcgaatatgctgtttatcacgaccggtatgggcggcggtaccggtaccggttccgcgccggttgttgctgagattgccaagtctttgggcattctgaccgttgccgtggttacccgaccgttcgcatatgaaggtaagcgcgtccatgtcgcacaggcagggttggaacagttgaaagaacacgtcgattcgctgattatcatcccgaacgacaaactgatgactgcattgggtgaagacgtaacgatgcgcgaagccttccgtgccgccgacaatgtattgcgcgatgcggtcgcaggcatttccgaagtggtaacttgcccgagcgaaatcatcaacctcgactttgccgacgtgaaaaccgtgatgagcaaccgcggtatcgctatgatgggttcgggttatgcccaaggtatcgaccgtgcgcgtatggcgaccgaccaggccatttccagtccgctgctggacgatgtaaccttggacggagcgcgcggtgtgctggtcaatattacgactgctccgggttgcttgaaaatgtccgagttgtccgaagtcatgaaaatcgtcaaccaaagcgcgcatcccgatttggaatgcaaattcggtgcggctgaagacgagaccatgagcgaagatgccatccggattaccattatcgctaccggtctgaaagaaaaaggcgcggtcgattttgttccggcaagggaggtagaagcggttgccccgtccaaacaggagcaaagccacaatgtcgaaggtatgatccgcaccaatcgcggtatccgcacgatgaaccttaccgctgcggatttcgacaatcagtccgtacttgacgactttgaaatccctgcgattttgcgtcgtcaacacaattcagacaaataa

SEQ ID NO: 46222 - DNA, 651 bp, Neisseria meningitidis
atgatttcagttgaacacgtttccaaacgctatctgacccgccaaggttggcggacagtcttgcacgatattagcttcaaaatggagaagggcgagaaaatcggtattctcggccgcaacggtgcaggtaaatcgacgctcatccgtttgatcagtggcgttgagccgccgaccacgggtgaaatcaagcggacaatgagtatttcttggcctttggcattctccggtgcgtttcaaggcagtctgaccggtatggacaatttgcgtttcatctgccggatttacaatgtcgatatcgattatgtgaagaactttaccgaagagttttccgagttggggcaatatctttacgagccggtcaagcgttattcttcaggtatgaaggcgcgtttggcatttgctttgtcgttggcggtagagtttgattgctatttgattgacgaagtgattgcagttggtgactcgcgttttgccgataaatgtaagtacgagttgtttgaaaagcgcaaagaccgttccatcatcttggtgtcgcacagccacagcgccatgaagcaatattgcgataatgcgatggtgctggaaaaagggcatatgtaccagtttgaagatatggacaaagcctacgaatattataattcgctgccttaa

SEQ ID NO: 46223 - DNA, 333 bp, Neisseria meningitidis; identical to SEQ ID NO: 43845

SEQ ID NO: 46224 - DNA, 285 bp, Neisseria meningitidis
atgttcggcggtcgtctgaaaaacgctccatccattaccgccaaacactttttgaaggaaaatatcatgaaatttattaacacctgccgtaaatacggcgcaaaactggctgttgtaacagctgctcccctggctttggccgcacatgcaaatgcaacgttgcccgatacggcaaaaaacgctttggaagccgcaaaagcggacggtatggaagccggttggattgtcgttggcgttttcgccgcgctttttgtattttccatcgttaagagagtgatgaagtaa

SEQ ID NO: 46225 - DNA, 2847 bp, Neisseria meningitidis; identical to SEQ ID NO: 38622

SEQ ID NO: 46226 - DNA, 396 bp, Neisseria meningitidis; identical to SEQ ID NO: 40876

SEQ ID NO: 46227 - DNA, 381 bp, Neisseria meningitidis
atgaatatcaggtttttcgcgctgaccgtaccggttttgtctttggcggcctgtgccgtgccggaggcgtatgatgacggcagacgcgggtatatgccgcctgttcaaaaccaagccggcccgaacgattttcgggcgttttcatgcgagaacggtttgtctgtgcgcgtccgccgtttggacggtggcaaaatcgcgttgcggctggacggcaggcgtgccgtcctctcttccgacgttgccgcatccggcgaacgctataccgccgaacacggtttgtttggaaacggaaccgagtggcaccagaaaggcggcgaagcctttttcggctttaccgatgcctacggcaattcggtcgaaacttcctgccgcgcccgttaa

SEQ ID NO: 46228 - DNA, 870 bp, Neisseria meningitidis
atgaaacgtatctttttgtccgccttgcccgccatcctgcctttatccacttatgccgacctgcccttgacgattgaagacataatgaccgacaagggaaaatggaaactggaaacttcccttacctacctgaacagcgaaaacagccgcgccgcacttgccgcaccggtttacattcaaaccggcgcaacctcgtttatccccattccgaccgaaatccaagaaaacggcagcaataccgatatgctcgccggcacgctcggtttgcgctacggactgaccggcaataccgacatttacggcagcggcagctatctgtggcacgaagaacgcaaactcgacggcaacggcaaaacccgcaacaaacggatgtccgacgtatccctcggcatcagccacaccttccttaaagacgacaaaaaccccgccctaatcagctttcttgaaagcacggtttacgaaaaatcgcgcaacaaagcctcgtcgggaaaatcgtggctcatcggcgccaccacctacaaagccatagatccgattgtcctttccctcaccgccgcctaccgcatcaacggcagcaaaaccctttcagacggcatccgctacaaatcgggcaactacctgctgctcaaccccaacatctcatttgccgccaacgacagaatcagcctgaccggaggcatccaatggctgggcaaacagcccgaccgcatagacggcaaaaaagaatccgcaagaaacacatccacctacgcccatttcggcgcaggtttcggtttcaccaaaaccacggctttaaacgcatccgcacgtttcaacgtttcagggcaaagcagttccgaactgaaattgggcgtacagcatacattttaa

SEQ ID NO: 46229 - DNA, 810 bp, Neisseria meningitidis; identical to SEQ ID NO: 38580

SEQ ID NO: 46230 - DNA, 660 bp, Neisseria meningitidis; identical to SEQ ID NO: 44157

SEQ ID NO: 46231 - DNA, 372 bp, Neisseria meningitidis; identical to SEQ ID NO: 39100

SEQ ID NO: 46232 - DNA, 867 bp, Neisseria meningitidis; identical to SEQ ID NO: 40507

SEQ ID NO: 46233 - DNA, 1125 bp, Neisseria meningitidis; identical to SEQ ID NO: 44526

SEQ ID NO: 46234 - DNA, 1170 bp, Neisseria meningitidis; identical to SEQ ID NO: 44259

SEQ ID NO: 46235 - DNA, 567 bp, Neisseria meningitidis
atgtccgccttcctccccatcatcaaccgcctgattctgcaaagcccggacagccgctcggaacttgccgcctttgcaggcaaaacactgaccctgaacattgccgggctgaaactggcgggacgcatcacggaagacggtttgctctcggcgggaaacggctttgcagacaccgaaatcaccttccgcaacagcgcggtacagaaaatcctccaaggcggcgaacccggggcgggcgacatcgggctcgaaggcgacctcatcctcggcatcgcggtactgtccctgctcggcagcctgcgttcccgcgcatcggacgaattggcacggattttcggcacgcaggcagacatcggcagccgtgccgccgacatcggacacggcatcaaacaaatcggcaggaacatcgccgaacaaatcggcggattttcccgcgaatccgagtccgcaaacatcggcaacgaagcccttgccgactgcctcgacgaaataagcagactgcgcgacggcgtggtacgcctcaacgaacgcctcgaccggctcgaacgcgatatttggatagactaa

SEQ ID NO: 46236 - DNA, 318 bp, Neisseria meningitidis
atgaaaaaaaatatttttcacaatgtaagcctttatgaaataatcttttccgataatggaaatacccttacattatcttttacagatacaattgaaggtaattatttcggatatatcaaatgcagtaatattttgaattttaaattagatacaaataatttcgtagattatgaggataaggaagatagcttgtttcccttgtttatacccgaaatagagctatataaataccaattttatagtgaaattattattgatgtagggattattataaaaatatctgctgaaacaattaattttgagccactgggaaaatag

SEQ ID NO: 46237 - DNA, 2559 bp, Neisseria meningitidis
atgcctgcaaacctgtcttcagcactggaaaccttcaaacagcagcgcgatgccgccgaagcgcattatttgaaaaccaaccgcgtgtcggtatttttcagggaatacacggcggcagtcgaaaccttactggcagcattgtgggtagaacattttcaaaacagcgcgttatgtctgatggcggtgggcggcttcgggcgcggcgaactgtatccctgttcggatgtggatttggcggttgtctcccctgccccgctttcagacggcattcaggaacagattgcccggtttgtccaaaccctgtgggactgcaaactgatgccgtctgtaaaaagcggcggcattgacgaactgtgcgaaagcgtgcgcaatgatattacgggggacacagcgtttttagaggcccgttttttgtttggcaaccgccaaacggcggatgaactggcggaaaaaatgaacgcgcaacgcaatgtagcggcatttatcgaagcaaaattggtggagatggaacaccgccatgccaaatcgcaaggttcgggagcggtgttggaaccaaacatcaaaagctgtcccggcggtctacgcgacatccataccctgctttggatagcgaaagcacaaggcttggcgaccaacctgcctgcgctggtcaaacaaggcattctgacgcgcactgaagccggtatgctttcacacggctaccgccgcctcgcccacatccgcatccatctgcatttaaacgccaagcgcgccgaagaccgcctgctgttcgatttgcagccgcaagtcgccgaaagtatgggttatcaaggcttgaacctccgccgtcaaagcgaagaactgatgcgcgtgttttaccgcgcgattaaaaccgtcaaacaactgagcggcatcctcacgcctatgctgcaaagccgcgtttcctccaccccgttgcgcgttaccctgcggattgacgacgactacatccaagtcaacaaccaaatcgccgcgcggcacaccgatatttttttcagacggcccgaacacattttcaaaatcgtcgaaatcatgcagcagcgcaacgatattaccgcgctcgaaccgcaaaccctgcgcgcatggtggggcgcgacgcgcaaaatcaaccgcagcttctaccaaaattctgaaaaccgccaccgcttcgccggctttttccgcaacggcaacggactgacccaaaccctgcgcttcctcaacctctacggcgtattgggacgctacctgcccgcgtgggaaaaaatcgtcggcctgctccagcacgacctgttccacatctatcccgtggacgaccacatcctcaccgtcgtccgcaacgtccgccgccttgccttggatatgcacagccacgagctgccctacgcctctgcactgatgcagtcctttgaaagacaagacatcctctaccttgccgcctttttccatgacatcgccaaaggacgcggcggcgaccatgccatacaaggcatcgcagacgcgcgccaatttgccgccgaccacttcctgaccgaagaagaaagcgacctgctcgcctggctggttgaaaaccatcttcttatgtccaccgtcgcccaaaaagaagacatccaagaccccagcgtactcgatgccttctgcaaacgcgtccaaacccacgaacgcctcagcgcgctctaccttctgaccatttccgacatacgcggtaccaatcccaagctgtggaacgcatggcgcgccagcctgctggaaagcctcttccatgccgccggacgctacctcgcaggcaacggtggcaacccgcacgccctcttcggccgccgccaacaagaagccgccgacttgctcacccgcgccgccgtccccgaaaaacagcagaaaaagctttggaacgcgctcggttccgcctacttcgcccgccaccagtcccgcgaaatcctgtggcacgccgccaacctcgtacacgattttgaaacccccatcgtccgcagccgcatcctgccccaaagcgacagcttccaagtgatggtctttatgcccaacggcccgcgcctgttcgcccgcctctgccgtatcttcagccgccacggcttcgacattctcgccgcccgcgcctttatcaccgaacacgactacatcctcgacaccttcatcgtgcaaatcccctcgcagcacgctcccgaagactaccccgacatccaaagcgcgctcgaagccgaactcaacagctttatccacggacacaccgttgccgaaatctccagccatagccgccgcatcagccgccgcagccgctacatgccgatcgcgccaagcatcaccattacccccgaagaagactaccccgactggtactccgtcgaaattaccgccgtcaaccgccccttcctgctcgccgatatggcggaaatctttttcgcccacaacgtcagcctgcgctatgccaaaatctccacactggatgaacgcgccgaagacagttttaccgtttttagccccgacctgaaaaacccaaaaatccagtcctcattgaaacaggctttgctggaacagttggcataa

SEQ ID NO: 46238 - DNA, 324 bp, Neisseria meningitidis; identical to SEQ ID NO: 38284

SEQ ID NO: 46239 - DNA, 1914 bp, Neisseria meningitidis
atgaacccaagccccctactcgacctgattgacagcccgcaagatttgcgccgtctggacaaaaaacagctgccgcgccttgccggcgagttgcgtgcctttctgctggaatctgtcgggcagaccggcgggcatttcgccagcaatctgggcgcggtcgaactgaccatcgccctgcactatgtgtacgacacgcccgaagacaagctggtgtgggatgtcggacaccaaagctatccgcacaaaatcctgacaggcaggaaaaaccagatgcacaccatgcgccaatacggcggtttagctggcttcccaaaacgcagcgagtcggaatacgacgcgttcggcgtagggcattcttccacatccatcggcgcggccttgggcatggccgttgcggacaaacagttgggcaacaaccgccgcagcgtcgccatcatcggcgacggagccatgacggctggtcaggcgtttgaagccctgaactgcgcaggcgatatggatgtggatttgctggtcgtcctcaacgacaacgaaatgtcgatttcccccaacgtcggcgcgctgccgaaataccttgccagcaacgtcgtgcgcgatatgcacggcctgttgagtaccgtcaaagcgcaaacgggcaaggtattagacaaaatacccggcgcgatggagtttgcccaaaaagtcgaacacaaaatcaaaacccttgccgaagaagccgaacacgccaaacagtcgctgtctttgtttgaaaacttcggcttccgctataccggccccgtggacggacacaacgtcgaaaatctggtggacgtattgaaagacttgcgcagccgcaaaggccctcagcttctgcacgtcatcaccaaaaaaggcaacggctacaaactcgccgaaaacgaccccgtcaaataccacgccgtcgccaagctgcctaaagaaggcgcggcgcaaatgccgtctgaaaaagaacccaagcccgtcgccaaaccgacctatacccaagtgttcggcaaatggctgtgcgaccgggcggcggcagacgagcgtttgatcgccatcacgcccgcgatgcgcgagggcagcggactggtggagtttgaacaacgattccccgaccgttatttcgatgtcggtattgccgagcagcacgccgttacctttgccggcggtttggcgtgcgaaggcatgaagcccgtcgtggcgatttattccacctttttacaacgcgcctacgaccaactggtgcacgatatcgccctgcaaaacctacccgttttgtttgccgtcgaccgcgcgggcatcgtcggcgcggacggcccgacccacgccggtttgtacgatttgagcttcttgcgttgcattccgaatatgattgtcgccgcgccgagcgatgaaaacgaatgccgcctgctgctttcgacctgctatcaggcggatgcgcccgccgccgtccgctatccgcgcggcacgggtacgggcgcgccggtttcagacggcatggaaaccgtggaaatcggcaagggcattatccgccgcgaaggtgggaaaaccgcattcattgccttcggcagtatggtcgcccccgcattggcggtcgccggaaaactgaacgccaccgtcgccgatatgcgctttgtcaaaccgatagacgaagagttgattgtccgccttgcccgaagccacgaccgcatcgttacccttgaagaaaacgccgaacagggcggcgcaggcggcgcggtgctggaagtattggcgaaacacggtatctgcaaacccgttttgcttttgggcgttgccgataccgtaaccggacacggcgatccgaaaaaacttttagacgatttgggcttgagtgccgaagcggtggaacggcgtgtgcgcgcgtggctgtcggatcgggatgcggcaaattaa

SEQ ID NO: 46240 - DNA, 1005 bp, Neisseria meningitidis; identical to SEQ ID NO: 44461

SEQ ID NO: 46241 - DNA, 303 bp, Neisseria meningitidis; identical to SEQ ID NO: 43912

SEQ ID NO: 46242 - DNA, 285 bp, Neisseria meningitidis; identical to SEQ ID NO: 45785

SEQ ID NO: 46243 - DNA, 441 bp, Neisseria meningitidis; identical to SEQ ID NO: 39177

SEQ ID NO: 46244 - DNA, 291 bp, Neisseria meningitidis
ttgttttctaaaggaaaactcaaaatgcaagttttgaagaaagttgattggaagatgtttgtggcacgctctttttggcagtgtgtgccggttggtttgacggcgggcgtgtggtgttttgtggcgggaatggcgttgcattcctgcgcgaaagaacccgaaccggttgcgaaagagccgacgaaggttgaggcgatggaaagacaggcggatttggaggtcaaggtatgggaagggcaatacgagtcaatgagcgtcgaggaaaaaatgaaagggattgtttatgagtga

SEQ ID NO: 46245 - DNA, 762 bp, Neisseria meningitidis
atgaccgaattcgtcgtattgattccggcgcggctggattcgtcgcgcctgcccggaaaagccttggcggacatccacggcaaaccgatggtcgtgcgcgttgccgaacaggcggcaaaaagtaaagccgcgcgcgtcgtcgtcgccaccgaccatcccgacattcagacagcctgtcaggcgcacggtatcgaagtcgtcatgacttcaaaccggcacgaaagcggcacgacgcgccttgccgaagcctctgccgcgctgaagctgccgccgcatctggtggttgtcaacgtacagggcgacgagccgctgattgcccccgaactcatcgaccgcactgccgaagtcttggtggaaaacaacgtacagatggcaactgcggcacacgaattgcacgatttcgacgaattgatgaatcccaatgccgtcaaagtcgtcctcgacaaaaaccgcaacgccatctacttcagccgcgccccgattccctatccgcgcgatgcgatgcgtgcaggaaaacgcgaaatgccgtctgaaaccgccgtcctgcgccatatcggcatctacgcttaccgcgccggcttcctgcaacgctatgccgaaatgagcgtttcgccgctggaaaccatcgaatcgctggaacagctgcgcgtcctgtggcacggctacccgattgccgtcgaaaccgccaaagaagcccccgccgccggtgtggatacgcaggaagatttggatagggttcgcgctgtatttcagaccgtataa

SEQ ID NO: 46246 - DNA, 762 bp, Neisseria meningitidis; identical to SEQ ID NO: 44538

SEQ ID NO: 46247 - DNA, 294 bp, Neisseria meningitidis; identical to SEQ ID NO: 44435

SEQ ID NO: 46248 - DNA, 231 bp, Neisseria meningitidis; identical to SEQ ID NO: 44466

SEQ ID NO: 46249 - DNA, 375 bp, Neisseria meningitidis
atgcagtatctgtttgtcaaatacagccaccaaatcttcgttaccatcaccattttggtattcaacatccgttttttcctactttggaaaaatccagaaaagcccttggcgggcttttggaaggcactgccacaccttaacgacaccatgctgctgtttacgggattgtggctgatgaaaattacccatttctccccgttcaacgcgccttggctcggtacaaaaatcctgcttctgctcgcctatatcgcattgggtatgatgatgatgcgcgcccgtccgcgttcgaccaagttctacaccgtttacctgctcgccatgtgttgcgtcgcctgcatcgtttaccttgccaaaaccaaagtcctgcctttctga

SEQ ID NO: 46250 - DNA, 864 bp, Neisseria meningitidis
gtggaaaatgttgaaacacatagccaaaaccaccgcaagcgattgattggcacattttttctggtcggactggaaaaccttttgatgctggtgtatccggtgtttggcagctgggcgattaatgccgtgattgcggggcaggcgtggcaggcgttgctgtacgctttggttgtgcttttgatgtggctggtcggtgcggcgcggcggattgccgatacgcgcacgtttacgcggatttataccgaaatcgccgtgccggttgtgttggaacagcggcagcggcaagtcccgcattcggcggtaactgcgcgggttgccctgtcgcgtgagtttgtcagcttttttgaagaacacctgccgattgccgcgacatccgtcgtatccatattcggcgcgtgcatcatgctgctggtgctggaattttgggtcggcgtgtcggcggtgggcatacttgcgttgtttttatggcttttgccacgttttgccgccatcagcgaaaacctgtatttccgcctgaagaacagcttggaacgcgacaaccactttatccgaaaaggcgacgagcggcagctggaccgccattacggactgcttgcgcgcctgcgtgtgctgatttccaaccgcgaagccttcggctatctctgcgtcggcacggcgatgggtattttgttcggctttgcttttgtgatgatgacgctcaaaggctacagcagcgcggggcatgtctattcggtcggcacttatctgtggatgtttgccatgagtttggacgacgtgccgcgattggtcgaacaatattccaatttgaaagacatcggacaacggatagagtggtcgaaacggaacatcaaagccggaacttga

SEQ ID NO: 46251 - DNA, 171 bp, Neisseria meningitidis; identical to SEQ ID NO: 36504

SEQ ID NO: 46252 - DNA, 1185 bp, Neisseria meningitidis; identical to SEQ ID NO: 38307

SEQ ID NO: 46253 - DNA, 687 bp, Neisseria meningitidis
aaatacagttgctacatctctgcgcagcagactctacaaggtattaataatttaggaaatttaagtccagaaacacaacttgctgccgcgagcctattacaggatagtgcttttgcggtaaaagacggcattaattccgccagacaatgggctgatgcccatccgaatataactgcaacagcccaaactgcccttgccgtagcagaggccgcaactacggtttggggcggtaaaaaagtagaacttaacccgaccaaatgggattgggttaaaaataccggctataaaaaacctgctgcccgccatatgcagactgtagatggggagatggcaggggggaatagaccgcctaaatctataacgtccaacagcaaagcagatgcttccacacaaccgtctttacaagcgcaactaattggagaacaaattagtagtgggcatgcttataacaagcatgtcataagacaacaagaatttacggatttaaatatcaattcaccagcagattttgctcggcatattgaaaatattgttagccatccaacaaatatgaaagagttacctcgcggtagaactgcgtattgggatgataaaacagggacaatagttatccgagataaaaattctgacgatggaggtacagcatttagaccaacatcaggtaaaaaatattatgatgatttatag

SEQ ID NO: 46254 - DNA, 1422 bp, Neisseria meningitidis; identical to SEQ ID NO: 45268

SEQ ID NO: 46255 - DNA, 2082 bp, Neisseria meningitidis
atgaaatcactcaaaaccttcctcatttggggcatagtggtactggtcggcttagcatcctttaccactctggctctcagccgaggcgaacaggtcagcgcggtatggatggttaccgccgccatatccgtttactgcatcgcctaccgtttttacagcctctacatcgccaaccgcgtaatgcggctcgatcctaaccgcctgactccggcagaacgccacaacgacggcttggactacgttccgacgcacaagggcgtattgttcggacaccactttgccgcgattgccggcgcgggccctttggtcggccctgtactggctgcgcaaatgggttacctgcccggtactttgtggattatcttcggcgtggtttttgccggcgcggtacaggatatgatggtactgtttgtttctatgcgccgtgacggtaagtctttgggcgatattgtgaaacaggaactcggcactgtccccggcgtgattgcctccatcggtattttgatgattatggtcatcattatggcggtgttggcgttgattgtcgtaaaagcacttgttcacagcccttggggtacgtttaccatcgccgccactatgccgattgccctgtttatgggtatttacacgcgctatatccgtccgggcaaaatcggcgagatttccatcgtcggctttattttgctgatgctggcggtaatttacggcgaagatgtggcgaaaagttccatcggacattggttcgaccttgacggcatccagctcacttgggcgattatgatttacggctttgtcgcctccgtattgcccgtatggttgctgctcactccgcgcgactatctctccaccttcctgaaaatcggtacgattgcggccttggctttgggcatcgtcatcgtcaatcccactttgcaaatgcctgccgtaacccactttatcgacggttcgggtccggtattctcaggcgcattgttcccgttcctcttcatcaccatcgcctgcggtgcggtttcgggcttccacgcgctgatttcctccggcaccacgccgaaaatgctggaaaacgaaacccacgtccgtatgattggttacggcggtatgttgatggaaagtttcgtagccattatggcgcttgccgccgccgcatcgcttgatcccggcgtgtacttcgccatgaacagccctgccgccctgatcggtacggatgccaacaccgccgccgaagtgattaccaccaagctgcaattccctgtcgatgcggcaaccctgttgcataccgctaaggaagtgggcgaaaacaccatcctttcccgtgcaggcggtgcgccaaccctcgcagtcggtatggcgcacattatgagccgcctgattccgggcgaggcgatgatggcgttctggtatcacttcgccctattgtttgaagccttgttcatcctgaccgccgtcgatgccggtacgcgcgtcgcacgttttatgattcaagacttgggcagcatcttctacaaacctttcggcaacaccgactccatccccgccaacctgattgcgaccttcttcgccgtggcattgtggggctacttcctctacaccggcgtaaccgacccgctgggcggcatcaactcgctctggcctttgttcggcatcgccaaccaaatgctggcaggcgtggccttgattatgtgcgccgtggtgctgattaagatgaaacgcgaccgttatgtttgggtggtactcgttcccgccgtcggcgtactgttcgtaacctgctacgccggcctgcaaaaactgttccacagcgacccgcgcatcagcttccttgcccacgccggcaaatacagcgacgcattggctaaaaacgaagtccttgcgcctgccaaagacatcggcgaaatggcgcaaatcatcttcaacgacaagattaatgccggtctgaccatcctcttcttgtcggttgtcgtgattgtcgccgcgtacggtttgcgtaccgccctcaaagcacgcaaagtcggctggccgaccgccaaagaaatcccggcggtgtaccgcgacagcaaacagccggaggcacaaagtgaagcataa

SEQ ID NO: 46256 - DNA, 1005 bp, Neisseria meningitidis
atgagcaccttctttcaacaaaccgcgcaagccatgattgccaaacacatcgaccgtttcccgctattgaagttggatcaagtgattgattggcagccgatcgaacaatacctgaatcgtcaaaaaacccgttaccttcgagaccaccgcggccgtcctgcctatcccctgctgtccatgttcaaagccatcctgcccggacaatggcacagcctctccgatcccgaactcgaacacagcctcattacccgcatcgatttcaacctgttttgccgttttgacgaactaagcatccccgattacagcaccttatgccgttaccgcaactggctggcgcaagacgacaccctgtccgaattgctggaactgattaaccgccaactgaccgaaaaaggcctaaaaatagagaaagcatccgccgtcgttggcgccaccattattcaaaccgccggcagcaaacagcgccaggccatagaagtcgatgaagaaggacaagtcagcggccaaaccacaccgagtaaggacagcgatgcccgttggataaagaaaaacggcctctacaaactcggttacaaacaacatacccgtaccgatgcggaaggctatatcgagaaactgcacattacccccgccaatgcccatgagtgcaaacacctgccgccgttgttggaaggggtacctagaggtacgaccgtctatgccgacaaaggctacgacagtgcagaaaaccggcaacatctggaagaacatcagttgcaggacggcattatgcgcaaagcctgccgcaaccgtccgctgacggaagcgcaaaccaaacgcaaccggtatttatcgaagacccgttatgtggtcgaacaaagcttcggtacgctgcaccgcaaattccgctatgcgcgggcagcctatttcggactgattaaagtgagtgcgcaaagccatctgaaggcgatgtgtttgaacctgttgaaagccgccaacaggctaagtgcgcccgctgccgcctaa

SEQ ID NO: 46257 - DNA, 876 bp, Neisseria meningitidis
atggaagaaggtttgatcgacaggctgcttgaaacgctgtggttggacaggcggctcaatcagaatactttaaacggttaccggcgcgatttggaaaaaatcgcccgccgcctgtcccaatcgggcagaatgctgaaggatgcggacgaagcggatttggcggcggcggtttatgttgacggagagcaacggagttcgcaggcgcgcgcattatcggcatgcaaacgcctgtatatatggatggagcgtgaaggcataaggacggacaatcccacccgtttgctgaaaccgcccaaaatcgacaagaatattccgaccctgattacagaacagcagatttcccgactgcttgccgcaccggataccgacacgccgcacggtttgcgggacaaggccctgcttgaattaatgtacgcgaccggcttgcgcgtcagcgaggcggtcgggctgaacttcggcaatgtggatttggacaggggctgtattaccgcgctgggcaagggcgacaagcagaggatggtcccgatggggcaggaatcggcgtattgggtgggacgctattacacggaggcgcgtccggccttgttgaagggcaggagttgcgatgccttgtttgtcagtcagaaaaaaacaggtatttcccgtcagttggcatggatgattgtcaaagaatatgcaggtagggcaggcatcgggcacatcagcccgcacagcctgcgccatgccttcgccacgcacttggtgcagcacggattggatttgcgcgtggttcaggatatgttgggacatgccgatttgaatacgacgcagatttatacccatgttgccaatgtatggttgcagggtgtagtgaaggaacaccattcccgaaactga

SEQ ID NO: 46258 - DNA, 651 bp, Neisseria meningitidis; identical to SEQ ID NO: 44494

SEQ ID NO: 46259 - DNA, 810 bp, Neisseria meningitidis; identical to SEQ ID NO: 39637

SEQ ID NO: 46260 - DNA, 1143 bp, Neisseria meningitidis
atgaatgtttttaaacaacagcttgaacaactcggcgcgcaaaaccaatatcgttcgattccggatttgattcatcaagggcggtatattacgcgggaaaaccgcaaaatgctgaatatgtcgtctaatgattatttgggtttggcatcagatgaaaacttgcgccggtcttttttgcagcaatacggcggtaattttccctcttttaccagttcttcatcgcgtttattaacgggcaactttcctatttataccgatttggaagagcttgtcgcacaacgtttccaacgggaaagcgcgttattgttcaacagcggctatcacgccaatctcggtattttgcctgctttgacgacgacgaaaagtttgattttggcagataaatttgttcacgccagtatgattgacggcatccgtttgagccggtgtgcgttttcccgttatcgtcataatgattatgaacatttgaaaaatctgcttgaaaaaaacgtcggaaaatttgaccgcacttttatcgttaccgaatctgttttcagtatggacggcgatgtggcggatttgaaacagcttgtccaattaaaaaaacagtttcccaatacttatctttatgtggatgaagcccacgcaatcggtgtttatgggcaaaacggattggggattgccgaacgggataatttgattgccgagattgatttactggtcggcactttcggtaaagccttagcctcggtgggggcgtatgccgtctgcaaccaagtattgaaagaatgtttgattaatcaaatgcgcccattgattttttcaaccgcattgccgccgtttaatgtggcttggacttattttatttttgaacgattgccgcaattctcaaaagaaagaagccatcttgagcagttaagtgcatttttacggcgggaagtggcgcatcggacgcaaataatgccgagccaaacctgtatcgtcccctatattttaggcgggaatgaagccgcccttgccaaagcggaatatctgcaaaggcagggttattattgcctgcccatcagaccgccgacagtacccaaaaacacatccagaatccgcctgtctttaacggcagatatgacaacggatgaagtgcggcagtttgcggtgtgcctgtaa

SEQ ID NO: 46261 - DNA, 645 bp, Neisseria meningitidis
atgagaaaaagtcgtctaagccagtataaacaaaataaactcattgaactgtttgtcacaggtgtaactgcaagaacggcagcagagttagtaggcgttaataaaaataccgcagcctattattttcatcgtttacgattacttatttatcaaaacagtccgcatttggaaatgtttgatggcgaagtagaagcagatgaaagttattttggcggacaacgcaaaggcaaacgcggtcgcggtgctgccggtaaagtcgccgtattcggtcttttgaagcgaaatggtaaggtttatacggttacagtaccgaatactcaaaccgctactttatttcctattatccgtgaacaagtgaaacctgacagtattgtttatacggattgttatcgtagctatgatgtattagatgtgcgcgaatttagccattttagcttcgctgaaacttcgttttttcgtatcaatcacagcacacattttgctgaacgacaaaaccatattaatggaattgagaacttttggaaccaggcaaaacgtcatttacgcaagtttaacggcattcccaaagcgcattttgagctgtatttaaaggagtgcgaacgacgttttaacaacagtgagataaaagttcttgttccattttaa

SEQ ID NO: 46262 - DNA, 4128 bp, Neisseria meningitidis; identical to SEQ ID NO: 44524

SEQ ID NO: 46263 - DNA, 2016 bp, Neisseria meningitidis
atgaaatcctaccccgacccctaccgccattttgaaaacctcgattccgccgaaacgcaaaacttcgctgctgaagcgaatgccgaaacgcgcgcgcgttttttaaacaacgacaaggcgcgcgcgctttcagacggcattttgaatcaaatgcaggacacgcggcagattccgttttgtcaggaacaccgcgcgcggatgtaccatttccatcaggacgcggaatatccgaagggcgtgtaccgcgtgtgcacggcggcgacctaccgttcgggctatccggagtggaaaatcctgttttcagtggcggacttcgacgaattgctcggcgacgatgtatatttgggcggcgtgtcgcacttggtggaaaagcccaaccgcgcgttgttgacactaagcaaatcaggcggcgatacggcgtacacgctggaagtggatttggaagcaggggaattggtagaaggtggttttcactttccggcaggcaaaaaccaagtgtcgtggcgcgatgaaaacagcgtgtgggtgtgtccggcttgggacgaacgccagttgaccgaatcgggctatccgcgtgaggtgtggctggtggaacgcggcaagagtttcgaggaaagcctgcctgtgtatcaaatcgataaagatgcaatgatggtgaacgcgtggcgttatctcgatccgcagggttcgccgattgatttgattgaagcgtcggacggtttttacaccaaaacctatttgcaggtgtcggccgaaggcgaggcgaaaccgttaaacctgcccaacgattgcgatgtggtcggctatctggcggggcatcttttgctgacgctgcgcaaggactggaaccgcgcgaaccaaagctatccgagcggtgcgctggtggcggtgaagctgaatcggggtgaactcggggcggcgcagcttttgtttgcgcctgatgaaacgcaggcattggaaagcgtggaaacgaccaagcgttttgtggtggcgagcctgctggaaaacgtacaaggccgtctgaaagcgtggcgttttgccgacggcaaatggcaggaagtcgaactgccgcgcctgccttcgggcgcgttggaaatgaccgaccagccttggggcggcgacgtggtttaccttgccgccggcgatttcaccacaccgctgacgctgtttgcgctggatttgaacgtgatggaactgaccgtcatgcgccgccagccgcagcagttcgattcagacggcatcgaagtgcggcagttttgggtgatgtcgtccgacggcgaacgcatcccttatttccacgtcggcaaaaacgccgcgcccgacacgccgacgctggtttatgcctacggcggtttcggcgtacccgagctgccgcattatctgggcagcatcggcaaatactggctggaagagggcaacgccttcgtgttggcgaacatacgcggcggcggcgagttcggcccgcgctggcatcaggcggcgcagggaatcagcaaacacaaaagcgtcgatgatttgcttgccgtcgtgcgcgatttgtccgagcgcggcatcagttcgccccaacacatcggtttgcagggcggcagcaacggcggcctgattaccgccgccgccttcgtgcgcgaaccgcaaagcataggcgcactggtgtgcgaagtgccgctgaccgacatgatccgttatccgctgctctccgccggttcaagctggacagacgaatacggcaatccgcaaaaatacgaagtctgcaaacgccggttgggcgaattgtcgccgtatcacaatctttcagacggcatcgattatccgcccgcgctcatcaccaccagcctcagcgacgaccgcgtccatcccgcccacgcgctcaagttttacgccaaactgcgcgaaacctcgccgcaatcttggctctactcgcctgacggcggcggccataccggcaacggcacgcagcgcgaagccgccgacgaactcgcctgcgtgttgctgtttttgaaagagtttttgggctaa

SEQ ID NO: 46264 - DNA, 2580 bp, Neisseria meningitidis
atgcgatacgacaaattaaccgccaaattccaacaggcccttgcagaagctcagagtttggcgttggctgcggacggcagctgtctggaagcgggctttgtgctgaaagccctgcttgacgaccaaaacagcggtgctgccgcgctcttggctcatgcgggcgtgaacgtgccgcaggtgaaacagcgtttgcagcagcatttgaacagcctgccgaaagtgtccggccagggcggcgacattctgcccagccgcgaattgcaggcggtgttgaacctgatggacaaagccgcaaccaaacgcggcgatgcctatatcgccagtgaacttttcctgcttgccttggtgcagcagaacgatgcggccggcaaaattttgaaagaagccggcgcgaccgaacaaaacatcaatgccgcgattgacgcggtacgaggaggacaaaacgtgaacgatgccaatgccgaagaccaacgcgatgctttgaaaaaatatacgctcgatctgacccaacgcgcccgagacggtaagctcgaccccgttatcggccgtgacgacgaaatccgccgtgcgattcaggtattgcaacgccgtaccaaaaacaaccctgtgctgattggcgaaccgggcgtgggtaaaaccgccatcgtcgaaggtttggcacaacgcatcgtcaacggcgaagtacccgaatccctgcgcaacaaacgcctactggttttggacttggcggcattgattgccggcgcgaaataccgcggcgaatttgaagaacgcttgaaaggcgtgttgaacgacttggcgaaagacgacggcaacactctgattttcatcgacgaaatccatactttggtcggcgcaggcaaaaccgacggtgcgatggatgcgggcaatatgctgaaaccggctttggcacgtggcgaattgcactgtatcggcgcgaccaccttggacgaataccgccaatacatcgaaaaagacgcggcactcgaacgccgcttccaaaaagtattggttggcgagccaagtgtagaagacaccatcgctatcttgcgcggtttacaggagcgttatgaaatccaccacggtatcgatattaccgaccctgctatcgttgccgcagcggagttgagcgaccgctacattaccgaccgcttcctgcctgataaagcgattgatttgattgacgaagccgccagccgtgtcaagatggaaaaagaaaccaagccggaagcaatggacaaaatcgaccgccgtctaattcagcttcggatggaaaaggcgcacgttgaaaaagaaaaagacgatgccagcaaaaaacgtttggaactgatagacgaggaaatcaacggtctgcaaaaagaatacgccgatttagacgaaatctggaaagccgaaaaagcaatttcagacggtgctgctaatattaagaaacaaattgacgaagtcaaaattaaaatcgaacaggcaaaacggcaaggcgatttggcactggcttcaaaattgatgtatgaagatttggagcatttggaaaaacagcgtgcagccgccgaacgggcagatacggacagcacaaaaccggcaaacaaactcttgcgtaataatgtcggcgcagaggaaatcgcagaggtggtttcccgtatgaccggcattcccgtatccaaaatgatggaaggcgaacgcgacaaactgctgaaaatggaagaagtattgcaccgccgcgtggtcggacaggacgaagccgtgcgtgccgtgtccgacgctatccgccgcagccgctccggtcttgccgatccgaacaaaccttacggcagcttcctgttcttgggcccgaccggcgtgggtaaaaccgagttgtgtaaagccctggcaggctttctgttcgacagcgaagatcatctgattcgcatcgatatgtccgaatatatggaaaaacacgccgttgcacgcctgatcggtgcgcctccgggctatgtcggctacgaagaaggcggctacctgaccgaacaagtgcgccgcaaaccgtacagcgtgattctgctggacgaagtggaaaaagcccatcccgatgtgttcaacatcctgctgcaagtattggatgacggtcgtttgaccgacgggcaaggcaggacggtagattttaaaaataccgtgattgtgatgacttccaacatcggcagccagcacatccaacaaatgggcattcaggattacgaagcggtaaaagaagttgtgatggaggatgtgaaagaacatttccgtcctgaaatgatcaaccgcatcgacgaagtggtcgtgttccacggtttggatcaggcaaacatccgcagcattgcgaaaatccagctcaaaggtttggaaaaacgtttggaaaaacaaaacctgcgcctgactgtttccgatgccgcactggacatcatcgccaaagccggtttcgacccgatttacggcgcacgtccgctcaaacgcgccatccagtcggaaatcgaaaacccgctggcaaaagccctgcttgccggaaactatgcgcccgaaagcgaaatcagggtagaagccgacggcgacagactgaaatttgcctga

SEQ ID NO: 46265 - DNA, 579 bp, Neisseria meningitidis; identical to SEQ ID NO: 39087

SEQ ID NO: 46266 - DNA, 987 bp, Neisseria meningitidis; identical to SEQ ID NO: 44901

SEQ ID NO: 46267 - DNA, 210 bp, Neisseria meningitidis; identical to SEQ ID NO: 41321

SEQ ID NO: 46268 - DNA, 438 bp, Neisseria meningitidis; identical to SEQ ID NO: 38425

SEQ ID NO: 46269 - DNA, 1356 bp, Neisseria meningitidis; identical to SEQ ID NO: 38710

SEQ ID NO: 46270 - DNA, 486 bp, Neisseria meningitidis; identical to SEQ ID NO: 45693

SEQ ID NO: 46271 - DNA, 435 bp, Neisseria meningitidis; identical to SEQ ID NO: 42997

SEQ ID NO: 46272 - DNA, 486 bp, Neisseria meningitidis; identical to SEQ ID NO: 37367

SEQ ID NO: 46273 - DNA, 387 bp, Neisseria meningitidis; identical to SEQ ID NO: 44892

SEQ ID NO: 46274 - DNA, 747 bp, Neisseria meningitidis; identical to SEQ ID NO: 44850

SEQ ID NO: 46275 - DNA, 621 bp, Neisseria meningitidis
atgaaaccgcaattcatcactttggacggcatagacggagccggaaaatccaccaaccttgccgtcatcaaagcatggtttgaacggagggggctgcccgtgctgttcacgcgcgagccgggcggaacgccggtcggtgaggccttgcgcgaaatcctgctcaaccctgaaaccaaagccggtttgcgtgcggaaacactgatgatgttcgccgccagaatgcagcatattgaagacgtgatattgcctgcactttcagacggcatccatgtcgtgtccgaccgttttaccgatgcaaccttcgcctatcagggcggcgggcgggggatgccgtctgaagacattgaaattttggaacattgggtgcagggcggtttgcgccccgatttgaccctgctgttggatgtgccgctggaagtgtcgatggcgcgtatcgggcagacgcgcgagaaagaccgtttcgagcaggaacaggcagatttcttcatgcgtgtgcgcagcgtttatctgaaccgtgccgccgcctgtccggaacgttacgccgttatcgacagtaacctcggcttggatgaagtcagaaacagcatagaaaaagtgttggacggacatttcggctgttaa

SEQ ID NO: 46276 - DNA, 1032 bp, Neisseria meningitidis; identical to SEQ ID NO: 42568

SEQ ID NO: 46277 - DNA, 1194 bp, Neisseria meningitidis; identical to SEQ ID NO: 42892

SEQ ID NO: 46278 - DNA, 1575 bp, Neisseria meningitidis
atggctcaaatccaaatgagcgcaaatgttaaaaccatcaacgccgtctttgccgccatgctggtaggtacagtcggctattttatttattggggcttgggttatacccattacaattacgccgccttattcattattgccacgatgttcggcgtgtttatggcgttcaacatcggcggcaacgatgttgccaattctttcggcaccagcgtcggtgcgggtacgctgaccatcccgcaggctttgctgattgcggcggtatttgaggtcagcggcgcggtcatcgcgggcggcgaggtaaccaataccatacgcaaaggcatcgtcgatttgaagggtgttgatttcgaacccatacagtttgtgtttattatgatgtccgcgcttttggcggcggcgttgtggctgttgtttgcctcgaaaaaagggcttccggtatctaccacccattccattatcggcggcattgtcggcagcgcggtatgtatggcggtaatgaacgatgccgcatcgggcgatttgatacgttggggcaagctgggcggtattggtgtttcttgggtattgtcgcccgtgttgggcggcgcggtgtcctatttcctgttttcgcgcgtcaagaaaaacgtcttagattacaacgcttgggcggaaggcacgctcaagggcatcaagcaggaaaaaaaggcctataaagaacggcaccgcctgtttttcgagggtttgtccgaagccgaaaaagtcgagtacgccaccaaaatggcgcacgacgcgcaaatttacgacgaacccgaattcgatccgcaagagctgcaatcggagtattaccgcggtctttatgcgttcgacaaccgtaaaaacaatgtcgattcctacaaagcgctgcattcttggattccctttatcgcttcgttcggcgcgatgatgatttccgctatgctgattttcaagggcttgaaaaacctgcatttggggatgagcaacgtcaacagcttcctgaccatctttatgataggcgcggcggtgtggatggggacgtttgtgtttgccaaaagcctcaagcgtaaagacttgggcaaatcgacctttcagatgttttcatggatgcaggtctttaccgcctgcggcttcgcattcagccacggggcgaacgatatcgccaacgccatcggtccgtttgccgcgattatggatgttttgcgtaccaacagcgttgccgcgcaaaatgtcgtccccccgattgcgatgctgactttcggcatcgcgctgattgtcggtttgtggtttgtcggtaaagaggtgattaaaaccgtcggtacgagtttggcggaaatgcaccccgcctcgggttttaccgccgaactgtccgccgcatccgtcgtgatgggcgcgtcgctgatggggctgcccgtgtccagtacgcatatcttggtcggcgcggtactcggcatcggtctggtcaaccgcaatgccaactggaaactgatgaagcccatcggtttggcgtgggtcattaccctgcctgccgccgccgtattgtcggttgtctgctacttggttttacaggcagtattctga

SEQ ID NO: 46279 - DNA, 2364 bp, Neisseria meningitidis
atgcaattctcctactcatggctgaaaacccaagccgataccgaactttccgccgataagctggaacatctgttaacgatgtccggcttggaagtggaagaggctgaaactgccgcacctgcctttgcgggcgtggttgttgccgaagtgaaatccgttgaaaaacatccggatgcagaccgtttgaacgttacccgagttgatgcgggtacgggagagttggttcagatcgtgtgcggtgcgccgaatgtgaaagcgggcatcaaagtgccgtgttcgttgccgggtgccgttttgccgggtaatttcaaaatcaagccgaccaaaatgcgcggcgtgccatcaaacggtatgctgtgttcgaccaatgaactaggtttgcctgatgatggtgtgaacggcctgcacattttgcctgaagacgcgcctgtcggtatcaatatccgtgaatacttggatttggacgatacgctgtttacgttgaaaattacgcctaaccgcgctgattgcttgagtgttaagggcattgcgcgcgaagtgtccgcattgacggggtgcgcgttcaggcagcccgaaatccataccgcgccgatcacgggcagtcgaaaacagcccgtgcagattaacgcgcctgccgattgcggccgttttatcagccgcgttattgaaaatgtcaatgcgaaagcggctactcccgattggatgaaacaacgtttggagcgcagcggcatccgcagtatttccgtgctggtggacatcggcaattatgtaatgctggaaatcggccagccgatgcacgttttcgatgccgacaaactttccggcagcctgcacatccgccgcgcgcgcgaaggggaaacgctggaatgcctgaacgagaaaaccgtttccctgtctgaaaatacgctggtcgtggcagacgaaaaaggcgcgttgagtttggcgggcttaatgggcggcgcggcgagcgcggtttcagacggcacgcaaaatatcgtgctggaagcggcttggtttgcgcccgaaatcatcgccggcaaatcgcgccaatacggtttcggttcggattcgtcgttccgcttcgagcgcggcgtggattaccgtttgcaggcggatgccattgaacgtgctaccgaattggtgttgcagatttgcggtggtgcggcaggcgagatggtggaagcgcaaggcgaattgcctgaagcgaagcaggttggattgcgtttggaccgtctgaaaaccgtgttgggcgtggacattcctgccgaacaggtggaaaccattttgcaacacttgggtctgcagcccgagaaaacggcggaaggcttccgcgttaccgcgccgagcttccgttttgacatcgaaattgaggctgatttgattgaagaaatcggacgcgtttacggctatgaaaacatccccgacgattacacgtcaggccgtctgaaaatgctggaactgcccgaaacacgtcgctcgcgttttgccgtttacaacgaaatggcggcgcgtggctaccgcgaagtggtcagctatgccttcgttgacgagcagtgggaacaagattttgccgccaacgccgaccccatccgcctgcaaaacccgctggcggcgcaatatgccgtgatgcgttccacactcatcggcggcttggtggaaattttgcaaaacaacctgaaccgcaaacaaaaccgcgtgcgcgtgtttgaaatcgcccgcgtgttcggcaaaggttcagacggccggtttgtccaaaacgaacgcatcggcggcttgtggtacggcgcggcaatgcccgaacaatggggcgggaaaacgcgcaatgcggatttttacgacatcaaggcagatgtggaaaatctgttgaaaaacaaagcggtcgagttcgttaaaaccggatatcccgccctgcatcccggacgcgccgccaatatcgtttcagacggcaaagtcatcggctttgtcggcgaactgcatccgaaatggctgcaaaaatacgacctgccgcaagcgccgctggtatttgaaatcgatatggcggccgtgttggaatgcgggaaaacgcgctatcgggccgtatcgaaattccagccggtgcgccgcgatttggcgtttgtgatgccggaagctatgagccatgatgatttgctgcttgtcttgaaaggcgcggcaaacaagttggtacaggaaatcagcgtgtttgacgtgtatcgcggcatgggactgcccgaagggatgaagagcgtggcggtcaaagtgattttgcaggatatggaaaacacgctgacggatgaggcggtcgagccgcttatcggaaaactgattggcgcggcaacggcggcaggggcgcggcttcgcagttaa

SEQ ID NO: 46280 - DNA, 855 bp, Neisseria meningitidis
ttgttttccgaacacggcggacttgagatgaaactcgatatttatgctttgctggaacgcgccctgctttcgggcgacccagatgaaaaaggacggctgacggatgaggcgtttgccgccgttcaaaatgcggacggggcggaagcaaacgcgccgccggcggacttcccccgagcgggacggccggacaagcctgttttggtcgcgccgtcgcaactgaccccgcgcaaaatgaacacaaccgaaggttatgcggcgatgctgcacgcgattgcgcatatcgaattcaacgccgtcaatctagctttggacgcggcataccgtttccgcacgctgccgtttcagtttgtccgcgactgggtgaaagtggcgaaggaagaggtgtaccatttccgcctgatgcgcgacagattgcgcgctttcggcttcgattacggcagtttcgaggcgcacaaccatttgtgggatatggcgtacaaaaccgcctacgacccgctgttgcgtatggcgttggtaccgcgcgtgttggaagcgcgcgggctggacgttacgccggggatacgcgcgaaggtggcgcagcgcggcgattcggaaacctgcggcgtattggacatcatttaccgcgacgaagtgggtcatgtcgccatcggcaaccattggtatcaacacctctgccgcgaacgcggtttggaaccgattaccctgttccgcagtctgattgcccgttacgatatgtttatcttccgcggctatgtgaacatcgaagcgcgcgaaaaagcgggcttcagccgctttgaattggatatgctggaagatttcgagcagggtttgaaacagaacaaaaataccgtctga

SEQ ID NO: 46281 - DNA, 648 bp, Neisseria meningitidis; identical to SEQ ID NO: 38134

SEQ ID NO: 46282 - DNA, 630 bp, Neisseria meningitidis
ttggtcaaaacggcagacggctacaaagctattgcccatatccgagtcggcgagagcgtcctttccaaggacgaggcaagcgggaaaacaggatacaaacccgttaccgcccgatacggtaatccgtatcgggaaaccgtttacattaaagtttcagacggcatcggcaacagccaaactcttgtttccaataaaatccacccgttttattcggacggcaaatggattaaggcggaagacttaaaggcgggaagccggctgttatccgaaagcggcaaaacccaaaccgtccgcaacatcgttgtcaaaccaaaaccgctcaaagcctacaatctgaccgttgccgactggcatacctactttgtcaaaggcgataaggcggaaacggaaggggtttgggttcataatgcgtgtccgcctaaaagaacaggaagctccaagaatgaaaaacatggagatggcggtcgaagtcaaatatcagcagaatcacgaattgctgaattaaaaaataaaattattcccggaatgtccaaaaatgaacgattaaagattgagcgaacaatcagaaatattacaaaaaatgccaatcgaaaagcaaaaggagaagagcatggtcgacgcggtcgttaa

SEQ ID NO: 46283 - DNA, 537 bp, Neisseria meningitidis; identical to SEQ ID NO: 37832

SEQ ID NO: 46284 - DNA, 720 bp, Neisseria meningitidis; identical to SEQ ID NO: 44115

SEQ ID NO: 46285 - DNA, 1728 bp, Neisseria meningitidis; identical to SEQ ID NO: 45588

SEQ ID NO: 46286 - DNA, 390 bp, Neisseria meningitidis; identical to SEQ ID NO: 45438

SEQ ID NO: 46287 - DNA, 573 bp, Neisseria meningitidis
atgaaaactttcaacgccaaccgtaccgcctctaccgaagatgaattgtgggtggtagaacatccccccgtgttcacacaggggctggccggcaaacccgaacacctgctgatccgcgacgacattcccatcgtccaaatcgaccggggcgggcagattacctatcacggacccgggcaattggtcgtttatacgatgattgatttcaaacggcgcaaaaccagcgtccgcaacattgtttccgcgcttgaaaacagcatcatcgccacattggcggaatacggcatcgaagcggcggcagatcccaaacgccccggcgtttacgtcggcgaacgcaaaatcgcctcactggggctgcgtatcaaaggaggttccgtctatcacggccttgcgctcaacgtcaatatggatttaagcccgtttacccacatcaacccctgcggctacgccggtatggaaatgacgcaaatcgcggattttgtccaaccctgccccacgccggacgaagtcgccgccaaacttaccgcacaccttgaaacacaattcacaccgaaagcagataacaatgagtga

SEQ ID NO: 46288 - DNA, 309 bp, Neisseria meningitidis; identical to SEQ ID NO: 39572

SEQ ID NO: 46289 - DNA, 1221 bp, Neisseria meningitidis; identical to SEQ ID NO: 44162

SEQ ID NO: 46290 - DNA, 1107 bp, Neisseria meningitidis
atgtctctttatccgatttacaatttttccgccggccctgccgtattgcccgaagccgtgttggaaacggcgcggcaggaaatgttggactacaacggtacgggttttcccgtgatggcgatgagccaccgttcggaaatgtttttgagcatcctgcatcatgcggaacaggatttgaggcagcttttgaaagtgcctgacaactataagatattgtttctgcagggcggagcaacaacccaatttaatatggcagccatgaatctggcacacggtttccgcactgccgacgcggtggtaacgggcaactggagccgtatcgcttatgaacagatgagccgtttgaccgatacggaaatccgtttggcggcgcatggcggcgagcagttcgactatctcgacctgccgcctgtggaaacgtgggatgttgcacccgattcggcgtttgtccattttgccgtcaatgaaacggtcaacgggctgcaataccgtgaagtgccgcgcctttcagaaggcatgccgccgctggtgtgcgatatgtccagcgagattttgtcgcgcgagtttgatgttgccgactacggactgatttacgcaggcgcacagaaaaacatcgggccggcaggggttacggtggtgattgtgcgtgaggatttgctcgagcgttgtccgaacgatattcccgatgtgttcaactaccgttcgcacatcaaccgcgacggtatgtacaacacgccgtcaacttacgcgatttatatgtcggggctggtgttccgctggctgcaggcgcagggcggtgtgaaaaaaattgaagcggtcaatcggctgaaggcgcaaaccttgtatgagacgatagatggcagcggcggtttctatatcaaccgtatccgtccgaatgcgcgttctaaaatgaatgtcgtgttccaaacgagggatgaggagcttgaccgccgttttgtgctggaagccgaattgcagggcttgtgcctgttgaagggctataagtctgtcggcgggatgcgtgccagcatttataatgcgatgccgctcgaaggcgtgcgggctttggcagattttatgcgcgatttccaacggcgttacggttga

SEQ ID NO: 46291 - DNA, 1128 bp, Neisseria meningitidis
atgaacacctcgcaacgcaaccgcctcgtcagccgctggctcaactcctacgaacgctaccgccaccgccgcctcatacacgccgtgcggctcggcggggccgtcctgttcgccaccgcactcgcccggctgctccacctccaacacggcgaatggataggcatgaccgtcttcgtcgtcctcggcatgctccagtttcaaggggcgatttactccaaggcggtggaacgtatgctcggcacggtcatcgggctgggcgcgggtttgggcgttttatggctgaaccagcattatttccacggcaacctcctcttctacctcaccgtcggcacggcaagcgcactggccggctgggcggcggtcggcaaaaacggctacgtccctatgctggcggggctgacgatgtgcatgctcatcggcgacaacggcagcgaatggttcgacagcggcctgatgcgcgccatgaacgtcctcatcggcgcggccatcgccattgccgccgccaaactgctgccgctgaaatccacactgatgtggcgtttcatgcttgccgacaacctgaccgactgcagcaaaatgattgccgaaatcagcaacggcaggcgtatgacgcgcgaacgtttggagcagaatatggttaaaatgcgccaaatcaacgcacgcatggtcaaaagccgcagccacctcgccgccacatcgggcgaaagccgcatcagccccgccatgatggaagccatgcagcacgcccaccgtaaaattgtcaacaccaccgagctgctcctgaccactgccgccaagctgcaatctcccaaactcaacggcagcgaaatccggctgctcgaccgccacttcacactgctccaaaccgacctgcaacaaaccgtcgcccttatcaacggcagacacgcccgccgcatccgcatcgacaccgccatcaaccccgaactggaagccctcgccgaacacctccactaccaatggcagggcttcctctggctcagcaccaatatgcgtcaggaaatttccgccctcgtcatcctgctgcaacgcacccgccgcaaatggctggatgcccacgaacgccaacacctgcgccaaagcctgcttgaaacacgggaacacggctga

SEQ ID NO: 46292 - DNA, 369 bp, Neisseria meningitidis; identical to SEQ ID NO: 39932

SEQ ID NO: 46293 - DNA, 1092 bp, Neisseria meningitidis
atgaaaaagagaaaaatactgccgctggcaatttgtttggcggctttgtctgcctgtacggcgatggaggcacgcccgccccgggtaaatgaagcccaagccccccgcgcggatgaaatgaaaaaagaaagccgccccgcgtttgacgcggcagccgtaccggtatccgacagcgggtttgccgccaatgcaaatgtccgccgttttgtggacgatgaagtcgggaaaggggatttttcccgggcggaatggcaggatttttttgacaaagcggcttacaaggcggacatcgtcaagattatgcaccgaccctccacatcgcgtccgtggtatgtgttccgcacgggaaattcgggcaaggcgaaatttcgcggcgcgcgccggttttatgcggaaaaccgcgcgcttatcgatgatgtggcgcaaaaatacggcgtgcctgccgaacttatcgtggcggttatcgggattgaaacgaattacggcaaaaatacgggcagtttccgtgtggcggacgcattggcgaccttaggctttgattacccccgccgcgccgggtttttccaaaaagaattggtcgagcttttaaagctggcaaaagaagaaggcggcgatgttttcgcctttaaaggcagctatgcgggcgcaatggggatgccgcaatttatgccttcgagctaccggaaatgggcggtggattatgacggggacggacatcgggacatatggggcaacatcggcgatgtcgcggcatcggttgccaattatatgaagcagcacggttggcgcacgggcgggaaaatactggtgtctgcaacattggcgccgggtgcggatgttcaggcaatcattggcgaaaaaaccgccctgacgcggacggtggcggatttgaaggcgtacggcatcatccccggcgaagagcttgccgatgatgaaaaggcggttttgttcaaactggaaaccgcacccggcgtgtttgaatattatttgggcttgaacaatttttatacggtatggcagtacaatcacagtcggatgtatgtaacggcggtcagggacattgccaattcgcttggcggcccgggattgtaa

SEQ ID NO: 46294 - DNA, 393 bp, Neisseria meningitidis; identical to SEQ ID NO: 39912

SEQ ID NO: 46295 - DNA, 303 bp, Neisseria meningitidis
atgggctatcgtgtcggcataaattgttttgatacaagattgcaggcagacgactatttattgtcgtcccttcctcctactgttacccaggacggaaaaatcatcaggccggaaagggtgggcgataaatggattttgaacggaaagccggttacgttgtcttatccggaatgttccaattttgagcagataaagcaaggttcttatgtcggttcgacggttctaattctgttcgtagtcattttcggtttcaggcttctgattaatttcttaaaagacatgggcaaggttggtactgattga

SEQ ID NO: 46296 - DNA, 876 bp, Neisseria meningitidis; identical to SEQ ID NO: 44545

SEQ ID NO: 46297 - DNA, 483 bp, Neisseria meningitidis; identical to SEQ ID NO: 39984

SEQ ID NO: 46298 - DNA, 921 bp, Neisseria meningitidis
atgaccttaaccgaattgcggtacatcgtcgcagtcgcccaagaacgtcatttcggcagggcggcgcggcgttgttttgtcagtcagcccactttgtctattgccattaagaaattggaagaagagcttgccgtctctttgtttgaccggagcagcaacgatattattacgaccgaggcgggggaacgtatcgttgcacaggcgcgtaaggtgttggaagaggcagagcttatcaggcatttggcaaatgaagaacaaaacgagctggagggtgcgttcaaactcgggctgatttttacggttgcgccgtacctgctgccgaaactgattgtctcgttgcgccgtactgcaccgaaaatgcctttgatgttggaagagaattacacgcatactttgaccgagtcgctcaaacgcggggacgttgatgcgattatcgttgccgaaccgtttcaagagccgggcattgttaccgaacccttgtatgacgaaccgtttttcgtgattgtcccgaaagggcattcatttgaggaactggatgccgtttcgccccggatgctgggtgaggagcaggttttgctgctgacggaaggcaactgtatgcgggatcaggtactctcaagctgttccgaattggcggcgaaacaacgcatacaggggttgaccaatacattgcagggcagctcgatcaatacaatccgccatatggtcgccagcggtttggcaatcagcgtgttgccggcaaccgcactgaccgagaacgatcatatgctgttcagcattattccgtttgagggtacgccgccaagccgacgggtcgtattggcgtaccgccgcaattttgtccgtccgaaggcgttgtcggcgatgaaggcggcgattatgcagtcgcagcttcacggggtaagttttatccgcgactag

SEQ ID NO: 46299 - DNA, 1986 bp, Neisseria meningitidis; identical to SEQ ID NO: 44981

SEQ ID NO: 46300 - DNA, 648 bp, Neisseria meningitidis; identical to SEQ ID NO: 37692

SEQ ID NO: 46301 - DNA, 702 bp, Neisseria meningitidis; identical to SEQ ID NO: 44292

SEQ ID NO: 46302 - DNA, 600 bp, Neisseria meningitidis; identical to SEQ ID NO: 45176

SEQ ID NO: 46303 - DNA, 945 bp, Neisseria meningitidis; identical to SEQ ID NO: 39666

SEQ ID NO: 46304 - DNA, 816 bp, Neisseria meningitidis; identical to SEQ ID NO: 39466

SEQ ID NO: 46305 - DNA, 2226 bp, Neisseria meningitidis; identical to SEQ ID NO: 44293

SEQ ID NO: 46306 - DNA, 870 bp, Neisseria meningitidis
ttgccgcaacccaaccctcaagatttacgtcatagcccgttcctgcatcggcgtgcgggaatgacgagaattggggattttgccgccaaatccatgatagagatacggagcaaacgaatgattaccctgccttccttaaacaatctgccgtcaaaatgggatgaaatccgccattgcctcgaaacccgggtttttgagtgcggcgttatgccgcatcccaatctgacggaatgcgaagccgggcagttcgatcgggatttttgggacaatatcggctgcgcgcctgaagaatatgtccgtatccgccgagccatccgtctgttggaagtgcgttatcccgacagcttgaacgagctggtgtgtgccgccattgccacgcctttgggcgagatgctggcggtgttcggaaataagggattgtgtctgctggagtttgtcggacagaagcatttggaacaggaaattgccgccgtccaaaaagccttgcgcggacggtttgtgtttcgggaggatgagcggacgcaacttttgcggcaggaattggacttatacttcaagggtcgtctgaaaacctttgccacgcctttggagcagattggcaccgagtttcaaaagcaggcatgggacgcgctcttggcgattccttacggcgaaacgcgcagctacaaggagcaggcgcagcgtttgggcaaccccaaagccgtccgcgccgttgccgccgccaacgggcagaacaaagtatctatcctgattccctgccaccgcgtcatcggcagcgacggcaaactgaccggctacgcgggcgggttgaaccgcaaacagtttttactggctttggaacgcggcgaagttcagacggcattgttttaa

SEQ ID NO: 46307 - DNA, 402 bp, Neisseria meningitidis; identical to SEQ ID NO: 38334

SEQ ID NO: 46308 - DNA, 1251 bp, Neisseria meningitidis; identical to SEQ ID NO: 44589

SEQ ID NO: 46309 - DNA, 300 bp, Neisseria meningitidis
gtggattatccggactttcctcaagagattcctacaccaaattatacagactgggtaaaaattaaattcaagcagttcagctatctgaaatttatctatggatacgccacgaagaaccaagataaaaatatcaaaaatgtattggaacttggagaattaaagcaggatgatgaaatcttggattatggaggtgcgctggaagtgataggcagtaggtatgatcttccgaccggttttagtatagatatagtttgccgggaaatagagttagaatttttagatcaggagagtttcaattaa

SEQ ID NO: 46310 - DNA, 1149 bp, Neisseria meningitidis
gtgcatattaacttttcaatggaatataaagaatttaatgaaaattatttatataaaaagccatttatttttaaaaatgctttagatgttagttctatctcatggaaagaaattaatgaattgtatcaacgtgcagaccctactgactggcaattcaaatttcgcaaaggagaaataatcccgaaagaagcctatgttgaatcattcaatgatgtaggtaagatacgttatcgttttaataaaacagccgtatatcagtatctgcaagatggtgcaacaatggtttataaccgtattgataatgaaccatttgttgatagtattgctaaacaaattgctcaatttgctcaagcacaaacagttgttagtggttatttagcttttggtagttcttcatcatatcggaatcattgggatactcgtgatgtgtttgcggttcaattgattggcacaaaacactggacactttctgctgcaaattttgatatgccattgtatatgcaacaagcaaaagatataccgcacattactccgcctacaacagtagatatggaagtcattttagaggcaggagatattttatatatcccgcgtggttggtggcataatcctatgcctatgaattgtgaaacattccatttagctattggtacttttcctccaaatggttataattatatggaatggttgatgaaaaaaatacctgatattcagagtattcgtcaaaatttcataggctggcaacacgaccaaaaaaacctagatgatgcagctcaagcaattaccgaaatgatgaataacccaaaaaattatcaaacatttatgcaagattttttgggaagtcagcgtaccaatacagcattcaatatggatttgtttggaaatgctcataatcaaacattacctgagcattgctttttaagattaaatagtaatgattactcaactatttcacaaggatacctgattgcgaatggcattaaattaaatatagatgaaatcagtatggaatttttaatgattttgattgaaaaacacataatatctctcactgaaatattatcgttatttaatgctaacaaacaagaaattgttaagagattaatttggcaattatgtttattagatgtcattgaacttgtgaggtaa

SEQ ID NO: 46311 - DNA, 1254 bp, Neisseria meningitidis; identical to SEQ ID NO: 45443

SEQ ID NO: 46312 - DNA, 1068 bp, Neisseria meningitidis
atgagaaaaatccttgttaccggcggtgcgggctttatcggctctgccgttgtccgtcatattatccgaaacacccaagattccgtcgtcaacctcgacaaactgacctacgcgggcaatctcgaatcgctgaccgacattgccgataatccccgctatgctttcgagcaagtggacatttgcgaccgcgccgaactcgaccgcgtattcgcacaacaccggcccgatgccgtgatgcacttggcggcggaaagccatgtcgaccgttctatcggttcggcaggcgagtttatccaaaccaatatcgtcggcacattcaatctgcttgaagcagcccgcgcctactggcaacaaatgccgtctgaacagcacgaagccttccgtttccaccatatttccaccgatgaagtctatggcgatttaggcggcacggacgatttgtttaccgaaaccgcgccctacgcgccgtccagcccctactctgcctctaaagcgtccagcgaccacctcgtccgcgcgtggttgcgtacttacggcttgccgaccattgtaaccaactgctccaacaactacggtccttaccattttccggaaaaactcattcctttgatgattctgaacgcgcttgacggcaaaccgctgcctgtgtacggcgacggtatgcaaatccgcgactggctgtttgtcgaagaccacgcgcgcgcactgtatcaggttgttaccgaaggtgttgtcggcgaaacctacaatatcggcggccacaatgaaaaagccaatattgaagtcgtcaaaaccatctgcgccctgctggaagaactcgctcccgaaaaaccggccggtgtggcgcgttatgaagatttgattactttcgtacaagaccgccccggccatgacgtacgctacgccgtcgacgcagccaaaatcaggcgggatttgggctggctgcctttggaaaccttcgagtccggcctccgcaaaaccgtgcaatggtatctggacaacaaaacctggtggcaaaatgtattgaacggcagctatcgtttggaacgtttaggtactggaaaatag

SEQ ID NO: 46313 - DNA, 1407 bp, Neisseria meningitidis; identical to SEQ ID NO: 45750

SEQ ID NO: 46314 - DNA, 1068 bp, Neisseria meningitidis
atgggcggtaaaacctttatgctgatggcgggcggaacgggcggacatattttccccgcgctggcggtggcggattcattgcgcgcgcgcggccatcatgtgatttggctgggcagcaaggattcgatggaagagcgtatcgtgccgcaatacggcatacgcttggaaacgctggcgattaaaggcgtgcgcggcaacggcatcaaacgcaaactgatgctgccggttactttgtatcaaaccgtccgcgaagcgcagcggattatccgcaaacaccgtgtcgagtgcgtcatcggcttcggcggcttcgttacctttcccggcggtctggcagcgaaactcttgggcgtgccgattgtgattcacgagcaaaacgccgtggcaggcttgtccaaccgccacctgtcgcgctgggcgaagcgggtgttgtacgcttttccgaaagcgttcagccacgaaggcggcttggtcggcaaccccgtccgcgccgatattagcaacctgcccgtgcctgccgaacgcttccaagggcgtgaaggccgtctgaaaattttggtggtcggcggcagtttgggcgcggacgttttgaacaaaaccgtaccgcaggcattggctttgctgcccgacgatgcgcgtccgcagatgtaccaccaatcgggacggggcaagctgggcagcttgcaggcggattacgacgcgctgggcgtgaaagccgaatgcgtggaatttattaccgacatggtgtccgcctaccgcgatgccgatttggtgatttgccgtgccggcgcgctgacgattgccgagttgacggcggcgggattgggtgcgttgctcgttccgtacccccacgcggttgacgatcaccaaaccgccaacgcgcgttttatggtgcaggcagaagcaggactgctgttgccgcaaacccagttgacggcggaaaaactcgccgaaatcctcggcagcctgaaccgcgaaaaatgtctcaaatgggcagaaaacgcccgtactttggcattgccgcacagcgcggacgacgttgccgaagccgcgattgcgtgtgcggcgtaa

SEQ ID NO: 46315 - DNA, 1047 bp, Neisseria meningitidis; identical to SEQ ID NO: 43592

SEQ ID NO: 46316 - DNA, 633 bp, Neisseria meningitidis; identical to SEQ ID NO: 36226

SEQ ID NO: 46317 - DNA, 354 bp, Neisseria meningitidis
atgaaaaattgcaaatttttttatgatccgacaagggcaatctatgatagcggtgcagattacttaactagggaaaaacatagattagtcgttatcgcaaatagtgcttgggggctattgcttaatttatcttgttattatgacgaggttttggaaaagcggaaaataccgttcggcaaacaggaaattgatgacgatatggacaaagtgtccgcccataagcggaagtttaaagatatttctgaaatcaaagtaggggatggttgggaatacccgttcaattatgagcagggaatgaaagaattagatgaagtgctattgaaatacattcccttttttgaagaagaacgataa

SEQ ID NO: 46318 - DNA, 1026 bp, Neisseria meningitidis
atgaaatacaaagccctgtccttactgccgcttgtcgctgcccttgccgcctgtgccggggggggggtagccgaaccgcacgtccccgtgtccatccccaccgccaccccgctgcccaccggcgaggtaaagttatcagacgacaatagcaaaatcgaaaacatcaacaccgccgacaccggaagcacatccggcatttccattcagcagcggaaatatgaagtagaaagttacggcatcaaaagagaagaaaaagcattcatcttccaaacacccggcggcgcgcaatacgccctttcatcctacgccgaccccataaccgtcagctactcctcccccgatttcaaaattcccgaccgccacgcagggcagcggcttgccgacggcagccgcatctttatctgttgcagcgaatccggggctacttcgtatgcggaaatcaccaaacaagattatatgaaattcggggcgtggataggtcccaacggcgaaatcgacctcttcgccggcggcttccccgtcggcaaaacgccgaagcctaaatactcttggggcaacaccgaacccgaaaccaaaggcaagggcaaaatcacttatcaggtttggggcatccgcgtcagaaacaggcaatttgttacttcctcttatacgccgccgaaaagcggttcttattatgggacacttgccaacacccccgtcctttcctttatcactgccaatttcaacagcaacaaactggcaggcgaaatccgcggcaacagcgattacggaccgagtgtgaaaattgaaaacgcaacgattaacagtttatccttttccggcactgccacgtccggcgggaaaaccggcaatttggaaggcaagttttttggaaaattcaacggctaccgggacactgaaaccagcataggcggcaaaatcacctttgacggcgaccgctccctcgataccgtattcggcggtgtgagttataaaaaagaacttgaaaacaacactgatacaagtaccacccatctcacaaaataa

SEQ ID NO: 46319 - DNA, 582 bp, Neisseria meningitidis; identical to SEQ ID NO: 39957

SEQ ID NO: 46320 - DNA, 510 bp, Neisseria meningitidis; identical to SEQ ID NO: 42226

SEQ ID NO: 46321 - DNA, 261 bp, Neisseria meningitidis; identical to SEQ ID NO: 38084

SEQ ID NO: 46322 - DNA, 1038 bp, Neisseria meningitidis
ttgaaatttcgtttcacagcttggagtatatacatgagcattaaagtagcgattaacggtttcggccgcatcggccgcctcgcattgcgtcaaattgaaaaagcccacgacatcgaagtcgtcgccgtcaacgacctgacccctgccgaaatgctgctgcaccttttcaaatacgacagcacgcaaggccgtttccaaggtactgccgaattaaaagacgatgccatcgtggtaaacggcaaagaaatcaaagttttcgccaatccgaatcccgaagaattgccttggggcgagttgggtgtggatgtcgtcctcgaatgtaccggcttctttaccaataaaaccaaagccgaagcccacatccgtgccggcgcgcgcaaagtcgtgatttccgcacctagcggcaatgatgtgaaaaccgtcgtatatggcgtaaaccaagacattttggacggcagcgaaaccgttatctccgctgcttcctgcaccaccaactgccttgccccgatggcggcagtcctgcaaaaggaattcggcgtagtcgaaggcctgatgaccaccatccacgcctacaccggcgaccaaaacacccttgacgcgccgcaccgcaaaggcgatttgcgccgcgcccgcgccgccgcgctcaacatcgtgcccaacagcaccggtgccgccaaggccatcggtctggttatccctgaattgaacggcaaactcgacggctccgcccaacgcgtccctgttgccaccggctcgctgaccgaattggtttccgtcctcgaacgccctgtaaccaaagaagaaatcaacgccgcgatgaaagccgccgccagcgaatcttacggctacaacgaagatcaaattgtttcttccgacgttgtcggcatcgaatacggttcgctcttcgatgcgacccaaacccgcgtgatgaccgtgggcggcaaacaattggtgaaaactgttgcctggtacgacaacgaaatgtcctacacctgccaactcgtccgcactttggaatacttcgcaggcaaaatctaa

SEQ ID NO: 46323 - DNA, 729 bp, Neisseria meningitidis; identical to SEQ ID NO: 45317

SEQ ID NO: 46324 - DNA, 153 bp, Neisseria meningitidis
atggatgcaaagtccttagacggcaaaatcaagatgccgctttatttttcagacggcatttccgtcaataaaaaagtcggtattggagcccaaaacagcctacgtcttgccgggatagggatgaaatctttaagaaaaaatgattatagttga

SEQ ID NO: 46325 - DNA, 954 bp, Neisseria meningitidis
atgacacataccgtccacctgcatttagaagaaaccgacaacttggcgttgcagcgtctgtgcggttcttttgacaacaaccttgatttacttgctaaagcactcgatatccacatcagccgccgttttgaacatttcactttcaacggcgcatttgcacacgccggcaaacgcgcactgctcaaactcttggaaacggcgcagacgcgcgacctaaacgacggcgacatcaggcttgccgccgtcgaagcccaaaccgaagatgccggtcatcaagaaaaaaaccatgaccacgcctattatttccgtaccaaacgcggcagcatcggcggcagaacgccacggcagaacggctatatccgcgccctactcaaccacgacatcgtattcggtctcgggccggcaggtacgggcaaaacctatctcgccgtcgccgccgccgtcgatgcgatggaaaaacaccaagtcgaacgcatcattttagtgcggcctgccgtcgaagccggcgagaaactgggttttctgcccggtgacctgacccagaaagtcgatccctaccttcgtccgctttatgatgccctctatgacctgatgggctttgaccgtgtcaccaagctgattgaaaaaggcctgattgaaatcgccccgctcgcctatatgcgcggcaggacgctcaacggcgcatacatcatcctcgacgaagcgcaaaacaccacgcccgaacaaatgaaaatgttcctgacccgcatcggcttcggcgcgaaagccgtcattaccggcgacaccagccaaatcgacctgcccaaaaacatcaaatcgggattaaaagatgcgcgtgagaaactgcacaacgtggaagggctgtatttccacacctttaccggcgaagacgttgtccggcatcctctggtgcaaaaaatcgtcgaagcctacgaatcggcagaacacgactga

SEQ ID NO: 46326 - DNA, 297 bp, Neisseria meningitidis; identical to SEQ ID NO: 39905

SEQ ID NO: 46327 - DNA, 951 bp, Neisseria meningitidis
atggaatcaaaaatgtccatccatactctgaaacgcctgccctcatcgctgctgctcggtctctgcctttccctgccgtcagcccacctttttgccgacaacgacattttagggcaatttttagaacagaacatgcttacctcctccgatccgatagaaatattcgccgaaagcacaatacaccccaccaacacccaagccattacaggcggtctgattctctcctcacagtctgccctggtcgtcaacaacaaaaccggacagatactgtatcagaaaaacgccgacaggattatgcccatcgcctccatttccaaactgatgagcgcgatggtcgttttggatgcaaacttggacatgaacgaaaccgttaccattacgcccgacgaaatcgaccgcctcaaagggaccggcagccgtcttgccataggtacggcacttacacgcaaagaactgctgcacctgagcctgatgagcagcgaaaaccgcgccacccatgcattgggcagaacctaccccggcggcatgggcgcatttgtcgccgccatgaaccgtaaagcccaaagcctcggtatgtacggcagccgcttttacgaaccgaccggactcaacttccaaaacgtttctaccgccaaagacctgagccttatggtcaacgccgccgcccaatatccgcaaatccgcaccaactcgacttccaactacgcctcggtacagaccaaaaacgggcagcagaactacaaaaactccaatgccctggtcagagaaggcatgtggaacatcgaattgcagaaaaccggctacatacgcgaagcaggcaggtctatggttgtcaaagccaacattcaaaatcaacccgttaccatcgtattgctgaactcgcccacatccgccacacgcgtcaacgacgcccgcaaaatcgaatcgtggatgctgcagcaacgctcctga

SEQ ID NO: 46328 - DNA, 1302 bp, Neisseria meningitidis
atgccgtctgaaaccgcccgccccctttatgcggacacgtgcgccgcacacacgctcgtctggttccgccaaaacctccgcatccgcgacaacgccgccttatgcgccgccgttgccgaaggtttgcccgttatcggtatttggattgacgatgccgaaacagacaaccctcgccgcgccgcgttctaccgccaatccgccgccgaactcgcccaagggcttgcagggcgcggcatcccgctctacacggcggcatcgcctgccgagctcgtccggctcgccgtccgcctcaatatccgcgccgtcatcgccgacgaatcccatacttttgccgacaaactcgccgacaacgccctttggcatgaattggacaaacacggcatcgcgttaaccttcgtcaacgaccgtgccgttttcggcaaaaccgacctgatacccgacggcggcacggcacacaccgatttcgaccgctaccgcgaagtatggctcgaccgcttttccaagcagccccccgccggtccggacctattcgcggcataccgccaacccttccccgaaaacctttccgccccgccgcctgccgccctttcagacggcatcttcctgccgcaaaacagcggcgaaacggcggcttggcggcagtggcggcggtttctcgaacaggcggattcctactccgttttaaaggatttcccctcgcgcaaacacacttcgctgatgggcgcgtatttgagtgccggctgcatctcgccgcgcctgctcgcgcgggaaagcctcgaacgccgtctgaacgcgtgggcggacaacatcatccgccgcgattttttccttcaacttgccttgcagcacacggatgacgacccttcagacggcaatcctgaacacaccctgcgcctgacgctttggcagcagggccagaccggcattccgattatcgatgccgcgatgcgctgtttgcacaaaaccggcagcctccaccccgccctgagacgcttgagcgcggattttttctgccacgttttaaacctcccccgccgcgaaggcgagatatggtttgcccggcagctgaccgatttcgatgcggcaatcaaccaaggcaactggtggcttgccgcctcacggcacacctgccccgacattgccgccgcctcataccgtaccgacccggacggtacttttatcaaacggcacattcccgaactcgcccacctgtccgccgacaccgtccacacgccttggcggtttgcctgttcggtcgatacccacggctatcccgcctatcctgtcgccggtattccctaa

SEQ ID NO: 46329 - DNA, 918 bp, Neisseria meningitidis; identical to SEQ ID NO: 37376

SEQ ID NO: 46330 - DNA, 861 bp, Neisseria meningitidis
ttgcccgtcttcccgataagccttaaaatacacgccgtcaaacctaccgtccgtccgtacatgagcccatccccctttatcgaaatgaaagacgtcgccttcgcgtatggcgaccgcccgattctgaagaacatcaatttcagcattccgcaaggcaattttgctgccgtaatgggcggttcgggcagcggcaaaaccacgctgatgcgactgattacaggacagattcgtccgcagtccgggcaggttttgattgaaggacgggatttggcgggcttttcggctgacgagttgtatgaacaccgccgccgtatgggcgtattgttccaacacggcgcgctgtttactgatttgtcggtattcgacaatatcgcttttccgatgcgcgaactgacgcgcctgccggaagcggtgattcgggatttggttttgttgaaattgaacgcggtcggtctgcgcggtgtggaaaacctgatgccgtccgagttgtccggcgggatgtcgcgccgcgtcgcgcttgcccgcacgattgcgctcgaccctgaaattatgttgtacgacgagccgtttaccggcctcgatccgatttccttgggcgtgattgcccacttgatcagccgcgtcaacaaggctttgcgttcgaccagtattatggtaacgcacgacattgaaaaatctttggaaatcgtcgatcaggtgattttcttggcgcacggcgaaattatgttctccggctcgccgcaggaaatgcgcgaactggattcgccttgggtgcgccagtttgtcggcgggctggcagacggccccgtagcataccgttatccggcgcaaacgtcgttgcagcaggatttgctcgggtaa

SEQ ID NO: 46331 - DNA, 534 bp, Neisseria meningitidis; identical to SEQ ID NO: 39841

SEQ ID NO: 46332 - DNA, 759 bp, Neisseria meningitidis
atgaatccaaaaactccccccgaccatacagaagatgccgtgcgcctctccaaacgcatggcgcaactggggctttgttcgcgccgcgaagccgacggctacatcgaacaaggctgggtaacggtcaacggcaaaaccgccgtactcggtcagaaagtttcaccggccgaccgtatcgaactaaacaagaaagcccacgaacagcaggcggcacgcattaccatcctgctgaacaaacctgtcggctatgtcagcgcacaagcggaaaaaggctataaatccgccgccgaactgattacccctgaaaaccgctgggaaggcgacaccggacgcatccgtttcgatccgaaacacaaaatcggcctcgcccccgccggcaggctggacatcgactcggtcggattgctggtattgacgcaggacggccgtatcgccaagcagcttatcggcgaaaacagcggcagtgaaaaagaatatttggtgcgcgtgcgcggcaaattggacgaaaaaggacttgccttactgaatcacggattgagtttggacggcgagaaactgcgtcccgcccaagtagaatggcaaaacgaagaccaactgcgcttcgtgttgaaacagggtaaaaagcggcaaatccgccgtatgtgcgaactggtcggactgcgcgtcgtcgggctgaaacgcatccgcatgggcaaggtcaaactcggcaggctgccgcccggcaaatggcgttatctcgcccccggtgaatcgttttaa

SEQ ID NO: 46333 - DNA, 534 bp, Neisseria meningitidis; identical to SEQ ID NO: 37791

SEQ ID NO: 46334 - DNA, 816 bp, Neisseria meningitidis; identical to SEQ ID NO: 38138

SEQ ID NO: 46335 - DNA, 465 bp, Neisseria meningitidis; identical to SEQ ID NO: 45733

SEQ ID NO: 46336 - DNA, 516 bp, Neisseria meningitidis
gtgctgaacaatgaacccggcgaactgaccaatgtcgaacaaggcgaaagcgtttgcgttccggttgacgacatcagcgactggatgttcgtgtgcaacggcattccctacggcggctttaccatacaggcaatgcgtggacagatgacggaagaggagcgtaccgaacacgatgccgcatggggaatcgatttcggcgatcccgggcaggtattgctggtgtatgaagaaaaagaacatcccgaaaatctggaagagcatccgatgtgccggaactgtattgacgattttcggcaacagttgtcccaaaatccggattttctgcatgagcaggacgaagacggctatacgccgcttcatcatgaagccatcgcaggaaatgcacttatggttcaagccatgcttgaatacggcgcaaatcctgcctcaaagacatcggaaggctataccgccctcgattttgcccgcctggcgggctggcaaaatgttgccgacctgctcgaaccgcgacattag

SEQ ID NO: 46337 - DNA, 321 bp, Neisseria meningitidis; identical to SEQ ID NO: 39983

SEQ ID NO: 46338 - DNA, 678 bp, Neisseria meningitidis
atgcaagctgatttcaaccgccccgtcctcgccgtcgataccggaacttcctatttgtcgctcgcgctgcgcgccgacggcgaaacccgtctgttccatcaggaagtcggcagccgccagtccgcactgatcctgccggaaatccgcaccctattccgaaatgcaggcattaccgccgccgatttgggggcgattgtttatgcgaaaggccccggcgcgtttacgggactgcgtatcggtatcggcgtggcgcaaggtttggcaacgccgtttgatacgcctttaatcggcatccccacgctcgatgccgccgcctcgctgccgccgccgcaaagctgcatactcgccgctgcggacgcgcgtatgggcgaagtgttttatgcgtggttcgacacgctgaaccgccgccgtttgagcgattatcaggtcgggcgggcggcagacatccggctgccggagggatgtgccttttcagacggcataggcagcgcgttcgcgttggaagaaacgccgccgttttcaggcaaacccgatatgccgaccgccgccgacttcctcaatctggcggctgaaggcggttttcccgccgtcgctgcggcacacgccgagctgctctacgtccgcaacaaaatcgccctgactgccaaagaacaggcggaacggagggcgcgcctgtga

SEQ ID NO: 46339 - DNA, 210 bp, Neisseria meningitidis; identical to SEQ ID NO: 39816

SEQ ID NO: 46340 - DNA, 1002 bp, Neisseria meningitidis
atgaaacggaaaatttggctgctgccgctgctggcggtttcggcatacctgcaggcgcagacggaagtcaggctggcggtgcataagtcgttcagcctgcccaaagggctgattgcgcgcttcgagcgggcaaacgatgcgaaggtgtcgattattcaggcgggcggcgcgaacgaaatgctcaacaaactgattttgagccgcgccaacccgattgccgacgcggtgtacggtttggacaacgccaatatcggcaaggcgcgggaaatgggcattttggcggcagcgcaacccgaatccgcccccgtcgcggtcgggctgccttcggctttggcggtcgattacggctatgtgtccatcaattacgacaaaaaatggtttgaaggcaaaaagctgcccctgccgcaaaccctgcaggatttgacccgccccgaatataaaaacctattggtcgtgccgtctcccgccacgtcgtccccggggctgggcttcctgatggcgaacatcagcggtctgggcgaagaaggcgcgttcaaatggtgggcacagatgcggcagaacggcgtgaaggtcgccaaaggctggagcgaggcgtattacaccgacttttcgcacaacggcggcgcgtatccgctggtggtcggttatgccgccagcccggcggcggaagtgtatttttccaaaggcaaatacagcgagccgccgacgggcaacctgtttttaaaaggcggcgtattccgccaggtcgaaggcgcggcagtcttgaagggcgcgaaacagccgaagctggcggcaaaactggtgcaatggctgcaaagtcgggaagtgcagcaggcggttccgtccgaaatgtgggtttaccccgccgtcaaaaacacgcgcctgcccgacgtgttccgcttcgcccaagccccgacgcacaccaccgcccccgcgcagcgcgatattgatgcgaaccagcgcggatgggtttcccgttggattagaacggttttgaaataa

SEQ ID NO: 46341 - DNA, 876 bp, Neisseria meningitidis; identical to SEQ ID NO: 38647

SEQ ID NO: 46342 - DNA, 726 bp, Neisseria meningitidis; identical to SEQ ID NO: 39737

SEQ ID NO: 46343 - DNA, 2766 bp, Neisseria meningitidis; identical to SEQ ID NO: 45507

SEQ ID NO: 46344 - DNA, 528 bp, Neisseria meningitidis
atgtatgcaactataggagatgtgatgcacgcgcttcatttttcggcttcggacaaggccgcgctttatcgggaggtgttgccgcagattgagtctgtggtggcggacgagacggattgggtggcgaatttggcgaacacggcggcggttttgaaggaggcgttcggttggttttgggtgggtttttatttggtcgatacgcgttcggacgaattggttttggcaccgtttcaggggcctttggcgtgtacgcggattccgttcggtcgcggggtgtgcggtcaggcttgggcgaagggcgggacggtggtcgtcggggatgtggacgcgcatcccgaccatattgcctgttcgtctttgtcgcgttcggagattgtcgtgccgctgttttcagacggccgctgtatcggcgtgttggacgcggacagcgaacatttggcgcagtttgatgagacagatgctttgtatttgggcgagctggcgaagattttggagaagcggtttgaggcttcgcgtcaggcggtttga

SEQ ID NO: 46345 - DNA, 288 bp, Neisseria meningitidis
atgacatattcttttcgtgtagaaaatataaatgatatatctgatattcctgaaaatcatttggaaatagttagagctgctctgcctagtaatagaagtaatgccttatctcgtgagccagatggggcacaagctgtttttgtttatgaaattgatggtgaatttagagctaagttatttgaccgcataaaagatacagacagttatttacaagcaacagaggataattactctaatgaccctcgcagtataggagtagtatacgttttggagcaacagcaagggtag

SEQ ID NO: 46346 - DNA, 303 bp, Neisseria meningitidis
gtgtttaacgagccgctgaacgtgtttaccaatcctgccgatttcggtgaaaccgtgatgattggcggtaaagaggtaaacgcgatatttgaccgtgaatttataacggatagcgggtttggcgttgccgttgccaatgccgacccgcaaatcatcgttactgaagacgacctgccggaagacgtgaagtcggtggttgttaccgtgcgtggcaaacgttatgcggtggcggaaaccgattttgacggctgcggaatggttgttgtgcaattgagggcgatacatgacaagccgacttactga

SEQ ID NO: 46347 - DNA, 483 bp, Neisseria meningitidis
atgacacacataagctcgccccgtaacgaatttatacgcggcatcaaagaaagttcgcccatgctgatcgggcttttgccttgggcattaatactcggtatgcagggtggacaaaaaggcatgagctggctggaaatgttgttgatgaccggtatgaacttcgccggcggctccgagtttgccacggtcaacctgtgggcggaacctctgccgatactgcttatcgccaccgtaacctttatgattaattctcggcatatcctgatgggggcggcacttgccccgcacctgaaagaaataccgctgaaaaaagccgtgcccgcactgttttttatgtgtgatgaaagctgggcgatggcattctccgaaatccaaaaacggaaagcagccggtttgcccgcattcaatatgcctttttatagtggattaacaaaaaccagtacagcgttgcctcgccttagctcaaagagaacgattctctaa

SEQ ID NO: 46348 - DNA, 1008 bp, Neisseria meningitidis
atgagcaccttcttccagcaaaccgcccaagccatgattgccaaacacatcaaccgcttcccgctattgaagttggaccaggtgattgattggcagccgatcgaacagtacctgaaccgtcaaaaaacccgttaccttcgagaccaccgcggccgtcccgcctacccgctgttgtccatgttcaaagccgtcctgctcggacaatggcacagcctctccgatcccgaactcgaacacagcctcattacccgcatcgatttcaacctgttttgtcgttttgacgaactgagcatccccgattacagcaccttatgccgctaccgtaactggctggcgcaagacaacaccctgtccgaattgctggaactgatcaaccgccaactgaccgaaaaaggtttaaaaatagagaaagcatccgctgccgttgttgacgccaccattattcagaccgccggcagcaaacagcgtcagaccatagaagttgacgaagaaggacaagtcagcggccaaaccacaccgagtaaggacagcgatgctcgttggatcaagaaaaacggcctctacaaactcggttacaaacaacatacccgtaccgatggggaaggctatatcgagaaactgcacattacccccgccaatgcccatgagtgcaaacacctgtcgcctttgctggaagggatagccgaaggtacgaccgtctatgccgacaaaggctacgacagtgcggaaaaccggcaacatctggaagaacatcagttgttggacggcattatgcgcaaagcctgccgcaaccgcccgctgtcggaagtgcaaaccaagcgtaaccgatatttatcgaagacccgttatgtggtcgaacaaagcttcggtacgctgcaccgtaaattccgctacgcccgggcagcctatttcggactgattaaagtgagtgcgcaaagccacctgaaagcgatgtgtttgaacctgttgaaagccgccaacaggctaagtgcgcccgctgccgcctaa

SEQ ID NO: 46349 - DNA, 1308 bp, Neisseria meningitidis
gtggtttttttgaagatttcggaagtattggtaaaagtgggcgacggtgtccacactctgctgctcgacaggccgattgtgcgcgacggcaggaaattcgacgcgccgcttttgtggatggtggtgctgatgacggcgttcagcctgctgatgatttattcggcttctgtgtatttggcatcaaaagaaggcggcgatcagtttttctatttgaccagacaggcggggttcgtcgttgccggcttgatagcgagcggtttgttatggtttctttgcaggatgaggacatggcggcggcttgtgccgtggatttttgccctatccggcctgttgctggtagtcgtattgattgccgggcgcgaaatcaatggcgcgacccgttggatacctttgggtccgttgaatttccagccgaccgagctgttcaagctggcggtcatcctttatttggcaagcctgttcacgcgccgtgaagaagtgttgcgcagcatggaaagtttgggttggcagtcgatttggcgggggacggccaatctgatcatgtccgccaccaatccgcaggcacgtcgtgaaacattagaaatgtacggccgtttccgggcgatcatcctgccgattatgctggtggcgttcggtttggtgctgataatggtacagccggatttcggttcgtttgtcgtcattaccgtcattgccgttggaatgctgtttttggcaggattgccgtggaaatattttttcgtcctggtaggcagcgtcttgggcgggatggtgctgatgattaccgccgctccctaccgtgtgcagcgggtagtggcatttttggacccgtggaaagacccgcagggtgccggctaccagcttacccactctctgatggcaatcgggcgcggagagtggttcggtatgggtttgggtgcgagtttgagcaaacgcggctttctgccggaagcgcataccgattttatttttgccatcatcgccgaagaattcggtttcttcggtatgtgcgtgctgatattctgttacggctggctggtggtgcgggcgttttccatcggcaagcagtcgcgcgatttgggtttgactttcaacgcctatatcgcttcgggtatcggcatttggatcggtatccaaagtttcttcaatatcggtgtgaacatcggtgctttgccgaccaaaggtctgacgctgccgttgatgtcctatggcggttcgtcagtctttttcatgctgatcagcatgatgctgctgttgcgtatagattatgaaaaccgccggaaaatgcgcggttatcgggtggagtaa

SEQ ID NO: 46350 - DNA, 606 bp, Neisseria meningitidis; identical to SEQ ID NO: 39821

SEQ ID NO: 46351 - DNA, 465 bp, Neisseria meningitidis
atgaaagaactagataaaatcgatttccgcattcttaagatcctccaacagaatgcccgcatcccgatgacggagcttgccgagaaggtaggcttgtccaccacgcccgttacagagagggtgcgccgtttggagcgggaacattatatttccggctatcacgcccacctcaatccccatctgttgggcaaaccgctattggtttttgtcgagctgaagctgcaatccaaatcgggcaatattttcgaagatttcaaaaaagaagtgctgaaaattccgcaaattatggaatgccacttggtgtcgggcgaatacgactatctgattaaagtacgtttgcccgatatgtctgcctatcgggatatgctaggcaatatcctattgcaactgcctgccgcttcggagagtaggagttatgttgtgatggaggaggtcaaagaaaatccggttttggatttggattga

SEQ ID NO: 46352 - DNA, 1404 bp, Neisseria meningitidis; identical to SEQ ID NO: 39890

SEQ ID NO: 46353 - DNA, 1311 bp, Neisseria meningitidis; identical to SEQ ID NO: 45437

SEQ ID NO: 46354 - DNA, 1302 bp, Neisseria meningitidis; identical to SEQ ID NO: 45009

SEQ ID NO: 46355 - DNA, 768 bp, Neisseria meningitidis; identical to SEQ ID NO: 39411

SEQ ID NO: 46356 - DNA, 693 bp, Neisseria meningitidis; identical to SEQ ID NO: 39567

SEQ ID NO: 46357 - DNA, 558 bp, Neisseria meningitidis; identical to SEQ ID NO: 39853

SEQ ID NO: 46358 - DNA, 345 bp, Neisseria meningitidis; identical to SEQ ID NO: 36231

SEQ ID NO: 46359 - DNA, 1494 bp, Neisseria meningitidis
atgttgtcaggactccccatccccaaagacatcgcgcgcccgcccgaaacgatattggtcaacatcacgccgcaggaaacgcgcgtagcggtgttggaggaaaacaatatctgcgagctgcacatcgagcgcaacagcgaacacagcctagtcggcaatatctatttgggcgtggtgcgccgcgtgctgcctgggatgcagagcgcgtttatcgacatcgacttggaacgcgcggcgtttttacacatcgtcgatgtcctcgaacaacgccgcaaccccgaagaaacccagcgcatcgaacatatgctgtttgaagggcagtctgttttggtgcaggtcatcaaagacccgatcaacaccaaaggcgcgcggctttccacccaaatctcgctggcggggcgtttcctcgtccatcttccgcaagaagaccacatcggcgtgtcccaacgcatcgaagacgatgccgaacgcagcagcctgcgcgaacgcctcgacaagctcctgccggaaaatgcctgccggggctacatcatccgcaccaacgccgaaaacgccaccgacgaacagctccagtccgacatcgactacctgaccaaagtgtgggaacacatccaagaacaggcgaaaatccggccgccggaaaccctgctttatcaggatttgcccttgagtttgcgcgtgttgcgcgatatggtcggctgcgacacgcaaaaaatcctcgtcgattccaccgtaaaccacggccgcatgacgcgttttgccgaacaatacgtccacggcgcattgggcaggatagaattgttcaaaggcgaacgcccgctatttgaaacccacaacgtcgagcaggaaatcagccgcgccctgcaaccgcgcgtcaacctcaacttcggcagctacctgattatcgaatccaccgaagcgatgaccacgatagacgtgaacaccggcggcttcgtcggcgcacgcaatttcgatgaaacgattttccgcaccaacctcgaagcctgccacaccatcgcccgcgaattgaggctgcgcaacctcggcggcatcatcatcatcgacttcatcgatatggcgcaggaaagccaccgcgaagccgtgttgcaggagcttgccaaagccctcgccttcgaccgtacccgcgttaccctgcacggttttaccagcctgggactggtcgagctgacgcgcaaacgctcgcgcgaaaacttaaaccaagtcctctgcgaaccctgcccttcctgccaaggcagaggccgtctgaaaacgccgcaaaccgtatgctacgaaatccagcgcgaaatcgtccgcgaagcgcgccgttacgatgccgaaagtttccgcatcctcgccgcccccaacgtcatcgatttgtttttggacgaagaatcgcaatccttggcaatgctgatagatttcatcggcaaaccgatttctctggcagtcgaaaccgcttacacgcaggaacaatacgacatcgttttgatgtaa

SEQ ID NO: 46360 - DNA, 948 bp, Neisseria meningitidis
atgcagttgcatgatttttctctcattgccgtaaatactgtaaatgtacctcaaatgccgcatccgtgccaaaccgttcacactttaaccgcccgtgtcccgaaatgccgtctgaagttgaacgccgcccgacggcagcgttacaatcgcccacaactgttttttccgaacatcatcatgaccacgaccgaacacgacaacgacgatgcattcctgctgcggtacagccgccacatcctcttggacgaaattggcatcgaagggcagcagaaactttccgccgcgcatattttggtcgtcggctgcggcggtttgggtgccgccgccctgccctatctcgccgcttccggcatcggcacgctgaccatagccgattccgacacggtcgagctgcacaacctgcaacgccaagtcgcatttgacgagggcgatgtcggcaagcccaaagccgaagccttggcagaccgcctgaaacgcatcaaccataacgtcgatgtccgcaccgtcaacgaaaaactcgacggctgccgcctgaccggtttggttcaaaccgccgacatcgttttagactgctgcgacaactacgccacgcgccaagccgtcaaccgtgtctgcgtacaaacgaaaacaccgctggtttcaggagcagcggtgcgctttgaagggcaacttgccgtgtaccgtcccgacttgcccgactcgccgtgttacgcctgcctgtttgacggcggatcggcttcagacggcatctgttccctcttcggcgtattctcgccgctggtcggcatcatcggctgcacgcaggcggcggaggctctgaaaatcctgctagacgtgggcgaaccgtcgcacggcaggctggcggtttaccgtgccttggaagggggctggcaatatttcgacctgccgcgcaaccccgaatgcccgatttgcggcacggaacggtaa

SEQ ID NO: 46361 - DNA, 1293 bp, Neisseria meningitidis
atgcagttctcagcattcggcgaaaaattcacgcaacacagcggcatcctccaactgatggacgacctcggcgacgcgctcaaaagcgacaagcccgtcaatatgctcggcggcggcaatccggcgcgcattccggaaatcgatcgggcgttcgccgacatattctccaaactggcggcggaacacgctgtcgagaacatcggcaactactccaatccccaaggcgatgccgcgctgattgacgcgctgaccgccttcctcaaccgcgaatacggctggaacctgaccgccgacaatatcgcgctgaccaacggttcgcaaaacgcgtttttctatttattcaacctcttcggcggcaaattcaacctttcagacggcacatccgcagaaaaagccattttgttgccgctcgcgcccgaatacatcggctatgccgacgtgcatgtcgaagggcagcacttcgtttccgtcaagcccaaaatcgaaaacgtcgaacacgaaggcgaagcaggcttcttcaaataccgcgtggactttgacgcactggaaaacctgcccgaactcaaagcgggcaaaatcggcgcgatttgctgttcgcgcccgaccaacccgaccggcaacgtgctgaccgacagcgaaatggcgcggctggacgctttggcgcgtgaacacgggattccgctgattatcgacaacgcctacggaatgccgttccccaacatcatttacagcgacgtaacgctgaattggcacgaaaacatcatcctctgcttcagcctttccaaagtcggcctgccgggcgttcgcaccggcatcatcgtcgccgcgcccgaagtcgtcaaagccgtcagcagcctgaacgcgattgtgaaccttgcccccacgcgcttcggcgcggccatcgccgccccgctgctggaaagcggcgagatgaaacggcttgccgaccaagtcatccggccgttttaccgcaatcaggcgcaaaccgccgtctcgctgctcaagcgcgagctgggcgcgtacccgatgaaaatccacaaacccgaaggcgcgattttcctgtggctctggtttgaaaacctgcccgtttcttcgcaaaccctgtacgaaatgctcaaagccgaaggtacgctgattattccgggcgagcatttcttcgtcggcatcgacacgcgggattacccgcacgcgggcgagtgcatccgcatgagcatcgcgcaggacgctcaaacgctggaaaaaggcatcgccgccatcggcaaaaccgtccgaaaactgtacgacaacgtttaa

SEQ ID NO: 46362 - DNA, 1128 bp, Neisseria meningitidis; identical to SEQ ID NO: 45222

SEQ ID NO: 46363 - DNA, 297 bp, Neisseria meningitidis
atggacgctaaacatcggctgaaaaaatacgtttaccacctgttggtagccatcgaccaactgttcaacgccctaaccggcggcgcggcggacgaaaccctctcaagccgcacctatcgcggcgcgcggctcgcccaaaagcccaaaacccgctggaaggttttatacaccctgatcaacggcgtgtttttcgaccgccaacactgtcggcaggcgtatatcagcgaactgaaaggcaggcagcacgacgcgcggttcaaccaaagccgcgccgccggggaaaaggggacgcgatga

SEQ ID NO: 46364 - DNA, 300 bp, Neisseria meningitidis
atgcttttcatggcactgacacttgccgacgtagacaaaatcgcccgactctcccgactgcacctgactgcggcagaaaaagaaaaatcgcttcaagaattaaacgacattttcgctatggtcgaacagatgcaaaccatcaacacagacggcatcgaaccgatggcgcatccgcacgaggccgccctgcgcctgcgcgaagacgaagtaaccgaaaccgaccgcgccgccgaatatcaggcggttgctccggaagtacgcaaccgtctgtatatcgtaccgcaagttatcgaagaataa

SEQ ID NO: 46365 - DNA, 417 bp, Neisseria meningitidis; identical to SEQ ID NO: 39888

SEQ ID NO: 46366 - DNA, 231 bp, Neisseria meningitidis; identical to SEQ ID NO: 38834

SEQ ID NO: 46367 - DNA, 504 bp, Neisseria meningitidis
ttggcaattgcggcggtgcctctgcgtgccgttttgaataatgggaatatcgggagtaggactatggatgtgaaatatgaatttaccctgccttcgagcagcggtgcggattttcattcggcagaacatctgcctttggtcgtgtatttttatccgaaagacagtacgccgggctgtacgacggaaggcttggatttcaatgcgcgtttggaacagtttgaggcattgggttataccgtggtcggtatttcccgcgacggcgtaaaggcgcatcagaatttttgcgccaagcagggtttccggttcgagctgttgagcgacaaggatgaaacagtgtgccgcctgtttgatgtcatcaaattgaagaaactgtacgggaaagagtcgttaggtatcgagcgcagtacgttcgtcttgaataaggatggagaaatcgcccatgaatggcggaaagtcaaagtggcgggtcacgcgcaggaagtattggaaacgctttcccgataa

SEQ ID NO: 46368 - DNA, 1314 bp, Neisseria meningitidis
atgatgaacacgccgcatccgcgcccgaaaatcgccgtcatcggcgcaggctgggcaggactgtccgccgccgtcaccttggcgcggcacgccgacgttaccctgtttgaagccggccggcaggcgggcggcagggcgcgcgcactggccggaaataccgacggtttcggttttttggacaacgggcagcacattttgctcggcgcataccggggcgtgttgcgcctgatgaaaaccatcggttcagacccccgtgccgcctttttgcgcgtaccgctgcactggcatatgcacggcggtttgcagttccgcaccctccccctgcccgcgccgctgcatattttgggcggcgtgctgcttgcccggcgcgtaccgtccgcattcaaagccaaactgcttgccgatatgtccgatttgcagaagtccgcacgcctcggacagcccgacacgacagttgcacaatggctgaaacagcggaacgtgccgcgtgccgccgtgatgcagttttggcagccgctggtgtggggtgcgctcaacacgcctttggaaaccgcaagcctgcgcgtgttgtgcaacgttttgtccgacggcgtgctgacgaaaaaatccggcagcgactatcttctacccaagcaggatttgggcgcaatcgtcgccgaacccgccttggcggagcttcaacggctcggcgcggacatccgcctcgaaacgcgcgtatgccgtctgaacaccctcccggacgggaaagtgctcgtcaacggcgaagctttcgatgccgccgtccccgccaccgcgccctaccacgccgccgcgctcctgcccgaaggcacgcccgaacacgttcagacggcatatcaaaaccttcgctaccacgccatcaccaccgtctatctgcgctacgccgaacccgtccgcctgcccgccccgctgaccggccttgccgacggcacggtgcaatggctgctttgccggggcaggctcggactgcctgaaaacgaagtgtccgccgtcatcagcgtttccgaccgcgtcggcgcgtttgcaaaccgggcgtgggcggacaaagcccacgccgacctcaaacgcatccttccgcatttgggcgaacccgaagccgtgcgcgtcatcaccgaaaaacgcgccacaaccgcagccgatgccccgccgccggacttgtcgtggttgcaccggcaccgcatcttccccgccggcgactacctccacccggactaccccgccacgctcgaagccgccgtacaatcaggtttcgcgtcggcggaagcctgcctgcaaagcctgagcgatgccgtctga

SEQ ID NO: 46369 - DNA, 483 bp, Neisseria meningitidis; identical to SEQ ID NO: 36360

SEQ ID NO: 46370 - DNA, 813 bp, Neisseria meningitidis; identical to SEQ ID NO: 39121

SEQ ID NO: 46371 - DNA, 477 bp, Neisseria meningitidis
atgcaaaaaatccccctgaccgtacgcggtgcggaattgctgaaacaggaattgcagcagctcaaaagcgtggcgcgtcccgaagtgatcgaagcgattgccgaagcccgttcgcacggcgatttgtccgaaaacgccgaatacgaagccgccaaagaacgccaaggctttatcgagggccgcatttccgagctggaacacaaactttccgttgcccacatcatcaatccgaccgaaatccacgccgaaggcaaaatcgtgttcggtacgacggttacgctggaagatttggaaacggaagaacacgttacctatcaaattgtcggcgaagacgaagccgacatcaaacagggcaaaatctatgtcggctcaccgattgcccgcgccttaatcggcaaggaagagggcgatacggcggaagtccaagccccgggcggcgtgcgcgaatacgacattatcgaagtccgatatatttga

SEQ ID NO: 46372 - DNA, 369 bp, Neisseria meningitidis
atggcaaacggattggacaatcaggcatttgaagaccaagtgttccacacgcgggcagatgcgccgatgcagttggcggagctttctcaaaaggagatgaaggaaactgagggggctgcattatggtttgctcccgtgttggcaggtggtggcagatttgcactgacaggatttactcggcatggtttaaatcaggctatttctcgtggtggtgtgggagtttcaaataaagcgattatgaacactatgcgtaaccctacaaaaattacaagccaatcaggaggaagaacccgttttacaggagctgatggtggtgttgttttgaatagtcaaggtaaagtaattactacatggggcaaacctcgttaa

SEQ ID NO: 46373 - DNA, 723 bp, Neisseria meningitidis; identical to SEQ ID NO: 38771

SEQ ID NO: 46374 - DNA, 1050 bp, Neisseria meningitidis
ttgatattaatgaacacacccatccccttctccgaacggctcatccgctggcaaaaacaacacggtcgccaccacctcccttggcaggtcaaaaacccttattgcgtctggctttccgaaatcatgctccagcaaacgcaggtcgccaccgtgttggactactatccgcgtttcttagaaaaattcccgaccgttcagacgcttgccgccgcgccgcaagacgaagtgttgtcgttgtgggcgggcttgggctattacagccgcgcgcgcaacctgcacaaagccgcgcaacaagtcgtcaggcaattcggcggcacgtttccatcggaacgcaaagacttggaaacgctctgcggcgtaggcagaagcaccgccgccgccatttgcgccttctccttcaaccgccgcgaaaccattttggacggcaacgtcaaacgcgtactctgccgcgtgttcgcccgcgacggcaatccgcaggacaaaaaatttgaaaactcgctctggacacttgccgaaagcctgctgccgtctgaaaacgccgatatgcctgcctatacacaaggtttgatggatttgggcgcaaccgtgtgcaaacggacgaaacccttgtgccaccaatgcccgatggcggacatctgcgaagcaaaaaagcaaaaccgcaccgccgagctgccgcgcaaaaaaaccgccgccgaagtaccgaccctgccgctttactggctgattatccgcaaccggaacggcgcgattttgctggaaaaacgccccgccaaaggcatttggggcgggctgtattgcgtgccgtgttttgaaagtttgaacgggctttccgactttgccgccaaattctccctgaccatggcagatatggacgaacaaaccgccctgacccaccggctgacgcaccggttgctgatgattacgccgtttgaaggacaaatgccgtctgaaagcccttcagacggcatttggataaagccgacgcatttgaaagattacggcctgcccaagcctttggaaatttatttaaacggtaataggttagaataa

SEQ ID NO: 46375 - DNA, 993 bp, Neisseria meningitidis
gtgtatgcttgccttcccttaaaaacaaacacgcaacgcattattatgaatatcctcagtaaaatcagcagctttatcggaaaaacattttccctctgggccgcgctctttgccgccgccgcttttttcgcgcccgacaccttcaaatgggcggggccttatattccttggctgttgggcattattatgttcggtatgggtttgacgctcaaaccttccgacttcgatattttgttcaaacatcccaaagccgtcatcatcggcgtaatcgcacaattcgccattataccggcaaccgcctggctgctgtccaaactgttgaacctgcctgccgaaatcgcggtcggcgtgattttggtcggctgctgcccgggcggtacggcttccaatgtgatgacctatctggcgcgtggcaatgtggctttgtcggttgccgttacgtctgtttccaccctgatttccccattgctgactcccgccatcttcctgatgcttgccggtgaaatgctggaaatccaagcggccggtatgttgatgtccatcgtcaaaatggttttgctccccattgttttgggtttgattgtccataaggttttgggcagtaaaaccgaaaagctgaccgatgcgctaccgctggtttccgttgccgccatcgtgctgattatcggcgcggttgtcggggcaagcaaaggcaagattatggaaagcggcctgctgatttttgccgttgtcgcactccacaacggcatcggctacctgctcggcttctttgccgccaaatggaccggcctgccttatgatgcacaaaaaacgctggccatcgaagtcggtatgcaaaactcggggctggccgccgcgcttgccgccgcacactttgccgctgcgccggtcgttgccgttccgggcgcattgttcagcgtgtggcacaatatctccggctcgctgctggcaacttattgggcggccaaagccggtaaacataaaaaaccctaa

SEQ ID NO: 46376 - DNA, 798 bp, Neisseria meningitidis
atggataccgcacaaaaacaacgctgggcaataaccctatcctatgatggcagccgcttttacggctggcagaaacaggctgacggcgtaccgaccgttcaggcggcattggaaaccgcgctcgcccaaatagcaggggaagcggtttccaccaccgttgccggcaggaccgacaccggcgtgcatgccaccgcccaagtcgtccacttcgacacaactgccgcccgtccccaacaggcatgggtgcgcggcgtaaatgcccacctgcccgaaggcattgccgttttgcacgcccgacaggtcgcccccgaatttcacgcccgcttcgacgcatacggacggcattaccgctacctgctcgaatccgtccccgtccgttcccccctgctcaaaaacagggcaggctggacacacctcaaactcgacatcgggccgatgcgccgggctgccgccttattgatcggcgaacaagacttctccagcttccgcgccgccgaatgccaggcaaaatcccccgtcaaaaccatctaccgcgccgaccttacccaaagctcaggactcgtccgcctcgatttgcacggcaacgcctttttgcaccatatggtacgcaacatcatgggcgcgctcgtctatgtcggcagcggcagactcagcgtcgaaggcttcgccgcactgattcaagaacgcagccgcctcaaagccccgccgaccttcatgcccgacggactttacctgaccggcgtcgactatcccgaggcatacggcatcatccgcccccaaatccccgaatggctttaa

SEQ ID NO: 46377 - DNA, 1014 bp, Neisseria meningitidis
ttgtccgaccggcggctttgccccaatatccccattttggagacacctatgttacgtttgactgctttagccgtatgcaccgccctcgccttgggcgcgtgttcgccgcaaaattccgactctgccccacaggccacagaacaggcggtttccgccgcacaaaccgaaagcgcgtccctgaccgtcaaaacggcgcgcggcgatgttcaaataccgcaaaaccccgaacgtatcgccgtttacgatttgggtatgctcgacactttaagcaaattgggcgtgaaaaccggtttgtccgtcgataaaaaccgcctgccgtatttagaggaatatttcaaaacgacaaaacctgccggaactttgttcgagccggattacgaaacgctcaatgcctacaagccgcagctcatcatcatcggcagccgcgccgccaaggcgtttgacaaattgaacgaaatcgcgccgaccatcgaaatgaccgccgataccgccaatctgaaagaaagtgccaaagagcgtatcgacgcgctggcgcaaatcttcggcaaacaggcggaagccgacaagctgaaggcggaaatcgacgcgtcttttgaagccgcgaaaactgccgcgcaaggtaagggcaaaggtttggtgattttggtcaacggcggcaagatgtccgccttcggcccgtcttcacgactgggcggctggctgcacaaagacatcggcgttcccgctgtcgatgaatcaattaaagaaggcagccacggtcagcctatcagctttgaatacctgaaagagaaaaatcccgactggctgtttgtccttgaccgcagcgcggccatcggcgaagagggtcaggcggcgaaagacgtgttgaataatccgctggttgccgaaacaaccgcctggaaaaaaggacaggtggtttaccttgttcctgaaacttatttggcggccggtggcgcgcaagagctgctgaatgcaagcaaacaggttgcggatgcttttaacgccgcgaaataa

SEQ ID NO: 46378 - DNA, 978 bp, Neisseria meningitidis; identical to SEQ ID NO: 44246

SEQ ID NO: 46379 - DNA, 642 bp, Neisseria meningitidis
atgaaagttatttccgtattaaatcaaaagggtggaagtggtaaaaccacagtcgcaactcacttggcacgcgccttgcaattagcaggaaatagcatcttattggttgatagcgatccacaaggaagcagtagggactgggctgctgttcacgaagagcaacctgttcctgtgattggtattgacagcccgacaattgatcgtgatttaaaaagcgttgttaaagattttgttattattgatggcgcaccacaaacagccgatttagccatatcagcgattaaagcctctgatttagttttaatccctgttcaaccgtcgccatacgatatttgggcaaccgctgatttggttaatttaatcaagcagcggataaaactcatagatggaaatttaaaggctgcttttttaattaaccgaactattaaaggaacaaagattggcggagaaattagagcagcgttagaagaatatgagttacctgttttatcaaccgtgattgtgcaacgtattatttatccaacatctgctatcacaggtagcactgtactggataaagaaccaaatggagaagcagctaaggaaattcaatcacttgcgaatgagataataaatttgataaatatagataatcatatttaa

SEQ ID NO: 46380 - DNA, 1512 bp, Neisseria meningitidis; identical to SEQ ID NO: 44859

SEQ ID NO: 46381 - DNA, 1362 bp, Neisseria meningitidis; identical to SEQ ID NO: 44971

SEQ ID NO: 46382 - DNA, 684 bp, Neisseria meningitidis; identical to SEQ ID NO: 38600

SEQ ID NO: 46383 - DNA, 246 bp, Neisseria meningitidis
ttgaaggattctacagggcaaatgaggctggcaaccaaggatttggcggaagccattaaacgaggagaagtacgtagttctgcttttacaacaaagcaactaaaggcaattgaaaaaggcaaagacaaaatccctagctacacttggcatcatcatcaagatacagggagaatgcagcttgtgcctgaatgggaacattctaaaaccggtcacataggagggacggcaatggggaagggtaaataa

SEQ ID NO: 46384 - DNA, 1155 bp, Neisseria meningitidis; identical to SEQ ID NO: 45256

SEQ ID NO: 46385 - DNA, 717 bp, Neisseria meningitidis; identical to SEQ ID NO: 45129

SEQ ID NO: 46386 - DNA, 516 bp, Neisseria meningitidis; identical to SEQ ID NO: 38690

SEQ ID NO: 46387 - DNA, 309 bp, Neisseria meningitidis; identical to SEQ ID NO: 38004

SEQ ID NO: 46388 - DNA, 2388 bp, Neisseria meningitidis; identical to SEQ ID NO: 45510

SEQ ID NO: 46389 - DNA, 3978 bp, Neisseria meningitidis
ttgagagccgaatccatgtctgtcgttttgcccttgcgcggcgttaccgccctttccgatttccgtgtcgaaaaactcttgcaaaaagccgccgcactcggactgcccgaagtcaaattaagcagcgaattttggtatttcgccggcagcgagaaagcattggatgccgcgactgtcgaaaaactgcaagccttgttggcggcgcaaagcgttgaacaaacgccaaaagcgcgcgagggcttgcatttgtttttggtaacgccccgtttgggtacgatttcgccgtgggcttccaaggcgaccaatatcgcggaaaactgcggtttggcaggcatcgagcgcatcgagcgcggcatggcggtgtggctggaaggtgcgcttaccgatgaacagaaacagcaatgggcggcgttgctgcacgaccgcatgaccgaatccgtgctgcccgattttcagacggcatccaaattattccaccatctcgaatccgaaaccttttccaccgttgatgttttaggcggcggtaaagaggctttggtcaaagccaataccgaaatgggtttggcactctccgccgacgaaatcgattatctggttgaaaactatcaggctttgcaacgcaatccgtccgatgtggagctgatgatgttcgcgcaggcaaacagcgaacactgccgccacaaaatcttcaacgccgacttcatcctcaacggcgaaaaacaaccgaaatcccttttcggcatgatacgcgacacgcacaacgcgcatcccgaaggcacggtcgtcgcttataaagacaattcgtccgtgatcgaaggcgcgaaaatcgagcgtttctatccgaatgcggcggaaaaccaaggctaccgtttccacgaggaagacacgcatatcatcatgaaagtggaaacgcacaaccacccgaccgccatcgcgccgtttgcaggcgcggcaacgggcgcgggcggcgaaatccgcgacgaaggcgcaacgggcaaaggttcgcgtccgaaagcaggcttgaccggctttaccgtgtccaacctcaacatccccggcctcaaacagccgtgggaacaagattacggcaagccggaacatatttcctcgccgctggacatcatgattgaaggcccgatcggcggcgcggcgttcaacaacgaattcggccgccccaacctcttgggctacttccgcacttttgaagaaaaatttgacggtcaggttcgcggctaccacaaaccgattatgattgccggcggcttgggcagcattcaggcgcagcagacgcataaagacgaaatccccgaaggcgcgttgctgatccaactgggcggcccgggcatgcttatcggcttgggcggcggcgcggcttcttcgatggataccggcacgaacgacgcttctttagacttcaactccgtacaacgcggcaaccccgaaatcgaacgccgcgcgcaggaagtcatcgaccgctgctggcagctcggcgacaaaaacccgattatctccatccacgacgtgggcgcaggaggtttgtccaacgccttccccgaactggtcaacgatgccggacgcggcgcggtattcgagctgcgcgaagtgccgttggaagaacacggtttaacgcctttgcaaatctggtgcaacgaatcgcaagagcgttatgtgttgtcgattttggaaaaagatttggataccttccgcgccatctgcgaacgcgaacgctgcccgtttgccgtggtcggtacagcgaccgacgacggtcatttgaaagtgcgcgacgatttgttcgccaacaaccccatcgatttgccgttgaacgtcttgctcggcaaaccgcccaaaaccacgcgtaccgacaaaacagttacgccatctaaaaaaccgtttcacgccgacgatatcgacatcaccgaagccgcctaccgcgttttgcacctgcctgccgtagccgccaaaaacttcctgattaccatcggcgaccgcagcgtcggcggcatgacccaccgcgaccaaatggtcggcaaataccaaacccccgtagccgactgcgccgttaccatgatgggcttcaatacctatcgcggcgaagcaatgtctatgggcgaaaaaccgaccgtcgccctgtttgacgcgcctgcttcgggcagaatgtgcgtcggcgaagccatcaccaacatcgcggcggtcaacatcggcgacatcggcaacatcaagctctccgccaactggatggcggcgtgcggcaacgaaggcgaagacgaaaaactctaccgcaccgtcgaagcggtttccaaagcctgtcaggcattggatttgagcattcccgtgggcaaagacagcctgtcgatgaaaaccgtatggcaggatggcgaagagaaaaaatccgtcgtttcgccgttgagcctgattatctccgcgttcgcgccggttcaagacgtacgcaaaaccgttacgcccgaattgaaaaacgtcgaggacagcgtattgctgtttgtcgatttgggcttcggcaaagcgcgtatgggcggctctgcattcggtcaggtatacaacaacatgagcggcgacgcgcccgatttggacgacacaggccgtctgaaagcgttttacaacgtgattcaacagcttgtcgccgaagacaaactcttggcataccacgaccgcagcgacggcggcttgtttgccgttttggtagaaatggcgtttgcagggcggtgcggcttggatatagatttaaatttattgcttgcacaaacatttattaccaaccataccgctctgtctcaatcattgcggactgaagaggtaaaagcgttggctgaatggcaagaaaccattgcccgcacattatttaatgaagagttgggtgctgttatccaagttagaaaacaagatgttgccgatattatcaatttattctatcaacaacagctgcatcataatgtctttgaaatcggtacgttaactgatgagaacacgttaatcatccgcgacgggcaaacgcaccttatttctgacaacctaatcaaactgcaacaaacctggcaagaaaccagccatcaaatccaacgcctgcgcgacaaccctgcctgcgccgacagcgagtttgccctgattggcgacaacgaccgcagcgcattgtttgccaacctgaaattcgacgtgaacgaagacatcgccgcgccgtttatcaacagcggcgcgaaacccaaaatcgccatcctgcgcgaacagggcgtgaacgggcaaatcgaaatggccgccgccttcacccgcgccggattcgatgcttacgacgtgcatatgtccgacctgatggcaggccgcttccgccttgccgacttcaaaatgctggcggcgtgcggcggcttcagctacggcgacgtactcggcgcgggcgaaggctgggcgaaatccatcctgttccaccctgccttgcgcgaccaatttgccgccttctttgccgatccggacacgctgacattgggcgtgtgcaacggctgccagatggtcagcaacctcgccgagattatcccgggtgcagaggcatggcctaaattcaaacgcaacctgagcgaacagtttgaagcacgcctgagcatggttcacgttccgaaatcagcgtcgctgattctgaacgaaatgcaaggctccagcctgcctgtcgtggtcagccacggcgaaggccgcgccgacttcgcgcttcacggcggcaatatttccgccgatttgggcatcgcgctgcaatatgtggacggtcaaaaccaagtgacccaaacctacccgctcaaccccaacggctcgccgcaaggcatcgccggcgttaccaacgccgacggccgcgtgaccatcatgatgccgcatccggaacgcgtgtaccgtgccgcacaaatgagctggaaaccagaagactggacggaattgtccggctggtaccgcctctttgccggcgcacgtaaagccttgggctaa

SEQ ID NO: 46390 - DNA, 729 bp, Neisseria meningitidis; identical to SEQ ID NO: 45418

SEQ ID NO: 46391 - DNA, 1005 bp, Neisseria meningitidis; identical to SEQ ID NO: 38175

SEQ ID NO: 46392 - DNA, 435 bp, Neisseria meningitidis; identical to SEQ ID NO: 40019

SEQ ID NO: 46393 - DNA, 648 bp, Neisseria meningitidis; identical to SEQ ID NO: 44369

SEQ ID NO: 46394 - DNA, 2793 bp, Neisseria meningitidis; identical to SEQ ID NO: 44594

SEQ ID NO: 46395 - DNA, 939 bp, Neisseria meningitidis; identical to SEQ ID NO: 38569

SEQ ID NO: 46396 - DNA, 471 bp, Neisseria meningitidis; identical to SEQ ID NO: 37133

SEQ ID NO: 46397 - DNA, 1122 bp, Neisseria meningitidis
gtgggcattgtaacgccccaaaaaattccgtttgaaatgccgctggttttggaaaacggtaaaactttgccgcgtttcgatctgatgattgaaacctacggcgagctgaatgccgaaaaaaataatgcggttttaatctgtcatgcgctgtcaggcaaccatcatgttgcgggcaggcattcggcggaggataaatatacgggctggtgggacaatatggtaggacccggcaaaccgattgatacggaacgttttttcgtggtcggtttgaacaatctgggcggctgtgacggcagcagcggacctttgtcgatcaatcctgaaacgggtagggaatacggcgcggattttccggtggttacggtgaaggactgggtaaaatcacaagccgcgcttgccgactatctcggcatcgggcaatgggcggcggttgtcggcggcagtttgggcggtatgcaggctttgcagtgggcgatttcctatcccgaacgcgtgcgccatgccttagtgattgcgtctgcgccgaaactgtccacgcaaaatatcgcgttcaacgatgtggcgcgtcaggcgattttgaccgaccccgatttcaacgaaggacattaccgcagccataataccgttcctgcacggggcttgcggattgcccgcatgatggggcacattacctatcttgccgaagacggtttgggcaaaaaattcggacgcgatttgcgttccaacggctatcaatacggttatggcgttgaatttgaagtagaatcctatctgcgctatcagggcgacaaattcgtcgggcggtttgatgccaacacctatttgctgatgaccaaagctttggactatttcgatccggcggcggatttcggcaacagcctgacccgcgccgtgcaggatgtgcaggcaaaattctttgtcgccagcttcagcaccgattggcgtttcgcgcccgaacgttcgcacgaactggtcaaggccctgattgccgcccaaaaatccgtgcagtatatcgaagtcaaatccgcacacgggcacgatgcctttttaatggaagacgaagcctatatgcgtgcggtcgccgcctatatgaacaacgtttataaggaatgtcagcaatga

SEQ ID NO: 46398 - DNA, 987 bp, Neisseria meningitidis; identical to SEQ ID NO: 44315

SEQ ID NO: 46399 - DNA, 1596 bp, Neisseria meningitidis; identical to SEQ ID NO: 44847

SEQ ID NO: 46400 - DNA, 513 bp, Neisseria meningitidis; identical to SEQ ID NO: 44775

SEQ ID NO: 46401 - DNA, 927 bp, Neisseria meningitidis
atgtcagaaatgaaaaaaaccaaagtccacctgatttcaggttttctgggaacaggcaaaaccactgcgctcaaaagcctgatggcgcaaaaagacccgaacgaaaaatgggtcatcatcgtcaacgagttcggcgaaatcggcattgacggcgcggtattgagcgacaacggtatccctgtggcagaaatcgccggcggctgtttgtgttgcaccgccggcccgcaaatgggcgtaaccgtgcagaaaatgctgcgcgacgccaagcccgaccgcctgatgattgaagcaagcggactggctcacgcagccagcgtcatcgacgaactcaaagtcaaaccgctggacagccttttggaaatcggcgccgtctttaccgtcgtcaatccgcgccagttcatcaaccccgattacgcgcaacaggcgttgtataaagaccaaatcggcatctgcgacgtattggtcgccagcaaaaccgatttatgcacccccgaacagcttgccgaatttcacgacaaagcggcaaaactgttcccgcccaaagccaaagtggttgaagtccaaaacgcacaactcgacatccggtggctcgatattcccgtcatcgaaaaatcacgctaccgcctcaaagccctgccggataataccatgggcttccagtcgcaaggtttcacattccccgccggacgcgatttcgacggcgaaaagctgaccaactttttcaacgacctgcccaaaatgaccgaaggactcgtccgcgccaaaggcgtgtttcaagtattgggaacgtgggtgtggctcaactgggtagacggacagtggggcgcgaaccaagtctcatggcggcgcgattcgcgttttgaattgattgccaaatcgtttgatgcggatttaatcgaacaaaagctcaaagacgcattggaatag

SEQ ID NO: 46402 - DNA, 726 bp, Neisseria meningitidis; identical to SEQ ID NO: 45241

SEQ ID NO: 46403 - DNA, 621 bp, Neisseria meningitidis; identical to SEQ ID NO: 44920

SEQ ID NO: 46404 - DNA, 1452 bp, Neisseria meningitidis
gtgaattatttccctattttcgccaacctcgccggccgccccgtattggtcgtaggcggcggcgcggtcgccgcacgcaaaatcagcctgctgctgaaggcgggcgcagaggtcagggttgccgcaaaacacctgaatgccgaactctccgcgttggcggcggaaaacaaaatcctgtggcttgccgaagaatttcgtgccgaacacatccgcacggttttcctcatcattgcggcaagcagcgaccaagccctcaaccggcgcgttttccatcttgccgaaagctgccaaaagccggtcaacgtggtggacgaccgcgaccattgcagcttcatcttcccgtcggttatcgaccgcaacccggttcagattgccgtttccagctccggcagcgcgcccgtcctcgcccgactgctgcgtgaaaggctggaagccctgctgccgccgtctttgggcgatatggcggaaatttcaggaaggtggcgcgatgccgtcaagggcaaactgaaatccgttaccgaacgccgccgcttttgggaaaagcagtttaacggacgtttcgccgccctcgtcaaaaaccggcaaaacacccttgccgaacgggaattggcaaagcagttggaacaaaattatcaaggcggttttgtgtctttggtcggtgcgggtcccggcgatgcggggctgctgacgctcaaagggctgcaggaaatccagcaggcagacgtggtgctttacgacgcgctggtttcagacggcatactgtccctcgtccgccgcgatgcggaacggatttttgtcggcaagcgcgcccggggcggccgcaccccgcaagaggacaccaatgcgcttatggtcaggctggcccgcgaaggcaggcgcgtggtgcgtttaaaaggcggagaccctttcgtgttcggacgcggcggcgaagaattggaaaccttggcacgccatcagatcccgttttcggtcgtccccggcattaccgccgccgtcggcgcgaccgcctatgccggcatcccgctcacgcaccgcgattatgcccaaagtgcggttttcgtaaccggccaccgcaaggcggatgcgcccgacatcgaatggcagaccctcgcccgcagccgccagaccttggtgatttatatgggtgcgctcaaagccgccctgattgccgaacggctgcaacagcacggacgctcgcccgacacgccggcagccgttatcagccaaggcacgctgccggctcaaaaaaccgcaaccggcacgctcgccaacctttccgaactcgccgaaaccgcgccgaatccggcattgattgtcataggcgaagtggtggggctgcacgaaaaactggcttggttcggcgaaaacgccaaaaaagaaagcaatccggccgaacacgcgtattttgcattggacggactgggcaccggacaagaacaacaagccgcataa

SEQ ID NO: 46405 - DNA, 906 bp, Neisseria meningitidis; identical to SEQ ID NO: 45205

SEQ ID NO: 46406 - DNA, 1386 bp, Neisseria meningitidis
atgtcttcaggactcgtaacagcggcgtatatcgttgccgcaattttattcatcttctcactggcggggctgtccaaacaggaaaccgccaaacagggctgctattccggtatcgccggtatggcggtcgccctttttgtaactgttttttccgacaatacccacggactgggctggatcatcatcgccatgctcatcggcgcggcaatcggcatctacaaagccaaaaaggtggaaatgaccgaaatgcccgaactgattgccctgctgcacagcttcgtcggcctagcggcggttttggtcggcttcaacagctatatcgagccgggcaacgtttcgcacgatatgcacaccatccatctggtcgaagtctatttgggcattttcatcggcgcggtaacctttaccggctcgctggtcgcattcggcaaactcaacggcaaaatcagcagcagcccgctgcaactgcccgccaaacacaagctcaacgcactggcgctcgccgtatcgtttgtgttgctgctcgtattcgtcggcattaacggtagcggcttcatcctgctgattatgaccctgattgccctcgcattcggctggcacttggttgcctccatcggcggcgcagatatgcccgtggtcgtgtccatgctcaactcctactccggctgggcggccgcagcggcaggcttcatgctctccaacgacctgctcatcgttaccggcgcgctggtcggctcaagcggcgcgattctgtcctacattatgtgcaaagccatgaaccgctcgtttgtctcggtaattgccggcggtttcggcagcgacagcggcacattatcttccggcagccaagagataggggaataccgagaagtcaaagctgccgatattgccgaaatgctgaaaggcgcaaacaatgtcatcattaccccgggctacggtatggcagtcgcacaagcgcaataccccgttgccgaaatcaccgagcttttacgtaaaaacggcaccgaagtacgcttcggcatccaccccgtcgccggccgcctgcccggtcatatgaacgtactgctcgccgaagccaaagtcccctacgacatcgttttggaaatggacgaaatcaacgacgacttccccgaaaccgatgtggtcttggtcatcggtgcgaacgacaccgtcaaccccgccgcccaaaccgacccgaacagcccgattgcgggtatgcccgtgttggaagtgtggaaggcaaaagaagtcgtcgtcttcaaacgctcgatgaataccggctacgcaggtgtacaaaacccactgttcttcaacgaaaacagcgtgatgtgtttcggagatgcgaagaaaaccgtagatgacattctgtccgaactgaaaaaataa

SEQ ID NO: 46407 - DNA, 957 bp, Neisseria meningitidis; identical to SEQ ID NO: 39251

SEQ ID NO: 46408 - DNA, 2178 bp, Neisseria meningitidis
atgtgtaaaccgaattatggcggcattgtcttgttgcccttacttttggcatcttgtatcggcggcaatttcggcgtgcagcctgttgtcgaatcaacgccgaccgcgtaccccgtcactttcaagtctaaggacgttcccactccgccccctgccaaaccttctatagaaatcacgccggtcaaccggcccgccgtcggtgcggcaatgcggctgccaaggcggaatactgcttttcatcgtgaagatggcacggaaattccaaatagcaaacaagcagaagaaaagctgtcgtttcaagaaggtgatgttctgtttttatacggttcaaaaggaaataaacttcaacaacttaaaagcgaaattcataaacgtgattccgatgtagaaattaggacatcagaaaaggaaaataaaaaatatgattataaatttgtagatgcaggttatgtatatgtaaagggaaaagatgaaattaagtggacttcagattacaagcagttttccaaccgcttaggttatgacggttttgtatattattccggagaacgtccttcccaatctttaccgagtgcgggaacggtggaatattctggtaactggcaatatatgaccgatgccaaacgtcatcgagcaggtaaggcggttggcattgacaatttgggttattacacattttatggtaacgatgttggtgcaacttcttatgcggctaaggatgtcgacgaaagggaaaaacatcctgctaaatatacggtagatttcggtaacaaaaccctgacgggcgagctgattaaaaaccaatatgtcaaacccagtgagaagcaaaaaccgctgaccatttacaacatcactgccgatttaaacggcaaccgctttaccggcagtgccaaggtcaatcctgatttagcgaaaagccatgccaataaggagcatttgtttttccatgccgatgccgatcagcggcttgagggcggttttttcggcgataagggggaagagcttgccggacggtttatcagcaacgacaacagcgtattcggtgtattcgcaggcaaacaaaatagccccgtgccgtctggaaaacacaccaaaatcttggattctctgaaaatttccgttgatgaggcaagtggtgaaaatccccgaccgtttgccatttctcctatgcccgattttggtcatcccgacaaacttcttgtcgaagggcatgaaattcctttggttagccaagagaaaaccatcgagcttgccgacggcaggaaaatgaccgtcagtgcttgttgcgactttttgacctatgtgaaactcggacggataaaaaccgaacgccccgccgccaaaccgaaggcgcaggacgaagaggattcggacattgataatggcgaagaaagcgaagacgaaatcggcgatgaagaagaaggcaccgaagatgcagccgcaggagatgaaggcagcgaagaagacgaagccacagaaaacgaagacggcgaagaagacgaagctgaagaacctgaagaagaatcgtcggcagaaggcaacggcagttcaaacgccatcctgcctgtcccggaagcctctaaaggcagggatatcgaccttttcctgaaaggtatccgcacggcagaaacgaatattccgcaaactggagaagcacgctataccggcacttgggaagcgcgtatcggcaaacccattcaatgggacaatcatgcggataaagaagcggcaaaagcagtatttaccgttgatttcggcaagaaatcgatttccggaacgctgacggagaaaaacggtgtagaacctgctttccgtattgaaaacggcgtgattgagggcaacggtttccatgcgacagcgcgcactcgggatgacggcatcgacctttccgggcagggttcgaccaaaccgcagatcttcaaagctaatgatcttcgtgtagaaggaggattttacggcccgaaggcggaggaattgggcggtattattttcaataatgatgggaaatctcttggtataactgaaggtactgaaaataaagttgaagctgatgttgatgttgatgttgatgttgatgttgatgctgatgctgatgttgaacagttaaaacctgaagttaaaccccaattcggcgtggtattcggtgcgaagaaagataataaagaggtggaaaaatga

SEQ ID NO: 46409 - DNA, 2043 bp, Neisseria meningitidis; identical to SEQ ID NO: 44582

SEQ ID NO: 46410 - DNA, 375 bp, Neisseria meningitidis
acaaataaactcattgaactgtttgtcgcaggtgtaactgcaagaacgacagcagagttagtaggcgttaataaaagtaccgcagcctattattttcatcgtttacgattacttatttatcaaaacagtccgcatttggaaatgtttgatggcgaagtagaagcagatgaaagttattttgctgaacgacaaaaccatatcaatggaattgagaacttttggaaccgggcaaaacgtcatttacgcaagtttgacggcattcccaaagcgcattttgagctgtatttaaaggggtacgaacggcgttttaacaacagtgagataaaagttcaaatttccattttaaaacaattagtaaaatcgagtttatcctag

SEQ ID NO: 46411 - DNA, 2760 bp, Neisseria meningitidis; identical to SEQ ID NO: 44880

SEQ ID NO: 46412 - DNA, 465 bp, Neisseria meningitidis
atgcaaggcaatcaagcagttttagattacatgaacgaattgctgtctggcgagctggcggcacgcgaccaatactttatccactcccgcctctactccgaatggggctacaccaaactttttgaacgtctcaaccacgagatggaagaagaaaccacacacgccgaagacttcatccgccgcatcctgatgctgggcggcacgccgaaaatggcacgcgccgaactgaatatcggcacggacgtggtttcctgcctcaaagccgacctgcaaaccgaatatgaagtacgtgatgcgttgaaaaaaggcatcaaactgtgcgaagaggctcaagactatgttacgcgcgacctgatggttgcccaactgaaagataccgaagaagaccacgcccactggctggaacagcagcttcgcctgatcgagttaattggcgaaggcaactactaccaaagccaactgtaa

SEQ ID NO: 46413 - DNA, 312 bp, Neisseria meningitidis; identical to SEQ ID NO: 38411

SEQ ID NO: 46414 - DNA, 372 bp, Neisseria meningitidis
atgatgaatccgaaaaccttgagccgtttgtcgctgtgtgcggcggtcttggctctgaccgcctgcggcggcaacgggcaaaaatccctgtattattacggcggctatcccgataccgtctatgaaggtttgaaaaacgacgacacttcgttgggcaagcagaccgaaaagatggaaaaatactttgtggaagccggcaacaaaaaaatgaatgccgccccgggtgcgcacgcccatctgggactgctgctttcccgttcgggagacaaagagggcgcgttccgccagtttgaagaagagaaaaggctgtttcccgaatcgggcgtatttatggacttcctgatgaaaacaggtaaaggaggcaagcgatga

SEQ ID NO: 46415 - DNA, 726 bp, Neisseria meningitidis; identical to SEQ ID NO: 43300

SEQ ID NO: 46416 - DNA, 1044 bp, Neisseria meningitidis
atgcagattaccgacttactcgccttcggcgctaaaaacaaagcatccgaccttcacctgagttcgggcatatcccctatgattcgggttcacggcgatatgcggcgcatcaaccttcccgaaatgagcgcggaagaggtcggtaatatggtaacttcggtgatgaacgaccaccagcggaaaatctaccagcaaaacttggaagtcgacttctcgttcgaactgcccaacgtcgcccgattccgcgtcaacgccttcaacaccggccgcggtcccgccgccgtattccgcaccattcccagcaccgtcttatcgctggaagaattgaaagccccgagcattttccaaaaaatcgcagaatcgccgcgcggcatggtattgattaccggccctaccggttcgggcaaatcgaccacgcttgccgcgatgatcaactacatcaacgaaacccagccggcacacatcctgaccatcgaagacccgatcgaattcgtccaccaaagcaaaaaatccctgattaaccagcgcgagctgcaccagcacaccctcagcttcgccaacgcgctgcgttccgcattgcgcgaagaccccgacgttatccttgtcggcgagatgcgcgaccccgaaaccatcggcttggcactgaccgccgccgaaaccggacacttggttttcggcacgctgcacacgaccggcgcagcaaaaaccgtcgaccgtatcgtggacgtattcccggcgggagaaaaagaaatggtgcgctctatgctgtccgaatcgctgaccgccgtcatctcccaaaacctgctgaaaacgcacgacggcaacggccgtgtcgcctcgcacgaaatcctgattgccaaccccgccgtccgcaacctcatccgcgaaaacaaaatcacgcagattaactccgtcctgcaaaccgggcaggcgagcggtatgcagacaatggaccaatcgctgcaatcgctggtgcgccaagggctgatcgcaccggaagtcgcacgcagacgcgcgcaaaacagcgaaagtatgagtttctga

SEQ ID NO: 46417 - DNA, 825 bp, Neisseria meningitidis
atggacggtacgcagtcgaaacccaagtttttcgaacgcctgattgcccgactcgcccgcgaacccgattccgccgaagacgtattaaacctgcttcggcaggcgcacgagcaggaagtttttgatgcggatacgcttttaagattggaaaaagtcctcgatttttccgatttggaagtgcgcgacgcgatgattacgcgcagccgtatgaacgttttaaaagaaaacgacagcatcgagcgcatcaccgcctacgttatcgataccgcccattcgcgcttccccgtcatcggcgaagacaaagacgaagttttgggcattttgcacgccaaagacctgctcaaatatatgtttaaccccgagcagttccacctcaaatccattctccgccccgccgtcttcgtccccgaaggcaaatcgctgaccgcccttttaaaagagttccgcgaacagcgcaaccatatggcgattgtcatcgacgaatacggcggcacatccggcttggtcacctttgaagacatcatcgagcaaatcgtcggcgaaatcgaagacgagtttgacgaagacgatagcgccgacaatatccatgccgtttcttccgaacgctggcgcatccatgcagctaccgaaatcgaagacatcaacaccttcttcggcacggaatacagcagcgaagaagccgacaccattggcggcctggtcattcaagagttgggacatctgcccgtgcgcggcgaaaaagtccttatcggcggtttgcagttcaccgtcgcacgcgccgacaaccgccgcctgcatacgctgatggcgacccgcgtgaagtaa

SEQ ID NO: 46418 - DNA, 573 bp, Neisseria meningitidis
atgacttatgaaattcaagcctctgttcgtgaagcacaaggcactggtgcgagccgccgcctgcgtcgcgaaggccaaatccccggcattctgtacggtgaaggtcaagagcctgttgcaatcgctgtggatcacaaaaccgtattctacgcattggaaaaagaatctttccatactgcgttgattaagttgtctctgaacggtgaaaccaaagacgttatcgtccgcgatttccaaatgcacccgttccgccgcgaagttcaacacatcgacttccaagctgtgaaagcagaccaacccgtacgcatccgcgttcccctgcacatcgttaacgctgaaaattcccaagcggtcaaactgcaaggcggccgcgtatctctgttaaacacttctgttgaagtagttgctttgcctgccaacatccctgctttcttggatttggattgtgctgaagtggttgccggcgacattctgcacttgtcagacatcaaactgcctgaaggtgtagaaagcgtttccctgaaacgtaacgaaaatctggctgttgctaccgttaccggtaagaaacgctaa

SEQ ID NO: 46419 - DNA, 3435 bp, Neisseria meningitidis
atgaccgagccgacctacatccccctgcgcctgcataccgaattttcgattaccgacggtatggtgcggattaaaaaactgattgccaaagcgcaggaatacggtttgcctgctttgggcatcagcgatttgatgaacgaattcggtttggtgaaattttataaagcctgccgcagcgcggggattaagcccgtcggcgcggcggacgtatggataggcaatccggatgcgcccgacaagccgttccgtgctatgctgattatccgcaacgatgcgggctatctgcgcttgagcgagcttttgacggcggcttatgtcggcaaagaccgcaatgtccatcatgcggaactcaatcccgaatggctggaaaacggcgacaacagcggcttgatttgtttgagcggcgcgcattacggcgaagtgggcgtgaatctcttgaacggcaacgaagacgcggcgcgggcggcggcgttgaaatatgcggcgtggtttcccgatgcgttttatctggagttgcaacgcctgcccgagcgtcccgaatgggaggcttgcgtttcgggcagcgtgaagctggcggaggaactgggtttgccggtggtggcgacgcatccgacgcagtttatgagccgcgacgatttcaacgcgcacgaggcgcgggtgtgtatcgcaggcggctgggtattgacggacaagaaacgtccgcgcgatttcacaccgagccagtttttcattccgccggaaacgatggccgaacgtttcgccgatttacccgaagccctcgaaaacacggtggaaattgccaaacgctgcaatctgcacatcacattgggcaaaaacttcctgccccttttccccacgcccgacggtttatcactcgatgactatctcatcaaactctccaatgagggcttgcaggaacgcatggttcagctttatcccgacgaggcggagcgtgcggaaaaaatgccggaatatcaggaacgtttggattttgagctgaacatcatcatccagatgaaattccccggctatttccttatcgtacaagactttatcaactgggcgaaaacacacggctgcccggtcgggccgggacgcggttcgggcgcgggttcgctggtggcgtattcgctgaagattaccgacctcgatccgctgaaatacgcgctgctgttcgagcgtttcctaaaccccgaacgcgtttctatgcccgacttcgacgtggacttctgtcaggcaaaccgcggccgcgtgattgaatatgtacgcgaaaaatacggtgcggaagcagtcagccagattgttaccttcggcacgatgtcgtccaaagcagtgattcgcgacgtggggcgcgtactggaactgccgtttatgctgtgcgacaaactgtccaagctgattccgttggaagccaacaaacctttgggtttggacgacgcgatgaaggcggagccgcagattcaggaattaatcgaagcggaagaagcggacgaactgattacgctggcgaaaaagctggaagatttgacgcgcggtttgggtatgcacgcgggcggcgtgttgattgcgccgggcaagatttccgattacagccccgtgtatcaggcggacgaatccgcctcgcccgtatccatgtacgacaagggcgacgtggaagacgtgggtttggtgaaattcgactttttaggtctgcgcaacctgaccatcatcgaaatggcgcagaacaacatcaaaaacaccaccggcgacatcatcgatgtcggcaaaattccgcttgacgaccaggttgcctaccaaatcttccgcgatgcgaacaccaccgccgtgttccagttcgagtcgacaggcatgaagaaaatgctgaaaacggcgcatacgaccaagtttgaagaactgattgccttcgtatcgctctaccgacccggcccgatggacaatattcccgacttcgtcgcgcgtatgaaaggtcaggaattccaatacatccacccgctactcgaaggcatcctcgcaccaacctacgggattatggtgtatcaggaacaagtgatgcaggcggcgcagattatcggcggctactcgctcggcggcgcggacctgctgcgccgcgccatgggtaagaaaaagcccgaagaaatggtgaaacaccgcgaaatcttcgccgaaggcgcggcaaaacaaggcatttcgcgcgaaaaatccgacgaaatcttcaactacatggaaaaattcgccggctacggtttcaacaaatcccacgctgccgcctacgccctgatttcctaccagaccgcatggctcaaagcccactaccccgccgaatttatggcggcgaccatgtcgtctgaattggacaacaccgaccagctcaagcatttctacgacgactgccgtgccaacggcatcgagttcctgccgcccgacatcaacgaatcagactaccgcttcacgccgtatccgaacatgaaaatccgctacgcgctcggcgcgattaaaggcacgggcgaagccgccgtcgaatccatcaccgccgcgcggcaaagcggcggcaagtttaccggcctcttggacttctgtgagcgcgtcggcaaagaacacatgaaccgccgcaccctcgaagctctgatacgcggcggcgcattcgacagcatcgaacccaaccgcgccatgctcttggcgaacatcgacctcgctatggacaacgccgaccaaaaagccgccaacgccaatcagggcgggcttttcgacatgatggaagacgccatcgaaccggtgcggctcatcgacgcgccgatgtggagcgaatcggaaaaactcgccgaagaaaaaaccgtcatcggcttttacctgtccggccacccgttcggcccgtatgcccaagaagtccgccaaatcgccccgcagaaactgtcgaaactcaaaccgcaagacagcgtgcgcctcgccggattcgttaccgccgtacgcaccatgatgggcaagcgcggcaaaatcgccttcgtcagccttgaagatttgagcggacaggttgaaatcatggtcggcggtcagacgttggaaaactgcgccgactgcctcaaagccgaccaagtgctgattatcgaatccaaagtcagccgcgacgactacggcggcggcgacggactgcgtattctggcaaaccaagtcatgaccctgcaaacggcacgcgaacgctacgcccgcagcctcagcctcgccctcgccccgcatcacgacatcggcggactggtacaactgctcgccgcccaccaactgcccgacacgccgcgcatcccgctgcaactgtcgtatgccaacgaaaaagcgtcgggcaggcttcaagtgccgccgaaatggacggttacaccgagctccgcattgttcggcgaactggaaacattgctcggcagccggtcggtgcgcgtcaactggtaa

SEQ ID NO: 46420 - DNA, 465 bp, Neisseria meningitidis; identical to SEQ ID NO: 38372

SEQ ID NO: 46421 - DNA, 1284 bp, Neisseria meningitidis; identical to SEQ ID NO: 44141

SEQ ID NO: 46422 - DNA, 738 bp, Neisseria meningitidis; identical to SEQ ID NO: 44182

SEQ ID NO: 46423 - DNA, 966 bp, Neisseria meningitidis; identical to SEQ ID NO: 46197

SEQ ID NO: 46424 - DNA, 1284 bp, Neisseria meningitidis
atgactgtatcgaaatcaggttttatcgggcaaatcttttcccgaaatatgcttgtttgtatttttacggggtttacctcggggctgccgctgtactttctgattaacctgattccggcgtggttgcgcagcgagcaggtggatttgaagagcatcgggctgatggcgttaatcggtctgccgtttacttggaaatttttgtggtcgccgctgatggacgcggtcaggctgcccgttttgggacggcggcgcgggtggatgctgctgacgcaggcagggttgctggcggctttggcggcctatgcctttttaaacccccgtaatcatctgccgctgattgccggcttgtcggtgcttgtcgcttttttttccgccagtcaggacattgtattggatgcgttcaggcgcgagattttgtcggacgaagaattgggtttgggcaactcggttcatgtgaacgcctatcgggttgccgccctgattcccggttcattgagtttggtgttggcagacaggatgccgtggtcagaagtatttgttatcacttcattatttatgctgcccggccttctgatgacgctgtttcttgcgcgcgaacccgtgttgccgcctgccgttcctaaaacgttgaagcagaccgtggtagagccgtttaaagaattttttacgcgcaagggcatcgcttcggcggtgtgcgtgctgctgtttatcttcctttacaaactcggcgacagtatggcaaccgcgttggcaacgccgttttatctggatatgggtttcagcaagacagacatcggtttgattgcgaaaaatgcaggactgtggccggcagtggcggcaggtatcttgggcggcgtgtggatgctgaaaatcggcgtaaacaaagccttgtggctatttggcgcggtgcaggctgtaaccgttttggggtttgtatggctggcagggttcggacctttcgacacggtcggcacaggcgagaggctgatgctggcggcagttatcggcgcggaagcggtcggcgtggggttggggacggcggcgttcgtatcgtatatggcgcgtgaaaccaatcccgcatttaccgcaacgcagcttgcgctgtttaccagcctgtccgccgtcccgcgcacggtcatcaattcctttgccggttatctgattgaatggctcggttatgtaccgtttttccaactgtgtttcgcactcgccctaccgggtatgctgctgctgctgaaagttgcgccttggaacggggagaaaactcaggatgcaggcagatga

SEQ ID NO: 46425 - DNA, 486 bp, Neisseria meningitidis
atgccaatcgaaaagcaaaaggagaagagcatggtcgacgcggtcgttaaaactcccgaatttttaccttttacttctgtaggaatattccgttttggtgcggatataacagagtacaaaaacatactggaaacttttatgtatgaacctcctgatgagtttagaacagaatattatgaatctcccgactcaaatttactcatttccgtcaaaaaaaacaaaattatttcgatattttgttatcaggagctatattttatgggcgttaatataataggtctgaattttgaagattttaaacagcttttccatcaccctaaatcatacggtgttgataaatattatttatcaaatgaatcttatccgacatatgtctatgagtttgatgaaataggagtacaagcttgggaagcaaaagggaaaattgttactatcattgccgggggcaaagacaattattcaacagaaccttactacgatgaataa

SEQ ID NO: 46426 - DNA, 1035 bp, Neisseria meningitidis
ttggaagacgaagattttattcgcgccgcgtccatgctcgccgaagaagttttcggtttctgtatctacaaagaatccaaaggctcgggcggtcgtttctatgagcgctgttggttgatgggttcggaagacgtcctatacggtcgcgtccattttggcggacaaaacaataccatccttttcgaactgaccggcaccggttgcggcgtcgcaaaagaaggctgggaatcacgacttttcgcattcctgactaatgcaatccgcccaaaaatcacacgcgttgacatcgcaaaagactttttcaacggcgaatacagcccgaaccaagcccgtgaagaccgaaataaaggtatgtttacctgtcatcacgtcaaaccaaaaggcgaatgtttggggtcagattgggaagaagacgatgaagccaaaatgaccaaaggcaagacctatggtatcggctcccgtgaatcgtccaaatatgtccgcgtctatgaaaaaggcaagcagttgggcgataaaacaagcacatggacgcgctttgaaattgaattcaaagcaaaagacatcgttatccctttcgaagttttgcagaatccgggcgaatatttcggcggcgcatatccgatttgcgaacgattcgcccaaaaggcaacgcgcatacacgcggttaaggaagataaggtcatttcagccgaccgctaccttgaatgggtaaaaaaacagttcggacgtgcggcaaacggtctgaaattcatttttcccgaattggacaaagccaaactgtttgaactgattgagccgagtcatcacaagctgcccaagtctttggctcccgaagcctacgactgcgcctttttgaaagctcaagccattcatgaacagcccgcattcaaaccgtacaatgacccttactatatgtacgaatattacgagaatcttgaaaaacagcttgaacagcaaaaacacgtcaacaatgaagaaagctataacaacttcatttacgacaaattcgcaagactaccgatttcatgggcttaa

SEQ ID NO: 46427 - DNA, 237 bp, Neisseria meningitidis; identical to SEQ ID NO: 40080

SEQ ID NO: 46428 - DNA, 426 bp, Neisseria meningitidis
ttgataaacatgaaaacatcgacggtcgtttttggcggattttttatggcagacaacggagagcgaatccaaatccccgttttggaaaatcctgacattagggaaatcaatcactttttttccgtatcaaattttgagaaaaaaaccggcgtccttgttttcagaatcatccccgagccggaatttggcaataccgaattaactgtctattttgaaaaaggatattatttgccaatgattcaaacaattttagaaggcggggatattgaagtcaaaaaccttaaaacggaaaattatagtggaaatacaatggaaatttggggagattcctaccctattgagcatatctctaaaaatatttctacaattcaaaatataatttctgaatttatgatacaaaaacaaacaccggcaccaataatttga

SEQ ID NO: 46429 - DNA, 1521 bp, Neisseria meningitidis; identical to SEQ ID NO: 39047

SEQ ID NO: 46430 - DNA, 2313 bp, Neisseria meningitidis
gtgttgggacattgtttttcctttgctgtgtcaagttttcggattctactcgaattatcggcgcgtttgagaaatttcgaccataccggcgttcagacggcatcccgcagccttaactgccgtctgaatatcaaagcaggaatcacgcttatgcaacaaaaaatccgtttccaaatcgaaggcatgacctgccaggcctgcgcttcgcgcattgaaaaagtgttgaacaaaaaagattttgtcgaatcggcgggggtaaacttcgccagcgaagaggcgcaggtagtgtttgacgacagcaaaacctcagtagccgacattgccaaaatcattgagaaaaccggttacggcgcgaaggaaaaaacggaagatacattgccgcaagctgaagcagaacaccatatcggctggcggctgtggctgctgtccgccatcaatattccgttccttgtcggtatggcggggatgatgatcggtaggcacgattggatgattccgccgttgtggcagtttgcgctggcaagcattgtgcaactttggctggcaatcccgttttacaaaagcgcgtgggcgagcattaaaggcgggctggcgaatatggacgtgctggttactatcggcacggtgtcgatttacctgtattccgtttatatgttgtttttcagtccgcacgcggcacacggaatggcgcacgtgtattttgaagcgggcgtgatggtgattggttttgtgtcgctgggcaaatttttggaacaccgtaccaaaaaatccagcctgaacagcttgggcttgctgctcaaactcacgccgacccaagtcaacgtgcagcgcgatggcgaatggaaacagcttcccatcgaccaagtgcaaatcggcgaccttatccgcgccaaccacggcgaacgcattgccgccgacggcgttatcgaaagcggcagcggctgggcggacgagagccatcttaccggcgaatccaatcccgaagagaaaaaggcgggcggcaaagtgttggcgggcgcgctgatgaccgaaggcagcgtggtgtaccgcgccgcgcagctcggcagccaaaccctgctcggcgacatgatgaacgcactctctgaagcgcaaggcagtaaagcaccgattgcgcgcgtggcggacaaggcggcggcggtgttcgtgcctgccgtcgtgggcatcgcgttgttgacttttattgttacttggctgattaagggcgattggacggttgcgctgatgcacgccgtcgccgttttggtgattgcctgcccgtgtgcgctcggtctggctacacccgccgcgattatggtcggcatgggtaaagcagtgaaacacggcatttggtttaaagacgcagcggcaatggaagaagccgcccacgtcgatgccgttgtgttggacaaaactggcacgctgaccgaaggcaggccgcaggttgccgccgtttattgtgttcccgacagcggctttgacaaagacgatttgtaccgcatcgccgctgccgtcgaacaaaacgccgcccatccgcttgcccgagccatcgtttccgccacccaagcgcgcggtttggagattcccgccgcacaaaacgcgcaaaccgttgtcggcgcaggcattgccgccgaagtggaaggtgcgggattggtgaaagcgggcaaagccgaatttgccgaactgaccttgcccgagttttcagacggcgtttgggacattgcaagcattgttgcagtctcagtcgataacaaacctatcggtgcattcgcacttgccgacgcgttgaaagccgataccgccgaagccataggccgtctgaaaaaacacaatatcgatgtttacatcatgagcggcgacaaccaaggcacggtcgaatacgtcgcccaacaactgggtatcgctcacgccttcggcaatatgagtccgcgcgacaaagccgccgaagtgcagaaactcaaagccgccggcaaaaccgtggcgatggtcggcgacggcatcaacgacgcgcccgcgctcgccgccgcaaacgtcagcttcgccatgaaaggcggtgcggacgttgccgaacacaccgcgtccgccacgctgatgcagcattcggttaatcagctcgccgatgccctgctggtgtcgcaagccactttgaaaaacatcaagcaaaacctgtttttcgccttcttctacaatatcttgggcattccgctcgccgcgcttggctttttaaatcccgtcatcgcaggcgcggccatggcggcaagctcggtttccgtgttgagcaatgccttgcgcctgaaacgggtaaaaatcgattga

SEQ ID NO: 46431 - DNA, 1092 bp, Neisseria meningitidis; identical to SEQ ID NO: 44962

SEQ ID NO: 46432 - DNA, 1980 bp, Neisseria meningitidis
atgcctaaaattttacaacaaacaaccttacatcgcttttttcgcgcaaacacgcaccatccgatcagcccgtccgttttgcagcaggctggcgatttgataagatggttatgtttttcagacggcatttcagatttccgtccatgccgtctgaagccgcaaaacccgattggaggaattattatgaataccgtatcgaattacctgtccgcattgcgcgaagccatgaaggcgcaaggcttggacgcgctcgtcatcccttccgccgacccccacctgtccgaatacctgcccgcacactggcaggcgcgccgcgaattgtcgggctttaccggctcggtcggcacattcgtcgttaccgccgatgaagcgggcgtatgggtggacagccgctattgggaacaagccgccaaacagcttgcgggcagcggcatcgaactgcaaaaaagcgggcaagtgccgccgtataacgaatggctcgcggcaaacctgcccgaaaacgccgccgtcggcatcccttccgatatggtctcgctcaccggcaaacgcactttggcgcaatccctgaccgccaaaaacatccgcatcgaacacccaaacgatctgcttgaccaagtgtggacaagccgtcccgctatccccgccgaaaccgtgttcatccacgaccccgcctacgtctccgaaaccgccgccgaaaaactcgcccgcgtgcgcgccgtgatggcggaaaaaggcgcggattaccacttggtttcctcgcttgacgacatcgcctggctgaccaacctgcgcggcagcgacgtacctttcaaccctgttttcgtgtccttcctgctgatcggcaaagacaacgccgtcctgtttaccgaccgatgccgtctgaacgccgaagccgccgccgcgctgcaaaccgcaggcatcacggtcgagccttacgcccaagttgccgacaaactcgcgcaaatcggcggcgcgttgcttatcgaaccgaacaaaaccgccgtcagcacgcttgtgcgcctgcccgaaagcgtgcgccttatcgagggaatcaacccgtccacgctgttcaaatcctgcaaatccgaagccgacatcgcccgcatccgcgaagcgatggaacacgacggcgcggcgttgtgcggtttcttcgccgagtttgaagacatcatcggcaacggcggcagcctgaccgaaatcgacgtggacaccatgctttatcgccaccgcagcgtgcgcccaggcttcatttcattgagtttcgacaccatcgcaggcttcaacgccaacggcgcactgccgcattacagcgcaacgcccgaaagccacagcaccatcagcggcaacgggcttttgctcatcgactccggcgcgcaatacaaaggcggcacgaccgacatcacccgcgtcgtccctgtcggcacacccaccgccgaacaaaaacgcgacaacaccctcgttctcaaagcccatatcgcgcttgccgaagccgtgttcccagaaaacatcccctcgccgctgattgatgcgatttgccgcaaacccctgtggcaggcgcaatgcgactacggccacggcaccggacacggcgtaggctatttcctcaacgtccacgaaggcccgcagcgcatcgccttcgccgcccccgccacgcccgaaaccgccatgaaaaaaggcatggttacctccatcgaacccggactctaccgcccgggaaaatggggcatccgcattgaaaaccttgccgccaaccaagccgtcgccgcccctcaagaaaccgaattcggcagcttcctctgttttgaaaccctgaccctctgccccatcgacacccgcctgatggacaccgccctcatgaccgacggcgaaatcgactgggtcaaccgctaccacgccgaagtccgccgccgcctcgagccgctgaccgaaggcgcggcaaaagcgtggctgatcaaacgcaccgaaccgctggcgcgttaa

SEQ ID NO: 46433 - DNA, 1134 bp, Neisseria meningitidis
gtggattggcacgaacgtttccccgaattggaagcgcaactgggtgcgccgattgaaaattacgcgccgccgaaacattggacgcgcaagcagctcagaagtatggggcgtgtgtcgtatttgtgcgtcgatgcggcggagcaggctttgacggatgccggtttgctcggagacgaaagcattactgacggacgcatgggcgttgcctgcggctcttccagcggcagcaccaaagacatcggcgatgtaggcgaattgttgctgaccggcatgtcgcgcaacttcagtgccaacacctatgtgcgtatgatgccgcacaccgccgccgccaatatcggcatctttttcgggctgaaaggacgcatcatcccgacatcgagcgcgtgttcgtccggcagccaaggcataggttatgcctacgaagccatcaaatacggtctgaccgatatgatgctggcgggcggaggcgaagaatttttcccgtccgaagtgtatgttttcgactcgctttatgccgccagccgccgcaacggcgaaccggaaaaaaccccgcgcccatacgacgcgaaccgcgacgggctggtcatcggcgaaggcgcggggattttcgtgctggaagaattggaacacgccaaacggcgcggtgcgaaaatttacgccgaactcgtcggctacggagccaacagcgatgcctaccatatttccacgccccgccccgacgcgggcgcaatccttgcctttcagacggcattgcaacacgcaggtcttgcgcccgaagacatcggctggattaatctgcacggcaccgggacgcaccacaacgacaatatggaaagccgcgccgttgcagcggttttcggcaacaatacgccctgcacgtccaccaagccgcaaaccggacacacgctgggcgcggcggacgcaatcgaagccgcgttcgcgtggggcattgccaaccggcaaagcaatcccgaaggaaaacttccgccccggctttgggacgggcagaacgaccccaacctgcccgccatcaacctgaccggcagcggcagccgctgggaaaccgaaaaacgcattgccgccagctcatcgtttgccttcgggggaagcaactgcgtcttaatcatcggatga

SEQ ID NO: 46434 - DNA, 2118 bp, Neisseria meningitidis
atgcgccgttttctaccgatcgcagccatatgcgccgtcgtcctgttgtacggactgacggcggcaaccggcagcaccagttcgctggcggattatttctggtggatagttgcgttcagcgcaatgctgctgctggtgttgtccgccgttttggcacgttatgtcatattgctgttgaaagacaggcgcgacggcgtattcggttcgcagattgccaaacgcctttctgggatgtttacgctggttgccgtactgcccggcgtgtttctgttcggcgtttccgcacagttcatcaacggtacgattaattcgtggttcggcaacgatacccacgaggcgcttgaacgcagcctcaatttgagcaagtccgcattgaatctggcggcagacaacgcccttggcaacgccatccccgtgcagatagacctcatcagcaccgcctccctatccggcaatatgggcagggtgctggaacattatgccaacgggtttacacagttgtccctttacaatgccgcaagcggcaaaatcgaaaaaagcatcaacccgcacaagctcgatcagccgtttccggataaggcgcgttgggaaaaaatccaacaggcgggttcggtcagggatttggaaagcataggcggcgtattgtacgcgcagggctggctgtcggcgggtacgcacaacgggcgcgattacgccttgtttttccgtcagccggttcccaaaggcgtggcagaggatgccgtcttaatcgaaaaggcaagggcgaaatatgctgagttgagttacagcaaaaaaggtttgcagacctttttcctggcaaccctgctgattgcctcgctgctgtcgatttttcttgcactggtcatggcactgtatttcgcccgccgtttcgtcgaacccgtcctatcgcttgccgagggggcaaaggcggtggcgcaaggcgatttcagccagacgcgccccgtgttgcgcaacgacgagttcggacgcttgaccaagttgttcaaccacatgaccgagcagctttccatcgccaaagaagcagacgagcgcaaccgccagcgcgaggaagccgccagacattatcttgaatgcgtgttggaggggctgaccacgggcgtggtggtgtttgacgaacaaggctgtctgaaaaccttcaacaaagcggcggaacagattttggggatgccgcttacccccctgtggggcagcagccggcacggttggcacggcgtttcggcgcagcagtccctgcttgccgaagtgtttgccgccatcggcgcggcggcaggtacggacaaaccggtccatgtgaaatatgccgcgccggacgatgccaaaatcctgctgggcaaggcaaccgtcctgcccgaagacaacggcaacggcgtggtaatggtgattgacgacatcaccgttttgatacacgcgcaaaaagaagccgcgtggggcgaagtggccaaacggctggcacacgaaatccgcaatccgctcacgcccatccagctttccgccgaacggctggcgtggaaattgggcgggaagctggatgagcaggatgcgcaaatcctgacgcgttcgaccgacaccatcgtcaaacaggtggcggcattgaaggaaatggtcgaagcattccgcaattatgcgcgttccccttcgctcaaattggaaaatcaggatttgaacgccttaatcggcgatgtgttggcattgtatgaagccggtccgtgccggtttgcggcggagcttgccggcgaaccgctgatggtggcggcggatacgaccgccatgcggcaggtgctgcacaatattttcaaaaatgccgccgaagcggcggaagaagccgatgtacccgaagtcagggtaaaatcggaagcggggcaggacggtcggattgtcctgacggtttgcgacaacggcaaagggttcggcaaggaaatgctgcacaacgccttcgagccgtatgtaacggacaaaccggcgggaacgggattgggtctgcctgtggtgaaaaaaatcattgaagaacacggcggccgcatcagcctgagcaatcaggatgcgggtggcgcgtgtgtcagaatcatcttgccaaaaacggtaaaaacttatgcgtag

SEQ ID NO: 46435 - DNA, 2253 bp, Neisseria meningitidis
atgggacagtacaagaagctatggtacttgctgtttgccgttctggcggtatgctttaccattcttggctatatgggcagcgaggtttacaaaaaagccccgccttaccctgaacaggtcgtttccgcatcaggcaaagtgctgatgacgaaagacgatattttggcaggtcagtctgcgtggcagagtaccggcggtatggaagtcggttcgattctgggtcacggcgcatatcaggctccggactggacggccgactggctgcatcgtgagttggttgcattggatttgaccgcgcaacagacttacggcaaaaaattcgatgaagtttcccctgaagaacaagccgttctgaaaacccgactggctgacgaataccgcaaccaaagccgtattaaagaagacggcagcgtcgtcatcagcgatacgcgcgtgaaagccatcgaaagcatcctgccttattaccacggtgtttacggcgatgatcccgcgctgcaaaccacccgcgaacactttgcaatgaaaaacaacacattgccaagccaagaagcgcgtgaaaaactgttcgacttcttcttctggacttcttggtctgcttcgaccaaccgtcctgacgagacgttcacttataccaacaactggccgcacgagcctttgatcaacaacgtaccgaccactgaaaactatatgtggtcattcaccagcgttgttcttctgctgatgggcatcggtttgttgatgtggggttattccttcctgaccaaacacgaggaagtggaagtgccgtctgaagacccgatttccaaaatccaactgaccccttcacaaaaagcattgggcaaatacgtcttcctgacggttgccctgtttgtggtacaagtattgctgggcggtctgaccgcgcactacaccgtcgaaggtcagggtttctacggcattgacgaggcgttgggctttgaaatgtccgactggttcccttacgccctgacccgtacttggcacatccaatccgccatcttctggattgcaaccggctttttgacggcaggtttgttccttgcgccgattgtcaacggcggcaaagatcccaagttccaacgtgcaggcgtgaacttcctctatatcgccctcttcatcgtggtcggcggctcttacgcgggcaacttcttcgcgttgacgcacatccttcccccggaatttaacttctggttcggacaccaaggttacgaatacctcgatttgggacgtttctggcaactcctgctgatggtcggcctgctgttgtggctgttcctgatgttgcgttgcacggtttccgccttcaaagaaaaaggcgtggacaaaaacctgctggcaatctttgtcgcttctatggtcggtgtgggcgtattctacgcaccgggactgttctatggcgagaaatccccgattgccgtaatggaatactggcgttggtgggtggttcacctgtgggtggaaggcttctttgaagtatttgccactgccgcttttgcctttgtcttctacaatatgggctttgtccgccgcagtaccgccacagcttctactctggccgctgccgccatctttatgttgggcggcgttccgggtacgctgcaccacctgtacttctccggctctacctccgcctctatggcaatcggtgcctgcttctccgctttggaagtcgtgccgctggtgttgctgggccgtgaagcatacgagcattggtcttaccaacacctgtccgactgggcgaaacgcctgcgttggccgctgatgtgcttcgtggcagtcgccttttggaatatgatcggtgccggtgtattcggtttcctgattaacccgccgatttccctgttctatatccaaggtttgaatacttctgctgttcatgcgcacgccgccttgttcggtgtgtacggtttcttggcattgggcttcgtattgctggttgcccgttatttgaaaccgaacgcgcagtttgacgacaaactgatgacttggggcttctggctgctcaacggcggcttggtcggtatgattgccatcagcctgttgccggttggcgtgattcaggcatacgcctccatcacgcacggcctgtggtatgcacgcagcgaagagttcctgcaaatggaaatcctcgacaccttgcgttgggtacgtacggcagctgacttggtctttatcggcggtgcaatctgcgttgccatccaagccactaaaatcgtattcggccgcgacaaataa

SEQ ID NO: 46436 - DNA, 354 bp, Neisseria meningitidis; identical to SEQ ID NO: 45508

SEQ ID NO: 46437 - DNA, 1008 bp, Neisseria meningitidis
atgagcaccttcttccaacaaaccgcccaagccatgattgccaaacacatcgaccgtttcccgctattgaagttggaccaggtgattgattggcagccgatcgaacagtacctgaatcgtcaaaaaacccgttacctcagagaccaccgcggccgtcctgcctatcccctgttgtccatgttcaaagccgtcctgctcggacaatggcacagcctctccgatcccgaactcgaacacagcctcatcacccgcatcgatttcaacctgttttgccgtttcgacgaactgagcatccccgattacagcaccttatgccgctaccgcaaccggctggcgcaagacgacaccctgtccgaattgctggaactgattaaccgccaactgaccgaaaaaggtttaaaagtagagaaagcatccgccgctgtcgttgatgccaccattattcagaccgccggcagcaaacagcgtcaggccatagaagtcgatgaagaaggacaagtcggcggccaaaccacaccgagtaaggacagcgatgcccgttggataaagaaaaacggcctctacaaactcggttacaaacaacatacccgcaccgatgcggaaggctatatcgagaaactgcacatcacccccgccaatgcccatgagtgcaaacacctgccgccgttgttggaaggggtacctagaggtacgaccgtctatgccgacaaaggctacgacagtgcagaaaaccggcaacatctggaagaacatcagttgcaggacggcattatgcgcaaagcctgccgcaaccgtccgctgtcggaaacgcaaaccaaacgcaaccggtatttgtcgaagacccattatgtggtcgaacaaagcttcggtacgctgcaccgtaaattccgctatgcgcgggcagcctatttcgggctgattaaagtgagtgcgcaaagccacctgaaggcgatgtgtttgaacctgttgaaagccgccaacaggctaagtgcgcccgctgccgcctaa

SEQ ID NO: 46438 - DNA, 948 bp, Neisseria meningitidis; identical to SEQ ID NO: 44214

SEQ ID NO: 46439 - DNA, 279 bp, Neisseria meningitidis; identical to SEQ ID NO: 38900

SEQ ID NO: 46440 - DNA, 1173 bp, Neisseria meningitidis
atgaacattaccatcgtcgccccttattgctcgctgccgtccgagccgcatttcaaccgcttctggtatcttgccgagctgttgtcgcagtcgcatgacgtgttgctgattaccagcaacttcaagcactacgacaaatctttcagacggcccgaagatgccgaggccgcctcacaaggccgtctgaaagtcatgctgttggaagaaagcggatacagcaaaaacgtgtctttaggacgcgtgaccagccatcaccgcttcgtcaaacattttgaaaaatggttggaaaactgccgtccgggcgaacaagacgtcgtcttttccgcctatccgctgattgccaccaacctactgttgggcaaacacaaagcgcgtttgggttacaaactgattgtcgatgtgcaggacgtatggccggagtctttctcctcggtcgtaccgtttttgaaaaaagtaccgcacaacctgctgccctttgcttcacgcgccaaccgggcctaccgctacgccgacgcgctggttgccgtatcgcagacttatctcgaccgcgccaaagaaaccaatccgaacgtacctggcgaagtcatctatattggtgctgactttcccaaactcgatgccgcacctgccaaagattttggcgacgacaaaacccgctttttctacttgggcacgctcagttacagctatgacgtggaaaccgtgtgcaaaggcgttcggaaacttttggacgacggcgaaaatgtagagctgcacatcatgggcggcggccccgatttggacaggctcaaacaatatgcctgcgacggcatcaagttttacggctacattccttacgccgaaatgatgtcggtcgccaagggctgcgacatttccgtcaacgccatccatagccacgccatgcagtcggttaccaacaaactctctgactatatggctttgcaaaaaccgattctgaacagccaggttaacgacgaagttgccgaagtccttaccctgctgccgcatgcggactaccgctccggcgatgtggacggtttcgttcaagccgataaagatattttgaagcgcaaaaacgatcctgttcagtccgaagaaatcgtccgccgcttcaaacgcgacgttgcctatcaaaaaatcgtcaacctgattgaaagattagctcatgaataa

SEQ ID NO: 46441 - DNA, 465 bp, Neisseria meningitidis
ttgaaagcgggaagcaggctgttatccgaaagcggcaaaacccaaaccgtccgcaacatcgttgtcaaaccaaaaccgctcaaagcctacaatctgaccgttgccgactggcatacctactttgtcaaaggcgataaggcggaaacggaaggggtttgggttcataatgattgtccgtatggaaatttatcggataataaatctgttggcgaaggaaaaaaatttacaccagctcaaaagaaagcaatcatccaagaaaacatgaatagaaacggaggggtagtgaagtctgaccaatctggagaagttttggttcgtcctaaaaagagccaaaaaggtatcacccccccatcaaatgaatggcagattgaccatgtgcaagcaaaaagtaaaggaggttcaaatagttataaaaatgcacaggttttatccagaagagaaaatattaagaaatcaaataaatag

SEQ ID NO: 46442 - DNA, 372 bp, Neisseria meningitidis; identical to SEQ ID NO: 36308

SEQ ID NO: 46443 - DNA, 594 bp, Neisseria meningitidis
atggcaaaaaaaccgaacaaacccttcaggctgacccccaaactcctgatacgcgccgtattgctcatctgtatcaccgccatcggcgcattggcaataggcatcgtcagcacattcaacccgaacggcgacaaaacccttcaagccgaaccgcaacacaccgacagcccccgcgaaaccgaattctggctgccaaacggcgtagtcggacaagatgccgcccaacccgaacaccaccacgccgcctcatccgaacccgcacagccggacggcacagacgaaagcggcagcggactgccgtcccctgccgcacccaagaaaaaccgggtcaaaccgcaacctgccgacacagctcaaaccgacaggcagccggacgacgccggaacacaagctgaaaacacactcaaagaaacccccgtactgcccacaaacgtcccccgtcccgaaccccgaaaagaaacacccgaaaaacaggcgcagcccaaagaaacacccaaagaaaaagaaacgcccaaagaaaaccataccaaaccggacaccccgaaaaacacgccgcccaaaccccataaagaaattctcgacaacctcttctga

SEQ ID NO: 46444 - DNA, 171 bp, Neisseria meningitidis; identical to SEQ ID NO: 37387

SEQ ID NO: 46445 - DNA, 396 bp, Neisseria meningitidis; identical to SEQ ID NO: 39895

SEQ ID NO: 46446 - DNA, 1134 bp, Neisseria meningitidis; identical to SEQ ID NO: 38450

SEQ ID NO: 46447 - DNA, 204 bp, Neisseria meningitidis
atggatacgaccctgaagaataaagccgaagccatcttgggcgaaccgcttttagacgaacctatccgccccgagtcgtgggaatgttgcggcagcgactgcggcgaggcgtgcattcagacgatttattgggcggataaggcccgctacgacgcgcaacggcggaaattgaaagaagcgggttggtcggacgatgccgtctga

SEQ ID NO: 46448 - DNA, 861 bp, Neisseria meningitidis; identical to SEQ ID NO: 40563

SEQ ID NO: 46449 - DNA, 480 bp, Neisseria meningitidis
atggctaacttagtaaaaacctttctgctcggcgagttggtaaaaggcatgggcgtaacgctcaaaaacttttttgcccgcaaagacacaatttatttccccgaagagaaaacgccgcaatccgtgcgtttccgtggcctgcacgcgcagcggcggtatccgaacggcgaagagcgctgtatcgcgtgtaaattgtgcgaggcagtttgtccggcaatggcgattaacattgaatcggaagaacgcgaagacggcacccgccgcaccaagcgttacgatatcgacctgaccaagtgcatcttctgcggtttctgcgaagaggcctgcccgaccgatgcgattgtggaaacgcatatttttgaataccacggcgagaaaaaaggcgacttgcacatgaccaagccgatcctcttggcaatcggcgacaaatacgaagctgaaatcgccaaacgcaaagccgctgatgcgccgtatcgttaa

SEQ ID NO: 46450 - DNA, 195 bp, Neisseria meningitidis; identical to SEQ ID NO: 44174

SEQ ID NO: 46451 - DNA, 1446 bp, Neisseria meningitidis; identical to SEQ ID NO: 44542

SEQ ID NO: 46452 - DNA, 822 bp, Neisseria meningitidis; identical to SEQ ID NO: 44998

SEQ ID NO: 46453 - DNA, 387 bp, Neisseria meningitidis; identical to SEQ ID NO: 44178

SEQ ID NO: 46454 - DNA, 303 bp, Neisseria meningitidis
atggattttttcctaccgaacactatgcatacagaactcaacaacggaacactgcacatcagcggcgacatcaccgtcaaaaccctgaccggggaggcttttgagcgtttccagcagcaatgccgtctgaaagaaaccattgccgtcgatttcggcggtgtcaaacgtgccgattccgcctgcgtgtcgctgctgctcgaagtgctgcgcggctgcaaaggcagcgtcaggctgaccggcattcccgaatccgtgcgcgcgctgtccgaactgtacgaaatcaaagactggctgaaatcatga

SEQ ID NO: 46455 - DNA, 1500 bp, Neisseria meningitidis
gtgttcaaaaaataccaatacctcgctttggcagcactgtgtgccgcctcgctggcaggctgcgacaaagccggcagctttttcggtgcggacaaaaaagaagcatctttcgtagaacgcatcgaacacaccaaagacgacggcagcgtcagtatgctgctgcccgactttgtccaactggttcaaagcgaaggcccggcagtcgtcaatattcaggcagcccccgccccgcgcacccaaaacggcagcagcaatgccgaaaccgattccgacccgcttgccgacagcgacccgttctacgaatttttcaaacgcctcgtcccgaacatgcccgaaatcccccaagaagaagcagatgacggcggattgaacttcggttcgggcttcatcatcagcaaagacggctatattctgaccaatacgcacgtcgttaccggcatgggcagtatcaaagtcctgctcaacgacaagcgcgaatataccgccaaactcatcggttcggatgtccaatccgatgtcgcccttctgaaaatcgacgcaacggaagagctgcccgtcgtcaaaatcggcaatcccaaagatttgaaaccaggcgaatgggtcgctgccatcggcgcgcccttcggcttcgacaacagcgtgaccgccggcatcgtgtccgccaaaggcagaagcctgcccaacgaaagctacacacctttcatccaaaccgacgttgccatcaatccgggcaactccggcggcccgctgttcaacttaaaaggacaggtcgtcggcatcaactcgcaaatatacagccgcagcggcggattcatgggcatttccttcgccatcccgattgacgttgccatgaatgtcgccgaacagctgaaaaacaccggcaaagtccaacgcggacaactgggcgtgattattcaagaagtatcctacggtttggcacaatcgttcggtttggacaaagccggcggcgcactgattgccaaaatcctgcccggcagccccgcagaacgtgccggcctgcaggcgggcgacatcgtcctcagcctcgacggcggagaaatacgttcttccggcgaccttcccgttatggtcggcgccattacgccgggaaaagaagtcagcctcggcgtatggcgcaaaggcgaagaaatcacaatcaaagtcaagctgggcaacgccgccgagcatatcggcgcatcatccaaaacagatgaagccccctacaccgaacagcaatccggtacgttctcggtcgaatccgcaggcattacccttcagacacataccgacagcagcggcggacacctcgtcgtcgtacgggtttccgacgcggcagaacgcgcaggcttgaggcgcggcgacgaaattcttgccgtcgggcaagtccccgtcaatgacgaagccggtttccgcaaagctatggacaaggcaggcaaaaacgtccccctgctgatcatgcgccgtggcaacacgctgtttatcgcattaaacctgcaataa

SEQ ID NO: 46456 - DNA, 1968 bp, Neisseria meningitidis
gtggggaacacctttaaatcaatccttgtctgggtcgccttgggtatcggcctgatggctgcgttcaacgctttagacggtaaaaaagaagacaacgggcaaatcgaatattctcagttcatccaacaggtcaacaacggcgaagtatccggcgtcaacatcgaaggatccgtcgtcagcggctacctgattaagggcgagcgcaccgacaaaagcaccttcttcaccaacgcgcctttggacgacaacctgattaaaacactgctcgacaaaaacgtccgtgtaaaagtaacgccggaagaaaaaccgagcgcgctggctgccctgttttacagcctgctgcccgtcctgctgctgattggcgcgtggttctgctttatgcgtatgcagacgggcggcggcggaaaaggcggcgcattctcattcggcaaaagccgcgcccgcctactggacaaagatgccaacaaagtgacctttgccgatgtcgccggctgcgacgaagccaaagaagaagtgcaggaaatcgtcgattacctcaaagcgccgaaccgctatcaaagcctgggcgggcgcgtgccgcgcggcatcctgctggcgggcagcccgggtacgggtaagacgcttttggcgaaagcgattgcaggcgaagccggcgtgccgttcttcagcatttcaggttccgactttgtcgaaatgttcgtcggtgtcggtgcaagccgcgtccgcgatatgttcgagcaggcgaagaaaaacgccccctgcatcatctttatcgacgagattgacgcagtcggccgccaacgcggcgcaggtttgggcggcggcaatgatgagcgcgagcaaacattaaaccaattgttggttgaaatggacggttttgagagcaatcagactgtaattgtgattgcggcaaccaaccgccccgacgtactcgatcctgcgctgcaacgccccggccgtttcgaccgccaagtcgtcgtccccctgccggacatccgggggcgcgaacagattttgaacgtccattctaaaaaagtgcctttggacgaatctgtggatttattgtccctcgcgcgcggcacgccgggtttttccggtgcggatttggcaaacctggttaacgaagccgccctgtttgccggccgccgcaacaaagtcaaagtcgatcaaagcgattttgaagacgcaaaagacaaaatctatatgggtccggaacgccgcagtatggtgatgcacgaagacgaaaaacgtgcgacggcgtatcatgagtccggacacgcgattgttgccgaaagcctgccctttaccgaccccgtccacaaagtaaccattatgccgcgcggacgtgcgctgggtctgacttggcagcttccggagcgcgaccgcatcagtatgtataaagatcagatgttgagccagctctccatcctgttcggcggacggattgccgaagacatcttcgtcggacgcatctccaccggcgcatcaaacgactttgaacgcgcaacccaaatggcgcgcgaaatggtaacgcgctacggcatgagcgacaaaatgggcgtgatggtttatgcggaaaacgaaggcgaagtcttcttaggacgcagcgtaacccgttcgcaaaacatttccgagaaaacccagcaggacatcgatgcggaaatccgccggattttggacgagcagtatcagattgcctacaaaatcctcgatgaaaaccgcgacaagatggaaaccatgtgcaaagccctgatggaatgggaaaccatcgaccgcgatcaggtactggaaatcatggcgggcaaacaacccagtccgcccaaggattacagccacaacctgcgcgagaatgcggacgcggcggaagataacgcgccgcacgctccgactcgggaagaaaccgaagcacctgccccggcagacaccgcttcgacagagtccgagcagcagcctgaaaacaaggcttaa

SEQ ID NO: 46457 - DNA, 756 bp, Neisseria meningitidis; identical to SEQ ID NO: 39133

SEQ ID NO: 46458 - DNA, 546 bp, Neisseria meningitidis
atgattatagttgaacatttagaacattatttgggtgaaatcgaaagcggtataaaatgcttggatcgacgttatcatctcagcgtttccgtcttcccatcacaaccatataaaggggtaactactttttctactttaggcttgaatcgatatgacttgaactataagagtaggtttgaattaatttttacctgttctgaagaatggaataaagaaaatattgcagcttttctatcaggagtggctgaatatttgattgacaatagacaacctattttaagaggtgaaattattcaattacccagggtaattatcgaaggtagcaaaatggatgcactgtatgtttccgccccattttatttcgacgatgattttcaggtctgttatggcgaacactacaatatcgttttccctttgcttgtcccgttgtataaacaggaagcagaattggtggaaaaaaagggttggaatgcttttgagcagttcttgctggataatgaagttgacaacctttcggatatgaatcggaaaccgtttgcttggtaa

SEQ ID NO: 46459 - DNA, 969 bp, Neisseria meningitidis
ttggttaagaatactgatttcagtcgtatgagtgcgaccgaaatcaaaaaatctaaagcgaagattactgcctattcaaaactggttgccggcactgcgtctgccgttgtaggcggggatgtgaatacagcggcgaatgcggcacagatagcggtggagaataatactttgtatcctagatgcgttggtgcaaagtgtgatgaatttcaaaaggaacaacaaaaatggatacgtgaaaatcctgaagaatatcgagaagttttgcttcttcagacaggatttattccaattatcggtgatatacagagttttgtacaagcacagaccgctgccgatcacctgtttgctttgctgggtgtggttccgggtatcggtgaatcgatacaggcctataaagtagcgaaagcggcaaaaaatttacaaggcatgaaaaaagccttggacaaggcagcaaccgttgccactgcacagggctatgtcagtaaaaccaaaatcaaaatcggtcaaattgaattaagggttactgcagcaactgacaaacaattgctgaaagctattggcgaaggaagggacacgacaggtaaaatgaccgagcagttatttgactctttagctaaacaaaatggcttcagagtgctttcgggcggcaaatacggcggaaataacggttttgatcatgtatggcaggctgccgatggtagtgttgttttgattgtagaaagtaagcagattaggaacggtacggtacagctgaatccgaatggtgcgggtggatatacgcagatgagtcgtgaatggattaaacaagttgtaaaaagtttacctgatggtagtcctgctaaggcagttgtcttaaaagcaaatcagaacggcaaattaaaaacggcaatagcaggcgttgatcgtcaaacaggtaaggccgttattctttctgtcaaagttccttctaaaaccaatataaggagataa

SEQ ID NO: 46460 - DNA, 234 bp, Neisseria meningitidis
atgtctatggaaataaaattcaatactttgggggttatcctgaatggggtcaatcctgaagaaaaattcataaaaattattgatgaccaggaaaataccggtggatttctgatactgttatcttcaaatgacaaattctcatcatttgacagttacgatgactgggtcgaaaacttagaaatattaaaagaatacctgcaagaatctcattggataataaagtgggtcggatag

SEQ ID NO: 46461 - DNA, 2058 bp, Neisseria meningitidis
atgacacgcaaaatcttagttacctccgccctgccctatgccaacggcagcatccacctcggccacatggtcgaacacatccaaaccgacgtttgggtgcgcttccaaaaactgcgcggcaacgaatgctactactgctgcgccgacgacacccacggcacgcccgtgatgcttgccgcgcaaaaacaaggcatcgcgcccgaagacatgattgccaaagtgcgcgaagaacacctcgccgactttaccggtttcaacatcggctacgacaattattacagcacccattcccctgaaaacaaacagttttcccaagatatttaccgcgcgctgaaagccaacgacaagattgagagccgcgtcatcgagcagcttttcgaccccgaaaaacaaatgttcctgcccgaccgcttcgttaaaggcgaatgcccgaaatgccacgcccaagaccaatacggcgacaactgcgaagtctgcggcacgacctattccccgaccgaactgattaacccgtattccgccgtttccggcgcgaaacccgaattgcgcgaatccgaacacttcttcttcaaactgggcgaatgcgccgacttcctcaaagcatggacttccggcaacaacccgcacgacggcaaaccccatctgcaaccagaagccctcaacaaaatgaaagaatggctgggcgaaggcgaagaaaccaccctgtccgactgggacatttcccgcgacgcgccgtatttcggttttgaaatccccgacgcgccgggcaaatacttctacgtctggctggacgcgcccgtcggctacatggcatcgtttaaaaacctgtgcgaccgcatcggcatcgatttcgacgaatacttcaaagccggcagccaaaccgagatgtaccacttcatcggcaaagacatcctctatttccacgccctgttctggcccgccatgctgcatttctccggccaccgcgccccgaccggcgtgtacgcacacggctttttgaccgtggacggacaaaaaatgtccaaatcgcgcggcacgtttattaccgccaaatcctatctggaacaaggcctaaaccccgagtggatgcgctactacatcgccgccaaactcaacagcaaaatcgaagacatcgatttgaacctgcaagactttatctcgcgcgtcaacagcgacctcgtcggcaaatacgtcaacatcgccgcccgcgcgtcaggtttcatcgccaaacgctttgaaggaaaactcaaagacgtttccgacagcgcattgctggcaaaactgactgcgcaaagcgaagccattgccgaatgctacgaaaaccgcgaatacgcccgcgccctgcgcgacatcatggcattggcagacattgttaatgaatacgttgatgccaacaaaccttgggaactcgccaaacaagaaggccaagacgaacgcctgcacgaagtatgcagcgaactcatcaacgcctttacgatgctgaccgcctacctcgcccccgtattgccgcaaaccgccaccaatgccgcgcgtttcctcaatctggacgcgattacttggacgaacacaagggtaaccttgggcaaacacgccatcaacaaatacaaacatttaatgcaacgagtggagcaaaaacaagtggacgatttaatcgaagccaacaaacaaagcatcgccgccgcagccgcacctgccgccgaagagagcaaatacgaaaaagtcgccgaacaggccagcttcgacgactttatgaaaattgatatgcgcgtcgccaaagtcttgaactgcgaagccgtcgagggcagcaccaaacttttgaaattcgacctcgatttcggttttgaaaaacgcatcatcttctccggtatcgccgcgtcttatcccaaccctgccgagttaaacggaagaatggtcatcgccgtcgccaacttcgccccgcgcaaaatggcaaaattcggcgtatccgaaggtatgattttgagtgccgccacggcagagggcaaactgaagctcttggatgtggatgcaggcgcacaaccgggcgacaaagtcggttaa

SEQ ID NO: 46462 - DNA, 567 bp, Neisseria meningitidis; identical to SEQ ID NO: 41762

SEQ ID NO: 46463 - DNA, 351 bp, Neisseria meningitidis; identical to SEQ ID NO: 39765

SEQ ID NO: 46464 - DNA, 756 bp, Neisseria meningitidis
gtgttagcgtgtataatcaggcattctatccgaaattcacaacaggtcagcaatatgtctttgaaaacagtagccgttatcggcgcaatggaacaagaaatcgagcttttgcgcgagatgatggaaaatgtcaaagccgtctctttcggcaagtttaccgcctatgaaggcgaattagcgggaaaacgcatggtgcttgcattgagcggcatcggcaaggtcaacgcggcggttgcaacggcttggattatccgtgaattcgcagcggactgcgtcatcaacaccggcagcgcgggcggtttgggcaagggtttgaaagtcggcgacgtggtgattggcacggaaaccgcacaccacgatgtcgatgtaaccgcattcggctatgtttggggacaagtgccgcaactgcccgccgtattcgtttcagacgacctcttggtcggcaaggcaaaacgggcggcgcggacgtttgaaggcgcggcggtagaacaaggtctgattgtcagcggcgaccgcttcgtccacagcagcgaaggcgtggcggaaatccgcaagcacttccccgaagttaaggcggtagaaatggaagcggcggcaatcgcccaaacctgtcatcagttggaaacgcctttcgtcatcatccgcgcggtttccgattcggcagatgaaaaagcagacatcagctttgacgaatttttgaaaacggcggcggcaagttctgcaaaaatggtggcagaaatcgtcaaatctttataa

SEQ ID NO: 46465 - DNA, 1677 bp, Neisseria meningitidis; identical to SEQ ID NO: 38898

SEQ ID NO: 46466 - DNA, 531 bp, Neisseria meningitidis; identical to SEQ ID NO: 39309

SEQ ID NO: 46467 - DNA, 339 bp, Neisseria meningitidis; identical to SEQ ID NO: 44994

SEQ ID NO: 46468 - DNA, 1134 bp, Neisseria meningitidis
atgagcacccccgccctcctcgtcctcgctgacggcagcgtattccacggcacatcaatcggttacgaaggttcgacttccggcgaagtcgtgttcaatacttcgatgaccggctatcaggaaatcctgaccgacccgtcctactgcaaacaaatcgttaccctcacctacccccacatcggcaacaccggcaccaacgccgaagatgaagaaagccgcagcgtttacgccgccggcctgattatccgcgacctgccgctcttgcacagcaacttccgtgcctccgaaagcctgcacgactatttggtacgcaacaaaaccgtcgccatcgccgacatcgacacccgccgcctgaccacgctgttgcgtgaaaaaggcgcgcaaggcggcgcgatcttgaccggcgcggatgctacggttgaaaaagcgcaagaactcatcgccgcgttcggcagtatggtcggcaaagacttggcaaaagaagtttcctgcacggaaacttacgaatggacggaaggcgaatgggaattgggcaagggtttcgttacccctgacgaacagccttaccacgtcgtcgcctacgatttcggcgtgaaaaccaacatcctgcgtatgctcgcctcgcgcggctgccgcctgaccgtcgtccccgcccaaacgagcgcacaagacgtgttggcactcaatcccgacggcgtgttcctgtccaacggccccggcgaccccgagccttgcacctacgccatcgaagccgtgcaaaaactgatggaaagcggcaaaccgattttcggcatctgcttgggacaccagctcatcagcctcgctatcggcgcgaaaaccctgaaaatgcgcttcagccaccacggtgcgaaccaccctgtgcaagatttggacagcggcaaagtcgtcatcaccagccaaaaccacggttttgccgttgatgccgacaccctgcccgctaacgcacgcattacccacaaatccttgtttgacaacactttgcaaggcatcgagctgaccgacaaacctgtgttctgcttccaaggccaccccgaagccagccccggtccgcaagatgtcggctatttgtttgacaaattcattggcaatatgaaagcggcaaaacgggcataa

SEQ ID NO: 46469 - DNA, 498 bp, Neisseria meningitidis; identical to SEQ ID NO: 45177

SEQ ID NO: 46470 - DNA, 1389 bp, Neisseria meningitidis
atgaacacccgcaccgaacacgacaccatgggcaatgtcgaagtcccgtccgaagcctattggggcgcgcagacccagcgcagccgcaacaatttcaaaatcggcggcgaaaccctgccgcagccgctgatttatgctttggcgctggtgaaaaaagccgctgccgcgaccaatgtttccctcggcaggattaagccggaacaggcggatttgattacgcaggcggcggatgatgtgttgaacggcaggcttgacggacagtttcctttagtggtttggcagaccggctccggcacgcagtccaatatgaacatgaacgaagtgctggcgaaccgcgccaacgaaatcgccggtacgggtttggcggcgtatcagcccgtccatcccaacgaccatgtgaaccacgcgcaatcgaccaacgacgcattcccgaccgccatccacgttgccgccgcgattgaaatcaaccgccacctcatccccgccgtaaaagccctgcgcgacaccttggacaaaaaagcccaagccttcgcccccatcgtcaaaatcggccgcacccacttgcaggacgcgacgccgctgactttaggccaagaattttccggctacgtttcccagctcgaccacggcttaggccgtctgaatgacgcgcttaaagacttgtatgaacttgctttgggcggtacggcggtcggcacgggtttgaacagccatcccgaatacgccgaaaaagccgccgccaaactcgccgaattgtccggcttgccgtttgtcagcgcgccgaacaaatttgaagccttgggcggacgcgatgccgccgttgccgcttcgggcgcattgaaaacgctggcggcaagcctgaataaaatcgccaacgacatccgctggctggcaagcggcccgcgctgcggtttgggcgaaatcaaaatccccgaaaacgagccgggttcgtccatcatgccgggcaaagtcaacccgacccaatgcgaagcgatgaccatggtgtgctgccaagtgttcggcaacgacgttaccatcggcatggcgggcgcgtcgggcaatttcgagctgaacgtctatatgcccgttatcgcctacaacctcttgcaatccatccgcctgttgggcgacgcgtgcaacagcttcaacgaacactgcgccgtcggcatcgaacccgtaccggaaaaaatcgactatttcctgcaccattccctgatgctggttactgcgttaaaccgtaaaatcggctacgaaaacgccgccaaagtcgccaaaaccgcctacaaaaacaacaaatcgttgcgcgaaaccgccgttgagttgggcttgctgacgggcgaagaatttgacgaactggtcgttcctgccgatatggttcatccgcgctaa

SEQ ID NO: 46471 - DNA, 1770 bp, Neisseria meningitidis; identical to SEQ ID NO: 45705

SEQ ID NO: 46472 - DNA, 1254 bp, Neisseria meningitidis; identical to SEQ ID NO: 38589

SEQ ID NO: 46473 - DNA, 672 bp, Neisseria meningitidis
atgactttttccgcgattctgttctatatccttgccgccatcgtcctatacggcgcgctgcgtaccgttacagcgaaaaaccctgtccacgccgctttgcatctggtgttgaccttctgcgtgagcgcgatgctttggatgctgatgcaggctgagtttttgggcgtgacgctggtggtggtttacgtcggcgccgtgatggtgttgttcctgttcgtcgtgatgatgttgaacatcgacattgaagaaatgcgtgccggtttctggcggcacgcgcctgttgccggtgtggtcggcacattgttggcagttgccctgattctgattctggtcaatccgaaaaccgaccttgccgcatttgggctgatgaaagacattcccgccgattacaacaatatccgcgatttgggcagccgtatttataccgattatctgctgccgtttgaattggcggcggtattgctgctgttgggtatggtggccgcgattgcgctggttcaccgtaaaacggttaatccgaaacgtatggaacctgccgaccaagttaaagtacgcgccgaccaaggccgtatgcgcttggtgaaaatggaagccgtgaaaccgcaaaccgaatctgccgaagaaagcgaagtttcagacgacctcaagccgaaagaggagggcaaagcatga

SEQ ID NO: 46474 - DNA, 1335 bp, Neisseria meningitidis
gtgggcgaacctgaaaacaaatcatccgaacccgtacgcgagatacaggcatcaaaagaaatgccgtctgaaacctcttccccacgcaaagaaaacgaaacagaagtacacattcctgccgctccttttatcgtcaaacagtccggcagcaacgctttggcagtctgcgccctggtattggcggcattgggtttgggtacaagtggttttttgtttgtccagggacagaatgtcttgaaaaaccaagagctggcattcaaccaaaaaatcgacaaagccgccttgggcgagtcggaaaacgccgccctgttgaaagacaacctcaaccggcaagccgccatacaatcagagctcgaccgtttggacggaaacgtcaaagcaaacggcgaacaaatcttggaaatgcaaaaatcctatcgcgagttgaccaaaggacgcgccgattggctggtggacgaaaccgagaccatactcaatctggcggcgcaacagctggtgttgaccggcaatatccaaacggcagtcggcgtattggagcatatcgacagccgcctgtcccgtttcgatcaggcagagcttctgccgatcaaacaggcagtcagcagcgacttggcggaactgaaaaaccgtccctatgtcgatatttccggcacggcattgcgcctcgacaggctggaaaccgccgtatccggactgccgctgattttggacggcgtattgaagccgggcgtacaggtgaagaacgaagccgcttctgcttcatggtggcagaacgtatgggaaaaatccctcggcacattgaaggggctggtcgaaatccgccgtttggaaaacaacgatgccatgctgatttctcccgaacaggcatattttgtgcgtgaaaacctgcgcctccgccttttggatgcgcggactgcattaatgcagcgcaacagcgaagtctatcagggcgatttgaacaatgccgaagccgccgtcagacagtatttcgatgccaagtctcccgccacgcagtcgtggctgaaagaactggcggaattgaaggcgttggatgtgcgcatgacggcggatgacggtttgaaaaacagcctaaatgccgtccgcgcctatcgcgacggtacgcgcatgacggcggcggaaaatcaagaagcagaacaggcggcttccgaaccggcaaacgaaaacacagcttccgaaccggctgccgcatcggatgtgaagaccatagaagcaccgtccctgccttcggaacgcaaaccggaacagcctgcaaaaaaacagcccgtaccggaaaaggcagggcgttcgccgtccgctaaaggagaacgcgcatga

SEQ ID NO: 46475 - DNA, 1242 bp, Neisseria meningitidis
atgattattgatgtaaaagtacctatgctgtctgaaagcgtatctgaaggcacgctcttggaatggaagaaaaaagttggcgaagcagttgcccgtgacgaaatcctgatcgatatcgaaacggacaaagtggttttggaagtaccttctccacaagccggcgtattggttgaaatcgtagcgcaagacggtgaaaccgttgttgccgaccaagttttggcacgtatcgataccgctgctactgccgctgctgaagcacctgccgctgctactgccgctgctgaagcacctgccgctgctactgccgctgctgaagcacctgccgccgctcctgccgaagctgccccggccgccgctcctgctgctgcacaaaacaacgccgctatgcctgccgccgccaaactggctgcagagagcggtgttgacgtgaacgcattgcaaggttccggccgtgacggtcgcgtattgaaagaagacgtacaaaatgccgcagccaaacctgccgcagccgctgctcctgccgttgcacttcctgccggcgcacgtcctgaagaacgcgtaccgatgagccgcctgcgtgcccgtgttgcagaacgcctcttggcttctcaacaagaaaacgccattctgactacattcaacgaagtcaacatgaaaccaatcatggacttgcgtgcgaagtacaaagaaaaattcgagaaagaacacggcgtgaaactgggctttatgtccttcttcgttaaagccgctgttgcagccctgaaaaaatacccggttgtgaatgcttctgttgacggcaaagacattgtgtaccacggctacttcgacatcggtatcgcgattggcagcccacgcggtttggttgtgccaatcctgcgcgatgccgaccaaatgagcattgccgacatcgaacaagcaattgttgattacgcgaaaaaagccaaagacggcaaaatcgctatcgaagatctgaccggcggtacattcagtattaccaacggcggtactttcggttctatgatgtccaccccgatcatcaatccgcctcaatctgcgattttgggtatgcacgccactaaagagcgcgctgtggttgaaaacggccaagttgttgtccgtccaatgatgtatctggctctgtcttacgaccaccgtatcattgacggccgcgaagctgtattgaccttggtagccattaaagacgcgttggaagacccagcccgcctgttgttggatctgtaa

SEQ ID NO: 46476 - DNA, 351 bp, Neisseria meningitidis; identical to SEQ ID NO: 39679

SEQ ID NO: 46477 - DNA, 360 bp, Neisseria meningitidis; identical to SEQ ID NO: 38354

SEQ ID NO: 46478 - DNA, 663 bp, Neisseria meningitidis; identical to SEQ ID NO: 38761

SEQ ID NO: 46479 - DNA, 1356 bp, Neisseria meningitidis; identical to SEQ ID NO: 38945

SEQ ID NO: 46480 - DNA, 819 bp, Neisseria meningitidis
atgaatccagcccccaaaaaccttctcttctcttctcttctcttctcttctcttctcttctcttctcttctcttctcttccgcagcgcaggcggcaagtgaagacagcagccgcagcccgtattatgtgcaggcggatttagcctatgccgccgaacgcattacccacgattatccgaaaccaaccggtacagacaaagacaaaataagcacagtaagcgattatttcagaaacatccgtgcgcattccatccacccccgggtgtcggtcggctacgatttcggcggctggaggatagcggcagattatgccagttacagaaagtggaacaacaataaatattccgtcaacataaaaaaggggagagaaacccaggacaatagggaagaactgaagacggaaaatcaggaaaacggcagcttccacgccgcttcttctctcggcttatccgccatttacgatttcaaactcaacgataaattcgataaattcaaaccctatatcggtgcgcgcgtcgcctacgggcacgttaaacatcaggttcattcggtggaaaccaaaaccacgattgttacctctaaaccgacggcaacctctccacagggaggccctattatacaaactgatcccagcaaacctccctatcacgaaagccacagcatcagcagcttgggtcttggtgtcatcgccggtgttggtttcgacatcacgcccaagctgaccctggacaccggataccgttaccacaactggggacgcttggaaaacacccgcttcaaaacccacgaagtctcattgggcatgcgctaccacttctga

SEQ ID NO: 46481 - DNA, 138 bp, Neisseria meningitidis; identical to SEQ ID NO: 36823

SEQ ID NO: 46482 - DNA, 1116 bp, Neisseria meningitidis; identical to SEQ ID NO: 38517

SEQ ID NO: 46483 - DNA, 657 bp, Neisseria meningitidis; identical to SEQ ID NO: 44297

SEQ ID NO: 46484 - DNA, 645 bp, Neisseria meningitidis; identical to SEQ ID NO: 39035

SEQ ID NO: 46485 - DNA, 669 bp, Neisseria meningitidis; identical to SEQ ID NO: 44413

SEQ ID NO: 46486 - DNA, 225 bp, Neisseria meningitidis; identical to SEQ ID NO: 44387

SEQ ID NO: 46487 - DNA, 696 bp, Neisseria meningitidis
atgtttgtttggcacgaatacgaaaatgcggcagaagcggcgcagtctttggctgacgcagtggcggatgctttgcagggcgcactggacgagaagggcggtgcggtgttggcagtttccggcggacgttcgccgattgcatttttcaacgccctgtcgcaaaaagatttggattggaaaaacgtcggcatcaccttggcagatgaacgcatcgtgccgaccgtccacgccgacagcaataccggtttggtgcgcgaatacctgttgaagaacaaagcggaagcggcaatgtggattcctatggtggaagacggaaaaactgaaaccgaattacatcccgatgctgttgtcgattatgcactgaaacattacaaacagcccgatgttttggttttgggtatgggaaacgacgggcatacggcttcgattttcccgaaagctccgcagtttcagacggcaatcgacggttcggcaggtgtcgcgctggtgcataccacgcccgttaccgcgccgcacgagcgagtcagtatgaccttggatgcgattgcccatacggggcatgtgtttttggcgatacggggcgaagagaaaaaagccgtgttcgaccaagccgcacaaggcgaaaaccgcgaatatccgatcaacctcgttttgaaccatcaaggagtgaactgccatgtcttctacgccgaataa

SEQ ID NO: 46488 - DNA, 456 bp, Neisseria meningitidis; identical to SEQ ID NO: 45576

SEQ ID NO: 46489 - DNA, 255 bp, Neisseria meningitidis; identical to SEQ ID NO: 40075

SEQ ID NO: 46490 - DNA, 1815 bp, Neisseria meningitidis; identical to SEQ ID NO: 44551

SEQ ID NO: 46491 - DNA, 963 bp, Neisseria meningitidis; identical to SEQ ID NO: 39603

SEQ ID NO: 46492 - DNA, 705 bp, Neisseria meningitidis; identical to SEQ ID NO: 42578

SEQ ID NO: 46493 - DNA, 519 bp, Neisseria meningitidis
atgactacgcattttgtcgttatgggcgtatgcggctgcggcaagaccaccgccgcgctgtccctgcagaaacacctcggtcaatgtccctatgccgaaggcgacgagttccacacccaagccaaccgcgacaagatgggcgcgggtattccgctgaccgatgaagaccgctatccgtggttgggcaatctgcgcgactggatgacgcaacaggcgcaaaacggtgcgaaccacaccatcgtaacctgttccgccctcaaacgcggctaccgcgacattctgcgcggagccgaaggcaaagctgccttcatccacctcagtccgccgcaagacatcaacctcgagcgcatgatgtcgcgcaaaggacattatatgaaagcagggatgctcgattcgcaactggaaatcctcgaggaactgggcgaaggcgaatacggggtcaaaatcgccaaccccggcacgcccgaagcggtcgaagccgatattctgaactgggttgcctcggaaaacctgctttga

SEQ ID NO: 46494 - DNA, 930 bp, Neisseria meningitidis; identical to SEQ ID NO: 45586

SEQ ID NO: 46495 - DNA, 378 bp, Neisseria meningitidis
gtgctgaaaacgaagttccagcgcgtgtattccgggcgtggtttcgcgcctgcgcaatcgcagttgccgtgtgttgtggtgtacgttgaccgtcgccgaacagaacaggaaacgtttgattttccgcctacctaccggcatacggtgcggctggttacgttggtttgcgtgcaggctgcttccggtgcggacgaactggcggaagagatgctgtctttgattgggcagttgtttgccgaacattccgatttgggtgttggtgatttggaaaatctggtgcctgatttgctgaatatcgattccgacgaaagcggcgaggccgttaccgtctattatcagcaaggatggcaggcaatttattttgatacggcagtctga

SEQ ID NO: 46496 - DNA, 264 bp, Neisseria meningitidis
atggcaaacagcgcacaagcacgcaaacgtgcccgccagtccgtcaaacaacgcgcccacaacgctagcctgcgtaccgcattccgcactgcagtgaaaaaagtattgaaagcagtcgaagcaggcgataaagctgccgcacaagcggtttaccaagagtccgtcaaagtcatcgaccgcatcgccgacaagggcgtgttccacaaaaacaaagcggcacgccacaaaagccgtctgtctgcaaaagtaaaagcactggcttga

SEQ ID NO: 46497 - DNA, 747 bp, Neisseria meningitidis
ttggaggataaaatgttgttccgtaaaacgaccgccgccgttttggcggcaaccttgatgctgaacggctgtacgttgatgttgtggggaatgaacaacccggtcagcgaaacaatcacccgcaaacacgttgacaaagaccaaatccgcgccttcggtgtggttgccgaagacaatgcccaattggaaaagggcagcctggtgatgatgggcggaaaatactggttcgtcgtcaatcctgaagattcggcgaagctgacgggcattttgaaggccgggctggacaagcccttccaaatagttgaggataccccgagctatgcccgccaccaagccctgccggtcaaactcgaatcgcccggcagccagaatttcagtaccgacggcctttgcctgcgctacgataccgacaggcctgacgacatcgccaagctgaaacagcttgagtttgaagcggtcgaactcgacaaacagactatttacacgcgctgcgtctctgccaaaggcaaatactacgccacgccgcaaaaactgaacgccgattatcattttgagcaaagtgtgcctgccgatatttattacacggttactgaaaaacataccgacaaatccaagctgtttgcaaatatcttatatacgccccccctttttgatactggatgcggcgggcgcggtactggctttgcctgcggcggctctgggtgcggtcgtggatgccgcccgcaaatgaacagcaatgccgtctga

SEQ ID NO: 46498 - DNA, 1251 bp, Neisseria meningitidis; identical to SEQ ID NO: 41516

SEQ ID NO: 46499 - DNA, 450 bp, Neisseria meningitidis
gtggacgaagttttcaaaactgaatcggcaggctatttgatgaaccacattgcccgccaatttgccattttattgggcgaaggtttaaagcctttgggcatcgcccccgcgcaatttccgatattgctggaactgtggcaaaaagacggtttgagccagcaggaattggtggaacgcgccgatttgaagcaggcaacgattgccaacactttggcgcggatggagcgcgacggactgattacgcgcgaaccgaatcccgacgatgcgcgcagccgcctgattatgctgacggagcaagctcgcgccttgcagcagcagtccacggaaattgcccaagccatcaaccaaacggctttgtcggatttgtcggcaaacgaacaaaagttgtttttggaaatggcggcaaaaattgtggcgcgacagcaagagatgattacgggcgagaagtga

SEQ ID NO: 46500 - DNA, 1179 bp, Neisseria meningitidis; identical to SEQ ID NO: 44771

SEQ ID NO: 46501 - DNA, 1479 bp, Neisseria meningitidis; identical to SEQ ID NO: 37927

SEQ ID NO: 46502 - DNA, 483 bp, Neisseria meningitidis
atgggaatagaaggcgttttgaaaaaaggtttcatcaccaccagcgcggatacggtgttgaactatatgcgtaccggttcgttgtggccggttactttcggcttggcctgctgcgccgtggaaatgatgcacgcgggtatggcgcgttatgaccttgaccgtttcggcatcattttccgtccgtccccacgtcaggccgacctgatgattgtggcgggtacgctgaccaacaaaatggcacccgccctgcgccgcgtgtatgaccagctcgccgagccgcgctgggtattgtctatgggctcgtgtgccaacggcggcggctattatcactattcttattccgttgtgcgcggtgccgaccgcgtcgtgccggtagacgtttatgtgccgggttgtccgccgactgcggaagccctgatttacggcctgattcagctccaacaaaaaatcaagcgcacttccaccatcgcgcgtgacgagtaa

SEQ ID NO: 46503 - DNA, 1038 bp, Neisseria meningitidis; identical to SEQ ID NO: 39064

SEQ ID NO: 46504 - DNA, 1485 bp, Neisseria meningitidis
atgaatatgaaatacaaagacctgcgcgacttcatcgccatgctcgagcagcagggcaaactcaaacgcatcgcgcaccccgtttccccgcatttggaaatgaccgaaatcgccgaccgcgtgctgcgcgccgaagggccggcgttgctgtttgaaaacccggttaagcccgacggtacgcgctacggttatcctgtgttggcaaacctgttcggcacgcccgaacgtgtggcgatgggcatgggcgcggacagcgtgtccaagctgcgtgaaatcgggcagacgctggcgtatttgaaagaacccgaaccgcccaaaggcatcaaagatgcgttttccaaactgccgctactgaaagacatttggagcatggcgccgaacgtggtgaaaaacgcgccgtgtcaggaaatcgtgtgggaaggcgaaaacgttgatttgtataaacttccgattcagcattgctggccggaagacgttgcgccgctggtaacatggggcttgaccgtaacgcgcgggccgcacaaaaaacgccaaaatctcggcatttaccgccaacaactcatcggcaaaaacaagctgattatgcgctggctgtcgcatcgcggcggcgcgttggattatcaggagttccgcaaactcaatcccgatacgccgtatcccgtcgccgtcgtgctcggttgcgaccctgccactattctcggagcggtaacgcctgttcccgatactttgagcgaataccagtttgccggactgctgcgcggttcgcggacggagctggtgaaatgtatcggcaacgatttgcaagtgcctgcccgtgctgaaattgtattggaaggcgtgattcatccgaacgaaaccgcgttggaaggcccatacggcgaccacaccggctattacaacgagcaggatcatttccctgtatttacggtcgagcgcatcaccatgcgcgaaaacccgatttaccattcgacctacacaggcaaacctcccgatgaacccgctgttttgggcgtggcattgaacgaagtgttcgtaccgctcttgcaaaagcagttccccgaaatcaccgatttttacctgccgcccgaaggctgctcctaccgcatggcggtggtgagcatgaaaaaacagtacgccggacacgccaagcgcgtgatgatgggctgctggtcgttcctgcgccagtttatgtacaccaaattcatcatcgtggtggatgacgatgtgaacgtacgcgactggaaagaagtcatctgggcggtcaccacgcgcatggaccccgtgcgcgacactgttttggtagaaaacacgcccatcgattatctcgacttcgccagccccgtcagcggactcggcggcaaaatgggtttggatgcgaccaacaaatggccgggcgaaaccgaccgcgaatggggacgcgtcatcaaaaaagaccctgcggttacggctaagattgatgggatttgggaggaattggggttgtag

SEQ ID NO: 46505 - DNA, 552 bp, Neisseria meningitidis; identical to SEQ ID NO: 37351

SEQ ID NO: 46506 - DNA, 1404 bp, Neisseria meningitidis; identical to SEQ ID NO: 44608

SEQ ID NO: 46507 - DNA, 576 bp, Neisseria meningitidis; identical to SEQ ID NO: 44953

SEQ ID NO: 46508 - DNA, 1131 bp, Neisseria meningitidis; identical to SEQ ID NO: 44982

SEQ ID NO: 46509 - DNA, 876 bp, Neisseria meningitidis; identical to SEQ ID NO: 45640

SEQ ID NO: 46510 - DNA, 348 bp, Neisseria meningitidis; identical to SEQ ID NO: 45022

SEQ ID NO: 46511 - DNA, 372 bp, Neisseria meningitidis; identical to SEQ ID NO: 45763

SEQ ID NO: 46512 - DNA, 489 bp, Neisseria meningitidis
gtgatgtatgtgaacgagaaatatccctatgcggctttgtttgcggggctggtgtttttgacgctgccgttcgcactgtcggtgcatgatgccttggcatttgcgttcggacgggcggggctgctggtgtcggtgtcggacggcgaattcggctggcgtggcggttgggacggcactgtttggtttgtgttcggtgtgtttgcgtttttgaatgtggttgtgtcggcgggcctgacgaaactggcgtacaaaaagatgatgcggcggcattcgcgttacgcgctgtttctgtcgggcgtggcggcttgcgcggctgctgcggtcgcgtggattttcgagctgttgttgggcagtgccgccttgggcgggctgcgcggggaggcggtgtcggaatatgcgtttgccgtgtggctggtgtctatgctgacgctgcccaaacgcctgacgcgcgcgccggtgcagccggtggtgtttcacaggaaaaaatag

SEQ ID NO: 46513 - DNA, 435 bp, Neisseria meningitidis
atgcccgcctgtttctgcccccactgcaaaacccgtctctgggtcaaagaaacccaactcaatgtcgcccaaggcttcgtcgtctgccaaaaatgcgaaggactgtttaaagccaaagaccatctggcaagcacgaaagaacccatattcaacgatttgcccgaggctgtttcggatgtcaaactcgttcaccgcatcggcacgcgcgccattggcaagaaacagatttcccgcgacgaaatcgccggcatcctcaacggcggtacaaccctgcacgatacgccgcccgcaaccgccgccacccctgccgccgcaccgcaggttgccgtaccgcccgccgcgcctgcccgtcaggaagggttcaactggacgattgcaaccctgtttgcccttatcgtcctcattatgcagctttcctacctcgtcatcctatga

SEQ ID NO: 46514 - DNA, 336 bp, Neisseria meningitidis; identical to SEQ ID NO: 44858

SEQ ID NO: 46515 - DNA, 648 bp, Neisseria meningitidis; identical to SEQ ID NO: 44828

SEQ ID NO: 46516 - DNA, 861 bp, Neisseria meningitidis
atggaattgaacgaatttctcgataaagcctatgccgttttgcggcgtttggatgccgtgcttccgcccgaacccgggcatacggattggaacgcgcttgccttccgctggcagagtgcgggcaaaaaaggttttttggaacacttgcccgatccgcacacctttcccttggtaaggctggcgggagtcggcaggcaaaccgaattgctggtgcgtaataccgaacagttcattgtcggcagacccgcgaacaatgtattgatgagcggcgcgcgcggaacaggcaaatcctcgctggtcaaagccctgctacacgaatatgcggataagggattgcgcctgatcgaagtcgataaaagcgatttaatcggcctgccttacctgttgacgcttttgaaggaacgtccggaaaaatttatcgtattttgcgacgatttgtcgtttgaaagcggcgatgaaacctataaggcattgaaaaccgcgttagacggcggtctgtctcaacgttgcgccaacgttttggtttacgcgacttccaacagacggcacctgatgcccgaatattttgacgagaatgccggtacgacggggatgcggggggaaatccatcagaaagaagcggtggaagaaaaaatatccctgtccgaccgattcttgtggctcagtttttatccgttcgatcaaaacgattatctggcggcggtgcaaaattggctggaagatttcggcgtgccgtatgatgaaaccgcacagatggcggcattgcagtgggcgcagacgcggggcagccgttcgggacgttccgcgtggcagtttgcctgcgactgggcgggcaggctgccgaaacaacgggcgttgtga

SEQ ID NO: 46517 - DNA, 279 bp, Neisseria meningitidis; identical to SEQ ID NO: 40180

SEQ ID NO: 46518 - DNA, 201 bp, Neisseria meningitidis
atgtttgtctgcatctgcaatgccgttaccgaccatcaaatcaaggaaacaatcgccgccggcgcgaccacaatgggcgatttgcagtcgcaattgggcgtagcgagctgctgcggctgctgcggggagcttgccgcttcgtttctgacggcgcacaatgcgcaaccgacggttacggcgggtatcaacgttcaagcgtaa

SEQ ID NO: 46519 - DNA, 594 bp, Neisseria meningitidis; identical to SEQ ID NO: 37729

SEQ ID NO: 46520 - DNA, 657 bp, Neisseria meningitidis; identical to SEQ ID NO: 39384

SEQ ID NO: 46521 - DNA, 1218 bp, Neisseria meningitidis
atgatgaaaatcaaagccctgatgattgccgccgcattgctggcagcagccgatgtccacgccgcaccgcaaaaggcaaaaaccgcatccgccaaagctgccaaagctgccaaagctgccaaagctgccaaagctgccaaagctgccaaagctgccaaagctgccaaagctgccaaagctgccaaagttgccaaagttgccaaagttgccaaagttgccaaagttgccaaagttgccaaagttgccaaagttgccaaagttgccaaagttgccaaagttgccaaagttgccaaagttgccaaagttgccaaagttgccaaagttgccgccacggcgcaaaaagaagccgcacccgcacaacagcagggcggtatccgcttttcagacggcattgccgccgttgccgacaacgaagtcatcacgcgccgccggcttgccgaagccgttgccgaagccaaagccaacctgcccaaagaggcgcagataagcgaatccgagctgtcccgacaggtgctgatgcagcttgtcaaccaatccctgattgtacaggcgggcaaacgccgcaacattcaagcaagcgaagcggaaatcgatgccgtcgtcgcaaaaaattccgccctcaaaaacctcagccccgcccaacgccgcgattttgccgacaacatcattgccgaaaaagtccgccagcaggcagtgatgcagaacagccgcgtgagcgaagctgaaatcgatgccttcctcgagcaggcgcaaaaacaaggcatcaccctgcccgaaggcgcaccgttgcgccaataccgcgcccaacacatcctgattaaagccgacagcgaaaacgccgccgtcggcgcggaaagcaccatccgcaaaatctacggagaggcccgcagcggcacagacttttccagcctagcgcgccaatattcgcaagacgcgagcgcgggcaacggcggagatttgggctggtttgccgacggcgtgatggttcccgcctttgaagaagccgtccacgcgctcaaacccggacaggtcggcgcgcccgtccgcacccaattcggctggcatatcatcaaattgaacgaagtgcgcgatgccggcacacctcaggaacgtatccgcaattccgtgcggcaatacatcttccaacaaaaagccgaacaggcaaccgtcaacctgttgcgtgacctgcattccggcgcgtatgtcgacatccgctaa

SEQ ID NO: 46522 - DNA, 189 bp, Neisseria meningitidis; identical to SEQ ID NO: 40436

SEQ ID NO: 46523 - DNA, 2088 bp, Neisseria meningitidis
atggattatttatcaagactgtcctttggatttaacaaaaagctacctgtcattctgcaaacagaagttgctgaatgtggtttagcatgcctgacatccatcttgtcctattatggctttcacactgatttaagaacgttacgccaaaaatacaccctgtcattaaagggcgcaaatcttgcagacatcatgagatttggcaatgaaatgaatttaacgccacgagctttgcgtttagagttagatgagctgtcaaatttacaactaccctgcattctccattggaacttaaaccattttgttgtactttgttccatttccaaagacagtatcgtcattatggaccctgctgtcggtatgcgaaaaatcaaaatggacgaagtttcacaaaaattcacagggattgccctagaattattccccaatacccattttgaagagaaaaaagaaacaaagaaaatcaaaatattatctctattaagggggatttcaggcttaaaacgctctttaattcaaatgcttatattagctatttctttggaagtctttgcattggttagtccattctttatgcaatgggtaatagaccatgtcattgtaactgctgataaaaatttattactgacccttactttgggatttggtttactggctatcctgcaacagttaattagcctgttacaagcatgggtaggtatgcacctatctacaactcttaatttacaatggaaagccaatatatttaaaaggttacttgacttacctaatgactatttcagtaaacgacatttaggagatgtgatttcaagatttggttcaatagatcatatccaagaaacactaacttctactttttttgttttagttttaaatagcttaatggctatttttactttcgtgttaatgacaatttacagcactcaattatcgctgattgttcttttaacacttgttttgtacatactaattcgttggcttgcatattacccattaagaaatgcaacagaagaaaatattgttcatgaagccaaacaaaactcatatttcatggaaaccattcgtggtatccaatcagttaaattatttgataaacattatcaaagacatggcacttggatgagcctatttgtgaatacagtcaataccaagctgacaacagataaactctctgctttatttgaattttcaaataaactgttgtttagcatggaaaatattatcataatttatcttggtgcaagcgcaattttagatggttcatttacagtcggtgttctgatggcttttttggcttataaagggcaatttgaaagcagaacagcttctctcgttgaccaatacatccaaatcaaaatgttagggcttcatgctgaacgtttggctgacattactttaaatgaaacagaaactgaaattattaagtataatcatatacctaaattagataatgaacaactggttcttaaagttgaaaacgtctcattcagatatgctgataatgagccatatctttttgaaaacattaatttggaatttaaagataatgaagcagttgttttaacaggacaatctggtcgggggaagtccactttgttaaacattttaacaggtagcctaaaacctgaaactggtacagttagtattaatgggcatgatatatatcaagtttctccatcctttattaggggattgagcgggattgttcgccaagatgatgtcctttttgcaggttctattggggaaaatatttcattttttgatgaaagcccaaatatggagctcattgaacaatgtgcaaaaatggcacaaatacatgacgatatacttaaaatgccaatgggctatgagaccttgattggcgatatgggaaatatcttatcaggtggacaaaagcagagagttatcttggctcgtgcattgtataaacgacccaaaattctatttttagacgaagcaagtagccatttagatgtagaaaatgaacaaaaaattaaccataacctaaaaagtcttggtattatgaaaataatggttgcacaccgccaagaaacaattcaatcggcagataaaattctgaatttaggttga

SEQ ID NO: 46524 - DNA, 1389 bp, Neisseria meningitidis; identical to SEQ ID NO: 45424

SEQ ID NO: 46525 - DNA, 1077 bp, Neisseria meningitidis; identical to SEQ ID NO: 44846

SEQ ID NO: 46526 - DNA, 1509 bp, Neisseria meningitidis; identical to SEQ ID NO: 45689

SEQ ID NO: 46527 - DNA, 324 bp, Neisseria meningitidis
atgattgttgacgaaaaatctacttcagatgtactgaaacaatatcaagaactagggtttgatttgacaaaacctatgataatagagttttttataggaggttctcaaaagaatctgcaatcaatagaaagccgactcatttcttatcggcaagattttcaaatcagtattgaacaagatgaattcggagaaatgtggacttgctattgttccgtcaatatcgtcccttcccttgaaaacattttagctattgaaactacgttatttggtattgcacaaaaaaatgattgtaattatgaaggttttggttcgtatgggaactaa

SEQ ID NO: 46528 - DNA, 780 bp, Neisseria meningitidis; identical to SEQ ID NO: 38783

SEQ ID NO: 46529 - DNA, 1155 bp, Neisseria meningitidis
atgactgaaactactcaaaccccgaccttcaaacctaagaaatccgttgcgctttcaggcgttgcggccggtaataccgctttgtgtaccgttggccgtaccggcaacgatttgagctatcgcggttacgacatcttggatttggcacaaaaatgcgagtttgaagaagtcgcccacctgctgattcacggtcatctgcccaacaaattcgagctggccgcttataaaaccaagctcaaatccatgcgcggcctgcctatccgtgtgattaaagttttggaaagcctgcctgcacatacccatccgatggacgtaatgcgtaccggcgtatccatgctgggctgcgttcatcctgaacgtgaaagccatccggaaagtgaagcgcgcgacatcgccgacaaactgatcgccagcctcggcagcatcctcttgtactggtatcaatattcgcacaacggcaaacgcattgaggttgaaagcgacgaagagaccatcggcggtcatttcctgcaactgttgcacggcaaacgcccaagcgaatcacacatcaaagccatgcacgtttcactgattctgtatgccgaacacgagttcaacgcttctacctttaccgcccgcgtgatcgccggtacaggctctgatatgtactccagcattaccggagcaatcggcgcgttgaaaggtccgaaacacggcggcgcgaacgaagtggcttacgatattcaaaaacgctaccgcaatgccgacgaagctgaagccgacatccgcgaacgcatcggccgcaaagaaatcgtgatcggtttcggtcatccggtgtataccatttccgacccccgcaacgttgtcattaaagaagtggcacgcggtttgagcaaagaaaccggcgatatgcgcctctttgacattgccgaacgtttggaaagcgtgatgtgggaagagaaaaaaatgttcccgaatctggactggttctctgccgtttcctaccaaaaattgggcgtaccgaccgctatgttcacaccgctgttcgtaatttcccgtacaaccggttggagcgcacacgttcttgagcaacgcaaagacggcaaaatcatccgtccgagcgcaaactacacgggccctgaagatttggcgtttgtggagattgaagaacgctga

SEQ ID NO: 46530 - DNA, 924 bp, Neisseria meningitidis; identical to SEQ ID NO: 39069

SEQ ID NO: 46531 - DNA, 621 bp, Neisseria meningitidis
atgctgaccccgaaaagttgcgatttgttcaatatcccgtttttccagtttgcccagcttaaaaaataccggcctgaaagcattccgcaaatcaaagccgactacaaggaaaactggcagatatggcagcagctgattcagcaggttgccgccgaattgggtgcgccgtttgcgccgccgcacatcgaacgctggtgtaacggctggcaggttcgcgcccatttctttgcctatttcaaatacgcccaatacaaaaactctgccgccatcctgtcgatactacttaaccgccgccgtctgagtgtcagcttggattggcactgctacaaagccgacgtgtcgccgattactctgcccgattacaaccgatggctggataattttgacactgaaaaatacgccgcattcgatatgtggcacggcgcggaaagcgaatacgacgaccaccgcaccgtcgcgcaacaaaacgagtccgaccgaaagttgcaaaacgacgaagactttttctgcattggcaaacacatcgaacgcgacgatttgggcaggcaggatgtcgcgaaatggatagcggaaacggtggaagatttgctgccgctttatgaagcctgccacggcaaatga

SEQ ID NO: 46532 - DNA, 840 bp, Neisseria meningitidis; identical to SEQ ID NO: 44138

SEQ ID NO: 46533 - DNA, 1335 bp, Neisseria meningitidis; identical to SEQ ID NO: 45577

SEQ ID NO: 46534 - DNA, 459 bp, Neisseria meningitidis; identical to SEQ ID NO: 45469

SEQ ID NO: 46535 - DNA, 957 bp, Neisseria meningitidis
ttgttaatccgctatatcgacatcgccaaacgaaacttcgtcatcgccgtttcgtctttgtctaaaaccaaaaccgaaaccaacaaccccaaaggtatcgcccatactatcgaataccttaaaaaacacaaggtcgccctcgtcgtgacggaaagtaccggcggtctcgaaatccccgccgccaaagccatccgccgagcaggcatagccgtgattatcgccaacccgcgtcagacgcatcagtttgcccaatcgcagccgctgaccaaaaccgacgccaaagatgccaaaatgcccgccttcttcgcacagatgacggcacagaaagaagattcgcaaaccatgccctaccaaccgcccaccgaagcggaagaagtgttggaagccttggttaaccgccgcaaccaaccggcggatatgcggactgccgagaaaaaccgtctgcatcaggttcacgaaacgcaagtcggaagcgtcaaacaactgattgcccattttgaccggctgattgacgaattggacaaacaaatcgacgaccacacccacacgcattttgacggcaaagcccaagtggcggagcaaatcaaaggcatcggttcgataacgacggctacgctgatggtgatgttgcccgaattggggcggctgtcgcacaaacggatagcgggtttggccggcattgccccgcacccgagggagagcggggaaaccaaattcaaaagccgctgcttcggcggaaggtctgcggtacgtaaggcgctgtatatggctaccgtggcagcgacacgttttgaaccgcttattcgggatttctaccaacgcctgctgtccgagggtaagccgtataaggttgccgttacggcatgtatgcgcaaactgctgacgatatcgaatgcccggatgcgtgattattttgccgaaaacgatactgccgaaaacggtatccggacggcttga

SEQ ID NO: 46536 - DNA, 354 bp, Neisseria meningitidis
atgattgaacttcaacttcatgaattgaagctggtttcagggggaggtcctgtaacagacaatatagctggaaatgtagctaatgctgccacaaccaaaggaggtcccacatggggggatttggttgcaatacctgctgccgcagcggcagtttattatctgccgaaaaatgcttacggtgctgctggtgcaaatggtgtatacaatgtgactcgtgattgggtaaatgatgccgttaatgcacctccttataacggaagaccaatctttgagattgaacatggattaactgctcccgcaacaaaagcagataaatcaggaaacggctacactgacggtacagattactgctga

SEQ ID NO: 46537 - DNA, 330 bp, Neisseria meningitidis
atgggcggcctgattattgaagacttgcaagaaggcttcggaaaagaagcagttaaaggcaaagagattaccgtgcattacacaggttggctggaagacggtaccaaattcgactccagcctcgaccgccgccagccgctgaccatcacgctcggcgtcggacaagtcatcaaaggctgggacgaaggcttcggcggaatgaaggaaagcggcaaacgcaagctgaccatcccttctgaaatggcttacggcgcacacggtgccggcggcgtgattcccccgcacgccactttgatatttgaagtcgagctgctgaaagtgtacgaataa

SEQ ID NO: 46538 - DNA, 1197 bp, Neisseria meningitidis
atgccgtctgaagcgttcagacggcataacgcaacaaacactttaatatccatcacacaggatgacacgatgacccatatcaaacccgtcattgccgcgctcgcactcatcgggcttgccgcctgctccggcagcaaaaccgaacagcccaagctcgactaccaaagccggtcgcaccgcctgatcaaactcgaagtcccacctgatttgaacaaccccgaccaaggcaacctctaccgcctgcctgccggttcgggcgccgtccgcgccagcgatttggaaaaacgccgcacacccgccgtccaacagcctgccgatgccgaagtattgaaaagcgtcaaaggtgtccgcctcgagcgcgacggcagccaacgctggctcgttgtcgacggcaagtctcatgccgaaatctggccgctcctgaaagccttttggcaggaaaacggcttcgacatcaaatccgaagaacccgccatcggacaaatggaaaccgagtgggcggaaaaccgtgccaaaatcccccaagacagcttgcgccgcctattcgacacagtcggtttgggcggcatctactccaccggcgagcgcgacaaattcatcgtccgtatcgaacagggcaaaaacggcgtttccgacatcttcttcgcccacaaagccatgaaagaagtgtacggcggcaaagacaaagacacgaccgtatggcagccctccccgtccgatcccaacctcgaagccgctttcctgacgcgctttatgcaatatttgggcgttgacggacagcaggcggaaaacgcatcggcaaaaaacccgaccctgcccgccgccaacgaaatggcgcgtatcgaaggcaaaagcctgattgtctttggcgactacggcagaaactggcggcgcaccgcgctcgccctcgaccgcatcgggctgaccgtcgtcggtcaaaacaccgaacgccacgctttcctggttcaaaaagccccgaacgaaagcaatgcagttaccgaacaaaaacccggcctgttcaaacgcctgctgggcaaaggcaaagcggagaaacctgccgaacagccggaactgattgtctatgccgagcctgtcgccaacggctcgcgcatcgtcctgctcaacaaagacggcagcgcatatgccggcaaagacgcatccgcattattgggcaaactccattccgaactgcgttaa

SEQ ID NO: 46539 - DNA, 198 bp, Neisseria meningitidis
atgcctaaaatgaaaaccaagtctagcgcgaaaaaacgctttaaagtactgggtaacggcggtgtgaaacgcgctcatgcgttcaaacgccacatcttgactaaaaagaccaccaaaaacaaacgccaactgcgcggtacctctatggtaaatgatcgcgatttggcttctgttgctaaaatgttaccctacgcttaa

SEQ ID NO: 46540 - DNA, 2019 bp, Neisseria meningitidis
atgatgggcgggaaaggcggattttatcggcatttggcggtagagggcaatttcggcggcacgacccaatccttagcggtttgctcaactatcggcgcaaattctgttaaaatgccgacttccttcctttacacaccgcaccgacaggcagaatttatggctcttttgcagatttcagaaccgggcatgtccgcctccccgcaccggcaccgtttggcagcaggcatcgatttgggtacgaccaacagcttggtcgccaccgtccgcagcggcagtgccgcctgtctgcccgatgccgaagggcgcgttaccctgccttccgtcgtccgctatctggaaaacggcggcattgaagtcggcaaaaccgccctgtccgcccaaaaaaccgacccgctgaacaccgtcagctccgccaaacgccttatcgggcggacgcttgccgatctgcatcaaaatacgcattacctgccttaccgtttcggcgacaatcaacgcgttatcgaactgcatacgcggcagggggtgaaaacgcctgtcgaagtgtcggcggaaatcctcaaaacccttaaatcgcgcgccgaagaaaccttgggcggcgatttggtcggcgtggtgattaccgtccctgcctatttcgatgatgcccaacgccaagccaccaaagatgccgcgcgtctggcgggtttgaacgtattgcgcctgctcaacgaacccaccgctgccgcaatcgcctacgggctggacaacgcctcggaaggcacgtttgtcgtgtacgacttagggggcggcacattcgacgtatccgtattgcaactgaccaaaggactgtttgaagtcaaagccaccggcggcaacagcgcgttgggcggcgacgatttcgaccaccgcctgttctgccgcctgctcgaacaaaacggactctcccaactcaacgaacaagacagccaactcctgctctcgctcgtccgcgccgccaaagaacaattaaccacgcaaaccgaagcgcgcattcaggcgacgctttcagacggcatggcaatcgacacaagcatcagtcgcgccgagttccacaacctgacgcagcatttggtgatgaaaacgctcgaaccggtcacacaggcgttgaaagatgccggtgtcggtaaaaacgaagtcaaaggcgtgattatggtcggcggttcgacccgtatgctgcacgtccaacaggcagtcgccaccttcttcggacaaaccccgctgaacaacctcaatcccgacgaagtcgtcgcgctcggcgccgccatacaggcaaacgtcctcgcaggcaacaaaaccgacggcgaatggctgctgctggacgttacacctttgtcgctcggtttggaaacctacggcggcttggcggaaaaaatcatcccgcgcaattccaccatccccaccgcgcgcgcgcaggactttaccaccttcaaagacggtcaaaccgcgatgacgatacacgtcgtgcaaggcgagcgcgagctcgtttctgactgccgcagccttgccaaattcaccctgcgcggcattccaccgatggcggcgggtgcggcgcgtatccgcgtaaccttccaaatcgatgcggacgggctgctgtccgtttccgcccaagaacaaagcaccggcgtacaggcgcaaatcgaagtcaaaccttcctacggcttggacgacggcgcgattacccgaatgcttaaagacagtatggacaacgccgccgaagatatggcggcacgcgcccgcgccgaagccgtagtcgaagccgaaagcctgaccgatgccgtcaacgccgccctcgagttggacagcgatttactggatgccaaagaattgcaacagatccggcaaggcatcgccgatttgcaaggccgtctgaaagacggaaaagccgaagacatccgctccgccgtcgccaaactcagccgcagcaccgacaacttcgccgccaaacgcatgaaccgcaatatccaacgcgcattgacaggccagagtgtcgataatatttga

SEQ ID NO: 46541 - DNA, 483 bp, Neisseria meningitidis; identical to SEQ ID NO: 38977

SEQ ID NO: 46542 - DNA, 366 bp, Neisseria meningitidis; identical to SEQ ID NO: 38539

SEQ ID NO: 46543 - DNA, 456 bp, Neisseria meningitidis; identical to SEQ ID NO: 40384

SEQ ID NO: 46544 - DNA, 426 bp, Neisseria meningitidis; identical to SEQ ID NO: 36185

SEQ ID NO: 46545 - DNA, 5199 bp, Neisseria meningitidis
atgaatgagggtgaagttgttttaacaccagaacaaatccaaaccttacgtggttatgcttcccgtggcgatacctatggcggttggcgttatttggctaatttgggcgaccgttatgcggataatgctgctgcaattgtcggtaaggatacaaacttaaatggtttgaatttatggatgaaaaaaggggtggaaaacctatgggatgatacggtcggtaaaaagacccgtttagagaaatttgatcgggttgcattgcaacatttcagccaatatgtagatctaattaataaaaataatggtagattacctaacactagtgaaattgagagaagttactataaagccgttacctatcatggcgtttcttctagtgcagctattgatttagttattaatcgttcacttccggatatggcggatggttattgggcattaggtttggggatagaagccgaacgtatccacaatgagcaagcagtaaataatccgaacggtagcgaaagggataatagaaagcagttaatatctgctttagataaaggatttgatggatcttttaaagagaagcattttacttttttacaatctgtgatgatggatctaacaaagttaggtgttgaatatacaatagatggttggcaaaaaattggaggttggggtaatgggataatcaatgatttatataaaagtgttgtaaaaagagagtggactggaatatttgagatcgttaataataacatcaagcaaggaaatgaagcttttaaaaatgaaatcaatagcttggttcatgatatgaaagctgctggcaaggaatttggagatgacttaaatacacagtggaataatctcactcaggctgccgaaataatctataatgacatagtagacaatactagtcaaggaatagaaaaaggtgtcaaagccattaaagaattgtctgaaaaaatgaaaaatgctgcttccgatttggctgacggttcagcagagaaagctaaacaagtagtggaagatttggctcaagccgccaaagaagcatacgaaaatgccaaatccacagccgagaaggctgctcaagcagctcgagaattttttaagggcttgcccagttttaaagatctggccgaaaaatttagagatctgttcccaaatccggaaggctggatcgatgatggtcaccaatgtttcgctccttgggttaaagaaactaaaaaacgcaatggcaaatatcatgtctacgacccccttgccctagatttggacggcgacggcatagaaaccgttgccaccaaaggcttttcaggcagcctatttgaccacaaccgcgatggcatccgcaccgccaccggttgggttgctgccgatgacggtctgcttgtgcgcgatttgaacggcaacggcatcatcgacaacggcgcggaactcttcggcgacaacaccaaactggcagacggttcttttgccaaacacggctatgcagctttggccgaattggattcaaacggcgacaacatcatcaacgcggcagacgccgcattccaaaccctgcgtgtatggcaggatctcaaccaggacggcatttcccaagctaatgaattgcgtacccttgaagaattgggtatccaatctttggatctcgcctataaagatgtaaataaaaatctcggtaacggtaacactttggctcagcaaggcagctataccaaaacagacggtacaaccgcaaaaatgggggatttacttttagcagccgacaatctgcacagccgcttcacgaacaaaatgctatccattagccatgttcgggaaaacacgatttccccgtttgttttaggctgtctaaacaaataaatgacatctgcaaattttaatattaacggttttggagatgtgaaattaacaccctattcaccactcttgggatataaagcttgggattcatttattggttctattcaatccttatctgatttaatctataatgtggataacaatagaaataaaatggaaattactgttaataatgctatccaagctgcagatagctttttaagcagtattggaagagataacaaaataacaaatactgcttctttacttgcatccctcgataacatttttttaaatttaagaaatgtatctcgagatatacgagaaacaggaaaatttaaacctaatgatattcaacaagcaattggtgatatattcattgctgctggtgatggattacaatatataaaacaacaaacagaggcgatggctcaaagcaaattcttaccaactaaattaaaaactggtttaaatgatgtccttaattctagaatgctaaaatcctctactgttttacagcatgaattgaattatttgggatttaaaataaaggattatggaaacgagaggcttggcgaatctataatgaatatagatgattttacaccaagtaagatagcaaacttttttgcggatcctgatacatacagcaatgtattagaagaagtatctaggtttatatattccttagttcctgatgatgcaaacccttggaaagggggcgaagattatattggacgagggataagtgaatggggagagttactggaaaaatggtataaacaagattttctcccttatcttgaaaaagaatgggaccaatttccgaaatttgaagattggctgcctgaattccctgaatgggcaagagagtggttgaaattagatcccaaacgttcaggcaaatatcatgtctacgaccccctcgccctagatctagacggcgacggtatagaaaccgttgctgccaaaggctttgcaggtgcattgttcgaccaccgcaatcaaggcatccgcaccgccaccggttgggtttctgccgatgacggtttactcgtccgcgatttgaacggcaacggcatcatcgacaacggcgcggaactcttcggcgacaacaccaaactggcagacggttcttttgccaaacacggctatgcagctttggccgaattggattcaaacggcgacaacatcatcaacgcggcagacgccgcattccaaaccctgcgtgtatggcaggatctcaaccaggacggcatttcccaagctaatgaattgcgtacccttgaagaattgggtatccaatctttggatctcgcctataaagatgtaaataaaaatctcggtaacggtaacactttggctcagcaaggcagctataccaaaacagacggtacaaccgcaaaaatgggggatttacttttagcagccgacaatctgcacagccgcttcaaagacaaagtggaactcactgccgaacaggcaaaagccgccaatcttgcgggcatcggccgtctgcgcgatttgcgcgaagctgccgcattgtccggcgatttggccaatatgctgaaagcttattctgccgccgaaactaaagaagcacagttggcattgttagataatttgattcacaaatgggcggaaaccgattcgaactggggcaaaaaatcgccaatgcgactttcaaccgattggacgcaaacggctaatgaaggtattgcactgacaccatcccaagtagcacaactaaaaaagaacgctttagtttccctttctgataaagctaaagcagctattgacgccgcccgcgaccgcattgccgtgcttgatgcctacacggggcaggattccagcacactctattacatgagcgaagaagacgcgcttaatatcgtcaaagtaaccaacgatacatacgaccatctcgccaaaaacatctaccaaaacctgttgttccaaacccgtttgcagccatatttgaatcaaatcagtttcaaaatggaaaatgatacgttcactttggattttagtggtcttgttcaagcatttaaccatgtcaaagaaactaatccgcaaaaagcttttgtggatttggccgagatgcttgcatatggcgaacttcgttcttggtatgaaggccgaagactaatggccgattatgtggaggaggcaaaaaaagcaggtaaatttgaagattaccagaaagtgttgggtcaggagaccgttgcattattagctaaaacatcgggtacgcaagcagatgatatcctgcaaaatgtaggctttggtcataataaaaatgtttctttatatggtaatgacggcaacgacactctaatcggcggtgcaggcaatgattacttggagggcggcagcggttcggatacttatgtcttcggcaaaggcttcggtcaggatacggtctataattacgactacgctaccggacgcaaagacatcatccgctttaccgacggtattacagccgatatgctgacttttacccgagagggcaaccatcttcttatcaaggcaaaagacgacagtggacaagtgactgttcagtcctatttccagaacgatggctcaggtgcttaccgtatcgatgagattcatttcgataacggcaaagtactggatgttgccactgtcaaagaactggtacagcaatccaccgacggttcggacagattgtatgcctaccaatccggaagtaccttaaatggcggattgggcgatgactatctgtacggtgccgacgggaatgacctgctgaatggtgatgcaggcaacgacagtatctacagtggcaatggcaatgatacgctcgatggaggagaaggcaacgacgccctgtacggctataatggtaacgatgcactgaatggtggcgaaggcaatgatcatttgaacggcgaagacggtaacgacactctaatcggcggtgcaggcaatgattacttggagggcggcagcggttcggatacttatgtcttcggcgaaggcttcggtcaggatacggtctataattaccatgtggataaaaactctgacactatgcactttaaaggatttaaagcagcagatgttcattttatccgttccggaagtgatttggtgcttagcgcttctgaacaagacaacgtacgtatttccggattcttctatggtgaaaaccatcgtgtagatacatttgtctttgatgatgcagctatcagtaatccagattttgccaagtatattaatgctggcaataatttggtacagtctatgtctgtgttcggttctaatactgctgcgacaggaggaaatgtggatgccaatatacaatccgtacagcagccgttattggtaacgccatctgcataa

SEQ ID NO: 46546 - DNA, 279 bp, Neisseria meningitidis; identical to SEQ ID NO: 38315

SEQ ID NO: 46547 - DNA, 606 bp, Neisseria meningitidis
atgccgtctgaaatgcggatgtcccgattgatgttattgctgtcggcatttgtgcttgctgcgtgtaatgcccaaaaccggcaatcctgtgtacggcatcaggatttcgcacgtgtagccgtcgatttgtttcggagtgcctgcgtcctgactcaaggcagtttcgaaccagtttccaagtttgccgctgtcggacattttgtccctgtcggaaaggaagacctgtcccgtctgccgcccgctgttgcagaacccgatgtacaggcgttgtggacgcttgaacgcgatggcggcatttattatttgagcctgccgcgcgactgttgcagtgtgaaagccgagcgggcagacagtgccgtgcttttggaacattttgacggacttgtccgacagccgccgaaaaataccaatatagaattgagggctgaacagtcggtgcaggcactgtttgaaaccaggcaaatcagctatgcctggcgggaatcgggcagccccgaagaaacagtattgaccgcacaaaccgccgattccccggatttgcccgtacaggcagttttgaacctgacgcaccgttcccacaacgggaaacccctaattctcccctaa

SEQ ID NO: 46548 - DNA, 669 bp, Neisseria meningitidis; identical to SEQ ID NO: 39284

SEQ ID NO: 46549 - DNA, 1008 bp, Neisseria meningitidis
atgagcaccttcttccggcaaaccgcccaagccatgattgccaagcacatcgactgcttcccactattgaagttggaccaggtgattgattggcaaccaatcgaacaatacctgaaccgtcaaaaaacccgttaccttagagaccaccgcggccgtcccgcctacccgctgttgtccatgttcaaagccgtcctgctcggacaatggcacagcctctccgatcccgaactcgaacacagcctcatcacccgcatcgatttcaacctgttttgccgttttgacgaactgagcatccctgattacagcaccttatgccgctaccgcaattggctggcgcaagacgacaccctgtccgaattgctcaaactgatcaaccgccaactgaccgaaaaaggtttaaaaatagagaaagcatccgctgccgtcgttgacgccaccattattcagaccgccggcagcaaacagcgtcaggccatagaagttgacgaataaggacaaatcaacggccaaaccacaccgagtaaggacagcgatgcccgttggatcaagaaaaacggcctctacaaactcggttacaaacaacatacccgtaccgatgcagaaggctatatcgagaaactgcacatcacccccgccaatgcccatgagtgcaaacacctgccgccgttgttggaagggttacccgaaggtacgaccgtctatgccgacaaaggctatgacagtgcggaaaaccggcaacatctggaagaacatcagttgttggacggcattatgcgcaaagcctgccgcaaccgcccgctgtcggaagtgcaaaccaaacgcaaccgatatttgtcgaagacccgttatgtggtcgaacaaagcttcggtacgctgcaccgtaaattccgctatgcgcggtcaacctatttcggactgattaaagtgagtgcgcaaagccacctgaaggcgatgtgtttgaacctgttgaaagccgccaacaggctaagtgcgcccgctgccgcctaa

SEQ ID NO: 46550 - DNA, 729 bp, Neisseria meningitidis; identical to SEQ ID NO: 39174

SEQ ID NO: 46551 - DNA, 852 bp, Neisseria meningitidis; identical to SEQ ID NO: 45401

SEQ ID NO: 46552 - DNA, 807 bp, Neisseria meningitidis; identical to SEQ ID NO: 45749

SEQ ID NO: 46553 - DNA, 1383 bp, Neisseria meningitidis; identical to SEQ ID NO: 45942

SEQ ID NO: 46554 - DNA, 3117 bp, Neisseria meningitidis
atgaataaaactttaaaaaggcgggttttccgccataccgcgctttatgccgccatcttgatgttttcccataccggcggggggggggcgatggcgcaaacctataaatacgctattatcatgaacgaacaaaatcagccgaaggtaaagcaggagggttcatattcaaccttaagggaaaaagacagggaacgcaaatttatctataataaaggcggatcgggtggaggctctgtctcattcaacaatagcgatgagcttgtttctcaacaaagcggtactgccgtttttggcacagccacctacctgccgccctacggcaaggtttccggttttgatgccgacgctctgaaagagcgcaacaatgcccttaattggattaatacgacccgcccggggttggcaggctactcctacgccaacgtcatatgcagagacacaaggcaatgcccccaacttttctatgagaccaaatttgccttcagcaacaaagatttggtaaacaatgcgggcaggctggataggcacccggacccaagccgcgaaaattcgcccatttacaaattgaaggatcatccatggttgggcgtatctttcaatttgggcagcgagggtaccgccaaagatggcaaggtatccaacaaattgatatcttcttttagtgaagacaataataatcaaaccatcgtctctacgacacgagaccaccctatttcccttggcgaccagcagcgcgaacataccgccatggcctattatctgaacgccaaactgcacctgctggacaaaaaagggattaaagatatcgcccaaggcaaaacagtggatttgggcaccttgagaccgcgcgtcgagacgaagacaaataattgggggaatctgctaaatttttgggttacgtggaagattgaagataacgggcagattccggtcaagctcggcctgccggaagtcaaagccgggcgctgcaccaacgccgcccaccccaattccaaagccaaacccccttcgccggcactgaccgcccccgcgctgtggttcggccctgtgcaaaatggtaaggtgcagatgtattccgcttcggtttctacctaccccggcagttcgagcagccgcatcttcctccaagagctgaaaactcaaaccgaccccggcaggcccggccggtattccctcgccgctttggatgcgcagaacatcaaaagccacgagccgcgtttcaacggaaggcagaccgtcatccgattgccgggcggcgtgtacaagatcagcctgggcaggaacggcggccgggtcgcgggtattaatggcaatgacggcaaaaacgacactttcggcatcttcaaggacaggtatgtcacacctgaggccgacgagtggagcgaaatgctgctgccttggacggttcgtgctttcaatgatgacggtcgatttaacacagtcaacaaagaagaaaacaacggcaagccaaaatacagccaaagataccgcatccgcgaaaacggcaacaacggcaagcgtgatttgggcgacatcgtcaacagccccatcgtggcggtcggcgggtatttggcaacttctgccaacgacgggatggtgcatatcttcaaacaaagcggcggggacaagcgcggctacaatctgaagctcagttatatcccgggtacgatgccgcgcaagaatattgaaaacaacgactccacccttgccaaagagctgcgcgcctttgccgaaaaaggctatgtgggcgaccgctacggcgtggacggcggctttgtcttgcgccgcattacagatgaccaagacaagcaaaaacacttctttatgttcggcgcaatgggctttggcggcagaggcgcatacgccttggatttgaccaaagccgacgacaatgacccgacaaaagcctctttgtttgatgtaaaagataacggcaataatggcaataacggcaataatcgcgtggaattaggctacaccgtcggcacgccgcaaatcggcaaaacccacaacggcaaatacgccgctttcctcgcctccggttatgcgactaaaaaaattgacgacccaacaaataaaaccgcgctgtatgtgtatgatttggaaaacaacaacggtacgccgattgcaaaaatcgaagtacccaacggcaagggcgggctttcgtcccccacgttggtggataaagatttggacggcacggtcgatatcgcctatgccggcgaccgcggcgggaatatgtaccgctttgatttgagcaacaacgatccgaccaaatggtctgtacgtactatttttaaaggcacgccggataagccgattacctccgcgcccgccgtttccaaactgaaagacaaacgcgtggttatcttcggtacgggcagtgatttgagtgaggatgatgttgataaaaaggatatacaatctatttacggtatttttgacaatgacacaggcacggatgtggcagaagaaggacagggcaaagggttgctcgagcaacaccttactcaggaagataaaaccttattcctgaccgattacaagcgatccgacggctcgggcgacaagggctgggtagtgaaattggaagccggacagcgcgttaccgtcaaaccgaccgtggtattgcgtaccgcctttgtaaccatccgcaaatataacgacggcggctgcggcgcggaaaccgccattttgggcatcaatactgccgacggcggcaagctgaccaagaaaagcgcgcgcccgattgtgccggaagccaatacggctgtcgcgcaatattccggtcataagcaaaccgccaaaggcaaatccatccctataggttgtatgtggaaaaacaatgaaaccgtctgcccgaacggatatgtttacgacaaaccggttaatgtgcgttatctggatgaaaagaaaacagacgatttccccgtcacggcagacggtgatgcaggcggcagcggaacattcaaagagggtaaaaaacccgcccgcaataaccggtgcttctccggaaaaggtgtgcgcaccctgctgatgaacgatttggacagcttggacattaccggcccgacgtgcggtatgaaacgaatcagctggcgtgaaatcttctactga

SEQ ID NO: 46555 - DNA, 1164 bp, Neisseria meningitidis; identical to SEQ ID NO: 38788

SEQ ID NO: 46556 - DNA, 516 bp, Neisseria meningitidis; identical to SEQ ID NO: 38602

SEQ ID NO: 46557 - DNA, 156 bp, Neisseria meningitidis
atggaaaaacgaaacacatacgctttcctgctcggtataggctcgctgctgggtctgttccatcccgcaaaaaccgccatccgccccaatcccgccgacgatctcaaaaacatcggcggcgattttcaacgcgccatagagaaagcgcgcaaatga

SEQ ID NO: 46558 - DNA, 1884 bp, Neisseria meningitidis
atgaagcctgataaggcgcaaatgcagcaaatgagccgctttgccgtatttcagcgcgaaagtgttgatgttgaaaaacggacggtcgaagtggcgttttccagcgaagaatcggtacgccgttggttcggtgatgaagtattaagtcatgcgcagggtgctgttgacttaagccgcctgaacgacggcggcgcggtgttgttcaatcatgactgggacgaccaaatcggcatcatcgaacgtgcttggattgatgccgacaagcgcggccgtgccttggtacgttttggcaacggtacgaaggcaacggaaaaattccaagacgtgcaagacggcatcctacgccatatcagcgtcggctaccgagtggaggatatggtattggacaatcccgatactgacgatgagggctaccgttacatcgttacccgctggatgccgtatgaaatcagttttgtaaccgttcctgcagacccgacagtaggtgtaggcaggtcggtggaaccatttattgaaaaccctgtaaacccaacccctgaaaaaggaaatcgaaacatggataaaaatcaaacgcccactacggtggaaacttccgccgctgcaatccctgccgccgcagcaaccgataccaacaacaccgccgaacgcggtatgcagaacgaacgcgcgcgcgtttccgaactgctggccattggtcgcagttacgccgcccacggcggtatcgaagcagccgaaaaggttattaaagagggcggcagtgaagcacaattacgcgccgccatcatggcaaacatgcagacgaagccgaccgttaccgccggtgaaatcggcatgactgataaagaacagcgtgaattttcccttctccgcgccatgtctgccgccgcaaccggcaaatgggacaaagcgggcttggaacgcgaagtgtcggaagagttggaaaaacgacatggtcgcgcagcggcaggcttctttgtgccgactgatttgattgcccgcgcttacagcaaaggcaatgcggcaaacggcggcaacgtcatcgaaaacgacttccgcgaagacttgttcatcgaactgctgcgcaaccgacttgccgttgcccagttgggcgccaccgtactggacggcttggtcggcgacatcactattccgaaacacctgaccggaaacaccgttcaatgggtggatgaaaacggcagcgcgaccgaatcgaatgccactttcggacaaatgagcctgaaaccgaaaaccgttaccgccaatactgaattgagccgcaaattcattttgcaatcctcgctgtctgccgaacagttcgcccgcagcgaattattgaaagcgatgatgctgggtatcgatttggcggccatcaacggcaaaggtaccggcaacgaaccgaccggcatcctgaataccgccggcatcggcgcggtggaaatcggtgcgaacggcggtgcgcccgaatggaagcatatcgtcgctttggaaagtgccattgccgccgccaatgccgacatcggcgatttggcatacatcaccaatgcccgcgtccgcggtctgctgaaaaccaagctgaaggccgacggcgtgtccggctacatctggcaggacggcgcaacgccgttgaacggctaccgttgcgcggtatcaaaccaaattccgtccaacctgaccaaaggcacggcggccaacaaatgcagcccgctgatttttggtaactggtctgatttgatgattgcgcactggggcgttttggatgtgattgttgatccgtacaccaagtctactacgggcgcggtacgcatcaccacgttgcaagatgtggatattgccgtccgtcatgtcgaatcctttgccgccattaaagacatcgcggctgcttga

SEQ ID NO: 46559 - DNA, 681 bp, Neisseria meningitidis; identical to SEQ ID NO: 45525

SEQ ID NO: 46560 - DNA, 1887 bp, Neisseria meningitidis
atgccgtctgaagccgtttttcaaatgattgatatgaatacagaaaaccgttctccggaacaattcgacatcccgctcttcctcaaaaacctgcccaagctgccgggcgtgtaccgtttttttgacgaaggcggcaaagtcttatacgtcggcaaagcggtcaacctcaagcggcgcgtgtccggctatttccaaaaaaacgaccattcgccgcgcatcgcattgatggtaaaacaggttcgccacatcgaaaccaccatcacccgctccgaatccgaagccctgattctcgaaaacaacttcatcaaagccctgtcgcccaaatacaatattcttttccgcgacgacaaaagctatccttatctgatgctcagcggccatcaatatccgcaaatggcgtattaccgcggcacgctgaaaaagcccaaccaatacttcggcccgtatcccaacagcaacgccgtgcgcgacagcatccaagtcctgcaaaaagtctttatgctgcgtacctgcgaagacagcgtgttcgaacaccgcgaccgcccttgcctgctgtaccaaatcaaacgctgtaccgcgccctgcgtcggacacatcagcgaagaagactaccgcgacagcgtgcgtcaagccgccacttttctcaacggcaaaaccgacgaactgacccgcaccctgcaacacaaaatgcaaactgccgccgcgaatctgcaatttgaagaagccgcccgctaccgcgaccaaatccaagcactcggcattatgcagagcaaccagttcatcgacagcaaaaacccgaacaaccccaacgatatcgatttgctcgcgctggcggtttcagacggcatcgtctgcgtacactgggtcagcatacgcggtgggcggcacgtcggcgacaaaagctttttccccgacaccaaaaacgatcccgatccaaacggacaagattacgccgaagccttcgtcgcccaacattatttgggcaaaagcaaacccgacatcattattagcaacttttccgttcccgatgcgctgaaagaggctttggaaggcgaacacggcaagcagatgcaatttgtcaccaaaaccataggcgaacgcaaagtctggttgaaaatggcggaacaaaacgcacaaatggcgattgcacaacgccgcctgcaacaaagcagccagcaacaccgcatcgacgaactcgccaaaatcctcggtatggattcagacggcctcaaccgcctcgaatgtttcgacatcagccacacacaaggcgaagccactattgcgtcctgcgttgtgtacgatgagcaaaacatccagccttcgcaataccgccgctacaacatcacgaccgccaaacccggcgacgactacgccgccatgcgcgaagtgttgacgcgccgttacggcaaaatgcaggaggccgaagccaacggcgagaccgtcaaatggccggatgccgtgttaattgacggcggcaaagggcaaatcggcgtagccgtatcggtatgggaagaactcgggctgcacattcctttggtcggtatcgccaaaggcccggagcgcaaagccggtatggaggagctcatactgccttttaccggcgaagtcttccgcctgcccccgcacagccccgccctgcaccttctgcaaaccgtgcgcgacgaatcacaccgctttgccattacaggccaccgcaaaaaacgcgacaaagcacgcgttacctcgtccctcagcgacatccccggcgtgggcagcaaacgccgccaagccctactcacccgcttcggcggcctgcgcggcgtgattgccgccagccgcgaggacttggaaaaagtggaaggcatcagcaaggcattggcggaaaccatttataatcatctgcattag

SEQ ID NO: 46561 - DNA, 975 bp, Neisseria meningitidis
atgattgccaaacacatcgaccgtttcccgctattgaagctagatcaagtgattgattggcagccgatcgaacaatacctgaaccgtcaaagaacccgttacctcagagaccaccgcggccgtcctgcctacccgctgttgtccatgttcaaagccgtcctgctcggacaatggcacagcctctccgatcccgaactcgaacacagcctcatcacccgcatcgacttcaacctgttttgccgtttcgacgaactgagcatccccgattacagcaccttatgccgctaccgcaaccggctggcgcaagataataccctgtccgaattgctcaaactgattaaccgccaactgaccgaaaaaggcctaaaagtagagaaagcatccgccgccgtcgttgacgccaccattattcagaccgccggcagcaaacagcgtcaggccatagaagtcgatgaggaaggacaaatcagcggccaaaccacaccgagtaaggacagcgatgcccgttggacaaagaaaaacagcctctacaaactcggttacaaacaacatacccgtaccgatgcggaaggctatatcgagaaactgtacatcactcccaccaatgcccatgagtgcacacacctgtcgccgttgttagaagggatagctgaaggtacgaccgtctatgccgacaaaggctatgacagtgcggaaaaccggcaacatctggaagaacatcagttgcaggacggcattatgcgcaaagcctgccgcaaccgtccgctgtcggaagcgcaaaccaaacgtaaccgatatttgtcgaagacccgttatgtggtcgaacaaagcttcggtacgctgcaccgtaaattccgctatgcgcgggcagcctatttcggactgattaaagtgagtgcgcaaagccatctgaaggcgatgtgtttgaacctgttgaaagcggccaacaggctaagtgcgcccgctgccgcctaa

SEQ ID NO: 46562 - DNA, 918 bp, Neisseria meningitidis; identical to SEQ ID NO: 45665

SEQ ID NO: 46563 - DNA, 531 bp, Neisseria meningitidis
gtgcccgttgagaacgaaaacatgaatccgtttgaaaccaaaagcgttacctttgccgaaccgattgaaatgctgtatgcctgccacggcaaagtgcgccgtttttgcggacaagtcgccatgctgtcggactatatcgccgaaaacggctgcaatcagattgttttgcaaaccatccgccaaatcgcccagtatttcaacgttgccgcgccgctgcaccatgaagacgaagaagaaaacttcttcccgctgctgctgcaatatgcgccgcaagcccaagaaagcgtggacgagcttttgcgccaacatatcgggctgcacgacaactgggcggctgtttccgccgaatttgccaaactcgaagcagacaatgcttatgttcccgatgcggaagcgttcaaacgttttgtggcgggatatgatgttcatttggcgattgaagagccgctgtttgatatgggcaacgcctttatcccaaaagaaaaactgaccgaaatcggcgaaatcatggcggcgcgccggcgcaaataa

SEQ ID NO: 46564 - DNA, 327 bp, Neisseria meningitidis; identical to SEQ ID NO: 45036

SEQ ID NO: 46565 - DNA, 2727 bp, Neisseria meningitidis
atgcaacagcaacatttgttccgattaaatattttatgcctgtctttaatgaccgcgctgcccgtttatgcagaaaatgtgcaagccgaacaagcacaggaaaaacagttggataccatacaggtaaaagccaaaaaacagaaaacccgccgcgataacgaagtaaccgggctgggcaagttggtcaagtcttccgatacgctaagtaaagaacaggttttgaatatccgagacctgacccgttatgatccgggtattgccgtggtcgaacagggtcggggcgcaagttccggctattcaatacgcggcatggataaaaaccgcgtttccttaacggtagacggcgtttcgcaaatacagtcctacaccgcgcaggcggcattgggtgggacgaggacggcgggtagcagcggcgcaatcaatgaaatcgagtatgaaaacgtcaaggccgttgaaatcagcaagggttcgaattcatcagaatacggaaacggcgcattggcaggttcggtcgcatttcaaaccaaaaccgcagccgacattatcggagagggaaaacagtggggcattcagagtaaaactgcctattcgggaaaagaccatgccctgacgcaatcccttgcgcttgccggacgcagcggcggcgcggaagccctccttatttatactaaacggcggggtcgggaaatccatgcgcataaagatgccggcaagggtgtgcagagcttcaaccggctggtgttggacgaggacaagaaggagggtggcagtcagtacagatatttcattgtcgaagaagaatgccacaatggatatgcggcctgtaaaaacaagctgaaagaagatgcctcggtcaaagatgagcgcaaaaccgtcagcacgcaggattataccggctccaaccgcttacttgcgaacccgcttgagtatggcagccaatcatggctgttccgaccgggttggcatttggacaaccgccattatgtcggagccgttctcgaacgtacgcagcagacctttgatacacgggatatgactgttcctgcctattttaccagtgaagattatgtacccggttcgctgaaaggtcttggcaaatattcgggcgataataaggcagaaaggctgtttgttcagggagagggcagtacattgcagggtatcggttacggtaccggcgtgttttatgatgaacgccatactaaaaaccgctacggggtcgaatatgtttaccataatgctgataaggatacctgggccgattacgcccgactttcttatgaccggcaaggtatagatttggacaaccgtttgcagcagacgcattgctctcacgacggttcggataaaaattgccgtcccgacggcaataaaccgtattctttctataaatccgaccggatgatttatgaagaaagccgaaacctgttccaagcagtatttaaaaaggcatttgatacggccaaaatccgtcacaatttgagtatcaatctagggtacgaccgctttaagtcgcaattgtcccacagcgattattatcttcaaaacgcagttcaggcatatgatttgataaccccgaaaaagcctccgtttcccaacggaagcaaagacaacccgtatagggtgtctatcggcaagaccacggtcaatacatcgccgatatgccgtttcggcaataacacctatacagactgcacaccgaggaatatcggcggcaacggttattatgcagccgttcaagacaatgtccgtttgggcaggtgggcggatgtcggagcaggcatacgttacgattaccgcagcacgcattcggaagataagagtgtctctaccggcactcaccgcaacctttcttggaacgcgggcgtagtcctcaaacctttcacctggatggatttgacttatcgcgcttctacgggcttccgtctgccgtcgtttgccgaaatgtatggctggagagccggggagtctttgaaaacgttggatctgaaaccggaaaaatcctttaatagagaggcaggtattgtatttaaaggggacttcggcaatttggaagccagctatttcaacaatgcctatcgcgacctgattgcattcggttatgaaacccgaactcaaaacgggcaaacttcggcttctggcgaccccggataccgaaatgcccaaaatgcacggatagccggtatcaatattttgggtaaaatcgattggcacggcgtatggggcgggttgccggacgggttgtattccacgcttgcctataaccgtatcaaggtcaaagatgccgatatacgcgccgacaggacgtttgtaacttcatatctctttgatgccgtccaaccttcacgatatgtattgggtttgggttacgaccatcctgacggaatatggggcatcaatacgatgtttacttattccaaggcaaaatctgttgacgaactgctcggcagccaggcgctgttgaacggtaatgccaatgctaaaaaagcagcatcacggcggacgcggccttggtatgttacggatgtttccggatattacaatatcaagaaacacctgaccctgcgcgcaggtgtgtacaacctcctcaactaccgctatgttacttgggaaaatgtgcggcaaactgccggcggcgcagtcaaccaacacaaaaatgtcggcgtttacaaccgatatgccgcccccggccgaaactacacatttagcttggaaatgaagttttaa

SEQ ID NO: 46566 - DNA, 1338 bp, Neisseria meningitidis; identical to SEQ ID NO: 38368

SEQ ID NO: 46567 - DNA, 960 bp, Neisseria meningitidis; identical to SEQ ID NO: 39447

SEQ ID NO: 46568 - DNA, 1227 bp, Neisseria meningitidis
atgaataccgataacctgcacgacatcttggacgaaatggttcaagtgtattctcaaaaaaaacaaagccgatccgaaaccccggccgaaatcggcgcacacttccacccgctgctcgaccgcctgtgcgaaaccgcagaagcacaaaacgcgtccgacatccttatcagcaaaggattcccgccctcgttgaaaatcaacagcgcattaaccccgcagccgcaaaaggcgctgacaggcgaggaaaccgccgccatcgccgcatcgacgatgaacgccgaacaatcggaaatattccggcgcgacggcgaaatcaactactccgtccagtcgcgcagcggcacgcgctaccgcgccaacgcctaccacagccaaggcagcgcaggtttggttttgcggcgcatcaaccacgtcatcccgcaaatgcaggaattgggcctgcccgaaaaactcaaagacctcgccgtcgcaccgcgcgggctgctgattatcgtcgggcctaccggttcgggcaaatccaccacgatggcgactatgctcgaacaccgcaacaaaaccctgcccagccatatcgttaccatcgaagacccgattgagtttatctacaaaccgcgccgctgcatctttacccagcgcgaaatcggcgtcgacaccataaactggcagacggcggtacaaaacgctatgcgccaatcccccgacgtggtctgcatcggcgaagtccgcagcagggaaagtatggaatacgcgatgcagctcgcccaaaccggccacctgtgcatttttacgctccacgccaacaccgcgccgcagtcgctcgaacgcatactcaacttctaccccaaagaacagcacaaccaaatactgatcgacatcgccctcaacctgaccggcatcatctgccaacgcctcgccctcaaacaagacaaaacgggcaggacggcggttgtcgacttgctcatcaacacgcccgccatccaagacttcatcctgaagggcgacctgatgaacatcagtaaaatcatggaaaccgccaaaaccgacggaatgcagacgatggatcaaaaccttttcgaactgtaccgtcacggcatcatcagttacgaagaagccctgcgccagtccgtttccgccaacaacctgcgattgcacatccaactgcacaaagaaggcaaaacgcccgaactcctttacgacagggtcaacggtctcaacctcatttcctga

SEQ ID NO: 46569 - DNA, 795 bp, Neisseria meningitidis; identical to SEQ ID NO: 45478

SEQ ID NO: 46570 - DNA, 444 bp, Neisseria meningitidis; identical to SEQ ID NO: 38367

SEQ ID NO: 46571 - DNA, 627 bp, Neisseria meningitidis; identical to SEQ ID NO: 39831

SEQ ID NO: 46572 - DNA, 957 bp, Neisseria meningitidis
ttgttaatccgctatatcgacatcgccaaacgaaacttcgtcatcgccgtttcgtctttgtctaaaaccaaaaccgaaaccaacaaccccaaaggtatcgcccatactatcgaataccttaaaaaacacaaggtcgccctcgtcgtgacggaaagtaccggcggtctcgaaatccccgccgccaaagccatccgccgagcaggcatagccgtgattatcgccaacccgcgtcagacgcatcagtttgcccaatcgcagccgctgaccaaaaccgacgccaaagatgccaaaatgcccgccttcttcgcacagatgacggcacagaaagaagattcgcaaaccatgccctaccaaccgcccaccgaagcggaagaagtgttggaagccttggttaaccgccgcaaccaaccggcggatatgcggactgccgagaaaaaccgtctgcatcaggttcacgaaacgcaagtcggaagcgtcaaacaactgattgcccattttgaccggctgattgacgaattggacaaacaaatcgacgaccacacccacacgcattttgacggcaaagcccaagtggcggagcaaatcaaaggcatcggttcgataacgacggctacgctgatggtgatgttgcccgaattggggcggctgtcgcacaaacggatagcgagtttggtcggcattgccccgcacccgagggagagcggggaaaccaaattcaaaagccgctgctttggcggaaggtctgcggtgcgtaaggcactgtatatggctaccgtggcagcgacacgttttgaaccgcttattcgggatttctaccaacgcctgctgtccgagggtaagccgtataaggttgccgttacggcatgtatgcgcaaactgctgacgatatcgaatgcccggatgcgtgattattttgccgaaaacgatactgccgaaaacggtatccggacggcttga

SEQ ID NO: 46573 - DNA, 324 bp, Neisseria meningitidis
aaaggtacgaccatctatgccgataaaggctatgacagtgcggaaaaccggcaacatctgaaagaacatcagttgctggacggcattatgcgcaaagcctgccgcaaccgtccgctgtcggaagcgcaaaccaaacgcaaccgatatttgtcgaagccccgttatgtggtcgaacaaagcttcggtacgctgcaccgtaaattccgctatgcgcgggcagcctatttcgggctgctcaaagtgagtgcgcaaagccacctgaaagcgatgtgtttgaacctgttgaaagcggccaacaggctaagtgcgcccgctgccgcctaa

SEQ ID NO: 46574 - DNA, 519 bp, Neisseria meningitidis; identical to SEQ ID NO: 36779

SEQ ID NO: 46575 - DNA, 1209 bp, Neisseria meningitidis; identical to SEQ ID NO: 38616

SEQ ID NO: 46576 - DNA, 1293 bp, Neisseria meningitidis
atggctgtcttcccactttcggcaaaacatcggaaatacgcgctgcgcgcgcttgccgtttcgattattttggtgtcggcggcatacattgctttgacagagaggacggaacgcgtcagaccgcagcgcgtggaacaaaatctgccgccgctgtcttggggcggcagcggcgttcagacggcatattgggtgcaggaggcggtgcagccgggcgactcgctggcggacgtgctggcgcgttcgggtatggcgcgggacgagattgcccgaatcacggaaaaatatggcggcgaagccgatttgcggcatttgcgtgccgaccagtcggttcatgttttggtcggcggcgacggcggcgcgcgcgaagtacagttttttaccgacgaagacggcgagcgcaatctggtcgctttggaaaagaaaggcggcatatggcggcggtcggcttctgaggcggatatgaaggttttgccgacgctgcgttcggtcgtggtcaaaacgtcggcgcgcggttcgctggcgcgggcggaagtgcccgtcgaaatccgcgaatccttaagcgggattttcgccggccgcttcagccttgacggtttgaaggaaggcgatgccgtgcgcctgatgtacgacagcctgtatttccacgggcagcaggtggcggcgggcgatattttggcggctgaagtcgttaagggcggcacaaggcatcaggcattctattaccgttcggacaaggaaggcggagggggcggcaattattatgatgaagacggcagggtgttgcaggaaaaaggcggcttcaacatcgagccgctggtctatacgcgcatttcttcgccgttcggctaccgtatgcaccccatcctgcacacatggcggctgcacacgggcatcgattatgccgcaccgcagggaacgccggtcagggcttccgccgacggcgtgattacctttaaaggccggaagggcggatacggcaacgcggtgatgatacgccacgccaacggcgtggaaacgctgtacgcgcacttgagcgcgttttcgcaggcacaaggcaatgtgcgcggcggcgaggtcatcggttttgtcggttcgaccgggcgttcgacggggccgcacctgcattacgaggcgcgcatcaatgggcagcccgttaatcctgtttcggtcgcattgccgacacccgaattgacgcaggcggacaaggcggcgtttgccgcgcagaaacagaaagcggacgcgctgcttgcgcgcttgcgcggcataccggttaccgtgtcgcaatcggattga

SEQ ID NO: 46577 - DNA, 324 bp, Neisseria meningitidis; identical to SEQ ID NO: 37971

SEQ ID NO: 46578 - DNA, 1815 bp, Neisseria meningitidis
atgagtgaacacgatatgcagaacacaaatccgccattaccgcctctgccgcccgaaatcacgcagctcctgtcggggctggacgcggcacaatgggcgtggctgtccggctacgcttgggcaaaagcaggaaacggggcatccgcagggctgcccgcgcttcagacggcattgccggcggcagaacctttttccgtaaccgtcctttccgcctcgcaaaccggcaatgcgaaatccgttgccgacaaagcgtcggacagcctggaagccgccggcatccaagtcaggcgcgccgaactgaaagactataaggcgaaaaacatcgccgacgaacgccgcctgctgctggttacgtccacccagggcgaaggcgaaccgccggaagaagccgtcgtgctgcacaaactgctgaacggcaaaaaagccccgaaattggacaaactccaatttgctgtactgggtttgggcgacagttcctatccgaatttctgccgggcgggcaaagatttcgaccggcgttttgaagaattgggcgcaaaacgcctgctcgaacgcgttgatgcggatttggactttgccgccgccgcagacggatggacaggccgcattgtcgcgcgcttaaaagaagaagccgcaaaaaaccgggcaacgcccgcgccgcagacaacgccccccgccggccttcagacggcaccggatggcaggtactgcaaggcagacccctttcccgccgccctgctggccaatcagaaaatcaccgcccgccaatccgataaagacgtgcgccacatcgaaatcgatttgagcggttcggatttgcactacctcccgggcgacgcgctcggcgtttggtttgacaacgatccggcactggtcagggaaatcctagacctgctcggcatcgatccggcaacggaaatacaggcgggcggaaaaaccctgccggttgcctccgcactgttatcccattttgaactcacgcaaaacacccccgcctttgtcaaaggctatgccccgttcgccgatgatgacgaactcgaccgtattgctgccgacaacgccgttttgcaaggctttgtgcaaagcacgccgattgccgatgtgctgcaccgcttcccggcaaaactgacggcggaacaattcgccggcctactgcgcccgcttgcgccgcgcctgtattcgatttcctcgtcgcaggcggaagtgggggacgaagtgcacctgaccgtcggcgcggtgcgtttcgaacacgaagggcgcgccagggcgggcggcgcatcgggtttccttgccgaccggctggaagaggacggcacggtgcgcgtgtttgtggaacgcaacgacggcttcaggctgcccgaagacagccgcaagccgattgtgatgatcggctcgggcaccggcgtcgcaccgttccgcgccttcgtccaacaacgtgccgcagaaaatgcggaaggcaaaaactggctgattttcggcaatccgcattttgcccgtgattttctctatcaaaccgaatggcagcagtttgccaaagacggtttcctgcacaggtacgatttcgcctggtcccgcgatcaggaagaaaaaatctatgtgcaggacaaaatccgcgaacaggcggaaggactttggcaatggctgcaggaaggcgcgcatatctatgtgtgcggcgatgcggcaaaaatggcaaaagacgtggaagccgccttgctggatgtgattatcggggcaggacatttggacgaagagggcgcagaagaatatttggatatgctgcgcgaagaaaaacgctatcagcgtgatgtttattga

SEQ ID NO: 46579 - DNA, 867 bp, Neisseria meningitidis
atgaaagcaaaaatcctgacttccgttgcactgcttgcctgttccggcagcctgtttgcccaaacgctggcaaccgtcaacggtcagaaaatcgacagttccgtcattgatgcgcaggttgccgcattccgtgcggaaaacagccgtgccgaagacacgccgcaactgcgccaatccctgctggaaaacgaagtggtcaacaccgtggtcgcacaggaagtgaaacgcctgaaactcgaccggtcggcagagtttaaaaatgcgcttgccaaattgcgtgccgaagcgaaaaagtcgggcgacgacaagaaaccgtccttcaaaaccgtttggcaggcggtaaaatatggcttgaacggcgaggcatacgcattgcatatcgccaaaacccaaccggtttccgagcaggaagtaaaagccgcatatgacaatatcagcggtttttacaaaggtacgcaggaagtccagttgggcgaaatcctgaccgacaaggaagaaaatgcaaaaaaagcggttgccgacttgaaggcgaaaaaaggtttcgatgccgtcttgaaacaatattccctcaacgaccgtaccaaacagaccggtgcgccggtcggatatgtgccgctgaaagatttggaacagggtgttccgccgctttatcaggcaattaaggacttgaaaaaaggcgaatttacggcaacgccgctgaaaaacggcgatttctacggcgtttattatgtcaacgacagccgcgaggtaaaagtgccttcttttgatgaaatgaaaggacagattgcgggcaaccttcaggcggaacggattgaccgtgccgtcggtgcactgttgggcaaggcaaacatcaaacctgcaaaataa

SEQ ID NO: 46580 - DNA, 366 bp, Neisseria meningitidis; identical to SEQ ID NO: 44550

SEQ ID NO: 46581 - DNA, 1977 bp, Neisseria meningitidis; identical to SEQ ID NO: 45153

SEQ ID NO: 46582 - DNA, 339 bp, Neisseria meningitidis
atgaaaaaaatcgaggcgattgtcaaaccgttcaaactcgacgacgtgcgcgaggcgttgacggaaatcggcattacgggtatgaccgtcagcgaggtcaaagggttcggcaggcagaaggggcatacggagatttaccggggcgcggaatacgctgtcgatttcctgcccaaggtcaaaatcgagctggtgttggcggatgatgctgtggaacgcgcgattgacgtgattgtcgaggtggcgcgttcgggaaaaatcggcgacggcaagatttttgtgctgccggtcgaggaggcaatccgtatccgcacgggcgaacgttcggacgcggcggtttga

SEQ ID NO: 46583 - DNA, 441 bp, Neisseria meningitidis
atgattaaggaaaccctaatgcgcccaatcttcctatctttcgttttactccctattttgataaccgcctgcagcacaccggacaagtctgcccgatgggaaaatatcggcacaatctcaaacggcaatattcatacatatatcaataaagacagcgtgagaaaaaacggaaatctgatgattttccaagataaaaaagttgttaccaatctaaaacaagaacgttttgccaacacccccgcatacaagactgccattgccgagtgggaaatccactgcaacaacaaaacataccgcttaagttcgctacagttgtttgatacaaaaaacacggaaatttccacacaaaactacacagcctcttccctccgcccgatgagcatcctgtccgggacattaaccgaaaaacaatatgaaaccgtatgcggaaaaaaactctga

SEQ ID NO: 46584 - DNA, 216 bp, Neisseria meningitidis; identical to SEQ ID NO: 39553

SEQ ID NO: 46585 - DNA, 1143 bp, Neisseria meningitidis
atgaaaaaatccgtattagccgttttggccgcgctgtctctggcagcctgcggcggcagcgaaaaaaacgccgtgcaacctcaagcagacgctgcgtctgctgccaatgccgaagccgctgccaccgatactctgaacatctacaactggtcgaactatgttgatgagagtacggtcgaagactttaaaaaagccaacaatctgaagctgacttacgacttgtacgaaaacaatgaaacgctggaagccaaaatgctgaccggcaaatccggttacgatttggttgtgccgggcatcgccttcctgccgcgccaaatcgaggcgggcgcgtatcaaaaagtcaacaaagacctgattcccaactataaaaacatcgatcccgaactcttgaaaatgctggaaaccgccgacccgggcaaccagtatgccgtcccctatttctccggcgtgaacacgattgcgattacggcgaaaggcaaagagcttttaggcggcaagctgcccgaaaacggctgggatttgctgttcaaacccgaatacacccacaagctgaaatcctgcggcatcgccctgtgggacaccccgagcgaaatgttcccgattttgctgaactacttgggcaaagaccccaaaggctcgaatcctgaagatttgaaggcggcggcggaagtgttgaagtctatccgtccggatgtcaaacgtttcagcccgtccatcatcgacgagctggcgcgcggcgacatctgcctggcggcaggtaacggcggcgacttgaacttggcgaaagcgcgttctgaagaagtgaaaaacaatgtcggcatcgaagtgttgacgccgaaaggtatgggattctggattgagtcttggctgattcccgccgatgcgaaaaacgtcgccaatgcccacaaatacatcaactacacgctcgaccccgaaatcgcggcgaaaaacggtatcgccgtaaccttcgcgccggccagcaaacctgcgcgcgaaaaaatgcctgccgagctggtgaacacccgttccatcttcccgaacgagcaggatatgaaagacggtttcgtgatgccgcaaatgagtacggatgcgaaaaaactgtcggtcagcctgtggcagaaaatcaaagtcggcaccaactga

SEQ ID NO: 46586 - DNA, 720 bp, Neisseria meningitidis
ttgactttaacccgaaaaacccttttccttctcaccgccgcattcggcacacactcccttcagacggcatccgccgacgcagtggtcaaggcagaaaaactgcacgcctccgccaaccgcagctacaaagtcgccggaaaacgctacacgccgaaaaaccaagtcgccgaattcacgcaaaccggcaacgcctcgtggtacggcggcaggtttcacgggcgcaaaacttccggcggagaacgatacgatatgaacgcctttaccgccgcccacaaaaccctgcccatccccagctatgtgcgcgtaaccaataccaaaaacggcaaaagcgtcatcgtccgcgtcaacgaccgcggccccttccacggcaaccgcatcatcgacgtatccaaagccgccgcgcaaaaattgggctttgtcagccaagggacggcgcacgtcaaaatcgaacaaatcgtcccgggcaaatccgcaccggttgccgaaaacaaagacatctttatcgacttgaaatctttcggtacggaacacgaagcacaagcctatctgaaccaagccgcccaaaacttcgccgcttcgacatcaagcccgaacctcgccattgaaaaacgccgttacgaatacgtcgtcaaaatgggtccgtttgcctcgcaggaacgcgccgccgaggccgaagctcaggcgcgcggtatggttcagacggtattgaccgccggttga

SEQ ID NO: 46587 - DNA, 474 bp, Neisseria meningitidis; identical to SEQ ID NO: 36318

SEQ ID NO: 46588 - DNA, 1170 bp, Neisseria meningitidis
atggacaacgaattgtggattatcctgctgccgattatccttttgcccgtcttcttcgcgatgggctggtttgccgcccgcgtggatatgaaaaccgtattgaagcaggcaaaaagcatcccttcgggattttataaaagcttggacgctttggtcgaccgcaacagcgggcgcgcggcaagggagttggcggaagtcgtcgacggccggccgcaatcgtatgatttgaacctcaccctcggcaaactttaccgccagcgcggcgaaaacgacaaagccatcaacatacaccggacaatgctcgattctcccgatacggtcggcgaaaagcgcgcgcgcgtcctgtttgaattggcgcaaaactaccaaagcgcgggtttggtcgatcgtgccgaacagatttttttggggctgcaagacggtgaaatggcgcgtgaagccagacagcacctgctcaatatctaccaacaggacagggattgggaaaaagcggttgaaaccgcccggctgctcagccatgacgatcagacctatcagtttgaaattgcccagttttattgcgaacttgcccaagccgcgctgttcaagtccaatttcgatgtcgcgcgtttcaatgtcggcaaggcactcgaagccaacaaaaaatgcacccgcgccaacatgattttgggcgacatcgaacaccgacaaggcaatttccctgccgccgtcgaagcctatgccgccatcgagcagcaaaaccatgcatacttgagcatggtcggcgagaagctttacgaagcctatgccgcgcagggaaaacctgaagaaggcttgaaccgtctgacaggatatatgcagacgtttcccgaacttgacctgatcaatgtcgtgtacgagaaatccctgctgcttaagggcgagaaagaagccgcgcaaaccgccgtcgagcttgtccgccgcaagcccgaccttaacggcgtgtaccgcctgctcggtttgaaactcagcgatatgaatccggcttggaaagccgatgccgacatgatgcgttcggttatcggacggcagctacagcgcagcgtgatgtaccgttgccgcaactgccacttcaaatcccaagtctttttctggcactgtcccgcctgcaacaaatggcagacgtttaccccgaataaaattgaagtttaa

SEQ ID NO: 46589 - DNA, 642 bp, Neisseria meningitidis
atgaccgatttccgccaagatttcctcaaattctccctcgcccaaaatgttttgaaattcggcgaattcaccaccaaagccggacggcggtcgccctatttcttcaatgccggcctctttaacgacggcttgtccacgctgcaactggcaaaattctatgcacaatccatcattgaaagcggcatccgattcgatatgctgttcggtcccgcctacaaaggtattattttggcggcggcaaccgcgatgatgctggcggaaaaaggcgtgaacgtcccgtttgcctacaaccgcaaagaagccaaagaccacggcgaaggcggcgtgttggtcggcgcgccgcttaaagggcgcgtgctgattatcgacgacgtgatttccgccggcacatccgtacgcgaatcgatcaaactgattgaagcggagggtgcaacccccgccggtgtcgccatcgcgctcgaccgcatggaaaaaggcacgggtgaattgagcgcggttcaggaagtggaaaaacaatacggtctgcccgtcgcccccatcgccagcctgaacgatttgtttattctgttgcaaaacaaccccgaattcggacagttcctcgaacccgtccgagcctaccgtcggcagtacggcgtagaataa

SEQ ID NO: 46590 - DNA, 93 bp, Neisseria meningitidis
ttgaagcggccgtgcattttaaaacgcattaaaaactaccccgacatacaggtcatcgggcaggtggttcaggtgttgaaagatttgaattga

SEQ ID NO: 46591 - DNA, 900 bp, Neisseria meningitidis; identical to SEQ ID NO: 39788

SEQ ID NO: 46592 - DNA, 957 bp, Neisseria meningitidis; identical to SEQ ID NO: 45175

SEQ ID NO: 46593 - DNA, 840 bp, Neisseria meningitidis; identical to SEQ ID NO: 45249

SEQ ID NO: 46594 - DNA, 477 bp, Neisseria meningitidis; identical to SEQ ID NO: 44496

SEQ ID NO: 46595 - DNA, 417 bp, Neisseria meningitidis; identical to SEQ ID NO: 37115

SEQ ID NO: 46596 - DNA, 1056 bp, Neisseria meningitidis; identical to SEQ ID NO: 38549

SEQ ID NO: 46597 - DNA, 438 bp, Neisseria meningitidis; identical to SEQ ID NO: 45344

SEQ ID NO: 46598 - DNA, 1011 bp, Neisseria meningitidis; identical to SEQ ID NO: 44780

SEQ ID NO: 46599 - DNA, 315 bp, Neisseria meningitidis
tgctcaaaatcggatgtggttccggtatttgaggctttgattagggatgcggactttcaatatatttttctcagctacaacaacgaaggcttgatgtctgtcgggcaggtaagggagatttttgagtgtttcggcaaatataatttggttcaaacggaataccggcgttttaaggcagataagacagaaaaccgtaatcataaggcaaattcgatattcgaatatctgcatattttagaaaagaccttttatagtggattaacaaaaaccagtacggcgttgcctcgccttagctcaaagagaacgattctctaa

SEQ ID NO: 46600 - DNA, 645 bp, Neisseria meningitidis
gatggtaatcatttatcaagatttaaatatatttttcaggaggcaatcagagataaaattttagtcttaagaattttatttgaatcaatagattatattttacatcttccgaaaagtgatagatatctgaacgattataataaaattggagactatacaattatattatctattaataagcattcacgtattattttttattccaatcaaaaaattttttcaatagttctaccatttacttattttaatgataaaaaaacatatgaattttattttaatagcattcttattaattctggtatcgtttcgtatattaaagaatttttagatatgttatccaaaaatggaaatacattagttttagatgaaataatggaattttatacaaataatcctgaaaaagattctgataaggataatgctattattatattaagcgatctaattttattggaggatgggtatattcgatatgattatgatcctgagcatgaaaatggtaatttgcatcctctacatcattatgacattttttatcaaaacaaaaatacttttaaaattggtttaaagtcagccatcggatgcaaggaatttattgaattactggattgcaccgaagaaagaagctttcttagcaaactgtag

SEQ ID NO: 46601 - DNA, 1215 bp, Neisseria meningitidis; identical to SEQ ID NO: 45034

SEQ ID NO: 46602 - DNA, 1284 bp, Neisseria meningitidis
atgaaccgtaacgaaattttattcgaccgcgccaaagccatcatccccggcggcgtgaattcccccgtccgcgcattcggcagcgtcggcggcgtgccgcgcttcatcaaaaaagccgaaggcgcgtatgtttgggacgaaaacggcacgcgctacaccgactatgtcggttcgtgggggcccgcgattgtcggacacgcgcaccccgaagtcatcgaagccatgcgcgaagctgccttgggcggtttgtcgttcggcgcgcctaccgaaggcgaaatcgtcattgccgaagaaatcgccaaaatcatgccgtccgtcgaacggctgcgccttgtcagctccggtaccgaagccaccatgaccgccatccgtctggcacgcggctttaccggccgtgacaaaatcatcaaatttgaaggctgctaccacggccattccgacagcctgttggtgaaagcaggcagcggtctgctcaccttcggtaatccctcttccgccggtgtgcctgccgactttaccaaacacactttagtcctcgaatacaacaacatcgcccaactcgaagaagcctttgctcaaagcggcaatgacattgcctgtgtgattttggagccttttgtcggcaatatgaatctggttaggccgtctgaagccttcgtcaaagccctgcgcgaattgaccgaaaaacacggcgcagtgttgatttacgacgaagtgatgaccggtttccgcgtcgcgctcggcggcgcacaatcgctgcacggcatcacgcccgacctgaccacgatgggcaaagtcatcggcggcggtatgccacttgccgcgttcggcggacgcaaagacattatggaatgtatttccccgctgggcggcgtgtatcaggcaggcaccttgtcgggcaacccgattgccgtcgccgccggtttgaaaacgctggaaatcatccgccgcgaagggttttatgaaaacctgacggcgcgtaccgaacagttggttcaaggttttcggacggcagcggatgcggcgggcatcgagttcaccgccgacagcgtgggcggtatgttcggtctgtatttcgccgcacacgcgccgcgaaattatgccgatatggcgcgttccaatattgacgctttcaaacgcttcttccacggtatgctcgaccgcggcattgccttcggcccgtccgcttatgaagcaggtttcgtttctgccgcgcatacgcccgagctgattgacgaaacggttgcggttgcggttgaagtgttcaaggcgatggctgcatga

SEQ ID NO: 46603 - DNA, 732 bp, Neisseria meningitidis
ttggaaaggcgcgcgaaaacaacgtacaataaacccgtttaccacccctcggaatgccgaaccgtgaaccagcttattttcgactttgccgcacacgactatccgagtttcgacaaattcctcggcacggaaaacgcggaactggtctatgtcctccgacacaaacacggacaattcatttatgtttggggcgaagaaggcgcgggcaaaagccatcttttgcaggcgtgggtcgcacaggcgctcgaagccggcaaaaacgccgcctatatcgatgccgcctccatgccgctgaccgatgccgcgttcgaggcggaatacctcgccgtcgatcaagtcgaaaagctgggcaacgaagaacaagccctgcttttttccatcttcaaccgcttccgcaacagcggcaaaggctttttgctgctcggttcggaatacacgccccagcagctcgtcatccgcgaagatttgcggacgcgtatggcttactgcctcgtttacgaagtcaaacccctgaccgaccaagaaaaaatcgacgcgctcgccagtatggcggcggcacgccaagtaaccgttgattccgaaattttcgaatacctgctcaaacactggcggcgcgatatggacagcctgatgatgatgctcgacacgctggacaactacgccgtcacgatgggcaaacgcatcaccctgccgcttttgcgccagcttttgaaacaacaggaaacccaatga

SEQ ID NO: 46604 - DNA, 936 bp, Neisseria meningitidis; identical to SEQ ID NO: 45685

SEQ ID NO: 46605 - DNA, 435 bp, Neisseria meningitidis; identical to SEQ ID NO: 38925

SEQ ID NO: 46606 - DNA, 630 bp, Neisseria meningitidis
atggcagcccatctcgaagaacaacaagagttagacaactttaaatatttttggaaaaccacgggcaaatggctgtttgccttgctgattttggcggcactcggctacttgggatacacggtttaccaaaaccgtgcggcttcccaaaatcaggaagcggcggcggtgctggcaaacatcgtggaaaaggcgcaaaacaaagccccgcaaaacgaaatcaatgccgaattggccaaactccaacaaagctacccgcattccatttccgccgcccaagccacgctgatggcggcggcaaccgaatttgacgcgcagcgttacgatgttgctgaaggccatttgaaatgggtgttgtccaaccaaaaagacagcctgattcaagcgttggcggcacagcgtctcggcgttgtgttgttgcaacaaaaaaaatacgatgccgcacttgccgcgctcgacacgccggttgaagcggacttctcccccctgctgatggaaaccaaaggcgatgtctatgccgcacagggaaaaagccaggaagccttaaaaaactacggtcaggctttagaaaaaatgcctcaagattctgtcggtcgtgaattggttcaaatgaaactcgattcgctgaaataa

SEQ ID NO: 46607 - DNA, 657 bp, Neisseria meningitidis
atgaaaaacaaaagcaaagtctgggacttccccacccgccttttccactggctgcttgccgcatccctaccctttatgtggtatagcgcgaaaaccggcggcgatatgctgcaatggcacacgcgcgtcgggctgtttatccttttcctgctcgtattccgcctctgctggggcatttggggcagcgataccgcccgtttctcccgtttcgtccgcggatggtcgggtatcagagagtatatgaaaaacggtattcccgaacacgtccaacccggacacaaccccttgggcgcactgatggtcgtcgcgcttttggccgccgtctcatttcaagtcggcacagggctttttgccgccgatgaaaacaccttcagcaccaacggctacctcaaccatttggtttccgagcatacgggcagccttatgcggaaaatccacctcaactttttcaagctgctcgccgttttttccgccattcatatcgccgccgtcgccgcataccgcgtgttcaaaaagaaaaacctcgtcctcccgatgataaccggcttcaaatacatcgaaggcaaaacctcaatccgctttgccggcaaaaccgcgcttgccgccgcattatcggttgccgcgcttgtcgcagccgccatcctgctcctgtcctga

SEQ ID NO: 46608 - DNA, 273 bp, Neisseria meningitidis
atgcaatggaaatttgaagatcctcaaaatactgctgttattaccaccagaagaattttgtctaaaaaaaacggaatcttagaagtatggcatgatgctgatgatggaatgttgcaattcttagatggcaatgaaattcatgaaggagatgctgtgatagttagtttaaaagaaattgtcactattgattcctcagtcaatctcttaagtaatttacctcttggtggttacgcttggagaaatactatatcggaaaaatggaattttgattag

SEQ ID NO: 46609 - DNA, 471 bp, Neisseria meningitidis; identical to SEQ ID NO: 38791

SEQ ID NO: 46610 - DNA, 1197 bp, Neisseria meningitidis; identical to SEQ ID NO: 39690

SEQ ID NO: 46611 - DNA, 282 bp, Neisseria meningitidis; identical to SEQ ID NO: 39646

SEQ ID NO: 46612 - DNA, 345 bp, Neisseria meningitidis; identical to SEQ ID NO: 38355

SEQ ID NO: 46613 - DNA, 1344 bp, Neisseria meningitidis; identical to SEQ ID NO: 39032

SEQ ID NO: 46614 - DNA, 1410 bp, Neisseria meningitidis; identical to SEQ ID NO: 44904

SEQ ID NO: 46615 - DNA, 720 bp, Neisseria meningitidis
atgttggcaggttttgcggcagccaaagcacccgaaatcgacccggctttggtggatacgctggtggcgcagatcatgcagcaggcagaccggcatgcggagcagtcccaaaaaccggacgggcaggcaatccgaaacgatgccgtccgccggctgcaaactttggaagttttgaaaaacagggcattgaaggaaggtttggataaggataaggatgtccaaaaccgctttaaaatcgccgaagcgtctttttatgccgaggagtacgtccgttttctggaacgttcggaaacggtttccgaaagcgcactgcgtcagttttatgagcggcaaatccgcatgatcaaattgcagcaggtcagcttcgcaaccgaagaggaggcgcgtcaggcgcagcagctcctgctcaaagggctgtcttttgaagggctgatgaagcgttatccgaacgacgagcaggcttttgacggtttcattatggcgcagcagcttcccgagccgctggcttcgcagtttgcagcgatgaatcggggcgacgttacccgcaatccggtcaaattgggcgaacgctattatctgttcaaactcagcgaggtcgggaaaaaccccgacgcgcaacctttcgagttggtcagaaaccaattggagcagggtttgagacaggaaaaagcccgcttgaaaatcgatgcccttttggaagaaaacggtgtcaaaccgtaa

SEQ ID NO: 46616 - DNA, 1131 bp, Neisseria meningitidis
ttgatgttagaatgcacgataaattactgttcaggcgaaattatgtcccaaactatcgacgaactcctccttccccaccgcaacgccatcgacaccatcgatgccgaaatcctgcgcctgctcaacgaacgtgcgcaacacgcccacgccatcggcgagctgaaaggcacgggcgcagtgtaccgccccgaacgcgaagtcgccgtgttgcgccgcattcaggatttgaacaaaggcccgctgcccgacgaatcggtagcacgcctgtttcgggaagtgatgagcgagtgcctcgccgtcgaacgcccgctgaccatcgcctatctggggccgcagggcacgtttacccagcaggcggcgatcaagcatttcggacacgccgcgcacaccatggcgtgtccgaccatagacaactgcttcaagcaggttgaaacccgtcaggcggattatctggtcgcgcccgtggaaaactcgaccgaaggctcggtcgggcgcacgttggatttgcttgccgttaccgcgttgcaggcgtgcggcgaagtcgttttgcgcatccaccacaaccttttgcgtaaaaacaacggcagcaccgaaggcattgccaaagtcttttcccacgcgcaggcgttggcgcagtgcaacgactggttgggcagacacctgcccaacgccgaacggattgccgtgtccagcaatgccgaagccgcaaggctggttgccgaatcggacgacggtacggttgccgccatcgccggacgcacggcggcggaaatctacggactcgatatggttgccgagtgcatcgaagacgaaccgaacaacaccacgcgcttcttggtgatgggacatcacgaaaccggtgcaagcggcagcgacaagacttcgctggccgtttccgcgcccaaccgggcaggcgcggttgcctcgctgctgcaaccgctgactgagtcgggtatttccatgaccaagtttgagagccgtccgagtaaatccgttttgtgggaatacctgttcttcatcgacatcgaaggacaccgccgggacgcgcagattcagacggcattggaacgcttgggcgaacgcgcttcgttcgtcaaagtcatcggttcgtacccgaccgccgttttgtag

SEQ ID NO: 46617 - DNA, 1047 bp, Neisseria meningitidis
atgattccggccacctacaccctgtcccaaatcaccgcgcggctcggcggcgaatggcgcggcgaggacatttccgttaccgccgtgcgcccgctcgcagacgcgcaggcggaacacatcagcttccttgccaatccgaaatacaaagccgaagtccacgacagcagcgcgggcgcggtcatcgtttccgccaaagcggcagacggatttgaagggcgcaacctgattgtcgccgacgacccctatctctatttcgccaaagtcgcccgcctgttttcacccgtcgtcaaagcgcgcggcggcatccatccgaccgccgtcgtcgaaccgagtgccaccgttcccgcaagctgcgaaatcggcgcgaacgcctacatcggcgcaaacaccgtgctcggcgaaggctgccgcatcttggcaaacgccgtcgtccaacacgattgcaaactgggcgacgaagtcgtcctgcatcccaacgccgtcgtttattacggctgcacactgggcagacgcgtcgaaatccacagcggcgcggtcatcggcgcggacggtttcggactcgcttttgccggcgattcatggtttaaaatcccgcaaaccggcgcggtaacgctgggcgacgacgtagaaatcggctcgaacaccaacatcgaccgcggcgcgatgagcgacaccaccgtcggcaacggcaccaaaatcgacaaccaagtccaaatcggacacaactgcaaaatcggttcgcacaccgtcatcgccgccaaaaccggcatctcaggcagcgtaaccataggcagctactgcatcatcggcggcggcgtcggtacggtcggacacatcgaaatcgccgacaaaaccaccatcggcggcggcacgtccgtcacccacagcattaccgaaagcggcaaacacctcgccggcatcttcccgatgtccacccataaagaatgggcgcgcaacgctgtttacatccaccgcttaagcgaaatgaacaaacggctcaaaacactggagcagcagctttcagatgccggtcaagacagcaaataa

SEQ ID NO: 46618 - DNA, 480 bp, Neisseria meningitidis; identical to SEQ ID NO: 44156

SEQ ID NO: 46619 - DNA, 1017 bp, Neisseria meningitidis; identical to SEQ ID NO: 44539

SEQ ID NO: 46620 - DNA, 642 bp, Neisseria meningitidis; identical to SEQ ID NO: 38943

SEQ ID NO: 46621 - DNA, 1836 bp, Neisseria meningitidis; identical to SEQ ID NO: 39289

SEQ ID NO: 46622 - DNA, 666 bp, Neisseria meningitidis; identical to SEQ ID NO: 45923

SEQ ID NO: 46623 - DNA, 627 bp, Neisseria meningitidis; identical to SEQ ID NO: 39768

SEQ ID NO: 46624 - DNA, 1011 bp, Neisseria meningitidis; identical to SEQ ID NO: 38365

SEQ ID NO: 46625 - DNA, 1056 bp, Neisseria meningitidis
atgaaaaacagtaagttaaaggcggttgattttttctgtggcggaggtggaatgagctatggaatgcaatccgccggtattcaggttttagccgggatagattacgaacccagctgcaaagaaacatatgaagccaatataaatgccaaatttatacaggctgatgtttttgaattgcagcctgaaaccttggaaaaagaactcgggttaaaaaagaatgatgatgatttgattcttataggttgtagtccttgtcaatattggagtgttattcaaacagacaaaagaaaatcggaaaaatccaagagtttgcttttggagtttcagcggtttgtagaatatttcaatcccggatatgttgttgtagagaacgtaccgggaattctgagcagaatgaaagaaagcaggcttgataatttcataaagttattggaagaaaaaggatttaccgtccatttcggtattcacaatacggctgattacggaattccccaaagccgtaaaagatttacgttaattgcaaacagaataaccaaagaaaagctggaaccagtcaagtattcgggcaaacggcttacggtacgcgatgttttgggaatggaaaatggctttcccaaaattattgcaggacaccaagacgaaacggattttatgcatagctgtgcgggattatctgatatcaacttgaaacgattggctttgatacctaaaaacggaggaaaccgtttggcttttgcgcatattcccgaattacagctggaatgttttatcggaaaagacaatagttttaaagacacgtttggtaggctatggtgggataagcccgcacctaccataacgaccaaattctttagtatttccaacgggaggtttgcccatcctgaagaagatagggcgttatcactgcgcgaaggtgcaacattgcaatcgttccctcgtaactatgtctttaaagcgggcagcagggacaagatagcccgtttgattggtaatgccgttcctccgatgtatgcggaaaaaataggcagggcaattgttgataatatcgaatgttag

SEQ ID NO: 46626 - DNA, 1566 bp, Neisseria meningitidis
atgacccaagacaaaatcctcatccttgacttcggttcgcaagttacccagctcatcgcccgccgcgtgcgcgaagcccacgtttactgcgagctgcattccttcgatatgcctttggacgaaatcaaagccttcaaccccaaaggcatcatcctttccggcggccctaattccgtttacgaatccgactatcaagccgataccggtatctttgacttgggcattccgattttgggcatttgctacggcatgcaatttatggcgcaccacttgggtggtgaagtgcaacccggcaaccagcgcgaattcggttacgcgcaagtcaaaaccatcgacagcgagctgacacgcggcattcaagacgatacgccaaacacgctcgacgtatggatgagccacggcgataaagtttccaaactgcctaccggtttcaccgtcatcggcgacacgccgtcctgcccgattgccatgatggaaaacgccgaaaaacaattctacggcatccaattccaccccgaagtaacccacaccaaacaaggccgcgccctgttgaaccgctttgtcttggatatttgcggcgcgcaacctagctggacgatgccgaactacatcgaagaagccgttgccaaaatccgcgaacaggtcggcagcgacgaagtgattttgggtttgtccggcggcgtggactcttccgtagccgccgcgctgattcaccgcgccatcggagaccaactgacctgcgtgttcgtcgatcacggcctcttgcgcttgaacgaaggcaaaatggtgatggatatgttcgcccgcaatttgggtgtgaaagtgattcacgtcgatgccgaagggcagtttatggagaaactcgccggcgttaccgatcccgagaaaaaacgcaaaatcatcggtgcggaatttatcgaagtatttgatgctgaagaaaaaaaactcaccaacgccaaatggctggcgcaaggcacgatttaccctgacgtaatcgaatccgcaggcgcgaaaaccaaaaaagcccacgccatcaaatcccaccacaatgtcggcggcctgcctgaaaacatgaagctcaagctgcttgagccgttgcgcgatttgttcaaagacgaagtgcgcgaactgggcgtggctttgggtctgccgcgcgaaatggtgtaccgccatcccttccccggtcccggtttgggcgtgcgcatcttgggcgaagtgaaaaaagaatacgccgacttattgcgtcaagcagacgatatttttattcaagaattacgcaacaccaccgacgaaaacggcacgtcttggtacgacctgaccagccaagccttcgccgtgttcctgcctgtgaaatccgtcggcgtaatgggcgacggacgcacttacgactacgtcgtcgcactgcgcgcagtcatcaccagcgactttatgaccgcacattgggctgagttgccttactcactgctcggacgcgtgtccaaccgcatcatcaacgaagtcaaaggcatcaaccgcgtggtgtacgatgtcagcggcaaaccgcctgccaccatcgagtgggaataa

SEQ ID NO: 46627 - DNA, 594 bp, Neisseria meningitidis; identical to SEQ ID NO: 38213

SEQ ID NO: 46628 - DNA, 969 bp, Neisseria meningitidis; identical to SEQ ID NO: 44817

SEQ ID NO: 46629 - DNA, 756 bp, Neisseria meningitidis; identical to SEQ ID NO: 44544

SEQ ID NO: 46630 - DNA, 438 bp, Neisseria meningitidis; identical to SEQ ID NO: 39000

SEQ ID NO: 46631 - DNA, 333 bp, Neisseria meningitidis
atgcttcctaaaggatttaaatatccgcaaagttatttaaaattagctcaatccactcatgccattaactacgatgaacaatattcttttccttggtggtttgaaaatgcagaaagcaatatatcagaagtaattgacatttattttgaaataactggcattccaaacctattaccttttgctagaaaccaagagtgggctgcctgttttgatatttcagataaatcaggtaatcctaaaattatagtagttaatttagataatacaaaatattacgagacttttgaaaattttgatacttggctaaaagaagctgaaaatgatggttggtag

SEQ ID NO: 46632 - DNA, 480 bp, Neisseria meningitidis
ttggaattttgggtcggactgttcgtcctgattggcgcggcggcggttgcctttctcgctttccgcgtggcgggcggcgcggcgttcggcaattccggcaagacttataccgtatatgccgatttcggcgacatcggcggtttgaaggtcaatgcccccgtcaaatccgcaggcgtattggtcgggcgcgtcggcgctatcggacttgacccgaaatcctatcaggcgagggtgcgcctcgatttggacggcaagtatcagttcagcagcgacgtttccgcgcaaatcctgacttcgggacttttgggcgagcagtacatcgggctgcagcagggcggcgacacggaaaaccttgctgccggcgacaccatctccgtaaccagttctgcaatggttctggaaaaccttatcggcaaattcatgacgagttttgccgaaaaaaatgccgacggcggcaatgcggaaaaagccgccgaataa

SEQ ID NO: 46633 - DNA, 1536 bp, Neisseria meningitidis
ttgccgataaaaaacactatgtctcctaaaaaaatacccatttggcttaccggcctcatcctactgattgccctaccgcttaccctgccttttttatatgtcgctatgcgttcgtggcaggtcggcatcaaccgcgccgtcgaactgttgttccgcccgcgtatgtgggatttgctctccaacaccttgacgatgatggcgggcgttaccctgatttccattgttttgggcattgcctgcgcccttttgttccaacgttaccgcttcttcggcaaaaccttttttcagacggcaatcaccctgcctttgtgcatccccgcatttgtcagctgtttcacctggatcagcctgaccttccgtgtcgaaggcttttgggggacagtgatgattatgagcctgtcctcgttcccgctcgcctacctgcccgtcgaggcggcactcaaacgcatcagcctgtcttacgaagaagtcagcctgtccttgggcaaaagccgcctgcaaacctttttttccgccatcctcccccagctcaaacccgccatcggcagcagcgtgttactgattgccctgcatatgctggtcgaatttggcgcggtatccattttgaactaccccacttttaccaccgccattttccaagaatacgaaatgtcctacaacaacaataccgccgccctgctttccgctgttttaatggcggtgtgcggcatcgtcgtatttggagaaagcatatttcgcggcaaagccaagatttaccacagcggcaaaggcgttgcccgtccttatcccgtcaaaaccctcaaactgcccggtcagattggcgcgattgtttttttaagcagcttgttgactttgggcattattatcccctttggcgtattgatacattggatgatggtcggcacttccggcacattcgcgctcgtatccgtatttgatgcctttatccgttccttaagcgtatcggctttaggtgcgattttgactatattatgtgccttgccccttgtttgggcatcggttcgctatcgcaattttttaaccgtttggatagacaggctgccgtttttactgcacgccgtccccggtttggttatcgccctatccttggtttatttcagcatcaactacacccctgccgtttaccaaacctttatcgtcgtcatccttgcctatttcatgctttacctgccgatggcgcaaaccaccctgaggacttccttggaacaactcccaaaagggatggaacaggtcggcgcaacattggggcgcggacacttctttattttcaggacgttggtactgccgtccatcctgcccggcattaccgccgcattcgcactcgtcttcctcaaactgatgaaagagctgaccgccaccctgctgctgaccaccgacgatgtccacacactctccaccgccgtttgggaatacacatcggacgcacaatacgccgccgccaccccttacgcgctgatgctggtattattttccggcatccccgtattcctgctgaagaaatacgccttcaaataa

SEQ ID NO: 46634 - DNA, 561 bp, Neisseria meningitidis
atgaatccacttattcatcaagcaaaggaatcatctatgcaaacccgcatcctctccgccgtactgctggctttttcaaccgctgcctttgccgggggcgcattcacgctgcaattcgacaacccgtccgaagacggcggcttcacgcaaaaccagcttttgagtgcgccttacggcttcggctgttcgggcggcaatgctccgcccgcgctgtcgtggaaaaatccgcccgccgggacaaaaagtttcgtcctgaccgtttacgataaagacgcgccgaccggactgggctggatgcactgggtggtcgccgacattcccgccgatgtccgccgccgcaacgcggcctcgctgcaattaagccgctgcgccaacatcgccgacgaccagtccgcagccatatcggcggtaatcagtttgcggatttgccgcatcaggttgacgccttcgtacacggcaaaaccgatgccgtcatgctgcaaccacgccaacacgccgcaaagcgcggcctccgccacattgtgcggcactttttcatccgccagcaccgcagccgcataa

SEQ ID NO: 46635 - DNA, 780 bp, Neisseria meningitidis; identical to SEQ ID NO: 39372

SEQ ID NO: 46636 - DNA, 1116 bp, Neisseria meningitidis; identical to SEQ ID NO: 39732

SEQ ID NO: 46637 - DNA, 1386 bp, Neisseria meningitidis
atgatggcaagagacaaccgcatccaaatgtttccgcacgaatggcgcaccagtacgacgctttccggcgtgtacgcgctgcgtatgctgggtatgttcctcgtgctgcccgtattggcggtgtatgccgcctcgctgcccggcgcggaaggcaacaaaacgctggtcgggctggcaatgggcatttacgggctgacacaggctctgctgcaactgcctttgggcatcgcttccgacaagttcgggcgcaagaaaaccatttatgtcgggctgattgtgtttgcagcgggcagcttccttgccgccgccgccgatacgctgcccatgctgatcgccgcacgcgccatacagggtgcgggagcggttagtgcggcggttaccgcgctgctggcggatttgacgcgcgacggcgtacgtacccgcgcaatggcgatgatcggtttgagtatcggtctgacgttttcggtcagcctcgtcgttgcccctgtgattgccgacgcggtgggcgtacgcggcttgtttctgctgaccggtattttgaccgttgccagtatcggcgtggtggcgtggatgactcccgacccggaggtttccaagctgcacgaagatacgcaggcgcagccttcgcgcataggcgaagttttgaaaaaccgtaggctgctgacgctcgatttcggcattttcgccctgcacgccgcgcaaatggcattgtttaccgcgctgcctttcgcgatgacccagctcggtttggaaaaaatacagcattggaaagtctatctgccctcgaccattacgggcttggtggtgatggttccgctgattatcgtcggcgagacgcgcaacaagctcaaacaggtttttgttttgggtatcgtctgtattgcggcggcgcagctcggtttgctgtccggtatgcgctcggtaggcttgattaccgcttatttggttgtttactttatcggttttaatgtgttggaagcgagcctgccgtctatggtttccaaaatcgcgccgtccgacctgaagggtacggcgatgggcgtgtacaacacgatgcagtcgctcggactgtttgccggcggcgcggcaggcggtttgctgtttcaaaaatacggcttttccggcgtgtttgccttttgcagtatattgatgctgctgtggctggtaattgccgttttatcgcctgcgcccaagcccgtcaaaaacctcagttaccctgtcggcggcgtgtggcagggcaatcaggaagggttataccgcgccttgtcggagcttgagggtgtggaagacatcggtttcagtttcgacgggcagaccgtctatctcaaagtgttgcagaagggtttcgatcaggctgccgctgaaaaaatcatcacaggagtttaa

SEQ ID NO: 46638 - DNA, 504 bp, Neisseria meningitidis
atgtcagacgaattcaaccgatttatcgaacgagtcctctcccacgagggcggttacgtcaaccaccctcaagaccccggcggcgaaaccaattggggcatcactaagcgcaccgcccaggcaaacggctacaacggctccatgcgtgccatgacgcgtgaacaggcaatcagcatttaccgtaaagcgttttgggagcgttaccgcgccgaccaaatgccggaagcggtcgcgttccaattttttgatgcctgcgtcaaccacggttacggcaatgccgcccgtatgctccaacgcgccgcaggcgtgccggacgatggaatcatcggcgaaatcagcctcaaagccatcaattcccttcccgaaaacgaccttttattgcggttcaacgccgagcgtctggtcttttataccaagctgggtacgttcacctctttcggcaagggctgggtacgccgtgtggcgcaaaacctgattcacgccgccgcagacaatgccgattga

SEQ ID NO: 46639 - DNA, 1746 bp, Neisseria meningitidis; identical to SEQ ID NO: 44429

SEQ ID NO: 46640 - DNA, 234 bp, Neisseria meningitidis; identical to SEQ ID NO: 40733

SEQ ID NO: 46641 - DNA, 876 bp, Neisseria meningitidis; identical to SEQ ID NO: 39674

SEQ ID NO: 46642 - DNA, 759 bp, Neisseria meningitidis
atgaaaatcacccccgtcaaagccctaaccgacaactacatctggatgatacagcacggcaaccatgccgtctgcgtcgacccttccgaaccctcgcccgtcttggaattcctcgtccgcaaccgcctcatgcttgcccaaacatgggtaactcacccccaccccgaccacgagggcggtgcggcggcactctggcgcggctacatggaatcgcccgtttacggcgaatccgacatcgaagcagcaacccacaccgtaaccgccggcacccaattcaccttcggcgacggacaggttaccgtttgggcaacacccggccacacagaccgccacaccagctaccttctcgaaacttcagacggcatacacgttttctgcggcgacaccctgttttccgccggctgcggacgcgtgtttaccggcacaatcgaacagctttacgacagcttccaacgcttcaaccgcctgcctgaaaacaccctgttctacccggcacacgaatacaccgccgccaacctggattttgccgcccatatcgagccggacaacgccgacattcagacggcactgaaagcggcggcgcatacgcctaccctgcccgttaccctcgcgcacgaacgccgcgtcaatccgtttttgcgcgtcgacctgccgcacgtcagagaccgcgccgaggcattgagcgggaaaacgttaaacagcagcctcgatacctttgtcgcgctgcgtgaacttaaaaaccaataccggacgaaataa

SEQ ID NO: 46643 - DNA, 1911 bp, Neisseria meningitidis
atgactctggaaaccctgcttgccctaccgcgcaacatcaagaaaatctgtttcctcatacacgattttctgatgattttcattgccttttggtttatccaaagcctgaaggccgactactcgaacgaatggttcgaccctgccaactggcagtctttcctattgaccgcgccgttgaccatcggcctgttcgtcagaatggggctctaccgtgccgttacacgcttcatcagcttccgcatcctctccaccgcgctggcaggcagcctcgcctccgccgtattgttcttcctcaacacattgatttttgaagaaaggctgcgcctcgccctgccgattgtctatttcttactgctgtttgtttccgtgaccggctcgcgtatggttttgcgcggactgttgtccgaacaccccaaaaaacagatgatccctgtcatcatttacggcgcgggacggtcgggcagacaactgcttgaggccgtcaaacaaatgcgcgaatattccgccgccgcctttgtagacgacgaccccaaactgtggcacaccgtcatctacgaccttgccgtttaccagcccgatgccatcgccttcctcatcgaacgctacggcgtggaaaaaatcctgctcgccatccccggcgcgacccaggaacaacgccgccgaatcatcaacaaactggaagcctatccgtgcgaagtgttgaccattcccggaatgaaagacctgatggacggaaaaatcagcatcggcacgctcaaaaaaatctctgtgtccgacctgctcgggcgtgattccgtcgcgcccgacgaccgcctgatgagtgccgacatcgaaggcaaaaccgtcatggtaaccggcgcgggcggctccatcggttcggaactctgccgccagattatccgccgccgccccgaaaagctgctgctgttcgagttatccgaattcgccctgtacgccatcgaaaaagaattgcgcgaaacctgcatccaaaaacgcctcgacaccgaaatcctgccctttctcggttcggtgcaaaaccgcacgctgctcgaacacgtcatgaccgccttttccgttgcgaccgtctatcacgccgctgcctacaaacacgtccccatggtcgagttcaacaccgtcgaaggcatacgcaacaacatcttcggcacactcgagtgcgcgcttgccgccacgacatcgggcgtaagaactttcgtcctcatctccaccgacaaagccgtccgccccaccaacaccatgggtgccagcaaacgcatggcggaactctgccttcaggcactcgccgccgaacccggacaaaaaacccgcttcagcatggtacgtttcggcaatgttttaggttcgtccggctccgttgtcccgctgtttgaaaaacagattgcagaaggcggcccgcttaccctgacccaccccgaaatcacacgttatttcatgaccatacccgaagccgcccaactcgtcatacaggcaggcgcgatgggtacgggcggcgacgtattcgtcctcgacatgggtgaatccgtcaaaatcatcgaccttgcccgccaaatgattaccctaagcggcctcaaacccaacacacccgaacaacccgacggcgacatcgaaatcctcattaccggactgcgtcccggcgaaaaactctacgaagagctgctcatcggcgacaacgtccgcaaaaccgcccatccgcgcattatgacggctgacgaggcgatgctgccgtggcacgagctctctgtcctgctcgaccgcatccgttcggcctgcgaccgttacgaccagcaggcaatccgcaccctgctcatcaacgccccgaccggctttgccccgagcgacggcatctgcgacctgctttgggtacgagaaacacacagaaaaaatgccgtctga

SEQ ID NO: 46644 - DNA, 173 bp, Neisseria meningitidis
atgacctaccgtgaattagttgaacgtcagttggctgtgcgccatgccgatttggaattgggcttaagccgcgcacgcgaacaagagccgtttgtcattcatgtttccgatctgttggataaggcaggcattgagtacgcggtacgcatggataaggattttcagacgacctt

SEQ ID NO: 46645 - DNA, 126 bp, Neisseria meningitidis; identical to SEQ ID NO: 38379

SEQ ID NO: 46646 - DNA, 324 bp, Neisseria meningitidis; identical to SEQ ID NO: 38645

SEQ ID NO: 46647 - DNA, 2136 bp, Neisseria meningitidis
ttgaaaggaacaataatgttcaataaacacgttaagaccttccaatacggtaatcaaaccgttactttggaaaccggcgaaatcgcccgccaagccgccgctgccgttaaagtatctatgggcgacaccgtcgttttggttgccgttaccaccaataaagaagtgaaagaaggtcaagacttcttccccctgaccgtcgattacctcgagcgtacttacgccgcaggcaaaatccccggcggcttcttcaaacgcgaaggcaaacaaagcgaaaaagaaatcctgaccagccgtctgatcgaccgtccgattcgtcctttattccctgaaggtttctaccacgacatccaaatcgtagcgatggtggtgtctgtcgatccggaaatcgattccgacattcctgcaatgttgggcgcatctgccgcgctggtgttgagcggcgtaccgtttgccggtccgattggtgcggcacgcgtgggttatgtaaacggcgtgtacgttttgaacccgactaaagccgaattggctaaatcgcaattggacttggtggtcgccggtacttcaaaagccgtgttgatggtggaatccgaagccaaaatcctgcccgaagacgtgatgctgggcgcggtggtttacggccacgatcaaatgcaggttgccatcaatgcaatcaatgaatttgccgacgaagtcaatccggaactttgggattggaaagcacctgaaaccaatgaggaactggttgccaaagtccgcgggattgccggcgaaaccattaaagaagcgttcaaaatccgtcaaaaacaagcgcgttctgccaagttggacgaagcttggaatgccgtgaaagaagcgttgattaccgaagaaaccgacactttggcagccaacgaaatcaaaggcattttcaaacacttggaagccgatgtcgtccgcagccaaattttggatggccaaccgcgcatcgacggccgcgacacccgcaccgtccgtccgctgaacatccaaaccagcgtattgccgcgcacgcacggttctgcattgtttacccgtggcgaaacccaagctttggccgttgcaactttgggtacttcgcgcgacgagcaaatcatcgacgcgctgtccggcgaatacaccgaccgctttatgctgcactacaactttccgccgtactctaccggcgaagtgggccgcatgggcgcaccgaaacgccgtgaaatcggtcacggccgtttggctaaacgtgcattgttggccgtattgccgaaacctgaagatttcagctacaccatgcgcgtggtctccgaaattaccgaatccaacggctcttcctctatggcttccgtctgcggcggctgcctgagcctgctgtctgccggcgtgcctttgaaagcacacgttgccggtatcgcgatgggtctgattctggaaggcaacaaatttgccgtcctgaccgacattttgggcgacgaagaccacttgggcgatatggactttaaagtggccggtacgaccgaaggcgttaccgcgctgcaaatggacatcaaaatccaaggcattaccaaagaaattatgcaaatcgctttggcacaggccaaagaagcgcgtctgcacatcttggatcagatgaaagccgccgttgcgggcccgcaagagctgtccgcacacgcgccacgcttgttcacgatgaaaatcaaccaagacaaaatccgcgaagttatcggtaagggcggtgaaaccatccgttcgattaccgctgaaaccggtacggaaatcaatattgccgaagacggtacgattaccattgccgcaaccactcaagaagccggcgatgcggcgaaaaaacgcatcgagcagattactgccgaagtggaagtgggcaaagtgtacgaaggcactgtggtgaaaatcctcgacaacaatgtcggcgcgattgtcagcgtgatgccgggcaaagacggtttggtacacatcagccaaatcgcccacgagcgcgtacgcaatgtcggcgactacctgcaagtcggtcaggtggtgaacgtgaaagcattggaagtggacgacagaggccgtgtccgtctgtccatcaaagccctgctggacgcgcctgcccgtgaggaaaatgccgccgagtaa

SEQ ID NO: 46648 - DNA, 777 bp, Neisseria meningitidis; identical to SEQ ID NO: 44279

SEQ ID NO: 46649 - DNA, 417 bp, Neisseria meningitidis
atgcttaaacatctcgcattcctactgcccgccatgatgttcgccctccccgccgcgtccgccgttctgacttcctatcaagaacccggctgcacctacgaaggcgatgtcggcaaagacggtaaacccgccggcaaaggcacatggcgctgccaagacgggcgcaactataccggttcgtttaaaaatggcaaattcgacggacaaggcgtttataccgttgccgccaaccgcgaaatatttatcgaaccgttcaattccgacagtaccaaattccgcaacatggtactctcgggcacgttcaaaaaaggcttggcacacggcagatttaccgtctcgcaaaacggcgaaaccctcttcattatgaaatgcgaaaacggcatgattaaagaagtgaaactgcctaaaaacaaataa

SEQ ID NO: 46650 - DNA, 1035 bp, Neisseria meningitidis; identical to SEQ ID NO: 44819

SEQ ID NO: 46651 - DNA, 438 bp, Neisseria meningitidis
gtgtgggcgatgatgttttcttggttcaagctgtttcacttgttttttgtcatttcgtggtttgcagggctgttttacctgccgaggattttcgtcaatatggcgatgattgatgcgccgcgcggcaatcccgagtatgtgcgcctgtcgggtatggcggtgcggctgtaccgttttatgtcgccgttgggcttcggcgcggtcgtgttcggctcggcgataccgtttgccgccggttggtggggcagcggttgggtacatgtcaaactgtgtttggggttgatgctcttggcttaccagttgtattgcggcgtgctgctgcgccgttttcaggattacagcaatgctttttcacaccgctggtaccgcgtgttcaacgaaatccccgtgctgctgatggttgccgcgctgtatctggtcgtgttcaaaccgttttga

SEQ ID NO: 46652 - DNA, 291 bp, Neisseria meningitidis
ggaatgacgggatttaatgatgccgccggcgtggcatccgcctccgacatcaaaggcaaatatgttgagaaagttgaagtcaaaaacggcgtcgttaccgccgaaatgaaatcaagcggcgtaaacaaagaaatccaaggcaaaaaactctccctgtgggccaagcgtcaagacggttcggtaaaatggttctgcggacagccggttgcgcgcaacgacaaagccgacaccgacaaaatcgacaccaagcacctgccgtcaacctgccgcgacgcagcatctgccgattaa

SEQ ID NO: 46653 - DNA, 918 bp, Neisseria meningitidis
atggttttggacgggtttgcggcgcattttgacgcttatttggaaaacatcgtgcgcgagggcaagtcggagcacacggtggcggcataccggcgcgatttggaagaactgtttgcgctgttggcacaaatgccgtctgaagatgtaggcggcgtgccgcaggacttgtcgcggcgcgattttacggcggcgttgcggcggctgtcgcagcgcggtttgaatgcgcggacgctggcgcgcaagctgtcgtcttggcggcagtattgtgtttggctggtggaacgcggtctgctgcataccgacccgaccgccgacatcaaaccgccgaagcagcccgagcgcgtacccaaagccctgccgcaggaatggctgaaccggatgctggatttgcccgtggacggcggcgacccgctggcggtgcgcgatcacgccctgttcgagctgatgtacggcagcggtttgcgcgtgagcgagatacacggcttgaatgcagatgatgtctatttggacgaggcgtgggtacacgttaccggcaaagggcgcaagcagcggcaggtgccgctgaccggcaaaagcgtggaagccctgaaaaactatctgccgctgcgtcagacggcatcggacggcaaagccctgtttaccggcaggaacggcacgcgcctgagccaacgccaaatccaaaaacgtttggcgcaatgggcggcgcaaaacggagacggcagacacgtttcgccgcatatgatgcgccacagctatgccggacacctgttgcaggcttcgcgcgacatccgggcggtgcaggagctgctcggacacagcagcctttcgaccacgcagatttacaccaaactcgatttcgaccacatcgcccgcctgtatgacgaagcccacccgcgcgccaagcggcgggacgaatga

SEQ ID NO: 46654 - DNA, 843 bp, Neisseria meningitidis; identical to SEQ ID NO: 39439

SEQ ID NO: 46655 - DNA, 2025 bp, Neisseria meningitidis
atgaacgacatgactttatatctcatcattgcccttgtgcctttggcaggctcgctgatcgcgggtttgttcggcaacaaaatcggacgtgccggtgcgcatacggttacgatactcggcgtggcggtgtccgccgtgctgtcggcttatgtgttgtggggctttattgacggcagccgcgccaagtttgacgaaaacgtctatacctggctgacaatgggcggcttggatttctccgtcggctttttggtcgatacgatgacggcgatgatgatggtcgtggtcaccggcgtatcgctgatggtacatatctataccatcggttatatgcacgatgaaaaaatcggctaccaacgcttcttcagctatatttctttgtttactttcagcatgttgatgctgattatgagcaacaacttcatccagctcttcttcggttgggaagcggtgggcttggtgtcgtatctcttgatcggtttctatttcaaacgtccgagcgcgacatttgccaacctgaaagcctttttgatcaaccgtgtcggcgacttcggctttttgctcggtatcggcttggtgcttgcctatttcggcggcagcctgcgctatcaagatgtattcgcttatctgcctaatgttcagacggccaccattcaattgttccccagtgtggaatggtctttgattactgtaacctgtttgctcctgtttgtcggtgcgatgggtaaatcggcacaattcccgctgcacgtctggctgcctgattcgatggaaggcccgaccccgatttctgcattgattcacgccgcaaccatggttaccgccggtctgtttatggtatcgcgtatgtcgccgatttatgagatgagtagcactgcgctgtctgtcatcatgatgattggtgcgattaccgccctgtttatgggtttcttgggcgtgattcaaaacgatatcaagcgcgtggttgcgtattccaccctgtcgcaactgggctatatgaccgtggctttgggcgcgtccgcctattccgtggcgatgttccacgtcatgacccacgccttctttaaagccttgctgttcttggcggcaggtagcgcgattatcggtatgcaccacgaccaagatatgcgccatatgggcaacctgaaaaaatatatgccggttacttggctgactatgctgatcggcaatttgtcgctgatcggtacgccgttcttctccggcttctattctaaagattcgattatcgaagcagcgaaatacagcaccctgccgggcagcggctttgcttattttgccgtccttgccagcgtgttcgttaccgcgttctacgcgttccgccaatactttatggtgttccacggcgaagagaaatggcgcagcttgcctgaacatcatgacgatcatcatggcgaagaacatcacagcttgggcaaaaacgacaatccgcacgaaagcccgttggttgttaccctgcctttgattttgcttgccattccgtccgtcatcatcggctacgttgccatcgagcctatgctttacggcgatttcttcaaagatgtgattttcgtcaacgccgacgcgcatccgaccatgcacatcatgaaggaagagttccacggcgcattggcaatggtgtcgcacagcctgcattcgcctgtactctaccttgctatcgcaggcgtgttgagcgcatggcttttgtacgtcaaactgccgcacctgccagcgaaaattgcacagacgttccgtccgatttacgttttgtttgaaaacaaatactacctcgacgccctgtatttcaacgttttcgccaaaggcacacgcgcattgggtactttcttctggaaagtcggcgataccgccattatcgacaacggcatcgtcaacggctctgccaaactggtcggcgcgattgccgcgcaagtgcgtaaagctcaaaccggctttatctatacctacgccgccgctatggtgttcggcgtattggtcttgctcggtatgaccttctggggattgttcagataa

SEQ ID NO: 46656 - DNA, 363 bp, Neisseria meningitidis; identical to SEQ ID NO: 38839

SEQ ID NO: 46657 - DNA, 285 bp, Neisseria meningitidis
atgaaattgttggccgcattgattccgctcttgatgagcgtcgcaggccgtatattgactgcattgggattgatggccgtgacctattcgggggtggatagattggtagcccattttcaacaggcgataacccatagcataacgggcgcacctcaagcaatgttacagcttttctatataagcggcggtggtactgttctaaacattcttttcggcgcgatcgcctttattctgtcattcaaacaaatgacaaaactagcaacctcaatcgggaataaaaaataa

SEQ ID NO: 46658 - DNA, 516 bp, Neisseria meningitidis; identical to SEQ ID NO: 44311

SEQ ID NO: 46659 - DNA, 1008 bp, Neisseria meningitidis
atgagtaccttcttccagcaaaccgcacaagccatgattgccaaacacatcaaccgcttcccgctattgaagttggaccaggtgattgattggcagccgatcgaacagtacctgaatcgtcaaagaacccgttacctccgagaccaccgcggccgtcctgcctatccactgttgtccatgttcaaagccgtcctgctcggacaatggcacagcctctccgatcccgaactcgaacacagcctcatcacccgcatcgatttcaacctgttttgtcgttttgacgaactgagcatccccgattacagcaccttatgccgctaccgtaactggctggcgcaagacaacaccctgtccgaactgttggaactgattaactgccaactgaccgaaaaaggcttaaaagtagagaaagcatccgccgccgtcgttgacgccaccattattcagaccgccggcagcgaacagcgtcaggccatagaagtcgatgaagagggacaagtcagcggtcaaaccacactgagtaaggacaaaaatgcccgttggacaaagaaaaacagcctctacaaactcggttacaaacaacatacccgtaccgatgcggaaggctatatcgagaaactgcacatcactcccgccaatacccatgagtgcaaccacctgtcgcctttgttggagggcattgccgaagatacgaccgtctatgccgacaaaggctacgacagtaaggaaaaccggcaacacctgaaagaacatcggttgctggacggcattatgcgcaaagcccagcgtaaccgtccgctgacggaagcgcaaaccaaacgtaaccgatatttgtcgaaaacccgttatgtggtcgaacaaagctttggtacgctgcaccgtaaattccgctacgcccgggcagcctatttcgggctgattaaagtgagtgcgcaaagccatctgaaggcgatgtgtttaaacctgttgaaagcagctaacaggctaagtgtgcctgttgccgcctaa

SEQ ID NO: 46660 - DNA, 486 bp, Neisseria meningitidis; identical to SEQ ID NO: 41484

SEQ ID NO: 46661 - DNA, 2847 bp, Neisseria meningitidis
atgtgcaaccatcatccccaacattcgcacgacaacgacaccatccgcatacgcggcgcgcgcacgcataatttgaaaaacgtcgatttagacattccgcgccacaagctggtggtggtaacaggattgtcaggcagcggcaaatcatcgctggcgttcgacacgctgtatgccgaaggacagcggcgttatgtcgagagcctgtccgcctatgcgcggcagtttttgcagatgatggacaaacccgatgtcgatttgatcgaaggcctgtcgcccgcgatttccatcgagcagaaatccaccagccacaatccgcgttccaccgtcggcacggttacggaaatccacgactatctgcgccttttgtacgcacgcgtcggcacaccctactgccccgaacacaagctgccgctatccagccaaaccgtatctcaaatggttgatgccgtcttaaaactgccggaagacacgcgcgtgatgattctggcgccggcggtacgagagcgtaagggcgagtttgtcgacttctttgccgacttgcaggcgcaaggctttgcccgtgtgcgcgtggacggcgaagtttatcagcttgacgaagtgccgaagctggagaaaaacatcaagcacaatatcgacgtggtcatcgaccgcgtgaaagtgaaggcggacatcaagcagcggctggcggaaagttttgaaaccgcactgcgccacggcaacgagcgcgcgctggcgatggaaatggaaagcggcgaagaacattggttttccgcgcgtttcgcctgtcccgtatgttcatacagcctgcccgaattagagccgcgcctgttttcgttcaacaacccgatgggctcctgcccaacttgcgacggcttgggcaacaccaacttcttcgatcccgaaaaagtggtcgcgcatcccgaattgtcgctggcaacgggcgcgattgacggctgggataagcgcaaccagttctatttccaaatgattcagtcgctggcgcggcattacggtttcgatgtgcaggctgcttgggaaacgctgcctgaaaaagtcaaaaaagtcgtgctgcacggctcgggcaaggaagtcattgatttcacctacctatccgaacgcggcaccaccttcaaccgcagccacgccttcgaaggcatcattcccaatctcgaacgccgctaccgcgaaaccgacagcgaaaccgtgcgcgaaaaattgcgcgaataccagaaccaccgcgcctgcccgagctgcggtggtgcacgtttgcgcaaagaagcccgctacgtttacgtcagcggcgaaccgctgcacgaagtttccgcctggccgctcaccaaaacccaccaattctttgaaacactggatttagacggcaacaaaaaacaaatcgccgaaaaaatcctcaaagaaatcaccgaacgcctcggcttcctgattaacgtcgggctggattacctgaatttaagccgctccgccgaaaccctctccggcggcgaagcccagcgcatccgcctcgccagccaaatcggcagcggcctgaccggcgtgatgtatgtactggacgaaccctccatcggcctgcaccagcgtgacaatgaccgcctgctggccaccctcaaacgactgcgcgatttgggcaacagcgtgattgtggtcgaacacgacgaagacgccatccgcgaagccgatttcgtggtcgatatgggccccggcgcaggcgaacacggcggcaacgtactgattgccgacacgcccgaaaacgtcgcccaatgcgaaaactccgttaccggacaatacctcagcggcaaaaaatccattgccgtgccgtctgaacgcacgcccgtcaatcccgaccggatgctcgtcctcaaaggcgcacgcggcaacaatctcaaaaacgttacccttgagctgccgctcggtttgattacctgcatcaccggcgtatccggcagcggcaaatccaccctgattaacgacaccctcgccaaaattaccgcccgcgaactcaaccgcgcccaagaagaacccgccccatacgacgacatccgcggcctcgaacacctcgacaaagtcatcaacgtcgaccaatcccccatcggccgcaccccgcgctccaaccccgccacctacaccggcctgttcacccccatccgcgaactcttcgccggcatccccctctcgcgcgaacgcggctacaacgtcggccgcttttccttcaacgtcaaaggcggccgctgcgaagcctgccaaggcgacggcgtgattaaagtcgaaatgcacttcctgcccgacgtgtacgtcccctgcgaagtctgccacggcaaacgctacaaccgcgaaaccctcgaaatccaatacaaaggcaaaaacatcagccaagtcctcgacatgaccgtcgaagaagcccgcgaatttttcgatgccgtccccaccgtatcgcgcaaactgcaaaccctgatggacgtaggcctaggctacatccgcctcggtcagtccgccaccaccctctccggcggcgaagcccagcgcgtcaaactcgccttggaactctccaaacgcgacaccggcagaacgctctacatcctcgacgaacccaccaccggcctacacttcgccgacatcgccctgctgctggaagtgataggccgtctgaaaggcaaaggcaactcaattgtgattatcgagcataatcttgacgttataaaaacggctgattatattgtggatttggggccggaaggcggcgacggtgggggaaggattattgcttcaggtagccctgaggaagtggcgaaggttaaggggagttatactgggaagtatttgaaagtggttttgtaa

SEQ ID NO: 46662 - DNA, 1119 bp, Neisseria meningitidis; identical to SEQ ID NO: 39438

SEQ ID NO: 46663 - DNA, 279 bp, Neisseria meningitidis; identical to SEQ ID NO: 36597

SEQ ID NO: 46664 - DNA, 1455 bp, Neisseria meningitidis
atgagcatcgaacacactcctccgacacacgacggcgaaaccggtcaaaaccatgccgaacgcccttccgctgatttcgaccgtgtccactccctctgcgaaatcctcgaacctgcctttgaacaaatcgaaaacggcacaccgctcgaagacgcgccgctgcgcgacaagctgaccgagctgaccgtcctcttgagcgagctgcaccctgccgacgtggcggcagtgttggaatcgctgccgccgcgcgaacgcaatatcgtctggattctggtcaaaccggaagacgacggcgaagtcttgctggaagtgtccgatgcggtgcgcgaaacgctgatcgagtcgatggacaaagacgaattgttggcggcggtcgatgatttggacgcggacgaattggcggagctggcagacgatttgccgcaccaagtggtttatgaagccttgcagacgcgcgacgaggaagagcgcgcacaagtcaaagcggcaatgtcctacgaagacaaccaagtcggtgcgattatggacttcgagttggtcagcatccgcgccgatgtcgcctgtgaagtggtgctgcgctatctgcgccgcttcgacagcctgcccgaccataccgacaagatttttgtggtcgatgaaaacgacgtactgcaaggcgtgctgcccatccgcaaacttttggtcgccgatcccgaagatttggtggaaaacgtgatggcgaaagatgtcgtgcgtttccgcgccgaagacgacgtggaagaagcagcgcaggcattcgaacgctatgacttggttaccgcgcccgtcgtcgatgaaaacaaaaagctcatcggcagggtgaccgttgacgaaatggtggacgtgatccgcgaagaatccgaagcggatatgttgaacatggcaggtttgcaggaagaggaagacctgttcgcccccgtcttggattccgtcaaaaaccgctggatgtggctcgccgtcaacctctgcaccgccttcctcgccagccgcgtcatcggcgcgtttgaaggcagcatcgaaaaaatcgtcgcactcgccgcgctgatgcccatcgtcgccggcatcggcggcaactcgggcaaccagacgattaccatgattgtccgcgcgatggcgatggggcaactgacaggcatgcaggcaggcaggctgttgaaaaaagaagtcggtgtcgccttggtcaacggcatcatttggggaacggtcatgggcgcagtatcttggctgctttacggcagcctcggcatcgggctggttatgattgccgcgatgacgctcaacctcctgctggcggcaaccgtcggcgtattaattcccgtggtaatggaaaagttcggacgcgatcccgcactgggcagctcggtgctgattaccgccgttaccgactccggcggcttcctgattttcttggggctcgccaccctattcctgctttaa

SEQ ID NO: 46665 - DNA, 267 bp, Neisseria meningitidis; identical to SEQ ID NO: 37278

SEQ ID NO: 46666 - DNA, 312 bp, Neisseria meningitidis; identical to SEQ ID NO: 39058

SEQ ID NO: 46667 - DNA, 300 bp, Neisseria meningitidis; identical to SEQ ID NO: 43627

SEQ ID NO: 46668 - DNA, 2028 bp, Neisseria meningitidis; identical to SEQ ID NO: 39522

SEQ ID NO: 46669 - DNA, 1245 bp, Neisseria meningitidis
atggaacagcagcaaagatacatcagcgtactggatatcggtacgtctaaagtcctcgcactgatcggggaagttcaagatgacgacaaaatcaacatcgtcggtttggggcaggctccttcacggggcttgcgcgcgggcatggtaaccaatatcgatgccaccgtccaagccatcaggcaggcggtcaatgatgccgagctgatggcggataccaaaattacccacgttaccacaggtatcgcaggcaaccacatccgcagtctcaattcgcaaggtgtggttaaaattaaagacggggaagtcacgcaggcagacatcgaccgcgccattgaaacggcaaaggcaatcaatatcccgcccgatcaaaaaattctcgatgccgtggttcaagactacattatcgacacccaacttggcgtgagggagcccatcggtatgagcggtgtgcgtctggatacgcgggtgcacatcattaccggtgcaagtacggcagtgcagaatgtccaaaaatgtatcgagcggtgcggcttgaaaagcgatcaaatcatgcttcagccgttggcaagcgggcaggcggtgctgactgaagatgaaaaagacctcggcgtatgcgtcatcgacattggtggcggaacgaccgatattgccgtttatatgaacggtgccatccgccatacgtccgtcattccggccggtggtaatctgattaccaaagatttgtccaaatcgttgagaacacctctcgatgccgccgagtacattaaaatccattatggcgtgacatcatgcgatacggaaggcttgggtgagatgattgaagttccgggcgtgggtgaccggacatcgcgtcaggtttccagtaaggttttggcagcaatcatcagtgcacgtattcaggagatttttggcgtagtgctgggcgagctgcaaaaatcgggtttccccaaagaagtgctgaatgcgggtatcgttctgaccggcggtgtgtccatgatgaccgggattgtggaatttgccgaaaaaatcttcgatttgcctgtacgcaccggtgcgccccaagaaatgggcggtttgtccgaccgcgtccgcacaccgcgcttttctaccgccatcgggctgcttcatgcagcatgcaagctggaaggaaacttgccgcagccggaaaacggtgcagtgcaagagagggaagggggcggtggtttgttggcaagattgaaacggtggattgaaaacagcttctga

SEQ ID NO: 46670 - DNA, 606 bp, Neisseria meningitidis; identical to SEQ ID NO: 44284

SEQ ID NO: 46671 - DNA, 249 bp, Neisseria meningitidis; identical to SEQ ID NO: 41580

SEQ ID NO: 46672 - DNA, 1116 bp, Neisseria meningitidis; identical to SEQ ID NO: 44370

SEQ ID NO: 46673 - DNA, 231 bp, Neisseria meningitidis; identical to SEQ ID NO: 44466

SEQ ID NO: 46674 - DNA, 915 bp, Neisseria meningitidis; identical to SEQ ID NO: 44950

SEQ ID NO: 46675 - DNA, 534 bp, Neisseria meningitidis; identical to SEQ ID NO: 41750

SEQ ID NO: 46676 - DNA, 378 bp, Neisseria meningitidis
atgagaaaaagtcgtctaagccggtataaacaaaataaactcattgagctatttgtcgcaggtgtaactgcaagaacagcaacagagcctgacagcattgtttatacggattgttatcgtagctatgatgtattagatgtgagcgaatttagccatttccgtatcaatcacagcacacattttgctgaacgacaaaaccatatcaatggaattgagaatttttggaaccgggcaaaacgtcatttacgcaagtttaacggcattcccaaagcgcattttgagctgtatttaaaggagtgcgaatggcgttttaacaacagtgagataaaagttcaaatttccattttaaaacaattagtaaaatcgagtttatcttag

SEQ ID NO: 46677 - DNA, 204 bp, Neisseria meningitidis; identical to SEQ ID NO: 37144

SEQ ID NO: 46678 - DNA, 465 bp, Neisseria meningitidis; identical to SEQ ID NO: 44908

SEQ ID NO: 46679 - DNA, 570 bp, Neisseria meningitidis; identical to SEQ ID NO: 45138

SEQ ID NO: 46680 - DNA, 969 bp, Neisseria meningitidis; identical to SEQ ID NO: 44947

SEQ ID NO: 46681 - DNA, 342 bp, Neisseria meningitidis
gtgaaatttgccaagaaacataaaatcagtgattccgagctgctggaagcggtagagcgggcggataacgggctgatagacgcagatttaggcggcggtgtgattaagcagcgcatagcaaggcaaggacaaggcagaagcggcggctatcgcagcctgatattgttcaaacaggcagatagggcatttttcgtttacgcctttgccaagaacgacagggaaaacatttcggataaagaactggacgtttaccgaaaagccgccgcatattatctgaaatacacgcgggcagagctggcggctttgaaagaagacggcattatcacggagatagaatcatga

SEQ ID NO: 46682 - DNA, 1158 bp, Neisseria meningitidis
atgcgaaaaaaacttaccgccctcgtattgtccgcactgccgcttgcggccgttgccgatgtcagcctgtacggcgaaatcaaagccggcgtggaaggcaggaacatccagctgcagttgaccgaaccgctccaaaatattcaacctcaggttactaagcgcaaaagccgcatcaggacgaaaatcagcgatttcggctcgtttatcggctttaaggggagcgaggatttgggcgaagggctgaaggctgtttggcagcttgagcaagacgtatccgttgccggcggcggcgcgacccagtggggcaacagggaatcctttatcggcttggcaggcgaattcggcacgctgcgcgccggtcgcgttgcgaatcagtttgacgatgccagccaagccattgatccttgggacagcaataatgatgtggcttcgcaattgggtattttcaaacgccacgacgatatgccggtttccgtacgctacgattctccggaattttccggtttcagcggcagcgtccaattcgttccggcccaaaacagcaaatccgcctatacaccggctcattttgttcagcagactcctaaaagtcagcctactctcgttccggctgttgtcggcaagccggggtcggatgtgtattatgccggtctgaattacaaaaatggcggttttgccgggaactatgcctttaaatacgcgaaacacgccaatgtgggccgtgatgcttttgagttgttcttgctcggcagcgggagtgatgaagccaaaggtaccgatcccttgaaaaaccatcaggtacaccgcctgacgggcggctatgaggaaggcggcttgaatctcgccttggcggctcagttggatttgtctgaaaatggcgacaaaaccaaaaacagtacgaccgaaattgccgccactgcttcctaccgcttcggtaatgcagttccacgcatcagctatgcccatggtttcgactttatcgaacgcggtaaaaaaggcgaaaataccagctacgatcaaatcatcgccggcgttgattatgatttttccaaacgcacttccgccatcgtgtctggcgcttggctgaaacgcaataccggcatcggcaactacactcaaattaatgccgcctccgtcggtttgcgccacaaattctaa

SEQ ID NO: 46683 - DNA, 975 bp, Neisseria meningitidis
atgccgtctgaaaaaaatatcggttttatggcaggaagcagccgtccgttgtgggtcgcctttgcgctgttactggtttcctgcgtcctgtttatgacgctcaacgtcaaaggcgattgggattttgtactgcaactgcggctgaccaagcttgcggctttacttttagtcgcgtatgcggtcggcgtgtccactcaactcttccaaacgctgaccaataatccgattctgaccccttcgattttgggtttcgattcgctgtatgtgtttttgcagacgcttttggttttcgctctgggcggcgtgggctatgcttccctgccgttgacgggcaaattcggctttgaactggtcgttatgatgggcggctcgctgctgttgttctacacgctcatccgtcagggcgggcgcgatttgccgcgtatgattttaatcggcgtgattttcgggattttgttccgcagcctgtcatcgctgctttcgcgcatgatcgatcccgaagaatttaccgccgcgcaggcgaatatgtttgccaccttcaatactgtccactcggaattattgggtatcggcgcaatcgtgttgctcatcagcgctgctgtgatctggcgcgaacgccaccgcctcgatgtttacctgctcggccgcaatcaggccgttaatttgggcatcagctacacgcgcaacaccttatggatactgctttggattgccgcgctggtggcgacggcgaccgccgtggtcggccccgtaagctttttcggacttctcgccgcctcgcttgccaaccacttttccccatccgtgcgccattccgtccgcctgccgatgacggtttgtgtcggcggcatccttctggtcggcggacaaaccgtattcgaacacttcttgggcatgaaggcggtattaagcgtggtggtcgaatttgcgggcggactcgttttcctctatctcgttttaaaacacaaaaaatga

SEQ ID NO: 46684 - DNA, 1371 bp, Neisseria meningitidis
atgttagacaatttaaccagccgcttcagcaatgtcctcaaaaacatccgcgggcaagccaaactgaccgaagacaacattaaagaagccttgcgcgaagtccgactcgccctgcttgaggcggatgtcgccctgcctgtcgtcaaagagttcgtcaacaacgtcaaagaaaaggccctcggtcaggaagtggcgggcagcctgacgccggatcaggcatttatcggcgtggtcaaccaagccttagtcgaactgatgggcaaggaaaacaaaacgctggatttatcggttgcgccgcccgccgtcgttttgatggccggtttgcagggcgcaggtaagacgacgactgtcggcaaactcgcccgcctgctgaaaaacgatcagaagaaaaaagttttggtggtatccgccgacgtttaccgccctgccgcgattgaacagctgcgtctgttggccgaacaggtcggcgtggactttttcccatccgataccaaccaaaaaccggttgaaattgcaactgccgccgtcgattacgccaaaaaacatttttacgatgtattgatggtcgataccgccggccgtttggcaatcgatgaggagatgatgaacgaaatcaaagcccttcatgcggcggttaacccggtggaaactttgttcgtcatcgatgcgatgctgggtcaggatgcggtgaacactgctcaggcatttaatgaagccctgccgctgaccggtgtcgtattgaccaagatggacggcgattcgcgcggcggcgcagctttgtccgtgcgccacgtaaccggcaagccgattaaatttatcggtgtcggcgaaaaaatcaacggcctcgaacctttccaccccgaccgtcttgccagccgtatcctcggcatgggcgacgtattgaccctgattgaagacgtccaaaaaggtattgatgaagaagccgccgccaaaatggcgaaaaagctacacaaaggcaaaggcttcgacctcaacgactttaaagaacaaatccagcaaatgcgcaatatgggcggtttggaaaacctgatgtcgaaaatgccgggcgaactgggtcaaatctcgaaacaaatccccgaaggcacggctgaaaaagcgatgggcaaagtggaagccatcatcaactcgatgactccaaaagaacgcgccaaccctgccctgcttaaagccagccgcaaacgccgtatcgcagtgggcgcgggcacgacggtacaggaagtgaacaaattgctcaaacagtttgaacaaatgcaacagatgatgaagatgttcagcggcaacggcttgggcaaactgatgcgtatggcgaaaggaatgagggggataaaagggatgttcccgggtttgtaa

SEQ ID NO: 46685 - DNA, 888 bp, Neisseria meningitidis
gtgcaacttttgaaccgccacaaaagcaccatcagccgcgaaatcagacggcaccgcacccaagggcagcaatacagcgccgaaaaagcccagcggcaaagccggactatcaaacagcgtaagcgacaaccctataagctcgattcgcagctgattcagcacatcgacacccttatccgccgcaaactcagtcccgaacaagtatgcgcctacctgtgcaaacaccaccagatcacgctccaccacagcaccatttaccgctaccttcgccaagacaaaagcaacggcagcacgttgtggcaacatctcagaatatgcagcaaaccctaccgcaaacgctacggcagcacatggaccagaggcaaagtccccaaccgtgtcggcatagaaaaccgacccgctatcgtcgaccagaaatcccgtatcggcgattgggaagccgacaccattgtcggcaaaggacagaaaagcgcattattgaccttggtcgaacgcgttacccgctacaccatcatctgcaaattggatagcctcaaagccgaagacactgcccgggcagctgttagggcattaaaggcacataaagacagggtgcacaccattaccatggataacggcaaagagttctaccaacacaccaaaataaccaaagcattgaaagcggagacttatttttgtcgcccttaccattcttgggagaaagggctgaatgagaacaccaacggactcatccggcaatacttccccaaacaaaccgatttccgtaacatcagtgatcgggagatacgcagggttcaagatgagttgaaccaccgaccaagaaaaacacttggctacgaaacgccaagtgttttattcttgaatctgttccaaccactaatacactag

SEQ ID NO: 46686 - DNA, 1776 bp, Neisseria meningitidis; identical to SEQ ID NO: 39929

SEQ ID NO: 46687 - DNA, 1008 bp, Neisseria meningitidis
atgagcaccttcttccagcaaaccgcccaagccatgattgccaaacacatcgaccgtttcccgctattgaagttggaccaggtgattgattggcagccgatcgaacagtacctgaatcgtcaaaaaacccgttaccttagagaccaccgcggtcgtcccgcctgtcccctgttgtccatgttcaaagccgtcctgctcggacaatggcacagcctctccgatcccgaactcgaacacagcctcatcacccgcatcgatttcaacctgttttgccgtttcgacgaactgatcatccccgattacagtaccttatgccgctaccgcaactggctggcgcaagacgacaccctgtccgaattactcaaactgattaactgccaactgaccgaaaaaggcctaaaaatagagaaagcatccgccgccgtcgttgatgccaccattatccagaccgccggcagcaaacagcgtcaggccatagaagttgacgaagaaggacaaatcagcggtcaaaccacaccgagtaaggacagcgatgcccgttggataaagaaaaacggcctctacaaactcggttacaaacaacatacccgtaccgatgcagaaggctatatcgagaaactgcacattactcccgccaatgcccatgagtgcaaacacctgtcgccgttgttggaaggactgcccaaaggtacgaccgtctatgccgacaaaggctatgacagtgcggaaaaccggcaacatctggaagaacatcagttgcaggacggcattatgcgcaaagcctgccgcaaccgtccgctgacggaaacgcaaaccaaacgcaaccggtatttgtcgaagacccgttatgtggtcgaacagagcttcggtacgctgcaccgtaaattccgctatgcgcggtcaacctatttcggactgattaaagtgagtgcgcaaagccacctgaaagcgatgtgtttgaacctgttgaaagcggccaacaggttaagtgcgcccgctgccgcctaa

SEQ ID NO: 46688 - DNA, 897 bp, Neisseria meningitidis
atgcttaccttccaacaaatcatcttcaaactgcaaacattctgggcagacaaaggctgcaccgtcatccaatctttcgacatggaagtcggcgcaggtacttcccaccccgccacctgcctgcgcgcactcggccccgagccttggtttgccgcctacgtccaacccagccgccgccccaaagacggccgctacggcgacaaccccaaccgcctgcaacactattaccaattccaagtcgcccttaaacccgcccccgccaatatccaagacctttatctcgactccctgcgcgaattgggcatcgatcccaaagtccacgacatccgctttgtcgaagacgactgggaaaaccccaccctcggtgcatggggtttgggctgggaagtctggctcaacggcatggaagtaacccagtttacctatttccaacaagtcggcggcattgactgcacgcctgtactcggcgaaattacctacggcatcgaacgcttggcgatgtacctgcaaggcgtagaaaacgtctatgacctcgtttgggcaaaaacgctggacgggaatacagtaacttacggcgacgtgtaccaccaaaacgaagtcgagcaatccacctacaacttcgaatacagcgatgccgactggctgctgcgccagttcaacgactacgaagcgcaagccaaacgcctgctcgccgttgaagaagcaagccttgcgctgcccgcctacgagctggttctcaaagcagggcatacgttcaaccttttagacgcacgcggcgcgatttccgtaaccgaacgcgccacctacatcgggcgcatccgcgcgttgagccgcgccgtggcgcaaaaatatgtcgaaagccgcgaaaaactgggcttcccgttgattaaaaaataa

SEQ ID NO: 46689 - DNA, 360 bp, Neisseria meningitidis
atggcatcatatgtttccataaaaggatggattgaatgctctgacgatgatataaaaatcatccaagaaaacattaataatttttggaataattgtcccttcaatatcgaagagaaagaatctgcaaaaatatataaaagtgggtgggttttcccgacaaatagttttaattggagcagctatattttttttggtgcatgcgtaaaatcttatttcattatttattttgaaaaatgtattaaaacaataatggaattggatattgaaatatcaggtttttttgaattagattattatgaagatagttataaagtacattggaaaataaataatggcaatttaatacaaacgactaattaa

SEQ ID NO: 46690 - DNA, 897 bp, Neisseria meningitidis; identical to SEQ ID NO: 39762

SEQ ID NO: 46691 - DNA, 582 bp, Neisseria meningitidis
ttgccgtactatttgtactgtctgcggcttcgtcgccttgtcctgatttttgttaatccactatatctgcatcagtttcatgaaacgcaagtcggaagcgtcaaacaactgattgcccattttgaccggctgattgacgaattggacaaacaaatcgacgaccacacccacacgcattttgacggcaaagcccaagtggcggagcaaatcaaaggcatcggttcgataacgacggctacgctgatggcgatgctgcccgaattggggcggctgtcgcacaaacggatagcgagtttggccggcattgccccgcacccgagggagagcggggaaaccaaattcaaaagccgctgctttggcggaaggtctgcggtgcttaaggcactgtatatggctaccgtggcagcgacacgttttgaaccgcttattcgggatttctaccaacgcctgccgtccgagggtaagccgtataaggttgccgttacggcatgtatgcgcaaactgctgacgatatcgaatgcccggatgcgtgattattttgccgaaaacgataccgccgaaaatggtatccaaacggcttga

SEQ ID NO: 46692 - DNA, 1113 bp, Neisseria meningitidis; identical to SEQ ID NO: 45010

SEQ ID NO: 46693 - DNA, 648 bp, Neisseria meningitidis; identical to SEQ ID NO: 43653

SEQ ID NO: 46694 - DNA, 1176 bp, Neisseria meningitidis
gtgtttaaagtgaaattttatattcgtcacgcagtattattattgtgtggaagtttaattgtaggatgctctgcgattccttcatcaggccccagcgcaaaaaaaattgtctctttagggcaacaatctgaagttcaaattcctgaagtggagctgattgatgtgaatcatacggttgctcagttattatataaggctcagataaatcagtcattcactcagtttggcgatggttatgcttcggctggtacgctaaatattggtgatgtattggatattatgatttgggaagcgccgccggcagtattgtttggtggtggcctttcttcgatgggctcgggtagtgcgcatcaaactaagttgccagagcagttggtcacggcacgtggtacggtttctgtgccgtttgttggcgatatttcggtggtcggtaaaacgcctggtcaggttcaggaaattattaaaggccgcctgaaaaaaatggccaatcagccacaagtgatggtgcgtttggtgcagaataatgcggcgaatgtgtcggtgattcgtgctgggaatagtgtgcgtatgccgctgacggcagccggtgagcgtgtgttggatgcggtggctgcggtaggtggttcaacggcaaatgtgcaggatacgaatgtgcagctgacacgtggcaatgtagtacgaactgttgccttggaagatttagttgcaaatccgcgacaaaatattttgctgcgtcgcggtgatgtggttaccatgattaccaatccctatacctttacgtctatgggtgcggtggggagaacacaagaaatcggtttttcagccagaggcttatcgctttctgaagccattggccgtatgggcggtttgcaagatcgccgttctgatgcgcgtggtgtgtttgtgttccgctatacgccattggtggaattgccggcagaacgtcaggataaatggattgctcaaggttatggcagtgaggcagagattccaacggtatatcgtgtgaatatggctgatgcgcattcgctattttctatgcagcgctttcctgtgaagaataaagatgtattgtatgtgtcgaatgcgccgttggctgaagtgcagaaatttttgtcgtttgtgttctcgccggttaccagtggcgcgaacagtattaataatttaactaattaa

SEQ ID NO: 46695 - DNA, 252 bp, Neisseria meningitidis; identical to SEQ ID NO: 45697

SEQ ID NO: 46696 - DNA, 549 bp, Neisseria meningitidis; identical to SEQ ID NO: 39055

SEQ ID NO: 46697 - DNA, 963 bp, Neisseria meningitidis; identical to SEQ ID NO: 44442

SEQ ID NO: 46698 - DNA, 378 bp, Neisseria meningitidis; identical to SEQ ID NO: 43968

SEQ ID NO: 46699 - DNA, 750 bp, Neisseria meningitidis
atgaaagcactggtcgcagtaaagcgcgtagtggactacaacgtcaaagttcgtgtaaaagccgatggttcggatgtggatatcggcaatgtcaaaatgtcgatgaatccgtttgacgaaatcgctgtggaagaagctgtccgtttgaaagaagccggaaaagtaagcgaaatcgtagcggtttctttgggtgagaaaaaatgcgaagaaaccttgcgtacagctttggcgatgggtgccgaccgtgccattcatgttgaaaccgatactaaactggagtctctggccgttgctaagttgctgaaagccgttgcggacaaagaaaatccgcaaattttctttttgggcaaacaagcgattgatgatgatgccaatcaagtggcgcaaatgctggcagctttgctgaatgcggcgcaaggtacgtttgcttcaaaagtacacattgaatgtggtgaagtacagattgtgcgcgaaattgatggcggcgaagaaaccatagcattaaaactgcctgctgttatcagtgctgatttgcgtttgaacgagccgcgctttgtcaaactccccaatattatggcggcaaagaaaaaacctttggaaaaactgactcctgacgatttggttgccgacatttcacctcgtttgaaaacggtgaaatttgccgaacctaaggcgcgtcaggcaggcgtaaaagtagcaagcgttgccgaattggttgaaaaattgaaaaacgaagccaaagtgatttga

SEQ ID NO: 46700 - DNA, 1050 bp, Neisseria meningitidis; identical to SEQ ID NO: 36439

SEQ ID NO: 46701 - DNA, 720 bp, Neisseria meningitidis
ttgaatttaatccacgatacattaccagttaacgttctattgcttatgtgtacacgaaaacaacaaggtttcacgctaacagagctgctcatcgtgatggtcattgcagccattatggcgatgatagccctccccaatatgagccaatggattgcatcccgccgcattgccagtcacgcggagcggattgccaaccttttgcgtttctccaggggcgaagccgtccggctcaatctccctgtctatatctgtcctgttcaagttaaaaaagacggtgcgcccaacaatagatgtgacttcagcaagaaggggcggggaatgttggctttcggcgacaaaaacggcaataaggcatatgacggcgatgcggcggatgttttcctccgcagcgtggtgttgaatgataccgacgacagccggattaattatgccttcaaccatatcgctttcggttcgtctcagccgaccgccgaccgtgtagtttggacattcaatcaaaacgggacgttcggttatacgaaagaccagcatcttacaagcaaatccagctttttttattccgacggttatatccaaatcgtgctgacagatgcgagagcagttttagatgccgataagaaattccgttcggcggtggttttgattgacagcagcggcagggtcgaagtttgccctaggggtgatcggcgtactcggcgtactatgtgccagtataaataa

SEQ ID NO: 46702 - DNA, 336 bp, Neisseria meningitidis; identical to SEQ ID NO: 38968

SEQ ID NO: 46703 - DNA, 372 bp, Neisseria meningitidis; identical to SEQ ID NO: 38879

SEQ ID NO: 46704 - DNA, 216 bp, Neisseria meningitidis
atgaaaaccctgctcctcaccttcggcatcttcctgaccgtcatcatcggtatggcggtcggctatatcttctccaaacgcaccatcaaaggcagttgcggcggcattaccgccttgggtatgaaaaaaatgtgcgactgcgacacgccttgcgacaccctgcaaaagaaactggatgaagaaaaacaggcaggcggcatacgggttgaccgttaa

SEQ ID NO: 46705 - DNA, 1452 bp, Neisseria meningitidis
atgacgtctgaacgcctacgggttttcagacggcatcaggacttttttatggatactacattgaaaaccaccttgacttctgttgcagcagccttcgcattatccgcctgcaccatgattccccaatacgagcagcccaaagtcgaagttgccgaaacgttcaaaaacgataccgccgacagcggcatccgtgcggtcgatttaggttggcatgactattttgccgacccgcgcctgcaaaagctgatcgacatcgcactcgagcgcaataccagtttgcgtaccgccgtattgaacagcgaaatctaccgcaaacaatacatgattgagcgcaacaacctcctgcccacgcttgccgccaatgcgaacgactcgcgccaaggcagcttgagcggcggcaatgtaagcagcagctacaaagtcggactgggtgcggcatcttacgaactcgatttgttcgggcgtgtacgcagcagcagcgaggcggcactgcaaggctatttcgccagcaccgccaaccgcgatgcggcacatttgagcctgattgccaccgttgccaaagcctatttcaacgaacgttacgccgaagaagcgatgtctttggcgcaacgtgttttgaaaacgcgcgaggaaacctacaagctgtccgaattacgttacaaggcaggcgtgatttccgccgtcgccctacgtcagcaggaagccctaatcgaatctgccaaagccgattatgcccatgccgcgcgcagccgcgaacaggcgcgcaatgccttggcaaccttgattaaccaaccgatacccgaagacctgcctgccggtttgccgctggacaagcagttttttgttgaaaaactgccggccggtttgagttccgaagtattgctcgaccgtcccgatatccgtgctgccgaacacgcgctcaaacaggcaaacgccaatatcggtgcggcacgcgccgcctttttcccatccatccgcctgaccggaaccgtcggtacgggttctgccgaattgggtgggttgttcaaaagcggcacgggcgtttggtcgttcgcgccgtctattaccctgccgatttttacctggggtacgaacaaggcgaaccttgatgtagccaagctgcgccaacaggcacaaatcgttgcctatgaatccgccgtccaatccgcatttcaagacgtggcaaacgcattggcggcgcgcgagcagttggataaagcctatgacgctttaagcaaacaaagccgcgcctctaaagaagcgttgcgtttggtcggtctgcgttacaaacacggcgtatccggcgcgctcgacttgctcgatgcggaacgcagcagctattcggcggaaggtgcggctttgtcggcacaactgacccgcgccgaaaaccttgccgatttgtacaaggcactcggcggcggattgaaacgggatacccaaaccgacaaataa

SEQ ID NO: 46706 - DNA, 861 bp, Neisseria meningitidis; identical to SEQ ID NO: 38865

SEQ ID NO: 46707 - DNA, 933 bp, Neisseria meningitidis; identical to SEQ ID NO: 38585

SEQ ID NO: 46708 - DNA, 402 bp, Neisseria meningitidis; identical to SEQ ID NO: 36186

SEQ ID NO: 46709 - DNA, 219 bp, Neisseria meningitidis; identical to SEQ ID NO: 37472

SEQ ID NO: 46710 - DNA, 555 bp, Neisseria meningitidis; identical to SEQ ID NO: 45646

SEQ ID NO: 46711 - DNA, 186 bp, Neisseria meningitidis; identical to SEQ ID NO: 37143

SEQ ID NO: 46712 - DNA, 807 bp, Neisseria meningitidis; identical to SEQ ID NO: 44600

SEQ ID NO: 46713 - DNA, 1851 bp, Neisseria meningitidis
atgattatgttacctaaccgtttcaaaatgttaactgtgttgacggcaaccttgattgccggacaggtatctgccgccggaggcggtgcgggggatatgaaacagccgaaggaagtcggaaaggttttcagaaagcagcagcgttacagcgaggaagaaatcaaaaacgaacgcgcacggcttgcggcagtgggcgagcgggttaatcagatatttacgttgctgggaggggaaaccgccttgcaaaaggggcaggcgggaacggctctggcaacctatatgctgatgttggaacgcacaaaatcccccgaagtcgccgaacgcgccttggaaatggccgtgtcgctgaacgcgtttgaacaggcggaaatgatttatcagaaatggcggcagattgagcctataccgggtaaggcgcaaaaacgggcggggtggctgcggaacgtgctgagggaaagaggaaatcagcatctggacggactggaagaagtgctggctcaggcggacgaaggacagaaccgcagggtgtttttattgttggcacaagccgccgtgcaacaggacgggttggcgcaaaaagcatcgaaagcggttcgccgtgcggcgttgaaatatgaacatctgcccgaagcggcggttgccgatgtggtgttcagcgtacaggggcgcgaaaaggaaaaggcaatcggagctttgcagcgtttggcgaagctcgatacggaaatattgccccccactttaatgacgttgcgtctgactgcacgcaaatatcccgaaatactcgacggctttttcgagcagacagacacccaaaacctttcggccgtctggcaggaaatggaaattatgaatctggtttccctgcacaggctggatgatgcctatgcgcgtttgaacgtgctgttggaacgcaatccgaatgcagacctgtatattcaggcagcgatattggcggcaaaccgaaaagaaggtgcttccgttatcgacggctacgccgaaaaggcatacggcagggggacgggggaacagcggggcagggcggcaatgacggcggcgatgatatatgccgaccgaagggattacaccaaagtcaggcagtggttgaaaaaagtgtccgcgccggaatacctgttcgacaaaggtgtgctggcggctgcggcggctgtcgagttggacggcggcagggcggctttgcggcagatcggcagggtgcggaaacttcccgaacagcaggggcggtattttacggcagacaatttgtccaaaatacagatgctcgccctgtcgaagctgcccgataaacgggaggctttgagggggttggacaagattatcgaaaaaccgcctgccggcagtaatacagagttacaggcagaggcattggtacagcggtcagttgtttacgatcggcttggcaagcggaaaaaaatgatttcagatcttgaaagggcgttcaggcttgcacccgataacgctcagattatgaataatctgggctacagcctgctttccgattccaaacgtttggacgaaggcttcgccctgcttcagacggcataccaaatcaacccggacgataccgctgtcaacgacagcataggctgggcgtattacctgaaaggcgacgcggaaagcgcgctgccgtatctgcggtattcgtttgaaaacgaccccgagcccgaagttgccgcccatttgggcgaagtgttgtgggcattgggcgaacgcgatcaggcggttgacgtatggacgcaggcggcacaccttacgggagacaagaaaatatggcgggaaacgctcaaacgtcacggcatcgcattgccccaaccttcccgcaaaccccggaaataa

SEQ ID NO: 46714 - DNA, 1236 bp, Neisseria meningitidis; identical to SEQ ID NO: 39525

SEQ ID NO: 46715 - DNA, 657 bp, Neisseria meningitidis; identical to SEQ ID NO: 42491

SEQ ID NO: 46716 - DNA, 849 bp, Neisseria meningitidis
atggacttcaaacaatttgattttttacacctgatcagtgtttccggttgggagcatctggctgaaaaggcgtgggcgttcgggctgaaccttgccgccgcgctgcttatttttttggtcggaaaatgggcggcgaaacgcattgtcgccgtgatgagggcggcgatgacgcgcgcgcaggtcgatgccacgctgattagttttttgtgtaatgttgccaatatcggcttattgattttggtgattattgccgcattgggcagattgggcgtttccacaacatccgtaaccgccttaatcggcggcgcgggtttggcggtggcgttgtccttgaaagaccagctgtccaattttgccgccggtgcgctgattatcctgtttcgcccgttcaaagtcggcgattttatccgcgtcggcggttttgaaggatatgtccgagagattaaaatggtgcagacttctttgcggacgaccgacaacgaagaagtcgtgctgcccaacagcgtggtgatgggcaacagcatcgtcaaccgttccaccctgccgctttgccgcgcccaagtgatagtcggcgtcgattacaactgcgatttgaaagtggcgaaagaggcggtgttgaaagccgccgtcgaacaccccttgagcgttcaaaacgaagagcggcaggccgccgcctacatcaccgccttgggcgacaatgccatcgaaatcacattatgggcttgggcaaacgaagcagaccgctggacgctgcaatgcgatttgaacgaacaagtggtcgaaaacctccgcaaagtcaatatcaacatcccgttcccgcaacgcgacatacacatcatcaattcttaa

SEQ ID NO: 46717 - DNA, 711 bp, Neisseria meningitidis; identical to SEQ ID NO: 41597

SEQ ID NO: 46718 - DNA, 375 bp, Neisseria meningitidis
ttgagaaagaaaaccatgtattttgttgaccgcaccgccgtcgtcctcaagccgaccgcgcgctttttggaatggctcaaaagcaccgacgaaaatatgcccgacctgaccatagagcagcttcgtgccaactgttccgtcttcctcgttccgcagttcgacgaaccggaagccgtcgtttcctacttcgacgaacgctaccgccagattttcgaggcggagctggcaggttgggacatcaataaggataaatggccgcaagatatggggctgaaggcgttttgggaatttttcgacatcgaaatccacgatatggtgttggacatggaagaagcggaattgaacattacccccgtgttcgacaacatgatgtaa

SEQ ID NO: 46719 - DNA, 972 bp, Neisseria meningitidis
atgtccgccaagttccaacaagaaaccctcaaatcccgtttcgcgcaagccaaagtcctggttgtcggcgacgtgatgctcgaccgctattggttcggcgatgtgtcccgtatttcgcccgaagcccccgtgccggtggcgaaaatcggacgaatcgaccaacgcgcgggcggagcggcaaatgtcgcgcgcaacatcgcttcgttgggcggcagggcagggctgttgtccgtaaccggcaacgacgaagccgccgacgcgctcgatgcgctgatggtgcaggacggcgtcgcctcctatctgatgcgcgacaaacaaatcgccaccaccgtcaaactgcgcgtcgtcgcccgcaaccagcagcttatccgtcttgattttgaagaacatcccaactgcgaagtgttggaacaaatcaagcagaaataccgcgaaatcttgcccgaatacgacgcaatcattttttcagactacggcaaaggcggcctgtcgcatatctccgatatgatcgattgggcgaaacacgccggcaaaaccgtcttaatcgaccccaaaggcgacgattacgaaaaatatgtcggtgcaactctgattacgcctaaccgcgccgaattgaaagaagtggtcggcagttggaaaaacgaaagcgagctgaccgaaaaagcgcaaaacctgcgccgccacctcgacctgaccgccgttttactgacccgaagcgaagaaggcatgaccttgttcagcgaaggcgaaccgatttaccagcccacccgcgcccaagaagtttacgacgtatccggtgcgggtgacaccgtcattgccggaatgggcttgggtttggcggcaggctgcaccatgcccgaagccatgtaccttgccaatactgcggccggggttgtcgtggcgaaactcggtacggcggtttgctcgtttgccgaattgatcaaggcattgtcagggcaatcaacaatgtag

SEQ ID NO: 46720 - DNA, 753 bp, Neisseria meningitidis; identical to SEQ ID NO: 38815

SEQ ID NO: 46721 - DNA, 492 bp, Neisseria meningitidis; identical to SEQ ID NO: 44896

SEQ ID NO: 46722 - DNA, 564 bp, Neisseria meningitidis; identical to SEQ ID NO: 36686

SEQ ID NO: 46723 - DNA, 666 bp, Neisseria meningitidis; identical to SEQ ID NO: 38448

SEQ ID NO: 46724 - DNA, 567 bp, Neisseria meningitidis
atgttattgcaaaacatccttccattcgcccattgccttttgcggaaggcacttcccgaaggcggcaatgcgctggacggcaccgccggcaacggacacgacacccttttcctcgcacaaaccgcaggcatccgggggaaagtgtgggcattcgacatccagccgcaagccctgaacaacacccgatgccgtctgcaggaagcaggttacagcaatgtacggttcatcttggacggacatgaaaacctgaagcaatatattccaaagccgctggatgcagccattttcaatttcggctggctgcccggcggggacaaaagccttaccacccgcacggaaaccagcattgccgccctttctgccaccttatccctactgaaagaaaacggtatgcttattgccgtcctctatccgggacacgaaaacggcaaacaggaggcagaagccgtcggacaatgggcaaaaaacctgcctcaagaacagtttgccgttttacgttacggctttaccaaccggaaaaacagcccaccctatctgttggcatttgaaaaactgcgtcaaaaataa

SEQ ID NO: 46725 - DNA, 1116 bp, Neisseria meningitidis; identical to SEQ ID NO: 39337

SEQ ID NO: 46726 - DNA, 1407 bp, Neisseria meningitidis
atgaacgattacgcagccatgccgtctgaagaccgtgaggtcggcgcattgtcgcttccgccgcactcaatggaggcggaacaatccgttttgggcgggttgatgctggaaaatccggcatgggacaggattgccgatgtggtttcgggagaggatttctaccggcatgaacaccgcctgattttccgttccattgccaaattaatcaatgagagccgtcccgcagatgtgattacggttcaggaagatttgcagcggaacgaagaattggaagcggcaggcggattcgaatacctgattacgctggcgcaaaacaccccgtctgccgccaacatccgccgctacgccgaaatcgtgcgcgagcgttccattatgcgccaactcgccgaagtggggacggaaatcgcccgcagcgcctacaatccgcaaggcagggacgcggggcagcttttagacgaggcggaaaacaaagtattccaaatcgccgaaagcaccgccaaatccaagcagggctttttggagatgcccgatttgctgaaagaagtcgtacagcgcatcgatatgctctactcgcgcgacaatcccgatgaagttaccggcgtgccgacagggttcatcgacctcgacaaaaaaacctcgggtctgcaacccggcgacctgattatcgttgccggtcgtccgtctatgggtaagaccgccttttccatcaatatcgccgaacacgttgccgtagaaggcaagctgccggttgccgtcttctcaatggagatgggcggtgcgcaactggtcatgcgtatgctcggctcggtcggacgcttggatcaaagcgtcctgaaaaccggcaggctcgaagacgaacactggggtcgtctgaacgaagcagtcgtcaaactctccgacgcgcccgtgtacatcgacgagaccccgggtttgactgcgctcgaactgcgcgcccgcgcccgccgtctcgcccgtcaatttaacaataagctgggattgatcgtcatcgactacctgcaactgatggcgggatccggccgttccgacaaccgagcttcagagctgggcgaaatttcacgttcgctcaaagcgttggcgaaagaattgcaagtccccatcatcgccctgtcgcaactgagccgcacggtcgaatcgcgtaccgacaaacgcccgatgatgtccgacctccgcgaatccggtgctatcgagcaggatgccgacctgattatgtttatgtaccgcgacgaatactacaaccaagactcgcccatgaaaggccttgccgaatgtatcatcggcaaacaccgcaacggtcccgtcggtaaaatcttcctcacatggacgggacaattcaccaaattcgacaatgctgcctatattcccgaggaggcaaagatagaagattaa

SEQ ID NO: 46727 - DNA, 951 bp, Neisseria meningitidis
atgaaattacaacaattgaaatacgccttagaagtttaccggcacaacctgaacgtttccgaagcggccgaagccttgtttacttcgcaacccggcatctccaaacaaatcaaattgctggaagaagaaatcggcattcagatttttatccgcagcggcaagcgcgtggtttcggtctcgcagccgggcaaggtggttttggatattgcggaacgtattttacgcgatgtacagaacattaaaaatatcggcagcgagtttaccggacaggacagcggttcgctgacggttgccacgacgcatactcaggcacgctatgccctacccttgattgttgccgattttgtgaaacgctatccgaaagtcaacctgaccatcaaacaggggagccctgccgccatcgcacgtatggttacctcaggcgaggcggacttggcgattgttacggaacggatagacgaccatcccgaactgggaaaacttccctgctatgactggactcatgcggttatcgtaccgaacgaccaccccttgctcgaatgcagaaaccccctccgcattgaagatttggcgaggtttccgctgattacttatgaatttgcattcaatgcgggcagcagcatcgcgcgggcattttccaaagcccgtttggaacagccggatgtcgcattggcggcggcggatacggacgtattgaagacttatgtgcgcttgggtttgggcgtgggactgatggcgaaaatggcgtacaacccggatacggacggcgatttgcagcttgtggatgcggcacacctgttcgagccgtcgccgacgtggattgctttgcgcagcgatacttatttgcgcggatatgcctacgactttatccaagcgtttgcgccgcacctgacacgcgagaaggtggataggattctgtacacgcccatcagcgaggatttttcgatttag

SEQ ID NO: 46728 - DNA, 735 bp, Neisseria meningitidis; identical to SEQ ID NO: 44160

SEQ ID NO: 46729 - DNA, 522 bp, Neisseria meningitidis
ttgagagagcgtatgaaaaagaaactgctttcgggcatcaaatttgccgttcagacggcattggtgtttttattggtgtcgctgtttttggattggatacgcaagcccgacgaacctgccggtgcggcagggcggcctttgaccctgctgtcggggcagcggctgactttgggacagtttagccgagataaggcggttttggtgtatttttgggggagctggtgcggcgtgtgccgttatcagtcgccgataatcgatgatttggcggcggacggcgtgccggtcgtcggcgtggcggtacgttccggcagttcggcggaagtggcggcgtatatggcaaaacgcggcttgggctttccgactgccaacgatgaggacgggggtttggcaaggtcttggcggattgtcgcaacgcctgccgtcgttttggtcaaaaatgggaaaatggtccattatacgacgggaatcagcagttattggggcttgcgcgcacgaatttttcaggcggatgttttcggttaa

SEQ ID NO: 46730 - DNA, 714 bp, Neisseria meningitidis; identical to SEQ ID NO: 37885

SEQ ID NO: 46731 - DNA, 1413 bp, Neisseria meningitidis
ttggcactggcggtattgctgatgcttttggttatgcgtgcgaagcagggtaagaaaacaccgaagcgcaaatcccaaggtgtcggcaatacgcaggggcagacacccggaagcaatgattcggactgggtcgatcagattggacaatcggtttcagacggcacgcaacccgactggtcttggaacgaaagtgccgagaccgcatccgccgccgtatccgcgcaagaagtcgatccgcttacggagtatcaggtttataagcaattcggttatcagggcaaggctgccgaatctttggctgcctatctggacggcattccggatggtgaagcgaaacctgaaaaccttatccgcgagctgctcgatatcaatctcgaagtgggggatgtcgatgttttggcagacaatctgcaaaaatacggcaaactgattccttccgaacttttggcaaaatatatcgaacaggcattacagcgcgattcaaaccatttgcgtatccgtgtcttggcggaagaaggtttgggatggggcactcaggagattgaaaaacgtgcggaaggcggttctgcgacggcagcttccgcatcgcccccgccggatgccggcggtaaggcttatgaagccgaagaaatcaagcgcatcccgattgtgcggggcaaaaaagacgtgtccggaatcagtcaagaggaaatcggtgcgattgccggtttggtccgtgccgatcaaggtgcgaaaatccttaaagacaaagtcagctatgaaacggcatcgaaacaatacgaccgtgccatccaaacttccgaaaaacctgcaaacctgattatcgatgcgttgaaactcgattaccaacacgcggacatagaccgttttgccggacatttgtggaaactttaccaaacgttgggcaactacggcaggcaggttaaagagcggatgctggggtgggggtacagcttgggttaccatgaagttttcgatgatttggaaaaagggccgaacgaccggcaaatcaaagacatcggtatggggcacgggtatctgccgaaaaatatacagaaattcaaatcgcaacatcgggatttggtgcttcaagattcttcgttgatcaacaccggttcgtctccggcagacgatgcggttaaagaagtagagtcgttgctgatgtatggtcagattgaagcggcaatggatgtgttggagcaggcggtattgaaatatcccgacgagtcccagctttatattacgttgatcgatatttatgaacgtactgaagattgggataggttggggcagtttttaagggtattgagggaacgtgcggacaggcttcctgaagaggtcgttatgctgatgagccggctgctgcagcgtatgaatcaaaatattaaaaaaataaaacggtacggaaaataa

SEQ ID NO: 46732 - DNA, 1371 bp, Neisseria meningitidis; identical to SEQ ID NO: 45667

SEQ ID NO: 46733 - DNA, 873 bp, Neisseria meningitidis
atgccccaaatgaataacgctttcgcattacccgccatccaaagcggcaacggcagcctcgaacaatacatccacaccgtcaacagcatcccgatgctgtcccaggaagaagaaacccgcctcgccgaacgccggataaagggcgacctcaacgccgccaaacaactcatcctgtcccacctgcgcgtcgtcgtttccatcgcgcgcggctatgacggctacgggctgaatcaggcagacctgattcaggaaggcaatatcggactgatgaaggcggtcaaacgctacgagcccggtagaggcgcgcgtctgttttcatttgccgtacactggattaaagccgaaatccacgagtttattttgagaaactggcgtttggttcgcgttgccaccaccaaaccgcaacgcaagctgtttttcaatttacgcagtatgcgtaaaaacctcaacgccctgtctcccaaagaggcacaagacatcgccgacgatttgggtgtcaaactttccgaagttctggaaatggaacagcgcatgacgggacacgacatcgccatcatggcagacaacagcgacgacgaggacagtttcgcccccatcgactggcttgccgaccacgattccgaaccgagccggcaactatcgaaacaggcgcattacgccctgcaaacagaaggtttacaaaacgctttggcgcaactggatgacaggagccgccgtattgtggaaagccgctggcttcaagacgacggcgggctgacgctgcaccagcttgctgcagaatacggcgtctctgccgagcgcatccgccagattgaagcaaaagccatgcagaaactgcgtggtttcctgaccgaagaagccgaagcggtttga

SEQ ID NO: 46734 - DNA, 537 bp, Neisseria meningitidis; identical to SEQ ID NO: 45068

SEQ ID NO: 46735 - DNA, 543 bp, Neisseria meningitidis; identical to SEQ ID NO: 44543

SEQ ID NO: 46736 - DNA, 1218 bp, Neisseria meningitidis; identical to SEQ ID NO: 45979

SEQ ID NO: 46737 - DNA, 1812 bp, Neisseria meningitidis
atgaaacaaatccgcaacatcgccatcatcgcccacgtcgaccacggcaaaaccacattggtcgaccaactgctgcgccaatccggcacattccgcgccaaccagcaggttgacgagcgcgtgatggacagcaacgacctcgaaaaagaacgcggcatcaccatcctcgccaaaaacaccgccatcgattacgaaggctaccacatcaatatcgtcgatacgccgggacacgccgacttcggcggcgaagtagagcgcgttttggggatggtggactgcgtcgtcttgttggtggacgcgcaggaaggcccgatgccgcaaacccgtttcgtgaccaaaaaagccttggctttggggctgaaaccgattgtcgtcatcaataaaatcgacaagccgtctgcacgtccgagctgggttatcgaccaaactttcgagctgttcgacaacttgggcgcgaccgacgagcagttggatttcccgattgtttacgcttcaggtttgagcggctttgccaagctggaagaaaccgacgagagcagcgatatgcgcccgctgttcgacaccatcttaaaacacacgcccgcaccgagcggcagcgcggacgagccgctgcaactgcaaatttcccaactcgactacgacaactacaccggccgcctcggcatcggtcgtatcttgaacggacgcatcaaacccggccaaaccgttgccgtcatgaaccacgagcagcaaatcgcccaaggccgcatcaaccagcttttgggtttcaaaggcttggaacgcgtaccgcttgaagaagccgaagccggcgacatcgtgattatttccggtatcgaagacatcggcatcggcgtaaccatcaccgacaaagacaaccccaaaggcctgccgatgttgagcgtggacgaaccgacgctgacgatggactttatggtcaacaccagcccgctggcgggtacggaaggcaaattcgtaaccagccgccaaatccgcgaccgcctgcaaaaagaattgctgaccaacgtcgccctgcgcgtggaagacaccgccgatgccgacgtgttccgcgtatccggacgcggcgagctgcacctgaccattttgttggaaaatatgcgccgcgaaggctacgaactcgccgtcggcaaaccgcgcgtcgtgtaccgcgacatcgacggtcaaaaatgcgaaccttatgaaaacctgaccgtggacgtacccgacgacaaccaaggcgcggtaatggaagaactcggccgccgccgtggcgaactgactaatatggaaagcgacggcaacggacgcacccgcctcgaataccatattccagcgcgcggcttgatcggtttccaaggcgaatttatgaccctgacgcgcggggtcgggctgatgagccacgtgttcgacgattacgcgcccgtcaaacccgatatgcccggccgccacaacggcgtgctggtgtcccaagagcagggcgaggcagtcgcttacgccttgtggaatctggaagaccgcggccgtatgttcgtatcgcccaacgacaaaatctacgaaggtatgattatcggcatccacagtcgcgacaacgatttggtggtcaacccgctcaaaggcaaaaaacttaccaacatccgtgccagcggtaccgacgaagccgttcgcctgaccacgccgattaagctgacgctggaaggtgcggtcgagtttatcgacgatgatgagctggtagaaatcacgccgcaatccatccgcctgcgcaagcgttacctgagcgaattggaacgccgccgccatttcaaaaagctagattga

SEQ ID NO: 46738 - DNA, 714 bp, Neisseria meningitidis
ttgcggcggcaatttgcagcatcggatgcctgccgcacgggtttgaaggagggggaaataatgggattgggcatggaaatcggcaagctgattgtggcttttttggtgctgattaatccgtttagcgcgttgtcgctttaccttgacctgaccaacgggcacagcacgaaggagcgcaggaaggtcgcgcggacggccgccgttgccgtgtttgccgtgattgcggtatttgcgctgatcggcggtacgctgctgaaggttttgggcatcagcgtcggttcgtttcaggtcggcggcgggattttggtgctgctgatcgccatttcgatgatgaacggcaacgacaatcccgccaagcagaatctcggcgcgcagccggaaacggggcaggcgcgccccgcccgcaatgccggagcgattgccgtcgtgcccatcgccataccgatcaccatcggcccgggcggtatttcgaccgtgattatttacgcttcggcagccaaaacgtacagcgacatcgcgctgattatcgtggccggtttggtggtcagtgcgatttgttatgccattttaattgttgcagggaaggtcagccgcctgctgggcgcgacggggctgacgattttaaaccgtatcatgggtatgatgctggcggcggtatcggtggagattattgtgtcgggactgaaaacgatattcccgcaactggcaggttga

SEQ ID NO: 46739 - DNA, 471 bp, Neisseria meningitidis; identical to SEQ ID NO: 44380

SEQ ID NO: 46740 - DNA, 426 bp, Neisseria meningitidis; identical to SEQ ID NO: 38777

SEQ ID NO: 46741 - DNA, 606 bp, Neisseria meningitidis
ttgcactttgatttctgtaaaaccgaatattattttatcgattggagatttaccatgaaagcttatctggctctgatttctgccgccgttatcggtttggctgcctgctctcaagaacctgccgcgcctgctgccgaggcaactcctgctgctgaagcacccgcttccgaagcgcctgccgccgaagctgctcctgcagatgctgccgaagcccctgctgccggcaattgtgcggcaactgtcgaatccaacgacaatatgcagttcaacaccaaagacatccaagtcagcaaagcatgtaaagagtttaccatcactctgaaacataccggtacgcaacccaaagccagcatgggtcacaaccttgtgattgccaaagctgaagacatggacggcgtatttaaagacggcgtaggtgctgccgataccgactatgtcaaacctgacgatgcgcgcgttgttgcccacaccaaactgatcggcggcggcgaagagtcttccctgactctggatcctgccaaattggctgacggcgactacaaatttgcctgcactttcccgggtcacggtgctttgatgaacggcaaagtgactttggtcgattaa

SEQ ID NO: 46742 - DNA, 951 bp, Neisseria meningitidis
atgtcccaacaccgcaaactgattattttgggttccggccccgccggatacaccgccgccgtctatgccgcgcgcgccaatttaaaccccgtcattattacaggtatcgcgcaaggcgggcaactgatgaccaccaccgaagtggacaactggcctgccgatgccgacggcgtgcaagggccggaattgatggcgcggtttctcgcccacgccgaacgtttcggaacggaaatcatttttgaccaaatcaacgccgtcgatctgcaaaaacgcccgtttacactcaaaggcgatatgggcgagtacacttgcgatgccctgattgtcgcaacaggcgcgtccgccaaatacctcggtttgccgagtgaggaagcgtttgcaggaaaaggcgtttccgcttgtgccacctgcgacggtttcttctacaaaaaccaagatgttgccgtagttggcggcggcaatacggcagttgaggaagcgctctaccttgccaatatcgccaaaaccgttaccctgatccaccgccgcagcgagttccgtgccgaaaaaatcatgatcgacaaactgatgaaacgcgtggaagagggcaaaatcatcctcaagctggaaagcaacctgcaagaagtactgggcgacgatcggggcgtaaacggcgcattattaaaaaacaacgacggttctgagcaacaaattgccgtcagcggcatttttatcgccatcgggcacaagccgaataccgatattttcaaaggtcagttggaaatggacgaagccggttacctgaaaaccaaaggcggcacggcggacaatgtcggcgcaaccaatatcgaaggcgtatgggcggcgggcgacgtaaaagaccatacctaccgtcaggcgattaccagcgcggcttccggctgtcaggcggctttggacgcggaacgctggctgggcagccaaaacatttga

SEQ ID NO: 46743 - DNA, 192 bp, Neisseria meningitidis; identical to SEQ ID NO: 42043

SEQ ID NO: 46744 - DNA, 420 bp, Neisseria meningitidis; identical to SEQ ID NO: 44730

SEQ ID NO: 46745 - DNA, 780 bp, Neisseria meningitidis; identical to SEQ ID NO: 39421

SEQ ID NO: 46746 - DNA, 1233 bp, Neisseria meningitidis; identical to SEQ ID NO: 39021

SEQ ID NO: 46747 - DNA, 720 bp, Neisseria meningitidis; identical to SEQ ID NO: 44635

SEQ ID NO: 46748 - DNA, 1245 bp, Neisseria meningitidis
atgtccaacgaaaaccgtacctgttccttttgcggaaaatccaaatcacacgtcaaacatttaattgagggcgaaaacgcctttatctgtgacgaatgcgtctcaaactgtattgaaatattgcatgaagacggaaatgacggcacaccttcggaaagtgccggaggggagccggaagaatccggcaagctgcccacgcccgccgaaatcgtcgccaacctcaacgaccacgttatcggtcaggaacaagccaagaaagccttggcggtgtcggtgtacaaccattacaaacgcctgcgccacccgaaagccggagctaatgtcgaattgtcgaaatccaacatcctgcttatcggcccgaccggatcgggtaaaaccctgctggcgcaatctttggcgcgtaaactggacgtaccgttcgtgatggcggatgcaaccacgctgactgaagcaggttatgtcggcgaagatgtcgagcaaatcatcaccaaactgttgggcaaatgtgatttcgatgttgaaaaagcccagcgcggcatcgtctatatcgacgaaatcgataaaatttcacgcaaaggcgacaatccgtccatcacgcgcgacgtgtccggcgaaggtgtgcaacaagccttgctgaaactgattgaaggtacggtggcaagtgttccgccccaaggcggccgcaagcatccgaatcaggaatttatcaacgtcgataccaccaacatcctgtttatctgcggcggtgcgtttgcaggcttggaaaaagtcatccgccagcgcaccgagaaaggcggtatcggtttcggtgcgtccgttcacagcaaggacgaaaatgccgacattaccaagctgttcggcatcgtcgaaccggaagatttaatcaaattcggtctgattccggaattaatcggacgtttgcctgtgattgcaacgttagaagaactggatgaggacgcgctgattaatattttgaccgagccgaaaaatgctttggtcaagcagtatcaagccttgttcggtatggaaaatgtcgaactggagtttgaagaaggcgcattgcgttccatcgcgcgtcaggcaatggagcgcaaaaccggcgcgcgcggcctgcgttccatcgtcgaacgctgcctgttggatacgatgtaccgcctgcccgatttgaaaggcttgaaaaaagtggtggtcggtaaggcagtcatcgaagagggcagggaaccggaattggtgttcgagccctga

SEQ ID NO: 46749 - DNA, 927 bp, Neisseria meningitidis; identical to SEQ ID NO: 45980

SEQ ID NO: 46750 - DNA, 1446 bp, Neisseria meningitidis; identical to SEQ ID NO: 45959

SEQ ID NO: 46751 - DNA, 642 bp, Neisseria meningitidis
atgagatgttttatgattcaaaatgtcgttacttcaataatcctgtattctgggacagccgtagacttacttattatcctaatgttattttttgccaaaagaaaaagcagaaaagacatcattaacatctatttaggacaatttctaggctctgttagcctgatattgctaagtttgctttttgcatttgtcttagattatattcctagtaaagagattttaggtttgctcggcttgattccgattttcctaggcctcaaagttttgctgttaggagattccgatggagaggctattgccaaagagggtttgcgcaaagataataaaaacctgatttttctagtcgctatgattacttttgcaagttgtggtgctgacaatattggtgtctttgttccatattttactaccttaaatttagcgaatttgatagtggctttacttacctttctagtcatgatttatctcttggttttttctgcccaaaaattagcacaagtcccttctgttggagaaactttggaaaaatatagcagatggtttgttgctgttgtttatttaggattgggggtatatatcctgattgaaaacaacagttttgatatgctatggactgtgtcgggccaggaaaaaatattatga

SEQ ID NO: 46752 - DNA, 645 bp, Neisseria meningitidis; identical to SEQ ID NO: 38405

SEQ ID NO: 46753 - DNA, 270 bp, Neisseria meningitidis; identical to SEQ ID NO: 45073

SEQ ID NO: 46754 - DNA, 957 bp, Neisseria meningitidis; identical to SEQ ID NO: 40772

SEQ ID NO: 46755 - DNA, 1203 bp, Neisseria meningitidis; identical to SEQ ID NO: 44234

SEQ ID NO: 46756 - DNA, 444 bp, Neisseria meningitidis
atgtatttgacacaacatacggactacgggctgcgcgtccttatctacactgccatcaacgacgatgcgctggtcaacatcagtaccatcgccgtaacctacggcatttccaaaagccatctgatgaaggtcgttaccgcgctggtcaaaggcggcttcctccacagcgtgcgcggaaaaggcggcggtctgcggcttgccacaccgcccgaccgcatcaacatcggctcggtcgtccgccacctcgaaccgatgcagctggtcgaatgtatgggttcgaacaacgaatgcctgattacaccgtcctgccgtctgacaggcatactcggcggtgcaatgaagtcgtttttcacgtatctggacggtttcacgctccaagacctgctcaacaagccgacctacgacctgctctacgaaccgagaattccgattgcggtgcagtaa

SEQ ID NO: 46757 - DNA, 1023 bp, Neisseria meningitidis; identical to SEQ ID NO: 44766

SEQ ID NO: 46758 - DNA, 516 bp, Neisseria meningitidis
atgtacacttgcacttcctgcggcgaaaaacatgaagatatgcccgcaatcggctttaccgccccctatccctataatcaactcagtgaagaagaacgcattgcttaccaagctgaatgcggcggcgatttctgcatcatccgctatcccgaccaaaccgaccgttttatccgcgcggtgctgcttattccgattatcgggcatgaggaaacgctggaatacggcgtgtgggtgtccgtcagcgaaaagagttttaacgactatcaaagccactttcacgacaatccggaaaatgtcgtttatttcgggatgatctgcaaccggctgcccccttatgaaaccgacaccttcggtttgcattgcaatgtcgttacccaacccgatggtcaacgtcctttgttgcaactccatcaaggcagcgaacatccgctggtacgcgacttttatcacggcatagaatatgccgaagcgcaggcaaggataggggcggtatccgaatcggattgctcaggataa

SEQ ID NO: 46759 - DNA, 360 bp, Neisseria meningitidis; identical to SEQ ID NO: 39361

SEQ ID NO: 46760 - DNA, 2439 bp, Neisseria meningitidis; identical to SEQ ID NO: 44804

SEQ ID NO: 46761 - DNA, 867 bp, Neisseria meningitidis
atgatgaaaaccttactgccctttttcggcgtggtgcgcgtcagcggcgaagaccgccaaaccttcctgcacggacagctttccaacgacatcaataatcttcagaccgggcaggcgtgttatgcgacttacaacacgcccaaaggccgcgtcatcgccaatatgattgtcgtcaaccgtggagacgatttgctgctgattatggcgcaagacttgcttgaagcaacggtcaaacgtttgcggatgtttgtgttgcgtgccaaagccgtttttgaaatccttgaagattacgccgtcggcgcggaattggcagcatccgccgaaccgcttgccgcgcaagaaccctgccttgcctttaccgccgaatgcggttcagacggcatctgttccgtcgtcctgccccatcggggcattttgcacatcgcccccgaaaccgccctgccgccttatgatgccgccgccgaaaacgcgtggcggctgcacgaaatcctcagcggttatccgtggatatgcgcggctaccaaagaaactgccgttgcccaaatgctcaaccagcacatcatcggcggcgttcacttcaaaaaaggctgctacccgggacaggaaatcattgcccgtgcccagtatcgggggcaggtcaaacgcggcttggcggtattgtcgggaaattcggccgtcgaagcaggaaccctgctgacggcagacggcgaagagaccggcatcgtgctcgacagcgttaaagattcggaaagctttaccgcccttgccgtgattaaattctccgccgcacaaaaagaactgaccgtcccaaacggcggtatcttcaaagcggttcatcccttctttaaaaccgaaaatgcagaataa

SEQ ID NO: 46762 - DNA, 1008 bp, Neisseria meningitidis
atgagcaccttcttccagcaaaccgcccaagccatgattgccaaacacatcaaccgcttcccgctattgaagttggaccaggtgattgattggcagccgatcgaacagtacctgaatcgtcaaagaacccgttaccttcgagaccaccgaggccgtcccgcctatcccctgttatccatgttcaaagccgtcctgctcggacaatggcacagcctttccgatcccgaactcgaacacagcctcatcacccgcatcgatttcaacctgttttgtcgttttgacgaactgagcatccccgattacagcaccttatgccgctaccgtaactggctggcgcaagacaacaccctgtccgaattgctggaactgatcaaccgccaactgaccgaaaaaggtttaaaaatagagaaagcatccgctgccgttgttgacgccaccattattcagaccgccggcagcaaacagcgtcagaccatagaagttgacgaagaaggacaagtcagcggccaaaccacaccgagtaaggacagcgatgctcgttggatcaagaaaaacggcctctacaaactcggttacaaacaacatacccgtaccgatggggaaggctatatcgagaaactgcacattacccccgccaatgcccatgagtgcaaacacctgtcgcctttgctggaagggatagccgaaggtacgaccgtctatgccgacaaaggctacgacagtgcggaaaaccggcaacatctggaagaacatcagttgttggacggcattatgcgcaaagcctgccgcaaccgcccgctgtcggaagtgcaaaccaagcgtaaccgatatttatcgaagacccgttatgtggtcgaacaaagcttcggtacgctgcaccgtaaattccgctacgcccgggcagcctatttcggactgattaaagtgagtgcgcaaagccacctgaaagcgatgtgtttgaacctgttgaaagccgccaacaggctaagtgcgcccgctgccgcctaa

SEQ ID NO: 46763 - DNA, 1338 bp, Neisseria meningitidis
atgacgcttgaaaacaaaaaaatcctcgtcgccggactcggcggtacgggtatttccatgattgcctatctgcgcaaaaacggcgcggaggtggccgcttatgatgcggagttgaagcccgagcgcgtgtcgcaaatcggtaagatgtttgacgggctggtgttttacacaggccgtctgaaagatgcgctggacaacggtttcgatattttggcactcagccccggcatcagcgagcgtcagccggatattgaggcgttcaagcaaaacggcggacgcgtgttgggcgacatcgaattgctggcggacattgtgaaccgccggggcgacaaggtaattgcgattaccggcagcaacggcaaaaccacggtaacgagcctggtcggctatctctgtatcaagtgcgggctggataccgttatcgcgggcaatatcggcacgccggttttggaggcggaatggcagcgcgaaggcaaaaaggcggacgtgtgggtgttggagctttccagcttccaactggaaaacaccgaaagcctgcgcccgacggcggcgacggtactgaatatttccgaagaccatctcgaccgctacgacgacttgctcgactacgcgcataccaaagccaagattttccgtggcgacggtgtgcaggttttgaatgcggacgatgcgttctgccgtgccatgaaacgtgccgggcgcgaggtaaaatggttttcgttggaacacgaagccgatttttggttggaacgtgagacaggccgcctgaaacaaggcaatgaagatttgattgccacgaaagacattccgttgcaaggcttgcacaacgccgccaacgtcatggctgccgtggctttgtgcgaagccgtcggtttgccgcgcgaagcattgcttgaacacgtcaaaaccttccaaggcctgccgcaccgcgtggaaaaaatcggcaagaaaaacggcgtggtattcattgatgacagcaaaggcacgaatgtcggcgcgaccgccgccgcgattgccggtttgcaaaatccgctcttcgtgattttaggcggcatgggcaaagggcaggacttcacgcctctgcgcgacgcgcttgccggcaaggcaaaaggcgtgttcctgatcggcgttgatgcgccgcaaatccgccgcgatttggacggctgcggtctgaatatgaccgactgcgccactttggaagaagccgttcagacggcatatgcccaagccgaagcgtgcgatatcgtgctgctcagcccggcttgtgcgagttttgatatgtttaaaggctacgcgcaccgttcggaagtgtttatcgaagcgtttaaggctttgtga

SEQ ID NO: 46764 - DNA, 966 bp, Neisseria meningitidis; identical to SEQ ID NO: 46197

SEQ ID NO: 46765 - DNA, 471 bp, Neisseria meningitidis; identical to SEQ ID NO: 44188

SEQ ID NO: 46766 - DNA, 588 bp, Neisseria meningitidis; identical to SEQ ID NO: 38394

SEQ ID NO: 46767 - DNA, 804 bp, Neisseria meningitidis
atgagggcagtcaaaatgaaacaagctatgaaaaattggtttgctgccttgctgttggcagtacccatgggtgcggcatttgcttcgggcggtcatgcacactatgagaaagtcgatatcgatttgcgcgaccaagtcagcctgcagcgcggcgcacaaatctttaccaactattgcctgtcctgccactcggcaagcggtatgcgtttcaaccgtttgaaagacatcggtttgactgacgaagaaatcaagaaaaacctgatgtttaccaccgataatgtcggcgatgtcatgcattcggcgatgaacccgaaagatgcggcaaaatggtttggtgctgctccgcccgatttgacattgattgcgcgttccaaaggtgcagactacctttacgcttatatgcgcggcttctataaagatccgacccgtccgagcggctggaacaatactgtattcgataaagtcggtatgccccacccgttgtgggaacagcaaggcgttcaagccgttgagttggatgccaaaggtcagccggttatggtaaaagacgaacacggcgagatgaagcctaagctgtattgggaatctaccggtttgcacagccgccgtctgcctaacggcaaagtgatccaaaaagagtacgacgcatatgtacgcgatttggtcaattaccttgtgtacatgggcgaacctgcacaactgcaacgcaaacgtataggctatgtcgtgatgattttcctatttgcggttatgctgcctttggcgtatttcctgaaaaaagaatattggaaagacgtacactaa

SEQ ID NO: 46768 - DNA, 366 bp, Neisseria meningitidis
atggcttcaagcggcgtaaacaacgaaatcaaagacaaaaaactctccctgtgggccaagcgtcaagacggttcggtaaaatggttctgcggactgccggttgcgcgcaccgacaaagccaccgacgacgtcaaagccgccaccgccaacggcaccgacgacaaaatcaacaccaagcacctgccgtcaacctgccgcgatgattcatctaccggttgcatagaaacaccacgcgccgacttcaaacacttccaaaaaatcagccgttaccgagtattgcccgaatcacggcaaatggcagaaaaacttcgtcattcccgcaaaagcgggaatctaggtttgtcggcgcagaaacttatcgggtaa

SEQ ID NO: 46769 - DNA, 267 bp, Neisseria meningitidis; identical to SEQ ID NO: 39635

SEQ ID NO: 46770 - DNA, 240 bp, Neisseria meningitidis; identical to SEQ ID NO: 44857

SEQ ID NO: 46771 - DNA, 282 bp, Neisseria meningitidis
ttgcaaaactttcggaaacccaatatgcagaccgttaccatgtacacaggtccgttttgtccctactgcgcgatggcgaaaaggctgctgcacgcggcaggtgtcggacatatcgacgaaatccgtgtcgatgcaagtcccgaagcctttgccgaaatgcagcagctttcgggacagcgcagcgtgccgcagattttcatcggcgaaacgcacgtcggcggatttaccgacctctaccgcctccagcaggaaggcgggctggacggactgctgaacccttaa

SEQ ID NO: 46772 - DNA, 1242 bp, Neisseria meningitidis; identical to SEQ ID NO: 46031

SEQ ID NO: 46773 - DNA, 555 bp, Neisseria meningitidis
atgattattggcggaatcggtggtgcaaggacacaaacaggactcagattcgaagaacgtacagacttacgaacgttgtttgaagaaattcccgggtacgacttaagaaaaacatatgataatgcgggttatgaagtttggttcaatggagaattgaaggcttattgttttaaaaaatatgagttttaccgatttttgaaaagaccgggatacaatattaattggaaagaccatctgtctaaaagattactacccgacaatggcttatttatcatcatccgtgataccttatttattattgagatcaaattccaacaaactcccggttcagtagatgagaaattacaaacttgcgattttaagagaaaacaatatacaaaattggttcactctttaggttggcgggttgaatatgtctatgttttgaatgattggtttacaaagccggaatataaagatgttttagattatattatcagtgttaactgccattaccaatttaacacgattcccttaaggtggtttggactgcctgatggtgaaacaaatgaataa

SEQ ID NO: 46774 - DNA, 435 bp, Neisseria meningitidis; identical to SEQ ID NO: 45056

SEQ ID NO: 46775 - DNA, 2076 bp, Neisseria meningitidis
atgctgtgcgtgttggcgggcgcggcttacggcgtattcagaacggaagcggcactgtcttcgcaatggcgggcggaggcggtttcaggtgtgccgttgacggtggaagtggcggatatgccgaggtcggacgggcggcgcgtgcagtttgcggcaaaggctgtggacagcggtggtcggacgtttgatttgctgctgtcggactacaaacggcgcgaatgggcggtcgggagcagatggcggataacggcacgtgtgcaccccgtcgtcggcgaattgaacctgcgcggtttgaaccgtgaggcgtgggcattatccaacgggataggcggcgcggggacggtcggtgcggacagggttttgctgcatggcggaagcggttgggggattgcggtttggcgcagccgcatcagccgtaattggcagcaggcggatgcggacggcgggctttcagacggcatcgggctgatgcgcgcgttgagcgtgggcgaacagtcggcattgcgccccgaattgtggcaggcgttccggccgttggggctgacgcatttggtcagtatttcgggtttgcacgttacgatggtggcggtaatgtttgcgtggctggcgaagcggctgcttgcctgttccccgcgccttcctgcccggccgcgtgcgtgggttttggcggcggggtgtgcaggcgcgctgttttacgcgctgcttgccggtttttccgtgccgacgcagcgcagcgttttgatgttggcggcgtttgcgtgggcttggcgcaggggaagattgtcggcgtgggcgacgtggtggcaggcgttggcggcggtgctgctgttcgacccgtcggcggtcttgggtgtggggacttggctgtctttcggtttggtggcggccctgatatgggcgtgttcggggcgtttgcacgaagggaaacggcaaaccgccgtgcgcgggcagtgggcggcttcggtgttgtcgctggttttgctcggttatctgtttgcttcgctgcctttaatcagccctttggtcaatgcggtggcgattccgtggttttcttgggtattgacgccgctggcgttgctgggttcggtcgtgccgtttgcgcctttgcaacagttgggggcatttttggcggaatatactttgcggtttttggtgtggcttgccgatgtgtcgcccgagtttgccgttgccgccgcacctttgccgctgttggtgttggcggtgtgtgccgctttgctgttgctgctgccgcgcggcttgggtttgcgtccgtgggcggtgttgctgttggcagggtttgtgttttaccgttcacccggcgtgccggaaaatgaggttgcggttacggtttgggatgcggggcagggtttgtcggtgtcggttcagacggcaaatcatcatcttttgtttgacaccggaacggcagcggcggcgcagatggggattgtgccgagtttgaatgcggcgggtgtccgccgtttggacaagctggttctgtcgcatcacgacagcgaccacgacggcggttttcaggcagtcggcaagataccgaacggcgggatttatgccgggcagccggaattttatgagggggcgcggcattgtgcggaacagcgttggcaatgggacggcgtggattttgagtttttgatgccgtctgaacgcaaaaacatcgatgataatgggaaaagttgtgttttgcgtgttgtggcgggcggtgcggcactgctggtaacgggcgatttggatacgaagggcgaggaaagcctggtcggcaagtatggaggcaacctgtacagccaggttttggttttgggacatcacggcagcaatacgtcctcgtcgggcgtgttcctcaatgccgtctcgcccgaatatgccgttgcttcaagcggttatgccaacgcctacaaacatccgaccgaagcggtgcaaaaccgtatccgtgcacacggcatcaaattgttgcgtaccgatttgtcgggcgcgctgcaattcggcttggggcgcggcggcgtgaaggctcaacgtttgagagggtataaattctattggcagaaaaaaccgtttgaatga

SEQ ID NO: 46776 - DNA, 444 bp, Neisseria meningitidis
ttggcgttgggacatagatgccgccgctttggaacagataaaataacttcccgtcccttaagacgacaaccgcaggagaaccctatgaatatcaaacacctgattaccgccgcactcattgcctcagccgcctttgccgcgcaggcagccccgcaaaaacccctagccgccgcccaaaccgcgcaacatccggccgtttggatcgatgtccgttccgaacaggaatttagcgaaggtcatttgcacaacgcggtcaacatccccgtcgaccaaatcgtccgccgcatacacgaagccgcgcccgacaaagacacgccggtcaacctctactgccgcagcggacggcgtgccaaagccgcccttcaggagctgaaaaaagcaggttatacaaatgttgccaatcacggcggttatgaagacctgctcaaaaaagggatgaaatga

SEQ ID NO: 46777 - DNA, 912 bp, Neisseria meningitidis; identical to SEQ ID NO: 44117

SEQ ID NO: 46778 - DNA, 672 bp, Neisseria meningitidis; identical to SEQ ID NO: 38125

SEQ ID NO: 46779 - DNA, 1635 bp, Neisseria meningitidis; identical to SEQ ID NO: 45745

SEQ ID NO: 46780 - DNA, 684 bp, Neisseria meningitidis; identical to SEQ ID NO: 45567

SEQ ID NO: 46781 - DNA, 684 bp, Neisseria meningitidis
atgcaacacgacgtttacgactacaccgcgcatacggtttctaaaaacaccgtcctgcagaaaacctaccgcctgctcggattttcattcattccggcagccgcaggcgcggcacttgccgccaatgccggtttcaatttttacgccgccttcggttcgcgctggatagggtttgccgtcgtgttggcgtttttctacggtatgatccacttcatcgagaaaaaccgttacagcaataccggcgttaccctgctgatggtattcacattcggtatgggcgtattgatcggccccgtgctgcaatacgcgctccatattgccgacggtgcgaaaatcgtcggcattgccgccgcgatgaccgccgccgtctttttaacgatgtccgccttggcgcgccgaacccggctcgatatgaacgcgctcggacgcttcctgaccgtaggtgcggtcattctgatggtcgccgtggttgccaatctgtttttgggtattcccgcactcgccctgaccatttccgccggttttgtcttgttcagttccttaatgattatgtggcaggtacgcaccgtcatcgacggcggcgaagacagccacatcagcgcggcactgacactgtttatctcgctttacaacatcttcagcagcctgctgaacatcctgttgtctttaaacggcgaggattga

SEQ ID NO: 46782 - DNA, 954 bp, Neisseria meningitidis
ttgcacaaatatagaaaacatccgcacaaggagggatatatggatgccgtacaattaaaatcatttgtcgccgtcgcgcacgagggcaaccttacccaagccgccaaacgacttttcctttcccagcctgccgtttccgcccaaattaaagcccttgaagaatatgtcggcacgccgctgttcaggcgcacggggaaaggcatggtattgacgcgggcgggcgaaatactgttgcccgaagcggaatccctgctgcaatacaaacacaagctggagcattttgccaaaacgctggcaggcgattattcggaagagaccagtttgggcattatccaccccatcgattcggcaaaactcgtcgcgctgacggacaatatcggtcaaacagcccccaaaacgcgcctgcacatccaatacggaatgagcggcgaaatcctctcgcgcatccaacacaaaaccctgcacggcggctttatactcggcaacgccgcccaacgcggcatccgcagcgtattcctgcaaaacctgacctacgcgctgatttgcccgcaaagccaatatccccatctgacccgctcccttccgcagagcctgcaagaatgcgtatggatagaaatgtcgggcgtgtccggaagtaggaagcacctgcaccagttttggcgcagcaaccggctctcacccaaaaaacagatcttgtgcgactacccccaaaccattatcgatttggttgcaggcggtataggtgtggcaatggtgccgggaaacaaagccgaagcggcggcaaaagaaggcgcgggcgtggctattatcgaatcgtgccgccacagtatgccgctcaatttcatttatgcggaagaatacgaggataatccccacgtctcactcctgctcgagtgcattgaaaaagtatggggagtgcaggcggtgcagccgcccgttgtctcggacaactga

SEQ ID NO: 46783 - DNA, 654 bp, Neisseria meningitidis
atgcaggataatgctttgacaatcgccttatccaaggggcgcatttttgaggagacgctgccgctgcttgccgctgccggcattgttccgactgaagagcctgaaaaatcgcgcaagctgattatcgggacgaaccatgaaaacatccgccttgtcattgtccgcgcaaccgatgtgccgacttatgtccgctacggcgcggcggacttcggcattgcgggcaaagacgtgctgatcgaacacggcggcacggggctttaccggcctttggatttggagattgccaagtgccgcatgatggttgctgtgcgtaaagggtttgattacgaagcagcttcgcaacccggatgccgtctgaagattgccacgaagtatcctgaaatcgcggcatctcattttgccggcaagggtgtccatgtggacattatcaaactgtacggctcgatggaacttgcgccgctggtcggcttgagcgatgcgattgtggacttggtttcgacgggcaacaccttgaaggcaaacggcttggaagcagtcgaacacatcgtcgacatttccagccgcctggtggtcaacaaggctgctttgaaaacgaaatacgcgctgctggagccgattattcaggcgttcggcggcgcagtgaaggcgaagtaa

SEQ ID NO: 46784 - DNA, 465 bp, Neisseria meningitidis; identical to SEQ ID NO: 45291

SEQ ID NO: 46785 - DNA, 756 bp, Neisseria meningitidis; identical to SEQ ID NO: 39656

SEQ ID NO: 46786 - DNA, 435 bp, Neisseria meningitidis
atgtgcgggttgtggctgctgcgcgccctgactgccaaactgccccaacagcgttatgcggctttgtttattacactgttttttgccgcagtattggtgttcgggcggcatgattcgatgtattggtatcccgtcctcgtcaatctgatgatgttggcggtgttcggcggcagcctgtttgccgggcagacggtgattgaaaaacttgcgcggctgcaacagcccgacctgcctgaaaaagctgtgcgctatacccgccgggtaacgcaggtttggtgcgtattctttattgccaacgggacgcttgccgctttgttggcacggttggggcgatatgattggtgggcggtttataccggcgtgattgcctatgtattgatggggatgccgtttgccggcgaatggctttaccgcaaactcgttttgaaagtctga

SEQ ID NO: 46787 - DNA, 201 bp, Neisseria meningitidis; identical to SEQ ID NO: 36765

SEQ ID NO: 46788 - DNA, 825 bp, Neisseria meningitidis
atggggcgcggacgaggtgaaacacgagttgcagcggttggggctggtgtgaagatgaggctgaccgacacacattgccatcttgccgattctgttttgcgcggcaatctggcgcaggtgcttgccgaagcgcgacaggcgggtgtgtggcggtttatcgttcccgcgacgcgcccgcaggattggcaaagcgtggcggaactgtcggaaatgccgtccgaacacggtcaaatccgtattgcgctcggcatccatccttggttttcagacggcattgccgagcgtgattgcgtccgcctggaaacgatgttggcacgttatccgcaggcatgggtcggcgaaatcggcttggatttttacgacaaaacccaaacgccgccgcagcgcgaacggcaaatccaagttttcgtccgccagcttgccatcgcgcaaaccctgcgccgccgcgtgattatccataatctcaaagccaccgccgacatcgccgccgccgtcaaacagacaggctttgcccaaggcggcatcgttcacgccttctcaggcagcgcggaagaagcgcgcgtgttgacgaaactgggtttcaaaatcggcatcggttcgttgttgctcaatccgaacgcgcgtaaagtgcgcgatacgcttaaagccttgaacgacggggatttcgtattggaaaccgacagcccgtttatgctgaaaaaagagattaatacgcctgccaacattcttcggattgccgaaattgccgcgcagatacgcggtaccggcgcggcggaaatcgccgcgataacggaacgcaatgccgacagcctgctccgtccctag

SEQ ID NO: 46789 - DNA, 378 bp, Neisseria meningitidis; identical to SEQ ID NO: 37228

SEQ ID NO: 46790 - DNA, 1281 bp, Neisseria meningitidis; identical to SEQ ID NO: 44844

SEQ ID NO: 46791 - DNA, 684 bp, Neisseria meningitidis; identical to SEQ ID NO: 45197

SEQ ID NO: 46792 - DNA, 624 bp, Neisseria meningitidis
atggaacgcaaagaacgcctgcgtgcaggcattgccgcgatggggctggatatttcggaaacggcgcaggacaggcttttggcctatgtggatttgttgaaaaagtggaacaaaacctacaatctgaccgccctgcgcgacgaggaaaaaatgattgtccatcatcttttggacagcctgacgctgctgccccatatcgagggtgtgcaaacgatgctggatgtcggttcgggcggcggtcagcccggcattccggcggcggtgtgccgtccggatgtgcagataacccttttggatgcaaatacgaagaaaacggcttttttacagcaggcggttatcgagttggggttggacaatgtgcgcgtggtatccggacgcgtggaggcggtttcggacgtgcgtgccgatgtggttaccagccgtgcgtttgcagaactggcggactttgtgtcgtggacggggcatctgttgaaagacggcggatactgggcggcgatgaagggcgtgtatccgcagggggaaatcggccgcctgccgcaggatgtgtgcgttgaaaaagtccaaaggctcgacgtgccaggcttggatgcggaacgccatatcgtcatcctgagcaagcgttga

SEQ ID NO: 46793 - DNA, 1674 bp, Neisseria meningitidis; identical to SEQ ID NO: 44924

SEQ ID NO: 46794 - DNA, 660 bp, Neisseria meningitidis; identical to SEQ ID NO: 44402

SEQ ID NO: 46795 - DNA, 270 bp, Neisseria meningitidis; identical to SEQ ID NO: 38590

SEQ ID NO: 46796 - DNA, 798 bp, Neisseria meningitidis; identical to SEQ ID NO: 36554

SEQ ID NO: 46797 - DNA, 1044 bp, Neisseria meningitidis; identical to SEQ ID NO: 44454

SEQ ID NO: 46798 - DNA, 723 bp, Neisseria meningitidis; identical to SEQ ID NO: 45767

SEQ ID NO: 46799 - DNA, 327 bp, Neisseria meningitidis
ttgaccggtgcccattacggtttgcgcgattgggcgatgcaacgtgcgactgcggttattatgttgatttataccgttgcacttttagtggttctattttccctgcctaaagaatattcggcatggcaggcattttttagtcaaacttgggtaaaagtatttacccaagtgagcttcatcgccgtattcttgcacgcttgggtgggtatccgcgatttgtggatggactatatcaaacccttcggcgtgcgtttgtttttgcaggttgccaccatcgtctggctggtcggctgcttggtgtattcaattaaagtaatttgggggtaa

SEQ ID NO: 46800 - DNA, 462 bp, Neisseria meningitidis; identical to SEQ ID NO: 45545

SEQ ID NO: 46801 - DNA, 1653 bp, Neisseria meningitidis
atggttgcctatgttttcctatttttgtttgtaacggcggcgttggtgctgattatcaggtcgcactaccgctggacgtattttttcgcatccgcgctgtttgtctttttggcgggcggtatgctgatgttgacggctcagtggcagcgcgccttgaatttcgcttcggtctggtttgtggtgctgatactgttccacaggctgaaaatccattattacaaacagccgctgttgatttccgactttttgctgattgccgactggcggaattgggaaacgctgtttcattataaggaagcggttatcggtatggcggggctgctggctttggcggcatatgcggttttcggctggagcggtgcggattctttgggtgtgccgtggcggtgggcgggcgcggcgttgtttgcggcggcgttcgtgtcgatgtggtatttttccaaacatccgggcgcggtaaagacgtggctggactcgctgccggacgacgggcgcgacgtgtttttgaacctgccgatgtcctgtcgggcggtgtttttccaagtacccgtgttcgagggcgacggggaagcgtttgctaaacagatgccgtctgaaacccagccgtgcggcatgtcggatgaaaaacccgatattgtcgttaccctgatggaatcgacgctcgatccgcactgtttcgactttgctgccgccaagattcccgatttgaaaatgttcgggcggcaggaagataccgtattttcctcacctttgcgcgtgcatactttcggcggcgcaacgtggaagtccgaatttgcgtttttggcgggtgttccgtccacggatttcggcgcgttggcaagtggcgtgttttactcggtcgtgccgcatttgcagaccggtttggtccgcaacctgcgcgaacacggttatttttgcgtggcactctcgccgtttaccaagggcaactacaatgccaaggcagcatatgaccatttcggctttaatctgatgttccagccgcaagatttgggctatcccgcgccgatgggcaaaaacctgtggcatatttccagtgaggaaatgatgcagtatgcgcggatgattttggaaaaacgccatcccgatttggaaaacgtgcggcagccgatgttcgtatatgtgctgaccatgaaggagcacgggccgtatcggacggataccgacaatgtgtttgatttggatgcacctgatttgaatgcgaaaaccgtatccgcgcttaacgactacatcgggcgcattgccgatttggacaaagcggtggaaagtttcgaccgttatctgcacgaacgcggcaaaccctttgttttcggttatttcggcgatcatcaggtaccgtttgagggcgtgtccgtcaggaagaaatgggattacgcgcagccggattatgtaacgcagtttgccgtcaggagcaatattgccggcggattcgtacagcggcaggatttcctcgaccttgcctttgcaggcggcgtgctgatggaggcggctggtctggaagccaaagacggcttcatgcgtgcgaatatggcgatgcgcggtttgtgcggcggagggttggaagactgcccgaaccggaaactggtcggagactatcggaactatctgtacgacgttttgaaaattgccagttag

SEQ ID NO: 46802 - DNA, 1248 bp, Neisseria meningitidis
atgttttctctagaggcttggataggcttgaggtatctcagggcgaaaaagcgcaacggctttatgtcgtttatcacgatggtttcgattgccggaatcgccttgggcgtaaccgcgctgattgtcgtcttgtcggttatgaacggctttcagaaagaaatacgcgggcagctcctgaatgtcgcgccgcacgccgaaatcggctatatcgacaatacggatacggattggcgcaacctgcttcggtttacggaaaaccgcaaaggtattttggctgccgcgccctatgtttccaatcaggctctgctggcaaacgcgggcgaaatcaggggcgtgcagatgcgcggcattttgccgtctgaagaacgcaaagtggtggaatatggcgacaaaatgccggcaggcaaatttgaagacctgattccgggcgagtttgacattatcctcggtgtcggcttggcggaggctttgggggcggaagtcggcaataaagttaccgtcatcacgccggagggcaacgttacccctgccggagtcgtgccgcgcctgaagcagtttaccgtggtcggtctggttaagacgggcgtttacgaagtggacaactcattggcgatgacgcatatccaagacgcgcgcgtactgtaccgcttggataaggaagttgcggggctgcggctgaaactcgccgacccgcaaaacgcccccgccttgacggcaacactgattccggaggcgcaaagggatacggtttgggtgcgcgattggacgttcagcaatcgaagctattttgaggcggtcgagttggaaaaacggatgatgttcatcatcctgacgctgattatcgccgtggcggcgttcaaccttgtctcttccttggtgatggcggttacggaaaagcaggcggacattgcgattttacggactttgggcctttcccctggcggcgtgatgaagatttttatggtgcagggcgcgttttcaggctttttcggcacgctggcgggtgtggtctgcggcgtgcttttgggttggaacgtcggcagagtcgtggcattttttgaaaacctgctcggtgtccacctcatcaattcgcaggtttattttatcgactacctgcccagcgatgtcgatatgggcgacgttgccctgattgcctgcatttccttgggactgtctttcgttgccacgctctacccgagctggcgtgcctcaaaaacccaaccggcggaggctttgcgttatgagtga

SEQ ID NO: 46803 - DNA, 723 bp, Neisseria meningitidis; identical to SEQ ID NO: 45562

SEQ ID NO: 46804 - DNA, 288 bp, Neisseria meningitidis; identical to SEQ ID NO: 36767

SEQ ID NO: 46805 - DNA, 474 bp, Neisseria meningitidis; identical to SEQ ID NO: 44983

SEQ ID NO: 46806 - DNA, 1146 bp, Neisseria meningitidis
atgaccgaaactcaatccctagagcttgccaaagagctgatttcccgaccatccgttacccctgacgacagggattgccaaaaactccttgccgaacgcctgcacaaaatcggttttgcggctgaagaactccatttcggcgacaccaaaaacatctggttgcgacgcggcacgaaagctcccgtcgtctgttttgcagggcataccgacgttgtaccgacaggtcctgtcgaaaaatgggattcgcccccgttcgaaccggccgagcgcgacggaagattatacgggcgcggcgcggcagacatgaaaaccagcatcgcctgcttcgttaccgcctgtgaacgcttcgttgccgaacatcccgaccaccaaggcagcattgcgcttctgattacttccgacgaagagggcgacgcgttggacggcacgaccaaagtcgtcgatgtattgaaagcgcgcgacgagcttatcgactactgcatcgtcggcgaaccgacagccgtggacaaattgggcgatatgattaaaaacggccggcgcggctcgctgtcgggcaacctgaccgtaaaaggcaagcaaggacatattgcctatccgcatttggcaatcaatcccgtccacacttttgccccggccttgttagagctgacgcaggaagtctgggacgaaggcaacgaatactttccgccgaccagctttcaaatttccaatatcaacggcggtacaggcgcgaccaacgtcattccgggcgagctgaacgtcaaattcaatttccgcttctccaccgagtccaccgaagcagggctgaaacaacgcgttcacgccattttggacaaacacggcgtgcaatacgatttacagtggtcgtgttcggggcagccctttctgacccaagcgggcaaactgaccgacgtggcacgcgcagccattgccgaaacctgcggcattgaggccgaattgtccaccaccggcggcacttcggacggacgcttcatcaaagccattgcaaaagaactcatcgaattaggcccgtccaatgcgaccatccaccaaatcaacgaaaacgtgcggctggacgatattccgaagctgtcggcggtgtatgaggggatattggcgcgcttgttggctggaaatgccgtctga

SEQ ID NO: 46807 - DNA, 1776 bp, Neisseria meningitidis; identical to SEQ ID NO: 39332

SEQ ID NO: 46808 - DNA, 276 bp, Neisseria meningitidis; identical to SEQ ID NO: 44823

SEQ ID NO: 46809 - DNA, 942 bp, Neisseria meningitidis
atgaaaatcctgctcctcctcatccccctcgtcctaaccgcctgcggcacactgaccggcatacccgcccacggcggcggcaaacgctttgccgtcgaacaagaactcgtcgccgcatcgtcccgcgccgccgtcaaagaaatggacttgtccgccctgaaaggacgcaaagccgccctttacgtctccgttatgggcgaccaaggttcgggcaacataagcggcggacgctactctatcgacgcactgatacgcggtggctaccacaacaaccccgaaagtgccacccaatacagctaccccgcctacgacactaccgccaccaccaaatccgacgcgctctccagcgtaaccacttccacatcggtcttaaacgcccccgcagccgccctgactagaaacagcggacgcaaaggcgaacgctccgccggactgtccgtcaacggcacgggcgactaccgcaacgaaaccctgctcgccaacccccgcgacgtttccttcctgaccaacctcatccaaaccgtcttctacctgcgcggcatcgaagtcgtaccgcccgaatacgccgacaccgacgtattcgtaaccgtcgacgtattcggcaccgtccgcagccgtaccgaactgcacctctacaacgccgaaacccttaaagcccaaaccaagctcgaatatttcgccgtcgaccgcgacagccggaaactgctgattgcccctaaaaccgccgcctacgaatcccaataccaagaacaatacgccctctggatgggaccttacagcgtcggcaaaaccgtcaaagcctcagaccgcctgatggtcgatttctccgacattaccccctacggcgacacaaccgcccaaaaccgtcccgacttcaaacaaaacaacggtaaaaaccccgatgtcggcaacgaagtcatccgccgccgcaaaggaggataa

SEQ ID NO: 46810 - DNA, 2073 bp, Neisseria meningitidis
gtgcgacactcgactgcctcgaaaacggcgcagactgatttcagacagcatcaaaacatgatgaaactcaatccccaacagctcgaagccgtccgctacctcggcggcccactgctcgtccttgccggtgcaggcagcggcaaaaccggcgtgattactcaaaaaatcaagtatttgattgtcaatgtcggctatctgccgcataccgttgccgcgattacctttaccaataaagccgccgcggaaatgcaggagcgcgtcgccaaaatgctgcacaaatcgcaaacgcgcgggctgacgatttgcacgttccactctttgggcatgaagattctgcgcgaagaggcgaaccatatcggttacaaaaaaaacttctccattctcgattctaccgacagcgcgaaaatcatcggcgaactcttaggcggtacgggcaaagaagccgtattcaaggcgcagcaccagatttccttgtggaaaaacgatttaaaaacgcctgaagatgtcgttcagacggcatcgaacatttgggaacaacaaaccgcacgcgtgtatgcgagctatcaggaaaccttacaaagctatcaggcagtggacttcgacgacttgatccgcctgcctgccgtgctgttgcagcaaaacagcgaagtgcgcaacaaatggcagcggcggctgcgttatctgctggttgacgaatgccaagatacgaatacctgccaatttacgttgatgaaacttctgaccggcgcagaaggtatgtttaccgccgtcggcgacgacgaccagtccatctacgcatggcgcggcgcgaacatggaaaacctgcgcaaaatgcaggaaaactatccgcagatgaaggtcatcaaactggagcaaaactaccgctccaccgcgcggattctcaaaatcgccaacaaagtcatcgagaacaaccccaagctgttcaccaaaaaactttggtcgaaattgggcgaaggcgagcccgtcaaagtcgttgcctgccaaaacgagcagcacgaagccgactgggtcgtcagccaaatcgtcaaacaaaaactcatcggcggcgacaaaacccaatatgccgatttcgccgtgttgtaccgcggaaagcatcaggcgaggattttcgaggaagcattgcgcggcgcgcgcatcccctaccgtctctccggcggacaaagctttttcgacaaagccgaaatcaaagacgtgttgtcttatgtgcggctgcttgccaaccccaatgacgatcccgcctttctgcgtgccgttaccacgcccaaacgcggcatcggcgatgtcacgctgggcaagctcaacacttacgcgcacgaacacgaatgcagcctgtatgaagccgcacaaaacgaagaagcccttgccacgctgaacaataccaaccgccaacacctgcaagcctttatggatatgttcggcagctaccgcgccaaagcggaaaccggcgaagcaggcgagttcatcaacagcctgctcgaagaaatcgactatgaaaaccatttgatgcaaaacgaagaaggcaaggccggcgaaatcaaatggcgcaatgtcagcgatttggtatcatggtttgcgcgaaaaggcggggaagacggcaaaaacatcatcgaactcgcccaaaccgtcgccttgatgacgcttttggaaggaaaagacgaagaagaaaccgatgccgtctcgctatccacgctacacgccgccaaaggtttggagtatccgtatgttttccttgtcggttgcgaagaaggcgttttgccgcacaacgacagtatcgaagagggcaacgtcgaagaagaacgccgcctgatgtacgtcggcatcacccgcgccaaacgccaactcacgctgacccactgcgtcaaacgcaaaaaacaaggcacatggcagttccccgaacccagccgattcatagacgaaatgccgcaggaagatttgaaaatcctggggcgcaaaggcggcgagccgattgtcagcaaggaagaaggcagacgcaaccttgccgatataatcggaaggctcgacagcatgaaaaaaggcaatccgtcggattaa

SEQ ID NO: 46811 - DNA, 594 bp, Neisseria meningitidis
atgtctgaaatgttgaaccatgtggcatcctgccgcctgccgaccgaatggggcgtatttacgatgcacggctttgaagaggcaaacgggcaggaacacgtcgcgctgaccgtcggtaatttttcagacggcaatccggttctgacgcgcatccactccgaatgcctgacgggcgatgcgctgttctcgagaaaatgcgactgcggacctcaacttgaagcggccatgagggcggtacagacagaggggcgcggcatcatcgtctatctgcgtcaggaaggacgcggcatcgggctgattaacaaaatccgcgcctatcatctgcaagaccaaggtatggatacggttgaagccaatttggcactcgggctgcccgtcgatgcccgcgatttccgtttggcgcaatctatctacgaatatctgggcatccgctcggtcaaactgctgaccaacaaccccgaaaaaatccaaaccctgaaagatgcggggattaacgtggtcgaacgcatccccctgcacgtcggggaaaaccttgaaaacaaacgctacctccaaaccaaagcagacaagctggggcatctgatgtcggaataa

SEQ ID NO: 46812 - DNA, 297 bp, Neisseria meningitidis
ttgactgtggaatattttatgttgctggcaacagacggggagaatgtgtatgaagcgcgtatggcggcacgtcccgaacacctcaaacggctggagacgctgaagtcggaaggccggctgttgacggcaggcccgaatcctttgccggaggactccaaccgcgtttcgggcagtttgattgtggcgcagttcgagtctttggatgcggcagaggcgtgggcggaagacgatccctatgttcatgcaggcgtgtacagcgaagtgctgatcaagccgtttaaagcggtgttcaaataa

SEQ ID NO: 46813 - DNA, 198 bp, Neisseria meningitidis; identical to SEQ ID NO: 36305

SEQ ID NO: 46814 - DNA, 612 bp, Neisseria meningitidis; identical to SEQ ID NO: 36530

SEQ ID NO: 46815 - DNA, 696 bp, Neisseria meningitidis
atgaaactgaaaaccttagctttgacttcattgaccctgttggcattggccgcttgtagcaaacaggctgaaaccagcgttccggcagacagcgtccaaagcagctcatctgctccggcagccccagccccattgaccgaaggcgtgaactacactgtattgtccacgcctatcccgcaacagcaggccggcaaagtcgaagtcttggaatttttcggctacttctgcccgcattgcgcccatcttgagccggtcttgagcgagcacatcaaaacgtttaaagacgatacctatatgcgccgggagcatgtcgtgtggggtgatgaaatgaaacctttggcacgtttggcggccgcagtggaaatggccggtgaatcagataaagccaacagccatattttcgatgcgatggttaatcaaaaaatcaatctggccgataccgataccctgaaaaaatggctgtccgagcaaacagcgtttgacggcaaaaaagtattggctgcatttgaggcttctgaaagccaagcgcgtgcggctcaaatggaagagttgaccaataaattccaaatcagcggcacaccgactgtgatcgtcggcggcaaataccaagttgaatttaaagactggcagtccggtatgaccacgattgaccagttggtggataaagtacgcgaagagcagaaaaagccgcaataa

SEQ ID NO: 46816 - DNA, 876 bp, Neisseria meningitidis; identical to SEQ ID NO: 44815

SEQ ID NO: 46817 - DNA, 792 bp, Neisseria meningitidis
atgattactgtgaacacactgcaaaaaatgaaggcggcgggcgaaaaaatcgctatgctgaccgcttacgaatccagttttgccgcgctgatggacgatgccggcgtggaaatgctgctggtcggcgattctttggggatggcggttcaggggcggaaatcgacgctgcccgtcagcctgcgcgatatgtgctatcacaccgaatgtgtagcacgcggtgcaaaaaatgcgatgattgtcagcgatttgccgtttggtgcatatcagcagagtaaggagcaggcgtttgccgccgccgccgaactgatggcggccggcgcgcatatggtcaaactcgaaggcggcgtgtggatggcggaaacgactgaatttctgcaaatgcgcggcattccggtctgtgcccacatcggtctgaccccgcaatccgtgtttgccttcggcggatacaaggttcagggccgcggaagtaaggcgcaggcgttgcttaacgatgccaaggcgcatgacgatgcgggggcggcggtcgtgttgatggagtgtgttcctgcggaactggcaaaaaaggtaactgaatccgtttcctgtccgaccatcggcatcggcgcgggcgcggattgcgacggtcaggttttggtgatgcacgatatgctcggtattttcccaggcaaaacggcgaaattcgtcaaaaactttatgcacgggcaaagcagcattcaggcggcggttcgggcgtatgttgccgaagtcaaagccaaaactttccctgctgcggaacatatttttgcagactga

SEQ ID NO: 46818 - DNA, 966 bp, Neisseria meningitidis; identical to SEQ ID NO: 39688

SEQ ID NO: 46819 - DNA, 1188 bp, Neisseria meningitidis; identical to SEQ ID NO: 45497

SEQ ID NO: 46820 - DNA, 1110 bp, Neisseria meningitidis
atgtccttgacccgcctaatcttgaaattctatgcactgttgcgcctttttttgggcaaaaacgcccgcaccgcatggatttcgcatcccgcctgtgccgggcacgaacccggcgcaaaccatcccgattcgcccgaccgcatcctctgcatcgagcaggcattgcgccgcgccggtatttggcagcacctccaaaccatagaggcggaagaaatcagcgatacgcgcctcgcacttgtccactcgagcaaatatctgaaccgtttggaatcttgcctgccccaaaaaggcaagattttccgcctggataacgacactgcaatcagcacaggctcgctgtctgccgcacactttgccgccggttcggcagttcaggcagtcgacatggtcatgaaccgtaaagcatggcatgccttttgcgccgcccgcccgcccggacaccatgcgggcagcggcaaagccggcggattctgcctgctgaacaacgttgccgccggcgtcatgcatgccattgccgaataccgcctgaaacgcattgccgtcatcgatttcgatgtccactacggcgacggtacggcagaaatattcaaagacgatccgcgcatcctgtttttcaacctgtttgaaaccgaccttttccccttccccgaaaacaacgatatgcccgacggcggcaatatggtgcacctgcccttgccgccgggaacgggcagccgcacattccgcgaagccgtccgcaggcagtggctgccccgacttgccgcattcaaacccgaactggtgctgctgtcggcaggattcgacgcacaccgtctagacgaatcgggcaggctcaacctgcacgaggcggattttgcctggctgacacacaaaatcattcagacggcatcgggctgccccggcaaaatcgtatccgtactcgaaggcggctacacccttgaacctctggcacaatctgctgccgagcatatccgagtgctggcagggctgggcaaatccgatgccgcaaccgcctatcagaaaacactggacccaacaaaaaaacggtttgccaaaccgaaaaccggacaggtgcgccaacctacccaatccgaccgttacgacatatag

SEQ ID NO: 46821 - DNA, 354 bp, Neisseria meningitidis; identical to SEQ ID NO: 39889

SEQ ID NO: 46822 - DNA, 1458 bp, Neisseria meningitidis
atgaaaccaaccatcgcgcttgtcggccgccccaacgtcggcaaatctactttattcaaccgtttgacgcgcaccaaagacgcgctcgtacacgacctgcccggtctgacgcgcgaccgccattacggacacggcaaagtcggcagcaaaccttatttggtcatcgataccggaggtttcgagccggttgtggacagcggcattttgcacgaaatggcaaaacaaaccttgcaggctgtcgatgaagctgatgcggttgtgtttttggtggacggccgtaccggcctgaccccgcaagacaaaatcattgccgaccgcctgcgccaaagcccgcgccctgtttatctggcggtaaacaaaggcgaaggcggcaacagggccgtgcttgccgccgagttctacgaacttgctttgggcgacccttatgttatttcaggtgcgcacggcgatggcgtgtattatctgattgaagatattttggaaactttcccagagccggaagccgaagaagccgatgcaaaacatcccgtctttgccgtcatcggccgtccgaacgtcggcaaatccacactggttaacgccatcctcggcgaagagcgcgtgattgctttcgatatggcaggcacgacacgcgacagcatccacatcgatttcgaacgcgaaggcaaaccgtttaccatcatcgataccgcaggcgtgcgccgtcgcggcaaagtggatgaagcagtagaaaaattctccgttatcaaagcgatgcaggcggttgaagcggcaaacgtcgctgttttggtattggacgcgcagcaggacatcgccgaccaagatgcgacgattgccggttttgctttggaagcaggccgcgccttggtggttgccgtcaacaaatgggacggcatcagcgaagagcgtcgcgagcaagtgaaacgcgatatcaaccgcaaactgtatttcctcgattttgccaagttccactttatttccgcattgaaagagcgcggtatagacggtttgtttgacagcattcaggctgcctacaacgcggcgatgattaagatgccgacgccgaaaatcacgcgcgtattacaaagcgcgatcgagcgtcagcaaccgccgcgtgccggcttggtgcgtccgaaaatgcgttatgcccaccaaggcggcatgaaccctcccgtaattgtggtacacggcaattcgctgcacgcgatttccgacagctatacgcgctatctgacccaaacgttccgcaaagccttcaatctgcaaggcacgccgctcagaattcaatacaatgtttcggaaaacccgtatgaaaatgcggaagacaaaccgaagaaaaaaccgctgcgccgcgtcagcctgagcaaccgtattgagaaacgcgaaggccgaaaggaagagaaaaaccgcttcaagaagaaaaccaaagtcagtgtgaaaaaacaattcagcaaataa

SEQ ID NO: 46823 - DNA, 489 bp, Neisseria meningitidis
atgatgagtaataaaatggaacaaaaagggtttacattgattgagatgatgatagtcgtcgcgatactcggcatcatcagcgtcattgccataccttcttatcaaagttatattgaaaaaggctatcagtcccagctttatacggagatggtcggtatcaacaatactgtcaaacaggttattttgaaaaatcccctggacgataatcagaccatcaagagcaaactggaaatatttgtctcaggctataagatgaatccgaaaattgccaaaaaatatagtgtttcggtaaggtttgtcgataaggaaaaatcaagggcatacagcttggtcggcgttccgaaggcggggacgggttatactttgtcggtatggatgaacagtgtgggcgacggatacaaatgccgtgatgccgcttctgcccgagcctattcggagactttatccgcagatgccggctgcgaagctttctctaatcgtaaaaaatag

SEQ ID NO: 46824 - DNA, 1446 bp, Neisseria meningitidis
atggagactctcatggacacacaaacttacaactacaaagtggtgcgccagttcgccatcatgactgtagtttgggggattgtgggtatgttggtcggcgttatcgtcgccgcccagctttttgctcctgccctcgacttgtctaatatcggaccttggttccacttcggccgcctgcgtccgctgcacaccaatgcggttattttcgcatttggcggttgtggcctgatcggcacatcatactacgttgtccaacgtacttgtaatacccgtcttttcggcggttggctgccggcatttaccttttggggctggcaggcggtaatcgttgccgccgtcgtcagcttccctatgggttggacccaaggtaaggaatatgccgaactggaatggccgatcgatattctgattactttggtttgggtggcttacgccatcgtattcttcggtacgattgccaaacgtaagattaaacatatttacgttgccaactggttctacggcggctttattttggcggtcgcacttttacacatcgtcaacaatatcagcatcccggccggtttgatgaagtcataccccgtctattccggtgcgattgatgctatggttcaatggtggtacgggcataacgccgtgggcttcttcctgactgccggcttcttgggtatgatgtactatttcgtacccaaacaagcagcccgccccgtttactcctaccgcctgtccgtcgttcacttctgggcgttgattttcacctatatgtgggcgggtccgcaccatcttcactacactgcgctgcctgactggacgcaatctttgggtatggttctgtctttgattctgttcgcaccctcttggggcggtatgattaacggcatcatgaccttgtccggcgcgtgggacaaactgcgtacagacccgattcttaaattcctgattgtatccttgtccttctacggtatgtctacctttgaaggcccgatgatgtcgattaaaacggtcaatgcattgagccactatacggactggaccgtcgcgcacgttcatgcgggtgcgttgggctgggtaggctttgtaaccatcggttccgtctattacatgattccccgtctgttcggcaaagaacagatgcacagcaccaagctggtagaagcacatttttggattgcgaccatcggcgtggttctgtatatcgctgccatgtggattgccggtgtgatgcagggtttgatgtggagttctttgaacgatgacggtacgctgacctactcgtttgtcgaatccgtaaaacgcaccatgccttactacgtgatccgttttgcaggtggtttattgtatctgagtggtatgtgcattatggcgtacaacgtgtaccgcacagccatcggtggtaaagcagtcgatgccgaaatccctgcggtttcccaaacacagcaccactaa

SEQ ID NO: 46825 - DNA, 789 bp, Neisseria meningitidis; identical to SEQ ID NO: 44579

SEQ ID NO: 46826 - DNA, 1539 bp, Neisseria meningitidis; identical to SEQ ID NO: 45340

SEQ ID NO: 46827 - DNA, 1455 bp, Neisseria meningitidis; identical to SEQ ID NO: 44854

SEQ ID NO: 46828 - DNA, 669 bp, Neisseria meningitidis; identical to SEQ ID NO: 44164

SEQ ID NO: 46829 - DNA, 294 bp, Neisseria meningitidis
atgacagctaaaggacaaatgttgcaagatcccttcctgaacgccctgcgtaaagagcacgttccggtttcgatttacctggtcaacggcatcaaactgcaaggtcaggttgaatctttcgaccaatacgtcgttcttctgagaaacacttccgtcacccaaatggtttacaaacacgccatttccaccatcgtaccggcacgctccgtcaacctacaacatgaaaacagaccccaagccgcaccggcttcgaccctcgtccaagtggaaaccgtccagcagcctgccgaataa

SEQ ID NO: 46830 - DNA, 537 bp, Neisseria meningitidis; identical to SEQ ID NO: 44233

SEQ ID NO: 46831 - DNA, 291 bp, Neisseria meningitidis
ttgaaggttcccgcaaaacgctatttcacgctggacgagttgtgcggactgttgcaaatcagcccctatggttttgcgcaatggcagcatgattatggtgtggttgtcggttacggcggcgaacgctacacccgtttggatgtggtgaaactgttgaaattgcagagcacgtttgcaccgtatgcagaaggtgcggagtcgggttcggacggcaaccgtccggttacgcttcaggaaatcggagacggtctgaaagagctgttggcggatttggataaggaattgtgctga

SEQ ID NO: 46832 - DNA, 300 bp, Neisseria meningitidis; identical to SEQ ID NO: 38838

SEQ ID NO: 46833 - DNA, 438 bp, Neisseria meningitidis; identical to SEQ ID NO: 39862

SEQ ID NO: 46834 - DNA, 975 bp, Neisseria meningitidis; identical to SEQ ID NO: 39370

SEQ ID NO: 46835 - DNA, 1224 bp, Neisseria meningitidis
atgtctgcgcaatcacaaaacaatcatacgtccccattgatcgtcttgaccacgctgttcttcatgatgggttttattacctgcatgaacgacatccttatccctcatttgaaagaaattttcgacctgtcttacgttcaggcgatgctgatccaattctgtttctttaccgcctatgcggtgatgtccatcccgatgggggcttttgtcggcaaagtcggctacaaaaacggcgttatcggcggctttctgctgacggcggtcggatgcctgctgttttatcctgctgcgggtagccattcttacgcggtatttttgggcgcgttgtttattttggcttccggcgtaacgctgcttcaggtcgccggtaatccttatgttaccctgctggcgaaacccggcaaggaatcggcaacactgacgctggttcaggcgtttaacgctttgggtacgaccattgcgccgcaaatcggcgcgttcctgattctggcggacgcaacccaaaccgtcagcaaggcggaacagatttcttccgtacagattccctatttgggactggcggggctgctgattatccttgccgttttcgtgaaaatgatccggctgcccgacgcgcgcaaaattgccgccgaggaaagcgcgcacaaccacgacggcaaaaccagcgtatggcaatacaaacatctcgtgttcggcacggcaggcattttctgctatgtcggcgcggaggtgtctatcggttcgttgatggtcaacgtattgggttatctgaaagggctggatcatgcttctgccgcgcattacctgtcgttctattggggcggcgcgatggtcggacgtttcctcggttcggcggtgatggcgaaattcgcgcccaaccgttatttggcgtttaacgcatcggctgcggtcgtactgcttgccgtcgcgatggcgacgggtagcggcaatgcggatgtggcgatgtggtcgctgcttgccatcggttttttcaactcgattatgttcccgacgattttctctttggcaaccaaaggattgggaaaatttaccaacgcggcttccggtgtactgtgtaccgcgattgtcggcggtgcggtcgttcctgtcgtgcagggctgggtggcagatacttacaccctgatgtcttcgtttgtcgtttccgtcatctgttatctgtatatcgtgttttttgcggtgtacggatatagggcggacaaataa

SEQ ID NO: 46836 - DNA, 483 bp, Neisseria meningitidis
ttgaaaccggccgtatgcaggagcaagacgatgaatattgaagtagaaatgaaagtattggacgaacggatggcggatgttgtccctgtctatgcaacgaagggttctgcaggtttagatttgcgcgcctgtttggatgaggaagtcgttttgcagccgggtgaaacgtttcttgtgccgacgggtttggcaatttatttggcgaatcccgcatatgccgccgttttgctgccccgttccggcttggggcataaacacggcattgttttgggcaatttggtcggtttgattgactccgattatcaaggggaattgaaggtgtcgttatggaacagaagcagcgaaccgtttactgtcaaaccgtttgagcgtatcgcgcagatggttgtcgtgccaatcgtgcaggcgcgtttcaaacgtgtcgaggaatttgtcggaagcagccggggtgagggcggcttcggcagtacgggtttgcattga

SEQ ID NO: 46837 - DNA, 837 bp, Neisseria meningitidis
atgcaaatcatacataccattcgagaactgcgcgcgtggcgtaaaaatgcgggaaaggtggcatttgtgccgaccatgggcaacctgcacgaagggcatcttgccctcgttcgcgaagccaaaaaacgcgccgacaacgttgttgtcagcatattcgtcaaccgcctgcaattcggtcagggcgaggatttcgacaaatatccgcgtactttgcaacaggatgcggacaagctggaagccgagggtgttgccgttgttttcgcgcccgatgaaaaagaactctatccgaacgtggagcaacggtatagcgtcgaaccgcccaatctgcaaaatgagttgtgcggcaagtttcgtccgggacatttcctcggggtggcgacggtggtgtccaagctgttcaatattgtcgcgccggatgttgcctgtttcggcaaaaaagactatcagcagcttgccgtgattaaaggtttgaccgaggatttgaattttgatgttgaaatagtgcctgtcgatacggggcgcgcggaagacggtttggcactctccagccgcaaccagtatttgagtgcggcggaacgcgacgaagcaccgcgcctgtaccgcgaattaaaggctgttgccgaatccttggcgcagggcagtttggattatgcaggtttggaaaaacgtgccgtccaatccctgacagaatacggctgggtggtcgattatgtcgaaatccgccgcgccgatacgctcgaagtggcgcgggcgggagataagaaactggtggtcttggccgccgcccgtctagggacgacgcgcctgattgacaatttggaaataaaactcccttaa

SEQ ID NO: 46838 - DNA, 924 bp, Neisseria meningitidis
atgccgtccgaacacccgttttcagacggcatttccacacccaaccccaaagaaaccatgaacgacaccgcccaaattaccgccagctacggccgccgctacatcgtgcgcacgcccgacggcacaacctacgaagccagcacgcgcaaaaaacgcgtcgatttcgcctgcggcgaccgtgtccgcatcagccccgtcaacgccgaacaagttgtgattgaagattttttaccgcgccaaagcctgctctaccgccaagacgcgtggaaaaccaaactcatcgccgccaacgttacccaactccttatcgttaccgccgccgtcccgagtccgagcatgcggctgctgcaacgcgccctgcttgccgccgaagccgccggtattgaagccgtcatcgtcctgaacaaagccgacctgcccgaaaccgccctttggcgcgaaaaactcaaattctacgaaacgctgggttatcccgtcatcgaaacccgtgcgctggaaaacgccgacctcctgcgccccgtcctgcaagggcacagcaacatcctgctcgggcagagcggtatgggcaaatccaccctgaccaacgcccttttaggcagccaaaccgcccgcaccggcgacatttccgccgcactcgactcgggaaaacacaccaccacccacgcccggctttatgatttgaacggcgaaacccaactcatcgactccccgggtttgcaagaatttggtttacaccacctccaagccgccgatttgccgcgctatttccccgatttccgccaccttgtcgggcaatgccgcttccacaactgcacccaccgcgccgaacccggctgcgccttcaaagccgccgccgaaaccggggcggcaagccccgaacgcctcgcctttttgcagggcatcaccgacgaactgcccgggtaa

SEQ ID NO: 46839 - DNA, 1230 bp, Neisseria meningitidis
ttgcgggggcaaaatcccgaaatggcggaaagggtgcggtttttatccgaatccgctataaaatgccgtttgaaaaccaatatgccgacaatgggggcggagatgaatacacggaatatgcgctatattcttttgacaggactgttgccgatggcatccgcttttggagagaccgcgctgcaatgcgccgctttgacggacaatgttacgcgtttggcgtgttacgacaggatttttgcggcacagcttccgtcttcggcagggtaggaagggcaggagtcgaaagccgtactcaatctgacggaaaccgtccgcagcagcctggataagggcgaggcggtcattgttgttgaaaaaggcggggatgcgcttcctgccgacagtgcgggcgaaaccgccgacatctatacgcctttgagcctgatgtacgacttggacaaaaacgatttgcgcgggctgttgggcgtacgcgaacacaatccgatgtaccttatgccgctctggtacaacaattcgcccaactatgccccgggttcgccgacgcgcggtacgactgtacaggaaaaattcggacagcagaaacgtgcggaaaccaaattgcaggtttcgttcaaaagcaaaattgccgaagatttgtttaaaacccgcgcggatctgtggttcggctacacccaaagatccgattggcagatttacaaccaaggcaggaaatccgcgccgttccgcaatacggattacaaacctgaaattttcctgacccagcctgtgaaggcagatttgccgttcggcggcaggctgcgtatgctcggtgcaggttttgtccaccagtccaacggacagagccgtcccgaatcgcgttcgtggaacaggatttatgccatggcaggcatggaatggggcaaattgacggtgattccgcgcgtgtgggtgcgtgcgttcgatcagagcggcgataaaaacgacaatcccgatattgccgactatatggggtatggcgacgtgaagctgcagtaccgcctgaacgacaggcagaatgtgtattccgtattgcgctacaaccccaaaacgggctacggcgcgattgaagccgcctacacgtttccgattaagggcaaactcaaaggcgtggtacgcggattccacggttacggcgagagtctgatcgactacaaccacaagcagaacggtatcggtatcgggttgatgttcaacgacttggacggcatctga

SEQ ID NO: 46840 - DNA, 564 bp, Neisseria meningitidis; identical to SEQ ID NO: 44781

SEQ ID NO: 46841 - DNA, 345 bp, Neisseria meningitidis; identical to SEQ ID NO: 39778

SEQ ID NO: 46842 - DNA, 828 bp, Neisseria meningitidis; identical to SEQ ID NO: 38675

SEQ ID NO: 46843 - DNA, 1275 bp, Neisseria meningitidis; identical to SEQ ID NO: 45020

SEQ ID NO: 46844 - DNA, 891 bp, Neisseria meningitidis
atgaacagcccttttcacaacatcggcatcgtaacccgccccaacacgcccgacatccaagacaccgcgcacacgctgattacctttttgaagcagcacggctttaccgtctatctcgacgaagtcggcataaaggaaggctgcatctatacccaagacaccgtcggctgccatatcgtcaacaagaccgaactggggcaatactgcgacctggtcgccgttttaggcggagacggcacctttctctccgtcgcccgcgaaatcgccctgcgcgccgttccgattatcggcatcaaccaagggcatttgggcttcctgacccaaattccccgcgaatatatgacggacaagctattgcccgttttagaagggaaataccttgccgaagagcgcatcctgattgaggccgcactcatccgcgaaggcaaaaccgccgaacgcgccatcgccctcaacgatgccgtcctctcccgtggcggcgccggacagatgattgagtttgaagtcttcgtcaatcgggaattcgtctatacccagcgttcggacgggctgattgtctccacccccaccggatcgaccgcctattcgcttgccgccggcggccccatcatgcaggcaggattgcacgccttcacgctcgtccccatctgcccgcaatccatgaccaaccgccccatcgccattccagacacgtccgaaatcgaaatcctcgttacccaaggcggcgacgcgcgcgtccatttcgacggtcaaacccatatcgacgtgcaaaacctcgaccgcatcaccatccgccgctaccgaaaccccttacgcatcctacatccgaccgactaccaatatttcaaaaccctgcgccaaaaactgcactggggcgaacaattggtctga

SEQ ID NO: 46845 - DNA, 375 bp, Neisseria meningitidis; identical to SEQ ID NO: 38891

SEQ ID NO: 46846 - DNA, 651 bp, Neisseria meningitidis; identical to SEQ ID NO: 45872

SEQ ID NO: 46847 - DNA, 2178 bp, Neisseria meningitidis
atgacacgcttcaaatattccctgctgtttgccgccctgttgcccgtgtacgcgcaggccgatgtttctgtttcagacgaccccaaaccgcaggaaagcactgaattgccgaccatcaccgttaccgccgaccgcaccgcgagttccaacgacggctacactgtttccggcacgcacaccccgctcgggctgcccatgaccctgcgcgaaatcccgcagagcgtcagcgtcatcacatcgcaacaaatgcgcgaccaaaacatcaaaacgctcgaccgcgccctgttgcaggcgaccggcaccagccgccagatttacggctccgaccgcgcgggctacaactacctgttcgcgcgcggcagccgcatcgccaactaccaaatcaacggcatccccgttgccgacgcgctggccgatacgggcaatgccaacaccgccgcctatgagcgcgtagaagtcgtgcgcggcgtggcggggctgctggacggcacgggcgagccttccgccaccgtcaatctggtgcgcaaacgcccgacccgcaagccattgtttgaagtccgcgccgaagcgggcaaccgcaaacatttcgggctgggcgcggacgtatcgggcagcctgaacaccgaaggcacgctgcgcggccgcctggtttccaccttcggacgcggcgactcgtggcggcagcgcgaacgcagccgcgatgccgaactctacggcattttggaatacgacatcgcaccgcaaacccgcgtccacgcaggcatggactaccagcaggcgaaagaaaccgccgacgcgccgctcagctacgccgtgtacgacagccaaggttatgccaccgccttcggcccgaaagacaaccccgccacaaattgggcgaacagccgccaccgtgcgctcaacctgtttgccggcatcgaacaccgcttcaaccaagactggaaactcaaagccgaatacgactacacccgcagccgcttccgccagccctacggcgtagcaggcgtgctttccatcgaccacaacaccgccgccaccgacctgattcccggttattggcacgccgacccgcgcacccacagcgccagcgtgtcattgatcggcaaataccgcctgttcggccgcgaacacgatttaatcgcgggtatcaacggttacaaatacgccagcaacaaatacggcgaacgcagcatcatccccaacgccattcccaacgcctacgaattttcccgcacgggcgcctatccgcagcctgcatcgtttgcccaaaccatcccgcaatacggcaccaggcggcaaatcggcggctatctcgccacccgtttccgcgccgccgacaacctttcgttgatactcggcggcagatacagccgttaccgcaccggcagctacgacagccgcacacaaggcatgacctatgtatccgccaaccgtttcaccccctacacaggcatcgtgttcgacctgaccggcaacctgtcgctttacggctcgtacagcagcctgttcgtcccgcaatcgcaaaaagacgaacacggcagctacctgaaacccgtaaccggcaacaatctggaagccggcatcaaaggcgaatggcttgaaggccgtctgaacgcatccgccgccgtgtaccgcgcccgtaaaaacaacctcgccaccgcagcaggacgcgacctgagcggcaacacctactaccgcgccgccaaccaagccaaaacccacggctgggaaatcgaagtcggcggccgcatcactcccgaatggcagatacaggcaggttacagccaaagcaaaacccgcgaccaagacggcagccgcctgaaccccgacagcgtacccgaacgcagcttcaaactcttcactgcctaccactttgcccccgaagcccccagcggctggaccatcggcgcaggcgtgcgctggcagagcgaaacccacaccgaccctgccacgctccgcatccccaaccccgccgccaaagcccgcgccgccgacaacagccgccaaaaagcctacgccgtcgccgacatcatggcgcgttaccgcttcaatccgcgcgccgaactgtcgctgaacgtggacaacctgttcaacaaacactaccgcacccagcctgaccgccacagttacggcgcactgcggacagtgaacgcggcgtttacctatcggtttaaataa

SEQ ID NO: 46848 - DNA, 1188 bp, Neisseria meningitidis; identical to SEQ ID NO: 38360

SEQ ID NO: 46849 - DNA, 408 bp, Neisseria meningitidis; identical to SEQ ID NO: 38369

SEQ ID NO: 46850 - DNA, 327 bp, Neisseria meningitidis
atgattgttttcaaatcattttatcggagcataaatatgaccatccgtcctttacacgaccgcgttgtcgtcaaacgcttggaagctgaagaaaaaaccgcatcgggcatcgttttgccgggtgcggccgccgaaaaacccgacatgggcgaagtcatcgccgtgggcgcgggcaaaatcggtaaagacggcgcgcgccgtccgctggatgtcaaagtcggcgacaaaatcatcttcggcaaatacagcggccaaaccgtaaaagccgacggcgaagagctgttggtaatgcgcgaagaagatattttcggcatcgttgaaaaataa

SEQ ID NO: 46851 - DNA, 378 bp, Neisseria meningitidis; identical to SEQ ID NO: 39350

SEQ ID NO: 46852 - DNA, 750 bp, Neisseria meningitidis; identical to SEQ ID NO: 38184

SEQ ID NO: 46853 - DNA, 213 bp, Neisseria meningitidis; identical to SEQ ID NO: 41375

SEQ ID NO: 46854 - DNA, 1545 bp, Neisseria meningitidis; identical to SEQ ID NO: 39615

SEQ ID NO: 46855 - DNA, 3210 bp, Neisseria meningitidis
atgttttatctgtatcaatccaaccgtcttgaaacgctggcggcattgtttgcccgcattcaaaaagtcaaaccgctgaaatcggctttacagcccgaacagattattgtgcagagtcaggggatgcgccgctatctcaatacctgcctcgcccgcgatttgggcgtggcggcgaatttgtcgttcagcctgcccgccggcctgacgtggaagctgatgaaaaaactgattcccggtattccggaactcagcccgtttgcacccgaagtcatgcgctggcggctgctggatttgttccgcagtgaagcattccggaatacggcagaatttgaagatgtgaggaatgtgctgcaagactatctgggcagcggcgaatcggcagattaccagcttgcgggacagcttgcggacatattcgaccaatacctcgtgtaccgtcctcagtggatagacgcttggcagcagggcaggcggctcggtttgggcgacgacgaaatctggcagtccaaactgtggcgttacctcgacgatggcaggcagagcgcgccgcaccgtgtcgcgttgtgggaaaagctgcttgccgcgttggacaaggataagctgcccgagcgttatttcgtgttcggcatttccacgatggcgccgatgtatcttcagcttttgcacaagctgtccgaacattgcgatgtgttcgtgttcgcactcaatccgagcgggatgtattggggcaacgtcatcgaagcggcgcaaatcctcaaaggcggcggcgatcccgatttaactcaggcagggcatccgctgctcgcctcattgggcaagcaggggcgcgactttttcgactttttgaacgaaatggaaatagaaggagaaacgccggtatttgaagaaggcgggcgcgatacgcttttgcacgccctgcaaaccgatattcaaaacctgaaaatgccgtctgaaaatgtgggaagcgtcaacacgggcgacggctcgatacgcatcgtctccgcacacagccccttgcgcgaattgcagatactcaaagacaagctgttgaaaattctgcatgaacatcccgattggcagccgcatgatatcgccgtattaaccccgcacatcgaatcctatacgccttttatcgaagccgtgttcggacaggcgcagcccggtgcgcaggcattgccgtattccgtttcagacgtgaaaatcagccgccgacaaccgctgtttcatgctttgtcatgcctgttcgacttgttggaaagccgatttgaagtcgataaagtgcttgtgcttttagaaaccgcacccgtgttgcgccgtttcggactgactgaggacgatttgccgcttttgcacgatatggttgccgatttgaacgttcactggggtttggacggagaaatgcgcggcggcacggatcagctgtttacctggaagcaggcggtagaacgcatgatattgggctggatgctgcccgaaggcggcaacccgatgtggcaggatgtcagcgcgtggtatgccgacgtgaaccaaaccgccctgttcggacgttttgccgccctcctcgaaaccctgtcggatattgtacggatatggcggcagcccgcaacgatcggcgaatgggtggcgcgttgccgggatttgcttgaaacattgttccaagctgaagccgatgaccaaaagtcagtccaaaaccttgaaaacgaatgggtcaaatggcaggcggaaacagaattggcgcaattttccggacagttgccgcaacaaaccgtcatccgccatatccgacgtttcctcgacagcgaaagcgaggcaggctttttacgcggcggcatcaccttttgcagtatggtgccgatgcggagcctgccgttcaaagtcatctgcctgttgggtttgaacgacggagattttccccgcaataccaaagccgccgtattcgacctgattgccaaacatcccgccaaaggcgaccgcgcccgccgcgatgacgaccgctacctcttcctcgaagccctcatcagcgcgcgcgaaatcctctacctgtcctacatcgggcgcgacatccgcaaagacgaagagcttgctccgtcttcgctgttgggcgaactcatcgacacagttgccgctatggcgggcatcggtagccgccaacttgcacaaaactggatagaacagcatccgctgcaagccttctcgcgccgatattttcaagaaggcggacgttcagacggcatattcggcacgcgtaccgactacgccactgcgctcggacaaacgcccgaaccgccgcaaccctttttcgaccaacccgtagaaaacgccgaacctgttgccgaaatcggacaggacgaatttatccgtttctggcgcaaccccgtcaaagtatggcttcagcagcagcttgcgtggagcgaaccccatatcggcgaagcctgggagcctgccgaacccttcgagccgcaacacgccgatcaaatcgccgaaacctacatcgaagcacggcgcgaaggacgggattttgcccaaaccgccgcccgcatcggggcggaaagcctcctgccgtcgggagagttgggcagactttggcagcagaacttccaaactgctgccaaacaaatcgacacggcggttttaaacagccccaaactgccaccgctttcatatgccataccgtcggacgggcaaatcctgaaaggcagcttgggcaatctgtaccgctgcggacaagtgttttacgcctacggcaaacccaacgcgccgcaacgtatcgcttttctgctggaacacctgatattttgcgccgttatgccgtctgaagccgaaacgcggcaaacctttatcgtccaatccggagaaaccgaaatattggcggaaatcgcgcaagacagggcattgcagctattgtcggaatggatggcgtttttcaatatcgggcaaaaccgcccgctgccgttttttgccaagacctcgcttgccgctgccgaagcgtttgcccaaaaacaagattgggaagccgccctgaaaaaagcccaaaccgcctattacggcaacaaagtcagcaaagggcagaaagactataccgaagtcgccctcgtgttcggcaacgcaagccaaaacccactcgaacaacccctgtttgaaaacctcgcccgcctgcttgccgacacgcttgccgcagcggaaaaaagggaaggggccggagcagcctga

SEQ ID NO: 46856 - DNA, 1266 bp, Neisseria meningitidis; identical to SEQ ID NO: 45196

SEQ ID NO: 46857 - DNA, 4170 bp, Neisseria meningitidis
atgaccgataccgcaccgacagataccgatccgaccgaaaacggcacgcgcaaaatgccgtctgaacaccgccctaccccgccggcaaaaaaacgccgcccgctgctgaagctgtcggcggcactgctgtctgttctgattttggcagtatgtttcctcggctggctcgccggcacggaagcgggtttgcgcttcgggctgtaccaaatcccgtcttggttcggcgtaaacatttcctcccaaaacctcaaaggcacgctgctcgacggcttcgacggcgacaactggtcgatagaaaccgagggggcagaccttaaaatcagccgcttccgcttcgcgtggaaaccgtccgaactgatgcgccgcagcctgcacattaccgaaatttccgccggcgacatcgccatcgttaccaaaccgactccgcctaaagaagaacgcccgccgctcagccttcccgacagcatagacctgcctgccgccgtctatctcgaccgcttcgagacgggcaaaatcagcatgggcaaagcctttgacaaacaaaccgtctatctcgaacggctggatgcttcataccgttacgaccgcaaaggacaccgcctcgacctgaaggctgccgacacgccgtggagcagttcgtcggggtcagcctcggtcggcttgaaaaaaccgtttgccctcgataccgccatttacaccaaaggcggactcgaaggcaaaaccatacacagtacggctcggctgagcggcagcctgaaggatgtgcgcgccgaactggcgatcgacggcggcaatatccgcctctcgggaaaatccgtcatccacccgtttgccgaatcattggataaaacattggaagaagtgctggtcaaagggttcaacatcaacccggccgccttcgtgccctccctgcccgatgccgggctgaatttcgacctgaccgccatcccgtcgttttcagacggcatcgcgctggaaggttcgctcgatttggaaaacaccaaagccggctttgccgaccgcaacggcatccccgtccgtcaggttttaggcggctttgtcatccggcaggacggcacggtgcatatcggcaatacgtccgccgccctgctcggacggggcggcatcaggctgtcgggcaaaatcgacaccgaaaaagacatcctcgatttaaatataggcatcaactccgtcggcgcggaagacgtactgcaaaccgcgttcaaaggcaggttggacggcagcatcggcatcggtggcacgaccgcctcgcccaaaatctcttggcaactcggcatcggcacggcgcgcacggacggcagcctcgccattgcaagcgaccccgcaaacggacagcggaaactggtgctcgacaccgtcaacatcgccgccgggcaaggcagcctgaccgcgcaaggctatctcgagctgtttaaagaccgcctgctcaagctggacatccgttcccgcgcattcgacccttcgcgcatcaatccgcaacttccggcaggcaatatcaacggctcaataaaccttgccggcgaactggcaaaagagaaattcacaggcaaaatgcggtttttacccggcacgttcaacggcgtaccgattgccggcagtgccgacattgtttacgagtcccgccaccttccgcgtgccgccgtcgatttgcggctggggcggaacattattaaaacagacggcggcttcggcaaaaaaggcgaccggctcaacctcaacatcaccgcacccgatttatcccgtttcggtttcggactcgcggggtctttaaatgtacgcggacacctttccggcgatttggacggcggcatccgaacctttgaaaccgacctttccggcgcggcgcgcaacctgcacatcggcaaggtggcagacatccgttcgctcgatttcacgctcaaaggttcgcccgacacaagccgcccgatacgcgccgacatcaaaggcagccgcctttcgctgtcgggcggagcggcggttgtcgataccgccgacctgatgctggacggcacgggcgtgcagcaccgcatccgcacacacgccgccatgacgctggatggcaaaccgttcaaattcgatttggacgcttcaggcggcatcaacagggaacttaccctatggaagggcagcatcggcatcctcgacatcggcggcgcattcaacctaaaactgcaaaaccgtatgacgctcgaagccggtgcggaacgtgtggcggcaagtgcggcaaattggcaggctatgggcggcagcctcaacctgcaacacttttcctgggacaggaaaaccggcatatcggcaaaaggcggcgcacgaggtctgcatatcgccgagttgcacaatttcttcaaaccgcccttcgaacacaatctggttttaaacggcgactgggatgtcgcctacgggcgcaacgcgcgcggctacctcaatatcaatcggcaaagcggcgatgccgtattgcccggcgggcaggctttgggtttgaacgcattttccctgaaaacgcgctttcaaaacgaccgtatcggaatcctgcttgacggcggcgcacgtttcgggcggattaacgccgatttggacatcggcaacgccttcggcggcaatatggcaaatgcaccgctcggcggcaggattaccgcctcccttcccgacttgggcacattgaagccctttctgcccgccgccgcgcaaaacattaccggcagcctgaatgccgccgcgcaaatcggcggacgggtcggctctccgtccgtcaatgccgccgtcaacggcagcagcaactacgggaaaatcaacggcaacatcaccgtcgggcaaagccgctctttcgataccgcgcctttgggcggcaggctcaacctgaccgttgccgatgccgaagtattccgcaacttcctgcccgtcggacaaaccgtcaaaggcagcctgaatgccgccgtaaccctcggcggcagcatcgccgacccgcacttgggcggcagcatcaacggcgacaagctctattaccgcaaccaaacccaaggcatcatcttggacaacggctcgctgcgttcgcatatcgcgggcagaaaatgggtaatcgacagcctgaaattccggcacgaaggaacggcggaactctccggcacggtcggtatggaaaacagcggacccgatgtcgatatcggcgcggtgttcgacaaataccgcatcctgtcccgccctaaccgccgcctgacggtttccggcaacacccgcctgcgctattcgccgcaaaaaggcatatccgttaccgggatgattaaaacggatcaggggctgttcggttcgcaaaaatcctcgatgccgtccgtcggcgacgatgtcgtcgtattaggcgaagttaaaaaagaggcggcggcaccgctccccgtcaatatgaacctgactttagacctcaatgacggcatccgcttcgccggctacggcgcggacgttaccataggcggcaaactgaccctgaccgcccaatcgggcggaagcgtgcggggcgtgggcacggtccgcgtcatcaaagggcgttataaggcatacgggcaggatttggacattaccaaaggcacggtctcctttgtcggcccgctcaacgaccccaacctcaacatccgcgccgaacgccgcctttcccccgtcggtgcgggcgtggaaatattgggcagcctcaacagtccgcgcattacgctgacggcaaacgaaccgatgagtgaaaaagacaagctctcctggctcatcctcaaccgcgccggcagtggcagcagcggcgacaatgccgccctgtccgcagccgcaggcgcgctgcttgccgggcaaatcaacgaccgcatcgggctggtggatgatttgggctttaccagcaagcgcagccgcaacgcgcaaaccggcgaactcaaccccgccgaacaggtgctgaccgtcggcaaacaactgaccggcaaactctacatcggctacgaatacagcatctccagcgcggaacagtccgtcaaactgatttaccggctgacccgcgccatacaggcggttgcccgtatcggcagacgttcgtcgggcggcgagctgacatacaccatacgtttcgaccgcttctccggttcggacaaaaaagactccgccggaaacggcaaaggaaaataa

SEQ ID NO: 46858 - DNA, 1473 bp, Neisseria meningitidis; identical to SEQ ID NO: 44151

SEQ ID NO: 46859 - DNA, 471 bp, Neisseria meningitidis; identical to SEQ ID NO: 39685

SEQ ID NO: 46860 - DNA, 678 bp, Neisseria meningitidis; identical to SEQ ID NO: 44558

SEQ ID NO: 46861 - DNA, 537 bp, Neisseria meningitidis; identical to SEQ ID NO: 45905

SEQ ID NO: 46862 - DNA, 294 bp, Neisseria meningitidis; identical to SEQ ID NO: 38787

SEQ ID NO: 46863 - DNA, 1011 bp, Neisseria meningitidis
atgcttccattctttccagaaccctccctttcctatacgcaacaaaaccgtaccgccgttttgctgttgaacctcggcacgcccgacgcgccgaccgcgcaggcggtacgaccttatctgaagtcctttctgaccgaccggcgcgtcgtcgaactgcccaaatggctgtggtatcccattctgcatggtctggtactgacgctccgccccaaaaaaagcgcgcacgcctatgaaaaaatctggtttaaggaaggttcgcccttagaagtttacacagcacgccaagctgccgcgcttgccaaacgtatgcccgacctcatcgtccgccacgccatgacctacggcaatccttcggtggcagacgtattgtcggaactgaaggcgcaaggcgcgggcagactgctggtcatcccgatgtacccgcaatatgccgcttccagcagcggagcggcagtagataaggtgtgcgaacaattactgctgcaacggaaccaaatgagcgtccgcaccgtttcgcgcttttatgacgataccggctacattgatgcgatgaaaaaccacatcctccgatattgggcggaacacgggcgcgggaaaaaactgatgttgagttttcacggcgtaccgcagaagcaccacgacctcggcgacccctatcccgacgagtgccgccacaccgccaaactgcttgccgaagcactggaactgaccgaagaccaatatgtcgtatcgttccaaagccaattcggcagggcaaaatgggttacaccgagcacgcaggatttgttcggcaaactgcccaaacagggggtaaccgagctggacgtattttgcccgggctttttggcagactgtttggaaaccatggaagaaatcgccctgatggggcgggaacagttttacgaagcaggcggcaaaagctaccgctacatcccctgcctcaacgacaaccccgactggatagacgcactcgtcgcacttgccgaagaaaaccttggcggctggcgttga

SEQ ID NO: 46864 - DNA, 1497 bp, Neisseria meningitidis
atgttttccaactacctactcagcttggcaatatggatacccatcgccgcaggtgtgctggttttgtcgaccggtaaggacagccgtgcgccgctggcgcgtgtgcttgcctttatgggtgcgcttgccggtttcttggtaacgctgcccctgtttaccggtttcgaccgtttgagcggcggctatcaatttaccgagttccacgagtggattccgctgctgaaaatcaactatgcattgggcgtggacggtatttcagtgctctttatcatcttgaatgcgtttattacgctgttggtggtgctggcgggttgggaagttattcagaaacgcccggcgcagtatatggcggcattcctgatgatgtcgggtttgattaacggtgcgtttgccgcgcaggatgcgattctgttttatgtgttcttcgagggtatgctgattccgctgtacctgattatcggtgtatggggcggcccgcgccgcgtctatgcgtcggtcaagctgttcctctatacgctgatgggttcgctcctgatgctggttgctatggtttacctgtactatcaaacaggcagcttctctattgtcgatttccaaaacatcaaacagattccgttgggcgtacaacagcttttatttgcagcgttcttcctgtcatttgccgtaaaagtgccgatgttccctgtgcacacttggttgccggatgcccacgttgaagcgccgaccggcggttcgatggtgttggcggcgattacgctgaagctgggtgcgtatggtttcttgcgctttatcctgccgattatgccggatgcggcacgctattttgcccctgtgatcattgtattgagcctgattgccgtgatttacatcggtatggtggctttggtgcaaaccgatatgaaaaaactggtggcgtattcgtccatcagccatatgggttttgtcactttgggtatgttcctgtttgtgaacggccaattgaatgattgggcattgaaaggcgcaatcattcaaatgatttcccacggttttgtgtctgccgcgatgtttatgtgtatcggcgtgatgtacgaccgcctgcatacccgcaatattgccgattatggcggcgtggtcaatgtgatgcctaagtttgcggcgtttatgatgttgttcggtatggccaatgccggtctgccggcgacttctggcttcgtgggcgagtttatggtgattatgggcgcggttaaagtgaatttctgggtgggcgcgttggcggccatgaccctgatttacggtgcgtcttataccctgtggatgtacaagcgcgtgattttcggcgcgatccacaatccgcacgttgccgaaatgaaagacatcaactgccgcgaatttgcgattctggcgattttggcggttgtggtattgggtatgggtctgtatccgaacgcatttatcgaagtggtgcatcaggcggcaaacgatttgattgcccatgtggcacaaagcaagatttga

SEQ ID NO: 46865 - DNA, 987 bp, Neisseria meningitidis; identical to SEQ ID NO: 38304

SEQ ID NO: 46866 - DNA, 606 bp, Neisseria meningitidis; identical to SEQ ID NO: 45248

SEQ ID NO: 46867 - DNA, 1929 bp, Neisseria meningitidis; identical to SEQ ID NO: 45887

SEQ ID NO: 46868 - DNA, 1056 bp, Neisseria meningitidis; identical to SEQ ID NO: 44627

SEQ ID NO: 46869 - DNA, 957 bp, Neisseria meningitidis; identical to SEQ ID NO: 39193

SEQ ID NO: 46870 - DNA, 1383 bp, Neisseria meningitidis; identical to SEQ ID NO: 37059

SEQ ID NO: 46871 - DNA, 912 bp, Neisseria meningitidis
ttgttcgatttagaggtagcattaagaagggttttgtcagctgctcctactgttcaagatacacaaattgaacaatacaatcagcttacccaaatcatgcatagaactttggatcctaaagatgtaaaaggcaattcaattggtggattactgatacacattggcagcggtacaaaagatgaacatatccgcactatgagcaatagacctgtacagcaagatgatcatggtggaacacaagctcctccaagtggatattcctttttgcgtaaagaggcttttttgtatattgttggacaccatgtaattttttgcggacatggttttttgtcagcatcaacggttgcttcttatttaagtttacttagcaataaattgagagagaacaatccggatattgttcaatttaatattgaattcaaagcagtaggtaattgcgacaagttgtcattgatacaacaacatggggtaaaaagtattcttttagatgtttcggcatatcaattatccagaaacagactgtatcaagatagccgttcaaccattgctaaagcattagggaaagttggtagtgtatttacaagcgaattgagtgatgaggaattggaagcacaatccgaaattcatatcaatttagaagtcttgctaaacggtaattcgagagccagtattgaagcgcaatcgctgatgcaggagcaggcagaggaaattattgatgatgaaacggttaatcaaggattttccattaccacgcaacaaggtgaagtgattcagccctctgatgtaaaactgtctaaatctgttagaataggacgatacgatgaagccaactcgttactccctgactcggcatttacagcaatcagtgaatatttcctagaactccaaagcagaaacttaactgaacaatga

SEQ ID NO: 46872 - DNA, 561 bp, Neisseria meningitidis; identical to SEQ ID NO: 45918

SEQ ID NO: 46873 - DNA, 603 bp, Neisseria meningitidis; identical to SEQ ID NO: 36499

SEQ ID NO: 46874 - DNA, 1296 bp, Neisseria meningitidis
atggcacaaaaaatccaatccgtcaaaggtatgaacgaccttctgcctgtcgagcaaaaagatttcaaactgacggctgcgttttggcaggcgtttgaggatacggtaaaccgttggacgcgcgcttacggttatcggcaaatccgtacgccgattgtcgagcaaaccggtttgtttgtccgctccatcggcgaggaaaccgacgtggtcggcaaggaaatgtacaccttttccgattcaaacgattctttgagtttgagcctgcgtcctgaaggtacggcttcctgtctgcgtgcggtggtcgaacacaatcttctctacaacagcccgcaaaagctgtggtatatgggaccgatgttccgccgcgagcgtccgcaaaaaggccgttatcgtcagttccatcaggtcggtatcgaagctttgggttttgaaggtccggatattgatgcggaaatcatcgcgatgtctgccgacttatgggaaaaattgggtatccgcgaatatctgactttggaaatcaacagtttgggcaaccgtgaggaacgcgcggcacaccgtgcggcattggttgaatatctgacccgttatgaagataaattggacgaagacagcaaacgccgtctgaaaaccaatcctttgcgcgttttggatacgaaaaaccctgatttgcaggaaatctgcaacgccgcgccgcgtctggtggattacttgggtgaggcttcgcaaaaccactatgcacgcttcaaggcgatgttggatggtttgggtattcaatatattgaaaatccgcgcttggttcgcggtttggattattacaatcagacggtttttgagtggacgaccgacaaactcggcgcgcaggcaactgtgtgcggcggcggccgttacgatggtttgattgaggaacttggcggcaaacctgcgccgtccatcggctttgcgatgggcatcgaacggctgctgcttttggtgagcgaatacggctcgctggaagtgaacgctgcgcctgatgtctatgcaatgcaccaaggcgaaagggcggacttgcaggtgatgaaatacgcgcaagccttgcgcacgcaaggtttcaatgtaatgcagcattccggctatcaaagcctgaaagcacaaatgaaaaaagccgacaacagcggcgcgcgctttgccctgattgtcgcgcaagacgaactggcgaacggtacggttacgctcaaagacatgaacggcgcacacggtcagcaaactgtcgccgccgaggatttaacccatactttacaacaatggaagaacgcataa

SEQ ID NO: 46875 - DNA, 897 bp, Neisseria meningitidis
atgtttcgtttacaattcgggctgtttccccctttgcgaaccgccatgcacatcctgttgaccgccctgctcaaatgcctctccctgctgccactttcctgtctgcacacgctgggaaaccggctcggacatctggcgttttaccttttaaaggaagaccgcgcgcgcatcgtcgccaatatgcgtcaggcaggcatgaatcccgaccccaaaacagtcaaagccgtttttgcggaaacggcaaaaggcggtttggaacttgcccccgcgtttttcagaaaaccggaagacatagaaacaatgttcaaagcggtacacggctgggaacatgtgcagcaggctttggacaaacacgaagggctgctattcatcacgccgcacatcggcagctacgatttgggcggacgctacatcagccagcagcttccgttcccgctgaccgccatgtacaaaccgccgaaaatcaaagcgatagacaaaatcatgcaggcgggcagggttcgcggcaaaggaaaaaccgcgcctaccagcatacaaggggtcaaacaaatcatcaaagccctgcgttcgggcgaagcaaccatcgtcctgcccgaccacgtcccctcccctcaagaaggcggggaaggcgtatgggtggatttcttcggcaaacctgcctataccatgacgctggcggcaaaattggcacacgtcaaaggcgtgaaaaccctgtttttctgctgcgaacgcctgcctggcggacaaggtttcgatttgcacatccgccccgtccaaggggaattgaacggcgacaaagcccacgatgccgccgtgttcaaccgcaatgccgaatattggatacgccgttttccgacgcagtatctgtttatgtacaaccgctacaaaatgccgtaa

SEQ ID NO: 46876 - DNA, 567 bp, Neisseria meningitidis
atgagtctttacgctttgctcttgattgcgctggggatgtcgatggatgcgtttgccgtcgcgctggcaaagggtgcggcggtcaggatgcctccgcgcaaaattgcagcaacagccttggtgttcggcacggttgaagcgctcacgccgctggcaggctgggtaggcggtttttatgccaagccgtttatcagcgaatgggaccattgggcggctttcgtcctgctgggcgggctgggtctgaaaatgatgcacgaagggttgtccggcgaggcggaggacgcgcgggaaaacaaacgggaaagctggtggttgacggttctgactgcttttggaaccagtattgattccatgatagtcggggtgggcttggcgtttatggaggtaaacatcgcctttgccgccgcaatcatcggtatggcgacgacggtgctggtggcggtcgggctgacggtgggaagggctttgggcgtattgttcggcaggcgtgcggaatttgccggaggtttggtgttgattgccatcggtacatggacgctcttgtcgcacttggggctgatcgggtaa

SEQ ID NO: 46877 - DNA, 837 bp, Neisseria meningitidis
atgatagacctgcactgccattccatcgtttccgacggtatgctttcccccgccgaagtcgtgcgcctcgcgcatcaaaacggctgcacgctgctggcgttgaccgaccacgaccacaccggcggcatcgccgaagcgcgtgccgaagccgacaggctcggtttgcgcctgattaacggcgtggaaatctccgtaacgtggcgcgggcgtaccatacacgttgtcggcttagactttgacgaacaagacgaaaacctgcaaaacctgttggcgcaagtgcggcaaggccgtctgaaacgcctcgaagccatcgccgccaagctggaaaaacgcggcatttcgggcgcatacgacggcgcgctcgcgctggcggcaaacaaagaaatggtcagccgcacacacgtcgccgagttcctcattcgggtgggacacgtcaaaaacaagcagcaggcgttcaccaaatacttgggcgacggcaaatcctgcgccgtccgccacgaatgggcgacgctggaagactgcgtctccgccgtcaacggcgcgggcgggttggcggtcatcgcccatccgatgcgttatgatttgtccgccaccgccaagcgcaatctgtttgaagaatttaaaaacctcggcggcgcaggcatcgaagtccacagcggcaactgctgcaaaaacgaccgcctcaactacgcgcttttggcagaacgcttcggtatgctcgccagcgcgggcagcgacttccaccgtttaaacgactttagcggcggcattctcggcgcgtgtcccgaactgccggaaaactgcaggccggtgtgggcgcatttttcccgatattga

SEQ ID NO: 46878 - DNA, 306 bp, Neisseria meningitidis
atgcgcgtatctaaaataattggaagtatgttgcttgttacagcggttcagaccgtattttcggcaaatgtttacgcgtgccgccataatggtaaaaccagttacagccaaactccgggaaaacattgtaccaacgcgggtttggggcgggacctggtgtacagttcggtcaggcctgccgtgaaagacagggcggaagacgcaggggctgacgatcatttggattcggtgagggacgaacacgtccaaaatccgagagagaatacgcataaggatgcttcgaataccggtgcaaagacgcattga

SEQ ID NO: 46879 - DNA, 777 bp, Neisseria meningitidis; identical to SEQ ID NO: 45411

SEQ ID NO: 46880 - DNA, 282 bp, Neisseria meningitidis; identical to SEQ ID NO: 38303

SEQ ID NO: 46881 - DNA, 2631 bp, Neisseria meningitidis
atgcaagaacattaccaacccgccgccatcgagcctgcggcgcagaaaaaatgggacgacgcccgtattttcaacgtctccgaagacgcttccaaacccaaatattattgcctctccatgttcccctatcccagcggcaagctgcacatggggcatgtgcgcaactacaccatcggcgatgtattgagccgcttcaaacttttaaacggcttcaacgtcatgcagcctatgggttgggacgcgttcggcatgccggcggaaaacgcggcgatgaaaaacaacgtcgcccctgccgcttggacgtacgataacatcgaatacatgaaaacccagctcaaaagcctgggttttgcgattgactgggcgcgcgaaaccgcaacctgcaaacccgaatactaccgctgggaacaatggctgtttaccaagctgtttgaaaaaggcatcgtctatcgcaaaaacggcacggtgaactgggacccggtcgaccaaaccgtccttgccaacgagcaagtcatcgacggacgcggctggcgttcgggcgcgttgatcgaaaaacgcgaaatcccgatgtattacttcaaaatcacggattacgccgaagagctgctcaacgacttggacaagctggaacactggccggaacaagtcaaaaccatgcagcgcaactggatcggcaaatcgcgcggtatgaccgtgcgcttcgccgtttcagacgacagcaaacaaggcttggaaggcgattacgcgaaattgctgcaagtttataccacccgccccgacacgctgatgggtgcgacttatgttgccgttgccgccgagcatccgctggcagccgccgcagccgccgacaaacccgaattgcaggcatttattgccgaatgcaaagccggttcggttgccgaagccgatatggcgacgatggagaaaaaaggcgtgccgaccggtcgctacgtcgtcaacccgctcaacggcgacaagctggaagtgtggattgccaactatgtattgtggggctacggcgacggcgcagtgatggcggttccggcgcacgacgaacgcgattttgagttcgccgccaaatacaatctgcctaaaaaacaagtcattgccgtcggcgacaacgcattcgacgcaaaccgatggcaagaatggtatgccgacaaagaaaacggcgtattggtcaacagcggcgacttggacggcttggattttcagacggcattcgatgccgttgccgccaagctgcaaagccaaggcgcgggcgaaccgaaaacccaataccgcctgcgcgactggggcatttcgcgccaacgctactggggctgcccgattcccatcgtccattgcgaacaatgcggcgacgtacccgtccctgccgaccaattgccggtcgttttgcctgaaaacgtcgtacccgacggcatgggttcgccgctggcaaaaatgcccgagttttacgaaactgcctgcccatgctgcggcggcgcggcaaaacgcgaaaccgacaccatggacaccttcatggaatcgagctggtatttcttccgctatatgtcgccaaaattttcagacggcatggtcgatcctgccgccgcgaaatactggggcgcggtcgaccaatacatcggcggcatcgaacacgcgattttgcacctcttgtacgcgcgtttcttcaccaaactgatgcgcgacgaaggtctagtcaatgttgacgaaccgtttgaacgcctgctgacgcaaggcatggtcgtttgcgaaacctactaccgcgaaaacgacaaaggcggcaaagattggatcaaccccgccgatgtcgagctgacgttcgacgacaaaggccgccccatttccgccgtcctcaaagccgacgggctgcccgtcgtcatcagcggcacggaaaaaatgtccaagtccaaaaacaacggcgtcgatccgcaagaactgattaacgcctacggcgcggacaccgcccgcctgtttatgatgttcgccgcaccgcccgaacagtccctcgaatggagcgacagcggcgtcgaaggcgcacaccgcttcctgcgccgcctgtggcgtaccgtttacgaatacttgaagcaaggcgaagcggtcaaagcgttcgcaggcagccaagacggtttgtctaaagaactcaaagacctgcgccacaaactgcacgcgaccactgccaaagtcagcgacgactacggccgccgccagcagttcaacaccgccatcgccgccgtgatggaattgctcaaccaatacgacaaaaccgacaccggcggcgaacaaggacgcgccgtcgcccaagaagtattggaaaccgccgtacgcctgttgtggcccatcgtgccgcacatctgcgaaaccctgtggagcgaattgaacggcgcgaaactgtgggaagcaggctggccgacagtcgacgaagccgccttggtcaaatccgaaatcgaagtgatggttcaagtcaacggcaaactgcgcggcaaaatcactgttgccgccgacgcatccaaagccgacctcgaagccgccgcactcgccaccgaaggcgcggtgaaattcatggaaggcaaaccggcgaagaaaatcatcgtcgttcccggacgcttggtgaatatcgtcgtctaa

SEQ ID NO: 46882 - DNA, 705 bp, Neisseria meningitidis; identical to SEQ ID NO: 37373

SEQ ID NO: 46883 - DNA, 1713 bp, Neisseria meningitidis; identical to SEQ ID NO: 44553

SEQ ID NO: 46884 - DNA, 285 bp, Neisseria meningitidis; identical to SEQ ID NO: 46657

SEQ ID NO: 46885 - DNA, 687 bp, Neisseria meningitidis; identical to SEQ ID NO: 36558

SEQ ID NO: 46886 - DNA, 366 bp, Neisseria meningitidis; identical to SEQ ID NO: 44602

SEQ ID NO: 46887 - DNA, 957 bp, Neisseria meningitidis; identical to SEQ ID NO: 39193

SEQ ID NO: 46888 - DNA, 1152 bp, Neisseria meningitidis
atgcagacatggcagcttccggaacatatcgccgacgtactgcccacgaacgcgcggcagcttgaaagcgcgagggagcagttgttggcactgttccgcgtacacggttatgaactggtacagcctccgctgatggagtacgcacattccctgctgacgcatatcgatgcggggctttccctgaaaaccattttggtaacggacaggctcagcggcaggcagttgggcatacgcgccgacatcacgccgcaggtggcgcgtatcgatgcccatcttttatccgccaaccaagggattaatcggttgtgttatgccggtccggtgttgcacgcgcagcccgacggtctgctgaatatgcgcgaacccttgcaggcaggggcggaaatgtacggttttgccgacatccgtggcgacatcgagctgatagacctgatgctgaaaagcatgaaaattgccgatatgggcaaagtgctgctttcgctggggcatatcggcatatttcgcgccttgtccgatgcggcgcatttggatgcggggcagtctgcaacgctgcttgccttgatgcaggataaagataccgggacggtcgaagcgcaggtcaaggcttggaagctggacggcatgtgggcaaaagcattctcgctgctgccgcgcctgtacggcgggcgtgaagtgttgtccgacgcgcgcggacggttgccggatttgtcggcggtcggcggcgcgttagacgaattgcaggcggtgtgcgacgcattccccgattgtgaaatccatatcgacttgtccgagctgcgtgtcgacaattaccacacgggcttgctgtatgccgcctatgccgccgatttccacgacgcggtcgcgcgcggcgggcgttatgacggattgggcggatatttcggcagggcgcgcccggcaacgggattcagtttcgacttgcgcagctttatcgggcgtttgcccaccagcgaacggcagcccgccgtgttggtcgatgcggaagatgccgaagcggcgcgcgaagcagtcgaagccttgcgtgaacaagggcagtgtgtcgtgattgactacggtatcggacacaatgtttcggaagagcttgcaggccgtctgaaaaagacggacggcgtttggcaggtcgtgaaacgctaa

SEQ ID NO: 46889 - DNA, 432 bp, Neisseria meningitidis; identical to SEQ ID NO: 40005

SEQ ID NO: 46890 - DNA, 384 bp, Neisseria meningitidis
atgacttttgcctattggtgcatcctgattgcctgcttattgccgcttttttgtgcggcatatgccaaaaaagcgggcggattccggtttaaagacaaccacaatccgcgcgattttctggcgcgcacgcaaggcacagccgcccgtgcccacgccgcgcagcaaaacggttttgaagcctttgcaccgtttgccgccgccgttttgacggcacacgcaaccggcaatgccggacaagcaaccgtcaacacgcttgccggcctgttcatcctgttccgcctcgcctttatctggtgctacatcgcagacaaagcagcattgcgctcgctgatgtgggcgggcggatttgcctgcaccgtcgggctgtttgtcgcggctgcttga

SEQ ID NO: 46891 - DNA, 807 bp, Neisseria meningitidis
atgagcaccttcttccggcaaaccgcacaagccatgattgccaaacacatcgaccgcttcccgctattgaagttggaccaggtgattgattggcagccgatcgaacagtacctgaatcgtcaaaaaacccgttaccttagagaccaccgcggtcgtcccgcctgtcccctgttgtccatgttcaaagccgtcctgctcggacaatggcacagcctctccgatcccgaactcgaacacagcctcattacccgcatcgatttcaacctgttttgtcgttttgacgaactgagcatccccgattacagcaccttatgccgctaccgcaactggctggcgcaagacgacaccctgtccgaactgttggaactgatcaaccgccaactgaccgaaaaaggtttaaaaatagagaaagcatccgctgccgttgttgacgccaccattattcagaccgccggcagcacacagcgtcaggctatagaagtcgatgaagaaggacaaatcaacggccaaaccacaccgagtaaggacaaagatgcccgttggatcaagaaaaacggcctctacaaactcggttacaaacaacatacccgtaccgatgcggaaggctatatcgagaaactgcacatcacccccgccaatgcccatgagtgcaaacacctgtcgccgttgttagaagggatagctgaaagtacgaccgtctatgccgacaaaggctatgacagtgcggaaaaccggcaacatctgaaagaacatcagttgttggacggcattatgcgcgggcagcctatttcggactgctcaaagtga

SEQ ID NO: 46892 - DNA, 1458 bp, Neisseria meningitidis
atgtcccggcatcccgcccccaccggagaaaaaacattcttcggccaccccttccagctttccaccctcttccatatcgaattgtgggaacgtttttcattttacggaatgcagggcatcctgctgatttacctctactacaccgccgacaaaggcggcttgggcatagacaaaaccctcgccggcggcattgtcggcgcatacagcggcagcgtgtacctgtccaccattttgggggcgtggtttgccgaccgagtatggggtgcggaaaaaaccctcttcctctcgggcatcgtcgtgatgctcggacacatcgtccttgccgccgccccgggcctgtacggccttttaatcgggctgatattcatcgcattgggcagcggcggcgtgaaatctacggccagttctatggtgggcgcattatacgaacaggacgaaatgcgcccgctgcgcgatgcgggattttccattttctacatcgccatcaatatcggcggcttcctaggcccgctgctgaccggcctgctgcaggaaaacatcggtttccattatggtttcggcgcggcggcggtcggtatggcattcggcttgtggcgttattccttgggacgtaaaaacctgccccatcccatcgtcccccatccgctttcaaaaggacagggcaaaactgcggccgccgtcggcattgctctcatcgccgcacttgcaaccgccatcaaaaccgggcttgtcaacctcgacaatttctccggcatcctcttatctaccgtcatccttgccgtcattgcctattttgcccgcctgctgactaatccccgcgtcagttccgacaacaaacggcacatcatcgcctacatcccgcttttcctgaccatctgtatgttttgggccgtctggtttcagatttacaccgtagcaaccgtctatttcgacgaaaccgtcaaccgcaccatcggttcgtttaccgtgcccgtcgcctggaaagattctatgcaaagcctgtgggtcatcctgttttccggacttatggcggcaatgtggacaaaaatggggcgcaaacagcccaaaaccccgctgaaattcgctatggcggtatttgttaccggcgcgtcgtttttgggattcatcccctttatttccgccggcacgccgatgcctattgcggttttcgcactgattgtccttgccatcacgataggcgaactgatgatttccccgattgcgctgtccatctccaccaaaatcgcaccgcctttattcaaaacccaaatggtcgcccttaatttccttgccttttcattaggcttcactttgggcggcgtattgtttgaaaaatgctatcaggcgggcgacgaaatcggcttctatcggctgctgttctacatcggcgcagccacaggcttcctgctgctcctgctcgtccccaaattgaacaaaatgctcgaaggcacagactaa

SEQ ID NO: 46893 - DNA, 777 bp, Neisseria meningitidis; identical to SEQ ID NO: 45554

SEQ ID NO: 46894 - DNA, 501 bp, Neisseria meningitidis; identical to SEQ ID NO: 37882

SEQ ID NO: 46895 - DNA, 225 bp, Neisseria meningitidis; identical to SEQ ID NO: 38459

SEQ ID NO: 46896 - DNA, 1257 bp, Neisseria meningitidis; identical to SEQ ID NO: 44253

SEQ ID NO: 46897 - DNA, 999 bp, Neisseria meningitidis; identical to SEQ ID NO: 45060

SEQ ID NO: 46898 - DNA, 1035 bp, Neisseria meningitidis
atgcaaaccctgaccattatccgccccgacgatatgcacctgcacctgcgcgacggcgacgcgctcaaagccgttgtgccttataccgccagacagatggggcgcgccgtgattatgcccaatctcaaaccgcctgtcgtcagcgttgccgacgcgcttgcctacaaagcgcgcattatggcggcgttgcccgaaggcagtgcgtttgagccgctgatgacgctttatttgaccgatcaagccacgccggaacttgtgcgcgaagccaaagccgccggcatcgtcgccttcaaactctaccctgccggcgcgacgaccaattccgattccggcgtaaccgacctattcaagctcatccccgtgttggaagaaatggcaaaacaggacatcctgttcctcgttcacggcgaagtaaccgaccccgaaatcgatattttcgaccgcgaagccgcctttatcgagcgcgtgatgaaacccgttttggcgcaagtgccgaatcttaaagtcgtgttcgaacacatcaccaccgccgaagccgcccgcttggttttggaagcaggcgacaacgttgccgcctccgtgaccccgcaacatctgctgcttaaccgcaacgacctcttggtcggcggcgtgcgcccccatcatttctgcctgcccgtactcaaacgcgaaacccaccgtcaggcattggttgctgccgttaccggcgagaaggcgcacaaattcttcctcggcaccgattccgcaccgcacgccaagtccgccaaagaaaacgcctgcggctgcgccggtatgttcagcgcgatgaccgccgtcgagctttacgccgaagtatttgaaaaagcaggcgcgttggacaaactcgaagcctttgcctcgaaaaacggcgcaaggttctacggcattcccgaaaataccgacacaatcaccctcgtcaaacaaagccaaaccgtccccgcaagtgttccctacggcgatggcgaacttgtcccgatgcgcgcgggcggcgaaatcggctggatggtacagtattga

SEQ ID NO: 46899 - DNA, 303 bp, Neisseria meningitidis; identical to SEQ ID NO: 39071

SEQ ID NO: 46900 - DNA, 1764 bp, Neisseria meningitidis
gtgaaaccgctgcgaagactgacaaacctccttgccgcctgcgccgtagcggcggccgcactcatacagcccgccctcgcagcggacttggcgcaagacccgttcattaccgataacacccaacggcagcactacgaacccggcggcaaataccacctcttcggcgacccgcgcggcagcgtttccgaccgcaccggtcaaatcaacgtcatccaagactatacccaccagatgggcaacctgctcatccaacaggcggcaatccaaggcaatcttggttacaccgtccgcttttcaggacacggatacgaagaacacgcccccttcgacaaccacgccgccgacagcgcaagcaaagaacaaggcaacgttgacgacggctttaccgtataccggctcaactgggaaggacacgaacatcatcccgccgatgcctacgacggcccgaagggcggcaattaccccaaacctacgggcgcacgcgacgaatacacctatcacgtcaacggcacagcacgcagcatcaaactcaatccgaccgacacccgcagcatccggcaacgcatatccgacaactacaacaacctcggcagcaatttctccgaccgcgccgatgaagccaacaaaaaaatattcgagcacaatgccaagctcgaccgctggggcaacagcatggagtttgtcaacggcatcgccgccggagcactcaacccctttatcagcgcgggcgaagccttaggcataggcgacatactgtacggaacgcgctatgccatagacaaagccgcaatgcgcaacatcgcccccttgcccaccgagggcaaattcgccgtcatcggcggcttgggcagcgtggcgggctttgaaaagaatacgcgcgaagccgttgaccggtggatacaggaaaaccccaatgccgccgaaaccgtcgaagccctggtcaacgtcctgccgtttgccaaagtcaaaaacctgacaaaggcggcaaaaccggggaaggctgcggttagtggggatttttctaaatcctacacctgctccttccacggcagcaccttggtcaaaacggcagacggctacaaagccattgcccatatccgagtcggcgagagcgtcttcgccaaagatgaaaccagtggaaaaactggatacaaacctgttaccgcccgatacggcaatccgtaccaggaaaccgtttacattgaaatttcagacggcatcggtaacagccaaaccctgatttccaaccgcatccatccgttttacagtcaaggaaaatggatacaggcaggtcgtctgaaaaaaggcgacaccctgctttccgaaagcggtgcaaaacagacagttcaaaacattaccctcaaacagcagccgctcaaagcctacaacctgaccgttgccgactggcatacttatttcgtcaagggtaatcaggcggaaacggaaggggtttgggttcataatgattgtccgtatggagaaaaatataggacagaagttggttcttatactaatactcatgaaagtggtcgaacttattctggaaagggcacaagacaacgttcccaaatctctggagcaagagaagctagggttaataatgaccctcatatagctacagattttactcctgccaaaaataatcgagaggcattcaaagatgaatctagaagaattgacgctcacggtggttccaaaagtaccaataattacaatcgaattgaaagcccggggaaaaaataccgaaaacaagatggagattaa

SEQ ID NO: 46901 - DNA, 855 bp, Neisseria meningitidis; identical to SEQ ID NO: 39178

SEQ ID NO: 46902 - DNA, 2055 bp, Neisseria meningitidis
atgagttcaaattatttttttagtgctattgatgaaagtttaattacatcgaataattcattatcaatgtttcttaataatttgaagaattattcattagatcagaaaaatcatatatttgtgattcaagctcctcttgcaaataacaaatatatatatacatataaagatgtagttattgtattaattgcaaagaaaaaaatagccttcattaattttggagatacagattcttttgaaacatttagagaggattttattgaagatttaaatgctatctctgataaatatgaatataaaagtaaaattggtagacctagagattggaaaaccatatttaaaaatttctccctagatgaattagttagcaatgatatacaaaattttgttaaaaatattgaaatttcttccgagagagagcagcgattgagtgagttgatcatttctcttcttactggaagtattaatgatattgaaaaaatcgatggtctaaatattcaagataatattcttgataaaattaaaaagaaaattattctttttgactctaatcaaacaaattttttgtaccaaaataaaaatcagaaaaaaattattattcaaggcttatcaggcacagggaaaacagaactattactacataaattaaaagaattgtatttagagtcggataacaatagaatattttttacatgcaacaataaaatattagcagaaagtttaagaaacagaatcccaagattttttaactttatgcaagtatcacaacaaatcgactgggataatcgattatggtgtaaccatgcgtgggggtcaggcaagaataaaaattctggactatatagttttatttgccatttttatggtattccatttctgaactatgcccaagagtcatcattctctaaaatttgctccatggcaattgaacaaatcaaatcaaattcagataatcttaacaaatatgcattcgattatatattaattgatgagagccaagattttggtgagagtttctttgaattatgcagcttagtgactaaacataagatctatattgcaggagatatattccaatctatttttggagagcaaaaaatttatgatcatgtagactacttattgaatcaatgttatagaacggatcctaaaactttaatgttttctcatggcttgagtatggggctatttgaaagtgagaaattacaatggctaacagatcaacaatgggaacagtacggatacattttccaaaaaaataataatagatatatatttacaagagaaccaattcgacgatttgaagacttaaaagacaatgataatagcattcatatagaaaatattaaggaacttaataattcccaaatttcagataaaattgttgaattaattatggatattaagtctaaatacccaagcgttcagcctgatgacatagccataattttcttagagcaaaatcgtagatacaatagtgagatgcttaattatattagatatacattagaagaaaaagggatagattggcctataaatccagcctttgagtctaaacaacaattaactggatatttatcaatcacaaattttaatcatgtgaaaggattagaatttccttttgtaatctgtatctcaccatatgaagttacagccgacttacggaaaagaaacgctatttacatggcaatgactagatcatttttacatagtagccttttaatgcctgttagcactgataacttctttttatactctcgaggactcaatgaaattaattctactaaaagaatgactattgaagaaccaaatgaagaaaataagaaccgaattcgagaaattaatatccaatttgatggtagtcattcatttaaggatattgttatagaaattctggattcatttcctaaatcgtcatctattacagataaagatagagaatggtgcattcaaggagttttacgttcattaggagaaacctatgataagaatgcaattaaatcacatctaaaacctctgattgattatatccagggtgagagaaatgaaagctga

SEQ ID NO: 46903 - DNA, 3921 bp, Neisseria meningitidis
ttgaactacattatcgccttttcaaacccgcctgaaaccgaattttcagacggcattcaaataaaaactgccaaacacggacacaccatgaccacgactaccgcccctcagcgtattcgggaaattccctacaactatacttcctacaccgaccgcgaaatcgtcatccgcctactgggcgatgaggcgtggcaaatcctgcaagacttgcgcggacagcgcaaaaccgggcgttcggcgcggatgctgtttgaagtgttgggcgatatttgggtggtcgtgcgcaatccgtatctggtcgatgacttgctggagcacccaaaacgccgcgccgcgctggtacgtgaaatgcgccaccgcttaaatgaaatccgcaaacgccgcgacgataatcggcaagtggatgtgttggttgccgcagcagaaaaagcagtcgagcgttttgatagcagttttgatgaaaccagccaaaaacggcggcagattttggagcgtttgagcaaaatcaccaagccgcacaatattatgttcgacgggctggcgcgggtaacgcacgttaccgatgcaaccgactggcgcgtggagtatccgtttgtcgtcgtcaatcccgacacggaggcggaagtcgcgcctttggtgcgcgctttaatcgaattggacttggttattatcccgcgcggcggcggcacgggttataccggaggcgcgattcctttggacgcaatgagcgcggtcatcaataccgaaaagctcgacaagcatcgcggcgtggaatacgttgagctggcaggattggacggcaagcatccgattatccggtgcggcgcgggcgtggttacgcggcgggtggaagaaaccgcgcatcaggcaggtttggtgttcgccgtcgatccgacttctgccgatgcgtcctgcgtgggcggcaatgtggcgatgaacgcgggcggcaaaaaagccgtgttgtgggggacggcgttggacaacctcgcctactggcagatggtcaaccctcaaggcgaatggctgcgtatcgagcgcgtgcgccacaatttcggcaaaatccacgatgaagaaaccgccgtgtttgacgtacatacgctggattcagacggcctcaatatcgttaaaaccgaacgtttggaaattcccggccacaaatttcgcaaagtcggtttgggcaaagacgttaccgacaaattcttgagcggcctgcccggcgtacagaaagaaggcacggacggcatcatcaccggcgttgctttcgtgttgcacaaaatgccgaaatacacgcgcactgtgtgtatggagtttttcggcacggtcgccaccgctacgccttctatcgtcgaaatccgcgatttcctgctcgcccacgacagcgttcggctggcaggtttggaacatttggactggcgttacgtccgcgccgtcggctacgcaaccaaagcggcgggcaagggacggccgaaaatggtcttgctggcggacgtggtttccgacgacgaagccgccgtagaggcagccgccgaacacatttgcgaacttgcccgcgcccgcgatggcgaaggctttatcgccgtgtctcccgaagcgcgcaaaaccttttggctcgaccgcagccgcaccgccgccatcgccaagcacaccaacgcctttaaaattaacgaagacgtggtcatcccgctcgaaaggctcggcgagtattcggacggcatcgaacgcatcaacattgagctttccatccaaaacaagctcaaactctgtgccgccttggagcaatatctttcgggcaaactccccatcgacaaaatgggcactgacctgccgaccgccgaacttttgggcgaacgcggcaaacacgccttggcccacgttgccgccgtcaaagaacgttgggactggttgctcgccaatttggacacgccgcttgccgactacaaagcccgctacggtgcagccgtccacgccgcgcccgaagccaaagacaatgaaagctgctttaccgcattccgcgatttccgcctgcgcgtgtctgtcaaagcagacgtaatgaaaccactcgccgaaatcttcagcggcaaaaccgataccaagattatccaaggcttgggcaaaatccacgccaaaaccgtacgcggcagagtctttgtcgccctgcatatgcacgccggcgacggcaatgtccacaccaatattccggtcaactcagacgatgccgaaatgcttcagacagcctaccgttcggtcgaacgcattatgaaaatcgcccgttcgctcggcggcgtaatttccggcgaacacggcatcggcatcaccaagctcgaatttttaagcgatgaagaaatgcagccgttttgggactacaaaaaccaagtcgatcccaaacacaccttcaaccgccacaaactgatgaaaggctcggacttacgcaacgcctacacgccgtctttcgagcttttgggcgcggaatcgctgattatggaaaaatcagacctcggcacgattgccgattccgtcaaagactgcctgcgctgcggcaaatgcaaacccgtctgctctactcacgttccgcgtgccaacctgctgtacagtccgcgcaacaaaatcctcggcgtgggcttgctgaccgaagccttcttatacgaagaacaaacccgccgcggcgtttccgtcaaacactttgaagaactcatggacatcggcgaccactgcaccgtgtgccaccgctgcgtcaaaccctgccccgtcaacatcgacttcggcgacgtaaccgtagccgtccgcaactaccttgccgattccggccacaaacgatttgcgcctgccgcagctatgggtatggcgtttttgaacgccaccggcccgaaaaccatcaaagcccttcgcgccgccatgatacagaccggcttcccagcgcaaaactttgcctacaaaatcggcaagcttcttccgatcggcacgaaaaagcaaaaagccgaacccaaggcaaccgtcggcaaagccccaattaaagaacaggttatccatttcatcaaccgtcctttgccgaaaagcgtacccgccaaaacaccgcgctccttattgggcatcgaagacggcaaaagcatccccatcatccgcaaccccgccgcgcccgaagatgccgaagccgtgttctacttcccgggttgcggttcggaacgcctgttcagccaaatcggacttgccgttcaagccatgctctggcacgtcggcgtacaaaccgtcctgccgcccggctatatgtgttgcggctatccgcaagacgcgggcggcaacaaggctaaagccgaagaaatgagcaccaacaaccgcgtggctttccaccgtatggcaaacaccctcaactacctcgacattaagaccgtcgttgtcagttgcggcacttgttacgaccagctcgaaaaataccgctttgaagaaatcttccccggctgccgcatcatcgacatccacgaatacctgctcgaaaaaggcgtgaaactcgacggcgtgcaaggtcagcaatacctctaccacgacccctgccacacccccatcaaaaccatgaacgccacccaaatggccagcagcctgatggggcagaaagtcgtcttaagcgaccgctgctgcggcgagtccggtatgttcgccgtcaaacgacccgatatcgccacccaagtcaaattccgcaaacaagaggaaatcgagaaaaacctcaaagagctgccgcagggtgaacccgtcaaaatgcttacttcctgcccagcctgcctgcaaggcttgagccgctacaccgacgacaacaatatgcctgccgactacatcgtcatcgaaatggcgaaacacatcctcggcgaaaactggctagacgagtttgtgaaaaaagccaacaacggcggcgtggaaaaagtattgctgtaa

SEQ ID NO: 46904 - DNA, 645 bp, Neisseria meningitidis
ttgatgaaactgtatatttacgaccattgcccgttttgtgtgcgtgcgcggatggctgccgggctgtttggcgcggacgttgaagaagccgtgctggcaaacgacgacgaggcaacgccgatcggtatgatcggtgcgaaacaagtgcccgtcctgcaaaaagaagacggttcgtttatgggcgagagtttggacattgtgcggcatttcgaccgcgaagaccgtctgaaagacgaagtccgccccgagatacgggcgtggctggacaaggtgggcggatacaacgacaaactggtgcagccgcgcgtgatcaaaatcgggctgcccgaatttgcaacgccggaagcggtaaaatattttacagacaaaaaagagaaaagcatcggcagcttttccgccaatttgaataaaaccgcccaatatctcgaacgcataaacgcagatttgcaagagttggagaatttgatggacggtgcttcagacggcatcaacggcggaatcggcatggaggatattttggttttccccgttttgaggaatctgaccgtggtgcgcggtatcgaatggcctcaaaaggtgatgggttatttgatgatgatgagtgaaaaatcgggcgtgccgctttattttgacagggcattgtaa

SEQ ID NO: 46905 - DNA, 1350 bp, Neisseria meningitidis
atgaaattaccggtgatgtcgcccgaacattcggcgcaacttcaggcgtttgaggcaaaaatcctgtccaatcacgccaaaatcgaggcgtggttccgcacgcagtggagcgtacaccgcccgccgttttacggttcggtcgatatacgcaatgccggttacaaaatttcgtctatcgatatgaatttgttccccggcggcttcaataatctgaatcccaactttatcccgctggcggcggttgccgcgcaagatgcggtgcaacgcgcctgtgaaacggcgaaatccgtattgattattcccgaaaaccacacgcgcaatacgttttacctgcaaaacgtttacgccctcggcgagattttgtgttcggcagggtatgaagtgcgcttgggcagcctgaatccggaagtaaccgaaccgaccgaatttgaaaccgcattgggcgacaaaatcctgttggaacctttattgcgtacccgcgaccgcgtccatcttgcagacggcttttcgccttgcgtggttttgttgaacaacgatttgtccgccggtattcccgacatcctcaaaggcatcagccaaaccgttttgccgccgttgcacggcggttggacgacgcgccgcaaaacaaatcatttcggcgcgtacaaccaagttgccgccgaatttgccaagttaatcggcatcgacgaatggcaaattaacccttattttgaaaaaatcggcggtttggacttccaagggcgtgaaggcgaagacgcgttggcggaggcggtagaacgtgtgctggcgaaaattcaagccaaatacgacgaatcgggcattaccgacaaacctttcgtcatcgtcaaagccgatgccggcacttacggcatgggcgtgatgagcgtcaaatccgccgacgaagtgcgcggattgaaccgtaaaaaccgcaataaaatggcgaaagtcaaagaaggtttggaagtcagcgaagtgattgtccaagaagggatttatacttatgaaaccttaaacagcgcggtgtgcgaacccgtcgtgtatatgatggaccgcttcgtcatcggcggctttttccgcgtacacgaagggcgcggtgcggacgaaaacctcaacgccggcggtatggtgtttgttccgctgtctaacagcattcctaccggtaacggcgataattcccaagaagcgcccgaagcctgcaagcgcgtattcgaacaatgggactcgctgggtatgccgcgctctgaaaaagactgcgacgtggacaacgaacacaaccgcctctacgtttacggcgtaatggcacgcctgtcgcttctggcggcttcaatcgagttggaagaaacggcgtaa

SEQ ID NO: 46906 - DNA, 417 bp, Neisseria meningitidis
atgcgcttactccatactatgctccgcgtgggcaatctcgaaaaatcccttgatttctaccaaaacgttttgggcatgaaactgctccgccgaaaagactatcccgaaggcagatttacccttgccttcgtcggttacggcgatgaaaccgacagcacggttttggaactgacgcacaactgggatacggaacgatacgacttgggcaacgcttacggacacatcgcgattgaagtggacgatgcctacgaagcctgcgaacgtgtgaagcggcagggcggaaacgtcgtccgcgaagccggcccgatgaaacacggcacaaccgtgatagccttcgtcgaagaccccgacggatacaaaatcgagttcattcaaaagaaaagcggtgacgattcggttgcctatcaaactgcctga

SEQ ID NO: 46907 - DNA, 423 bp, Neisseria meningitidis; identical to SEQ ID NO: 45387

SEQ ID NO: 46908 - DNA, 807 bp, Neisseria meningitidis
atgccgacagttttcatctttttgatggcagtttacgcaggattgggtgcatttgcatggcactgccaacagcaggggcgcggccgggattacccgtggaagacggaattgccggttttgggcgcggcattgaccgtccacggcgcggcactgcttatgccggtcattcaagacaaaatcatcattatgggcttcgggtattccggcagcctgattgtttggatgatgctgtttatttattttgccggcagcttcttttatccgctgcgcggagtgcagttgctgctgtatccttgcgccgtactgatgctgctgtcaggtttggtttttcctggaaaattctcgggatatgaaattaccgaccttccctttatgctgcatatcggaacttcgctgctcgcatacgggctgttcggcatcgcaacattattgtccgttttgaccctgctgctgaatcggagcctgcaccgcaggaacttctccaagctcgcaggattcctgccgtcgctgctcagtttggaaaaactcatgttccaggccatgtgggcaggtttcatcctgctgacctattccgtcgtcagcggaacattttttgccgaagccgtattcggcaaacccatgacctttacccataaaaccgtattcggcatattgtcatggctgatttacggcggactgctgctcaagcacagcatgaccgcatggcgcggcaaaaaagccgccgtgtggaccatcatcggatttgtcagccttatgattgcctatatgggcagcaagttcgtattggaaatcattctgaaaagataa

SEQ ID NO: 46909 - DNA, 609 bp, Neisseria meningitidis; identical to SEQ ID NO: 45110

SEQ ID NO: 46910 - DNA, 525 bp, Neisseria meningitidis
gtgttggacagggaaggctatcgccccaatgtcggtatcatcttaaccaacaaccgcgacgaagtcttttggggtaagcgcgtgcgcgaacattcttggcagtttccgcaaggcggcatcaagccgggcgaaagccccgaaaccgcgatgtaccgcgagctttacgaagaagtcggacttctgtcgcaacacgtcaaaatcgtcgggcggacgcgcgactggctgcgttacgacgtgccgaacaactgggtacgccgcgaatggcgcggctcttatcgcgggcagaagcagatttggtatctcctgcgcctgaccggccgggattgcgatgtcaacctgcgcgccacccgccaccccgaatttgacggctggcgttggcaccaatattgggcgcccgttgacgaagtgattgatttcaaacgcgacgtttatttgggggcattgaaagaactttcttcccgcttcctgcgcggtatggaaagttatgaagactttgccgcccgccaactttccggcaaccggtaa

SEQ ID NO: 46911 - DNA, 1311 bp, Neisseria meningitidis
atgtacgctaaaaaaggcggtttgggactggttaaaagccgccgtttcgcacctcttttcgctacgcagtttctcggcgcgttcaacgacaatgtgttcaaaaccgcgctgtttgtgatgattgggttttacggtttggggcaaaacggcttcctgcctgccggacagatgttgaacttgggcgcgttgttgtttattttgccgtatttcctgttttcctcgctgtcggggcagttgggtaacaaattcgacaaggccgttttggcgcgttgggtcaaggtgctggaaatgatcattatggcggtggcggcatacgggttttatatccggtctgccccgctgcttttggcgtgtctgttttgcatgggcgcgcaatcgacgctgttcgggccgctgaaatacgccatcctgcccgattatctcgacgacaaagagttgatgatgggcaacagcctgattgaatcgggtacgtttgtcgccatcctgttcggtcagattttgggaacggcggtggcaggtgtaccgccttatattgtcgggatactggttttgctggtcgccgtcggaggcacggtcggcagcctgtttatgccgtccgtccccgccaaggctgccgatacccaaattgagtggaatattgtccgtggcacaaaatccctgcttcgtgaaacggtgcggtacaaacccgtctttaccgctattatcggtatttcgtggttttggtttgtcggcgcggtttataccacgcaactgccgacctttacccaaatccatctgggcggcaacgacaatgttttcaacctgatgcttgccctgttttccatcggtattgccgccggttcggtactgtgtgccaagttcagcagggaacgcctgatgttggcttgggtaacggttggtgcgttgggtttgacggtttgcggcctggttttggtgtggctgacgcacggacaccgttttgaagggctgaacggcattttttggtttttatcgcaaggatgggcatatcccgtgatggcggtgatgacgctgatcggctttttcggcggatttttctccgttccgctctatacctggctgcaaaccgccagtagcgagactttccgcgcccgcgccgttgccgccaacaatatcgttaacggtatttttatggtttccgccgccgttttgagcgcggtgttgctgtttttgtttgacagcatttccttgttgtatctgattgtcgctttgggcaatattccgttgtcggtatttttgattaagcgcgaaaggcggtttttaggcgcggcggcaatcaggaaaaaaccttga

SEQ ID NO: 46912 - DNA, 1092 bp, Neisseria meningitidis; identical to SEQ ID NO: 38959

SEQ ID NO: 46913 - DNA, 1251 bp, Neisseria meningitidis
atgtggacgggatttttttcaaaatcaggcactggaattgcagaggaaaggcatcaaaaccgccgtgcttgcaccgatgttccgctacttgcggaaagaaacagcaagcatcctgaccgaccttacggttttgcaaaatatcggcaaagcggtttggacatctatgcatggcacggcatgtatttcttcccccgctttccgttcatcgacatcgaccgcatccgctgggtgcgcgtgggtttgaaagccttcaaacactacatccgcgaaaacgggctgcccgacctgattcacgcccaccgcatgaactatgccggcatactcgcccaaaaaatttcccaaaaatacggcatcccctatgtcgtcacgaaacacagcagcaccattacgcgcggtctgatccgtccccaccaatggcagcctatgaaaaatgcggcggcgcacgccgccgcacgtctcgccatcagccgccatttcgcacacgtcctgcaacacaaatacggctgcgaatggcagtacctcatggcagtacctccccaacatactgggcggaatattcaaccgaccgtttgacccaacatactgggcggaatattcaaccgaccgtttgaacaaagagaaaaaaacaacaaaccgcatttcgtgttctgcaccgtctcgcaccttcgccgtctcaaaggacacgatgtcctgctcactgcctttgcccgggcgttggcacaatgcccgcaactgcgtctaaacatcggcggcagcggacaggaagaacagcggctgaaacagcaggcggcagacttgggcattacccatgccgttacatttttgggcgcactgcaacccgaagcagtcttggatttgatgaagaacagcgacgcatttgtccttgccagccgcaccgaaaccttcggcgtggtctatatcgaagcactgtcccaaggattgcccgtcattgcaacacgctgcggcggtgcggaatctattgtttcagacggcaacggatatttggttcctgttgacgacgacgatgcccttgccgacgcactcatcaaaatgtatgaacaccactctgatttcgaacctgcccgacttagagaaaactgtctgaacgaatttggcgaaaatgccgttataggcaggttgatcggcattttccgacaggcaatcgcagaatacggtaagaaaataccggtgaaatatagtggattaacaaaaatcaggacaaggcgacgaagccgcagacagtacaaatag

SEQ ID NO: 46914 - DNA, 1065 bp, Neisseria meningitidis; identical to SEQ ID NO: 39464

SEQ ID NO: 46915 - DNA, 420 bp, Neisseria meningitidis
gtggggaaatgtatgactgtatggtttgttgccgctgttgccgtcttaatcatcgaattattgacgggaacggtttatcttttggttgtcagcgcggctttggcgggttcgggcattgcttacgggctgaccggcagtacgcctgccgccgtcttgaccgccgctctgctttccgcgctgggtatttggttcgtacacgccaaaaccgccgtgggaaaagttgaaacggattcatatcaggatttggatgccggacaatatgtcgaaatcctccgacacacaggcggcaaccgttacgaagttttttatcgcggtacgcactggcaggctcaaaatacggggcaagaagagcttgaaccaggaactcgcgccctaatcgtccgcaaggaaggcaaccttcttatcatcgcaaacccttaa

SEQ ID NO: 46916 - DNA, 252 bp, Neisseria meningitidis
atgagaaaaagtcgtctaagccagtataaacaaaataaactcattgaactgtttgtcgcaggtgtaactgcaagaacagcagcagagttagtaggcgttaataaaaataccgcagcctattattttcatcgtttacgattacttatttatcaaaacagtccgcatttggaaatgtttgacggcaaagtagaagcagatgaaagttattttgctgaacgacaaaaccatatcaatggaattgggaacttttga

SEQ ID NO: 46917 - DNA, 1635 bp, Neisseria meningitidis; identical to SEQ ID NO: 45125

SEQ ID NO: 46918 - DNA, 879 bp, Neisseria meningitidis
atgatgagtcaacactctgccggagcacgtttccgccaagccgtgaaagaatcgaatccgcttgccgtcgccggttgcgtcaatgcttattttgcacgattggccacccaaagcggtttcaaagccatctatctgtccggcggcggcgtggcagcctgttcttgcggtatccctgatttgggcattaccacaatggaagatgtgctgatcgacgcacgacgcattacggacaacgtggatacgcctctgctggtggacatcgatgtgggttggggcggtgcattcaatattgcccgtaccattcgcaactttgaacgcgccggtgttgcagcggttcacatcgaagatcaggtagcgcaaaaacgctgcggccaccgtccgaacaaagccattgtatctaaagatgaaatggtcgaccgtatcaaagctgccgtagatgcgcgcgttgatgagaacttcgtgattatggcgcgtaccgatgcgctggcggtagaaggtttggatgccgctatcgaacgcgcccaagcttgtgtcgaagccggtgcggacatgattttccctgaagccatgaccgatttgaacatgtaccgccaatttgcagatgcggtgaaagtgcccgtgttggcgaacattaccgagtttggttccactccgctttatacccaaagcgagctggctgaaaacggcgtgtcgctggtgctgtatccgctgtcatcgttccgtgcagcaagcaaagccgctctgaatgtttacgaagcgattatgcgcgatggcactcaggcggcggtggtggacagtatgcaaacccgtgccgagctgtacgagcatctgaactatcatgccttcgagcaaaaactggataaattgtttcaaaaatga

SEQ ID NO: 46919 - DNA, 1410 bp, Neisseria meningitidis
atgaaatacatcagcacgcgcggcgaaaccgcacacaaaccgttcagcgaagttttattgatggggcttgcacccgacggcggcctgatgctgccggaacattatccgcaaatcgggcgggaaaccttggacaaatggcgcggtttggcttatcccgaattggcgtttgaaattatgcgcctgttcgttaccgacattccggaggacgatttgcgcgatattctgaaccgtacttacacggaagcggcgttcggtactaaggaaatcacccccgtccgcacgctttcagacggcatcaaaatccaagccttgtccaacggcccgacgctggcgttcaaagatatggcgatgcagtttttgggcaatgcgtttgaatatgttttaaacaaagaaggcaaaaaactcaatatcttgggcgcaaccagcggcgatacgggttcggctgcggaatatgccttgcgcggcaaaaaaggtgtgaatgtatttatgctgtcgcccgatggcaaaatgagcgcgttccaacgtgcgcagatgtacagcctgcaagacgggaatatccacaatatcgccgtgaagggtatgtttgacgactgtcaggatattgtgaaggcggtgcaaaacgatgccgcgttcaaggaaaaataccatatcggtacggtcaattcgattaactggggacgcatcgtcgcgcaagtggtttattactttgccggctatttcaaagcgacgcaaagcaatgacgagcaagtcagcttttgcgtgccgagcggcaacttcggcaacgtttgcgcgggacatattgccaaacagatgggcttgcccatccgccgcctgattgtcgcgaccaatgaaaacgatgtgttggacgagtttttcaaaaccggcgcgtaccgcccgcgcaacagcgcgcatacttatgttacctccagcccatctatggacatttccaaagcgtccaatttcgagcgtttcgtgttcgacctgatggatcgcgatcctcaggaaatcaatacgctgtggacggaagtcgcggcgggcaagggctttgacttgcagtttgccttagacaaagtcggcggcaaatacggctttacctccagcaagtccacccacgccgaccgcctcgccaccatcaaacaggtttacgagcaagaccaagaactcatcgacccgcacactgccgacggcgtaaaagtcgcccgcgaagtgcgcgaagaaggggaaacggtggtttgtttggaaaccgcgttggcagcgaaattcgatgcgaccatacgcgaagccgtcggcgatgccgccattccgcgccctgccgcgctggaaggtttggaaaacctgccgcagcgcgtgcaaaccgtgccgaacagtgcggatgcggtaaaaggcatcatcgaacaaacccttgcctga

SEQ ID NO: 46920 - DNA, 1218 bp, Neisseria meningitidis; identical to SEQ ID NO: 36341

SEQ ID NO: 46921 - DNA, 447 bp, Neisseria meningitidis; identical to SEQ ID NO: 44675

SEQ ID NO: 46922 - DNA, 1218 bp, Neisseria meningitidis
ttgggaggaaaaatgcaaactttaatttcagcagataatcatttgctgctgtgggcttttgttatgttagctgccgctgctgcgatttttattgagcaaaacagtcgcttggctgggaaagtccctggtgcagtattagctttattgattgcgttgattgcttctaatttgggtgttattccgacggatgctccagtatttgatgctgtatggtcttatattgtacctcttgctattccgttgttattgtttcaattagatcttcatgctctatttaaggaaagtggacgtatgctgtttattttcctgattagttcactagggacggtcattggaacgcttgtctcatttgcactattgaaaaactatattcctgaactagataaggtagctggcatgatttcagcatcttatacgggaggtggtgttaattttgcagctatgtcagctaagcttaaccctgctaaagatgttattgcagcaacaattgttgctgataatttgatgatggcttgttacttttttattttgattggtatctcttcctcatattgggtcagaaaagtttggggaagtccatatcaggataaattggagcaggaatatcatgatccgagtgtgaataaggctgccgagtattggaaacctaaatccatttcgctacagagtatagccttatctttggctgcctcgattttgttggtcgcagtttcattctcattatccagttttttgcaaaatcattttcaaagtgttgatggtgttgcattaaaaatgctgacaggtttaattagtgacaaatatttgctgttaacgacatttacattggcagttgttttatttttccgtaaaggcattcaaaaactagatggcagtcaagaattagggacatattgtatttatctgttttttgttgtgattggtgttcctgcctctataccgttaattattaaaacagcaccattactctttgtttttactttgattattgcggtattgaatttgttactgacgttagtgttaggcaagctgttcaaattcagtattgaagaaattgtattggcttgtaatgccaatattggagggccgactactgcagcagccttagccatcagtaaaggttggcgtgatttagtcggtgcaattttgttaattggtactgtaggctacattatcggtaactatataggttcgtttgtatatgccctattgagctga

SEQ ID NO: 46923 - DNA, 411 bp, Neisseria meningitidis
tggattaacaaaaatcaggacaagacgacgaagccgcagacagtacaaatagtacggcaaggcgaggcaacaccgtactggtttaaatttaatccacgatattacgaacaatgcaaaaacatcagccaaaccgcagcaacgtttaacttgtcaagaaacacgctttacctgtggattcgccttaaaaaacaaacaggcagcctaaaacatcaagttaccggtctaaatgccgtcaaatcggataggcaaaaaccggctcaatatattgggcaacaccaggatgcctatctgcatgaaatcgccaaacattttgattgtacggcagccaccgtttgctatgcactcaaacagatggggataacgcgcaaaaaaagaccaccacttacaaagaacaagacccggccaaagtaa

SEQ ID NO: 46924 - DNA, 291 bp, Neisseria meningitidis; identical to SEQ ID NO: 39870

SEQ ID NO: 46925 - DNA, 234 bp, Neisseria meningitidis; identical to SEQ ID NO: 41393

SEQ ID NO: 46926 - DNA, 423 bp, Neisseria meningitidis
ttggtttttgctcggatttttcctggctttgtctgtcgctttgatatttatatgacgtgttttaaaatcaggctttcaaaacaacctttgaaagacagaaacatgaacaagccgtttatcacgcaggcgcagttggcactttataaatatcagccgtccagcaagtattttgggcagtcgatggcattaattgcgtctaaggaatttgaagagtttgtaagaaatgtaaaagaatacgacgtaatagaatgtttctcttattttttaaataagagggtaacgcataatatttggaaaatttatttttctgatgagtctaatatttttattaggaagtcagaagaaaatggaaaaatttcgcatgaatttatttactcggaattttctgatagcaacaccgattttaatgtgttgttctcttag

SEQ ID NO: 46927 - DNA, 294 bp, Neisseria meningitidis
atgtctttcggctatttgattgcaacatcgcaaccttgcgaattgttgacaaaatctcgaggtgaaactttttctttaattatggataagatggatttatggatttatttcagattttgtgaaggaaatatttatacaataaggaagaatgaaactgaatcttgtcttacagaaagaggaggcaaatggttgaaacatatttatgaatttaatcggggaagttttattttttcttatgtgcttctaaaaaagagagaaagcgaagagaattttgcagaaattgttttaaaataa

SEQ ID NO: 46928 - DNA, 783 bp, Neisseria meningitidis; identical to SEQ ID NO: 44471

SEQ ID NO: 46929 - DNA, 450 bp, Neisseria meningitidis; identical to SEQ ID NO: 44886

SEQ ID NO: 46930 - DNA, 1194 bp, Neisseria meningitidis; identical to SEQ ID NO: 36937

SEQ ID NO: 46931 - DNA, 303 bp, Neisseria meningitidis; identical to SEQ ID NO: 40930

SEQ ID NO: 46932 - DNA, 447 bp, Neisseria meningitidis; identical to SEQ ID NO: 39246

SEQ ID NO: 46933 - DNA, 1188 bp, Neisseria meningitidis
atggcagagatctgtttgataaccggcacacccggttcagggaaaacattaaaaatggtttccatgatggcaaacgatgaaatgtttaagccggatgaaaacggcatacgccgtaaagtatttacgaacatcaaaggcttgaagataccgcacacctacatagaaacggacgcgaaaaagctgccgaaatcgacagatgagcagctttcggcgcatgatatgtacgaatggataaagaagcccgaaaatatcgggtctattgtcattgtagatgaagctcaagacgtatggccggcacgctcggcaggttcaaaaatccctgaaaatgtccaatggctgaatacgcacagacatcagggcattgatatatttgttttgactcaaggctctaagcttctagatcaaaatcttagaacgcttgtacggaaacattaccacatcgcttcaaacaagatgggtatgcgtacgcttttagaatggaaaatatgcgcggacgatcccgtaaaaatggcatcaagcgcattctccagcatttatacactggataaaaaagtctatgacttgtacgaatcagcggaggttcataccgtaaataaggtcaagcggtcaaagtggttttatactctgccagtaataatattgctgattcccatttttgtcggcctgtcctataaaatgttaagtagttatggaaaaaaacaggaagaacccgcagcacaagaatcggcggcaacagaacagcaggcagtacttccagataaaacagaaggagaatcggtgaataacggaaaccttacggcagatatgtttgttccgacattgtccgaaaaacccgaaagcaagccgatttataacggtgtaaggcaggtaagaacctttgaatatatagcaggctgtgtagaaggcggaagaaccggatgcacatgctattcgcatcaaggtacggcattgaaagaagtgacgcaagtgatgtgtaaggactatgtaaaaaacggcttgccgtttaacccatacaaagaagaaagccaagggcgtgatgtccagcaaagtgagaagcaacattcggacaggccgcaagttgccgcgttgggcggaaagtctcagcaaaatcttatgtatgataattggcaggagcgcggaaaaccgtttgaaggaatcggcgggggcgtggtcggatcggcaaactga

SEQ ID NO: 46934 - DNA, 957 bp, Neisseria meningitidis; identical to SEQ ID NO: 39193

SEQ ID NO: 46935 - DNA, 276 bp, Neisseria meningitidis; identical to SEQ ID NO: 45703

SEQ ID NO: 46936 - DNA, 228 bp, Neisseria meningitidis; identical to SEQ ID NO: 40081

SEQ ID NO: 46937 - DNA, 807 bp, Neisseria meningitidis; identical to SEQ ID NO: 45050

SEQ ID NO: 46938 - DNA, 237 bp, Neisseria meningitidis; identical to SEQ ID NO: 37424

SEQ ID NO: 46939 - DNA, 672 bp, Neisseria meningitidis; identical to SEQ ID NO: 42198

SEQ ID NO: 46940 - DNA, 987 bp, Neisseria meningitidis; identical to SEQ ID NO: 44177

SEQ ID NO: 46941 - DNA, 690 bp, Neisseria meningitidis; identical to SEQ ID NO: 38413

SEQ ID NO: 46942 - DNA, 1002 bp, Neisseria meningitidis
ttgatgaagattgcgatttacggtacgaaaagctatgaccgcgaacattttacccgcgccaaccggcatttcggcttcgagctggagttttttgattttatgctggatgcgaaaacggcgaaaatggcggaaggcgcggaagcggtttgtatttttgtaaacgacgacggcagccggcccgtgttggaaaaattggcgcaaattggcgtgaaaactgtggcgttgcgttgtgccggcttcaataatgtggatttaaaggcggctgaagagttgggcttgaaagtcgtgcgcgtgcctgcctattcgcccgaatcggttgcggaacatacggtcggtctgatgctgactttgaaccgccgtatccacaaagcctatcagcgtacccgcgatgcgaatttttcgctggaaggtctgaccggtttcaatatgtacggcaaaacggcgggcgttatcggcacggggaaaatcggtattgcaaccatgcggattttaaagggtttcggcatgaacctgctggctcacgatccgttttgcaaccccgaagcggaaaaaatcggcggcaggtatgtggatttggacgagctgtatgcccagtcggacatcatcacgctgcattgccccgccacgccggaaaaccactatatgctgaacgaagcggcgttcgacaaaatgaaagacggcgtgatgattatcaacaccagccggggcgggctgattgacagtgccgccgcgattgaggcgttgaaacgccggaaaatcggcgcattgggcatggatgtgtacgagaacgagcgcgagctgttttttgaagacaaatccaacgatgtgattaccgacgacgtgttccgccggttgtcgtcctgccataacgtgctgtttaccggtcatcaggcgtttttgacggaagaggcgttgggtaatatttcggaagttacgctgtccaatatccgcgaggtcggacagaccggcgattgcggcaatgcggttcgtgccgacggctga

SEQ ID NO: 46943 - DNA, 399 bp, Neisseria meningitidis
atgtgcgagttcaaggattttagaagaaacatcccttgttttgaagagtatgacgaaaattcatttattggcaaatggtatgatgacggggtgtgggatgatgaagaatattggaaattggagaatgctttaatcgaggttagaaaaaaatatccttatccgatggatataccaagggacatcgtgattggaatcggtaccattattgattttttaatggttcaaaattggaaactttttgaaattaaagcttccccttggttgcctaaaagtgtcaaaattaatgagcgttatgaaaggttcagagtaatgctccgttatatttttactgatctagatgtagatgactggaaatttttttactttccaatacaacatagtaaaggtagattgagatga

SEQ ID NO: 46944 - DNA, 2151 bp, Neisseria meningitidis
atgctcaccgatttagaaaaaaacgccatccgcgaccattaccaaaacatcggcaaaaacctgcccggtttccgtccgcgtgcttcgcagcgggaaatgattgcggcggttgccaacgctttttcgcggacgttggcgcgtgaagaaggcggcgagccgcccaagcgcgagggcgagagcatcgccgtaatcgaagggccgaccggcgtgggcaaatcgcttgcctacctgctggcgggcggcatcatggcgcaaacacgcggcaagcggctgattgtgagcagcgcgacggttgccttgcaggagcagttggtagaccgcgacctgccgtttttggtcgaaaaaagcggtttggaactgaccttcgcacttgccaaagggcgcggccgctatctctgcccctacaaactctaccaactgacgcaaagcaatgcccagcaaaacctgctcggctttgaagcccccgccgtcttgtgggacagcaaacccaagcccgaagaattgaagctgctgcgcgacatcgccgacgaattttccgcccgacggttcaacggcgaccgcgacacttggccggaaaaaatcgatgacgcgatttggctcaaagtgaccaacgaccgccacggctgcctgaaaaccgcctgtcccaaccgtccggaatgtccgttttacctggcacgcgatgtcttggaaaccgtcgatgtcgtcgttgccaaccacgatcttctgcttgccgacatcagtatgggcggcggcgtgattctgcctgcgcccgaaaacagtttctattgcatagacgaagcgcaccacctgcccaaaaaagccctcagccgttttgccgccgaacattcatggaatattgccgtttggacgctggaaaaactgccgcagctgaccggcaaaattgccgcgcttaccgataaagccgaacttgccaacctggccgacgaagccgccgcatccttgctcgacagcctgcacgaatggcagttccatttggcggaagagccgtctttaagtatggggccgtctgaaaacgacagacgaaccaacagcgaaccgacttggctgtgggaagacggcaaaatccccgaaggcctcgaaaccaccgtttccaatacggccattgctgcgcgcagcctgctcaaacacgttgtcgggctgaacgatgcgctttccgccgcgcgccgcgaaaaagaacaggacggcgcgctcctcgaccgcctgaccggcgagttcggcatcttcatcgtccgtatcgaacaaatcagcgcggtttgggatttgctctccaccgtccccctcgaaggcgaagagccgctggcaaaatggataacccgccgtgccgacgacaaaaacgactacattttcaacgccagccccatcagcagcgcatcccaccttgccaacagcctgtggcggcgtgcggcaggcgcggtattgacttccgccaccctgcaatccttgggcaacttcaacctgatgctgcgccaaaccgggctgcaatggctgcccgaaaccaccaccctcgccctcaaaagcccctttgactttgaaaaacagggcgaactctacatcccccccatatacgccagccccaaagaccccgaagcccacaccgccgccgtcatcgaatggctgcccaagcttatttcgcccaccgaagccatcggcacgctcgtcttgttttcctcgcgcaaacaaatgcaggatgtcgccctgcgcctgcccggagactacctgccgctcttgctcgtacaaggcgaattacccaaagccgtcctcctgcaaaaacaccaccgggccatagaagaaggcaaagccagcatcatcttcggactcgacagtttcgccgaaggactcgacctgcccggcaccgcctgcgtgcaagtcatcatcgccaagctgccgtttgcgatgcctgacaaccccatcgaaaaaacccaaaaccgctggatagaacagcgcggcggcaatccttttattgaaatcaccgtccccgaagccggcatcaaactcatccaggccgtcggccgcctcatccgcaccgaacaagactacggccgcgtaaccatcctcgacaaccgcatcaaaacacagcggtacggccaacaattattggccggcctgccgccgtttaaaaggatagggtaa

SEQ ID NO: 46945 - DNA, 936 bp, Neisseria meningitidis
atgatgtatgagataaaacagccttttcatagcggatacttgcaggtgtctgaaattcatcaaatttattgggaagagtcgggcaatcccgacggtgtgccggtcatttttttacacggcggaccgggggcgggggcttcgcctgaatgtcggggttttttcaatcccgatgtgttccgcatcgtcattattgaccagcgcggttgcggacgttcgcgcccgtatgcttgtgcggaagacaatacgacttgggatttggtggcggatattgaaaaagtccgtgaaatgctgggtatcgggaaatggctggtgttcggcggttcgtggggcagtactttgtcgctggcttatgcccaaacccatccggaacgggtaaagggattggtgttgcgcgggatatttttgtgcaggccgtctgaaacggcgtggctgaacgaggcgggcggtgtgagccggatttatccggaacaatggcaaaaatttgtcgcgccgattgctgaaaatcggcggaaccggctgattgaggcgtatcacgggttgctgtttcatcaagatgaagaagtgtgcctgtctgccgcaaaggcttgggcggattgggaaagctatctgatccgtttcgagccggaggaagtggatgaagatgcttatgcctcgctggcaatcgcgcgtttggaaaaccattattttgtcaacggcggctggttgcagggcgatagggcgattttgaacaatatcggcaaaatacagcatatcccgaccattatcgtgcaggggcggtatgatttgtgtacgccgatgcagagtgcgtgggcgctgtcgaaagcctttccggaagcggaattgagggtggttcaggcagggcatcgtgcgttcgatccgcctttggcggatgcgttggttcaggcggttgaggatatttttcctcggttgttgtaa

SEQ ID NO: 46946 - DNA, 1410 bp, Neisseria meningitidis
atgatgaaaaatcgagtgaccaacatccattttgtcggtatcggcggcgtcggcatgagcggtatcgccgaagtcttgcacaatttgggttttaaagtttccggttcggatcaggcgcgaaatgccgctaccgagcatttgggcagcctgggcattcaagtttatcccggccataccgcagaacacgttaacggtgcggatgtcgtcgttacctctaccgccgtcaaaaaagaaaatcccgaagttgtcgctgcgttggagcagcaaattcccgttattccgcgcgccctgatgttggcggagttgatgcgcttccgtgacggcatcgccattgccggcacgcacggcaaaaccacgaccaccagcctgaccgcctccatcctcggcgcggcaggacttgacccgactttcgttatcggcggcaaactcaacgccgcaggcaccaacgcccgcttgggcaaaggcgaatacatcgttgccgaagccgacgagtcggatgcatcctttctgcacctgacaccgattatgtccgtcgttaccaatatcgacgaagaccatatggatacctacgggcacagcgtcgaaaaactgcatcaggcgtttatcgatttcatccaccgtatgcccttctacggcaaagcctttttgtgtattgacagcgaacacgtccgcgcgattttgcccaaagtgagcaaaccttatgctacttacggtttggacgataccgccgacatctacgccaccgacatcgaaaacgtcggcgcgcaaatgaaattcaccgtccatgttcaaatgaaaggacatgagcaggggtcgtttgaagtcgtgctgaatatgcccggcagacacaacgtgctgaacgcattggcagccatcggcgtggcgctggaagtcggcgcatcggttgaagcgatccaaaaaggcttgctcggctttgaaggtgtcggccgccgcttccaaaaatacggcgacatcaagttgccaaacggcgggaccgcgctcttggtggacgactacggacaccaccccgtcgaaatggcggcgacccttgccgccgcacgcggcgcgtatccggaaaaacgtttggtactcgccttccagccgcaccgctatacccgcacgcgcgatttgtttgaagactttaccaaagtcctcaataccgttgacgcgctggtgctgaccgaagtttatgccgccggtgaagagccgattgccgccgccgattcccgcgctcttgcccgcgccatccgcgtgttgggcaaactcgagccgatttactgcgaaaacgttgccgatctgcccgaaatgctgttgaacgttttgcaggacggcgacatcgtgttgaatatgggtgcgggaagcatcaaccgcgtccccgccgcgctgctggaattgtcgaaacagatttga

SEQ ID NO: 46947 - DNA, 780 bp, Neisseria meningitidis; identical to SEQ ID NO: 39113

SEQ ID NO: 46948 - DNA, 2058 bp, Neisseria meningitidis
gtgcagcgcactgaccgatgccggacaggttgccgcctttatcgaagcgcactgacttcgttctgcaaaaagcagcctgccctcttcaggctgcttttcatgtccgaacggcggcagccccatatttacgctataatccatcccgaccaaaccaccgacagcggctgccgttgcagttcccgccctaccgatatgatagaaaaactgactttcggactgtttaaaaaagaagacgcgcgcagctttatgcgcctgatggcgtacgtccgcccctacaaaatccgcatcgttgccgccctgattgccattttcggcgttgccgccaccgaaagctaccttgccgccttcatcgcccccctgattaaccacggcttttccgcacctgccgcgccgcccgagctgtctgccgccgccggcatcatttccaccctgcaaaactggcgcgaacagtttacctatatggtttgggggacggaaaacaaaatctggaccgtcccgctctttctcatcattctcgtcgtcatccgtggcatctgccgctttaccagcacctatctgatgacttgggtctccgtgatgaccatcagcaaaatccgcaaagatatgtttgccaaaatgctgaccctttcctcccgctaccatcaggaaacgccgtccggcaccgtactgatgaatatgctcaacctgaccgaacagtcggtcagcaacgccagcgacatcttcaccgtcctcacgcgcgacacgatgatcgttaccggcctgaccatcgtcctgctttacctcaactggcagctcagccttatcgtcgtcctgatgttccccctgctctccctgctctcgcgctactaccgcgaccgtctgaaacacgtcatttccgactcgcaaaaaagcataggcacgatgaacaacgtgattgccgaaacccatcagggacaccgcgtcgtcaagctgttcaacgggcaggcgcaggcggcaaaccggttcgacgcgatcaaccgcaccatcgtccgcctcagcaaaaaaatcacgcaggcaacggcggcacattccccgttcagcgaactaatcgcctcgatcgccctcgccgtcgtcatcttcatcgccctgtggcaaagccaaaacggctacaccaccatcggcgaatttatggcattcatcgtcgcgatgctgcaaatgtacgcccccatcaaaagccttgccaacattagcatccctatgcagacgatgttcctcgccgccgacggcgtatgtgcatttctcgacaccccgcccgaacaggacaaaggcacgctcgcaccgcagcgtgtcgaagggcgcatcagcttccgcaacgtcgatgtcgaataccgttcggacggcatcaaagccctcgacggcttcaacctcgacatcagacaaggcgaacgcgtcgccctggtcggacgttccggcagcggcaaatccaccgtcgtcaacctgctgccccgctttgtcgaaccgtctgccggcaacatctgcatagacggtatcgacatcgccgacatcaaactcgactgcctgcgcgcccaatttgccctcgtctcccaagacgtattcctgtttgacgacaccctgtttgaaaacgtccgatatagccgtcccgacgcgggcgaagccgaagtcctatccgccctccaagccgctaacctgcaaagcctgatcgacgcatcaccgctcggactgcaccagcccatcggatcgaacggcagcaacttatccggcggacagcggcaacgcgttgccattgcccgcgccattttgaaagacgcgccgatattattattggacgaagccaccagcgcattggacaacgaatccgaacgcctcgtccaacaggcgctcgaacgcctgatggaaaaccgcaccggcatcatcgtcgcccaccgcctgaccaccatcgaaggggccgaccgcatcatcgtaatggacgacggcaaaatcatcgaacaaggcacacacgaacaactgatgtcccaaaacggctactacacgatgttacgcaatatctcaaacaaagatgccgccgtccggacggcataa

SEQ ID NO: 46949 - DNA, 966 bp, Neisseria meningitidis; identical to SEQ ID NO: 46197

SEQ ID NO: 46950 - DNA, 630 bp, Neisseria meningitidis; identical to SEQ ID NO: 38660

SEQ ID NO: 46951 - DNA, 435 bp, Neisseria meningitidis; identical to SEQ ID NO: 45690

SEQ ID NO: 46952 - DNA, 243 bp, Neisseria meningitidis
atgatcccttatgttaaaaggaatcctatgaaagaatacaaagtcgtcatttatcaggaaagccagttgtccagcctgtttttcggcgcggcaaaggtcaaccccgtcaatttcagcgcgttcctcaacaaacaaacccccgaaggctggcgggttgtaacgatggaaaaagatttgcgccgtatgctgttgtttttcaaacgcgaggcctacgtcgtcattttggagcgggaccgtgtttaa

SEQ ID NO: 46953 - DNA, 1050 bp, Neisseria meningitidis
atgcaaaacaacaacgaatttaaaattggtaatcgttcagtaggttacaaccacgaaccattgattatctgtgaaatcggcatcaatcatgaaggctctttaaaaacagcttttgaaatggttgatgctgcctataatgcaggcgctgaagttgttaaacatcaaacacacatcgttgaagacgaaatgtctgatgaggccaaacaagtcattccaggcaatgcagatgtctctatttatgaaattatggaacgttgcgccctgaatgaagaagatgagattaaattaaaagaatacgtagagagtaagggtatgatttttatcagtactcctttctctcgtgcagccgctttacgattacaacgcatggatattccagcatataaaatcggctctggcgaatgtaataactacccattaattaaactggtggcctcttttggtaagcctattattctctctaccggcatgaattctattgaaagcatcaaaaagtcggtagaaattattcgagaagcaggggtaccttatgctttgcttcactgtaccaacatctacccaaccccttacgaagatgttcgattgggtggtatgaacgatttatctgaagcctttccagacgcaatcattggcctgtctgaccataccttagataactatgcttgcttaggagcagtagctttaggcggttcgattttagagcgtcactttactgaccgcatggatcgcccaggtccggatattgtatgctctatgaatccggatacttttaaagagctcaagcaaggcgctcatgctttaaaattggcacgcggcggcaaaaaagacacgattatcgcgggagaaaagccaactaaagatttcgcctttgcatctgtcgtagcagataaagacattaaaaaaggagaactgttgtccggagataacctatgggttaaacgcccaggcaatggagacttcagcgtcaacgaatatgaaacattatttggtaaggtcgctgcttgcaatattcgcaaaggtgctcaaatcaaaaaaactgatattgaataa

SEQ ID NO: 46954 - DNA, 1008 bp, Neisseria meningitidis
atgagcaccttcttccagcaaaccgcccaagccatgattgccagacacatcgaccgtttcccactattgaagttggaccaggtgattgattggcaaccaatcgaacaatacctgaaccgtcaaaaaacccgttaccttagagaccaccgcggccgtcccgcctacccgctgttgtccatgttcaaagccgtcctgctcggacaatggcacagcctctccgatcccgaactcgaacacagcctcattacccgcatcgatttcaacctgttttgccgtttcgacgaactgagcatccctgattacagtactttatgccgctaccgcaactggctggcgcaagacgacaccctgtccgaattgctcaaactgattaactgccaactgaccgaaaaaaacctaaaagtagagaaagcatccgccgccgtcgttgacgccaccattattcagaccgccggcagcaaacagcgccaggccatagaagtcgatgaagaaggacaagtcagcggccaaaccacaccgagtaaggacagcgatgcccgttggataaagaaaaacggcctctacaaactcggttacaaacaacatacccgcaccgatgcggaaggctatatcgagaaactgcacatcacccccgccaatgcccatgagtgcaaacacctgccgccgttgttggaagggttacccgaaggtacgaccgtctatgccgacaaaggctatgacagtgcggaaaaccggcaacatctggaagagcgtcagttgttagacggcattatgcgcaaagcctgccgcaaccgtccgctgtcggaagcgcaaaccaaacgcaaccgatatttgtcgaagacccgttatgtggtcgaacaaagcttcggtacgctgcaccgtaaattccgctatgcgcggtcaacctatttcggactgattaaagtgagtgcgcaaagccacctgaaggcgatgtgtttgaacctgttgaaagccgccaacaggctaagtgcgcccgctgccgcctaa

SEQ ID NO: 46955 - DNA, 501 bp, Neisseria meningitidis; identical to SEQ ID NO: 45157

SEQ ID NO: 46956 - DNA, 624 bp, Neisseria meningitidis
ttggtaaataccttcttcaaacggtcaatgccgtctgaaaaaccttgtttcaggtttcaggcgacctttgaaaacaggctaaaaagcatggactataaccaaactgttttatctcatttgcaaaatttttggaaacatcatgatattaaaggatttacttgggctttaggaaggattgttgaagaacttcccgatttccaagttttccaagtgattcctaatcatgaagatgagccttgggtttatgtcagctctggaataggtcaatttttagagcaggagttttttatcatcagcccatttgaaacacctgaacatattgagaccttggcaatgctggcatctgcaagtatgcattatcccgatcgatttcaattagggaaaacggtcaatatcggcagaccgtgggttgagcaatcatccttccagcattttctgatttctctgccttatccttatgggcaagaattggaatatatggataatgtccgatttttctggttattgccaattacccagccagaaagacttttcttgaatactcattcagtagaagacttggaaacgagatttgatgagctaggtattgattatttggatataaatcgtgcaagcgttatttga

SEQ ID NO: 46957 - DNA, 510 bp, Neisseria meningitidis; identical to SEQ ID NO: 39924

SEQ ID NO: 46958 - DNA, 786 bp, Neisseria meningitidis; identical to SEQ ID NO: 39210

SEQ ID NO: 46959 - DNA, 1209 bp, Neisseria meningitidis; identical to SEQ ID NO: 38616

SEQ ID NO: 46960 - DNA, 552 bp, Neisseria meningitidis; identical to SEQ ID NO: 45173

SEQ ID NO: 46961 - DNA, 279 bp, Neisseria meningitidis
atgtactaccaagtcggaaataaatgtcttgagaagcaccaggctgaaaacctttatttcagcttggtagtaccaagaatcaaagaaaacggacagattgtcagaccggaatataacggcagtctgtggaagatgtcggacggtcagccgctaaggcttttattggcggaatgcagtccgaaagacaacctgcaaagcggtcttgaaacaggctggatagtattcggcgtgatggcgtccgtttactttgtttccctgctgaaaaaggttttgaaatga

SEQ ID NO: 46962 - DNA, 825 bp, Neisseria meningitidis
atgaaatggctcttcacccttttggcggtactcaatattgccgtattcggcggcacggtgggctataaattggccgttaaagcgacgggcggcgtgccggaaaaccgggccgtcgaaaacacgccccccgcaacgcccgccgccgacaatgcggcggcatccgtggaggatacggcggcactgctcaaaccgggcgacatcctgaccgaagagcaggccgagcagttgcgcttgaaaaaggaagcggaacagaaaaaactgagggagaaaaaacagcgcgaggaaaaagcccgccgcgaaaaactcgccgccgaaaaggcgcaggcggaacgcgaaaacggcgcggcggatgccttatgcgccgcgcaggcaagcctcacgatggacgaagacgactaccaccgcatcaaagggcttttgggcaaatggtcgcacgttgccagcaggagcgtcgaaaaacgcaccgccaaagccaaacctgccgacaaaacctaccgcgtcgtcctgcccgtttccgccgatgccgaaaatcaggcggcggagctgtctgccaaaggtttcaaccccataccgtttgacggcgcattgagtttgggtgtcggcaacagccgggaaaacgcccaagccctgcaaaaccggcttgccggcgccggattcggcggggcgcatattgtcgaacactttgccgaagccgacaggcaggacgattctttgagcgtgtcgcgtatgacggttttgtttaccggcgtgaatgccgccgatgcggacgaaattcgtaaaatcacgtccctatacggcaaactgaacctcaagtcttgcaaatag

SEQ ID NO: 46963 - DNA, 525 bp, Neisseria meningitidis
atggatggagttggcaaaaacagacgcggtataaagattgggaaaaatatggaacacctatttgggaaatggctgcccgacttgcccgccgccgtttcagacggcatcgacctgccgatgagccggttattgaaagcccggtcgctgaccgccgcattgcgcgccttgccgcatacattttcggtggaactgctgaaactgggcgaattggagacggaatgcggagggaggctggtgcgcgaagttttgttgaagctggaccgtatccctgttgttgaggcaaggagcgaatgccggataggttcggcgttttggcaaaacattttggactgcggcacgcgccctttgggcgagcgtctgtttcaagccgatttggaaggggcgcgttcggcgtttgagtttgccgtttccggcgaaggatgcggacggtactttgccgcgcggcgttctcggttttcccgtcacggcgaggaaatgctgctgaccgagtattttctgcccgaactgaaacgctttatcggataa

SEQ ID NO: 46964 - DNA, 387 bp, Neisseria meningitidis; identical to SEQ ID NO: 45699

SEQ ID NO: 46965 - DNA, 1800 bp, Neisseria meningitidis
atgaacaatccattggtaaatcaggctgctatggtgctgcctgtgtttttgttgagtgcttgtctgggtggcggcggcagtttcgatttggacagcgtggaaaccgtgcaagatatgcactccaaacctaagtatgaggatgaaaaaagccagcctgaaagccaacaggatgtatcggaaaacagcggcgcggcttatggctttgcagtaaaactacctcgccggaatgcacattttaatcctaaatataaggaaaagcacaaaccattgggttcaatggattggaaaaaactgcaaagaggagaaccaaatagttttagtgagagggatgaattggaaaaaaaacggggtagttctgaacttattgaatcaaaatgggaagatgggcaaagtcgtgtagttggttatacaaatttcacttatgtccgttcgggatatgtttaccttaataaaaataatattgatattaagaataatatagttctttttggacctgacggatatctttactataaagggaaagaaccttccaaggagctgccatcggaaaagataacttataaaggtacttgggattatgttactgatgctatggaaaaacaaaggtttgaaggattgggtagtgcagcaggaggagataaatcgggggcgttgtctgcattagaagaaggggtattgcgtaatcaggcagaggcatcatccggtcataccgattttggtatgactagtgagtttgaggttgatttttctgataaaacaataaagggcacactttatcgtaacaaccgtattactcaaaataatagtgaaaacaaacaaataaaaactacgcgttacaccattcaagcaactcttcacggcaaccgtttcaaaggtaaggcgttggcggcagataaaggtgcaacaaatggaagtcatccctttatttccgactccgacagtttggaaggcggattttacgggccgaaaggcgaggaacttgccggtaaattcttgagcaacgacaacaaagttgcagcggtgtttggtgcgaagcagaaagataagaaggatggggaaaacgcggcagggcctgcaacggaaaccgtgatagatgcataccgtattaccggcgaggagtttaagaaagagcaaatagacagttttggagatgtgaaaaagctgctggttgacggagtggagctttcactgctgccgtctgagggcaataaggcggcatttcagcacgagattgagcaaaacggcgtgaaggcaacggtgtgttgttccaacttggattacatgagttttgggaagctgtcaaaagaaaataaagacgatatgttcctgcaaggtgtccgcactccagtatccgatgtggcggcaaggacggaggcaaacgccaaatatcgcggtacttggtacggatatattgccaacggcacaagctggagcggcgaagcctccaatcaggaaggtggtaatagggcagagtttgacgtggatttttccactaaaaaaatcagtggcacactgacggcaaaagaccgtacgtctcctgcgtttactattactgccatgattaaggacaacggtttttcaggtgtggcgaaaaccggtgaaaacggctttgcgctggatccgcaaaataccggaaattcccactatacgcatattgaagccactgtatccggcggtttctacggcaaaaacgccatcgagatgggcggatcgttctcatttccgggaaatgcaccagagggaaaacaagaaaaagcatcggtggtattcggtgcgaaacgccaacagcttgtgcaataa

SEQ ID NO: 46966 - DNA, 933 bp, Neisseria meningitidis; identical to SEQ ID NO: 44984

SEQ ID NO: 46967 - DNA, 1155 bp, Neisseria meningitidis; identical to SEQ ID NO: 45219

SEQ ID NO: 46968 - DNA, 483 bp, Neisseria meningitidis; identical to SEQ ID NO: 45182

SEQ ID NO: 46969 - DNA, 798 bp, Neisseria meningitidis; identical to SEQ ID NO: 44377

SEQ ID NO: 46970 - DNA, 780 bp, Neisseria meningitidis; identical to SEQ ID NO: 45214

SEQ ID NO: 46971 - DNA, 993 bp, Neisseria meningitidis; identical to SEQ ID NO: 44567

SEQ ID NO: 46972 - DNA, 810 bp, Neisseria meningitidis; identical to SEQ ID NO: 45425

SEQ ID NO: 46973 - DNA, 369 bp, Neisseria meningitidis; identical to SEQ ID NO: 43089

SEQ ID NO: 46974 - DNA, 306 bp, Neisseria meningitidis; identical to SEQ ID NO: 45752

SEQ ID NO: 46975 - DNA, 588 bp, Neisseria meningitidis; identical to SEQ ID NO: 45304

SEQ ID NO: 46976 - DNA, 1380 bp, Neisseria meningitidis
atgttcgctttcaaatccttactcgatatgccgcgcggtgaggcacttgccgtcgtcgtcgctctgattgccgcgatgggctataccatcatttcattggagtggctgccgcatatgtccattattgccgccatcgtcgtgctgattttgtacggcttggcgcgcggtttgaaatacaacgatatgcagcagggcatgataggcgcgttgaatcagggtatgggcgcgatttacctgtttttcttcatcgggctgatggtcagcgcgctgatgatgagcggtgcgattccgacgctgatgtattacggtttcgggctgatttccccgacttatttttatttttccgctttcgcgctgtgttccgtcatcggcgtatccatcggcagcagcctgaccacctgcgccaccgtcggcgttgcctttatggggatggcggcggcgtttcatgccgatatggcgatgacggcgggcgcgattgtttccggtgcgtttttcggcgacaaaatgtccccgctttccgacaccacgggcatttccgcgtccatcgtcggcatcgacctgtttgagcacatcaaaaatatgatgtacaccaccattcccgcgtggctcatcagtgcggcactgatgctgtggcttcttcccagtgtcgccgcgcaggatttgaacagcgtcgaatccttccgcagccagcttgaagccacgggattggtgcacggctattcgctgattccgtttgcgctgttggtcattttggcattgatgcgcgtcaacgccgtggtcgccatgctctttaccgtcatggttgccgttgccgtaacgtatctgcacagcacgcccgatctgcgtcagctcggcgcgtggttttacggcggttacaaactcgaaggcgaagcgtttaaagatgttgtcaaactcatttcgcgcggcggcttggaaagtatgtttttcacgcaaaccatcgtgattctcgggatgagtttgggcggactgttgtttgcgctcggtgtgattccttccctgttggaggccatccgtaccttcttgacgaatgccggacgcgcgacgttcagcgttgccatgacttcggtcggggttaatttcctgatcggcgagcaatatttgagtattttgttgtcgggtgaaacgttcaaacccgtttacgataagctcggtctgcattcgcgcaatctgtcgcggacgctggaagatgcggggacggtgattaacccgctcgtaccgtggagcgtatgcggcgtgttcatcagccacgcgctgggcgtgccggtttgggaatatctgccgtatgcctttttctgctatttgagtttggctttgaccctgttattcggttggacggggctgactttgagcaaaaaataa

SEQ ID NO: 46977 - DNA, 696 bp, Neisseria meningitidis; identical to SEQ ID NO: 39886

SEQ ID NO: 46978 - DNA, 1086 bp, Neisseria meningitidis
gtgcatgcgccggacgtaacgctccgcaacctgaccgttacccgttccggtatgagcctgcctgcaatggatgccggtatttatctcgaagaaaccgccccgcgcgccctgattgaacacaacaatattttggataattcggtcggcgtatatctgcatggttctgccgatgcgatggtgcgcgagaacaaaattgttggcgatgcgactttgcgcgtgaacgagcgaggcaacggcgttaccgtttggaacgcgcccggcgcgcaggtcgtcggcaacgatatttccaaaggccgcgacggcattttttccaataccagcacgcacaacacctataaaaacaaccgcttcagcgatttgcgtttcgccgtccactatatgtacaccaacgacagcgaaatcagcggcaatatttccgtgggcaacaatatgggctatgtgctgatgttttccgagcggctcaaagtgtttgacaatatcgccgtcggcagccgcgaccaaggcatcatgctcaactatgtcaactattccgatattcacgacaacattatcaacaaagcgggcaagtgcgtttttgcctacaatgccaactacgataaactgtccgccaatcattttgaaaactgccaaatcggcatacactttaccgccgccatcgaaggcacgtccctgcacgacaattcctttatcaacaacgaaagccaggtcaaatacgtcagcacgcgctttctcgactggagcgagggcggacacggcaactattggagcgacaacagtgcgttcgatttgaacggcgacggcttcggcgacagcgcgtaccggcccaacggcatcatcgaccaaatcatctggcgcgcgcccgtattgcgcctcttgatgaacagtctcgcaatcagcatcgtcaaatgggcgcaggcgcagtttcccgccgttctgcccggcggcgtggtggacagcaaaccgctgatgaagccttatgtccccaaaattcaaacccgctatcaggcaatgaaggacgagttgctcaaagaagccgaaacacggcagtcggaatggggcagggcggaaaacggttctttgaactag

SEQ ID NO: 46979 - DNA, 333 bp, Neisseria meningitidis; identical to SEQ ID NO: 44638

SEQ ID NO: 46980 - DNA, 1239 bp, Neisseria meningitidis
atggctttttatgcttttaaggcgatgcgtgcggccgcgttggctgccgccgttgcattggtactgtcgtcttgcggtaaaggcggagacgcggcgcagggcgggcagcctgctggtcgggaagcaccggctcccgtcgtcggtgtcgtaaccgtccatccgcaaaccgtcgcattgaccgtcgagttgccggggcgtttggaatcgctgcgtaccgccgatgtccgcgcccaagtcggcggcatcatccaaaaacgcctgttccaagaaggcagttatgtccgtgccggacagccgctgtatcagatcgacagttccacttatgaagcaggtctggaaagcgcacgcgcgcaactggcaacggctcaggcaacgcttgccaaagcggatgcggatttggcgcggtacaagcctttggttgccgccgaagccgtcagccggcaggaatacgatgctgcggtaacggcgaaacgttctgccgaggcaggtgtcaaagcagcacaggcggcaatcaaatctgccggcattaatctgaaccgttcgcgcattaccgcgccgatttccggctttatcggtcagtccaaagtttccgaaggtacgctgttgaatgcgggcgatacgaccgtgctggcaaccatccgccaaaccaatccgatgtatgtgaacgttacccagtctgcatccgaagtgatgaaattgcgccgtcagatagccgaaggcaaactgctggcggcggatggtgtgattgcggtcggcatcaaatttgacgacggcacagtttaccctgaaaaaggccgcctgctgtttgccgatccgaccgtcaacgaatcgaccggtcagattaccctgcgcgccgccgtaccgaacgatcagaatatcctgatgcccggcctgtatgtgcgcgtgctgatggaccaagtggcggtggataacgcattcatcgtgccgcagcaggcggtaacgcgcggtgcgaaagataccgtgatgattgtgaacgcccaaggcggtatggaaccccgcgaggtaacggtcgcgcaacagcagggtacgaattggattgttacgtcgggtctgaaggacggggacaaggtggttgtggaaggcatcagtatcgccggtataacgggtgcgaaaaaggtaacgcccaaagaatgggcgccgtctgaaaaccaagccgccgcgcctcaatccggcgttcagacggcatctgaagccaaaactgcttctgaagcggaataa

SEQ ID NO: 46981 - DNA, 900 bp, Neisseria meningitidis; identical to SEQ ID NO: 36345

SEQ ID NO: 46982 - DNA, 1638 bp, Neisseria meningitidis; identical to SEQ ID NO: 45007

SEQ ID NO: 46983 - DNA, 1848 bp, Neisseria meningitidis
atgcacgacacccgtaccatgatgattaaaccgaccgccctgctcctgccggctttatttttctttccgcacgcatacgcgcctgccgccgacctttccgaaaacaaggcggcgggtttcgcattgttcaaaaacaaaagccccgacaccgaatcagttaaattaaaacccaaattccccgtccgcatcgacacgcaggatagtgaaatcaaagatatggtcgaagaacacctgccgctcatcacgcagcagcaggaagaagtattggacaaggaacagacgggcttcctcgccgaagaagcaccggacaacgttaaaacaatgctccacagcaaaggctatttcagcagcaaagtcagcctgacggaaaaagacggagcttatacggtacacatcacaccgggcccgcgcaccaaaatcgccaacgtcggcgtcgccatcctcggcgacatcctttcagacggcaacctcgccgaatactaccgcaacgcgctggaaaactggcagcagccggtaggcagtgatttcgatcaggacagttgggaaaacagcaaaacttccgtcctcggcgcggtaacgcgcaaagcctacccgcttgccaagctcggcaacacccgggcggccgtcaaccccgataccgccaccgccgatttgaacgtcgtcgtggacagcggccgccccatcgccttcggcgactttgaaattaccggcacgcagcgttaccccgaacaaatcgtctccggcttggcgcgcttccaaccgggcacgccctacgacctcgacctgctgctcgacttccaacaggcgctcgaacaaaacgggcattattccggcgcgtccgtacaagccgacttcgaccgcctccaaggcgaccgcgtccccgtcaaagtcagcgtaaccgaggtcaaacgccacaagctcgaaaccggcatccgcctcgattcggaatacggtttgggcggcaaaatcgcctacgactattacaacctcttcaacaaaggctatatcggttcggtcgtctgggatatggacaaatacgaaaccacgcttgccgccggcatcagccagccgcgcaactatcggggcaactactggacaagcaacgtttcctacaaccgttcgaccacccaaaacctcgaaaaacgcgccttctccggcggcatctggtatgtgcgcgaccgcgcgggcatcgatgccaggctgggggcggagtttctcgcagaaggccggaaaatccccggctcggatatcgatttgggcaacagccacgccacgatgctgaccgcctcttggaaacgccagctgctcaacaacgtgctgcatcccgaaaacggccattacctcgacggcaaaatcggtacgactttgggcgcattcctgtcctccaccgcgctgatccgcacctctgcccgcgcaggttatttcttcacgcccgaaaacaaaaaactcggcacgttcatcatacgcggacaagcgggttacaccgttgcccgcgacaatgccaacgttccttcagggctgatgttccgcagcggcggcgcgtcttccgtgcgcggttacgaactcgacagcatcgggcttgccggcccgaacggatcggtcctgcccgaacgcgccctcttggtgggcagcctggaataccaactgccgtttacgcgcaccctttccggcgcggtgttccacgatatgggcgacgccgccgccaatttcaaacgtatgaagctgaaacacggttcgggactgggcgtgcgctggttcagcccgctcgcgccgttttccttcgacatcgcctacgggcacagcgacaagaaaatccgctggcacatcagcttgggaacgcgcttctaa

SEQ ID NO: 46984 - DNA, 1338 bp, Neisseria meningitidis
atgaccgacacagccggtctgcgccgccgcaacctgcggcaatggatagcagaacactacggcggtttgcaaacccgttttgccgaagccgttgccctcaacacaggcgaactctccgcccttttgaaaaacaaatccttcggcgagaaaaaagcccgtaaaatcgaacaggcggcaaaaatgcccgccttctggctcgataccgaacacaccgcccgcccgcccgaacacacaggaaaacacaccatgtcccatatttcccccatccccgaaatccttgccgacatcaaagccggcaaaatggtcatcatcaccgatgccgaagaccgagaaaacgaaggcgacctgctgatggcggcgcaattcgtcacgcccgaagccatcaacttcatgatcaaacacgcgcgcggcttggtctgcctgccgatggacggcgaaatggtcgaaaaactcgggctgccgatgatgacccaaaaaaacggcgcgcaatacggcaccaactttaccgtctccatcgaagccgcacacggcattaccaccggcatttccgccgccgaccgcgccctgactattcaaaccgccgtttccccgaccgccaaacccgcagacatcgtccaacccggtcatatcttcccgcttcgcgcccaaaaaggcggcgtactcgtccgcgccggacacaccgaagccggcgtcgacttggcgcaaatgaacgggctgattcctgccgccgtcatctgtgaaatcatcaacgacgacggcaccatggcgcgtatgcccgagctgatgaagtttgccgaagaacacaaccttaaaatcggcaccattgccgacctcatcgaataccgcagccgtaccgaaagcctgctcgaagacatgggcaatgcgcctgtacaaaccccgtggggcgagttccaacaacacgtttacgtcgacaaactctccggcgaaacccacctcgccctcgtcaaaggcacgcccgccgccgacaccgaaaccctcgtccgcgtccacgaacccttcagtgtgatggacttcattcaagccaacccgcgccattcatggtcattgcccaaagcactcgagcgcgtccaacaggcagaaagcggcgtcgtcatccttctgcaccgcaccgaagacggcgcatccctgctcgaccgcaccctacccaaaggcgcaaaccaagcctacaaatgggacagcaaaagctacggcatcggcgcacaaatcctcgtcggcctcaacgtcaaaaaactgcgcgtcctcgggcagccctcatctttcaccggtctgaccggcttcggtttggaagtcgtcggctttgaagaagcggaaaaataa

SEQ ID NO: 46985 - DNA, 492 bp, Neisseria meningitidis; identical to SEQ ID NO: 38322

SEQ ID NO: 46986 - DNA, 639 bp, Neisseria meningitidis; identical to SEQ ID NO: 39626

SEQ ID NO: 46987 - DNA, 903 bp, Neisseria meningitidis; identical to SEQ ID NO: 38685

SEQ ID NO: 46988 - DNA, 477 bp, Neisseria meningitidis; identical to SEQ ID NO: 45550

SEQ ID NO: 46989 - DNA, 1773 bp, Neisseria meningitidis
atgattccatccgacttcattgacgagcttttagccaaaaccgatattgtcgatattatcgacgagcaggttccgctgaaaaaaggcggggcgaactatatggcgtgttgcccgttccacaaggaaaaaacgccgtcgttttcggtcagtccaaccaagcagttttaccattgtttcagttgcggggcgcatggttcggcgattggttttgtgatggagcatcaggggctgtcgtttccggaggctgtgcagtttcttgccgaccgtgtgggcatggttgtgcctaaagtgcgtgggcagaacgataatcccgaagtccgtgccgaacgtaagaaaaaacagcagacgctggaagaaacgacggcggcggcggctgatttttacgcgcaacagctaaaattcaatccggcggcaaaagcttatttggacaagcgcggcttgagtgcagaagttatcgcgcattatggtttgggctacgcgcccgacggctggcagcctttggcgcaagtgttccaaccgtatccgaataccgcgttggtggatacggggatggtgattgacaatgaggggcggtattacgaccgcttccgccatcggattatgttccctatccgcaatccgcgcgggcaggtcatcggtttcggcggcagggtgctggacgactccaaacccaaatatctaaactctcccgatacacctttgtttgacaaagggaaaaacctttacggcttgtatgaggggcgtgccgctgtcaaggaagcggagcggattctggtggtcgaaggctatatggacgtggtcgcgctggcacagttcggcgtgggctacggtgtggcggccttgggcacggcaacaacagctgaacacgtcaaaatcctaatgcgtcaggcagacagtatttatttctgtttcgacggcgacagcgcggggcgaaaagcggcttggcgcgcgctggaaaacgcgttgccgcagttgaaagacgacaaatcgctgcattttttgttcctgcccgaggaacacgaccccgacagttacatccgtgcctacggcaaagcgcaatttgaagacgcgcttctgaatcaaagcaagcctttgtcggagtatttctgggaacacctttcagacggcattcatctcaatacgcaggaaggcaaggcggaattggtgaaaaccagttcgccgcttttggcgcagattaccgcgccggcattggcttatttgttaaaacaacggcttagcgaactggtcggcatcgaccccgacaacctcgcgcaactgctaggacaggaagcgccgaagcggcacgtcaaacaaaaaaactacaaactgcctccgatttccgtcaaacagcccgtcatgctgacgctggtacagcggcaaatccgcagcctcttgataaatccggattgggctgcatatatagacctgcccgattatctggcgttggacggtgatttcgcctgccttgccaatcttgccgaatcgattaaaaaccatgccgccgtacccgaaaccgctcaggttttagagtatatgcgcggctcgccttacgaagaaacgataacccgaatcttccattcaacgcaccaatcggaagaaatgaacagcagcagtgaagaagattgcgagaatttccaaatcggcatgaaaaaactgctcaatgagttaaaatacagccaaatcgaagcattgaaacaaaaaagcctgcaatccggcttaaatgaaagcgagaaaaaacttttgctgtcgttgctgaccgcaaaacaaaattga

SEQ ID NO: 46990 - DNA, 1347 bp, Neisseria meningitidis
atgtcggataacgttccaacgattgcggcagtcgctaccgcacccgggcgcggcggcgtgggcgtgatacgcatatcggggaaaaacctgctgccgatggcagaggctttgtgtgggaaaacgcccaagccgcgcgtggcaacctatgctgattttacggacgcggacggtcaggcaatcgacagcgggcttttgcttttttttgccgcaccggcaagttttacgggcgaagatgttatcgagcttcagggacacggcgggccggtagtgatggatatgctgctgaaccgctgtttggaattgggcgcgcgccttgccgaaccgggcgagtttacgaagcgtgcgtttttaaacgacaaactggacttggcacaggcggaaggcgtggcggatttgattgacgcatccagccgttcggcggcgcgtctggcgttgcgctcgctcaaaggcgatttttcgcggcggatacacggtctagtcgaagacttgattaccttgcggatgctggtcgaagcgacgttagattttcccgaggaagacattgattttctcgaagcggcagacgcacgcggcaaactggacggcttgcgccgcgccgtggatgatgtgcttgccaacgcgcagcagggcgcgattttgcgcgaaggtctgaatgtcgtattggtcggcgcgccgaatgtcggcaaatccagcctgttgaacgcgctggcgggcgacgaagtggcgattgttaccgatattgccggaacgacgcgcgacgcggtcagggaacgtatcctgattgacggcgttccggtgcatattgtcgatacggcaggtttgcgcgagacggacgacgtggtcgaacgcatcggcatcgaacgcagccgcaaagccgtatccgaagccgatgtcgcgctggtgttggtcgatccgcgcgaaggcgtgaacgacaagacacgggcgattttggacgcgttgccgccggagttgaaacgcatcgaaatccacagcaaatccgatttgcacgcacacgcggcaggcgggttcggtacgggcgcggaaaccgtcatcgcgctgtcggcgaaaaccggcgacggcttggacgcgctgaaacggacgttgttgcgcgaggccggatggcagggcgagggcgaagggctgtttttggcgcggacgcggcacgtcaacgcactcaaagcagcgcaggaagaattgtcgctggcggcattgtgcggcaaccatcaaatcgagctgtttgccgaacacttgcgcttggcgcaggtcgcatgcggcgaaatcacgggcgagtttacggcggacgacctgctcggcgtgattttttcgaggttttgtatcggaaaataa

SEQ ID NO: 46991 - DNA, 231 bp, Neisseria meningitidis; identical to SEQ ID NO: 44466

SEQ ID NO: 46992 - DNA, 198 bp, Neisseria meningitidis; identical to SEQ ID NO: 39472

SEQ ID NO: 46993 - DNA, 2691 bp, Neisseria meningitidis
atgtccgacaaccgcctcgacactgcccgccgccattccctgttccttgcccgccagctcgacaacggcaaactcaagcctgaaattttcctgcccatgttggacaaggttttgaccgaagcggatttccaagcctttgccgactgggacaaaatccgtgcggaagaaaacgaggaagaattggcgcggcagttgcgcgggttgcgccgttatgtggtgtcgcagattatcgtgcgcgatatcaaccgcatcagcgatttgaacgaagtaacccgcacgattacgctgtttgccgattttgccgtcaataccgcgctggattttgcctacgcctattatcgggatatgtacggcacgccgatcgggcgtgatacgaaatcgccgcagcatttgagtgtggtggcgatgggcaaggcgggcggctatgagttgaacgtgtcttccgacatcgatttgattttcatctatcccgaatcgggcgataccgacggtaggcgcgaacgcggcaatcaggaatttttcaccaaagtcgggcagaaactgattgcgttgctgaatgacattaccgccgacgggcaggtgttccgcgtcgatatgcggctgcggccggacggcgattcgggcgcgctggtattgagcgaaaccgcgctggagcaatacctgattacgcaggggcgcgaatgggaacgttatgcgtggtgcaaaggccgcgtgcttacgccgtatccgaacggcatcaaatcgctggtgcgccccttcgtgttccgaaaatatctggattacggcgcgtatgaggcgatgcgtaagctgcaccgccaaatccgcagcgaagtcggcaaaaaagggatggcggacaacatcaaactcggcgcgggcggcatccgcgaagtcgaatttatcgcccagattttccagatgatacgcggcggacaaatgcgcgcgctgcaactgaaaggcacgcaggaaacgctggaaaaactcgccgaatcgggcattatgccgtctgaaaacgtcgaaaccctgctcgccgcctaccgctttttgcgcgatgtcgaacatcgtttgcaatattgggacgaccggcaaacccaaaccctgccggcttcgcccgaacagcggcaacggcttgccgaaagtatgggatttgatgattacgccgattttttgaacgctttaaatcaacatcgaaaccaagtcaaccggttgttcaacgaaattttgagcgaacccggagaacaaacgcaaagcagcggcgaatggcagtgggtttggcaggagaagcccgatgaagaagggcggcaatgccgtctgaaggaacacgggttcgatgccgaaaccatcgccgcgcggctcgaccaaatccgcaacgggcataaataccgccgcctttccgcccacgcccagccgcgtttcgacgcgcttgtgccgttgctggtacaggcggcggcagcgcaaaccaacccgaccgatacattgatgcggctgttggatttcctcgaaaatatcagccgccgttccgcctatctcgccttcctcaacgagcatccgcaaaccctggcgcaactcgctcagattatgagccaaagctcatgggtggcggcgtatctgaacaaatatccgattttgttggacgaactcatcagtgcgcaattattagatacggcgtttgattgggacaaactcgccgccgaactttcagacggcatcaaagcctgcggcggcgacaccgaagcgcaaatggacaccctgcgccatttccaacacgcccaagtcttccgcctcaccgtccaagacctcgccggattgtggacggtagaatccctctccgaccaactctccgcccttgccgacaccgtcattgccgccgccctttcgtgcgcgtgggcggatatgcccaaaaaacaccgcgacacaccgcaattcgccatcgtcggctacggcaaactcggcggcaaagaactcggctacgcctccgacctcgacttggtctatctttatgacgacccgcatcccgatgcaggcgacgtgtacagccgccttgcccgccgcctgaccaactggctttccgccgccaccggcgcaggcagcctctacgaaaccgacctgcgcctgcgccctaatggcgacgccggtttcctcgcccacagcatcgccgcctttgaaaaataccagcgcgaaaacgcctggacgtgggaacaccaatcccttacccgcgcccgcttcatctgcggcacacccgaaattcagacggccttcgaccgcatccgcaccgaaatcctcaccgccgaacgcgaccaaaccgccttgtcaggcgaaatcatcgaaatgcgcgaaaaaatgttccccacccatccgcctgccgacagcaacgtcaaatacgcacgcggcggcgtggtcgacgtcgaatttatcgtccaatacctcatccttgcccatgcccgaaaatatccgcaacttctcgccaactacggcaacatcgccctcttgaatatcgccgccgactgcagccttatcgacaaaaacctcgccgaacaaagccgcaccgcctaccgcttctaccgccggcagcaacacaacaccaaactgcgcgacgcagaaaaaaccgaagtaagcggcgaattgctggcacattacggcaatgtcaggaaattgtggcgggaagtgttcggcgaagaagcggcaaccgcctga

SEQ ID NO: 46994 - DNA, 1170 bp, Neisseria meningitidis
atgacagcacataaaatcctgcccgtcctgctttccatcatcttaggcgtttctcacgcaacggccgcatcgcccgcgcccaacaaaccggcggtacacgccgcccccacgttccaaacacccgaaaccctcacagcggcacacatcgttatcgaccttcaaagcaaacagattttatccgccaaaaacatcaatacccctgtcgaaccggcggcactaacccaactgatgaccgcatatctggttttcaaaaacatgaaatcgggaaatatccgatctgaagaaaacttaaaaatacccgaatccgcatgggcttcagaaggaagcagaatgtttgtacgtcccggcgatacggtcagcaccgacaaactcttaaaaggcatgattgcactatccgcaaacgatgccgccctaacccttgccggccggctgggcaacggctcgattgaaaattttgtgcaacaaatgaacaaagaagcccgacgcttgggcatgaagaacactgtattcaaaaatccgacaggcttgagtagagaaggacaggtttccaccgccaaagacctcgcccagctgtctgaagcattgatgcgcgactttccggaatattacccgctgttttccatcaaatctttcaaattcaaaaatatagagcaaaacaaccgcaatatccttttatatagggacaacaatgtaaacggtctgaaagccggacacacagaaagcggcggctacaaccttgccgtgtcatactccggcaacggcaggcacatccttgtcatcacattgggttcggaatcggcggaaacacgcgcatcagacaacagcaagctgctgaactgggcattgcaggccttcgatacgcccaaaatatatccgaaaggcaaaaccgttgcccaaatccaaatttccggaggcagcaaaaaaaccgtccgcgcaggcttcctcaaagaagcctacatcactctgccacataaggaagcgaaaatggcagaacagattttggaaaccatacagccgattcccgccccggtaaaaaaagggcaaattttaggaaaaatcaaaatcagacaaaacggatacaccattgccgaaaaagaaatcgtcgcactggaaaatgtaaaaaaaagaagccggtggcaaaggctttgggcgcgtctgacagggcagtaa

SEQ ID NO: 46995 - DNA, 192 bp, Neisseria meningitidis; identical to SEQ ID NO: 37158

SEQ ID NO: 46996 - DNA, 1248 bp, Neisseria meningitidis; identical to SEQ ID NO: 41324

SEQ ID NO: 46997 - DNA, 579 bp, Neisseria meningitidis; identical to SEQ ID NO: 36924

SEQ ID NO: 46998 - DNA, 621 bp, Neisseria meningitidis; identical to SEQ ID NO: 38571

SEQ ID NO: 46999 - DNA, 156 bp, Neisseria meningitidis
atgaagataacacactgcaaattaaagaaaaaagtacagaaagaactgctccgttttttgtactggaagttaccgcccgttctgcatctgcaaaccgttttgtctgattacgcccgatttgacgatgcactactgtcctactttgattttaattga

SEQ ID NO: 47000 - DNA, 246 bp, Neisseria meningitidis; identical to SEQ ID NO: 38079

SEQ ID NO: 47001 - DNA, 621 bp, Neisseria meningitidis; identical to SEQ ID NO: 43359

SEQ ID NO: 47002 - DNA, 1434 bp, Neisseria meningitidis
atgtctcaatatgatgtagtagtgattggtgcaggcccgggcggatacgttgccgccatccgtgccgcacaactgggtttcaaaactgcctgtgtcgatgcaggcgttaacaaagcaggcaatgcccctgcattgggcggtacttgcttgaacgtaggttgtatcccttctaaagccctgttgcaatccagcgaacatttccacgcagcgcaacacgagtttgccgaacacggtatcactgtcggcgacgtaaaattcgacgtggccaaaatgattgagcgcaaagatgccatcgtaaccaaactgaccggcggcgtgaaattcctgttccagaaaaacaaagtaaccagcctgttcggtacggcttcctttgccggcaaaaatggcgatgcttaccaaatcgaagtcgataacaaaggtgagaaaaccgttatcgaagccaaacacgtcatcgtagcgaccggttccgtaccgcgtccgttgccgcaagtcgctatcgacaatgtgaacgtattggacaacgaaggcgcattgaacctgaccgaagtacctgccaaactcggcgtgatcggttccggtgtgattggtttggaaatgggttccgtatggaaccgcgtgggtgcggaagttaccattcttgaagccgcgccgaccttcctggctgccgccgaccaacaaatcgccaaagaagccttcaaatacttcaccaaagagcaaggtctgagcatcgaattgggcgtgaaaatcggcgacatcaagtctgaaggcaaaggtgtttccgttgcttacgaaactgctgctggcgaagccaaaaccgaagtattcgacaaactgatcgttgccatcggccgtattccaaacaccaaaggcctgaacgcggaagccgtaggcttggaaaaagacgagcgcggctttatcaaagtagatggcgaatgccgtaccaacctgcctaacgtatgggcaatcggcgacgtggttcgcggcccgatgttggcacacaaagccagcgacgaaggcgttgccgttgccgaacgcattgccggtcaaaaaccgcatatcgacttcaacaacgtaccgttcgtgatttacaccgatcctgaaatcgcttgggtgggtaaaaccgaagagcagctcaaagccgaaggcgtggagtacaaaaaaggtacttcaggttttggtgcgaatggtcgcgcattggcaatgggcaaagccaaaggtacggttaaagtgttggcagatgccaaaaccgaccgcatcttgggcgtacacatgattggtccggttgtcagcgaattggttaccgaaggcgtgactgcgctcgaattcttcgccagcagcgaagacatcgcccgcattatccatgcccacccaaccttgtccgaagtggttcacgaagctgcattggcggccgacaaacgcgctttgcacggttga

SEQ ID NO: 47003 - DNA, 762 bp, Neisseria meningitidis
atggaaaatttgaagaaagaagcagacatgattcaacgccaaatcatcctcgataccgaaaccaccggtctgtatgccgacggcggcgaccgcttggtcgagtttgccggtttagaaatggtcaaccgccaaatgaccgacaaaaacctgcacctctatgtccaccccgagcgcgatatgcctgaagaggcggcgagggtgcacggtctgacgatagaggttttggaagggaaaaacgcaccgccttttgcagaggtcggcaggcagattgccgatttcctgcgcggtgcggaactgattatccacaatgccaaattcgacgtgggcttcctcaatatggagttccgccggatggggttgccgaccgttgaggaactcggctgtaccgttaccgataccctggcgatggcgcgcgaaatgttccccgggcagaaagccagcctggatgccctgtgcaaccgtttttccgtcgaccgcagcaagcgcgtcctgcacggcgcattgatcgactgcgaacttttgggcgaagtctatcttgctatgacgcggcggcagttcgacctgatgggtgcggccgcagaggaaaaaatggaaaccaaacccgtggtgcataccgaaaccaaacgcagcggcaaactgaaagtcatcagggcggacgaaaacgagttggcggcgcacgggcaatatttggacggcttgggcgaagcctgtatctggcgcaaggaagccgtgccgtctgaaaacggcgggacggacgcatga

SEQ ID NO: 47004 - DNA, 1419 bp, Neisseria meningitidis; identical to SEQ ID NO: 45619

SEQ ID NO: 47005 - DNA, 1116 bp, Neisseria meningitidis; identical to SEQ ID NO: 44405

SEQ ID NO: 47006 - DNA, 1389 bp, Neisseria meningitidis; identical to SEQ ID NO: 45101

SEQ ID NO: 47007 - DNA, 1509 bp, Neisseria meningitidis
atgccggttcgtttgcttgtgaacattcaagatgccgactctgacggcattcagacagcatctgaaaacaataacggcacaaggatggggtacaatcgctctatggaaaaaaacaccctatccgcccgcgcaccatccccttggctgccgcttctgctggcaattgccatttttatgcagatgttggatgcgaccattttaaataccgcactgcctgaaattgccgccgacctgaatgagtcgccattgaacatgcagctggcggttatttcctacacgctgacggttgccctgctgattcctttgagcggttatttggcggacaggttcggaacgaaaaaagtctttttcggttcgattgccgtttttatgctcggatcggcattgtgcgccgcatcgggttcgctgtttgaattgacgctttcccgtgtcgttcagggcatcggcggttcgatgctggttccgataccgcgtctgaccatcttgcgtgtgtacgacaagtccaagctgctcaacgccatcaattatgcggttatgcccgcattaatcggaccggttttagggcctttggcgggcggttatctggtcgaatacgcttcgtggcactggattttcctgctcaacctgcccatcggtcttctgggtttcatattgggacgcaacatcatgcccgatattaaaggcagcaatatctctttagacttcaaaggctatctgattttttctgccgccgcgtgcctcttgttactttcggcagaaagcctgtcgcacgcgctgcctccgtattttgcactgttgccgctgtgcggcggactgctgtttgcacgccgttatttccgacatatgaaaaccgcgtccaaaccgatttattccgccgacctgtttctgatacgcactttccgtctaggactggcgggcaatctgttcagccgtctcggcatcagctcgattccttttctgatgcccctgatgtttcaagtcgctttcggcttcggcgcaagcctgtcgggttggctggtcgcccccgtcgccctgtcttcgctgctggtcaaaccgctgattgcaccgctcatgaaacgtttcggctaccgcacggtactgctttggaacaccaagctgcttgccgccttcatcatgctgctcgccctacctgatggaaactcgccgctgtggatttggattttcctctcgctggcgatcggcgcgtgcaactccctacagttttctgccatgaacacactgaccctcgccgatttgcgcccgcaacagaccggcagcggcaacagcctgatggcggtcaaccaacagcttgccatcagcatgggcattgttgtcggcgcattaatccttaaaaactggacatttctgataccggcttcttcaggtctgcattccgccttccgtatgaccctgctcagtatcggcggcattacccttgcctcgtcgttggttttcaagcgtctgcacgtttcagacggtgcaaacctgacacggaacacaccgtcctaa

SEQ ID NO: 47008 - DNA, 369 bp, Neisseria meningitidis; identical to SEQ ID NO: 37026

SEQ ID NO: 47009 - DNA, 1527 bp, Neisseria meningitidis
atgaacacgccccttccttattccaattacctcatccgcatcctgacggcatctgtctatgatgtcgcggtcgaaacgcctttggaaccggcacgcagcctttctgtacgtttgaaaaacaacatccttttgaaacgcgaagatttgcaaccggttttttcgttcaaaatacgcggcgcgtacaacaaaatgtccaagttgccgaaagatgcgctcgcttgcggcgtgattgcggcaagcgcgggcaatcatgctcaaggcgtggcattgtccgcacagcgtttgggttgccgtgccgttatcgttatgccggaaactacgccgaaaatcaaagtggatgcggttaaaagccatggcggcgaggtggttttgcggggcgtttcatacaacgatgcctacgattatgcgatggagttggcggaaaaagaagggttaacctatatcgcgccgtttgatgatcctgatgtgattgcgggacaggggacggtggggatggaaattgtcagccagcatcccgatccaatccgcgccgtattcgtaccgataggcggtggcggtttggcggcgggcgtggcggcatttatcaagcaggtccgccccgaaatcaaagttatcggcgttcagaccaacgattcctgctgtatgaagcagtcggtcgaagcgggtgaaatcgtccatttgaaagatgtcgggctgttttcagacggcactgcggtcaaagttgtcggagacgaaaccttccgcctctgcaaagaacttttggatgaaatcattacagtcgataccgatgcggtttgcggcgcggtcaaggatattttcgatgacacgcgcagcattaccgagccggcgggcgcgttggcgttggcgggtctgaaagcctatatcgcccgagaaggcgcggaaaaccaaaccctgattgccgttaccagcggtgcgaatatgaattttcaccgtttgcgccatgtgtcggagcgtagtgaattgggcgagggcaacgaaggtatttttgccgttaccatccccgaagaacgcggcagcttccttaagtttgtcaatatattgggaaataggaatattaccgagttcaactaccgctacggagacgatgaaaaagcgcatatctttgtcggacttcaagcggcaggcccgcaggatttggcggttatcggcagccggttggatgaggcgggattgcccaatgtcgacctgactgatgatgagattgccaaaatccatatccgttatatggttggagggcggacggacaaagtagaaaacgagcgtttggtcagttttgagtttccggagcgtccgggggcgttggcgcgttttttgaaccatatgcagggcggttggaacattacgctcttccattaccgcaaccacggtgcggattacgggcggattttggtcggtatcgatgtgccgccgcacgatgccgccgcatttgacggtttcttggaaagtctgggatacagctatcacgaggaaacgcaaaatgccgcgtacaagctgtttcttgcctga

SEQ ID NO: 47010 - DNA, 432 bp, Neisseria meningitidis; identical to SEQ ID NO: 36206

SEQ ID NO: 47011 - DNA, 2190 bp, Neisseria meningitidis
atgatctaccaccgcatcgccgtaaacgtgccgctttcagacggccttttgacttattcccattccgatccgcttcctccaggaacgcgggtgcttgtgcctttccgcaataaaaccgtggtcgggatggtgtgggaaacggatattgcgccggatatggatacggcgcggattttgagcgttcggacggcctttgtggaagaaaagccgttgcctcaaagctggcgtgatttgttggcatttacgtcgcgttattaccactatccgaccgggcaggcggtgtttgccgcgctgccgcagggtttgaaggaaacgcgcgcggtggaaatgccgcagccgccgttgttttatgctttgaacgaagcgggcagggcgcaaacgccgccgccggctcggttcaacaaaaaagcggctttgtgggatgcgctgctgtcgggcggaatgacgatggcggcgttgaagcaggtgaacgcgcaggcggcgaaattaatcgaagattgggcggaacagggttggattgaaacgacggaagcggcgaaacctgtattgaggccgtaccacgggcaggcttcgcactctgaatttgtgttgaatgccaaccagcagaaagcttccgatgccattcagacggcattgggacgcttccagccgtttctgctgtacggcatcaccggcagcggcaagaccgaggtgtattttgatgcgatggcgaaagtgttggcgcaggggcggcaggtgttgtttctgttgcccgaaatcaacctcacgccgcagcttttgaagcgggtggaaaaccgttttgccgacgtaccgaccgccgtgttgcacagccggatggcggcaggcaggcgcacgcaggattatctgagcgcgatgtcggggcaggcgaagctggtcatcggcacgcggctggcggtgttcacgccgatggatgatgtcgggctgattgtggtcgatgaggaacacgacggctcgttcaaacaggacaacgaattgcgctatcacgcccgcgatttggcggtgtggcgggcgaagcagagcggctgcccgatcatattgggcagtgccacccccagcttggagagttggcacaaggcgcaaagcggcgcgtaccgcctgctgcaactgaccgaacgcgcccataccgccgcgcaactgccgcaagtggacatcctcaacgtaggccgtctgaaactcgacaacggtttctcgccgcaagccttgcagcttttgaaacagaattttgaagcgggcggcatgtcgctggtgtacctcaaccgtcgcggtttcgcgccagcgctgttttgcagcgactgcggccataccttcggctgcccgaactgctccgccaaaatggtgctgcaccaacgtgcccgccaactgcgctgccaccactgcgaccaccgcgaacccgtcccgttcaaatgccccgactgcggcaaccaagatctgaccgccgtcggacacggcacgcagcgcgtcgaagaaaccctgcgcgccttcctgcccaaggcagccgtcgtccgtgttgacagggacagcaccgcgcacaaaaacgactgggcggatttgtaccgccgcattgccgacaacgaaatcgacattctggtcggcacgcagatgctcgccaaagggcatgatttcgcgcggctcaacctcgttatcgtgttgaacgccgacggcagcctgtacagcgcggactttcgcgccccggaaaggctgttcgccgagctgatgcaggtgtccggcagggcggggcgcgccgacaaacccggcaaggtgttgatacagacccaactgcccgaacatcccgtcttcgccgccgtcaaagcgcaggattatgccgtgttcgccgaaaacgaattgaacgagcggcaaatgttcgcgatgccgcccttcggtttccagaccgccgtccgcgccgatgcgccgcgtgttgccgatgcgatggaatttctcaacgccgccaaagaaaccctcgccccgctgttgcccgaaagcgtttcccagtttggcgcggctccgatgctgatggtgcgccttgccgaacgcgaacgcgcgcaaatcttcctcgaatcaacatcccgacaagatttgcaccgagccgtgagtttgtgggtgcaggtgttgcagcaaaacagggacggcaaaatccgatggtcggtggatgtcgatccgcaggaggcttga

SEQ ID NO: 47012 - DNA, 483 bp, Neisseria meningitidis; identical to SEQ ID NO: 39611

SEQ ID NO: 47013 - DNA, 390 bp, Neisseria meningitidis
atgtggaaaattacgaaagagcaaggtcaagatttaagttttgcaacatattgcttattatcggcagcaattaatttgcaagaatttaaattatggttggagaaggttgtcttagatatgcctattgataatatacctttttatatttttgatttaattgatcttaaagaaggagtaggagatatttataatattttggattttgttccgaattcagacttatctaaagaccaagatgacgcattaacaggcattgccttcttaagggggatagatgtctatgaccctcccgtttcaaaagaaaaagcattaaaagccttagaaaaacatcctgaaatttatcagaggtttcagcatttctttccgtttgtagaactgcccccgctttaa

SEQ ID NO: 47014 - DNA, 1746 bp, Neisseria meningitidis
atgttgattaagagcgaatataagcctcggatgctgcccaaagaagagcaggtcaaaaagccgatgaccagtaacggacggatcagcttcgtcctgatggcaatagcggtcttgtttgccggtctgattgcccgcggactgtatctgcagacggtaacgtataactttttgaaagaacagggcgacaaccggattgtgcggactcaaacattgccggctacacgcggtacggtttcggaccggaacggtgcggttttggcgttgagtgcgccgacggagtccctgtttgccgtgcctaaagagatgaaggaaatgccgtctgccgcacaattggaacgcctgtccgagcttgtcgatgtgccggttgatgttttgaggaacaagctcgaacagaaaggcaagtcgtttatctggattaagcggcagctcgatcccaaggttgccgaagaggtcaaagccttgggtttggaaaactttgtatttgaaaaagaattaaaacgccattacccgatgggcaacctgtttgcacacgtcatcggatttaccgatattgacggcaaaggtcaggaaggtttggaactttcgcttgaagacagcctgcatggcgaagacggcgcggaagtcgttttgcgggaccggcagggcaatattgtggacagcttggactccccgcgcaataaagccccgaaaaacggcaaagacatcatcctttccctcgatcagaggattcagaccttggtctatgaagagttgaacaaggcggtcgaataccatcaggcaaaagccggaacggtggtggttttggatgcccgcacgggggaaatcctcgccttggccaatacgcccgcctacgatcccaacaggcccggccgggcagacagcgaacagcggcgcaaccgtgccgtaaccgatatgatcgaacccggttcggcaatcaaaccgtttgtgattgcgaaggcattggatgcgggcaaaaccgatttgaacgaacggctgaatacgcagccttataaaatcggaccgtctcccgtgcgcgatacccatgtttacccctctttggatgtgcgcggcatcatgcagaaatcgtccaacgtcggcacaagcaaactgtctgcgcgtttcggcgccgaagaaatgtatgacttctatcatgagttgggcatcggtgtgcgtatgcactcgggctttccgggcgaaactgcaggtttgttgagaaattggcgcaggtggcggcctatcgaacaggcgacgatgtctttcggttacggcctgcaattgagcctgctgcaattggcgcgcgcctataccgcactgacgcacgacggcgttttgctgccggtcagctttgaaaaacaggcggttgcgccgcaaggcaaacgcatattcaaagaatcgaccgcgcgcgaggtacgcaatctgatggtttccgtgaccgagccgggcggcaccggtacggcgggtgcggtggacggtttcgatgtcggcgcgaaaaccggcacggcgcgcaagttcgtcaacgggcgttatgccgacaacaaacacatcgctacctttatcggttttgcccccgccaaaaacccccgtgtgattgtggcggtaaccattgacgaaccgactgcccacggttattacggcggcgtagtggcagggccgcccttcaaaaaaattatgggcggcagcctgaacatcttgggcatttccccgaccaagccactgaccgccgcagccgtcaaaacaccgtcttaa

SEQ ID NO: 47015 - DNA, 345 bp, Neisseria meningitidis; identical to SEQ ID NO: 36580

SEQ ID NO: 47016 - DNA, 795 bp, Neisseria meningitidis; identical to SEQ ID NO: 45641

SEQ ID NO: 47017 - DNA, 645 bp, Neisseria meningitidis; identical to SEQ ID NO: 39354

SEQ ID NO: 47018 - DNA, 276 bp, Neisseria meningitidis
atgcagtggagcagagaaaccgaatggctgggcttgaatgtcatcgcacaccgcaacttcggcaaacagcacgcccaagtcgaatttgaagcctacttccgagacggacaacaccgatccgcgcatcacgaactgtccggcttcatcaacatcggcggacaatggtattttatcgatcctaccgttccgcatcctgcgatgaaacaaccctgcatttgcggatcgggcaaaaaattcaaagcctgctgcggcaaatatctgaaacctgtcgcataa

SEQ ID NO: 47019 - DNA, 615 bp, Neisseria meningitidis; identical to SEQ ID NO: 36682

SEQ ID NO: 47020 - DNA, 465 bp, Neisseria meningitidis; identical to SEQ ID NO: 36919

SEQ ID NO: 47021 - DNA, 324 bp, Neisseria meningitidis
atgatgaaaaagcagcggcatatcctgtgtgtcggctgcctgtatattatattgaaggtcaacgtatttcccaataccggctggatggaagcgtcgaaagggatgcagggcatgtcgttcagtaccttcggatacgcggatgctccgggctatacattcagccgcattggccatactttaattttcctacttggaaagaccacagggacacgtacaactgtttccgatagttcgcataatgtatattatgttaaattatatatttgtgcaaacggtctgcttcggattcgtccttgcgttacacccctaactccaaggcattaa

SEQ ID NO: 47022 - DNA, 492 bp, Neisseria meningitidis; identical to SEQ ID NO: 38741

SEQ ID NO: 47023 - DNA, 375 bp, Neisseria meningitidis; identical to SEQ ID NO: 38650

SEQ ID NO: 47024 - DNA, 1407 bp, Neisseria meningitidis; identical to SEQ ID NO: 45710

SEQ ID NO: 47025 - DNA, 273 bp, Neisseria meningitidis; identical to SEQ ID NO: 44827

SEQ ID NO: 47026 - DNA, 384 bp, Neisseria meningitidis; identical to SEQ ID NO: 38957

SEQ ID NO: 47027 - DNA, 1263 bp, Neisseria meningitidis; identical to SEQ ID NO: 45801

SEQ ID NO: 47028 - DNA, 1398 bp, Neisseria meningitidis
atgagccaaggcaaaatcgtacaaattatcggtgcggttgttgacgtggaatttccacgcgacatgattccgcgcgtttacgacgctttgaaattagacgaaaacggtctgactttggaagtccaacagcttttgggcgacggcgtagtccgtaccattgcgatgggcagctcggacggtttgaaacgcggcatgactgtgagcaataccggtgcgcccattactgtgccggtaggtaaaggtacgttgggacgcattgtcgatgtattgggaacgcctgttgacgaggcaggtccaatcgataccgacaagagccgtgccatccaccaagccgctcctaagtttgacgaactgtcttccacaaccgaattgctcgaaacgggcattaaagtgattgacttgctgtgtccgtttgccaaaggcggtaaagtaggtctgttcggcggtgccggtgtgggtaaaaccgtgaacatgatggaattgatcaacaacatcgccaaagcgcacagcggcttgtccgtgttcgcaggcgtgggtgagcgtacccgcgaaggtaacgacttctaccacgagatgaaagattccaacgtattggataaagtggcaatggtttacggtcagatgaacgaacctccgggcaaccgtttgcgcgtcgcattgaccggtttgaccatggcggaatacttccgtgacgaaaaagacgaaaacggcaaaggccgcgacgtattgttcttcgtggacaacatctaccgttacactctagctggtaccgaagtatccgcattgttgggccgtatgccgtctgcagtgggctaccaaccgacattggcagaagaaatgggtcgtttgcaggagcgtattacctctacccaaaccggttctattacttctatccaagccgtatatgtacctgcggacgacttgaccgacccgtctccggcaacaacgttcgcccacttggacgcaaccgtcgtattgagccgcgatattgcctctttgggtatttacccggcagtcgatccgcttgattctacttcgcgccaactggatccgatggtattgggtcaagagcactacgacgtagcgcgcggcgtacagtccaccctgcagaaatacaaagaattgcgcgacatcatcgccatcttgggtatggacgaattgtctgatgaagacaaactgaccgtaatgcgtgcgcgtaaaatccaacgcttcctgtcccaaccgttccacgttgccgaagtgtttacaggttctccgggcaaatatgtcgccctgcgcgataccattgccggcttcaaagccatcttgaacggcgaatacgaccatctgcccgaacaggcattctacatggtcggcagcatcgaagaagcggttgagaaagcgaaaaccttaaactga

SEQ ID NO: 47029 - DNA, 2751 bp, Neisseria meningitidis
atgctgacaaacattgccaagaaaatcttcggcagccgcaacgaccgcttgctgaaacaataccgtaaatccgttgccagaatcaacgcgctcgaagaacagatgcaagccctaagcgatgctgatctgcaagccaaaactgccgaattcaaacaacgcctcgccgacggtcagactttggacggcattttgcccgaagccttcgccgtctgccgcgaagcgtcccgccgcaccctcggtatgcgccacttcgacgtgcagcttatcggcggtatggtgctgcacgacggcaaaatcgccgaaatgcgtaccggcgaaggcaaaaccctggtcgccaccctcgccgtctatctcaacgcgctggccggcaaaggcgtgcacgtcgttaccgtcaacgactacctcgcctcgcgcgacgcaggcattatggagccgctctacaatttcctcggcctgaccgtcggcgtgattatttcagatatgcaaccgttcgaccgtcaaaacgcctatgccgccgatatcacctacggcaccaataatgaattcggcttcgactacctgcgcgacaatatggttaccgaccaatacgacaaagtgcagcgcgaattgaattttgccgttgtcgatgaagtggattccatcttgattgacgaagcgcgcactccgctgattatctccggccaggcagacgacaacatccagttgtaccaaatcatgaacaccgtcccgccccacctcgtccgccaagaaaccgaagaaggcgaaggcgactactgggtagatgaaaaggcacatcaggtcatcctgagcgaagcaggtcacgaacacgccgagcaaatcctgacccaaatgggattgctggcagaaaacgactcgctctattccgccgccaatatcgccctgatgcaccaccttatggcggcattgcgcgcgcattccctcttccacaaagaccaacattacgtcatccaagacggcgaaatcgtcatcgtggacgaattcaccggccggctgatgtccggccgccgctggtcggagggtctgcatcaagccgtcgaagccaaagaaggcgtggaaatcaaacgcgaaaaccaaacccttgcctccatcaccttccaaaactatttccgcctgtacaccaagctctccggcatgaccggtacggcagataccgaggctttcgagttccaaagcatctacaacctcgaaaccgtcatcatcccgaccaaccgccccgtacagcgcaaagatttcaacgaccagattttccgttccgccgaagaaaaattcgaagccgtcgtcaaagacatcgaggaatgccacaaacgcgggcagcccgtcctcgtcggcaccaccagcatcgaaaactccgaactggtctcccaccttctgcaaaaagccggactgccgcacaacgtcctcaacgccaaagaacacgaacgcgaagccctgattgtcgcccaagccggcaaagtcggcgcgattaccgttgccaccaatatggcgggacgcggtacggacatcgttttaggcggcaacctgaagcaccaaaccgatgccatccgtgccgacgaaaccttgagcgacgaagagaaacaggcacaaatcgccgcactcgaagacggctggcaggcagaacacgataaagtaatggaagcaggcggcctgcacatcatcggtacggaacgccacgaaagccgccgtatcgacaaccaattgcgcggacgttccggccgtcagggcgaccccggatccagccgtttctacctttcgtttgaagacccgctgctgcgcttattcgcactcgaccgcgccgccgccatcctcaaccgtctcgcccccgaacgcggcgttgccatcgaacacaacctgctgacgcgccaaatcgaaggggcgcaacgcaaagtcgaaggcagaaacttcgatatgcgcaaacaggttttggaatacgacgacgttgccaacgaacagcgcaaagtcatttacagccagcgcaacgaaattctgaccagcaaagacatcagcgacctgatgcaggaaatccgttctgatgtcgtcagcgacctcgtggatacctatatgcctcccgacagcatggaagaacaatgggacatcccgactttggagaaccgtctggctgccgaattcagactgcacgaagacatccaatcctggctgaaggcggacaatgcgattgacggtcaagacatcaaagaacgcctgatcgaacgcatcgaaaacgaatatgccgccaaaaccgaactggtcggtaagcaggcaatggccgatttcgagcgcaacgtgatgttgcaggtcatcgacaaccaatggcgcgaacacctcgccgctatggactacctgcgacaaggcatacacctgcgcagctatgcccaaaaaaatccgaagcaggaatataaacgtgaagcctttaccatgttccaagacctgtggaacggcatcaaattccatattgcctccctgcttacctcggttcaaatcgaacaaaaccctgtcgcggtggttgaagagcaacccatcggcaacatccagtccatccattccgaatcgcccgatatggaagaacttttgggtcagtcgcaaaccgatttggttaccgaggcctttaatcccgatggaacggatttcagccccgaagccttggaagcgcggggacaaatcgtccaccgcaacgacccctgcccctgcggcagcggtttgaaatacaaacaatgccacggcaaactggcttaa

SEQ ID NO: 47030 - DNA, 228 bp, Neisseria meningitidis; identical to SEQ ID NO: 39542

SEQ ID NO: 47031 - DNA, 987 bp, Neisseria meningitidis
atgcctatggggattgcgccttactgtcgaaaccttattattcaggagcagaagatgaaaattgcaaacagcatcaccgaactaatcggcaacacgcctttggtcaaactgaaccgtctgaccgaaggtttgaaggcggaggttgccgtgaaactggaatttttcaatccaggcagcagcgtcaaagaccgcattgccgaagcaatgatcgagggtgccgaaaaagcgggcaaaatcaacaaaaacaccgtcattgtcgaagcaaccagcggcaatacgggtgtcggtttggcaatggtatgtgccgcacgcggctacaagctggcgattaccatgccggaaagcatgagtaaggagcgcaaaatgctgttgcgcgcgtttggtgcggagctgattctgacccctgccgccgaaggtatggcgggcgcgattgccaaagcgaaatccttggtggacgcgcatcccgacacttattttatgccgcgccagttcgacaatgaggcaaaccccgaagtccaccgcaaaacaaccgccgaggaaatttggcgggatacggacggcaaagtcgatgtcttcgttgccggcgtcggcacgggcggtacgattaccggcgtgggcgaagtgttgaaaaaatacaaacccgaagttaaagtggttgccgtcgagcctgaagcttcacccgtattgagcggcggcgaaaaaggcccgcacccgattcaaggcatcggcgcaggctttattccgaccgttttgaataccaaaatttacgacagcattaccaaagtgtcgaacgaagcggcttttgaaaccgcccgcgcaatagcggaaaaagaaggcattttggtgggtatttcttccggtgcggcggtttggagtgcgttgcagcttgccaaacagcctgaaaacgaaggcaagctgatagtcgtgctgctgccttcttatggcgaacgctatctctctacgccactttttgcagatttggcataa

SEQ ID NO: 47032 - DNA, 657 bp, Neisseria meningitidis
gtgaacaaacggctgttttgcagccgcaacggcttgcgctattacctgttgggcggtttctgtttgagtgtttttccgcttttgctggtgtttgcctcatccgtttgggcggtttatcggacgggcgggcaggttttgccgccgtatgtccgggcggatgccgcgctggtgttgggcgccgccgcgtgggacaaacgcccttccccggttttccgcgaacgcatcaaccacgccatcgcgctttatcagagccgcagggtaggcaaaatcgtgtttacgggagggcgaaccaaaaaaggctatatgaccgaagccgaggtcgggcggcggtacgcgctcaaacagggggttccggcgcgcaacatcctgtttgaaaacacttcgcgcaacacttatgaaaacctgaacaacatccgtccggttttgcgtgccaacggtattgacagcgtggtgattgtcagcgatccctaccatttggcgcgggcggcggaaatggcggaggatttgggtgtccgcgtttatatgtctgccaccccgaccacgcggtttgatgcgggaaataagaaaaaaatctttatgctgcaagagggatatgcgttatccctctaccgtttggaaaaatggggcagccgctttttgggatggctgtctgattga

SEQ ID NO: 47033 - DNA, 1257 bp, Neisseria meningitidis; identical to SEQ ID NO: 45359

SEQ ID NO: 47034 - DNA, 390 bp, Neisseria meningitidis; identical to SEQ ID NO: 39791

SEQ ID NO: 47035 - DNA, 1926 bp, Neisseria meningitidis
ttgagaatttgcatcatgaatatattatctgtagaaaacgcttcttttgccatcggccacgttgccttgctcgacaaaacttcttttcaactcgacagcggcgaaaaagtcggcttgatcggacgcaacggcgcaggtaagtcttcgtttctgaaaatcctcgccggcgtgcaaaagctcgacgacgggcagattatcattcaaaacaacctcaaaatcgtttatgtaccgcaggaatccttttttgataaggacgcaaccgtatttgataccgttgccgaaggtttgggtgaaattcgcgatttattgcgccgttaccaccgcgtcggccatgagttggaaaacggttcgggtgaggctttgttgaaagaactcaacgaattacaacttgaaatcgaagcgaaggacggctggaagctggatgcggcagtcaagcagactttgggggaactcggtttgccggaaaacgaaaaaatcggcaacctttccggcggtcagaaaaagcgtgtcgccttggcgcaggcttgggtgcagaagcccgacgtattgctgctggacgaaccgaccaaccatttggatatcgacgcgattatttggctggaaaatctgctcaaagcgtttgaaggcagcttggttgtgattacccacgaccgccgttttttggacaatatcgccacgcggattgtcgaactcgatcgcggtattttgcgttcctatcccggctcgttctccaaatacagcgaaaaaaaagtgcaggaattggcggttgaagcggaacacaaccgcctgtttgacaaattccacgcgcaggaagaagcgtggatacgcaaaggcatcgaagcgcgccgcacccgcaacgaaggccgcgtgcgccgtttggaagagctgcgccgccaacgcgccgaacgccgcaatgtgcagggacaggtcaacttcaagctcgacagcggcgagaaaagcggcaaaatcatcgccgaattggaacatgcctcgtttgcctatggcgacaaagtcattatggacaaattctccgcgattttgcagcgcggcgataaaatcggtctaatcggccccaacggcatcggcaaaaccacatttttaaaactgattttaggcgaactcaacccgacttacggcagaatccgtatcggcagtaagcaggaagttgcctatttcgaccaattccgcagcacgttgaacgaaaacgacaccgtgttttacacgctcggtcaaggcaacgattacgtcgaagtcggcggcaagaaaaaacacgtaatgagctatctggaagatttcttattccatccagcccgcgcacaaagtcccgtttcatcgctctccggcggcgaacgcaaccgccttttgctggcaaaactctttacccgtcctgctaatattttgattttggacgaaccgaccaacgacttggatatcgatacccaagagctgcttgaagatttgctgcgcgattatcaaggcacggtattccttgtctcacacgaccgtatgttcctcgataacgtgattacccaaagcattatttttgaaggaaatggaaggttaaaagaatatatcggcggctatcaggactacatcgacgcaaaatcacgcgaagcgaagattcagacggaatccgcacccaaaacagccgatgccgaaccggtgaaagaaaaacccaaagccaaccgcacggtcaaactgtcctacaaagaacagcgcgaactcgacgccctgcccgacgaaatcgccgccttggaagccgaacaggcagaaatcaacgcgcagctttccgatcccgaaatcttcaaagattacgaaaaagccggcgcactgcaaagccgcgccgaagaaatcgaaatgctgcttttggaaaagctggaacgctgggagctgctggaaaccaaacagaacggcaatgccgtctga

SEQ ID NO: 47036 - DNA, 783 bp, Neisseria meningitidis
gtgatgaaactggtaaggcctcagaaaatcagcgatcaggtattgtcggtattggaaggccgcatcgtggaaggggtttacgcggaagggggcaagattccgcccgaacgcgttttggcggaagagttcggcgtgtcccgcccgtcggtcaggtcggcattgaatgttttggtcgcccgtcaggttttggaagcgaggcagggagacggttattatgtttcggtcaagccgcagcaggattttttgcaaagttggcaggagcttttgggcaagcattccaattgggaacaggatgtttttgatttcagctgccacatcgagggctgtatggcggcattggcggcagaacgccggacggatgccgatttgaagcggattgggttttggcttgaaaagtttgaggaggcgtgcgaaagcggcaatctggaacatcagagcgaagccgatgtcagcttccatcagacgattgcggatgcggcgcacaatttgttgttcagccatttgtcgggcggtttgttgaaaatgctgtaccggcagacgcgcagcagccttatttatctgaatcaggaagaagatccgcgtccgaaactgatggcgcagcaccgcgtgctgtatgaggcgatatcgaaccgtcggccgggcgaggcttcggaggcggcaaaggcacatttgaattatgtggcaagcagcatcatgaaagacagggaatatcagagccgtaaccgccacgcggatactttggcgcaaaacgatttgaagcgcgtgcaggattgggaggtatga

SEQ ID NO: 47037 - DNA, 861 bp, Neisseria meningitidis
atgtctgatttgtctgtattgtcgccgtttgccgtgcctttggcagcggtgttcgggctgctggtcggcagtttcttaaacgtcgtcatttaccgcgtgccggtcatgatggaacgcggctggacggtatttgccaaaaaacatttaaacctgccgctgaccgaaaaggaaagccgtaccttcaacctgatgaaaccggattcctgctgtcccaaatgccgcgtgccgatacgcgcgtggcagaacatcccgattgtcagctacctgctcctgcgcggcaaatgcgcttcctgccaaaccaaaatcagcatacgttatcccttaatcgagctgctgaccggcgtattattcgggctggtcgcctggcaatacggctggtcttggattacattgggcggtttgatactgaccgcgtttctgatttccctgacctttatcgatgcggacacccaatacctgcccgactcgatgacactgcccttgatttggctggggctgatatttaatttggacggcggcttcgtgcctttgcagtctgccgttttaggtgcggttgccggctatggttcgatatggcttttatgcgcggtatataaactgattaaaggcgaaatcggtatgggcaacggagatttcaaactgattgccgcattgggcgcgtggctcggcatatccgcattgcccgtgctgatttttgtttcctcgctgatcggtttggtcgcggcaatcgttatgcgcgtcgccaaggggcagcattttgccttcggccccgcactgacagtttcgggctggataatttttacggcaaacgattccgtatggcgggcggtcaactggtggctgacccatccggtgctgtaa

SEQ ID NO: 47038 - DNA, 2157 bp, Neisseria meningitidis; identical to SEQ ID NO: 44180

SEQ ID NO: 47039 - DNA, 324 bp, Neisseria meningitidis; identical to SEQ ID NO: 44318

SEQ ID NO: 47040 - DNA, 534 bp, Neisseria meningitidis; identical to SEQ ID NO: 45717

SEQ ID NO: 47041 - DNA, 357 bp, Neisseria meningitidis
atgttgtccgcttactttcccgtctttgtctttatcctcgtcggcctcgcggccagcgtgctgtttatcctgctcggcacgattttaggcccgaaacgccactacgccgaaaaagacgcgccttacgaatgcggttttgaagcctttgaaaacgccaggatgaagttcgacgtgcgctattacctcgtcgccatcctctttatcttgtttgatttggaggtcgcgttcatgttgccgtgggcagtcgtgttcaaagatttgggcgcgtacggcttctggtctatgctggtgtttatcgtcgttctgacggtaggctttgtttacgaatggaaaaaaggtgcgctggaatgggaatag

SEQ ID NO: 47042 - DNA, 525 bp, Neisseria meningitidis; identical to SEQ ID NO: 39459

SEQ ID NO: 47043 - DNA, 1857 bp, Neisseria meningitidis
atgatgaaccgttatcctttatggaaatatctgctgattgtgttcacgattgcggttgccgcagtgtattcgctgcccaacctattcggcgaaacacccgccgtgcaggtatcgaccaaccgacaagccatcatcatcaacgaacagactcaatccaaagtggatgccgcgctgcaaaacgcgggtattcagaccgacgggatgtttgttgtggacaattcactgaaagtgcgtttcaaagacacagaaacgcagcttaaagcgcgcgacgtcatcgaaaacactttgggcgaagggtatattaccgcgctcaacctgttggcggacagccccgaatggatggcgaaaatcaaagccaatccgatgtttttgggtttggacctgcgcggcggcgtgcatttcaccatgcaggtcgatatgaaagcggcgatgcagaaaacgtttgaacgttattcgggcggcatccgccgcgaactgcgccgcgaaaaaatccgcagcggcacggtgcgtcaggctggaaacagcctgaccgtccctttgcaggatgcaggtgatgtgcaaaaggcactgccgcagttgcgcaagctgtttcctgaagcaacgctgaattcagacggcagcaatatcgtcttgacgctttcggaagaggcggtcaataaagtgcgttccgatgcggtcaaacagaacatcactaccctgcacaaccgtgtgaacgagttgggcgtggccgaacccgtcatccagcagtcaggtgcagaccgtatcgtcgtgcagcttccgggcgttcaggatactgccaaggcaaaagacatcatcggccgtaccgcgactttggaattgcgtatggtggaggacgatcctgccaagttgcgcgaggcattggaaggcaacgtgccgagcggttatgagctgctttcaagcggcggagatcgtcccgaaactctgctaatcagcaaacaggtcgagctgacgggcgacaacatcaacgatgcgcaaccgagtttcgaccaaatgggcgcacctgccgtcagtctgagcttggacagcgcgggcggcagcattttcggcgaactgactgccgcaaatgtcggcaaacgcatggcgatggttttgatcgaccaaggaaaatccgaggttgtaaccgcgccggttatccgtactgccattaccggcggacgcgtggaaatttccggaagcatgacgacagccgaagccaatgatacgtctttgctgttgcgtgccggttctcttgccgcgccgatgcagattgtcgaagaacgtaccatcggtccgtctttgggtaaggagaacatcgaaaaaggcttccattcgactttatggggttttgccatcgttgctgcattcatggtggtttactatcgtctgatgggtttcttttctaccattgcattgagtgccaacatactgttcctaatcggtattttgtctgctatgcaggcaacgttgacgttaccgggtatggccgcgctggcgttgactttgggtatggcaatcgactccaacgtcttgattaacgaacgtatccgcgaagaattgcgtgtcggcgtgccgccgcagcaggcaatcaatctcggtttccaacacgcatgggcgaccattgtcgattccaacctgacttcgctgattgccggtatcgcgcttttggtattcggttccggcccggtacgcggttttgcggtcgtacactgtttgggtattctgacttcgatgtattcgtccgtcgtcgtattccgtgcgttggtcaatctgtggtacggacgcagacgcaaattgcagaatatttccatcggtgcggtatggaaacctgaagccgaaactgcggcaggtaaggagtaa

SEQ ID NO: 47044 - DNA, 1512 bp, Neisseria meningitidis
atgcgccccttttacgaggcgcgatatataaggaggaaggttatggaaaaacataatgggacttatcgggatttgcaccgtccggcttcggaatttgcgacgcgggacgaatatttggaacatgaattgcagattatgcaaccaaaacgctggcggcccaacctgccctttcgcgattaccgcttcgagtgggaggatttgattcctgcgatggcgggaacgattggaaaagtggtgatggtgggggcggtggcggcggcgtttgccgcacctttggggctgcctgacagctttgtactggaaaatgtgcgctatgagcttttaatcgccgccgcgtttatcttattggtatcgggcttttttctgcccggcgccaacctgcccggtacgcacgggccgctgattccgatgattcccatcgttgtgtcggcaggcgggcatcctttggcgttcggcatttcgattgcggttttaggtctgctgatggctttatttcgcggcggcagtattatggcgaagctgacaagcaacggcgtatgcggcggattattactctatttgggctttatcggcacgacggggcaggtaaaaaaattgttttcgtgggcaggcggttttaatatgccctacatcgcttttaccgtcattattgtaacgattgtgatgtacgctttgttggagcattggaaaaaacgctggttagccgtgcctttgggatgcttgattgccggtgtggtggcatttgcattgggtgcgccgtttgagtttcacaccgcccccggcctgcctccaatgagtcctgcttattggtggggtgaaaacagcggctggcatctagggttgccgacggcagaaagttttttggttgtctttccatttgcggtattggctgttgcaatgtggtcgcccgattttttaggacatcaagtgttccaaaaaatcagctatccggaaaaaaccgataaggtattgatgaatatagacgacaccatgacaagttgttctgtccgtcaagcagtgggttctattttagggggtgcaaattttacctcttcttggggaacttatatcgtaccggcatcgattgccaaacgccccattccgggcggtgcggttttaacggcggttttatgtattatcgccgggttatggggctatccgatggacttggcgatttggcagccggtattgagcgtagccttggtcgtaggcgtatacttaccgcttttggaagcgggcatggaaatgacgcgcaaaggcaaaaccacccaatccgccgccatcgtggtgttctcttccgccttggtcaatccggttttcggctgggcgttgacgatgctgttggataatttgggcttaatcggctgcaaagagcgcagtgcgcaattaggtttcgccggacgcgtgttgatacccgcagtaggtttcttgatcttgtgtgtggcgatgggtgcggtcgggatgctgcccggtatcccgccgtttttggaacacttcaaatctttgggctag

SEQ ID NO: 47045 - DNA, 600 bp, Neisseria meningitidis
atgcgcaaacagaacactttgacgggaatcccgacttctgacggacagagggggtttgcactgtttatcgtgctgatggtgatgatcgtcgtggcttttttggttgtaactgccgcgcagtcttacaataccgagcagcggatcagtgccaacgaatcagacaggaaattggctttgtctttggccgaggcggctttgcgggaaggcgaacttcaggttttggatttggaatatgatacggacagtaaggttacatttagcgaaaactgtgaaaaaggtctgtgtaccgcagtgaatgtgcggacaaatacaaataatggtaatgaagaggcttttgacaatatcgtggtgcaaggcaagcccaccgttgaggcggtgaagcgttcttgccctgcaaaatctacaggcctgtgcattgacaataaagggatggaatataagaaaggcacgagaagcgtcagcaaaatgccacgttatattatcgaatatttgggcgtgaagaacggagaaaatgtttatcgggttactgccaaggcttggggtaagaatgccaataccgtggtcgtccttcaatcttatgtaagcaataatgatgagtaa

SEQ ID NO: 47046 - DNA, 1176 bp, Neisseria meningitidis; identical to SEQ ID NO: 44641

SEQ ID NO: 47047 - DNA, 765 bp, Neisseria meningitidis
ttgccgaccgaagatattgaagagatatttatgagcgcaaacgtcagccgccttgttgttcaaaacctgcaaaaaagtttcaaaaaacgccaagtcgttaaaagcttctcccttgaaatcgaaagcggggaagtcgtcggcctgctcgggcccaacggtgcgggtaaaaccaccagcttctacatgattgttggactcattgccgccgatgcgggcagcgtgatgctggacgggcaggaattgcgtcacctgcccatacacgaacgcgcccgcctgggtgtcggctacctaccgcaggaagcctctattttccgtaaaatgaccgtcgaacaaaacatccgcgccattttagaaatcagtaccaaagacaaaagccgcatcgacggcgaagttgaaaaactgcttgccgacctgaatatcgagcgtttgcgcaataatcctgccccatctttgtcgggcggcgaacgccgacgcgtcgaaatcgcccgcgtacttgccatgaaaccgcattttattttgttggacgagccttttgccggcgtcgatcccatcgccgtcatcgacatccaaaaaatcatcggatttctcaagtcgcgcggtatcggcgtattaattaccgaccacaacgtacgcgaaaccctcagcatctgcgatcgggcctacattatttcagacggcacggtgttggcatcgggaaaacctgatgatttggtcggaaacgaacaggttcgttctgtttatctgggtaagaacttcaaatattga

SEQ ID NO: 47048 - DNA, 918 bp, Neisseria meningitidis
atgaacgtatctgttctcaattttggtaacacccctgtatctttccgtcaagacggttttttaaatgcaaccgccattgcatctcactttggcaagttacctaaagactacctaaaaagtgaacaaactcaacaatatatctctgcacttgctgagaatttaagcgttaggagaaaaatcctaacggaagcaaatcaaatagttatcgtgaagcgtggtggcagtgagcaaggcacatggctgcatcccaaactcgctattcactttgcccgttggcttaatccgaaatttgcggtttggtgcgatgagcagattgaaattttacttaacggcaaaatttcagacggcataaaaacagttacccccaaacccacccgcgcccttccggacggcttgaccggcgaacaaatcgaagccgtcaaaaaactgcacaacgccctgaccaaatccgcacccaaagaagcgcaggcgcgtatcgccattaccctttggtctgccgtcaaaagcaagttcggatgcagctacaaagaagtacctgccgaacagttccccgaagttttaagcgtgatgagccgcgtggcagttgaaaacggcgtgctgtacggcgaagtcctcgaccgcgaaccgttacccgcaccgcaacctgccctgcccatcagcggcaacgccctgtacgacctcgccgttgccgtcagatacggcgcgtgggccatccaaatgggcagagacgtttccctgccgctgaagcagctcggctgcaaacaggcggtaacgatgtggacggtctgggcggaaacacgcagccgcctcaaagccgccgcaaacgccctcgaagccttaaacgcacacgccgacgcggaacacgcggcaaaaatccgcccgatgctgcccgaaatccgcaacctgtcgtcggtttga

SEQ ID NO: 47049 - DNA, 495 bp, Neisseria meningitidis; identical to SEQ ID NO: 45300

SEQ ID NO: 47050 - DNA, 2586 bp, Neisseria meningitidis
atgttagaagcctatcgtaaagccgccgccgagcgcgccgccctcggcattcccgccctccctttgaacgcgcagcaaaccgccgatttggttgagctgctgaaaagcccgcccgcaggcgaaggcgagttcttggtcgaactgcttgcccaccgtgttccgcccggtgtggacgatgccgccaaagtcaaagcctcattcctggctgccgttgccgaaggcagcgcgtccagcccgctgatctcccccgaatatgcgaccgaactcttaggtacgatgctcggcggttacaatatccacaccttaatcgaactcttggacgacgacaaactcgcgcccattgccgccaaaggcttgaaacatacgcttctgatgttcgattccttccacgacgttcaggaaaaagccgaaaaaggcaacaaatacgcgcaagaagttttgcaatcttgggcagatgccgaatggtttacctcacgcgccaaagttcccgaaaaaatcaccgttaccgttttcaaagttgacggcgaaaccaatacagacgacctctcccccgcgcccgacgcgtggagtcgtcccgatattccgctgcacgcgctggccatgctgaaaaacccgcgcgacggcatcacgcccgacaaaccgggcgaagtcggtccgattaaattgttggaagaactcaaagccaaaggccatccggttgcttacgtcggcgacgtggtcggtactggttcttcacgcaaatccgcgaccaactccgtcatttggcataccggcgaagacattccgttcgtgccgaacaaacgcttcggcggcgtgtgcttgggcggcaaaatcgcgccgattttcttcaatacccaagaagactccggcgcgctgccgattgaagtcgatgtttccgctctaaaaatgggcgatgtcgtcgatatcctgccttatgaaggcaaaatcgtgaaaaacggcgagactgttgccgagtttgaattgaaatcacaagtattgctggacgaagtgcaagccggcggccgtatcaacctgattatcggccgaggtctgaccgccaaagcgcgcgaagccctgaaactgcctgcctctactgcattccgcctgccgcaagcgcctgccgaaagcaaagccggtttcaccttggcgcaaaaaatggtcggccgcgcctgcggtcttcccgaaggacaaggcgtgcgtccgggtacttactgcgaaccgcgtatgacgacggtcggctcgcaagacacgaccggcccgatgacccgcgacgagttgaaagacttggcttgtttgggcttctccgccgatatggtgatgcagtctttctgccacaccgccgcctatccgaaacctgtcgatgtaaaaacccataaagaactgcccgcctttatttccacccgtggcggcgtgtccctgcgtccgggcgacggcgtcatccactcgtggctcaaccgcctgctgctgcccgataccgtcggcaccggcggcgacagccacacccgtttccccatcggtatttccttccccgccggctctggcttggttgcctttgccgccgcaacaggcgtaatgccgctcgatatgcccgagtctgtattggtacgcttcagcggcaaactgcaaccgggtgtaaccctgcgcgatttggtgaacgccattccgctgtacgcaatcaaacaaggtttgctgaccgttgccaaagccggtaagaaaaacatcttctccggccgcatcctcgaaatcgaaggcctgcctgatttgaaagtggaacaagcctttgaattgaccgacgcatccgccgaacgctccgccgccggctgtaccgtgaagctcaacaaagagccgattatcgagtacatgaaatccaacgtcgtgttgatgaaaaacatgattgccgacggctatcaagacccgcgtactttggaacgccgcatcaaagccatggaaaaatggctggcaaatcccgagttgctcgaagcggataaagatgccgaatacgccgccgtgattgaaatcaacatggacgacatcaaagagccgattatcgcctgcccgaacgacccggacgacgtgtgcttcatgtccgaacgctccggcaccaaaatcgacgaagtattcatcggttcgtgtatgaccaacatcggccacttccgcgccgcctccaaacttttggaaggcaaggcagacacccccgtccgcctgtggattgcgccgccgaccaaaatggacgcgaaacaattgtccgacgaaggacactacggcgtactcggacgtgccggcgcgcgtatggaaatgccgggttgctccttatgtatgggtaatcaggcgcaagtacgcgaaggtgcgaccgttatgtccacctccacccgcaactttccgaaccgtttgggtaaaaacacctttgtttacctcggttcggcggaattggcagcgatttgctccaaactgggtaaaatcccgaccgttgaagaatatcaagccaatatcggcatcatcaacgaacagggcgataaaatctaccgctatatgaacttcaacgaaatcgacagctacaacgaagtagccgagaccgtgaacgtttaa

SEQ ID NO: 47051 - DNA, 1128 bp, Neisseria meningitidis; identical to SEQ ID NO: 44813

SEQ ID NO: 47052 - DNA, 1017 bp, Neisseria meningitidis
atgattggagggcttatgcagtttccttaccgcaatgttccggcttcgcgtatgcgccgtatgcgcagggacgatttttcacgccgcctgatgcgcgaacacacgctgaccgccgatgatttgatttatccggtgttcgtattggaggggtcggcgcgcgaggaggatgtgccttctatgccgggtgtgaagcgtcaaagtttggacaggctgctgtttacggcggaagaggcggtaaagctcggtattccgatgttggcactgttccccgtggttacggcaaacaaaaccgagcgtgcgcaggaggcgtacaatcccgaaggactcgtgccgtcaactgtccgcgccttgcgcgagaggtttcccgaactgggcattatgacggatgtcgcgctcgatccttatacggttcacggtcaggacgggctgacggacgaaaacggttatgtgatgaacgatgaaaccgtagaggttttggtcaagcaggctttgtgccacgctgaagcgggcgcgcaggtggttgctccgtcggatatgatggacgggcgtatcggtgcgattcgcgaggcgttggaggatgccggacatatccacacgcggattatggcatattccgccaaatatgcttctgcattctatggccctttccgtgatgcggtaggcagttcgggcaatttgggcaaggcagataaaaagacctatcagatggatcccgcaaacaccgatgaggcgctgcatgaagtagcgctcgatattcaggaaggtgcggatatggtgatggtgaagcccggtttgccgtatttggacgttgtccgccgcgtgaaggacgagttcggtgtgccgacttatgcctatcaggtttcgggcgaatatgcgatgctgcaggcggcggttgccaacggatggctggacggcgataaagtggttttggaaagcctgctggcattcaaacgtgcgggcgcggatgggattttgacctattatgccattgaggcggccaagatgctgaagcgttga

SEQ ID NO: 47053 - DNA, 957 bp, Neisseria meningitidis; identical to SEQ ID NO: 39193

SEQ ID NO: 47054 - DNA, 1248 bp, Neisseria meningitidis
atgttgaaacaaacgacacttttggcggcttgcgcctcctttgccgcactgttgggcggttgcgccacccaacagcctgctcctgtcattgcaggcaattcaggtatgcaggacgcgccgtcttcggcagtttacaacaacccctatggagcaacgccgtacagcccggctcctgccggcgatgcgccttatgtgccgccggtgcaaagcgcgccggtttatacgcctcctgcttatgttccgccgtctgcacctgccgtttcgggtacatacgttccttcttacgcacccgtcgacatcaacgcggcgacgcatactattgtgcgcggcgacacggtgtacaacatttccaaacgctaccatatctctcaagacgatttccgtgcgtggaacggcatgaccgacaatacgttgagcatcggtcagattgttaaagtcaaaccggcaggatatgccgcaccgaaagccgcagccgtaaaaagcaggcccgccgtaccggttgccgcgcaaccgcccgtacagtccgcacccgtcgacatcaacgcggcgacgcatactattgtgcgcggcgacacggtgtacaacatttccaaacgctaccatatctctcaagacgatttccgtgcgtggaacggcatgaccgacaatatgttgagcatcggtcagattgttaaagtcaaaccggcaggatatgccgcaccgaaaacctcagccgtagaaagcaggcccgccgtaccggctgccgtgcaaacccctgtgaaacccgccgcgcaaccgcctgtgcagtccgcgccgcaacctgccgcgcccgctgcggaaaataaagcggttcccgcgcccgccccgcaatctcctgccgcttcgccttccggaacgcgttcggtcggcggcattgtttggcagcgtccgacgcaaggtaaagtggttgccgatttcggcggcaacaacaagggtgtcgatattgcaggaaatgcgggacaacccgttttggcggcggctgacggcaaagtggtttatgcaggttccggtttgaggggatacggcaatctggtcatcatccagcataattcttccttcctgaccgcatacgggcacaaccaaaaattgctggtcggcgaaggccagcaggtcaaacgcgggcagcaggtcgctttgatgggcaataccgacgcttccagaacgcagcttcatttcgaggtgcggcaaaacggcaaaccggttaacccgaacagctatatcgcgttctga

SEQ ID NO: 47055 - DNA, 330 bp, Neisseria meningitidis
atggatgtgcaaaaacaatatccctttgaaaccgtcgccgtatgcgtgctgccgaaccatattcacgccatttggacgctgccgcccgacgatgcggattattccctactccggcggctgattaaaaccaaattctccgcatattccccttatactaaaaacttatccgccggcaaacagcggcagcacgaacgcggtatttggcaacggcgtttttacggacacaccgtgcgcgacgaaacggatttgcagcgttgcgcggactacatccattccaatcctatcaaacaaaaaatgtcgcgtgctaaaacagaatcctgcaaaaaataa

SEQ ID NO: 47056 - DNA, 627 bp, Neisseria meningitidis; identical to SEQ ID NO: 37626

SEQ ID NO: 47057 - DNA, 1059 bp, Neisseria meningitidis; identical to SEQ ID NO: 40263

SEQ ID NO: 47058 - DNA, 360 bp, Neisseria meningitidis; identical to SEQ ID NO: 37430

SEQ ID NO: 47059 - DNA, 459 bp, Neisseria meningitidis; identical to SEQ ID NO: 36255

SEQ ID NO: 47060 - DNA, 1479 bp, Neisseria meningitidis
atgttcagcaagttaacccctttggctgaaaccggcatcccgaccctgtcgtgtgcaaacgcagcagggcgtttgttgcattcagacagccgccaaatcaaacaaggcgatattttcgttgcctgtccgggcgaatatgccgacggccgcagttatatccccgccgccgttgccaacggcgcggcttttgttttttgggacgacgacggcaaattcgcgtggaatcccgaatggaaagtccccaatcaaggcatcaaagatttgaaacaccgtgccggcatattggcggcgcaagtttacggcaacgtttcagacggtctcaaattctggggcgtaaccggaaccaacggcaaaacctccatcacgcaatggctggcgcaagctgccgatttgttgggcgaaaaaaccgccattgtcggcacggtcggcaacggcttttggggtgcattggaagaaaccacgcataccacacccgcccccgtcgatgtccaaaccctgctctaccgtttccgtcaacaaggcgcaacagccgccgcgatggaagtctccagccacggtcttgaccagtcgcgcgtcaacggcgtgccattccgcagcgcaatctttaccaatctcacccgagaccacctcgactaccacggcacgatggaagcctatggcgccatcaagtcgcgcctgttttactggcatggcttgaaacacgccgttatcaatgtagatgacggatacggcgcagaactcataggccgtctgaaaaaagactgccccgatttggccgtttatagctacggcttcagcgaacacgccgacatccgcattaccgactttaccgcctcttcagacggcatagaagccgtattccgaaccccgtggggtgaagggaaatgccgcacacgcctgctcggacggttcaacgcgcaaaacctcgccgcctgcatcgccttgctgtgcgccaacgactatccgttggataaggtattggatgtgctggcaaaaatccgtcccgcttcagggcgcatggactgcatcatgaacagcggcaagcccttggtcgtcgtcgattacgcccacacgcccgacgcattggaaaaagcactcgccaccttgcaggaaatcaaaccgcagggtgcggctttgtggtgcgtattcggttgcggcggtaaccgcgatcgcggcaaacgcctgctgatgggcgcggcagccgtacagggcgcggataaagtcgtcgtcaccagcgacaatccgcgtttggaaaatccgcacgacatcatcaacgacatcctgcctgccgttcccgcgcccgaatgcgtcgaagccgaccgtgccgccgccatccgttatgcggttgaacaagccgccgcaaacgacatcatcctgattgccggcaaagggcatgaaaactatcaggatgtacaaggcgtgaagcaccgtttttccgatcttgaaatcgtcggacaggctttgttaactcgtaaataa

SEQ ID NO: 47061 - DNA, 774 bp, Neisseria meningitidis; identical to SEQ ID NO: 39194

SEQ ID NO: 47062 - DNA, 198 bp, Neisseria meningitidis; identical to SEQ ID NO: 36305

SEQ ID NO: 47063 - DNA, 1053 bp, Neisseria meningitidis; identical to SEQ ID NO: 44860

SEQ ID NO: 47064 - DNA, 717 bp, Neisseria meningitidis; identical to SEQ ID NO: 39244

SEQ ID NO: 47065 - DNA, 366 bp, Neisseria meningitidis; identical to SEQ ID NO: 37248

SEQ ID NO: 47066 - DNA, 750 bp, Neisseria meningitidis
atgccgtctgaaagaaaagacatgatcaaattcaaaaacgtacacaaacatttcaaagacctgcacgtcatcaacggcgtgaacttggaaatcaaaaaaggcgaagtggtcgtcgtctgcgggccttcgggcagcggcaaatccacactcatccgcaccgtcaaccagcttgaaagcatcgaaagcggcgagatttgggtggacggtgtcaacgttgccgacccaaaaaccgatttgaacaaaatccgcgaagaagtcggctttgtgtttcaaagtttcaacctctacccgcacctgaccgtgttggaaaacattaccctcgcaccgatgaaggttaaggggcaaaatgcggaacaggcggagaaaaaggcaatggagcttttggaacgcgtcggactggcacacaaaaaagacgccttcccttcccaactttccggcggccagcagcaacgcgtggcgattgcacgcggtttggcgatggaaccgcgcgtaatgttgtttgacgaaccgacctccgcactcgaccccgaaatggtcggcgaagtgttgaaagtgatgaaagacttggcagaaagcggcatgaccatgatgtgcgtaacccacgaaatggggtttgcccgcgaagttgccgaccgcgtgattttcgtcgataaagggcaaatcctcgaagacgaaacgccggaagcgttttttaccaacccgaaacacgaacgcgccaagcagttcctgcaacaggtcatgacccattga

SEQ ID NO: 47067 - DNA, 1287 bp, Neisseria meningitidis
atgatttacatcgtactgtttctagctgtcgtcctcgccgttgtcgcctacaacatgtatcaggaaaaccaataccgcaaaaaagtgcgcgaccagttcggacactccgacaaagatgccctgctcaacagcaaaaccagccatgtccgcgacggcaaaccgtccggcgggtcagtcatgatgccgaaaccccaaccggcggtcaaaaaaacggcaaaaccccaagaccccgccatgcgcaacctgcaagaacaggatgccgtctacatcgccaagcagaaacaggcaaaagcctccccgttcaaaaccgaaatcgaaaccgccttggaagaaagcggcattatcggcaactccgcccacaccgtttccgaaccccaaaccggacattccgcaccgaaacctgccgacgcgccggcaaaacctgcacccgttccgcaaacacctgcaaaaccgctgattacgctcaaagaactgtcaaaagtcgaattaccctggtttgacgtgcgcttcgacttcatctcctatatcgcgctgaccgaagccaaagaactgcacgcactgccgcgcctttccaaccgctgccgctaccagattgtcggctgcaccatggacgaccatttccagattgccgaacccatcccgggcatccgctatcaggcatttatcgtgggtattcaggcagtcagccgcaacggacttgcctcgcaggaagaactctccgcattcaaccgccaggtggacgcattcgcacaaagcatgggcggtcagacgctgcacaccgaccttgccgcctttatcgaagtggcttccgcactggacgcattctgcgcgcgcgtcgaccagaccatcgccatccatttggtttccccgaccagcatcagcggcgtagaactgcgttccgccgtaacgggcgtgggtttcgttttggaagacgacggcgcgttccactataccgacacgtcgggctcgaccatgttctccatctgctcgctcaacaacgagccgtttaccaatgcccttttggacaaccagtcctacaaaggcttcagtatgctgctcgacatcccgcactctccggcaggcgaaaaaaccttcgacgatttgtttatggatttggcggtacgcctgtccggccagttgaacctgaatctggtcaacgacaaaatggaagaagtttcgacccaatggctcaaagacgtgcgcacttatgtattggctcgtcagtccgagatgctcaaagtcggtatcgaaccgggcggcaaaaccgcattgcgcctgttctcctaa

SEQ ID NO: 47068 - DNA, 738 bp, Neisseria meningitidis
atggctttgcaagatcgtaccggtcaaaaagtaccttccgtagtattccgcacccgcgtcggcgacacttggaaagatgtgtctaccgatgatttgttcaaaggcaaaaaagtagtcgtattctccctgcccggtgcatttaccccgacttgttcttcttcacacctgccgcgttacaacgaattgttcggcgcgttcaaagaaaacggcgttgacgcaatctactgcgtatctgtaaacgatacgttcgtaatgaacgcttgggctgccgaagaagaatccgacaacatctacatgattcctgatggcaacggcgaatttaccgaaggtatgggtatgctggtcggtaaagaagacttgggcttcggtaaacgctcttggcgttactccatgctggttaacgacggcgtggttgaaaaaatgttcatcgagcctgaagaaccaggcgatccgttcaaagtatccgatgcagatactatgctgaaattcgttgctcctgattggaaagctcaagagtctgtggcaattttcactaaaccaggttgccaattctgcgccaaagccaaacaagctttgcaagacaaaggtttgtcttacgaagaaatcgtattgggcaaagatgcaaccgttacttccgttcgcgccattaccggcaagatgactgcccctcaagtcttcatcggcggcaaatacatcggcggcagcgaagatttggaagcttacttggctaaaaactga

SEQ ID NO: 47069 - DNA, 780 bp, Neisseria meningitidis; identical to SEQ ID NO: 39156

SEQ ID NO: 47070 - DNA, 1356 bp, Neisseria meningitidis; identical to SEQ ID NO: 44226

SEQ ID NO: 47071 - DNA, 1266 bp, Neisseria meningitidis; identical to SEQ ID NO: 45709

SEQ ID NO: 47072 - DNA, 1059 bp, Neisseria meningitidis; identical to SEQ ID NO: 38958

SEQ ID NO: 47073 - DNA, 2595 bp, Neisseria meningitidis; identical to SEQ ID NO: 44645

SEQ ID NO: 47074 - DNA, 1035 bp, Neisseria meningitidis
ttggaagacgaagattttattcgcgcagcgtccatgctcgccgaagaagttttcggtttcggtatctacaaagagtccaaaggctcgggcggccgtttttatgagcgctgttggttgatgggttcggaagacgtcctatacggtcgcgtccattttggcggacaaaacaataccattcttttcgaactgaccggcaccggttgcggcgtcgcaaaagaaggctgggaatcacgacttttcgcattcctgactaatgcaatccgcccaaaaatcacacgcgttgacatcgcaaaagactttttcaacggcgaatacagcccgaaccaagcccgtgaagaccgaaataaaggtatgtttacctgtcatcacgtcaaaccaaaaggcgaatgtttggggtcagattgggaagaagacgatgaagccaaaatgaccaaaggcaagacctatggtatcggctcccgtgaatcgtccaaatatgtccgcgtctatgaaaaaggcaagcagttgggcgataaaacaagcacatggacgcgctttgaaattgaattcaaagcaaaagacatcgttatccctttcgaagttttgcagaatccgggcgaatatttcggcggcgcatatccgatttgcgaacgattcgcccaaaaggcaacgcgcatacacgcggttaaggaagataaggtcatttcagccgaccgctaccttgaatgggtaaaaaaacagttcggacgtgcggcaaacggtctgaaattcatttttcccgaattggacaaagccaaactgtttgaactgattgagccgagtcatcacaagctgcccaagtctttggctcccgaagcctacgactgcgcctttttgaaagctcaagccattcatgaacagcccgcattcaaaccgtacaaagacccttactatatgtacgaatattacgagaatcttgaaaaacagcttgaacagcaaaaacacgtcaacaatgaagaaagctataacaacttcatttacgacaaattcgcaagactaccgatttcatgggcttaa

SEQ ID NO: 47075 - DNA, 1677 bp, Neisseria meningitidis; identical to SEQ ID NO: 41006

SEQ ID NO: 47076 - DNA, 2940 bp, Neisseria meningitidis; identical to SEQ ID NO: 45559

SEQ ID NO: 47077 - DNA, 357 bp, Neisseria meningitidis
gtgcgaagctgtccgggcggcgtttttatttacggagcaaacatgaaacttatctataccttcatcaaaatcattatcctgctgctcttcctgctgcttgccgttattaatacggatgccgttaccttttcctacctgccggggcaaaaattcgatttgccgctgattgtcgtattgttcggcgcatttgtagtcggtattatttttggaatgtttgccttgttcggacggttgttgtcgttacgtggcgagaacggcaggttgcgtgccgaagtaaagaaaaatgcgcgtttgacggggaaggagctgaccgcaccaccggcgcaaaatgcgcccgaatctaccaaacagccttaa

SEQ ID NO: 47078 - DNA, 807 bp, Neisseria meningitidis
atgcaaaaccacgttatcagcttagcttccgccgcagaacgcagggcgcacattgccgcaaccttcggcgcgcgcggcatcccgtttcagtttttcgacgcactgatgccgtctgaaaggctggaacaggcaatggcggaactcgtccccggcttgtcggcgcacccctatttgagcggagtggaaaaagcctgctttatgagccacgccgtattgtggaaacaggcattggacgaaggtctgccgtatatcgccgtatttgaggacgacgttttactcggcgaaggcgcggagaaattccttgccgaagacgcttggctaaaagaacgctttgaccccgattccgcctttatcgtccgcttggaaacgatgtttatgcacgtcctgacctcgccctccggtgtggcggactactgcgggcgtgcctttccgctgttggaaagcgaacactgggggacggcgggctatattatttcccgaaaggcgatgcgtttctttttggacaggtttgccgttttgccgtctgaacgcctgaaggcggtggattggatgctcttcagcagttttctcgacaaaggggggatgacggtttgccaactgacccccgccttgtgcgtccaaagcgaaaccctgcccagccaactgaaaaacggcaggcaggaatcgtaccgcaaccgccgctccccgaaggttttgttgaaacgcgctttgggaaaaatcggcagggaaatcgaaagggcgagggaacggaaacgtcagaaaaaattggaaaaacacctcgggcggcacgtcgtcccgtttgaatag

SEQ ID NO: 47079 - DNA, 2109 bp, Neisseria meningitidis
gtgtgtgcgccagcacgcatgcgttccatgatttacggctcaatgccgtctgaaaagctcacaatttttcagacggcatttgttatgcaagtaaatattcagattccctgtatgctgtacagacgcgggagtgttaagccccccttgtttgaagctccgcggctcctgccgagcttcaccgaccccgttgtgcccaagctctctgctcccggcggctacattgtcgacatccccaaaggcaatctgaaaaccgaaatcgaaaagctggccaaacagcccgaatacgcctacctgaaacagcttcagacggccaagaacgtcgattggaaacaggtgcagctggcctacgacaaatgggactataaacaggaaggcttgaccggagccggtgcagcgattgtggtgattattgtaaccgctctaacttatggatacggagcggctgcagcgggtagcgtaactgccgcaggaagtagtacagccgcagctgcaacaacgacagcggcagcaactaccactgtttctactgcagctgccatgcaaaccgcagctttagcctccttgtatagccaagcagctgtagccatcatcaataataaaggcgatgtaggcaaagcattaaaagatctcggcaccagtgatacggtcaagcagattgttacttccgcactgacggcgggtgcattaaaccagatgggagcagatattgcccaattgaacagcaaggtaagaaccgaactgttcagcagtacgggcaatcaaaccattgccaaccttggaggcagattggccaccaacctcagcaatgcaggtatctcagctggtatcaataccgccgttaacggcggcagcttgaaagacaacttaggcaatgccgcattgggagcattggttaatagcttccaaggggaagccgccagcaaaatcaaaacaaccttcagcgacgattatgttgccaaacagttcgcccacgctttggcgggttgtgttagcggactggtacagggaaaatgtaaagatggggcaattggcgcagcagttggggaaatcgtagctgaatccatacttggcggcagaaaccctgctacactcagcgatgcagaaaagcataaagttatcagttactcgaagattattgcgggcagcgtggcggcactcaacggcggcgatgtgaatactgcggcgaatgcggctgaggtagctgtggtgaataatgctttgaattttgacagcacccctaccaatgcgaaaaagcatcaaccgcagaagcccgacaaaaccgcactggaaaaaatcatccaaagtattatgcctgcacatgcggcaggtgcgatgactaatccgcaggataaggatgctgccatttggataagcaatatccgtaatggcatcacaggcccgattgtgattaccagctatggagtttatgcagcaggttggacagctccgctgatcggtacagctggtaaagcagctatcagcacctgtatggctaatccttctggttgtactgtcatggttacgcaggctgctgaagcgggcgcgggaatcgccacgggtgcggtaacggtaggcaacgcttgggaagctccagtaggagcgttgtcgaaagcgaaggcggctaagcaagctgctcctaaagaaacaataaacaatttggcaaatttagccaaagcagaacagcagattttattccgtattgcccaacgcgatacgcaactggatgcatggaagacgggatttaacaatagagtaaggaaaggagcaggcttgcttgatgcaagtaatattccgataaccattaacggaaaaaccatcaaacctgtacaagccataagcttaaagggagcacccgtttacagcggcgtaagcgaacaggagatttttgcgctttatcggcagatgactggccagaatccgaattttagagttttgcctgacggaagattagcaaatggcattatcagtactggagaatgggcaggaacaaaaattgcattaagaaatttttcaaaaacagagaattcaactcaagcacgatggacattagatttgcagaatcctccatcatttattaaaggtactaaattggagcttaaattccaataa

SEQ ID NO: 47080 - DNA, 915 bp, Neisseria meningitidis; identical to SEQ ID NO: 45937

SEQ ID NO: 47081 - DNA, 441 bp, Neisseria meningitidis
atgcctacccaatcaaaacatgcgtctatcaatatcagtctgatacaggcaagggaagccctgatgacccaattcaggcctattctgaatcaggcgaatattaccgatcagcaatggcggattatccgtcttttggcggaaaacggcacgctggactttcaagatttggcgaatcaggcgtgtattctgcgccccagcctgaccggtatcctgacccgccttgaaaaagcgggtttggttgtccgcctgaaaccttccaacgaccaacgacgtgtttttctgaagctgactgccgagggcgagaagctgtatgaggaaatcggcgaagaagtggacgagcgttacgacgctatcgaggaagtgctgggccgcgagaaaatgctgctgcttaaagacctgttggcagaacttgccaaaatcgaggatgcgttgaactcgtaa

SEQ ID NO: 47082 - DNA, 1632 bp, Neisseria meningitidis
atgtttcttatcctagggcgaaattttttaaagattatcctatgctttagtttttttgtatctaaatttgcattggcatcagtaaatgttccgggtaaatttgatagggttgaagtttatgatgatggcagatatttaggtattcgaggttcagatgacaaaagaagaagagtttgggaaggtgtatttgataaagaatcgggaagatatttaaattcagaagctcaagatttaacagttaggcatgtatctactggggcatcaagtactggtaaagttagtgcggttgtatcttcatcagtttcccgcgccggagtcttggcaggagtcggcaaacttgcccgcttaggcgcgaaattcagcacaagggcggttccctatgtcggaacagcccttttagcccacgacgtatacgaaactttcaaagaagacatacaggcacaaggctaccaatacgaccccgaaaccgacaaatttgtaaaaggctacgaatatagtaattgcctttggtacgaagacgaaagacgtattaatagaacctatggctgctacggcgttgacagttcgattatgcgccttatgtccgattacagcagattccccgaagtcaaagaattgatggaaagccaaatgtataggctggcacgtccgttttggaattggcataaagaagaactgaataaattaagttctttggattggaataattttgttttaaatcgttgcacatttgattggaacggcggagattgtgtggtcaataaaggtgatgattacagaaatggggctaatttttcccttagccgcaatccgaaatacaaagaagaaatggatgccaaaaagctggaagagattttatcgttgaaagtcgatgccaatcccgacaaatacataaaggcaaccggatatcccggttattccgaaaaagtagaagtcgcacccggaacaaaagtgaatatgggacccgtcacggacaggaacgggaatcccgttcaggttgtcgcaacattcggcagggattcgcaaggcaacaccacagtggatgttcaagtaattccgcgtcccgacttaacccccggaagcgcggaagcgccgaacgcacagccgctgcccgaagtatcgcccgccgaaaaccccgcaaacaacccggcccccaatgagaaccccggcacgcgtcccaatcccgaacccgaccccgatttgaatcccgatgcaaatcccgatacggacggacagcccggcacaagacccgattcccccgccgttccggatcgcccaaacggtaggcatcgcaaagaaaggaaagaaggcgaagacggcggccttttgtgtaaattcttccccgacattctcgcttgcgacaggctgcccgagcccaatccggcagaagatttaaatctgccgtctgaaaccgtcaatgtagagtttcagaaatccggaatcttccaagattccgcacagtgtcccgcacctgtcactttcacagtgactgtgcttgattcaagcaggcagttcgcgttcagctttgagaacgcatgtaccatagccgaacggctaaggtacatgcttctcgcccttgcttgggcggttgccgcctttttttgtatccgcacagtatcccgtgaagtctag

SEQ ID NO: 47083 - DNA, 390 bp, Neisseria meningitidis; identical to SEQ ID NO: 44937

SEQ ID NO: 47084 - DNA, 588 bp, Neisseria meningitidis
tgccttagtgcggtatgtcaacactatcagccccccgatgaaaatgacaaaggcagcatatcctttcattcaaaaacaggcaatttgttcaatatgaacgttaaagttcataaagacacacaccatttcggtattcacaacctcaacaataccgatgttcatctgactgccgaagacagcgataatgtgattgagattaaaggggaactcgccgaccttatgccgacaggaaatgttgagagtacaagttttttaaggggcattgaaacggcttttaaatccaataccgtattaacggggaataacaataaaatatccatcgccactgagggcaagggcttgggattgggcgtaaatggtctccagtccaactccccctattccggacgcacgacgggcattttcatcaataatcaatcaagcgaccttacccaaccttcccttgatggcatcagcactatcaagctcaaagccgtcaagggaaataatgaagttgatttaaatgtaaaaaaccacgcctccgtaaaaggcattatcgcgtcgcattctgcaaaagcaacgcttgaagccgaaggggacaatattgtc

SEQ ID NO: 47085 - DNA, 1977 bp, Neisseria meningitidis; identical to SEQ ID NO: 45146

SEQ ID NO: 47086 - DNA, 234 bp, Neisseria meningitidis; identical to SEQ ID NO: 45569

SEQ ID NO: 47087 - DNA, 441 bp, Neisseria meningitidis
atgccgaaagccaccttttacacgcacgttgcccaagttccgattttcacctgccgcctgattgcccgtgcgattcgggacggcggcaggatactggtgtggtccgattcgttcgggcggcttcaggaattggacaaaatgctttggcaatacgaagccgagagtttcattccgcacgaaatttgggaaatggaagaagccatgccgtctgaaacatccgtcctgcttgcttgcggcggcaatccgccccgaattcccgaaggcatgactgttttgaacctgtccgacggtttttggaacaccgctccggtcttgcccgcgcgcgttttggaaatcgtcggcaacagcttggaagatctcgccgacgcgcgcgaacgctttaccgcctaccgccgaagcggttttgccatcgaacatcacggcatggagggcaaggcataa

SEQ ID NO: 47088 - DNA, 453 bp, Neisseria meningitidis; identical to SEQ ID NO: 45863

SEQ ID NO: 47089 - DNA, 330 bp, Neisseria meningitidis; identical to SEQ ID NO: 45117

SEQ ID NO: 47090 - DNA, 1185 bp, Neisseria meningitidis; identical to SEQ ID NO: 38307

SEQ ID NO: 47091 - DNA, 3204 bp, Neisseria meningitidis; identical to SEQ ID NO: 36673

SEQ ID NO: 47092 - DNA, 1413 bp, Neisseria meningitidis; identical to SEQ ID NO: 38542

SEQ ID NO: 47093 - DNA, 660 bp, Neisseria meningitidis
atgaaaaccgccattttgattgacggtgcattttttattaagcgggtacggtcattaggcctgtctcaaaatccacacgatgcaaaaagaattgctgatttggctttccgatattcgatgctgcatctgaaagataaaatcaacggcacagatcaaatggatgatttatatagaattttcttttacgactgcgtgccgtttgaaaagaaaatgcacaatcccgtatctcatcgtgccatagatttttcaaagactccggaagccatatttcgtcgcaatctgcataccgaattgaagaagaagcgtaaattagcgttacgtttaggcaagctgtcggacaatacagcatggatattaaaaccccaagtcatgaaaaatcttctgaaaaacccgtcaactcaaattacggaaaacgatgtcgtgctcgatgttaaacaaaaaggtgtagatatgcgtataggcttggatatttcatctattaccttaaaaaaacaagccgataaaatcatcttgttttctggtgattccgattttgtcccagcagccaaattagccagacgggaaggtatcgattttattcttgatcctatgtggaatcatgtcccacctgacttaatggaacacatcgacggattgaagacaaaatgtccgaaaccgtaa

SEQ ID NO: 47094 - DNA, 717 bp, Neisseria meningitidis; identical to SEQ ID NO: 40339

SEQ ID NO: 47095 - DNA, 879 bp, Neisseria meningitidis
atggcaagaaggtcaaaaacatttgaagaagctgctgctgaggttgaggaacgtttcggtcatcgtggcattaagttggtcgagtttgagggtacagccaagccgtgtgtaatcaactgccctaaacatggaaaccaaacctgttcgaggtactccaatatgttcataggaagtagctggggttgcccctcttgtggtaatgagcaagctgcaaaagccggtatagcgacccttaggaagaatcacatagcgttagaaatgctgaaacaggctgtaacaggtatgaccaagcaagagcgcatcacgacgcaagcctacaatgagatgaccaaatccgtggcaggttcaaacagcatagtccttaacgatgtccaaggcgatacgaccatcaacaaccatcatacgcatacgcacaaccacagcgatgccgacggcaaagcactgtcgatgaggctcacaccacgccccctgttgtcagaccgtcaggcggcggctttcgcccgtacaggcaaactcacaggcagtttcgacttgtttgcttcggtggtcgccccctcgcagtacacgtttgccgttgccatgcccgacacgtccatgtcgccggttatcgaaaagggggatttgctggtggtcgagccgcgtatgcgccctgcggacgaagacatcgtactgattgaactgtccgacaagcggctggtcgtcgcgcaccttgttatcgatattgcgggcaggatgctgatttatcagacgggcaggccgtctgaagccctcgacctgcccgaaggcagcgtgattttaggtgtggtgctggaggtcaaaaaacggtttatgtccgccgcacaggcaagaaggcgtgttgattcggattaccgcccctga

SEQ ID NO: 47096 - DNA, 585 bp, Neisseria meningitidis
atgatcagcagactgaccggcaaactggttgaaaaaaaccctccgcaaatcgtcatcgatgtcaacggtgtcggctatgaggccgacgtatcgatgcagaccttctacaacctgccgcccgtgggtgaaagcgtacaactgtttacccagcttatcattcgggaagacgcacatcttttatttggttttgccactgcggaagaacgcaaaacattccgccaactgattaaggtcagcggcatcggcgcgaaaacggctttgggcattttgtcggcgatgacggcagacgagctggcgcaggcggttgcagaagaagatgtcaaacgcctctcctccgccccgggaatcggcaaaaaaaccgccgaacgcatggttttggaactgcgcggcaagctggtcgcgcatgcggtaacggacgggctgtttgccgccgcacccgccgccgacgaaacggaagacatcgtcggcacgctcctcgccctcggttacagcgaacgcgaggcaaaagcggcggtcaaaggcgttccgaaagggacggacgtgggcgaaggcgtgcgccttgctttgaaaaacctgctgaaataa

SEQ ID NO: 47097 - DNA, 987 bp, Neisseria meningitidis; identical to SEQ ID NO: 38696

SEQ ID NO: 47098 - DNA, 1497 bp, Neisseria meningitidis; identical to SEQ ID NO: 45087

SEQ ID NO: 47099 - DNA, 387 bp, Neisseria meningitidis; identical to SEQ ID NO: 39754

SEQ ID NO: 47100 - DNA, 1632 bp, Neisseria meningitidis
atgaattggttaaacttgcgggcaatagtgccttcagacaaacaaaatatgccgaacaaaaagaaaaaagccgcctttgcgcgtgctgcaacggagaacggtgtgccggacgtgtccaacatcaaaaattcatatgatgatttgatgtatgaatccaaagcattttcccaaaccgccatcaacgccttggaggctcgcgcccgcatgatgggtttgcagcccgcgcccgccgccaatgccaaggtcttggagctgggctgttcgatgggcggcaacatcatcacgcaggctctttattacccggatgcggaatttgtcggtatcgacttgtccggcaggcaggttgcgcagggcaacgccatcattgaaaaaatgggcttgaaaaatgtgcgtctggaagaaaaagatattttgaccgtcgatgagtcattcgggaagttcgactatatcatcgtccacggcatttggtcgtgggtgcctgacgcagttaaagacaaaatcttttcgatttgccggaacaacctgaccaaacacggcattgcctatatttcatacaatgtttaccctggctggaaacggcaggagcagttgcgcgaaattatgtactttgccggcagggatgtgcttgaagaacccttggaagcgcggacgcggaaaggcttggacgcgctcaaggcgctggcggaaattttggaaaacgacaaaggcttgggcggcggcggcaaacttccggcgattcaaaaaatattgaatcacaatacttattatgtcgcacacgaatatatggaaatattcaacgacccgatttacgttaacggcttcatcgaatgggcaaaccgccaccggctggcgtatatcggggataccgatttgcacgcgtcttttgtttcttggatggcggagcatacgcgggagcggattctggcattggcagggggcgattatattgccaaagaattttacagcgatattttatccgaccgccaattccgccgttcgcttttatgccgtgaggaagtcggggatactgtcaggcgtgacgagtcggttgccgtcgaagtgatagaaagtttgaatttccgcccggcaagaggggaaacaatcaactttgatgaaaacgataccctgctttcgggcatacgcgatgtgatgaaaaccggagaggcgtttaaaacggaagatgttgcggaaaatctcgcccgccgatttcccggtttgacattcgaccgtatgaaaatcaattcccagcttttattgcaaaccattctcgggcgtttttctgtttcatcagacaatgcgggcaaacaattttttgaagaccataaaacctatgtgccggcgcgttttacagattatgtcgccgcctttgtggaacacggcgcggaagcgtttgtccagcctgccaaccgttacaacgaaagcaccccctcattcgggtacgggcatttgtacattatgcggcaattgtcgcggccgacgagcaaacaggcattgattgaaacggttgccgaaaacttgaacatcgtcagcaccacgcccgacggtttgacattccatccgcctgccgaagtgtatgtggaagaaatattggcagacttggcagacaggcattttctcgtttcggcggattga

SEQ ID NO: 47101 - DNA, 891 bp, Neisseria meningitidis
atgtttcccgttttccatctttcaggcgaaagccgccgccggatgcttcaggcggcatcgcgttttccctatgttttcaaagcccgtgcggaagattcgcacaaagggactttcggcacgctcgccgtagtcggcggatcggcagggatgagaggcgcgcccgtattggcggcatcggcggcgatgtatctcggctgcggcaaggtgtgggcgggtttcaatcaggatgcgcttccgtttgccgtcattgccggttttcccgaaattatgttggacacggcagacggtttgaccaagcgtcaaggcataaacgcttggatggtaggttgcggcctgggtacggataaagcggcggtcggaacgcttgccggaattttggcggaacacacggacaagcccgtccttttggatgcggacgcgctgaacatattatcaaccgatgccgaaacccgaaatctggcgcgcgggtgtaaaaacctgattttaacgccacaccccgccgaagccgcgcgcctgcttggaacgacggttgcacaggttcaggcggatcggacggcggcagtgaggaagataagggcaattttcggcgcaaccgtggttttaaaggggcacaaaacattggttgcctcacccgatacggaaatctatgtcaacgaaagcggcaacgcgggattggcaacggcgggcagtggcgacgtattgggcggcatcatcggcagtctgctcgcacagggcgtgccggtttttgaagccgcctgcgcgggcgtgtggctgcacggcgcggcggcggatgtcataaaagaatcggcaggcattgcggcggggctgttggctggcgaaatctccccggcggcaaggtggctgcgcaaccggataactgaaagtatgtaa

SEQ ID NO: 47102 - DNA, 1260 bp, Neisseria meningitidis
atgtgttctaatacgccccaagccgccaccaaaaatcgggagacacgccatatgaccggcatcatacattcgctgcttgacaccgacctctacaaattcactatgctgcaagtggttctgcaccagtttccgcagacgcacagcctttacgaattccgctgccgcaacgcctcgaccgtctatccgcttgccgacatcaaggaagacttggaagccgaactcgacgcgctctgccggctgcgcttcacccacgacgaactcggctatctgcgctccctgcgtttcatcaaaagcgactttgtcgattatctcgaactcttccagctccaacgccgctttgtcgaaatcggcacagacgataaagaccgtctgaacatccgtatcgaaggtccgatgatacaggcgatgttttttgaaatcttcatcctcgccattgtcaacgaactttacttccgccggctggaaacccctgccgttatcgaagaaggtgaacgccggcttcaagccaaagccgcgcgcctcaaagaaatcgccgccgcacaaaaccccgacgatccgcccttcctgatttccgacttcggcacgcgccgccgctacaagctcgcgtggcaggaacacgtcatccgcaccctgctcgaagccgccccaagcatcgtgcgcggcaccagcaatgtctttctcgccaaaaaactcggcattacccccatcggcaccatggcgcacgaattcctccaagccttccaggccctcgacgtacgcctgcggaatttccaaaaggccgcgctcgaaagctgggtgcacgaataccggggcgatttgggcgttgccctgaccgacgttgtcggtatggatgccttcctgcgcgatttcgacctctatttcgccaaacttttcgacgggctgcgccacgacagcggcgacccttacgtttggggcgacaaagcctacgcccactatcaaaagctcaaaatcgacagccgcaccaaaatgctgaccttctccgacgggctggacatcgaacgctcttgggcattgcaccaatatttcaaagaccgcttcaaaaccggcttcggcatcggcaccaacctcaccaacgatatggggcatacgcccttgaatatcgtcttgaaactggtcgaatgcaacgggcagtccgtcgccaagctgtccgactctccgggcaaaaccatgaccaacaacagcaccttcctcgcctacctgcgccaagtgttcgacgtacccgaacccgaaacgccgtaa

SEQ ID NO: 47103 - DNA, 606 bp, Neisseria meningitidis; identical to SEQ ID NO: 38535

SEQ ID NO: 47104 - DNA, 435 bp, Neisseria meningitidis
ttgaggcgggatatgagcgagcagacggcattggccgtgtgtgccgacggtgtggaaacggcattggcggaagcggcatcactgttggaagagggatgcgggtcggttttggttttggcggcggacgatccgctgccggaaggatatgccgtatcggcaacgcgcgcgccgtttgcttatgctttggcgatggttctgaccaaagggacgcgttacagcctgactttatctgcttcggacgatatgccgtctgaagccggtatgctgcccgaggcatattggagcggtttggaatgggtgcgctttctgctgaacggcagtcgggaatgccgccgggtatatcgcaatcgtgaatggctgtggcagcccgcaagctgcaggctgaagatttccgcaatgtccgcaccgtcaacgacgtggtacaggcggtattga

SEQ ID NO: 47105 - DNA, 180 bp, Neisseria meningitidis; identical to SEQ ID NO: 39090

SEQ ID NO: 47106 - DNA, 816 bp, Neisseria meningitidis; identical to SEQ ID NO: 39466

SEQ ID NO: 47107 - DNA, 1314 bp, Neisseria meningitidis
atgatgagcgtaactgttgaaactttagaaaatctggaacgcaaagtagtgttgtccctgccttggtccgaaatcaacgcagaaaccgataaaaaactgaaacaaacccagcgccgtgcaaaaatcgacggtttccgcccgggtaaagcacctttaaaaatgattgcccaaatgtacggtgcgagcgcgcaaaacgacgtgatcaacgagctggtgcaacgccgcttccacgatgttgccgttgcccaagagttgaaagtggcaggcttcccccgttttgaaggcgttgaagaacaagacgataaagaatctttcaaagttgccgccatttttgaagtgttccccgaagtcgttatcggcgatttgtctgcacaagaagttgaaaaagtaaccgcttccgtcggtgatgccgaagtggaccaaaccgtagaaatcctgcgcaaacaacgcacccgcttcaaccatgtcgaacgcgaagcccgaaacagcgaccgcgtcatcattgactttgaaggcaaaatcgacggcgaaccttttgcaggcggcgcatccaaaaactacgccttcgtattgggcgcaggtcaaatgctgcctgaatttgaagccggcgtagtcggcatgaaggctggcgaaagtaaagacgttaccgtcaacttccctgaagaataccacggcaaagacgttgccggtaaaactgccgtgttcaccattacgctgaacaacgtttccgaagcgactctgcctgaagtcgatgcagattttgcaaaagccttgggtattgcggatggcgacgttgccaaaatgcgcgaagaagtgcagaaaaacgtaagccgcgaagtggaacgccgcgtaaacgaacaaaccaaagaatccgtaatgaacgcgctgctcaaagccgtagagctgaaagcacctgttgctttggtcaatgaagaagccgcacgcttggcaaacgaaatgaaacaaaattttgttaaccaaggtatggctgatgctgccaacttggatctgcctttggatatattcaaagaacaagccgaacgccgcgtatctttgggtctgattttggccaaactggttgatgaaaacaaactggaaccgactgaggagcaagtcaaagccgttgtcgccaacttcgcagaaagctacgaagatcctcaagaagtaatcgactggtactacgcagagccttcccgcctgcaagccccgacttctttggcgatagaaagcaacgtcgttgatttcgttttgggtaaagccaaagtaaacgaaaaagctttgtcttttgacgaagtgatgggcgcgcaagcctga

SEQ ID NO: 47108 - DNA, 903 bp, Neisseria meningitidis; identical to SEQ ID NO: 45584

SEQ ID NO: 47109 - DNA, 1428 bp, Neisseria meningitidis; identical to SEQ ID NO: 39120

SEQ ID NO: 47110 - DNA, 1167 bp, Neisseria meningitidis; identical to SEQ ID NO: 45211

SEQ ID NO: 47111 - DNA, 306 bp, Neisseria meningitidis; identical to SEQ ID NO: 43025

SEQ ID NO: 47112 - DNA, 1233 bp, Neisseria meningitidis
atggctaaaaacggaggattttctttgttcgcaaagaaagaaaaacgctttatctttgaaggcaggcattccgcctccgacaaactggtcaacggcgaagtatccgcgtttaccgaagaagaggcgcgcaaaaaactggcaaaacgcggcatccgcccgttgcagattacccgtgtgaaaacaagctccaagcgcaaaatcacacaagaagacatcaccgttttcacccgccagctgtccacgatgattaaagcgggcctgccgctgatgcaggcatttgaaatcgtggcgcgcggacacggcaacccgtctatgacggaaatgctgatggaaatccgaggcgaagtggaacagggcagctcgttgagccgcgcattctcaaaccacccgaaatatttcgaccgcttctactgcaacctggttgcggcaggcgaaacgggcggcgtattggaaagcctgctggacaaattggcaatttacaaagaaaaaacccaggccatccgcaaaaaggtaaaaaccgcactgacctatccggtatccgtcatcgccgtcgccatcggtttggtattcgtgatgatgattttcgtactgcccgcctttaaagaagtttacgccaatatgggcgcggagcttcccgcactgacccaaacagtgatggatatgtccgactttttcgtctcatacggctggatggtgctgatcgcactgggctttgccatatacggcttccttaaattgaaggcgcgttcgattaaaatccaacggcgtatggatgccatactgctgcgtatgccgattttcggagacattgtccgcaaagggacgattgcccgctggggcaggacgacagcgacgctgattgcggcaggcgtgcctttggtcgatgtattggactccactgccggcgcggcgggcaatttaatctatgaagaagccacccgggaaatccgtacgcgcgtcatccaaggtttgtctatgacttcggggatgcgtgcgacggaactgttccccaatatgatgttgcagatgtcttccatcggcgaggaatcgggttctttggacgatatgctcaacaaagccgccgaattttacgaagacgaggtggacaatgcggtcggcaggctgtccgctatgatggagccgatcattatcgtgattttaggcttggtcatcggcacgcttctggtcgccatgtatctgccgctgtttaatttgggcaacgtggtcgcctga

SEQ ID NO: 47113 - DNA, 237 bp, Neisseria meningitidis; identical to SEQ ID NO: 39540

SEQ ID NO: 47114 - DNA, 822 bp, Neisseria meningitidis; identical to SEQ ID NO: 44760

SEQ ID NO: 47115 - DNA, 1215 bp, Neisseria meningitidis; identical to SEQ ID NO: 44713

SEQ ID NO: 47116 - DNA, 1377 bp, Neisseria meningitidis
atgaaacacatccacattatcggtatcggcggcacgtttatgggtgggattgccgccattgccaaagaagcagggtttgaagtcagcggttgcgatgcgaagatgtatccgccgatgagcacccagctcgaagccttgggcataggcgtacacgaaggcttcgacgcggcgcagttggaggaatttaaagccgacgtttacgtcatcggcaatgtcgccaagcgcgggatggatgtggttgaggcgattttgaaccgcgggctgccttatatttccggtccgcaatggctggctgaaaacgtgctgcaccatcattgggtactcggcgtggcggggacgcacggcaaaacgaccaccgcgtctatgctcgcgtgggttttggaatatgccggactcgcaccgggcttccttattggcggcgtaccggaaaatttcggcgtttccgcccgcctgccgcaaacgccgcgccaagacccgaacagccaatcgccgtttttcgttatcgaagccgacgaatacgacaccgcgtttttcgacaaacgctccaaattcgtgcattaccgtccgcgtaccgccgtgttgaacaatctggaattcgaccacgccgacatctttgccgacttgggcgcgatacagacccagttccactacctcgtgcgtaccgtgccgtctgaaggcttaatcgtctgcaacggacggcagcaaagcctgcaagatactttggacaaaggctgctggacgccggtggaaaaattcggcacggaacacggctggcaggccggcgaagccaatgccgacggctcgttcgacgtgttgctcgacggcaaaacggccggacgcgtcaaatgggatttgatgggcaggcacaaccgcatgaacgcgctcgccgtcatcgccgccgcgcgtcatgccggtgtcggcattcagacggcctgcgaagccttgggcgcgtttaaaaacgtcaaacgccgcatggaaatcaaaggcacggcaaacggcatcaccgtttacgacgacttcgcccaccacccgaccgccatcgaaaccacgattcaaggtttgcgccaacgtatcggcggcgcgcgtatcctcgccgtcctcgagccgcgctccaacaccatgaaactcggcacgatgaagtccgccctgcctgtaagcctcaaagaagccgaccaagtgttctgctacgccggtggcgtggactggaacgtcgccgaagccctcgcgcctttgggcggcaggctgcacgtcggcaaagacttcgatgccttcgttgccgaaatcgtgaaaaacgccgaagcaggcgaccatattttggtgatgagcaacggcggtttcggcggaatacacggaaagctgctggacgctttgagatag

SEQ ID NO: 47117 - DNA, 1581 bp, Neisseria meningitidis; identical to SEQ ID NO: 38415

SEQ ID NO: 47118 - DNA, 1137 bp, Neisseria meningitidis
atgagcaccttctttcaacaaaccgcacaagccatgattgccaaacacatcgaccgtttcccgctattgaagttggaccaggtgattgattggcagccgatcgagcagtacctgaaccgtcaaaaaacccgttaccttagagaccaccgcggccgtcccgcctacccgctgttgtccatgttcaaagccgtcctgctcggacaatggcacagcctctccgatcccgaactcgaacacagcctcattacccgcatcgatttcaacctgttttgccgtttcgacgaactgagcagtatagtggattaacaaaaaccagtacggcgttgcctcgccttagctcaaagagaacgattctctaaggtgctgaagcaccaagtgaatcggttccgtactatttgtactgtctgcggcttcgtcgccttgtcctgatttttgttaatccactatactttatgccgctaccgcaactggctggcgcaagacaataccctgtccgaattgctggaactgattaactgccaactgaccgaaaaaggcttaaaagtagagaaagcattgacgccaccattattcagaccgctggcagcaaacagcgtcaggccatagaagttgacgaagaaggacaaatcagcggccaaaccacaccgagtaaagacagcgatgcccgttggataaagaaaaacggcctctacaaactcggttacaaacaacatacccgtaccgatggtggaaggctatatcgagaaactgcacattacccccgccaatgcccatgagtgcaaacacctgccgcctttgctggaagggatagctgaaggtacgaccgtctatgccgacaaaggctatgacagtgcggaaaaccggcaacatctggaagagcgtcagttgttagacggcattatgcgcaaagcctgccgcaaccgtccgctgtcggaagcgcaaaccaaacgcaaccgatatttgtcgaagacccgttatgtggtcgaacaaagcttcggtacgctgcaccgtaaattccgctatgcgcggtcaacctatttcggactgattaaagtgagtgcgcaaagccacctgaaggcgatgtgtttgaacctgttgaaagccgccaacaggctaagtgcgcccgctgccgcctaa

SEQ ID NO: 47119 - DNA, 1350 bp, Neisseria meningitidis; identical to SEQ ID NO: 44843

SEQ ID NO: 47120 - DNA, 750 bp, Neisseria meningitidis
atgccatccgttgaactgctgttggagattgtcggactgccacgcggcaccttctattaccaattggccgtccaatcggcagaagacaaatatgccgatttgaaacggcatatccatgatatttatcgacgacataagggaagatacggctaccggaggattgcggcagccatccgtcacgcaggaacaccggtcaatcacaagaaagtcagccgtctgatggcgaagacggggctgaaggcagtgatacggcggcgcaaataccgctcgttcaaaggagaagtcggcaaaattgcgccgaatatcctgcgacgctgtttccatgcagaaaagccgaatgagaaatgggtaacggacgttaccgagttcaatgtaggcggagaaaagatatacctttctccgattatggatttgtttaacggggaaatcgtcagttaccgtattcaaatccgcccgactttcgatttggccggcgagatactgaaaggtgcgccggagaaaccgggatcgtctgaaaagccgatactgcattcggatcaaggttggcaatatcagatgtttttttatagtggattaaatttaaatcaggacaaggcgatgaagccgcagacagtacaaatagtacggcaaggcgaggcaacgccgtactggtttaaatttaatccactatacaacaacgatagaatcaagttgaaattaaaagggctgagccttgttcagtacagaattcagtccctgaaagccgcttga

SEQ ID NO: 47121 - DNA, 2106 bp, Neisseria meningitidis; identical to SEQ ID NO: 44972

SEQ ID NO: 47122 - DNA, 600 bp, Neisseria meningitidis; identical to SEQ ID NO: 45296

SEQ ID NO: 47123 - DNA, 1806 bp, Neisseria meningitidis
atgcgctacaaaccccttctgcttgccctgatgctcgttttttccacgcccgccgttgccgcccacgacgcggcacacaaccgttccgccgaagtgaaaaaacagacgaagaacaaaaaagaacagcccgaagcggcggaaggcaaaaaagaaaaaggcaaaaatggcgcagtgaaagataaaaaaacaggcggcaaagaggcggcaaaagagggcaaagagtccaaaaaaaccgccaaaaaccgcaaagaagcagagaaggaggcgacatccaggcagtctgcgcgcaaaggacgcgaaggggataagaaatcgaaggcggaacacaaaaaggcacatggcaagtccgtgtccggatccaaagaaaaaaacgcaaaaacacagcctgaaaacaaacaaggcaaaaaagaggcaaaaggacagggcaatccgcgcaagggcggcaaggcggaaaaagacactgtttctgcaaataaaaaagtccgttccgacaagaacggcaaagcagtgaaacaggacaaaaaatacagggaagagaaaaatgccaaaaccgattccgacgaattgaaagccgccgttgccgctgccaccaatgatgtcgaaaacaaaaaagccctgctcaaacaaagcgaaggaatgctgcttcatgtcagcaattccctcaaacagcttcaggaagagcgtatccgccaagagcgtatccgccaagagcgtatccgtcaggcgcgcggcaaccttgcttccgtcaaccgcaaacagcgcgaggcttgggacaagttccaaaaactcaataccgagctgaaccgtttgaaaacggaagtcgccgctacgaaagcgcagatttcccgtttcgtatcggggaactataaaaacagccagccgaatgcggttgccctgttcctgaaaaacgccgaaccgggtcagaaaaaccgctttttgcgttatacgcgttatgtaaacgcctccaatcgggaagttgtcaaggatttggaaaaacagcagaaggctttggcggtacaagagcagaaaatcaacaatgagcttgcccgtttgaagaaaattcaggcaaacgtgcaatctctgctgaaaaaacagggtgtaaccgatgcggcggaacagacggaaagccgcagacagaatgccaaaatcgccaaagatgcccgaaaactgctggaacagaaagggaacgagcagcagctgaacaagctcttgagcaatttggagaagaaaaaggccgaacaccgcattcaggatgcggaagcaaaaagaaaattggctgaagccagactggcggcagccgaaaaagccagaaaagaagcggcgcagcagaaggctgaagcacgacgtgcggaaatgtccaacctgaccgccgaagacaggaacatccaagcgccttcggttatgggtatcggcagtgccgacggtttcagccgcatgcaaggacgtttgaaaaaaccggttgacggtgtgccgaccggacttttcgggcagaaccggagcggcggcgatgtttggaaaggcgtgttctattccactgcaccggcaacggttgaaagcattgcgccgggaacggtaagctatgcggacgagttggacggctacggcaaagtggtcgtggtcgatcacggcgagaactacatcagcatctatgccggtttgagcgaaatttccgtcggcaagggttatatggtcgcggcaggaagcaaaatcggctcgagcgggtcgctgccagacggggaagaggggctttacctgcaaatacgttatcaaggtcaggtattgaacccttcgagctggatacgttga

SEQ ID NO: 47124 - DNA, 489 bp, Neisseria meningitidis
atgaagaaagatattttttattgtgagcagtggtcttatggttataagagacttcataagcctttttctgagaaacaagctgaagaaaaacatattaaaggggaattatatagtgccgtaataggttcggcgacacaacctgaatatgtaattaccttgcgagaggaagtaggttttttttcggtagattttttcgataaatttggaagggattatttaacccatcaatttcaaaaatattccaattcgaattattattttctttctatggctgtatggagagattatataactttagactctcatgacttagcagaaggatatacttatttcttcaatgaaaatacggatgattgctatgttttgaaagaggattttattaataatgagcgatatgaaaaaacagaattatattcccaaaaagataaggtaattctatttccaaagtttggcgaatatgatttggtgttaaatccggacattatttaa

SEQ ID NO: 47125 - DNA, 1410 bp, Neisseria meningitidis
atgacagcacaaaccctctacgacaaactttggaacagccacgtcgtccgcgaagaagaagacggcaccgtcctgctctacatcgaccgccatttggtgcacgaagttaccagccctcaggcatttgaaggcttgaaaatggcggggcgcaagctgtggcgcatcgacagcgtcgtctccaccgccgaccacaacaccccgaccggcgattgggacaaaggcatccaagacccgatttccaagctgcaagtcgatactttggacaaaaacattaaagagtttggcgcactcgcctattttccgtttatggacaaaggtcagggcatcgtacacgttatgggccccgaacaaggcgcgaccctgcccggtatgaccgtcgtctgcggcgactcgcacacttccacccacggcgcattcggcgcactggcgcacggcatcggcacttccgaagtcgagcacacgatggcgacccagtgcattaccgcgaaaaaatccaaatccatgctgattgccgttgacggcaaattaaaagcgggcgttaccgccaaagacgtggcactttacatcatcgggcaaatcggcacggcgggcggtacaggctacgccgtcgagtttggcggcgaagccatccgcagcctttctatggaaggccgcatgactttatgcaatatggcgatcgaagccggtgcgcgctcaggcatggttgccgtcgaccaaaccaccatcgactatgtaaaagataaacccttcgcacccgaaggcgaagcgtgggacaaagccgtcgagtactggcgcacgctggtgtctgacgaaggtgcggtattcgacaaagaataccgtttcaacgccgaagacatcgaaccgcaagtcacttggggtacctcgcctgaaatggttttagacatcagcagcaaagtgccgaatcctgccgaagaaaccgatccggtcaaacgcagcggtatggaacgggcccttgaatacatgggcttggaagccggtacgccattaaacgaaatccccgtcgacatcgtattcatcggctcttgcaccaacagccgcatcgaagacttgcgcgaagccgccgccatcgccaaagaccgcaaaaaagccgccaacgtacagcgcgtgttaatcgtccccggctccggtttggttaaagaacaagccgaaaaagaaggcttggacaaaattttcattgaagccggttttgaatggcgcgaaccgggctgttcaatgtgtctcgccatgaacgccgaccgcctgaccccggggcaacgctgcgcctccacctccaaccgcaattttgaaggccgtcaaggcaacggcggacgtacccacctcgtcagccccgctatggcagccgccgccgccgttaccggccgctttaccgacatccgcatgatggcgtaa

SEQ ID NO: 47126 - DNA, 834 bp, Neisseria meningitidis; identical to SEQ ID NO: 39780

SEQ ID NO: 47127 - DNA, 264 bp, Neisseria meningitidis; identical to SEQ ID NO: 39198

SEQ ID NO: 47128 - DNA, 1194 bp, Neisseria meningitidis; identical to SEQ ID NO: 44495

SEQ ID NO: 47129 - DNA, 1179 bp, Neisseria meningitidis
atggcatttttaaaactgaccgaacaaaacgtgcagggcaaaaccgtcctcatccgcgccgatatgaacgtgccgttcaaagacggcaaaatcagcgacgacacccgtatccgcgcctcgctcgcgtccatccaatactgcatggacaacggcgcatccgttatcgtgatgacccacttgggccgcccgaccgaaggcgagttccaccccgaagacgacgttgcgcccgttgccgcgcatttgggcggcctgttgggcaaaaacgtgaaagtattgaacgactggcgcgaaaacaaaccggctttgaacgcgggcgatgtcgtgatgctgcaaaacgtgcgtatcaacaaaggcgagaagaaaaacgatttggaactgggcaaagcctacgcttctttgtgcgacgtgttcgtcaatgacgcgttcggcaccgcgcaccgcgcccaagcctcgaccgaagccgtcgcccaagccgctcccgttgcctgcgccggcgtattgatggcgggcgaactcgacgctttgggcaaagccttgaaacagcccgcgcgcccgatggttgccatcgttgccggcagcaaagtgtccaccaagctgaccatcctcgaatcgctggcggacaaagtcgaccaactcatcgtcggcggcggcattgccaacaccttcctgttggcggaaggcaaagccatcggcaaatctttggcggaacacgatttggtggaagaatccaaaaaaattatggcaaaaatggcggccaaaggcggttctgtgccgctgccgaccgatgtcgtcgttgccaaagcctttaccgccgatgccgaagcggtcgtgaaagacattgccgacgttgccgaagacgatatgattttggacatcggcccgaaatccgccgccgagcttgccgatttgctcaaagctgccggtacggttgtatggaacggccctgtcggcgtgtttgagttcgatcaattcgcaggcggcacgaaagctcttgccgaagccattgctcaaagcaaagcattctcgattgcaggcggtggcgacacgctggcggcgattgctaaattcggcgttaccgaccaaatcggctatatttctaccggcggaggcgcgtttcttgagttcttggaaggtaaagagttgcctgccgtagccgctttggaaaaacgcggcgcgtaa

SEQ ID NO: 47130 - DNA, 1506 bp, Neisseria meningitidis
atgtatgcactttcggaaaaatataacgataatggattcaaggcatacaaagttttgggtgaaggagggggaatctatacagaatacaattacaaatttgataaaagtttgaatttgaatgtattagaaagttcaacaggtgcacgctctcttgaaaaagtccccgttaaatttaccgcatcagtttcccgcgccggagtcttggcaggagtcggcaaacttgcccgcttaggcgcgaaattcagcacaagggcggttccctatgtcggaacagcccttttagcccatgacgtatacgaaactttcaaagaagacatacaggcacgaggctaccaatacgaccccgaaaccgacaaatttgtaaaaggctacgaatatagtaattgcctttggtacgaagacgaaagacgtattaatagaacctatggctgctacggcgttgacagttccattatgcgccttatgtccgattacagcagattccccgaagtcaaagaattgatggaaagccaaatggaaaggcttgcccgtccgtattgggaaaagttaaggaatcgtcctgatatgtattattttaaaaactacaattttaaacgttgttatttcggattgaacggcggagattgtttagttgctaaaggtgatgatggtagaacttttatcagtttctcacttcaaggaaattcaaaatacaaagaagaaatggatgccaaaaagctggaagagattttatcgttgaaagtcgatgccaatcccgacaaatacataaaggcaaccggatatcccggttattccgaaaaagtagaagtcgcacccggaacaaaagtgaatatgggacccgtcacggacaggaacgggaatcccgttcaggttgtcgcaacattcggcagggattcgcaaggcaacaccacagtggatgttcaagtaattccgcgtcccgacttaacccccggaagcgcggaagcgccgaacgcacagccgctgcccgaagtatcgcccgccgaaaaccccgcaaacaacccggcccccaatgagaaccccggcacgcgtcccaatcccgaacccgaccccgatttgaatcccgatgcaaatcccgatacggacggacagcccggcacaagacccgattcccccgccgttccggatcgcccaaacggtaggcatcgcaaagaaaggaaagaaggcgaagacggcggccttttgtgtaaattcttccccgacattctcgcttgcgacaggctgcccgagcccaatccggcagaagatttaaatctgccgtctgaaaccgtcaatgtagagtttcagaaatccggaatcttccaagattccgcacagtgtcccgcacctgtcactttcacagtgactgtgcttgattcaagcaggcagttcgcgttcagctttgagaacgcatgtaccatagccgaacggctaaggtacatgcttctcgcccttgcttgggcggttgccgcctttttttgtatccgcacagtatcccgtgaagtctag

SEQ ID NO: 47131 - DNA, 744 bp, Neisseria meningitidis
atgctcatcatccgcaacctgatttactggctgatactctgttccaccctgattttcctctttccctttatgctgctcgcctcgcctttccgggacggggcgcacaagatggcgcgggtctgggtcaaaatcctcaacctctcgctcaaacacatcgtcgggctcaaataccgcatcatcggcgcggaaaacatccccgaccgccccgccgtcatctgcgccaaacaccaaagcggctgggaaacgctcgcccttcaggacatttttccgccgcaggtttacgttgccaaacgcgagttgttcaaaatcccctttttcggctggggcttgaaactggtcaaaaccataggcatagaccgcaacaaccgccgcgaagccaacgagcagctcataaaacaggggttggcgcgcaaaaacgaaggctattggattaccattttccccgaaggcacgcgccttgcgcccggaaaacgcggcaaatacaaactcggcggcgcgcgcatggcgaaaatgtttgagatggacatcgtccccgtcgccctcaacagcggcgaattttggccgaaaaactcctttctgaaatatccgggggaaatcaccgtcgtcatctgtccgaccatcccgcacgcaagcggcagcgaagccgaattgatggaaaaatgcgaacatctcatcgaaacgcaacaaccgcttatttccggcgcaggcccgtttgccgccaaaatgccgtctgaaaccgcatga

SEQ ID NO: 47132 - DNA, 2019 bp, Neisseria meningitidis; identical to SEQ ID NO: 45303

SEQ ID NO: 47133 - DNA, 1458 bp, Neisseria meningitidis
atgcacaaaatcctgcccatcgcccacgtcctctcccgactgggtatgctgttttcctttatcctgctgatacccgccgccctctcctacgccttttcggacggcgcgtacaccgccttcgccaccaccgcgaccgttaccctttccggctcgtacatcgtccggctcgccaccctccggttcaggcgcgaactgcgcccgcgcgacggcttcaccctcgtcctgatgttgtggctggcgtttgccgctatggcggcgatgccgatgtacctgtatttcccgaatatgggctttaccgacgcattttttgaatcgatgtcgggactgaccaccaccggcgcgaccgtcatcccccacgtcgacgggctcgccccctccgtcaacttttggcggcatatgctcaactggctgggtgggatgggcatcatcgtccttgccgtcgccatcctgcctatgctcggcgtaggcggcacgcagttattcaaagccgaaatccccggcattgacaaagaaagcaaaatgtcgccgcgcatttcccaagtggcgaaaaaactctggttcggctacaccctgatcaccatcctcgcggcagcctgcctgcattttgccgggatgagctggttcgatgccgtctgtcacgcaatggcgaccctctcgctgggcggattttccacccacgatgccagcatagcttattacaactcccccctcatcgaggcggtcatcatcgttttcaccattgtcggcggcatcaattttgccagccatttcgccgccctcaacagccgcagcctcaaaacctattggaaagacgaagaatgccggacgatgctgctgctgctctccggcagcatccttaccgccgccctgtacctgtggcacaccggctattacgccggttttaccgaatccctgcgctacaccgccttcaacttcgtctccatcggactggcaaacgggctggccaacaccgacttcgcacaatggccgctcctgatttccctgtggatgtttttcctcgccaacatcctcgccaactccggctcgaccggcggcggcatcaaaaccatacgcgccctcgtcctgttcaaattcagcctgcgcgaaatgatggtgctgctgcaccccaaagccgtccgcaccgtcaaaatcagcggcaaggccatacccgaccgcctcgcgctgaccgttatgtccttcatcttcatctactttatgaccgtcgtcctcttcagcttcctgctgatggcgagcggtatggaatttaccaccgccttcaccgccgtcatcgcctgcatcaccaacgccggccccggcctgggcgaagtcgggcccgccggcaattacgccggtttggacgtgatgcagaaatggatctgcgttaccgccatgctcttgggcaggctggaaatcttcaccgtcttcatcctcttcacccccgcctactggaagaaataa

SEQ ID NO: 47134 - DNA, 1218 bp, Neisseria meningitidis
atgacagcacccgtaccaacgtgtaatatgtcgggaaatccaataaatttacacaagctaacacttatcatgcccctccccctcccctctcccgaagcacggcaattctcgctcaaactgcaaaccctcattgccgaagaaatcggcaaacacggcaactggattccattttcacgttttatggaattggttttatacgctccgcaatacggctactacaccggcggcagccataaaatcggcaataccggggattttattaccgcaccgaccctcacctctctgtttgcacagacactggcacgccaacttcaagaacttctatcccaaacggcgggcaatatctatgaattcggcgcgggaaccggacagcttgccgccgatttgttgggcagcatttcggacggcatcagccgttactatattattgaaatatcgccggagctggcagcacgtcagaaaaacctgattcaagcacgcgcaccggaagcatctcaaaaagttgtccacttgaccgcacttcccgaagcgtttgacggcatcatcatcggcaacgaagtactcgatgccatgcctgtcgaaatcgtccgtaaaaatgaaggcggctcattcgagcatgtcggcgtttgcctagataatgaccgttttacctattcggcacgaccgctgcacgacttacagctatctgccttggcttccctctattttcctcaaacagattatccctacaccagcgaactacatccgcaacaatatgcctttatccgcacccttgcctcaaggcttgaacgcgggggtatgatattcatcgactacggttttgatgcagcgcagtattaccaccctcaacgcaatcaaggtactctgatcggacactaccgacatcacgttatccacaatccttttgacttcatcgggttggccgacctgaccgcgcatgtcaactttaccgacattgcccaagccggtacggatgcaggactggatttgacaggctatctgccccagtcccattttctgctgaatctgggcataaccgaactgttggcacaagtgggaaaaacagactcgcccgcctacatccgtgaagctgctgccgttcagaaactgattgaccagcatgaaatgggagaattgtttaaagtcatcgcattcggtaaaaatatcggcgtcgactgggcaggattccgcttcggcgacatctgccacaaactctaa

SEQ ID NO: 47135 - DNA, 738 bp, Neisseria meningitidis
atgattattttggacaaggtttccaagcattaccaaacgcgcgacaagacccgttttgccgctgtcgagccgaccagcctcgaaatccgcgacggtgaaatcttcgggctgatgggttattcgggtgcaggcaaatccaccctgttgcgcctgattaacctgttggaacgtcccgacagcggcaaggtcaacgtctgcggacaagagctgaccgcgctcgatgccgccgcattgcgtcaggctcggcagaatatcggcatggtgtttcagcagttcaacctgttgaacaaccgcaccgtcgccggcaacgtcgccttcccattggaaatcgccggatggccgtctgaaaaaatcaaagcgcgcgttgccgaatgtctcgaaatcgtcggactgaccgaacgcgccggccactatcccgcccagctttcaggcgggcagaaacagcgtgtcggcatcgcccgcgcactcgcgcccaaaccccaagtcatcctcgccgacgaacccacttccgccctcgaccccgccaccacgcgcagcgtcttggaatgtttggaagacatcaacaaacgattcaacgtaaccatcgtcatcgtaacccacgaaatgagcgttatcagacgactgtgcgaccgctccgccctgttggataaaggcaaagtcgtcgaaatcgtcgaagtacgcggcaaccaaatccacgcccgatccgacatcgggcgcgaactgattcgggaggactga

SEQ ID NO: 47136 - DNA, 990 bp, Neisseria meningitidis; identical to SEQ ID NO: 45616

SEQ ID NO: 47137 - DNA, 210 bp, Neisseria meningitidis; identical to SEQ ID NO: 44386

SEQ ID NO: 47138 - DNA, 1947 bp, Neisseria meningitidis
atgccgttattttttaatctttcggagcgtttgatgttgaacattaccttgccggacggctcagtccgccaatacgaatcccccgttaccgtggctcaaattgctgcgtctatcggtgtcggtttggcgagggcggcggtggcaggcagggtaaacggcaaattggtcgatgcgtgcgacccgattgttgaaaattctgctgttcaaatcattactccgaaagatcaggaaggcatcgaaatcatccgccattcctgcgcccatcttgtcgggcatgccgtcaagcaactctatcctaatgcaaaaatggttatcggccccgtcattgaagagggcttttattacgacatcgccacggaaaaaccgtttacaccggaagatgttgccgccattgaagcgcgtatgaaagaattgattgcccaagactatgatgtggtcaaaatcatgactccgcgtgcggaggcgattaaaatttttcaagagcgcggcgaagaatacaaactgcgcctgattgacgatatgcccgaagtggaagcgatggggatgtatcatcatcaggaatatgtcgatatgtgccgcggaccgcacgttccgaatacccgtttcctgaaaaacttcaaactgaccaagttggcgggcgcatactggcgcggcgacagcaataatgaaatgctgcaacgcatatacggtacggcttgggcgacaaaagacgaattaaaagcctatattcaacgtatcgaagaagccgaaaagcgcgaccaccgcaaacttggcaagcaattggatctgttccatctgcaagacgaagcgccgggcatggtgttttggcatcctaaaggctgggctttgtggcaagtgattgaacagcatatgcgtaaagagctgaacgccgccggttataaagaggtcaaaacgcctcaaattatggataaaaccttttgggaaaaatccggccattgggacaactacaaagacaatatgttcgtgaccagttcagaaaaacgcgaatacgcggtgaaaccgatgaactgtccgggtcatgtgcaaatttttaataacggtttgcgctcatatcgcgatttgccgatgcgtttggccgagttcggttcttgccaccgcaatgaaccaagcggtgcattgcatggtctgatgcgtgttcgcggttttgtgcaagatgatgcgcatattttctgtaccgaagaccaaatcgtcagcgaagcgcgcgcattcaatgaattgttggttcgcatctacaaacagttcggtttccatgatgttgctgtgaagttgtccctccgccctgaacaacgtgcaggttctgacgaagtttgggataaggccgaacaaggcttgcgtgatgcattgaccgcttgtggcgtagagtgggaagagttgcctggcgaaggtgcgttttacgggcctaaaatcgaatatcacgtcaaagatgccttgggtcgttcttggcaatgcggtacattgcaactagatttcgtcttaccggaacgcttggatgcagaatatgtaaccgaaaacaatgaccgcgctcgccctgtaatgttgcaccgcgccattttgggttctttggagcggtttatcggcattctgattgagaaccatgcaggctctttcccgttatggctggcgccggttcaaatggtgattatgaatatcaccgaaaatcaagcggattactgccgtgaagtggctgccaaattgcaggcggcaggattccgcgccgagttggatttgcgtaacgaaaaaatcggttacaaaatccgcgacaacagccaataccgttttccttatcaaatcgttgtcggcgataaagaaaagcaggaaaacaaagtggcggtacgccgcaaagcagaagatttgggttctttggatttggatgatttcattgcgcaattgcagcaagaaatcactgatgccctcgtcaatcattaa

SEQ ID NO: 47139 - DNA, 270 bp, Neisseria meningitidis
atggcaatgaacaaattgaatttccttctgctgcttgcggtgtgcgtttccgctttttccgttgtgatgcagcaaaaccagtacaggctcaacttcacagctttggataaggcgaaaaaacaggaaatcgccttggagcaggattatgcgcaaatgaggctgcaacaggcgcgtttggcgaaccacgaagcgatcagggcggcggcagaaaaacaaaacctccatccgccggtttcgggcaatacctttatggtggagcatcaaagatag

SEQ ID NO: 47140 - DNA, 1134 bp, Neisseria meningitidis
atgaaaagaattctttgcattacaggtaccagagccgacttcggcaagctaaaacctttattagcctatattgaaaatcacccagaccttgaattgcatttgattgtaactggtatgcatatgatgaaaacatatggcagaacctacaaggaagtaactcgagaaaactatcaacatacatatctgttttcaaatcaaatccaaggtgaaccaatgggtgccgttttaggcaataccattacgtttatctctcgtctatctgatgaaattgaacctgatatggtcatgattcacggcgaccgtttagaagcactagcaggcgcagctgtaggtgcattaagcagccgtttagtttgccatatcgaaggtggtgaactatctggtacagtagatgactccattcgtcattctattagtaaactttctcatatccacttggtagcaaatgaacaagctgtcactcgcctagtgcaaatgggagaaaaaagaaagcatattcacatcatcggctcccccgatttagatgttatggcctcttccaccctcccatccttagaagaagtcaaagaatattacggtttaccatacgaaaattatggtatttctatgtttcaccccgtgactacagaagcacatttaatgccacaatatgcggcccaatatttcaaagcattagaattaagtggccaaaatatcattagcatctaccctaataatgacacgggcactgaaagtattctgcaagaattattaaaatatcaatctgataaatttattgcatttccttccattcgatttgaatattttttagtcttattgaaacatgctaaatttatggtcggcaactcaagtgcaggtattagagaagctcctctctacggtgtcccttcaattgatgttggtacacgccaaagtaaccgccatatgggaaaatctattattcatacagattatgaaactaaaaatatctttgatgcgattcaacaagcatgcagtttaggcaaatttgaagcagatgatacctttaatggcggagatactcgcaccagcacagaaagatttgctgaagtaatcaacaatcctgaaacgtggaatgtttctgctcaaaaacgttttatcgatttgaatctttaa

SEQ ID NO: 47141 - DNA, 2301 bp, Neisseria meningitidis; identical to SEQ ID NO: 44782

SEQ ID NO: 47142 - DNA, 1512 bp, Neisseria meningitidis; identical to SEQ ID NO: 44625

SEQ ID NO: 47143 - DNA, 1020 bp, Neisseria meningitidis; identical to SEQ ID NO: 44737

SEQ ID NO: 47144 - DNA, 582 bp, Neisseria meningitidis; identical to SEQ ID NO: 45592

SEQ ID NO: 47145 - DNA, 3147 bp, Neisseria meningitidis
atgaataaaacttggaaacggcaggttttccgccataccgcgctttataccgccatattgatgttttcccataccggcgggggggggggggcgcaggcgcaggagaatccatacgctattgtaatgaacagtcaaaagctgcccgaggtaaagtgggggaattcatataaaaaaggggagttgaggcccgaagacagggatcgtaaatttacctttacgagtacttatggaatcaaacgcaacactaatatcacattcaataataccgattatcttgtttctgaaaaaaacggtactgccgttttcggcgcggcgacctacctgccgccctacggcaaggtttccggttttgataccgataggctgaccaagcgcggcaatgccgttgattggattaatacgacccacccggggttgataggctacagctaccaaggtatcacatgcagcagcagcagcagctgtcctgaatttggctataaaacccaatttaccttcggtaattccggtttggcaaaaaagacaaacagcagcaagctggatatatacgaagacaaaagccgcgacaattcgcccatttacaaattgcaggattatccttggttgggcgtgtctttcaatttgagcagcgatagctacgtcaaacaaaagagacacaatagtttggtatcttcttttagcgaggatgtgacgcagagcaatggtacgcaaagcccatacaaagacagaaacctcgtttatcgtacagacgattaccataataagggtaattatagccatcaggacgcacaccacgccatcgccttttatctgaacgccaagctgcacctgctggataaaaaacaaatcaaaaatatcgcgcaaggcagtgaacttaatttgggtatgttgaaaacgcacatcgagctgccgaaaaattttaatcaaaggagcttggtaggttcggtggttagttggacggttaaagatgagggaaaagtcagcgtcaaactcaaattgccggaagtcaaagcaggccgctgcatcaacaaagataaccccaatcccaaatccaaagccccttcccccgccctgaccgcccccgcgctgtggttcggacctgtgcaaaatggtaaggcgcagatgtattccgcttcggtttctacctaccccgacagttcgagcagccgcattttccttcaaaatctgaaaagaaaagacgaccccaacaaacccggccgccattccctcgcaaccttgactgagaatgatattaaaaatcgagagccgactttcaaccagcggcaaacaatcatccgattggatggcggcgtacagcagatcaaactggataaaagcaatgaggccaccggtttaaatggaaataccaacaacaacactttcggcattgttaaggacttgggcgtcgatcctgatgccaatgagtggaaaaaagtattgctgccttggacggttcgtgctttcaatgatgacggtcgatttaacacagtcaacaaagaagaaaacaacggcaagccaaaatacagtcaaaaataccgcagccgcgacaacggcaagcacgagcgcaatttgggcgacatcgtcaacagccccatcgtggcggtcggcgagtatttggctacttccgccaacgacgggatggtgcatatcttcaaacaaagcggcggggacaagcgcagctacaatctgaagctcagttatatcccgggtacgatgccgcgcaaggatattcaaaacaccgaatccacccttgccaaagagctgcgcgcctttgccgaaaaaagctatgtgggcgaccgctacggcgtggacggcggctttgtcttgcgcaaagtcgaacggaacgggaaagaccatgtgtttatgttcggcgcgatgggctttggcggcagaggcgcgtatgccttggatttaagcaaaatcgacagcggcaacggcaacctggcagacgtttccctgtttgatgtcaaacatgacaagaatggcaataacggcgtgaaattaggctacaccgtcggcacaccgcaaatcggcaaaacccacgacggcaaatacgccgctttcctcgcctccggttatgcgactaaagacattaccagcggcgacaataaaaccgcgctgtatgtgtatgatttggaaagcagcggtacgctgattaaaaaaatcgaagtacccaacggcaagggcgggctttcgtcccccacgttggtggataaagatttggacggcacggtcgatatcgcctatgccggcgaccgcggcgggaatatgtaccgctttgatttgagcaacaacgatccgaccaaatggtctgtacgtactatttttaaaggcacgccggataagccgattacctccgcgcccgccgtttccaaactgaaagacaaacgcgtggttatcttcggtacgggcagtgatttgagtgaggatgatgttgataaaaaggatatacaatctatttacggtatttttgacaatgacacaggcacggatgtggcagaagaaggacagggcaaagggttgctcgagcaacaccttactcaggaagataaaaccttattcctgaccgattacaagcgatccgacggctcgggcgacaagggctgggtagtgaaattggaagccggacagcgcgttaccgtcaaaccgaccgtggtattgcgtaccgcctttgtaaccatccgcaaatataacgacggcggctgcggcgcggaaaccgccattttgggcatcaatactgccgacggcggcaagctgaccaagaaaagcgcgcgcccgattgtgccggaagccaatacggctgtcgcgcaatattccggtcataagcaaaccgccaaaggcaaatccatccctataggttgtatgtggaaaaacaatgaaaccgtctgcccgaacggatatgtttacgacaaaccggttaatgtgcgttatctggatgaaaagaaaacagacggattttcaacaacggcagacggcgatgcgggcggcagcggtatagaccccgccggcaagcgttccggcaaaaacaaccgctgcttctcccaaaaaggggtgcgcaccctgctgatgaacgatttggacagcttggacattaccggcccgacgtgcggtatgaaacgaatcagctggcgcgaagtcttctactga

SEQ ID NO: 47146 - DNA, 771 bp, Neisseria meningitidis; identical to SEQ ID NO: 39218

SEQ ID NO: 47147 - DNA, 1251 bp, Neisseria meningitidis; identical to SEQ ID NO: 38424

SEQ ID NO: 47148 - DNA, 897 bp, Neisseria meningitidis; identical to SEQ ID NO: 38955

SEQ ID NO: 47149 - DNA, 2235 bp, Neisseria meningitidis
atgaaggcagacattcaaaccgaattaacccaagccctgctatcacacgaaaaagtatgggcgaacgaagaaaaaaccattttagccaaaaacattctgttggatttggtggaaaaaaccgacccggccattatcggtttgttattggggaatgatgagttaaaacgccatttttttgtggaagtgaatggtgttttggtgtttaaattgcaggattttcgttttttcttggacaaacacagcgtcaataattcctacacaaaatacgccaaccgcattggtttgacggacggcaaccgctttttgaaagacagttcggatattgtgttggattttccgtttaaagattgcgtattgaatggcgggcaaagcagcgaagaaggcgaagagatttattttaaacacagtaatagccagccagccagccagccagccagccagccagccagccagccagccagccagccagccagccagccagccagccagccagccagccagccagccagccaattatacactaaattaacccgaaaaagacaagaaatcttttttaatcaaacgcttgcttttgatgaaattgaccggctttttgacgcaaaagcattctcaaaattctctcgccacaccgcagacggcaaacaagcggttggcgaaatcaaacgacattcagacggcacaccagccgaaaatctcattatcaaaggcaataatctgattgccctgcattcgcttgccacgcagtttaaaggtaaagtgaagctgatttatattgatccgccttattattttgttaaaaagaaacaacaagatagttttggttataacactaactttaaattatctacttggcttacatttatgaaaaatcgtttatcaattgccaaagaattattaactgatgatgggattattgttatttccattgatgatgacggaaatgcttatttaaagattttgttagatgaaatttttggatttgaaaattttatcggaaatttacccactattatgaatttaaaaggtaataatgatgaatatgcttttgcaggcactcacgaatacacactagtctttgctaaaaataaagataaatctactttttatgaatttccaatagatgaagataattttttagagaaatgggaagaagatgaaattgggttttataaaaaaggagctccaatgcgagcaacaggaaccgaagataaaagagaagatagacctgaaatgttctatccttttttggtaaaaaataacacagttagtacaattacagatgaagaattttctcaaatctataataaagatttagaagtattcaatgatgattttattcaaaaactaaaagagaaatacgaaaatcttggatacaattttattttacctattgctgataaacaatgggggcgttggcgttgggggtattcaataaagaataaggcaaggctgcagacggatattattgttagccaatctaaaaatggaatttccttgtataaaaaacaaagacctgaattagatgatttacctacaaaaaaacctaaaactattttttataaacctgaatacagtagtggtaatggaactgaacagatgaaaaatctttttggtgaaaaggcatttaaaaatcctaaaccagaagaacttatccaagattttattaccatcacaaccaacgaatccgacatcgtcttagactaccatcttggtagtggcacaaccgccgccgttgcccacaaaatgaaccgacaatatatcggtattgaacaaatggattatattgaaacgcttgccgttgaacgcttgaaaaaagtgattgatggcgagcaaggcggtatttccaaagccgtgaattggcaaggtggtggcgagtttgtttatgccgaacttgccccatttaacgaaaccgcaaaacaacaaattttggcttgcgaagattcagacggcatcaaaacgctgtttgaaggtttatgcgaacgctatttcttgaaatacaacgtcagcgtaaatgaatttagtcaaatcattcaagagcctgaatttcaatccttggcattagacgaacaaaaacaaatggtgcttgaaatgttggatttaaatcaaatgtatgtttcattatccgaaatggatgatgagcaatttgcaggttgcttaaatgatgacgataaagcgttaagccgtgaattctatcaatcagcaaaaaatcaagcggagaaaaaagatggcgaataa

SEQ ID NO: 47150 - DNA, 501 bp, Neisseria meningitidis; identical to SEQ ID NO: 37418

SEQ ID NO: 47151 - DNA, 1449 bp, Neisseria meningitidis; identical to SEQ ID NO: 46113

SEQ ID NO: 47152 - DNA, 1467 bp, Neisseria meningitidis; identical to SEQ ID NO: 38295

SEQ ID NO: 47153 - DNA, 2838 bp, Neisseria meningitidis
atgttagacaaatactcccccgccgaaatcgaatccaaacattatcaaaactgggaagagcagggctatttccaacctgatatggatttgaccaaaccgtctttttccatccaactgccgccgcccaatgtaaccggcacgctgcacatgggtcatgccttcaaccaaaccattatggacggcctgacccgctactaccgtatgaaaggctgcaacaccgcctggattcccggcaccgaccacgcgggcatcgccacgcaaatcgtggtcgagcgtcagcttgccgcgcaaaacgtgtcccgtcatgacttgggtcgtgaaaaattcttggaaaaagtgtgggaatggaaagaagtttccggcggcacgattacgcagcagatgcgccgtgtgggctgttctgccgactggacgcgcgagtatttcacaatggacgatgtacgcgccgaaaccgtaaccgaagtgttcgtacgcctgtatgaacagggcttgatttatcgcggcaaacgcttggtgaactgggatccggtattgggtaccgcagtgtctgatttggaagtggaaagcgtggaagaacaaggctctatgtggcacatccgctatccgctggcggacaatcctgccgaagccgtcatcgtcgccaccacccgtcccgaaacgctgttgggcgacgttgccgttgccgtcaatcccgaagacgaacgttatacccacttaatcggcaaagaattaatcctgccgctgaccggccgcaccattcccgtgattgccgacgaatacgttgaaaaagacttcggcaccggctgcgtgaaaatcacgcctgcgcacgacttcaacgactacgaagtcggcaaacgccacgatacgcgcttggttaatgtgttcgacttggaagccaaagtattggcaaacgccgaagtgttcaacttcaaaggcgaagcgcaaccaagctttgccctgcctgaaaaatacgcaggcttggaccgctttgccgcgcgcaaacaaatggttgccgatttgcaggaacaaggtttcttggtcgaaatcaaagcgcacacgctgatgacgccgaaaggcgaccgtaccggttccgtgattgagccgatgctgaccagccaatggtttgtcgccatgtccgccacgccaaacggcggcgagcctgacagcgaattcaaaggcttaagccttgctgacaaagccaaaaaagccgtcgacagcggcgcggtgcgctttatccccgaaaactgggtcaacacctacaaccaatggatgaacaacatccaagactggtgcatctcgcgccaactgtggtgggggcatcaaatccctgcatggtacgacaacgaaggcaatgtgtacgttgcccgcaatcaggaagaagccgaaaaacaagccggcaaaacaggcttgacccgagaagaagacgtattggacacatggttctcctccgcactcgtgccgttctccacgctcggctggccgtctgaaaccgacgaactcaaagccttcctgccgtccaacgtcttggttaccggctacgaaatcatcttcttctgggtggcgcgcatgattatgatgaccacccactttaccggcaaagtaccgtttaaagacgtgtacatccacggcatcgtgcgcgaccacgaaggcaaaaaaatgtccaaatccgaaggcaacgtcattgaccctgtggatttgatcgacggcatcgacttggaaaaactgctggtgaaacgtaccaccggtctgcgcaaacccgaaaccgcgccgaaagtggaagaagcctcgagaaaactcttccccgaaggcattccgagtatgggcgcggacgctttgcgcttcaccatggcgagctacgccagcttggggcgcagcgtgaacttcgacttcaaacgcgccgaaggctaccgcaacttctgcaacaaaatctggaacgccaccaacttcgtcttgatgaacaccgaaaaccaagactgcggctacggcgcaaccgccactgagccgcgcggctattccttccccgatatgtggattgtagaccgtctgaatcagaccatcgagcaagtaacgcaagcctacgaaacctaccgctttgatttggcagcggaaaccctgtacagcttcatgtggaacgactattgcgactggtatttggaacttgccaaagtgcagcttcaaaccggctgcgccagccgccaacgcgccacacgccataccttgttgcgcgtactcgaagccgccctgcgcctgctgcacccgattatcccgttcatcaccgaagaattgtggcaaaccgtcgctcctatgtgcgacgcgaaaaccgccgacagcatcatgctcgcccgcttccccgaagccgacggcggcgatattgttcagacggcattcgagcaaatgaccgtgttgcaggatttgattggcgcagtccgcaacctgcgcggcgaaatgggcatccagcccaatgtgaaagccccgctgtttgtcgaaagcacggacgacttggcggactacctcaaatacctgccgatgatgacccgcctgatcgaagcacagcaagtcgccgccctacccgaaagcgaagacgcgcccgtcgccgtctgcaacggcgcgcgcctgatgttgaaagtcgaaatcgacaaagctgcggaaaccgcccgtttgagcaaagaagccgagaagctgcaaaaagccttggacaaactcaacgccaaactctccaaacccggctacaccgaaaaagcccctgcgcatctggtggaaaaagacaaagccgatttggcggaattggaagacaaaatggcaaaagttcaaaatcagttggcgaagttgaaagactga

SEQ ID NO: 47154 - DNA, 870 bp, Neisseria meningitidis; identical to SEQ ID NO: 38859

SEQ ID NO: 47155 - DNA, 1242 bp, Neisseria meningitidis
atgcccaccaaaaccccttcactgttcggctgcgcgatgattatcgccggcacggtcatcggcgcaggtatgctcgccaacccgaccgccacatccggcgtatggtttaccggctcgctggccgtgttgctgtacacctggttttccatgctctccagcggcctgatgattttggaagtcaacacccactacccccacggcgcgagcttcgacaccatggttaaagacctgctcggacgcggctggaacatcatcaacggtatcgccgtcgccttcgttttatacctgcttacttacgcttatatcttcgtcggcggcgacctgaccgccaaaggcatcggcaacgccttgggcggcaatgtttcgcttaccgtcggacaactcgtcttcttcggcatcctcgccttttgcgtatgggcatccgcacgcttggtcgaccgattcaccagcgtcctcatcggcggcatggtattaacctttatttgggcaaccggcggcctgattgccgatgccaaaatgcctgttttgtttgacacccaagcccctgccggcaccggctactggatttacgccgccaccgccctgcccgtctgcctcgcttccttcggcttccacggcaacgtttccagcctgctcaaatactttaaaggcgacgcgcccaaagtggctaaatccatctggatgggcacactgattgcgctggtaatttacgtcctctggcaaaccgccatccaaggcaacctgccgcgcaacgagttcgcccccgtgattgccgccgaagggcaagtctccgtcctcatcgaaaccctgtccaaattcgcccaaaccggcaatatggacaaaatattgtccctgttttcctatatggcgatcgccacctcgtttttaggcgtaacgctcggactcttcgactacatcgcagacatcttcaaatggaacgacagcgtgtccggccgcaccaaaaccgccgcgctgaccttcctgccgcccctgatttcctgcctgctcttccccaccggcttcgttaccgccatcggctacgtcggcctggcggcaaccgtctggacaggcatcatccccgccatgctgctctaccgttcgcgcaaaaaattcggcgcaggcaaaacctataaagtttacggcggcttgtggctgatggtttgggtcttccttttcggcatcgtcaacatcgccgcacaggtattgagccaaatggaactcgtccccgtatttaaaggataa

SEQ ID NO: 47156 - DNA, 384 bp, Neisseria meningitidis; identical to SEQ ID NO: 38800

SEQ ID NO: 47157 - DNA, 2589 bp, Neisseria meningitidis; identical to SEQ ID NO: 45721

SEQ ID NO: 47158 - DNA, 561 bp, Neisseria meningitidis
atgaacagactgctactgctgtctgccgccgtcctgctgactgcctgcggcagcggcgaaaccgataaaatcggacgggcaagtaccgttttcaacatgctgggcaaaaacgaccgtatcgaagtggaaggattcgacgatcccgacgttcaaggggttgcctgttatatttcgtatgcaaaaaaaggcggcttgaaggaaatggtcaatttggaagaggacgcgtccgacgcatcggtttcgtgcgttcagacggcatcttcgatttcttttgacgaaaccgccgtgcgcaaaccgaaagaagttttcaaacacggtgcgagcttcgcgttcaagagccggcagattgtccgttattacgaccccaaacgcaaaaccttcgcctatttggtgtacagcgataaaatcatccaaggctcgccgaaaaattccttaagcgcggtttcctgtttcggcggcggcataccgcaaaccgatggggtgcaagccgatacttccggcaaactgtttgccggcacctgcatgatttccaacccgatagaaaatcccgacaaacgctga

SEQ ID NO: 47159 - DNA, 651 bp, Neisseria meningitidis
atgagggttttaatggctggtaaggtgcggaaacaaataaaacaaggaggttggttgtcagtaattgccctaacctccttgtttgtatctgtattcactttattttacatattcaggcacagcgtacagtttaacctatgggggacggccgaatggctgatgttttggcaactgaccgttgtttcagtaaccgccgtcattgcactggggacaatattcatcaataagaaaacttcaaagcaaaaggcgacattagatgttattttgaatgattaccaagatgcacaatttgtagaagccgacaatcatatttcgccttatattcgcggcacggcagttgacgacaacaacgcgcggatcgacctgtatgaaatttatcaaaataagggcggacaatgggaaaaagagagagggcatttacttaccgtaatcaatcggcacgagttttatgcgtgcgcaatcaactcgggagtattggatgaggatttgtttaaacggctgcattgcaccaacttcataaaattgtggaatgcagtttcgcctcttgttatgaaaatacgcgaagaagaacgcaaagacacaatatttagagagttggaaattttggttgcattatggaaagcaaaccccctaaaggcatctgatttgtga

SEQ ID NO: 47160 - DNA, 309 bp, Neisseria meningitidis; identical to SEQ ID NO: 36432

SEQ ID NO: 47161 - DNA, 321 bp, Neisseria meningitidis
ttgttaccccttacaagaaacaccatgttccgcatattactgttgcttttcccttgtgcaatccttgccgcctgcacccgaaacataccggcaaacccggccgtttcaaattgcgcgcatcttcaaaaccgcaccatcctgtattttgacgcacacggcaaacccgccgacggcgcagtaaagggcggattttacaaaattatcgaaatacagggtgcaaaccgcatccttattcaagactttaacagcacgggcaatgccctcggcggatcctatgtgccggactgccgcaaatcatcccttttcccgaaaaatatttga

SEQ ID NO: 47162 - DNA, 561 bp, Neisseria meningitidis; identical to SEQ ID NO: 38782

SEQ ID NO: 47163 - DNA, 810 bp, Neisseria meningitidis; identical to SEQ ID NO: 39750

SEQ ID NO: 47164 - DNA, 1260 bp, Neisseria meningitidis
atgaaacagaccgtcctcaaaaataacctgcaaaacctgcttgaaagcgcagaaaatatcctgctgcttcaaggccctgtcggcgatttttttctgcgccttgccgactggctgactgcaaacggcaaaaccgtacataaattcaactttaatgcaggagacgactatttttatccgcccactcaagcgcataccgttgtttttaacgacaactacgatgcctttcctgagtttttgcaagaatacatcactcaacatcacatccaggccgttgtctgctttggcgacacacgcccttatcacgtcattgcaaaacgcattgcaaacgaaaaccaagccagtttctgggcgtttgaagaaggctatttccgcccctactacatcaccttagaaaaagacggcgtcaacgcattttccccgttgccacgccgtgccgacttttttcttgaacaattccctaagcttgcccagcaagaatataaagcgccaacgccggtacgcggcggatttacgcccatggcaaaaaacgccatccgttactatatcgagttgttccgcaatctacgcaaataccccgactacatccaccaccgcgcacccaatgccggccattacctcaaaccgtggtcgctctccatcctcaagcgtttgaactactatattgaagacatccaaatcgccaaacgtgtggaagcaggcaaatacggcaagttttttattgttcccttgcaggtattcaacgacagccaagtccatatccattgcgactttcccagcgtccgcagcttcctgctccatgttttgagttcatttgccgagcacgcgcctgccgataccaacatcatcatcaagcatcatcctatggaccgcggctttatcgactactggcgcgacattaaacgctttatcaaagaacaccccgaactcaaaggccgtgtgatttatgtccatgatgtccccctgcccgttttcctgcgccacggtctcggcatggttaccatcaacagcaccagcggcctgtccggactgattcacaatatgccagttaaggttctcggccgtgcctattatgatattcccggcattactgaccaaaataccttggcagaattttggaatcatccgacaccgcctgacaaagagctgttccatgcctaccgaatgtaccacctcaacgtgacccaaattaacggcaacttctacagtcaggtcttttttcctaacaaaaacacatccgactcttccacaccaacaacctaa

SEQ ID NO: 47165 - DNA, 687 bp, Neisseria meningitidis
ttgattttgaaatgcgaaggcgtgggcaaacgctaccgcgacggcggtttggacgttcgggtgctgcacggcttggatttggaaatccgcgcgggggaaagcaccggcatcatcggttcttcgggcagcggaaaatcgacgctgctgcatattctgggcgggctggatatgccgtctgaaggcagggtgctgctgatgggcgaggatttgcgtacattaagccagcgacaactgggcatcctgcgcaaccgccatctcggtttcgtgtaccagttccaccatcttctgcctgaattttcggcactggaaaacgtgatgatgccgcttctgatcggcaagaaaaaacgggaagaggcggcagaaacggcaatggcgatgctggaaaaggtcggactgaaacaccgttcgacgcaccgcgcgggcgaactgtccggcggcgaacgccagcgtgccgccattgcgcgcgccttggttacgcaaccaaaatgcctgcttgccgacgaaccgaccggcaacctcgaccgtgcgaacgccaggaatgttttggatatgatgctggaactgaaaacggaattgggaacggggctggtggtcgtaacgcacgacgacgaactcgccggccgcttcgagcgcgtgatggtcatgaaagacggcagcctgcaccccaaacagggcgcaaacgcctaa

SEQ ID NO: 47166 - DNA, 1452 bp, Neisseria meningitidis
ttgttaatccactatatttccccgtcctatcggtttcccgtttcagacgacataaggtctgaaagaaagactacaattatgagtaatccattttcctctttaggtttgggtacggaactcgtttccgcactgaccgcgcaaggttacgaaaacccgacgcccatccaagccgccgccattcccaaagcactcgccggtcatgatttgctagccgccgcgcaaaccggcacaggcaaaaccgccgcctttatgctgcccagtctggaacgcctcaaacgttacgccaccgccagcacctcgcccgcgatgcaccccgtgcgtatgctcgtccttacccccacgcgcgaacttgccgaccaaatcgaccaaaacgtgcagtcctacatcaaaaacctgccgcttcgccacaccgtcttgttcggcggtatgaatatggacaaacagaccgccgatttgcgtgccggctgcgaaatcgtcgtcgccaccgtcggacggctgctcgaccacgtcaaacaaaaaaacatcagtttgaacaaagtcgaaatcgtcgttctggacgaagcagaccgcatgttggatatggggtttatcgacgacatccgcaaaatcatgcagatgctgcccaaacaacgccaaaccctgctcttttccgctaccttctccgcaccgatacgcaaactggcgcaagacttcatgaacgcgcccgaaaccgtcgaagtcgccgcgcaaaacaccaccaacgccaacgtcgaacaacacatcatcgccgtcgataccattcagaagcgcaacctgctcgaacggctgattgtcgatttgcatatgaaccaggtcatcgtgttctgcaaaaccaaacaaagcgtcgaccgcgtaacgcgcgaactggtgcgccgcaacctgtccgcacaggcgatacacggcgaccgttcccaacaaagccggctcgaaacactcaacgccttcaaagacggcagcctgcgcgtcctcgtcgccaccgacatcgccgcgcgcgggctggacattgccgaactgcccttcgtcatcaattacgaaatgcccgcccagcccgaagactacgtccaccgcatcgggcgcacggggcgcgcgggcgcggacggcgtggcgatttccctgatggacgaatccgaacagaaaatgtttgaatccattaaagagctgaccggcaacaagctgctcatcgagcgcatcgagggcttcgagccgcaatggtgggaacagggcggcgcaaaaccggaaaaaaccgaaatgcgcgaaccgagacaacgcaaccgctacgaatccgccagggctcagcgcgaaaaaaatacccgaccggaaaccacggcaaacgatgcgggcgcggcttgcggaaaaattgccggacgcagccgccgaagccgtcgggaacaccggacgtgcgccctgctccaaccgcgttacggcgtaaaataa

SEQ ID NO: 47167 - DNA, 738 bp, Neisseria meningitidis; identical to SEQ ID NO: 45800

SEQ ID NO: 47168 - DNA, 558 bp, Neisseria meningitidis
atggatgctttaaaattattgacgaaccgccgatcttccaaaaagctgaagcaccccgcccccgatgcggcggagttggaacaaatatttcaggcggcaacccaagttcccgatcacggcaatatgcgccccttccgttttaccgtgattcaaggcgaggtaggattgcaacgttttcgcgatgtgttgaagcaaacggttgccgaattgaatttcggcgacgatgcgatgaaaaaggcggaaaaagtgggcaatatggcgccgatggttatcggggtaacgtttgcgccgaaccgcgatgtgcctaagccgaaaccggaatgggagcagatgctgacggcgggttgtgcggcgtatgcgctgcaactggcggcaacggcgcaaggtttcgacaatgtctggattacggggatgtgggtcaacagccccctgttgcgtgaggctttcggatgtgcggataaggataaaatcatcgggctgatgatggtcggcacgccgacagaggaagtgcataagcccaagaataccgatttggaagcgtttgtcagtcattggtaa

SEQ ID NO: 47169 - DNA, 777 bp, Neisseria meningitidis; identical to SEQ ID NO: 44372

SEQ ID NO: 47170 - DNA, 822 bp, Neisseria meningitidis; identical to SEQ ID NO: 44347

SEQ ID NO: 47171 - DNA, 204 bp, Neisseria meningitidis; identical to SEQ ID NO: 40161

SEQ ID NO: 47172 - DNA, 2502 bp, Neisseria meningitidis; identical to SEQ ID NO: 45456

SEQ ID NO: 47173 - DNA, 360 bp, Neisseria meningitidis; identical to SEQ ID NO: 45472

SEQ ID NO: 47174 - DNA, 1065 bp, Neisseria meningitidis; identical to SEQ ID NO: 44887

SEQ ID NO: 47175 - DNA, 1101 bp, Neisseria meningitidis; identical to SEQ ID NO: 37731

SEQ ID NO: 47176 - DNA, 873 bp, Neisseria meningitidis
atgcccattttgaaccatattgccctcatcggtgtagggctgatcggcggttcgttcgttctcgacctcaaaaggcagggactcgtccgcaccgttaccggtatcgacaccgaccgcgacaacctcgaacgtgcattggaacgcggcgtgattgaccgtgcctccgttgccatcgacgcggacagcatcggcggtgcggacttggtactgattgccacgcccgtcgccacctttcccgccattttgaccgcgctgcgccccgttttgccggaacacacttggatttccgatgtcggcagcaccaaatcttcggtcatcgaagccttccgccgctgtctgcccgaccgcctgcaccgctgcatcgccgcccacccgattgccggttcggacagaagcggtgcgcaagccgcgcagttcgggctgttccgccacagaaaactcatcatcacgccacacggcggcgaacattcagacggcattgccttggtagaagaactgtggcacgcggtcggtgcggaaatttatacgatggacgcgcaacgccacgacgcggttttcgctgccgtctcccatatgccccacctgaccgccttcgcctatgtccaccagattctcgaccaccccgacggacaggaatatctgaaattcgccgccacgggctttcgggacttcacccgcatcgcctccggtcatcccgccgtgtgggcggacatctgccttgccaacaaagacagcctgctgcaactggttcaaggcttgggcaaacagttggacgttttggcaaacatcctgaccaccgacgaccgcgaagccctgtaccgctattttgaagaagccaaaaccacacgcgaccgctggctggacggcaactga

SEQ ID NO: 47177 - DNA, 1065 bp, Neisseria meningitidis; identical to SEQ ID NO: 39469

SEQ ID NO: 47178 - DNA, 591 bp, Neisseria meningitidis; identical to SEQ ID NO: 38840

SEQ ID NO: 47179 - DNA, 2604 bp, Neisseria meningitidis; identical to SEQ ID NO: 44767

SEQ ID NO: 47180 - DNA, 1095 bp, Neisseria meningitidis; identical to SEQ ID NO: 38108

SEQ ID NO: 47181 - DNA, 1098 bp, Neisseria meningitidis; identical to SEQ ID NO: 36189

SEQ ID NO: 47182 - DNA, 1290 bp, Neisseria meningitidis; identical to SEQ ID NO: 38999

SEQ ID NO: 47183 - DNA, 462 bp, Neisseria meningitidis; identical to SEQ ID NO: 36928

SEQ ID NO: 47184 - DNA, 882 bp, Neisseria meningitidis; identical to SEQ ID NO: 45356

SEQ ID NO: 47185 - DNA, 534 bp, Neisseria meningitidis; identical to SEQ ID NO: 39728

SEQ ID NO: 47186 - DNA, 1278 bp, Neisseria meningitidis
atgcgtagcagcgatattttaattgtagacgacgaaatcggcatccgcgacctgctgtcggaaatcctgcaggacgaaggttattcggtcgcattggcggaaaacgccgaagaggcgcgcaagctgcgccatcaggtacgcccggcgatggtgttgctggatatttggatgcccgattgcgacggcatcacccttttgaaggagtgggcgaaaaacgggcagctcaatatgccggtggtgatgatgagcgggcatgccagcatcgataccgccgtagaagcgaccaaaatcggcgcgctcgactttttggaaaaaccgatttccctgcaaaagctgctgtctgccgtcgaaaacgcgttgaaacacggtgcggcgaaaatcgaaacggggcctgtattcgacaagctgggcaacagtgcggcgattcaggagatgaactgcgaagtcgaagcggcggcaaagcgcacgtcccctgtatttttgacgggcgaagcgggttcgccgtttgaaaccgtggcgcgctatttccataaaaacggtacgccgtgggtcagtccggcaagggtcgaatatctgatcgatatgccgatggaactgttgcagaaggcggagggcggcgttttgtatgtcggcgacatcgcccaatacagccgcaatatccaaaccggcattgcctttatcatcggcaaggcagaacgctgccgcgtcagggtggtcgcatcgggcagcagggcggcaggttcagacggcattgcctgcgaggaaaagctggcggaactgctgtcggaatcggtcgtccgtattccgccgctgcgtatgcagcatgaagatattcccttcctgatacaggggattgcctgcaatgtggcggaaagccaaaagattgcgcctgcctcattcagtgaagaggcacttgccgcattgacccgttacgactggccgggaaatttcgaccaactgcaaagcgtcgttgcaacgctgttgttggaggcggacggacaggaaatcggcgcggcggcggtttcttcccttttggggcagaatgtgcctgccgagggagcggaagatatggtgggcgggtttaatttcaacctgcccctgcgcgaattgagggaggaggtggagcggcgttatttcgagtaccacatcgcccaagaaggtcagaatatgagcaaagtggcgcagaaggtcggtttggaacgcacgcacctttaccgcaaactcaaacagctcggcatcggcgtttcgcgccgggcgggggaaaaaaccgaagaatag

SEQ ID NO: 47187 - DNA, 924 bp, Neisseria meningitidis; identical to SEQ ID NO: 45081

SEQ ID NO: 47188 - DNA, 372 bp, Neisseria meningitidis
atgaatattacattaggtcgaaatcatcaaatcaattgtgatgaaaaggacctttacaagtttatcggctatttggcaaatcatcctaatgatgtaaatttagtctttgagaaaaatagtgtgcaaggtgcttggggtgatgagggacgtatacagtttttctcaagtaaagcacaaaatatttttgtgccactaggatttaaatttacggcaggcgtaggtaatattgcatataggctaaattgtaatgagctttttgaaatgctatctcagttagattttgtttctggtggaaaacaaaatctttcaacaataaaagcaaatattccgtctcaatttcatgcagaatttgatgctggtgcgaatatgtaa

SEQ ID NO: 47189 - DNA, 1395 bp, Neisseria meningitidis; identical to SEQ ID NO: 45077

SEQ ID NO: 47190 - DNA, 285 bp, Neisseria meningitidis; identical to SEQ ID NO: 39906

SEQ ID NO: 47191 - DNA, 756 bp, Neisseria meningitidis; identical to SEQ ID NO: 37765

SEQ ID NO: 47192 - DNA, 522 bp, Neisseria meningitidis
atcatcgctcaagaacgcgaagcacgaatcaacggcgaaattaccgccaaagaagtgcgtttaatcagtgagtcaggcgaacagcttggtgtcgtttcagttcgtgaagctttggctatggccgaagggcaggatgtcgatttggtagagatttccccaactgctaaaccgcctgtgtgcaaactgatggattacggtaaatacaaataccaacaagccaagaagcgcgacgaagccaagaaaaatcaaaagcaggtgcaaatcaaggaaatcaaattccgtccgggtacggatgagggcgattatcaaatcaagatgcgcaacattaaccgcttccttgccgacggcgataaagtcaaagtgacattgcgttttcgcggccgtgaaatggctcaccagcaactcggcgcgcaacttttggaacgtgtaaaagaagatttggctgaagtggcgcaaatcgagtcctttcccaaaatggaaggtcgccaaatggtgatgatgattgcgccgaagaaaaaataa

SEQ ID NO: 47193 - DNA, 348 bp, Neisseria meningitidis; identical to SEQ ID NO: 37022

SEQ ID NO: 47194 - DNA, 645 bp, Neisseria meningitidis; identical to SEQ ID NO: 41316

SEQ ID NO: 47195 - DNA, 1251 bp, Neisseria meningitidis
atgccgtctgaaagcccttcagacggcatcgtccggctgcgcggcacaaaggcggaaaaaccgtttgccccgtattttcaaacgcgttacacttgccgccgctgttttcagccatttgattacccgcaaccgccgtcattgcgccggcggtttgcctgtcagcgtcattgcgccgctgtaaatacgaaagaacacattatgaccgtatcccccgtcgccttgcgccgtaagaccgagtgcaagcctcatcccaccgcgcgctattggaaaaaatgcgatgtcgaggcacttttcggactgccgtttttagaacttgtccatcaggcggcagaagtccaccgccaaaatttcaacccgcgcgaaatccagctttccacgctgttgtccatcaaaaccggcggttgtcccgaagattgcgcctactgtccgcaatcggcgcaccacaataccaatctgggcaaagagcagatgatggatgtggatgaaatcgtcgaaaaagccaaaatcgccaaatcgcgcggcgcaagccggttttgtatgggcgcggcatggcgcggccccaaacccaaagacgtggagacggtttccgcaatcatcaaagccgtcaagggcttgggtatggaaacctgcggcacgttcggtatgctcgaagaaggtatggcggaagacttgaaagaggcgggcttggattattacaaccacaacctcgacaccgaccccgaccgctacaacgacatcatccatacacgccggcatgaagaccgtatggacaccttgggcaaagtccgcaacgccggtttgaaagtctgctgcggcggcatcgtcgggatgaacgaaacccgcgccgaacgcgcagggctgattgccagcctcgccaacctcgacccgcagcccgaaagcgtgccgattaaccggttggtcaaagtggaaggtacgccgcttgccgatgccgaggatttggactggacggaatttgtccgcaccatcgccgtggcgcggattacgatgccgcaaagttatgtccgactgtcggcagggcgcagcaatatgccggaagcgatgcaggcgatgtgctttatggcgggcgcgaactcgattttttacggcgacaagctgctgaccacgggcaatccggatgaagacggcgacagaatcctgatggaaaagctcaacctgtatcccttacagtttgagctggaaggcgaggtcgccgaagtggaaaaagcctctgggattaaagtggattattga

SEQ ID NO: 47196 - DNA, 618 bp, Neisseria meningitidis; identical to SEQ ID NO: 44520

SEQ ID NO: 47197 - DNA, 729 bp, Neisseria meningitidis; identical to SEQ ID NO: 36802

SEQ ID NO: 47198 - DNA, 312 bp, Neisseria meningitidis; identical to SEQ ID NO: 38411

SEQ ID NO: 47199 - DNA, 990 bp, Neisseria meningitidis; identical to SEQ ID NO: 38513

SEQ ID NO: 47200 - DNA, 273 bp, Neisseria meningitidis; identical to SEQ ID NO: 45144

SEQ ID NO: 47201 - DNA, 96 bp, Neisseria meningitidis
atggacatcgtatttgcagcagacggcaggatgcggcggctgtttaccttgaggcaatacttcggcattttgcaccgattgctgaaaaaccgttga

SEQ ID NO: 47202 - DNA, 525 bp, Neisseria meningitidis
atgttgctattacgacgagataatattgatagggctttcaagattgtcaaaaataggcgttttgattccccttggtggcctggtgagtacgatgccggtatgaatttccttggcgtacaaggagagttgaaggttcacgagctgcatcacagaacagcaaccctgtgctttgagtggcttggcgaagtatctgcgccgcgcagaaaagagaactacaaagacctcaagccaaatgtattgtatgactttgatggttccggtaagcattttgccaaccctgacgcaaggtatctattgcccgtcggttcaagcggcttaatcttaaaacatatccaaatcgatgacgaagacactctgttgcggctatggtgcgcacgaaatatcccaatgccacaccggctatctaaaatcccgatgcttcggcagtattatctaagcaaggcatggcacgaaatttatgctatcaaccaacacctaaggaaaacgaagctgatagttgatgtggcatacggccccacagattaa

SEQ ID NO: 47203 - DNA, 1305 bp, Neisseria meningitidis; identical to SEQ ID NO: 39546

SEQ ID NO: 47204 - DNA, 324 bp, Neisseria meningitidis; identical to SEQ ID NO: 36328

SEQ ID NO: 47205 - DNA, 336 bp, Neisseria meningitidis
atgatggctgataaggaacaagtagaaaagatgatttattctgaaaataaacagagtgttattgacggtatgctcggtatgaccttcagttcagaggaggatgaaatcccttggatttctgagaaattgacggagttgtcgaagcataaagacttggatattgccagattgtcattaacctgtttcggacatctcgctaggatgcatgaaaatatcggcgattgcgataaagtgattgctttattgcgctcaaaacaaggcaatccggattttcaaggttttgccgaagatgcgttagacgatatttccttctttatatttaaaaagcatccgtaa

SEQ ID NO: 47206 - DNA, 594 bp, Neisseria meningitidis; identical to SEQ ID NO: 45285

SEQ ID NO: 47207 - DNA, 1110 bp, Neisseria meningitidis; identical to SEQ ID NO: 45845

SEQ ID NO: 47208 - DNA, 2451 bp, Neisseria meningitidis; identical to SEQ ID NO: 45869

SEQ ID NO: 47209 - DNA, 2064 bp, Neisseria meningitidis
atgacaacccaaacccttttaatcgaactccttaccgaagaacttccgcccaaagcccttaataatctgggcaaccattttgccgccgccgttgccgaaggcttggaaaaagcgcaactggttgacggcgcagccgaatttacggcttatgcctcgccgcgccgtttggcggttcaagtcaaaaacgtcaaagccgttcaagccgatcagaaaatcgtgaaaaaaggccctgccgtggcgaatgccgtaaaagacggtgcgccgaccaaggctttggaaggtttcgcacgcggtgcaggggcgaaaatcgaagacttgaccatcgtccacgacggcaagcaggacgtgtacgcctacgaatacgtccaaaccggcaaaccgttgggcggacttttggaagacattatcaatgccgcagtgaaaaaactgccgattccgaaagtgatgcgttggggcagcagcacatttaccttcgtgcgccccgtccacgggctgattgtgctgcacggcggcgacatcgtaaacgtcagcgttttgggtctgcaaagcagcaatcaaaccttgggacaccgcttcttgtccaacggcgaaatcaccattgaaaacgccgacagctacgccgcacaaatgcgcgagcaaggcaaagtcgtcgcttcgtttgccgagcgcaaagccgcgattcagacggcattggaagggcaggcgcgccgtctgaacgcgaccgttgccgccgatgaagcattgctggacgaagtaaccgcgctggtcgaataccccgttgttttggaagccggttttgaggaacacttcctcgccgtgccgcaggaatgcctgattctgacgatgcagcaaaaccaaaaatacttcccgctgctcgaccaaaacggcaagctgatgaaccgcttcctgctggtttccaacctgcaaaccgaagatccgtcgcacatcatccgaggcaacgaacgcgtcttgcgcgcgcgcctgtctgatgccgagttcttctacaaacaagaccaaaaagcgactctggaaagccgcctgcccaagctggcaaacgtggtgtaccacaacaaaatcggttcgcaagccgaacgcatcgaacgtttgcaaagcattgccgcccacatcgctaaagcgttggacgcggatgccgccgcagccgagcgcgccgcgcgtcttgccaaagccgatttggttaccgaaatggtcggcgagttccccgaattgcaaggcacgatgggcaaatactatgcccgcttggacggcgaaaccgaagaaatcgccgaagctattgagcaacactaccaaccgcgttttgccggcgacaagctgcccgaaagcaaaattgccgccgccgtggcactggcggacaaactggaaaccttggtcggcatttggggcatcggtctgattccgaccggcgacaaagacccctacgccctgcgccgcgccgccttgggtattttgcggatgctgatgcagtacggtttggacgtgaacgaactgattcagacggcattcgacagcttccccaaaggtttgctcaacgaaaaaacgccgtctgaaaccgccgactttatgcaggcgcgtttagccgtgttgctgcaaaacgattatccgcaagacatcgttgccgccgtacttgctaaacagccgcgccgtttggacgatttgaccgccaaactgcaggccgttgccgcgttcaaacaacttcccgaagccgccgcattggccgcagccaacaaacgcgtacaaaacctgctgaaaaaagccgatgccgagttgggcgaagtcaatgaaagcctgctgcaacaggacgaagaaaaagccctctttgccgccgcgcaaggcttgcagccgaaaatcgccgccgccgtcgccgaaggcaatttccaaaccgccttgtccgaactggcttccgtcaaaccgcaagtcgatgccttcttcgacggcgtgatggtgatggcggaagatgccgccgtaaaacaaaaccgcctgaacctgctgaaccgcttggcagagcagatgaacgcggtagccgacatcgcgcttttgggcgagtaa

SEQ ID NO: 47210 - DNA, 918 bp, Neisseria meningitidis; identical to SEQ ID NO: 45098

SEQ ID NO: 47211 - DNA, 1056 bp, Neisseria meningitidis
atgaaaacctacgcaccggcactctataccgcagccctgctcaccgcctgcagccccgcagccgattcaaaccatccgtccggacaaaatgccccggccaataccgaatccgacggaaaaaacattaccctgctcaacgcctcatacgatgtggcacgggatttttacaaagaatacaaccccttatttatcaaaacataccaatccgaacaccccggcacatccgtcagcatccaacagtcccacggcggctccagcaaacaggcattatccgtagccaacggccttcaagccgatgtcgtaaccatgaaccaatcctccgacatcgacctgctcgaaaaaaaaggactggtagaaaaaggctggcaacaagccctccccgaccacgctgcgccctacaccagcactatggttttccttgtccgaaaaaacaaccccaaacagatccgcgattggaacgaccttgccaaagacggcgttaacatcgtcatcgccaatcccaaaacctcgggcaacggacgctacgccttcctcggcgcatacggttacggtctgaaaaccaccaacggcaacgaacaggaagcccaaaaactcgtcgcatccatcctcaaaaacacccccgtttttgaaaacggcggacgcgccgccaccaccaccttcacacaacgcaacatcggcgacgtactcattacttttgaaaacgaagccaactacgtcagcaaaaaactgacccaaggacagtttgaaatcgtctatccgagctacaccatttccgccgaaagccccgtcgccgtcgtcaacagcgtcgtcgcgaaaaaaggcacgcaaaaaaccgcccgcgcctatctcgaatacctttggagcgaaccggcgcaagaactcgccgcctcactctacctgcgcccccgcaaccccgaagtattggcaagacacaaagccgacttcccagacttagactcattctctcccgaagaaaaattcggcggatgggacaacatcatgaaaacctacttcgccgacggcggcatattcgaccgcctgaccgcacaaaaatga

SEQ ID NO: 47212 - DNA, 270 bp, Neisseria meningitidis; identical to SEQ ID NO: 36672

SEQ ID NO: 47213 - DNA, 489 bp, Neisseria meningitidis
atgctcaaattaaccctaattgcggcgtgtgcggaaaacctgtgcatcggggcgggcaatgcgatgccttggcacatccccgaagatttcgcatttttcaaagcctataccttgggcaaacccgtcattatggggcggaaaacgtgggaatccctgcacgtcaaacccctgcccggacggaggaacatcgtcatcagccggcaggcggattattgcgcggcaggcgcggaaacggcggcaagtttggaggcggcattggcattgtgcgcaggcgcggaagaagccgtcattatgggcggcgcgcagatatacggacaagcgatgccattggcgaccgatttgcggataaccgaagtggatttgtctgtggaaggagatgcatttttccccgcaatagaccggacgcattggaaagaagcagagcggacggaacgccgtgtcagcagcaaaggcacgagctatgcttttgtgcattatttgagatattga

SEQ ID NO: 47214 - DNA, 732 bp, Neisseria meningitidis
ttgatgagaaaaggaacacttctcatggaaaaaatgagttttgaaatttaccgttacaacccggatgttgatgccaagccttatatgcagcgttacgagttggaattggaaccgaccgacgtgaaacttttggatgctttggtacgcctgaaagcacaagacgataccttgtctttccgccgctcctgccgcgaaggcatttgcggatcggacggtatgaacatcaacggcaaaaacggcttggcgtgtttgaccgatctgcgtggcttgaaacagccggttaaaatccgtcctctgccaggtctgcctgttatccgcgacctgattgtggatatgacccagttcttcaaacaataccattccgtcaaaccttatgttgtcaacgataatccgattgatgcggacaaagagcgtctgcaaactcaggaagagcgtaaagagttggacggtttgtacgagtgtattttgtgcgcctgctgttcgactgcctgcccgtcattttggtggaaccctgataaattcgttggtccgtccggtttgctgaatgcttaccgtttcattgcggacagccgtgataccatcactaatgagcgtttggataatctgaacgacccataccgtttgttccgttgccacaccattatgaactgcgtagacgtatgtcctaaacacttgaatccgacccgagccatcggtaagattaaagagattatgttgaaacgggccgtttaa

SEQ ID NO: 47215 - DNA, 666 bp, Neisseria meningitidis
atggcagtattaagcaaagagcaggttctatccgcatttaaaaaccgcaaatcatgccggcattacgatgcggcacgtaaaatcagtgccgaggattttcagtttattttagaactcgggcgtttgtcgcccagttcggtcggttcggagccttggcagtttgttgtggttcaaaaccccgaaatccgacaggcaatcaagccgttttcttggggtatggcggatgctttggataccgccagtcatttggtggtgtttttggcaaagaaaaatgcccgcttcgacagcccgtttatgttggaaagcctcaaacggcgcggcgttaccgaaccggatgccatggcaaaatctttggcgaggtatcaggcgtttcaagccgacgacatcaagattttggacgattcgcgcgccttgtttgactggtgttgccgccagacctatatcgcgttgggcaacatgatgacgggtgcggcgatggcaggtatcgattcctgcccggtggaaggtttcaactatgccgatatggaacgcgtattgtccgggcagttcggtttgttcgatgcggcagaatggggcgtgtccgtcgccgcgacattcggttaccgcgttcaggaaatcgccacgaaagcgcgcaggcccttggaagaaaccgttatttgggcataa

SEQ ID NO: 47216 - DNA, 1392 bp, Neisseria meningitidis; identical to SEQ ID NO: 45350

SEQ ID NO: 47217 - DNA, 1518 bp, Neisseria meningitidis; identical to SEQ ID NO: 38183

SEQ ID NO: 47218 - DNA, 1176 bp, Neisseria meningitidis
atgctgaacacctccctttccccgtggccctgcttcacccaagaagaagccgatgccgtttccaaagtcctgctgtccaacaaagtcaactactggacgggaaacgaatgccgcgaatttgaaaaagaatttgccgcctttgccggcacgcggtacgccgtcgccctttccaacggcacgctggcactcgatgtcgcgctcaaagcaatgggcataggcgcgggcgacgatgtgattgttacttcgcgcaccttcctcgcctccgcctcctgcatcgtgaacgcaggcgcaaaccccgtgtttgccgacgtggatttgaacagccaaaacatcagcgcggaaaccgtcaaggctgtgctgaccccgaataccaaagcgattatcgtggttcaccttgccggtatgcctgccgaaatggacggcattatggctttggcaaaagaacatgatttgtgggtgattgaagactgcgcccaagcgcacggcgcaaaatacaaaggcaaatccgtcggctctatcggacacgtcggcgcgtggtcgttctgccaagacaaaatcatgaccaccggtggcgaaggcggtatggttacgaccaacgacaaaaccctgtgggaaaaaatgtggtcgtacaaagaccacggcaaaagctacgatgccgtgtaccaccgcgaacacgcgcccggtttccgctggctgcacgaaagtttcggcacaaactggcgtatgatggaaatgcaggcggtcattggccgcatccagctcaaacgcctgcccgaatggacagcacgccgccaagaaaacgctgccaaactggctgaaagcttgggcaagtttgccagcatccgcttggttgaagtcgccgactacatcgaacacgcgcaatacaagttctacaccttcgtcaaacccgaacacctcaaagacggctggatgcgcgaccgcatcgtgaacgaactgaacgcgcgcaaagtcccctgctatcaaggcagctgctccgaagtctatttggaaaaagccttcgacaacacaccttggcggccgaaagagcgtttgaaaaacgccgtcgaactgggcgacaccagcctgatgttcttagtacatccgacgctgaccgacggcgaaatcgcgttctgcaaagaacacatcgaagccgtattgaccgaagccacacgataa

SEQ ID NO: 47219 - DNA, 387 bp, Neisseria meningitidis; identical to SEQ ID NO: 45290

SEQ ID NO: 47220 - DNA, 240 bp, Neisseria meningitidis; identical to SEQ ID NO: 39921

SEQ ID NO: 47221 - DNA, 1380 bp, Neisseria meningitidis; identical to SEQ ID NO: 45781

SEQ ID NO: 47222 - DNA, 135 bp, Neisseria meningitidis; identical to SEQ ID NO: 44583

SEQ ID NO: 47223 - DNA, 1869 bp, Neisseria meningitidis
atgcaagctgtccgatacaggcctgaaattgacggattgcgggccgtcgccgtgctatccgtcatgattttccacctgaatgaccgctggctgcccggagggtttttgggggtggacattttctttgtcatctcgggattcctcattaccggcatcattctttctgaaatacagaacggttctttttctttccggggtttttatacccgcaggattaagcggatttaccctgcctttattgcggctgtgtccctggcttcggtgattgcctctcaaatcttcctttacgaagatttcaaccaaatgcggaaaaccgtggagctttctgcggttttcttgtccaatatttatctggggtttcagcaggggtatttcgatttgagtgccgacgagaaccccgtactgcatatctggtctttggcggtagaggaacagtattacctcctgtatcctcttttgctgatattttgctgcaaaaaaaccaaatcgctacgggtgttgtgccacatcagcatcatcctgtttttgattttgactgcctcatcgtttttgccaagcgggttttataccgacatcctcaaccaacccaatacttattacctttcgacactgaggtttcccgagctgttggcaggttcgctgctggcggtttacgggcaaacgcaaaacggcagacggcaaacagcaaatggaaaacggcagttgctttcatcactctgcttcggcgcattgcttgcctgcctgttcgtgattgacaaacacaatccgtttatcccgggaatgaccctgctccttccctgcctgctgacggcactgcttatccggagtatgcaatacgggacacttccgacccgcatcctgtcggcaagccccatcgtatttgtcggcaaaatctcttattccctatacctgtaccattggatttttattgctttcgcccattacattacaggcgacaaacagctcggactgcctgccgtatcggcggttgccgcgttgacggccggattttccctgttgagttattatttgattgaacagccgcttagaaaacggaagatgaccttcaaaaaggcatttttctgcctctatctcgccccgtccctgatacttgtcggttacaacctgtacgcaatggggatattgaaacaggaacacctccgcccgttgcccggcgcgccccttgctgcggaaaatcattttccggaaaccgtcctgaccctcggcgactcgcacgccggacacctgcgggggtttttggattatgtcggcagccgggaagggtggaaagccaaaatcctgtccctcgattcggagtgtttggtttgggtagatgagaagctggcagacaacccgttatgtcgaaaataccgggatgaagttgaaaaagccgaagccgttttcattgcccaattctatgatttgaggatgggcggccagcccgtgccgagatttgaagcgcaatccttcctaatacccgggttcccagcccgattcagggaaaccgtcaaaaggatagccgccgtcaaacccgtctatgtttttgcaaacaacacatcaatcagccgttcgcccctgagggaggaaaaattgaaaagatttgccgcaaaccaatatctccgccccattcaggctatgggcgacatcggcaagagcaatcaggcggtctttgatttgattaaagatattcccaatgtgcattgggtggacgcacaaaaatacctgcccaaaaacacggtcgaaatatacggccgctatctttacggcgaccaagaccacctgacctatttcggttcttattatatggggcgggaatttcacaaacacgaacgcctgcttaaatcttctcgcgacggcgcattgcagtag

SEQ ID NO: 47224 - DNA, 1200 bp, Neisseria meningitidis
ttgtccacttttccgaaccacaccatgcacaccatttcctttccaaaccgcacccggctcaccgccctgccgcccctgtcactctatatccacatcccgtggtgcatcaaaaaatgcccgtattgcgactttaattcccacagcctgaaaaacggattgcccgaagccgcctatatcgacgcgctgctgaccgacttgcagcttgaattgcccaatatttggggcaggccggtggaaacgatctttttcggaggcggtacgcccagcctgtttcaggcggaatcgattgaccgtttgttgagcggcgtgcgttcactgttgcgcttgcagccggaggcggaaattacgttggaagccaatccaggcacctttgaaatcgagaagtttcaaggatttaaagacgcaggtattacgcggctttctattggcgtgcagagtttcaacaacgatatgctctcaaggctggggcgcgtccacaacggcaaagaagccttaaccgctatcgataccgccttgaaattatttgataaagtcaatatcgacttgatgtatgccctgccgaaccaaaccgttcagacggcattggacgacgtacaaaccgccatcgctacgggcgcgacccacatcagcgcgtatcatctgacgatggaaccgaacacgccgttcggtcatacgccgccgaaaggtttgccgcaagacgaagccgccctcgacatcgaagacgcggtacacggcgcgctggaaggcgcgggttttgtccactacgaaacatcggcttttgcgaaaccagccatgcagtgccgccacaatttgaactactggcagttcggcgattatttaggcataggcgcgggcgctcacggcaaaatttcctatcccgaccgcatcgagcgcaccgtccgccgccgccaccccaacgactacctcgccttaatgcaaagccaaccgagtgaagccgtcgaacgcaaaaccgttgccgccgaagatttgccgttcgagtttatgatgaacgccctgcgcctgaccgacggcgtacccgccgcgatgttgcaggagcgcacgggcgtaccgagtgccaaaatcatggcgcaaatcgaaacggcaaggcaaaaaggcctgctggaaaccgaccccgccgtattccgcccgaccgaaaaaggacgcttgtttttaaacgatttgctgcaatgttttttatag

SEQ ID NO: 47225 - DNA, 2130 bp, Neisseria meningitidis; identical to SEQ ID NO: 44956

SEQ ID NO: 47226 - DNA, 549 bp, Neisseria meningitidis; identical to SEQ ID NO: 42575

SEQ ID NO: 47227 - DNA, 423 bp, Neisseria meningitidis; identical to SEQ ID NO: 45038

SEQ ID NO: 47228 - DNA, 639 bp, Neisseria meningitidis
atgtttcaaaattttgatttgggcgtgtttctgcttgccgtcctgcccgtgctgctcgccattaccgtcagggaggtggcgcgcggctatacggcgcgctactggggagacaacactgccgaacaatacggcaggctgacactgaaccccctgccccatatcgatttggtcggcacaatcatcgtaccgctgcttactttgatgttcacgcccttcctgttcggctgggcgcgtccgattcctatcgattcgcgcaacttccgcaacccgcgccttgcctggcgttgcgttgccgcgtccggcccgctgtcgaatctggcgatggctgttctgtggggcgtggttttggtgctgactccgtatgtcggcggggcgtatcagatgccgttggctcaaatggcaaactacggtattctgatcaatgcgattctgttcgcgctcaacatcatccccatcctgccttgggacggcggcattttcatcgacaccttcctgtcggcgaaatattcgcaagcgttccgcaaaatcgaaccttatgggacgtggattatcctgctgcttatgctgaccggggttttgggtgcgtttattgcaccgattgtgcggctggtgattgcgtttgtgcagatgttcgtctga

SEQ ID NO: 47229 - DNA, 927 bp, Neisseria meningitidis; identical to SEQ ID NO: 38159

SEQ ID NO: 47230 - DNA, 1527 bp, Neisseria meningitidis; identical to SEQ ID NO: 44799

SEQ ID NO: 47231 - DNA, 1386 bp, Neisseria meningitidis
atggacggctggacacagacgctgtccgcgcaaaccctgttgggcatttcggcggcggcaatcatcctcattctgattttaatcgtcaaattccgcatccacgcgctgctgacactggtcatcgtcagcctgctgacggctttggcaaccggtttgcccacaggcagcattgtcaacgacgtactggtcaaaaacttcggcggcacgctcggcggcgtggcgcttctggtcggcctgggcgcaatgctcggacgtttggtcgaaacatccggcggcgcacagtcgctggcggacgcgctgatccggatgttcggcgaaaaacgcgcaccgttcgcgctgggcgttgcctcgctgattttcggcttcccgattttcttcgatgccggactaatcgtcatgctgcccatcgtgttcgccaccgcacggcgcatgaaacaggacgtactgcccttcgcgcttgcctccatcggcgcattttccgtcatgcacgtcttcctgccgccccatccgggcccgattgccgcttccgaattttacggcgcgaacatcggccaagttttgattttgggtctgccgaccgccttcatcacatggtatttcagcggctatatgctcggcaaagtgttggggcgcaccatccatgttcccgttcccgaactgctcagcggcggcacgcaagacaacgacctgccgaaagaacctgccaaagcaggaacggtcgtcgccatcatgctgattcccatgctgctgattttcctgaataccggcgtatcggccctcatcagcgaaaaactcgtaagtgcggacgaaacctgggttcagacggcaaaaataatcggttcgacaccgatcgcccttctgatttccgtattggtcgcactgtttgtcttgggacgcaaacgcggcgaaagcggcagcgcgttggaaaaaaccgtggacggcgcactcgcccccgtctgttccgtgattctgattaccggcgcgggcggtatgttcggcggcgttttgcgcgcttccggcatcggcaaggcactcgccgacagcatggcggatttgggcattcccgtccttttgggctgtttccttgtcgccttggcactgcgtatcgcgcaaggttcggcaaccgtcgccctgaccaccgctgccgcgctgatggctcctgccgttgccgccgccggctttaccgactggcagctcgcctgtatcgtattggcaacggcggcaggttcggtcggttgcagccacttcaacgactccggcttctggctggtcggccgcctcttggacatggacgtaccgaccacgctgaaaacctggacggtcaaccaaaccctcatcgcactcatcggctttgccttgtccgcactgctgttctccatcgtctga

SEQ ID NO: 47232 - DNA, 390 bp, Neisseria meningitidis; identical to SEQ ID NO: 37209

SEQ ID NO: 47233 - DNA, 588 bp, Neisseria meningitidis; identical to SEQ ID NO: 45803

SEQ ID NO: 47234 - DNA, 531 bp, Neisseria meningitidis; identical to SEQ ID NO: 39810

SEQ ID NO: 47235 - DNA, 282 bp, Neisseria meningitidis; identical to SEQ ID NO: 39486

SEQ ID NO: 47236 - DNA, 1371 bp, Neisseria meningitidis
atgatcaaccccatcgcctcgctttcccctttagatggccgttatgcccaatccgttgaagcattgcgcccgattttttcagagtacggcctgatgaaggcgcgcgtcaaagtcgaattaaactggctcaaagccctggccgccgagccgaagattgtcgaagtgccgcccttcagtgccgaaacgcttgccgaaatcgacacggtgattgaaaacttttcattggaagacgcagccgctgtcaaagccatcgaagccacgaccaatcatgatgtcaaagccattgaatattggcttaaagaacgcttctccggcgtgcctgaagtggcagctgccagcgagttcatccactttgcctgcaccagcgaagacatcaacaacctgtcccacgctttaatgctgcaagaagcgcgtgaggctgttttgctgccgaaactggccgaaatcatcgaaaaactgaccggcatggcgcatgagttggctgccgtcccgatgatgagccgcacccacggccagcctgctacaccaagcacactgggtaaagaaatcgccaatgtcgtgtaccgcctgcaacgccagtttaaaaacctgcaagcgcaagagttcctcggcaaaatcaatggcgcagtcggcaactacaatgcccatatggtcgcttatcccgatgtggattgggaaacccattgccgcaacttcgttgaaatcagcctcggcctgaccttcaacccctacaccattcaaatcgagccgcacgactatatggcggaattcttccaagccatcagccgtgtcaacacgattctgatcgacttcaaccgcgatgtttggggctatatttctttgggttacttcaaacaaaaagtcaaagcaggcgaagtcggttcttccaccatgccgcacaaagtcaacccgatcgactttgaaaactccgaaggcaacctcggtatggcaaacgccgtattgggcttcttatccgaaaaactgccgatttcccgttggcagcgcgacctgaccgacagcaccgtattgcgcaatatgggcgtaggcgtgggctatgccgtgttgggtttcgccgcccatctgcgcggtctgaacaagctcgaacccaaccctgccgcgcttgccgccgatttggacgctacttgggagctgctcgccgagccgattcaaaccgtaatgcgtcgttacggcgtggccaatccttacgaaaagctcaaagacctgacgcgcggcaaagacggcattacgcctgaagtgttgaaactctttatcgagtcgttggaaattccggcagaagccaaagccaaattgcttgagctgacccccgcactgtatgtgggtaaggctgaagcgttggcgaaacggatttga

SEQ ID NO: 47237 - DNA, 459 bp, Neisseria meningitidis; identical to SEQ ID NO: 44367

SEQ ID NO: 47238 - DNA, 720 bp, Neisseria meningitidis
gttcttcaaaaatcctgtctccgtcccttatacgtcggtgctttagtcaaaacggcagacggctacaaagctattgcccatatccgagtcggcgagagcgtcctttccaaggacgaggcaagcgggaaaacaggatacaaacccgttaccgcccaatacggtaatccgtatcaagaaaccgtttacattaaagtttcagacggcatcggcaacagccaaaccctgatttccaaccgcatccatccgttttacagtcaaggaaaatggatacaggcaggtcgtctgaaaaaaggcgacaccctgctttccgaaagcggcgcaaaacagacggttcaaaacattaccttcaaacagcagccgctcaaagcctacaatctgaccgttgccgactggcatacttactttgtcaaaggcgataaggcggaaacggaaggggtttgggttcataatgcgtgtccgccaagaaaaacaccatctacccccgtatatgggaatgattcagaagcatatgcagcagcaaagaaattgggatatagaaaaataaaagaaagaacgagaaatgatgctgctatttttaaaaaaggaaagagttatatatcacgcgatgtagattcacataatggaggggcttggaaagaagcatcttcacccaaaaatctgaacagaaaagaaacaagaaacggtacatttgataaaaacctaaatcgtattggagattaa

SEQ ID NO: 47239 - DNA, 480 bp, Neisseria meningitidis; identical to SEQ ID NO: 39570

SEQ ID NO: 47240 - DNA, 1080 bp, Neisseria meningitidis
atgaacatacaaaacatccgcaccctcctcgacaccgtcgccgttccgaatacggcacgcacgctcggcggcgaaaaggccgtccgttcggtcgaacagcgttcagacggcatccatatcgccctgcatttcggcttccccgtcgcgcacattgcctcagaaacagccgaccgcatacaggaaatcctgatgccgctgacaggcgacacacacatccatctgtccatggacaccgaaatcggcacacacaaagtccagcccggcgttaccactatcaaaggtgtgaaaaacatcatcgccgtcgcatcgggaaaaggcggcgtgggcaaatcaaccaccaccgccaaccttgccgccgcaatggcgcgcatgggcgcgcgcgtcggcgtactcgatgccgacctttacggcccgagccaaccgaccatgttgggtgtggacgaccgcaaacccgaccagaaaaaccaaaaactgattcctgtcgaatcttcaaacggcatacaggtcatgtctatcggctttctcgtcgataccgaccaagccgtcgtctggcgcgggccgatggtcagccaagccttgcagcaactgatgtttcaaagcgagtgggacgaagtggattatcttttcatcgacctgccccccggcacgggcgacatccagctcacgctgtcccaacgcatccccgtaaccggatcggtcatcgtaaccacgccgcaggacatcgccctgatagacgcgcgcaaagccgtggatatgttccgcaaagtcaacattcccattttgggcgtattggaaaatatgtccgtccacatctgctccaactgcgggcatagcgaagcactgttcggcacggacggcggcaaagatttagccgcacgcctcaacgtccccctgctgggacagcttccattaagcctgcccgtgcgcgaagccatggacggcggcacaccggcgcaactgttcgacgaacaccccgccatcgcccgaatctacaccgatgccgcattccaaatcgccctgggcattgccgacaaaggcaaagacttcagcagccggttccctaaaatcgtcgtcgaataa

SEQ ID NO: 47241 - DNA, 642 bp, Neisseria meningitidis; identical to SEQ ID NO: 38347

SEQ ID NO: 47242 - DNA, 942 bp, Neisseria meningitidis; identical to SEQ ID NO: 38350

SEQ ID NO: 47243 - DNA, 1059 bp, Neisseria meningitidis
atggaactcaaaatagacattgcaaccaacaacttcaaacacggcggcggcacggaacgctacacattggatttggtaaagggtctgaacagacaaaacatcacaccggccgtttatgcgacgaaatttgatcacggcattcctgaatacgccatgatcgaaccccatcttgtcgatcaacaccggacgctgaaaaaactacgctcattcctcttttcaagtcggctcgctcaaaccagaaaaaacagtgccgccaaactgattgcctgccaccacgccgattacgccgacctcctcatctgcggcggcacacacttgggctacctgcaccatatggcgcaaaaaccgaacctgctcgaccgtctcgccatacgccgcaaccgcagcaactacgccaccgccaaactgattatggcgcattcccatatgatgcggcgcgaactggtcggactgtacggcgttccccctgaaagaatccaagtcgccccccccccccccgcagatacggaacgcttctttccacaacccggagaaactgccgacctgcgcgccaaatacggctttgccgaccatgaaaccgttttcctgttcccatcgaccggccacacgcgcaaaggtctggaactgcttgccgactttttcgaacataccggcctgcccgtcaagcttgccgttgtcggctccccgctcccccgccctatgaaaaacgtcgtcggactgggcttctgcaccgatatgcccgaactctaccgcgccgccgactttaccattatggcctccctgtatgaacccttcgggctggtcggtgtcgaatccgtcctatgcggcacacgcgtcgtcctctccgaaaacatggcatgtacagaggtcatgaacgaagaagccggattctttttctcacgccaaaacccggaaaccctggcgcaagccgttgcccaagccgtcagccttaaaaaacagggcggacaccgcctgtccgacccgatgcgtgcactgaactacaacccgtccctgtcgcaccacatcgaccgactgaccgacatactggcatccgtataa

SEQ ID NO: 47244 - DNA, 1629 bp, Neisseria meningitidis; identical to SEQ ID NO: 38661

SEQ ID NO: 47245 - DNA, 1209 bp, Neisseria meningitidis; identical to SEQ ID NO: 38616

SEQ ID NO: 47246 - DNA, 285 bp, Neisseria meningitidis; identical to SEQ ID NO: 46657

SEQ ID NO: 47247 - DNA, 387 bp, Neisseria meningitidis
atgtggaaaatttataaagaaaatagcaccgacttaaattttgccataggcagtatatattgccaagcaatcaatcttaccgaatttaaaatgtgggtcgaaaaaatcataagggaagtggatttagatgaaattccaaattatttttttgatttgatagattttcaatcactatacgatctgattgatattataggatttgttcccgaaaataatttatcaaaaaatcaggataatgcattaaccggtattgcttttttaagggggatagatgtctatgaccctcccgtttcaaaagaaaaagcattaaaagccttagaaaaacatcctgaaatttatcagaggtttcagcatttctttccgtttgtagagctgcctccgctttaa

SEQ ID NO: 47248 - DNA, 3300 bp, Neisseria meningitidis
atgcaaaatatgaaaaaccaagtacgcggatcaggcatggatgcacgatccaatccggccaatgtttcagacggcctgcaaaacagttcgggtcatatcggtaccaacacgcgttaccgcctgaccaaactcggcgaacaaatggcgcgcctgcccatcgacccgaaaatcgcgcgcattttgttggcggcgaagaagcacgactgcatggcggaaatattggtgatcgcgtccgcgctgtcgattcaagacccgcgcgagcggccgctggaagcgcgcgatgccgccgccaaggcgcacgagcgttttaccgacaagcaatctgactttcttgcctatctgaacatttgggacagcttccagcgcgagcgcgacaagggcttgtccaacaagcagttggtgcagtggtgccgtcaatatttcctgtcgcacctgcggatgcgcgagtggcgcgagctgcaccaccagcttgcccaaaccgcgattgaaatgggtttgaccaccaaggaagcggctttcagacgactttccgaaatcaagcagcttacgtcgtctgaaaaccaaggcgatcaagacttatccgccaaacgcaaacaaaaacaactggataagaaacaacaccgcgcccaaatccgcgccgccaaagaagcgggctacgaacaaatccaccgcgccctgctcaccggccttatcgccaacgtcggcatgaaatcgcccgacggcaacgactataccggcgcgcgcggcagccgtttccaccttttccccgcctccgccctgttcaaagccaaacccaaatgggtgatggcggcagaactcgttgaaacgacaaaactttatgcgcgcgacgtcgccgttatccagcccgaatggattgagcaggaagccccgcacctcgtccgctaccactatttcgagccgcactgggaacaaaaacgcggcgaagtcgtcgccagcgaacgcgtgacgctttacggcctgaccgtattgccgcgccgccccgtgccttacggcaaagttgcgcccgaagaagcacgtgaaatctttatccgcagcgcgttggtggcgcaggaatgcgatttgaaagcggatttttttgtccacaataaaaagctgattaaagaaattaccgaactcgaacacaaatcgcgcaagcaagacgtattggtcgacgacgaagccctgtttgcgttttataacgaacgcctgcccgaaatggcttggaaagacgcgcaaggcagcgtttggggaagtgaagattccgtacggattattgaatctgacaaagccgagaggtcgtctgaaaatgagcgcaacgagtttcgtaaaaacaagcgtaatgggtctcgccaaaatgaaaatcacggcaacaccgtaggttgggttgaaaacccaacatcagccgcaactgcaaaaactgttgggtttgacaacccaacctacgctactcagcaacccaccccctcccccgcgagggagggtcggggagagggcaaaacagttgccgcacaaaccaacttttccgcaaccgcagcaaaccctctcccgcaggagagggagcagagtgccgcagcttcagcggtttcaaacgacctgcatcctgcaaatccccaacaaaccgccccctcccccgtgggggagggctggggagagggcaaaacagttgccacccaaaccaacttctccgcaaccacagcaaaccctctccctaaccctctcccacaggagggggaacagagtgccgcagcttcagcggtttcaaacgaccctcaaccccaaaagcagccagcaccccaaaaagaccgtctgaaacccctccccctcgccgacatccgcaccttccaagcctggctcaaaaccgccgaacgcgagaacccgcgcctgctgttcctcagccgcgacgatttgatgcaacacgccgccgcacacattaccgaagaacaattccccaaattctggcaaaccgcagacggcaagttcgaactcagctaccgcttcgagccgcaccacccgctcgacggcgttaccctcaccctgccgcttaccgtgctcaaccgcatcagccccgccgccctcgaatggctcgtgcccggtatgttgcgcgagaaaatccagctgctgattaaagcactgcccaagcaaatccgccgcatctgcgtgcccgtgcccgaattcatcacccaatttttaagccaaaaccccgaccgcaacgcccccatcctgccccaactcgcccaagccatcgccaaaaccgcaggcgacatccgcatattcgagcaaatcaaccaagacgaatgggccgcgttcaggctgcccgaacactgctatttcaacctccgcatcatcgacgacggcggacaagaattagccatagggcgcgatttaatccaaatccaacaacaactcggccaagccgccgccgttaccttccgcgacaacacccaagaattcgagcgcgacaacgtgaccacatgggacatcggcatcctgcccgaatccatcaaattcgcacgcggcaaacaacagcttaccggctatctcggcctgcaaaaagaaaaagacggccgcatcgccctgcgcctgttcgacacaatagaagccgccgaacaggcacaccgtcaaggcgtgatagaactcatgaaactacaactaaaagaacaagttaaagacctgaacaaaggcatccaaggcttcacccaagccgccatgctgctcaaacacatcaacgccgacaccctgcgcgacgacctcacccaagccgtctgcgaccgcgcctttatcggcgaagacgagctgccgcgtaacgaaaaagcctttaaagagcaaatcaaacgcgcccgcagccgcctgcctgccgtcaaagaagccctcagccgctacctgcaggaaaccgcagccgcctacgccgaactcaacagcaaactcggcaaacacccattgacccacctcctacgccaacgcctgcaaaccctgctcgccgccggcttcgccacccgcaccccgtgggcacaatggccgcgcctccccatctacctcaaagccatgaccctgcgcctcgaaaaatacagcagcaaccccgcccgcgacgcagcccgcgaagccgatatccaagagctggaacaaatgtggcaggaaaaaacagacagcctgattaaacaaggtctccccatttcagacggcctcgccgcgtttaaatggatgattgaagaattgagggtgtcgctgttcgcgcaggaattgaagacaccgtatccggtgtcggtgaagcggttgttgaagatgtgggaggatcttaattaa

SEQ ID NO: 47249 - DNA, 450 bp, Neisseria meningitidis; identical to SEQ ID NO: 44603

SEQ ID NO: 47250 - DNA, 693 bp, Neisseria meningitidis; identical to SEQ ID NO: 39213

SEQ ID NO: 47251 - DNA, 1902 bp, Neisseria meningitidis; identical to SEQ ID NO: 45013

SEQ ID NO: 47252 - DNA, 969 bp, Neisseria meningitidis
atgaaactcaccctcgccctcccctcgctcaatttggatgaagacgaaatccgaatacctctatgcctgcccgccttcaacaaaatcctgcaatacggctcgctgcaccgccaaagctgcacggcttcggcattttacgcgcgttatttgtggtgcggcagactggcggaacgcgcggcgcaaagcctgaatatgccgtctgaaaccgtcgcgctcgccacgcccgtctggcaaaagatggggatgcatcaggcaaatgtgctgacggcggaatatttggatgtcggtacggatgaagcggaacggctctgccgcgatctgtcggcgttttacggcgatattccgtggcgtttcgttcccgtcctgcccgaattatggctggtttcccttccccgcgcgtaccgctggggcgcgaagcccgttttggacttgggcggattgttgggcgcggacgatcagccggacggagaagatgcgttggaatggctgcgcgtccaaaccgaaatccaaatgtggctggcggcgcaccccgtcaaccataaccgcaagaaacgcgggctgcccgagttgaacggcttatggctttggggcggcacaaacggcggcacgcaaggcggcacgcttttcgccgatacggtttggagccgtttccaccccgaccgccgcgcattgcccgacaacttccgcgcctatgaagaaacggcggcacacctgcccgacacgcaccatatcctgtttatggacgatttgcgcctgaccgccctgacaggggacagggagcggtatgcggcaatattgcagcagtgggaagaacgctggttcgcaccgctttacgaagccgtccgcatcggcaaaatcaaacggctggacatcgccacggacggacaacacggcggtacgctgaccttcaaacccgccgacaggtggaaattttggcgcggcgcgaaaacctttgacggaatctggtga

SEQ ID NO: 47253 - DNA, 999 bp, Neisseria meningitidis
atgagcagacccgtacccgccgtattcggcagcgtttttcacagtcaaatgcccgtcctcgcctaccgcgaaggcaaatggcagccgaccgaatggcaatcttcccaagacctctccctcgcaccgggcgcgcacgccctgcactacggcagcgaatgtttcgagggactgaaagccttccgtcaggcagacggcaaaatcgtactgttccgcccgaccgccaacatcgcgcgtatgcggcaaagtgcggacattttgcacctgccccgccccgaaaccgaagcttatctcgatgctttggtcgaactggtcaaacgtgccgccgacgaaattcccgatgcaccttccgcgctgtacctgcgcccgaccttaatcggtaccgatcccgtcatcggcaaggccggttctccttccgaaaccgctctgctttatatcctcgcctcccccgtcggcgactatttcaaagtcggctcgcccgtcaaaattttggtggaaaccgaacacatccgctgcgccccgcatatgggacgcgtcaaatgcggcggcaactacgcttccgccatgcactgggtgctgaaggcgaaagccgaatacggcgcaaatcaagtcctcttctgcccgaacggcgacgtgcaggaaaccggcgcgtccaactttatcctgattaacggcgatgaaatcattaccaaaccgctgaccgacgagtttttgcacggcgtaacccgcgattccgtactgacggttgccaaagatttgggctataccgtcagcgaacgtaatttcacggttgacgagctcaaagctgcggtagaaaacggtgcagaagcgattctgaccggtacggcagccgtcatctcgcccgttacttccttcgtcatcggcggcaaagaaatcgaagtgaagagccaagaacgcggctatgccatccgtaaggcgattaccgacatccagtatggtttggcggaagacaaatacggctggctggttgaagtgtgctga

SEQ ID NO: 47254 - DNA, 546 bp, Neisseria meningitidis; identical to SEQ ID NO: 39943

SEQ ID NO: 47255 - DNA, 582 bp, Neisseria meningitidis
atccccatccaactacacctgactggaggtacggtttggggcggtaaaaaagtagaacttaacccgaccaaatgggattgggttaaaaataccggctataaaacacctactgcccgccctatgcagactttagatggggagatggcaggtgggaataagccaccaaaaccaagtacgcagcaacaccctacacactctgataacaatatcggcttacctgcctcatatgttaaacctgatacatctatttctccgacaggaacaattcaagaccgcatcagatggacaaagtccaagtttcctactgagaaatctttaaatggacatttcaaagctcatggaaaagaatttggcgatataaccattgaagactaccaaaaaatggcgtctgatttgttatcaaaacagacatcggacaagatattaggttatcagacggaacatagacgagtgcgctatgatatcaataacaatatctatgttttggccaatccaaaaacattcaaaatcaaaacaatgtttaaaccaaacttaggaaagaagtattatgatggagaattcaaaaaagacatgggaaattga

SEQ ID NO: 47256 - DNA, 1104 bp, Neisseria meningitidis; identical to SEQ ID NO: 44519

SEQ ID NO: 47257 - DNA, 975 bp, Neisseria meningitidis; identical to SEQ ID NO: 44181

SEQ ID NO: 47258 - DNA, 387 bp, Neisseria meningitidis
gtgatgtcaaaaatccatagcaaagaaaccaaaccggaaatattggtaaggaaatttcttttctcccaaggttttcgttatcggaaaaacgataaacgctatgcaggcaaaccggatatcgttttgccgaaatataaaacagtcgtgtttatacacggctgtttttggtacgggcattcttgtaataaaggacatatcccgaaaagcaatacggatttttggttggaaaaaatcacaaaaaattgcgaacgtgatattaaaaatgaaaccgagctggaaaagatcggtttcaaagtgattgtcgtttgggagtgcgaattaaaaaataaagctattggtagggagcgattaaatcggttggtcagggaaataaaagatgccgtctga

SEQ ID NO: 47259 - DNA, 516 bp, Neisseria meningitidis; identical to SEQ ID NO: 39413

SEQ ID NO: 47260 - DNA, 1194 bp, Neisseria meningitidis
atgacagaggacgaacgtttcgcgtggctgcaattggcgtttacgccctatatcggcgcggaaagcttcctgctgctgctgcgccgtttcggcagcgcgtcaaacgccctgtccgcaccggcggaacaggtcgccccggcggtgcggcacaagcaggcggccgaggcttggcgcaatgcggaaaaacgcgcctcggcgcggcaggcggcagaagcggcgttggaatgggaaatgcgggacggatgccgtctgatgctgcttcaggatgaagatttccccgaaatgctgacgcaggggctgaccgcgccgccggttttgtttttgcgcggcaacgtgcggctgctgcacaagccttccgccgccatcgtcggcagccgccatgccacgccgcaggcgatgcggattgccaaagatttcggcagggcgttgggtgggaaaggcattcccgtcgtgtcgggtatggcttcgggcatcgacaccgccgcccatcagggcgcgttgcaggcagaaggcggcaccatcgccgtgtgggggacgggcatagaccgcatttatccgccgtccaataaaaaccttgcttatgaaattgccgaaaggggattgattgtcagcgagttccctttggacacgcgtccgtttgcaggcaactttccgcgccgcaaccgcctgattgccgcactgtcgcaagtaacgctggtggtcgaggccgccttggaatccggttcgctgattaccgccggtttggcggcagaaatggggcgcgaggtaatggcggtacccggttcgatagacaacccgcacagcaaaggctgccacaaactgattaaagacggcgcgaaactgacggaatgcctggacgacatcctgaacgaatgcccgcggctcttgcaaaatgagggtgcttcgtcatattctataaataagggaatgcctgaaaagcgcatcactgccgttcagacggcatccgaccagctgtctctgcctgaaggcaaaatgccgtctgaaaagacggagaaccgacccgtcggcggcagtatcttggacaggatgggtttcgacccagttcatcccgacgtgcttgccggacagttggctatgcctgccgcagatttgtatgccgcactgttggaattggaattggacggcagcgttgccgcaatgcccggcggcagataccagcgtatccgaacttga

SEQ ID NO: 47261 - DNA, 846 bp, Neisseria meningitidis; identical to SEQ ID NO: 39931

SEQ ID NO: 47262 - DNA, 321 bp, Neisseria meningitidis; identical to SEQ ID NO: 44453

SEQ ID NO: 47263 - DNA, 171 bp, Neisseria meningitidis; identical to SEQ ID NO: 41813

SEQ ID NO: 47264 - DNA, 1458 bp, Neisseria meningitidis
atgtccgagtggcggggtttcaaccgaaaaggaaatacgatgaatattcacgccctgctctccaaacaatggacgctgccgccattcctgccgaaacggctgctgctgtccctgctgatactgctggcccccaatgcgatgttttgggttttggcactgctgaccgccaccgcccgcccgattgtcaatttggactaccttcccgccgcgctgctgatcgccctgccttggcgtttcgtcaaaattgccggcgtattggcgttttggctggcggttttgtttgacgggctgatgatggtgatccagcttttcccttttatggacctcatcggcgccatcaacctcgtccccttcatcctgaccgcccccaccccttatcagataatgaccgggctgttgctgctgtatatgctggcgatgccgtttgtgttgcagaaagccgccgccaaaaccgacttccggcacattgccgtctgcgccgccgttgtggcggcagccggctatttcaccggccatttgagttactacgaccgggggcggatggccaatatcttcggcgcaaacaacttctattacgccaaaagtcaggcgatgctctacaccgttagccagaatgccgactttattaccgccggcctggtcgatcccgtcttcctccccttgggcaatcagcagcgtgccgccacgcatctgaacgagccgaaatctcaaaaaatcctctttatcgtcgccgaatcttgggggctgccggccaatcccgaacttcaaaacgccacttttgccaaactgctggcgcaaaaagaccgtttttcggtttgggaaagcggcagttttcccttcatcggcgcgacggtcgaaggcgaaatgcgcgaattgtgcgcctacggcggtttgcgcgggttcgcactgcgccgcgcgcccgacgaaaaatttgcccgctgcctccccaaccgtttgaaacaagaaggttatgccacctttgcgatgcacggcgcgggcagttcgctttacgaccgcttcagctggtatccgagggcgggctttcaagaaatcaaaaccgccgaaaacctgatcggtaaaaaaacctgtgccattttcggcggcgtgtgcgacagcgagctgttcggcgaagtgtcggcatttttcaaaaaacacgacaagggactgttttactggatgacgctgaccagccacgccgactatcccgaatccgacattttcaaccacaggctcaaatgcaccgaatacggcctacccgccgaaaccgacctctgccgcaacttcagcctgcacacccaattcttcgaccaactggcggatttaatccaacgccccgaaatgaaaggcgtggaagtcatcatcgtcggcgaccatccgccgcccgtcggcaacctcaatgaaaccttccgctacctcaaacaggggcacgtcgcctggctgaacttcaaaatcaaataa

SEQ ID NO: 47265 - DNA, 1854 bp, Neisseria meningitidis
ttgaacaaaatcttttcctggttcgagtcccgaatcgacccttatcccgaagccgccccgaaaacgccagaaaaaggcttgtggcggtttgtctggagcagcatggccggcgtgcggaaatggatagccgccctggctgcgctgaccgccggcatcggcattatggaagccctgatttttcaatttatgggcaaaatcgtggagtggctcggcaaatacgcgcccgccgaattgtttgccgaaaaaggttgggaactggcggcaatggcggcgatgatggtgttttcggtcgtgtgggcgtttgccgcgtccaacgtgcgcctgcaaacccttcagggcgtgttccccatgcgcctgcgctggaacttccaccgcctgatgctgaaccaaagcctcggtttttatcaggacgaatttgccggacgcgtgtccgccaaagtcatgcagaccgcgctggcgttgcgcgacgcggtgatgacggttgccgatatggtcgtttatgtgtcggtgtatttcattacctccggcgtgattctcgcctcgctcgactcatggctgctgctgccctttatcggctggattgtcggtttcgcttcggtgatgcgcctgctgattcccaaattggggcaaaccgccgcatggcaggcggatgcccgctcgctgatgaccggccgcattaccgatgcctattccaatatcgccaccgtcaaactcttctcccacggcgcgcgtgaagccgcctatgccaagcagtcgatggaagaatttatggttacggtgcgcgcccaaatgcggctggcgacgctgctgcattcgtgcagcttcatcgtcaacacctccctgaccctctccaccgccgcactgggcatctggctctggcacaacgggcaggtcggcgtgggcgcggttgctacagccaccgccatggcgttgcgcgtcaacggtttgtcgcaatacattatgtgggaatccgcgcggctgtttgaaaacatcggcaccgtcggcgacggcatggcaaccctgtccaaaccgcacaccatcctcgacaagccccgggcactgccgctgaacgtgccgcaaggcgcaatcaaatttgaacacatcgatttctgctacgaagccggcaaaccgctgctcaacggcttcaacctcaccatccgcccgggcgaaaaagtcggcttgatcggacgcagcggcgcgggcaaatccaccatcgtcaacctgcttttgcgcttctacgaaccgcaaagcggcacggtttcgatcgacgggcaggacataagcggcgttacccaagaatctttacgcgcccaaatcggtttggtcacgcaagatacctcgctgctgcaccgttccgtgcgcgacaacattatttacggccgccccgacgcgaccgatgccgaaatggtttccgccgccgaacgcgccgaagccgccggcttcatccccgaactttccgatgccaaagggcggcgcggctatgacgcgcacgtcggcgaacgcggcgtgaaactctccggcggtcaacgccagcgtatcgccatcgcccgcgtgatgctcaaagacgcaccgattcttcttttggacgaagccaccagcgcgctcgattccgaagtcgaagccgccatccaagaaagcctcgacaaaatgatgaacggcaaaaccgtcatcgccatcgcccaccgcctttccaccatcgccgcaatggacaggctcgtcgtcctcgacaaaggccgcatcatcgaagaaggcacacacgccgaactcctcgaaaaacgcgggctttacgccaaactctgggcgcaccagagcggcggcttcctcaacgaacacgtcgagtggcagcacgactga

SEQ ID NO: 47266 - DNA, 753 bp, Neisseria meningitidis
gtgaaacccatcatgctgattgtccgaccgtcgggcagggcgaaggacgatgtggaaacctgccgtcgtgccgaatggcaggcggaagtgttgagtccgattgaaatcgaaaccgacaaagcaagcctgaaacggctgccggaaatgtatgcccgtgcggatgccgtgttttgggtcagtccgaccgccgttgaaaccgccgtcccgtaccttaacctttcagacggcataaagatgcacatttccgtagggcagggcagccgccgtgcattggaacgctgtttgggcagaacggtcatcgcgcctgatgacggcaacgacagcgaggcggttttgcgcctgccggtttggaacagtctgcccgaaggtgcgcgcgtattgtttgtgcgcggacacggcgggcgggattttctgatgaatgccttgcaggagaaaggttttcggacggaggtggcagaagtctatttcagacggcataaacctttgaactttcaaaatttccaaaccgaaaatattgccgccgcctatattacgtccgcagaactcgtgcagtcgctgtttgcacaggttccgccgcaattttcccgattcttcaaatccttgctatactttacccatcatccgcgcattgcggaggcattgaagcgcgaaggcgtgtgttcggtcgaaaccgtccctacgctggaagccgcgctttcccattcttccatttccgtttcagacggcatggtctttcccggaacctcaaattaa

SEQ ID NO: 47267 - DNA, 843 bp, Neisseria meningitidis; identical to SEQ ID NO: 39914

SEQ ID NO: 47268 - DNA, 1266 bp, Neisseria meningitidis
atgtcccacttattccgaaaagaagtctttgtagcccaacaaaataagtggacaggtcaggttatcttgacccgtccattctcttttttatttctgactttttgcgcttttctcattgctctgtgtatcattatctttttgatttttggtagctataccaataaaacaaccgttgaaggtcaattacttccaactatgggggtggttcgtgtttactcttccgatatcggcacgattacgcataaatttgttgaagatggtaactttgtcaaagctggcgaaccattgttcaaactttccacatcgcgttttggcgaaaaaggaaacgtacaagccaaattggcagcagaagccaaccttaaaaaaactttggcattacaagaattggaacgtttaaagcgcattcatcaaaatgagcaaaaaaatgttcataacaacattcatcgtttaaacaatcaattagagaatattaaacagcaaattacagggcaaaatcgtcaaattcgtttagcggaaaaaacccttaacaagaacaagtttttagccagtcaaggcgcagtatcccaacaagataagatgaccgccgaaagccatttattggaacaacgctcacgtttggagagcctaaaacgtgaacaaaataatgcaatcagggaacttgatgaacagaaaatcacattaagcagcctgcctgaacgccataaaaccgaattgagccaactcaaccgtgcgattacggaaatgaaccaagaaattttggattttgatttgaaatccgaacaaaccatacgagctagtaaatcaggttatatttcaacaattaatgttgatatagggcaacaagttgaaccgtctaaattgctgttaagcattgtccctgaacaaactgaattggtcgccaatctttacatacccagtaaagctgttggttttattaaaccgaaagataaagttgttttacgttaccaagcgtacccttaccaaaaatttggacatgccacaggagaaattatttcagttgccagaactgctctcggtaaacaagagctatcaggtttaggtatcattttcactaacccaaccttattaaatgaacctgcctatcttgtgaaagttaaattggaaaaacaaacgattaaagcatacggagaaaacaagccgcttcaaattggcatgattttagaagcagatattctccatgaacgaaaaaaattgtacgaatgggtacttgacccactttacagcatttcaggaaaaatcaattaa

SEQ ID NO: 47269 - DNA, 2007 bp, Neisseria meningitidis
atggctgatatgaagaaaattacccctcaaaacctgcgccccctgctttcggaaagcttgggacataccgattttgtcaacgtcctcaacgcactgattaaatttttgcgccgtggcggcaaaaaatgtgcgggggaacgtttcgacctgattatcgacacattcaaacaagacagggaattgctgtcccgcttcagccggtgtttttacatctggctcgcgcaaatacacatttatccggcactcatcaaactcggcatcttctcgcgccacagctttgcccgggaaatgggcatacgcatctacgaacgcttcagcccgtcatataaagattttgccaacttgggcgaagtcttcctttatcttttccattccgaaaacgacgacaaatggctgcaaacgctcaatatccgccaatggctggttttatacgaactcatccggagccacgccgaaccgtccaaattgcagacggcgggcatccgccttgccgatgcgcgtttgcgcgccatcgaaatgctgtctgtctggacggcatccgaagccatcgaacccgacctcatccgcatcgccccgcgcctgctggaagccgattcttccttcgtcgccctccaacgcgaaaccgccaaactggtcgaacactaccgcaacggcaccgcgccttacgacaccgcccacctcgaagtgatgttcgaccaatgtttcagccagattgactatttgcgccgcaaagggacgggcgccggctccggttcgtcggtcaaagtcgcccacctgctcgaacggctccggcagaccgtagaccgtctgaagctgctcaccgacatccaaaccggcgccggcaacagcaaccgcctgaccatcgcgctgatgaactccctcatctacgcggcggtcgaacaatacagcacccgccacctgcgccgcagcagcatccgtatgctcgcccgcagcattaccgaaaacaaaagccaccacggcgaacactacatcacccgcaaccgcaaagaatatttcaaaatgttctactcggcggcaggcggcggcgtcatcatcgccctgatggcgctgctcaaaatccgcatcggcacactcggcctcagccccttcctcacttccttgtcggccgggttcaactacggcatcggctttatgatcatccatatgctgcactgcaccgtcgccaccaagcagcccgcgatgactgccgccagctttgccgaacaggtcgatctcaacgaaggcggcaaagcggtggacaacaaactcgccaagctcctcatcgacgtatgccgctcccaaagcgtcgccgtcttcggcaacgtttccatcgccatccttttggcgtgcgccatatcgttcggctatgcccatctgtaccggcagcccatactcgatgcccacaccgccgcctaccagttcaaatccatagacatcatcgcttacccgacgctgtggtatgccgccattgcaggtctgtggctgttctgctccggcatcatcgcaggttttttcgacaaccgcgccgactacctcaacctgcgccaacgcctgcctttcaaccccttgctgcgtaaaatcatgcgccccgggccccgccgcgtcctcgccgcctacatccacaaacactacggctcgttggtaggcaacttcatcttcgggatgctcttgggtatgaccggctatttcggacacctcctcgggctgccgctggacatccgccacgtcgccttttcctccgccaacctcggctatgccgccgtcagcggcaacgtcggtttgggcacgttcgtactcggcattttcagcgtcctcgccatcggcctggtcaacctctgcgtcagtttcagcctcgccctcttcgtcgccctgcgctcgcgcggcacgaaaatcggcagcatccgcaatctgattaaaagtttttggaatcagattaaaagcaatccctgcatacttttcctcccgcccgccaaagaacagggacatcctccttcggacaagccttga

SEQ ID NO: 47270 - DNA, 1467 bp, Neisseria meningitidis
gtgcaaaatcagacaaattcatgtaggattagcggatttcatctgacctctcctgctgatttcagacggcatttgattcaaagtgcggcacaattatatcggcagcggatattttcgtctttcaatatttacatttcagtcggcttacaaggagacacaatgaagccagtaaacatcggtcttttaggtttgggtacggtcggcggcggtacggctgccgtgttgcgggacaacgcggaggaaatttcccgccgcttggggcgcgaagtgcgcatcagtgccgtatgcgacttgagcgaagaaaaagcccgccaaatctgcccgtccgcagcctttgtcaaagatccgttcgaactggtcgcgcgtaaagacgtcgatgtcgtcgtcgaattgttcggcggcacgggcattgccaaagatgcggtgttgaaagccattgaaaacggcaaacacatcgttaccgccaacaaaaaactgctcgccgaatacggcaacgaaatcttcccgctggcggaagaaaaaaatgtcatggtgcaatttgaagcggcagtagcgggcggtatcccaatcatcaaagccctgcgcgaaggtttggcggcaaacaggattaaatccatcgccggcattattaacggcaccagcaacttcatcctctccgaaatgcgtgaaaaaggcagcgcgtttgccgatgtactgaaagaagcgcaggcactgggctatgccgaagccgacccgaccttcgacatcgaaggacatgacgcgggccataaaatcaccatcatgagcgcgctggcattcggcacgccgatgaacttttccgcctgctacctcgaaggcatcagcaaactcgacagccgcgacatcaaatacgccgaagaacttggctaccgcatcaaactgttgggcatcacccgcaaaaccggcaaaggcatcgagctgcgcgtccaccctaccctgattcccgaaagccgcctcttggcaaacgtcaacggcgtgatgaacgccgtgcgcgtcaacgccgatatggttggcgaaaccttatattacggcgcgggcgcgggcgcattgccgaccgcttccgccgtggttgccgatatcatcgacatcgcccgcctggttgaagccgataccgcccaccgcgtaccgcatctggcgttccaacccgcgcaagtccaagcgcaaaccatcctgcctatggacgaaattaccagcagctactacctgcgcgtccaagccaaagacgaaccgggcacgctggggcaaatcgccgcgctgttggcacaagaaaacgtgtccatcgaagcactgattcaaaaaggcgtgattgatcagaccactgccgaaatcgtgattctgacccacagcacggtcgaaaaacacatcaagtcggcaatcgcagccatcgaagcactggattgcgtggaaaaaccgattaccatgatccgcatggaaagcctgcatgactga

SEQ ID NO: 47271 - DNA, 1881 bp, Neisseria meningitidis
atgaatattttttacgaagagtccggccaattcaaaatcgccgccatcatccaaaaaaacgacgctacctaccaagtcgataccccacacggcaaacgcaccaaagtgaaggcgaacaacgtctttaccgagttcgacggcgatatggcggcgtttttggaaaacgcgcaggcacaggcggcggatatcgacaccgatttattgtgggaagtgtgcggcgaagaggaatttaccgctgaagccatagccgaagaatattacggccatgcgccgaccaaaaccgagctggcggcgaccttgattgcgctgtacgccgcgccgatgtatttctacaaaaaagccaaaggcgtgttcaaagccgcgcccgaagaaactttaaaacaagcacttgccgccatcgaacgcaaaaaacagcaagacgcgcaaatcgacgcttgggcagaagccttgaaacgcggtgagatgccgtctgaaatcgcggcggatttgaaaaccatcctgcacgcgcccgacaagcagtcgctgacctacaaagcctttaccaaagccgccgacgcgctgaaaacctctgcctacgaattggcgaaaaaaacgggcggcattacgtccattccccaatacctgcaagacgggtttgaaatcaaatacttccccaaaggaacaggcttccccgaccttccgcttcccgaaatgcccgacctgcccaaggctgacgttaccgccttttccattgacgacgaatcgaccaccgaagtggacgacgctttaagcctgaccgacttggacaacggcacgaagcgcgtcggcatccacatcgccgcgccgtcgcttgccattaaacaaggcgacaaaatgaaaaaaaacatcatggaacgcttgagcacggtttatttccccggcggcaaaatcacgatgctgcccgaaaactggattgccgcgttcagccttgatgcaggcgcacaccgccctgccgtcagcatttatttcgatgtggacggcgagttcaacgtcggcgcgccgacctgcaaaatcgaagcggtcaacatctccgaaaacctgcgtatccaagccatcgaaccgcatttcaacgccgaagcgggcttggacgaagcgggcgaaatgatgttcgcccaccatcaagacctgatttggttttatcaattcgccatcaccctgcaaaaagcgcgcggcaaatacgagcccaaccgtgcgccgcaatacgattacagcatcgaattggataaagaagacaacgtatccgtcgtccgccgcgaacgcggctcacccatcgatacgctggtcagcgagatgatgattcttgccaacagcacttgggcacaaatgctccatgacaacgacctgcccggcctcttccgcgtccaacccaccggaaaagtacgcatgagcaccaaatccgagccgcatatcggcatgggcgtgcagcattacggctggtttacctcgccgctgcgccgcgccgccgactacatcaaccaaaagcagctgatcagcctgatagacgacactgccgagccgctgtatcaaaacagcgatgccgagcttttcgccgcactgcgcgactttgatgccgcctataccgcctacgccgatttccaacggcagatggaagcctactggagccttgtgtacctgcaacagcaaggtacaagcgagctgaccgcgaccatcctcaaagaagacctcgtccgcatcgaaggcctgccgctggtcacgcgcgcgaccggtattccgtttgacgcgctgcccaaatcacaggcattgttcaaaatcaccgaattagatgccgagaagcagtttgtctcgctcaactacatcaaggcagtcgcactcgcaggcaaaacggcaggcaatgccgtctga

SEQ ID NO: 47272 - DNA, 1569 bp, Neisseria meningitidis
atgaaacaccgtactttcttttccctttgcgccaagttcggctgcctgcttgcgctgggtgcttgttcgcccaaaatcgtcgatgccggagccgcgaccgtgccgcacactttatccactttgaaaactgcggacaaccgccccgccagtgtttacttgaaaaaagacaaaccgacgctgattaaattttgggcgagctggtgtcctttgtgtttgtccgaattgggacagaccgaaaaatgggcgcaagatgcaaaattcagctccgccaacctgattaccgtcgcgtctccgggctttttgcacgagaaaaaagacggcgacttccaaaaatggtatgccggtttgaattatcccaagctgcccgtcgtaaccgacaacggcggcacgatcgcccaaagcctgaatatcagcgtttacccctcgtgggcgttaatcggtaaagacggcgacgtgcagcgcatcgtcaaaggcagcatcaacgaagcgcaggcgttggcgttaatccgcgacccgaatgccgatttgggcagcttgaaacattcgttctacaaacccgacactcagaaaaaggattcaaaaatcatgaacacacgcaccatttacctcgccggcggctgcttctggggcttggaagcctatttccaacgcatcgacggcgtggttgacgcggtatccggctacgccaacggcaacacgaaaaatccgagctatgaagacgtgtcctaccgccatacgggccacgccgaaaccgttaaagtgacctacgatgccgacaaactcagcctagacgacatcctgcaatatttcttccgcgtcgttgatccgaccagcctcaacaaacagggcaacgacaccggtacgcaataccgcagcggcgtgtactacaccgaccccgccgaaaaagccgtcatcgccgccgccctcaaacgcgagcagcaaaaataccaactgcccctcgttgttgaaaacgagccgctgaaaaacttctacgatgccgaggaataccatcaggactacctgattaaaaaccccaacggctactgccacatcgatatccgcaaagccgacgaaccgctgccgggcaaaaccaagaccgccccgcaaggcaaaggcttcgacgcggcaacgtataaaaaaccgagtgacgccgaactcaaacgcaccctgaccgaagagcaataccaagttacccaaaacagcgcgaccgaatatgccttcagccacgaatacgaccatttgttcaaacccggcatttatgtggacgttgtcagcggcgaacctttgttcagctccgccgacaaatatgattccggctgcggctggccgagcttcacgcgcccgattgatgcaaaatccgttaccgaacacgatgatttcagctacaacatgcgccgcaccgaagtgcgcagccacgccgccgattcgcatttgggacacgtcttccccgacggcccgcgcgacaaaggcggactgcgctactgcatcaacggcgcgagcttgaaattcatcccgctggaacaaatggacgcggcaggctacggcgcgttgaagagtaaagtgaaataa

SEQ ID NO: 47273 - DNA, 702 bp, Neisseria meningitidis
ttgaatccgacctacaacctgtcccatcttaataaaataccccattccacccggagaaccgaaatgtccaaactgaccccccgcgaaattttgaccgccggcgcagttgtgccggtaatggcgattgacgacttaagcaccgccatcgatttgtcccacgcccttgtcgaaggcggcatccctaccctcgaaatcaccctgcgcacccctgtcggcctcgacgccatccgcctgattgccaaagaagtgcccaacgccatcgtcggcgcgggtacggtaaccaatcccgaacagctcaaagccgtcgaagacgcaggcgcggttttcgccatcagcccggggctgcacgaatccctcgccaaagccggccacaacagcggcatccccctgattcccggtgttgccaccccgggcgaagtccaactggctttagaacacggcatcgacaccctcaaactcttccctgccgaagtcgttggcggcaaagccatgctcaaagccctgtacggtccttacgccgatgttcgcttctgcccgacaggcggcatcagcctcgccaccgcgcccgagtacttggcactgcccaacgtcctgtgcgtcggcggctcttggctgacaccgaaagaagccgtgaaaaacaaagactgggacaccatcacccgcctcgccaaagaagcggcggcgttgaaacccaaagcctga

SEQ ID NO: 47274 - DNA, 966 bp, Neisseria meningitidis; identical to SEQ ID NO: 46197

SEQ ID NO: 47275 - DNA, 837 bp, Neisseria meningitidis; identical to SEQ ID NO: 44358

SEQ ID NO: 47276 - DNA, 888 bp, Neisseria meningitidis
atgtacacaggacgtttcgcccccagcccgaccgggctgctccacatcggctcgctgctgaccgccgccgcttcctatgccgatgcacgctcaaacggcggcaaatggctggtccgcatggaagacctcgatccgccgcgcgaaatgccgggggcggcaagccatatcctgcacacgcttgaggcattcggattcgagtgggacggagaagtcgcctatcagagccgccgttacgccctgtatgaagaaacactatgccgtctgcaaaccgccggactggtctatccctgccattgcagccgcaaagactggcaggctgcggcagtccacggcgcagacggattcgtctataacggacgttgccgcaatccgcagcaacgccctgcactgcaaggcaaacagcctgcgtggcgcatccgcgtccccgaccgcgacatcggcttttcagacggcatcgtcggcggttacgcccaaaacctcgcccgcgacatcggcgatttcgtcctgcttcgtgcagacggttactgggcataccagctcgccgtcgttgccgacgatgccgaacagggcgttacccacatcgtccgcggacaagacctgctcgtttccacgccgcgccaaatctatttgcagcagtgtttgggcgttccgacaccgcaatatgcccacctgccgctgctgaccaacgcacaagggcagaagtggtcgaaacagacgctcgcccccgcattggatttaaaccgccgcgaacaactcctccgccaagtgttccgttacctcaagctgcccgaagcaccggaaaccgaccgccctgccgaactgctcgactgggcggtggcacactgggatatgggcaaagtgccgaaacacgccattaccaccccctaa

SEQ ID NO: 47277 - DNA, 393 bp, Neisseria meningitidis; identical to SEQ ID NO: 38784

SEQ ID NO: 47278 - DNA, 6081 bp, Neisseria meningitidis
atgaataaaggtttacatcgcattatctttagtaaaaagcacagcaccatggttgcagtagccgaaactgccaacagccagggcaaaggtaaacaggcaggcagttcggtttctgtttcactgaaaacttcaggcgacctttgcggcaaactcaaaaccacccttaaaaccttggtctgctctttggtttccctgagtatggtattgcctgcccatgcccaaattaccaccgacaaatcagcacctaaaaaccagcaggtcgttatccttaaaaccaacactggtgcccccttggtgaatatccaaactccgaatggacgcggattgagccacaaccgctatacgcagtttgatgtcgacgctaaaggtgctgtactgaacaacgatcgcaacaacaacccgtttctggccaaaggcagtgcgcagttgattttgaacgaggtgcgcggtgcggccagcaaactcaatggcatcgttaccgtaggtggtcaaaaggccgatgtgattatcgccaaccccaacggcattaccgtgaacggcggcggctttaaaaacgtcggccgcggtatcttaactaccggtgcgccccaaatcggcaaagacggtgcactgacaggatttgatgtgcgtcaaggcacattgaccgtaggagcagcaggttggaatgataaaggcggagccgactacaccggggtacttgctcgtgcagttgctttgcaggggaaattacagggtaaaaacctggcggtttctaccggtcctcagaaagtagattacgccagcggcgaaatcagtgcaggtacggcagcgggtacgaaaccgactattgcccttgatactaccgcactgggcggtatgtacgcagacagcatcacactgattgccaatgaaaaaggcgtaggcgtcaaaaatgccggcacactcgaagcggccaagcaattgattgtgacttcgtcaggccgcattgaaaacagcggccgcatcgccaccactgccgacggcaccgaagcttcaccgacttatctctccatcgaaaccaccgaaaaaggagcggcaggcacatttatctccaatggtggtcggatcgagagcaaaggcttattggttattgagacgggagaagatatcagcttgcgtaacggagccgtggtgcagaataacggcagtcgcccagctaccacggtattaaatgctggtcataatttggtgattgagagtaaaactaatgtgaacaatgccaaaggctcggctaatctgtcggccggcggtcgtactacgatcaatgatgctactattcaagcgggcagttccgtgtacagctccaccaaaggcgatactgaattgggtgaaaatacccgtattattgctgaaaacgtaaccgtattgtccaacggcagtattggcagtgctgctgtaattgaggctaaagacactgcacacattgaatcgggcaaaccgctttctttagaaacctcgaccgttgcctccaacatccgtttgaacaacggtaacattaaaggcggaaagcaggtggtactgatggctgatggcgacattcaggcaaaagcctccaatctgaatgcatccggcaatctgtatattcatgcaggtaaggatctggatttgaatgccgataaagacttatcaacacaaagtatcagcctgagggcagacaacaccgccctcatcagtagcaacggtaacaccttgactgcagaaaagaatctggatattcaggcaggtagcttgagtgtgcgtcaaagtaatctgcaatccagtggcggtaatgtgcagatgagcgcgactaaaggcaacatcagcttgaatcagagttggataaatgccagtcagaatattgatacggcagcacttcaaggcaatattatttcagacggtctgactgctgttgccgaagttggacgcgtatctcttcttgccaacggcaatgttgatttcaacggtctaaataccttgattgcggaaggagacattaatgctggttcagtcggtaaaggccgtctgaaaatggacaataccgatatttatgcttctgcaggcgatgtgaaactggttgccggaggtcaattagatttaggcaacggcaccgttaacggcggtcatatcagcttagacagcaataaaggcagcatggtggtgcaggatgtacacctgaatgcccgcgcatcactgaaagtggatgcggatcaaactttaaccattaataacagcaagctcaattccggtcacaatacccagattaatacaaatcatggtcatatgacgcttaatcagcttgatgctcattcacgtcgtcatatgagtatcagtgcacagggtaaaggcaaaggaaaagacagcggtcaaattttacaaaacgaccagcaaaacagtaaaagtactttggcggcagatggtgtattgtcattgaacagcagcgcattacaggttttggacaatactaccctgcgcggtggcgcgataaacatcaaagctggcggaggcatcatcaaacggggctatatcgattgggaaacccaagatacggctactatgcgttcagcggaactgaaaccactgtctggtatgatgtcgatagaatcgggcggtgataaccctttaaccgttgaacccggtaaccgtatcgtttctgcaggtgatttggccgtgaaccacaacggcacattccaaatcagtgccagagcaggaaataacggcaatccgagtgcgcaaacagccagcgtttcagctaaaggcaatatcgggattgtggcgggagaggtggatattgatgcagcaaatattgccgcagggaaagatttggctttagtggcaactaaagggaatatttcactaaacagtattaggaatacgtttagtaactatcaattgaaaacagataaacacaatatcacacagcaacttactgatgtagagcaggagcttagtaagttaacgagcgatcctaaatatcgtaaagcacaggatcttccacaaatgttgaggcgtaaatataagaggcgtgacaaagtattcggtgatagtgaggccagattacgtggtttacgagcagagataaatgctgctgatgaggcttgggcagaactccaatccccagtaaaagcgttacttgaacgtaaacaattgttacaacaagcccttttaacagtttcccaaccgggtagtggtcacgaaaaccaaggtagcacccttagcggtcaaaatatcaaactgctcgctgcaggtggtatccgtatccagggctccaaagttgctgccacccaacaggcaaatatccaagctgcaggatttttacctgcaccagccgcagaggaactgcaagaaggtcgacttcaatcagccattgacatcagcggtgtatttgatacttttgaatatggtcagcaaggcagcgataaatacggctatgccattttcagcaggccatctgaaatttcaggaaaaacaggtgttaccctctctgcaccaaatgccaatgagaacagccgcatcagtctgagtgcggcaaacatcgaagctgaaaacggcaaaatcaaactgcaatcctacggcgaccaatcctattacgccgggcagggcgaactctataccttagaacgccgcagctacaaaaccggcaaatggtacaaccgcaaacacattaccgaagtcaaagaacacaaaaacgccaagcccgacgcagtaaacctcagcgcatcccaaggcatcgacatcaaatctggtggcaacatcgacgcctacgccaccgcattcgatgcccccaaaggcagcattaacatcgaagccgggcggaaattgacactctatgccgtagaagagctcaactacgacaaacttgacagccaaaaaaggcgcagatttctcggcatcagctacagcaaagcacacgacaccaccacccaagtcatgaaaaccgcgctgccctcaagggtagttgcagaatcagccaacctccaatcgggctgggataccaaactgcaaggcacacagtttgaaaccacactgggtggcgcaaccatacgcgcaggcgtaggcgagcaggcacgggcagatgccaagattatcctcgaagggatcaaaagcagcatccacacagaaaccgtgagcagcagcaaatctactctatggcaaaaacaggcaggacggggcagtaacatcgaaaccttgcaattgccgagtttcaccggtcccgttgcgcccgtactgtccgctcccggcggctatatcgtcgacattccgaaaggcaatctgaaaaccgaaatcgaaaagctggccaaacagcccgaatacgcctacctgaaacagcttcagacggccaagaacgtcgattggaaacaggtgcagctggcctacgacaaatgggactataaacaggaaggcttgaccggagccggtgcagcgattgtggtgattattgtaaccgctctaacttatggatacggagcggctgcagcgggtagcgtaactgccgcaggaagtagtacagccgcagctgcaacaacgacagcggcagcaactaccactgtttctactgcagctgccatgcaaaccgcagctttagcctccttgtatagccaagcagctgtagccatcatcaataataaaggcgatgtaggcaaagcattaaaagatctcggcaccagtgatacggtcaagcagattgttacttccgcactgacggcgggtgcattaaaccagatgggagcagatattgcccaattgaacagcaaggtaagaaccgaactgttcagcagtacgggcaatcaaaccattgccaaccttggaggcagattggccaccaacctcagcaatgcaggtatctcagctggtatcaataccgccgttaacggcggcagcttgaaagacaacttaggcaatgccgcattgggagcattggttaatagcttccaaggggaagccgccagcaaaatcaaaacaaccttcagcgacgattatgttgccaaacagttcgcccacgctttggcgggttgtgttagcggactggtacagggaaaatgtaaagatggggcaattggcgcagcagttggggaaatcgtagctgaatccatacttggcggcagaaaccctgctacactcagcgatgcagaaaagcataaagttatcagttactcgaagattattgcgggcagcgtggcggcactcaacggcggcgatgtgaatactgcggcgaatgcggctgaggtagctgtggtgaataatgctttgaattttgacagcacccctaccaatgcgaaaaagcatcaaccgcagaagcccgacaaaaccgcactggaaaaaatcatccaaagtattatgcctgcacatgcggcaggtgcgatgactaatccgcaggataaggatgctgccatttggataagcaatatccgtaatggcatcacaggcccgattgtgattaccagctatggagtttatgcagcaggttggacagctccgctgatcggtacagctggtaaagcagctatcagcacctgtatggctaatccttctggttgtactgtcatggttacgcaggctgctgaagcgggcgcgggaatcgccacgggtgcggtaacggtaggcaacgcttgggaagctccagtaggagcgttgtcgaaagcgaaggcggctaagcaggctataccaacccagacagttaaagaacttgatggcttactacaagaatcaaaaaatataggtgctgtaaatacacgaattaatatagcgaatagtactactcgatatacaccaatgagacaaacgggacaaccggtatctgctggctttgagcatgttcttgaggggcacttccataggcctattgcgaataaccgttcagtttttaccatctccccaaatgaattgaaggttatacttcaaagtaataaagtagtttcttctcccgtatcgatgactcctgatggccaatatatgcggactgtcgatgtaggaaaagttattggtactacttctattaaagaaggtggacaacccacaactacaattaaagtatttacagataagtcaggaaatttgattactacatacccagtaaaaggaaactaa

SEQ ID NO: 47279 - DNA, 1467 bp, Neisseria meningitidis; identical to SEQ ID NO: 39873

SEQ ID NO: 47280 - DNA, 687 bp, Neisseria meningitidis; identical to SEQ ID NO: 42016

SEQ ID NO: 47281 - DNA, 627 bp, Neisseria meningitidis; identical to SEQ ID NO: 45676

SEQ ID NO: 47282 - DNA, 1593 bp, Neisseria meningitidis; identical to SEQ ID NO: 44189

SEQ ID NO: 47283 - DNA, 336 bp, Neisseria meningitidis; identical to SEQ ID NO: 45775

SEQ ID NO: 47284 - DNA, 2016 bp, Neisseria meningitidis
atgagtaaatcccgtagatctcccccacttctttcccgtccgtggttcgcttttttcagctccatgcgctttgcggtcgctttgctcagtctgctgggtattgcatcggttatcggtacggtgttgcagcaaaaccagccgcagacggattatttggtcaaattcggacctttttgggcgcagatttttggttttctgggactgtatgacgtctatgcttcggcatggtttgtcgttatcatgatgtttttggtggtttctaccagtttgtgcctgattcgcaatgtgccgccgttctggcgcgaaatgaagtcttttcgggaaaaggttaaagaaaaatctctggcggcgatgcgccattcttcgctgttggatgtaaaaattgcccccgaagttgccaaacgttatctggaggtgcagggttttcagggaaaaaccgtcagccgtgagggcgggtcggttctgattgccgccaaaaaaggcacgatgaacaaatggggctatatctttgcccatgttgctttgattgtcatttgcctgggcgggttgatagacagtaacctgctgttgaaactgggtatgctgaccggtcggattgttccggacaatcaggcggtttatgccaaggatttcaagcccgaaagtattttgagtgcgtccaatctctcatttaggggcaacgtcaatatttccgaggggcagagtgcggatgtggttttcctgaatgccgacaacgggatattggttcaggacttgccttttgaagtcaaactgaaaaaattccatatcgatttttacaatacgggtatgccgcgtgatttcgccagcgatattgaagtgacggacaaggcaaccggtgagaaactcgagcgcaccatccgcgtgaaccatcctttgaccttgcacggcatcacgatttatcaggcgagttttgccgacggcggttcggatttgacattcaaggcgtggaatttgggtgatgcttcgcgcgagcctgtcgtgttgaaggcaacatccatacaccagtttccgttggaaattggcaaacacaaatatcgtcttgagttcgatcagttcacttctatgaatgtggaggacatgagcgagggcgcggaacgggaaaaaagcctgaaatccacgctgaacgatgtccgcgccgttactcaggaaggtaaaaaatacaccaatatcggcccttccattgtttaccgtatccgtgatgcggcagggcaggcggtcgaatataaaaactatatgctgccggttttgcaggaacaggattatttttggattaccggcacgcgcagcggcttgcagcagcaataccgctggctgcgtatccccttggacaagcagttgaaagcggacacctttatggcattgcgtgagtttttgaaagatggggaagggcgcaaacgtctggttgccgacgcaaccaaagacgcacctgccgaaatccgcgaacaattcatgctggctgcggaaaacacgctgaacatctttgcacaaaaaggctatttgggattggacgaatttattacgtccaatatcccgaaagagcagcaggataagatgcagggttatttctacgaaatgctttacggcgtgatgaacgctgctttggatgaaaccatacgccggtacggcttgcccgaatggcagcaggatgaagcgcggaaccgtttcctgctgcacagtatggatgcgtacacgggtttgaccgaatatcccgcgcctatgctgctgcaacttgatgggttttccgaggtgcgttcgtcgggtttgcagatgacccgttccccgggtgcgcttttggtctatctcggctcggtgctgttggtattgggtacggtattgatgttttatgtgcgcgaaaaacgggcgtgggtattgttttcagacggcaaaatccgttttgccatgtcttcggcccgcagcgaacgggatttgcagaaggaatttccaaaacacgtcgagagtctgcaacggctcggcaaggacttgaatcatgactga

SEQ ID NO: 47285 - DNA, 624 bp, Neisseria meningitidis; identical to SEQ ID NO: 38279

SEQ ID NO: 47286 - DNA, 249 bp, Neisseria meningitidis; identical to SEQ ID NO: 39195

SEQ ID NO: 47287 - DNA, 1236 bp, Neisseria meningitidis
ttgaaccgattgaaagaagatggtatgaaccaactgaaacttgccgtttccggcgcgcagattttatttgtggcattcggcgcaatggtgctggttcccctgctgaccggtctgaatccggctcttgcgcttttgggcgcaggcttgggaacgctgctgttccaaatcacaaccaaacgcaaagtgccgatttttcttggttcttcgtttgcctttatcgcaccgattatctactccgtcggcgaatgggggctgccttccaccatgttcggactgtttgccgccggctttatgtattttgtgtttgccgcgctgatccgttggcgcggactggcagcggtacacaaactgctgcctccggtcgtcatcggccccgtcatcatggtcatcggtctgtctgttgccgtggcggcaagcagcatggcaatgggtcaggcggacggcaaacaggtcatcgactataccgattcgctgattctttccggctttacctttgccgttaccgccatcgtatcggttttcggcagcaggatgatgaagctgattcccatcttgatcggtgtcgcttcgggttatgttttggcactgctgatgggactggtggacacggcaagcattgcacacgcgccctggttcgccgttccccattttgaaacgcctcaggtcaactggcaggctgcactgtttatgctgcccgttgccgtcgcccccgccatcgaacacatcggcggcatcatggcaatcggcaatgtgacggggaaagactatacgaaagacccgggcttggacaaaacccttgcaggcgacggtttgggcgtatgcgttgcgggtctgatcggcggcccgccggttacgacctacggcgaagtaacgggtgcggtgatgattaccaaaaacagcaaccccgtcatcatgacttgggcggcggtttttgccgtctgcatggcgtttttcggcaaattcaatgcgtttttggcttccattccgatgccagtaatgggcggcattatgctgctgctgttcggcacgattgcttctttgggcgtgaaaacgttgattgatgccaaagtcgatttgatgctgccgaaaaacctggtcatcgtcagctcggtactgaccacgggcatcggcggcatgacgctcaaattgggcagcttcagctttgccggcgtgggcttgtgcgccgtacttgccattatgttgaacagcctgctgcccgatccgaaagaatcctga

SEQ ID NO: 47288 - DNA, 762 bp, Neisseria meningitidis
atgaatcaaaagtatattttatctgcaaacaataatagtttgatagaagaaattcacaatacagtacagagtattgggtattgtattgttcgaggtcttaatctaaaccatcttgatggcagccggagaaacaagaaattatttgactttctatctcaattaggaatgctgacaaaccacaaaggcgatggttttaaatctatattttgggatattaaatatataaataatgatataactttctcggaagatgttggagaatgtccacttcatagtgattcatcttttagtgaaaacccggaaagttatttggttatgtatgtagtaaaatcagccaatgatggaggtaattccctatttttaagttcatcagatattgtcaatcagttatctaaaacagaaaccggtaaaaaacacttaaaaacattaacgggcaatttatatccatttaaagcaccagcatcatttgataaaaaacaaggtgtgagatggggtaatatcttatcggtcaatactcaaatgattagatttagaagtgattgtatctataaaggtattgaagaaaatagaaataaagtatcaaaggaaatggtacttgcacttgattatcttgtaaagattataaaaaatgcgagtgatattcaagaattttctgcacaagatgatggtttgattattattgacaatgtcaatggcttgcatgccggaactgattatacggataaaaacaggcattatattagagcaagaattactgtataa

SEQ ID NO: 47289 - DNA, 6090 bp, Neisseria meningitidis
atgaatgagggtgaagttgttttaacaccagaacaaatccaaaccttacgtggttatgcttcccgtggcgatacctatggcggttggcgttatttggctaatttgggcgaccgttatgcggataatgctgctgcaattgtcggtaaggatacaaacttaaatggtttgaatttatggatgaaaaaaggggtggaaaacctatgggatgatacggtcggtaaaaagacccgtttagagaaatttgatcgggttgcattgcaacatttcagccaatatgtagatctaattaataaaaataatggtagattacctaacactagtgaaattgagagaagttactataaagccgttacctatcatggcgtttcttctagtgcagctattgatttagttattaatcgttcacttccggatatggcggatggttattgggcattaggtttggggatagaagccgaacgtatccacaatgagcaagcagtaaataatccgaacggtagcgaaagggataatagaaagcagttaatatctgctttagataaaggatttgatggatcttttaaagagaagcattttacttttttacaatctgtgatgatggatctaacaaagttaggtgttgaatatacaatagatggttggcaaaaaattggaggttggggtaatgggataatcaatgatttatataaaagtgttgtaaaaagagagtggactggaatatttgagatcgttaataataacatcaagcaaggaaatgaagcttttaaaaatgaaatcaatagcttggttcatgatatgaaagctgctggcaaggaatttggagatgacttaaatacacagtggaataatctcactcaggctgccgaaataatctataatgacatagtagacaatactagtcaaggaatagaaaaaggtgtcaaagccattaaagaattgtctgaaaaaatgaaaaatgctgcttccgatttggctgacggttcagcagagaaagctaaacaagtagtggaagatttggctcaagccgccaaagaagcatacgaaaatgccaaatccacagccgagaaggctgctcaagcagctcgagaattttttaagggcttgcccagttttaaagatctggccgaaaaatttagagatctgttcccaaatccggaaggctggatcgatgatggtcaccaatgtttcgctccttgggttaaagaaactaaaaaacgcaatggcaaatatcatgtctacgacccccttgccctagatttggacggcgacggcatagaaaccgttgccaccaaaggcttttcaggcagcctatttgaccacaaccgcgatggcatccgcaccgccaccggttgggttgctgccgatgacggtctgcttgtgcgcgatttgaacggcaacggcatcatcgacaacggcgcggaactcttcggcgacaacaccaaactggcagacggttcttttgccaaacacggctatgcagctttggccgaattggattcaaacggcgacaacatcatcaacgcggcagacgccgcattccaaaccctgcgtgtatggcaggatctcaaccaggacggcatttcccaagctaatgaattgcgtacccttgaagaattgggtattcaatctttggatctcgcctataaagatgtaaataaaaatctcggtaacggtaacactttggctcagcaaggtagctataccaaaacaaacggtacaaccgcaaaaatgggggatttacttttagcagccgacaacctgcacagccgttttaaagataaagtggaactcactgccgaacaggcaaaagccgccaatcttgcgggcattggtcgtctgcgcgatttgcgcgaagctgccgcattgtccggcgatttggccaatatgctgaaagcttattctgccgccgaaactaaagaagcacagttggcattgttagataatttgattcacaaatgggcggaaaccgattcgaactggggcaaaaaatcgccaatgcgactttcaaccgattggacgcaaacggctaatgaaggtattgcactgacaccatcccaagtagcacaactaaaaaagaacgctttagtttccctttctgataaagctaaagcagctattgacgccgcccgcgaccgcattgccgtgcttgatgcctacacggggcaggattccaacacactctattacatgagcgaggaagatgcgcttaatatcgtcaaagtaaccaacgatacatacgaccatctcgccaaaaacatctaccaaaacctgttgttccaaacccgtttgcagccatatttgaatcaaatcagtttcaaaatggaaaatgatacgttcactttggattttagtggtcttgttcaagcatttaaccatgtcaaagaaactaatccgcaaaaagcttttgtggatttggccgagatgcttgcatatggcgaacttcgttcttggtatgaaggccgaagactaatggccgattatgtggaggaggcaaaaaaagcaggtaaatttgaagattaccagaaagtgttgggtcaggagaccgttgcattattagctaaaacatcgggtacgcaagcagatgatatcctgcaaaatgtaggctttggtcataataaaaatgtttctttatatggtaatgacggcaacgacactctaatcggcggtgccggtaatgattacttggagggcggcagcggttcggatacttatgtcttcggcaaaggcttcggtcaggatacggtctataattacgactacgctatcggacgcaaagacatcatccgctttaccgacggtattacagccgatatgctgacttttacccgagagggcaaccatcttcttatcaaggcaaaagacggcagtggacaagtgactgttcagtcctatttccagaacgatggctcaggtgcttaccgtatcgatgagattcatttcgataacggcaaagtactggatgttgccactgtcaaagaactggtacagcaatccaccgacggttcggacagattgtatgcctaccaatccggaaataccttaaatggcggattgggcgatgactatctgtacggtgccgacggggatgacctgctgaatggtgatgcaggcaacgacagtatctacagtggcaatggcaatgatacgctcaatggaggagaaggcaacgacgccctgtacggctataatggtaacgatgcactgaatggtggcgaaggcaatgatcatttgaacggcgaagacggtaacgacactctgatcggcggtgccggtaatgattacttggagggcggcagcggttcggatacttatgtcttcggcaaaggcttcggtcaggatacggtctataattacgactacgctaccggacgcaaagacatcatccgctttaccgacggtattacagccgatatgctgacttttacccgagagggcaaccatcttcttatcaaggcaaaagacggcagtggacaagtgactgttcagtcctatttccagaacgatggctcaggtgcttaccgtatcgatgagattcatttcgataacggcaaagtactggatgttgccactgtcaaagaactggtacagcaatccaccgacggttcggacagattgtatgcctaccaatccggaaataccttaaatggcggattgggcgatgactatctgtacggtgccgacggggatgacctgctgaatggtgatgcaggcaacgacagtatctacagtggcaatggcaatgatacgctcgatggaggagaaggcaacgacgccctgtacggctataatggtaacgatgcactgaatggtggcgaaggcaatgatcatttgaacggcgaagacggtaacgacactctaatcggcggtgccggtaatgattacttggagggcggcagcggttcggatacttatgtcttcggcaaaggcttcggtcaggatacggtctataattacgactacgctaccggacgcaaagacatcatccgctttaccgacggtattacagccgatatgctgacttttacccgagagggcaaccatcttcttatcaaggcaaaagacgacagtggacaagtgactgttcagtcctatttccagaacgatggctcaggtgcttaccgtatcgatgagattcatttcgataacggcaaagtactggatgttgccactgtcaaagaactggtacagcaatccaccgacggttcggacagattgtatgcctaccaatccggaagtaccttaaatggcggattgggcgatgactatctgtacggtgccgacggggatgacctgctgaatggtgatgcaggcaacgacagtatctacagtggcaatggcaatgatacgctcgatggaggagaaggcaacgacgccctgtacggctataatggtaacgatgcactgaatggtggcgaaggcaatgatcatttgaacggcgaagacggtaacgacactctgatcggcggtgccggcaatgattacttggagggcggcagcggttcggatacttatgtcttcggcaaaggcttcggtcaggatacggtctataattacgactacgctaccggacgcaaagacatcatccgctttaccgacggtattacagccgatatgctgacttttacccgagagggcaaccatcttcttatcaaggcaaaagacggcagtggacaagtgactgttcagtcctatttccagaacgatggctcaggtgcttaccgtatcgatgagattcatttcgataacggcaaagtactggatgttgccactgtcaaaaaactggtacagcaatccaccgacggttcggacagattgtatgcctaccaatccggaagtaccttaaatggcggattgggcgatgactatctgtacggtgccgacggggatgacctgctgaatggtgatgcaggcaacgacagtatctacagtggcaatggcaatgatacgctcaatggaggagaaggcaacgacgccctgtacggctataatggtaacgatgtactgaatggtgccgaaggcaatgatcatttgaacggcgaagacggtaacgacactctgatcggcggtgcaggcaatgattacttggagggcggcagcggttcggatacttatgtcttcggcgaaggcttcggtcaggatacggtctataattacgactacgctaccggacgcaaagacatcatccgctttaccgacggtattacagccgatatgctgacttttacccgagagggcaaccatcttcttatcaaggcaaaagacggcagtggacaagtgactgttcagtcctatttccagaacgatggctcaggtgcttaccgtatcgatgagattcatttcgataacggcaaagtactggatgttgccactgtcaaaaaactggtacagcaatccaccgacggttcggacagattgtatgcctaccaatccggaaataccttaaatggcggattgggcgatgactatctgtacggtgccgacggggatgacctgctgaatggtgatgcaggcaacgacagtatctacagtggcaatggcaatgatacgctcaatggaggagaaggcaacgacgccctgtacggctataatggtaacgatgtactgaatggtggcgaaggcaatgatcatttgaacggcgaagacggtaacgacactctgatcggcggtgccggtaatgattacttggagggcggcagcggttcggatacttatgtcttcggcaaaggcttcggtcaggatacggtctataattaccatgtggataaaaactctgacactatgcactttaaaggatttaaagcagcagatgttcattttatccgttccggaagtgatttggtgcttagcgcttctgaacaagacaacgtacgtatttccggattcttctatggtgaaaaccatcgtgtagatacatttgtctttgatgatgcagctatcagtaatccagattttgccaagtatattaatgctggcaataatttggtacagtctatgtctgtgttcggttctaatactgcggcgacaggaggaaatgtggatgccaatacacaatccgtacagcagccgttattggtaacgccatctgcataa

SEQ ID NO: 47290 - DNA, 594 bp, Neisseria meningitidis
ttgcggatgcgggctgtcgggcattgttggaaaagatttccaaataaagcaattgaatacaaatataaaaccgcctcctgccgtatcggttgttcagacggcataaacagagaatttatgaaaacaaatttcaaacagaaaattatcgaacaggcacgcagcgaaggcttgcaggtaaccgctttgcgcgagcaggtattagatattgtcttgcagcaaagcggcgtgattaaagcctacaacgtcttgtcgcagatgcagcagcaaagcgagggcgtgcttgcaccgcctaccgcctaccgcgcccttgatttttgggcggagcagggcgttttgcacaaagtggcggcggtcaacggctatattttgtgcagccacgcgcagcacgagtgcgacgaccattgccacgaccacgaagaagccgaagcgcaccacagcgcgtttattttggtctgcaccgaatgcggcacggcggacgagcaaaccctcagccacgagtgggcggcactgcgcgcaggcgttgccgaaagcggctttgcgctgaaagaagaacacgttgttttaactggaatctgtaaaaaatgtcagaaatga

SEQ ID NO: 47291 - DNA, 198 bp, Neisseria meningitidis; identical to SEQ ID NO: 43079

SEQ ID NO: 47292 - DNA, 147 bp, Neisseria meningitidis; identical to SEQ ID NO: 42194

SEQ ID NO: 47293 - DNA, 2853 bp, Neisseria meningitidis
atgaaactatctgaattgttcaacccgaacgaatttgccgcgcgccatttgagtttcggcgacgaagcggcgttgcttgccgctgtcggcgagaaaagcatggacgaatttgtcggcaataccgtgccgcaaagcatccgtatgccgtccgaactcgatttgcccgatgccctgaccgaagcggacgcgttggcgaaattgaaaggcattgcgtcgaaaaacgtgatcaacaagtcctatatcggtttgggctattacccgacccgcgtgccgaacgtgattttgcgcaacgtgttggaaaatccgggttggtacaccgcctacacgccgtatcaggcggaaattgcccagggtcgtttggaagcgttgttaaacttccaacaagtgtgtatcgatttgaccggtttccctgtggcgggcgcgtctttgctggacgaggcaactgctgcggctgaagcgatggcgatggcgcaccgcgtgggcaaggtgaaatccgagcgtttctttgtggatgcgcgcgtgtatccgcaaactttggacgtgatgaaaacccgcgccaaatatttcggcttcgagctggtggtcagcgattttgccaaagcggatgacggcgaatacttcggcgcgctgttccaatacgtcggcaaagacggcgatgtgcaagacttgcaggatgttatcggtcgtctgaaagcaaaaggcacgatcgttgctgttgccgccgacatcatgagcttggttttactgaaatcacctgccgaattgggagcggatattgctttgggcaacacccaacgtttcggcgtgcctatgggcttcggcgggccgcacgccgcttatttcgcgtttaaagacgcgttcaaacgttccgcccctggccgcatcatcggcgtatccaaagacgcatcaggcaaacctgccttgcgcatggcgttgtccacccgcgagcaacacatccgccgcgaaaaagccacgtccaatatttgtaccgcacaagcattgctggcgaatttggcgggtatgtatgccgtttaccacggccctgaaggcgtgaaacgcatcgccaaccgcattcacgcgctggcttctgcttttgccgatgcgctggtttcagacggcattaatgtggttcacaaagtcttcttcgataccgttaccgtcgatttcggcaacaaagagaaagcagaccaagtgtttgccgctgctttggaatcgggctataacctgcgccgcgttaacgatactcaagttgcggctgcattccacgaaacatcggcatgcgaagatttggttgatttgtaccgcgcgtttaccggcaaggatacgttcgcatttgccgatgatgtcaaaggccgtctgaacgccgaactgctgcgtcaagacgacattctgcaacatcccgtgttcaaccgttaccacaccgaacacgaaatgctgcgctacctgaaaaaactcgaagaccgcgacttggcgatgaaccgcagcatgatttcattgggcagctgcaccatgaaactcaacgcgactgcggaaatgttgccgattacttgggcggagttctccgacatccatccttacgctcctgaagcgcaaaccgccggctaccgcgaattgctcgccgatatggaaaacagcctgaaatccatcaccggttttgatgcaatttccttccagcccaactccggcgcgcagggcgaatacagcggtatgcttgccatccgccgctatcaggaagcgcaaggcgaagcgcagcgcaacatctgtctgattcccaaatccgcccacggcaccaaccccgccaccgccgccatgctcggtttgaaagtcgtcgtcgtcgataccgacgaacacggcaacgtcaacatcgacgatttgaaagccaaagccgagcaacaccgcgacgctttgtccgccatcatgattacctatccgtccacccacggcgtgtacgaagaaggcatccgcgacatctgccgcatcgtccatgaaaacggcggacaggtttacatggacggcgccaacctcaacgcccaaatcggcatcatgcagcctgccgaagtcggcgcggacgtgttgcacatgaacctgcacaaaaccttctgtatccctcacggcggcggcggtccgggcatgggtccgattggcttgaaagcccatctggctccgttcgcaccgggacacgctttgaccgacacccacagcgccagtgccgaccaaaccgccgttgctgctgcggccttcggttctgcgtccatactgccgattacttggatgtacctgaccatgatgggcaaacaaggcatggaacaggcgacacgctgggcattgctcaacgccaactacgttgccaaacgcctgagcgaagactatccgattctgtatacaggcaaaaacggccgcgtcgcgcatgaatgtatcgtcgatttgcgtccgctcaaagccgaaagcggcatcactgaaaccgacatcgccaaacgcctgatggactacggcttccacgccccgacggtttccttccccgttgccggtacgctgatgatcgagccgaccgagagcgaaagcaaagccgaactcgaccgcttcatcgccgccctgaaacaaatcaaacaggaagtgctgaaagtcgggcgcggcgaatggccgaaagaggacaatccgctggtcaacgctccgcataccgcatccgatgtaaccggcgaatgggcgcatccgtactcccgtgaagaagccgtctttccgttgccattcgtccgcgaacacaaattctggccgagcgtcaaccgtgtggacgacgtgtacggcgaccgcaatctcgtgtgcagctgcccaccgatggaaaattatgaagactga

SEQ ID NO: 47294 - DNA, 966 bp, Neisseria meningitidis; identical to SEQ ID NO: 46197

SEQ ID NO: 47295 - DNA, 2427 bp, Neisseria meningitidis; identical to SEQ ID NO: 44903

SEQ ID NO: 47296 - DNA, 780 bp, Neisseria meningitidis; identical to SEQ ID NO: 45496

SEQ ID NO: 47297 - DNA, 1065 bp, Neisseria meningitidis
atgactcttttaaaaaacgataccttcctccgcgccctgctcaaacagcccgtcgaatacacgccgatttggatgatgcgccaggcggggcgttatctgcccgaatacaaagccacacgcgcgaaagcgggcagcttcctcgatttgtgcaaaaacaccgaattggcgaccgaagttaccatccaacctttggaacgcttcgatttggacgcggcgattttgttttccgacatcctgaccgtccccgacgcaatgggcttgggactgtattttgccgaaggcgaaggcccgaaattcaaacgcgccatgcaacacgaggccgacatcgccaagctgcacgttcccgatatggaaaaactgcaatacgttttcgacgcggtaacttccatccgtaaagcattggacggccgcgtaccgcttatcggcttttccggcagcccgttcacactcgcctgttatatggtcgaaggcggcggcagcaaagaattccgcaccatcaaaaccatgatgtactcgcgccccgatttgctgcacaaaatcctcgataccaacgcccaagccgttaccgcctacctcaacgcccaaatcgacgcgggcgcgcaggcggtgcaaattttcgacacttggggcggcgtgttgagcgacgcggcgtttaaagaattcagcctcaaatacatccgccagatcgtcgccggactcaaacgcgaaagcgaaggccgccgcgtgcctgttatcgtatttgccaaaggcggcgggctgtggctggaaagtatggcccaaatcggcgcagacgcattgggcttggactggacgtgcaacatcggcgaagcacgccgccgcgtcggaaaccaagtcgccctgcaaggtaacttcgacccgtccgccctcttcggtacgccggaatccatccgcgccgaagtcgcacgcatcctagccgactacggacacggcagcggccatgtcttcaacctcggacacggcatcaaccaacatgccgaccccgaacacgccaaaatcttagtcgacaccgtacacgagctgtcgcggcagtatcacggcgggtaa

SEQ ID NO: 47298 - DNA, 2511 bp, Neisseria meningitidis
ttgtgccaccgcaccaaacacagacgaaaccgaaatgccatgaaaaaaacctgtttccactgcggtctggatgttcccgaacacctccacctgactgtccgttacgaaaacgaagaccgcgaaacctgctgcgccggttgtcaggcggtcgcacaaagcattattgacgcgggcttgggcagttattacaaacaacgcaccgccgacgcgcaaaaaaccgagctgccgccccaagaaatcctcgaccaaatccgcctgtacgacctgcccgaagtccagtccgactttgtggaaacccacggcggcacgcgcgaggcggttttaatgctcggcggcatcacctgcgccgcctgcgtctggctgatcgaacagcagcttttgcgtacagacggcatcgtccgcatcgacctcaattacagcacgcaccgctgccgcgtcgtctgggacgacggcaaaatccgcctttccgacattctgttgaaaatcaggcagataggctacaccgccgcaccctatgacgcgcaaaaaatcgaagccgccaaccaaaaagaacgaaaacaatacatcgtccgcctcgccgttgccgggctggggatgatgcagacgatgatgttcgcgctgccgacctacctttacggcggcgacatcgaacccgatttcctgcaaatcctccattggggcggctttttaatggtgctgcccgtcgtattctattgcgccgtcccgttttatcaaggcgcgttgcgcgacctgaaaaacctccgcgccggcatggatacgccgattgccgtcgccatcatcatgacctttatcgccggcgtttacagccttgcgaccaatgcggggcaggggatgtatttcgaatccatcgccatgctgctgtttttcctgctgggcggacgctttatggaacacattgcccggcgcaaggcaggcgatgctgccgaaaggctggtgaaactgatacccgccttctgccaccggatgcccggctatcctgccgtacaggatgtccgcgaagccgccgtcgtcaagctccaagcaggcgatgtggtactggtcaaaccgggcgaaaccatccccgttgacggcacggtgctggaaggaagcagtgccgtcaacgaatctatgctgaccggcgagagcctgcccgtcgccaaaatgccgtctgaaaaagtaaccgccggcacactcaacacgcaaagccccctgattatacgcaccgaccgcaccggcggcggcacgcgactgtcgcacatcgtccgcctgctcgaccgcgccttagcgcaaaaaccgcgcactgccgagttggcggaacaatacgcctcgtctttcatattcggcgaactcctgcttgccgtccccgtcttcatcggctggacgctgtacgccgacgcgcacaccgcattgtggattaccgtcgccctgctggtcattacctgcccctgcgccttatcgcttgccacgccgaccgcgctggcagcttctaccggtacgctggcgcgcgaaggtattttaatcggcggaaagcaggcaatcgaaaccctcgcccaaaccaccgacatcatcttcgacaaaaccggcacgctgacccaaggcaaacccgccgtccgccgtatctcattgttgagaggcacagacgaagcctttgttctcgcggtggcgcaggctttagaacaacagtccgaacatccccttgcccgcgccatcctcaactgccgcatttcagacggcagcgtccccgacatcgctattaaacaacgcctcaaccgcatcggcgaaggcgtgggcgcgcaactgaccgtcaacggcgaaacacaggtttgggcattgggcagggcatcctatgtcgccgaaatttcaggtaaagaaccgcaaacagaaggcggcggcagcgcggtttacctcggcagtcaaagcggtttccaagccgtgttctacctgaccgaccccttgaaagacagcgcggcggaggcggtgcggcagttggcaggcaaaaacctgaccctgcacatcctcagcggcgaccgcgaaaccgccgttgccgaaaccgcccgtgccctgggtgtcgcgcactaccgcgcccaagccatgcccgaggacaaactggaatacgtcaaagccttgcaaaaagaagggaaaaaagtgctgatgataggcgacggcatcaacgacgcgcccgttttggcgcaggcagacgtatccgccgccgcagcgggcgggacggatattgcgagggacggcgcggacattgtgttattgaacgaagatttgcgtaccgtcgcccacctgctcgatcaggcgcggcgcacccgccatattatccggcaaaacctgatatgggcgggcgcgtacaatatcattgccgtaccgcttgccgttttgggctatgtccaaccgtggatagccgcactgggtatgagcttcagttcgctggcggttttgggcaacgccctgcgccttcacaaacgggggaaaatgcagtctgaaaaaatgccgtccgaacaatga

SEQ ID NO: 47299 - DNA, 1260 bp, Neisseria meningitidis; identical to SEQ ID NO: 44493

SEQ ID NO: 47300 - DNA, 1218 bp, Neisseria meningitidis
atgacgcacaccgcatcgaaaacacccaaattttggctgaccatcaccgccgccgcattcatcctgctgattaccatcggcatgaggatgacgctcggactgttcgtccaacccgtcgtcaacaccaccgaattgagcattgcccaattcagcctcatcatcgccgttttccaactgatgtggggcatatcgcaaccattgtccggcgcgcttgccgaccgtttcggcgcgttcagggtattaagcggcggcgccgtcctgctcgtctgcgcctgcctgattgcccccaacatcccgacttattgggggctgatgattgccgtcgggctgctgctcgcattcggcaccggttccggcggtttctccatcattatggggcaggtcgccgcccaagtccccgcacacaaacgcggcttggcatccggactggtcaacgccggcggttcggcaggacaattcctgttcgcaccgctggttcaaggactcgtcgtcctgcccgaagtcggctggacgggcacattttacgtttggggcgcaatcgccctgctgattctgcctgtctcatggtggcttgccggcggcaacaacgccgcccacacccaacacgcccaagccacacacggacaaagcctcggagaagcagtcaaaaccgccttcaaaaccccaagctacatcctgctgcacctaagcttttttgcctgcggcttccacatcgcctttctcgtaacccacctacccacggaagtcgccctgtgcggactgcccgccaccgtcgcatccacagccatcgccatcatcggactggcaaacatcgccggttgtgtgttctcaggctggtgcacaagccgcgttcggggcaaatacgtcctgttcggactgtacgcctcgcgcgccgcgatgatactcatctacattttttcgcccaagaccgacctcaacttctacattttcgccgccgcactcggatttacctggctcgccaccgtcacgccgaccgcctccattaccggcaaactcttcggcacacgctacctcgccaccctgttcggactgaagatgctcagccaccaaatcggcggattcctcggctcgtacatcggcggcatcgtgattacacaattcggcgactacggctggatgtggtacgccgacgcactgctggcgggaaccgccgccctcctcaacctccccatccgcgaaccccgaaccgccgcatga

SEQ ID NO: 47301 - DNA, 426 bp, Neisseria meningitidis; identical to SEQ ID NO: 39813

SEQ ID NO: 47302 - DNA, 219 bp, Neisseria meningitidis; identical to SEQ ID NO: 46065

SEQ ID NO: 47303 - DNA, 759 bp, Neisseria meningitidis
atgattaccatccgcaacgtcagctaccgcatcggcacacgccccatcctcgacaacgtcagcctcgacatccccgaaggcggcattaccgccctcgtcggccccaacggtgcgggcaaatccaccctgttttcctttatggcgcggctgcgcccgcttgaaagcggcagcatcgcctaccgcggcaaaaaccttgccggcacccccaccgccgaactcgcccgcacgctctccatcctcacccaagaaaacagcatcatgagccgcatcaccgtgcgcgacctgctgatgttcggccgttacccctaccatcaaggcagaccgactgccgaatgccaccgtatcgttaacggtgcaatcgaagaattccacctgcaagacctctccgaccgctatctgaccgagctctccggcggccaacgccaacgcgccatgattgcgatggtgttctgccaaagcaccgactacgtccttttggacgaaccgctgaacaacctcgatatgtatcacgcccgctcgctcatgcagattctgcaaaagctcacgcgcgaacacaaacgcaccaccgtcgccgtattgcacgacatcaaccaggccgccgcctacgccgaccacgtcgtcgccatgaaaaacggcaaagccgtcctgaccggcacgcccgaagaagtgttcaccgtacacaacatcaaagaactgttcgacatggacgtggacgtactcgactacgaaggcaaaaaactcatcgtccaccatatctga

SEQ ID NO: 47304 - DNA, 798 bp, Neisseria meningitidis
atggcagcagattttaatcggacaacaggggtaattatgccttttaagccatccaaacgaatctctttattacttgtccttgccttgggcgcgtgcagcacttcctaccgcccctcgcgggcagaaaaagccaatcaggtttccaatatcaaaacccagttggcaatggaatatatgcgcggtcaggactaccgtcaggcgacggcaagtattgaagacgccctgaaatcggaccctaaaaacgagcttgcctggctggtccgtgccgaaatctatcaatacctgaaagttaacgacaaggcgcaggaaagtttccggcaagccctctccatcaaacccgacagtgccgaaatcaacaacaactacggctggttcctgtgcggcaggctcaaccgccctgccgaatctatggcatatttcgacaaagccctggccgaccccacctacccgaccccttatattgccaacctgaataaaggcatatgcagcgcaaaacaggggcaattcggattggcggaagcctatttgaaacgttccctcgccgcccagccgcagttcccacccgcatttaaagaactggcgcgcaccaaaatgctggccgggcagttgggcgatgccgattactactttaaaaaataccaaagcagggtagaagtccttcaggccgatgatttgctgctaggctggaaaattgccaaagccctcggcaacgcacaggcggcatacgaatatgaagcacaattgcaggcgaatttcccctactcggaagaattgcaaaccgtcctcatcggtcaataa

SEQ ID NO: 47305 - DNA, 2151 bp, Neisseria meningitidis
atgaaaaccccactcctcaagcctctgctcattacctcgcttcccgttttcgccagtgtttttaccgccgcctccatcgtctggcagctaggcgaacccaagctcgccatgcccttcgtactcggcatcatcgccggcggccttgtcgatttggacaaccgcctgaccggacggctgaaaaacatcatcaccaccgtcgccctgttcaccctctcctcgctcacggcacaaagcaccctcggcacagggctgcccttcatcctcgccatgaccctgatgaccttcggctttaccattttaggcgcggtcgggctgaaataccgcaccttcgccttcggcgcactcgccgtcgccacttacaccacacttacctacacccccgaaacctactggctgaccaaccccttcatgattttatgcggcaccgtactgtacagcaccgccatcatccttttccaaatcatcctgccccaccgccccgttcaagaaaacgtcgccaacgcctacgaagcgctcggcagctacctcgaagctaaagccgactttttcgatcccgacgaagccgaatggataggcaaccgccacatcgacctcgccatgagcaacaccggcgtcatcaccgccttcaaccaatgccgttccgccctgttttaccgccttcgcggcaaacaccgccacccgcgcaccgccaaaatgctgcgttactactttgccgcccaagacatacacgaacgcatcagctccgcccacgtcgattatcaggaaatgtccgaaaaattcaaaaacaccgacatcatcttccgcatccaccgcctgctcgaaatgcagggacaagcctgccgcaacaccgcccaagccctgcgcgcaagcaaagactacgtttacagcaaacgcctcggccgcgccatcgaaggctgccgccaatcgctgcgcctcctttcagacggcaacgacaatcccgacatccgccacctcggccgcctgctcgacaacctcggcagcgtcgaccaacaattccgccaactccagcacaacggcctgcaggcggaaaacgaccgcatgggcgacacccgcatcgccgccatagagaccggcagcctcaaaaacacctggcaggcaatccgtcctcagctaaacctcgaatcaggcgtattccgccatgccgtccgcctgtccctcgtcgttgccgccgcctgcaccatcgtcgaagccctcaacctcaacctcggctactggatactactgaccgcccttttcgtctgccaacccaactacaccgccaccaaaagccgcgtccgccagcgcatcgccggcaccgtactcggcgtaatcgtcggctcgctcgtcccctacttcaccccgtctgtcgaaaccaaactctggattgtcatcgccagtaccaccctctttttcatgacccgcacctacaaatacagtttctccaccttcttcattaccattcaagccctgaccagcctctccctcgcaggtttggacgtatacgccgccatgcccgtacgcatcatcgacaccattatcggcgcatcccttgcctgggcggcagtcagctacctgtggccagactggaaatacctcacgctcgaacgcaccgccgcccttgccgtatgcagcaacggtgcctatctcgaaaaaatcaccgaacgcctcaaaagcggcgaaaccggcgacgacgtcgaataccgcgccacccgccgccgcgcccacgaacacaccgccgccctcagcagcaccctttccgacatgagcagcgaacccgcaaaattcgccgacagcctgcaacccggctttaccctgctcaaaaccggctacgccctgaccggctacatctccgccctcggcgcataccgcagcgaaatgcacgaagaatgcagccccgactttaccgcacagttccacctcgccgccgaacacaccgcccacatcttccaacacctgcccgaaaccgaacccgacgactttcagacagcactggatacactgcgcggcgaactcgacaccctccgcacccacagcagcggaacacaaagccacatcctcctccaacagctccaactcatcgcccggcagctcgaaccctactaccgcgcctaccgacaaattccgcacaggcagccccaaaacgcagcctga

SEQ ID NO: 47306 - DNA, 153 bp, Neisseria meningitidis
atgtctaacaatcactcatttttcagaccagaagtctttgtagctcaacggaacaagtggacaggaccagtaggctgggttggcgcaattggagctggtattttctctgctgctggcggatacaatatcggtcgtggcatgatgaagccataa

SEQ ID NO: 47307 - DNA, 924 bp, Neisseria meningitidis; identical to SEQ ID NO: 39986

SEQ ID NO: 47308 - DNA, 360 bp, Neisseria meningitidis; identical to SEQ ID NO: 39367

SEQ ID NO: 47309 - DNA, 777 bp, Neisseria meningitidis; identical to SEQ ID NO: 39763

SEQ ID NO: 47310 - DNA, 1104 bp, Neisseria meningitidis
atgaatacgacagcaaacccttccaatatcatcgtcgggctctccggcggtgtcgattcttccgtaaccgccgccctgctcaagcagcagggttatcaagtgcgcggtgtgttcatgcagaactgggaagacgacgacaacgacgaatattgcagcatcaaacaggattcgttcgatgccatcgccgttgccgatattatcggcatcgacatcgacatcgttaatttcgccgcgcaatataaagacaaagtctttgcttattttcttcaggaatacagtgcggggcgcacgccgaatcccgatgtgttgtgcaacgccgaaatcaaattcaaatgctttttggattacgccgtagggcagggcgcggataccatcgccaccggacactatgcgcgcaaagaagtccgcaacggcgtgcattacctgctcaaaggtttggatcgaaacaaagaccaaagctatttcctctaccgcctcaagcctttccaactcgagcgcgcgatttttccgttgggcggtttggaaaaacctgaagtccgccgccttgccgccgaatttaatttgccgaccgccgccaaaaaagacagcacgggcatctgcttcatcggcgaacgcccgtttcgcgagtttctgcaaaaatacctgccgaccgacaacggtaaaatggttacgcccgaagggaaaaccgtcggcgaacacgtcgggctgatgttctacacgctcggacagcgcaaaggtttgggcatcggcggcgcgggcgaaccgtggtttgttgcggctaaagatttgacgaaaaacgaactgattgtcgtgcaaggacacgaccatccgctgctctatacccgcagccttgtgatgaacgatttgagtttcacgctgcccgaacgcccgaaggcaggacgctatacctgcaaaacgcgttaccgtatggcggacgcgccttgtgagttgcgctatttggatgaagaaaccgccgagctggtgtttgacgaaccgcaatgggcggttacgccgggccagtctgccgtgctgtacgacggcgatatctgtttgggcggcggcatcatccaaacgaccgacaaacccgtcatcatcacgcgataa

SEQ ID NO: 47311 - DNA, 1197 bp, Neisseria meningitidis; identical to SEQ ID NO: 44474

SEQ ID NO: 47312 - DNA, 819 bp, Neisseria meningitidis; identical to SEQ ID NO: 37573

SEQ ID NO: 47313 - DNA, 606 bp, Neisseria meningitidis
atgaagaaaatcggactgttcggcggcactttcgacccgatacacaacgggcatctccacatcgcccgcgcctttgccgacgaaatcggcttggacgcggttgttttcctgccggcaggcggcccgtatcacaaagacgcagcctccgcttccgccgccgaccgccttgccatggtcgaactggcgacggcagaagacgcgcgttttgccgtcagcgattgcgacatcgtccgagaaggtgcaacctatacttttgataccgtccaaatcttccgccagcagttcccatccgcgcaactctggtggctgatgggcagcgacagcctgatgaagctgcacacatggaaaaaatggcagatgctcgtgcgcgaaaccaatatcgccgtcgccatgaggcagggcgacagcctgcaccaaaccccgcgcgaactgcacgcgtggctgggcaagtcccttcaggacggcagcgtccgcatcttgtccgccccgatgcataatgtgtcgtcaacggaaatccgccgcaaccttgccagccaaggcgtttcagacggcatcccgcctgccgccgcacgctacatccgcgaacacggtttgtatgaaaaataa

SEQ ID NO: 47314 - DNA, 654 bp, Neisseria meningitidis
atgaagataacgcactgcaaattaaagaaaaaagtacagaaagagctgctccgtttttttgtactcgaagttaccgcccgttctgccgccgatattttgggtatccatcccaattcggcagcactgttctaccgtaaaatccgcacggttatcaaccatcatttggccttggctgccgatgaggtttttgagggccctgtcgagccggacgaaagcgatttcggcggacggcgtaaaggcagacgtggtcgcggtgcggcaggaaaagtggttgtcttcggcattctgaaacgcaacggacgggtctataccgttgtggtggataatgccaagtctgaaacgttactccctgtcatcaagaagaaaatcatgccggacagcattgtttataccgatagtctgagcagctgcgacaagttggacgtgagcggttttatccattaccgcatcaaccattccaaggaatttgcagaccgtcaaaaccacattaacggcattgagaacttttggaatcaggcaaaacgcgtcttgcgcaaatacaacgaaattgatcgtaaatctttcccgctgttcttgaaagaatgcaaatttcggtttaacttcggcacaccgtcccgacagctaaaaattttgcgggattggtgtggaatttag

SEQ ID NO: 47315 - DNA, 1254 bp, Neisseria meningitidis
atgcagacttacctcgtcggcggcgccgtccgcgattatcttttgggcttgcccgtcaaagaccgcgattgggtggtcgtcggcgcagacgcacaaaccatgctggcgcaaggcttccagccggtcggcaaagattttcccgtgtttctccatcccgaaacgcacgaagaatacaccctcgcccgcaccgagcgcaaaaccgccaaaggttacgtcggtttcagtttccacgccgacaaagacgttacgctggagcaggacttgatgcgccgcgacctgaccatcaacgcgatggcgcaagatgcggacggcaagattatcgaccctttcggcggacaacgggatttggcggcaggcattttgcgccacgtttccccggccttcgccgaagaccccgtccgcatcctgcgtactgcccgctttgccgcgcgttacaggtttgaaatcgccgaagaaaccataaagctgatgcggcagatggtggaaaacggcgaagcggacgcattggttgccgaacgcgtctggcaggagtttgcgaaaggtttgatggaaaaaaatccgcgcaaaatgattgaagtgttgcgcgaatgcggcgcgctcaaagtcttgctgcccgaagtcaatgccctcttcggcgtgccgcaacgcgccgactaccatcccgaaatcgacagcggcatccataccctgatgacgctgcaacgcgccgccgatatgggtttgagcctgcccgaacgctatgccgccctgctgcacgacttgggcaaagccaaaacaccgtccgacatcctgccgcgccaccacggacacgacctcgccggtgtcgaacccgtgcgcgaagtcaatcagcggctgcgtgcgccgaaacattgcgccgagcttgccgaattggtttgccgttggcacattattttccaccaagtcggacagcttaaaagccaaaccattctgaacgtattgaaaaaaaccgatgccttccgccgtcccgaacgctttcagacggcattgaacgtctgcattgccgacacgcaaggccgtctgaaccgcgaacacacgccctacccgcaacgcgcacactggttcgccctgctcgaagccgccaatcaggcggattcgggcaaaatcgccgccgaatgccgcgcgcagggaaaagcgcaccttatcgccgaacaaatcgaccgggcgcggctggcacaaatcgccccattgcaaaaaacgtttcgagcggcgcaagacaaaacagaaaaacattaa

SEQ ID NO: 47316 - DNA, 1053 bp, Neisseria meningitidis
ttgggttatactgtcgcccgaattttaagacgtattccgaatgctgggaatcctaccatgttgagaaaattgttgaaatggtctgccgtttttttgaccgtatcggcagccgttttcgccgcgctgcttttcgtccctaaagacaacggcagggcataccgaattaaaattgccaaaaaccagggtatttcgtcggtcggcaggaaacttgccgaagaccgcatcgtgttcagcaggcatgttttgacggcggcggcctacgttttgggtgtgcacaacaggctgcatacggggacgtacagactgccttcggaagtgtctgcttgggatatcttgcagaaaatgcgcggcggcaggccggattccgttaccgtgcagattatcgaaggttcgcgtttttcgcatatgaggaaagtcatcgacgcaacgcccgacatcgaacacgacaccaaaggctggagcaatgaaaaactgatggcggaagttgcccctgatgccttcagcggcaatcctgaagggcagtttttccccgacagctacgaaatcgatgcgggcggcagcgatttacggatttaccaaaccgcctacaaggcgatgcaacgccgcctgaatgaggcatgggaaagcaggcaggacgggctgccttataaaaatccttatgaaatgctgattatggcgagcctggtcgaaaaggaaacggggcatgaagccgaccgcgaccatgtcgcttccgtcttcgtcaaccgcctgaaaatcggtatgcgcctgcaaaccgacccgtccgtgatttacggcatgggtgcggcatacaagggcaaaatccgtaaagccgacctgcgccgcgacacgccgtacaacacctacacgcgcggcggtctgccgccaaccccgattgcgctgcccggcaaggccgcgcttgatgccgccgcccatccgtctggcgaaaaatacctttattttgtttctaaaatggacggtacgggcttgagccagttcagccatgatttgaccgaacacaatgccgccgtccgcaaatatattttgaaaaaataa

SEQ ID NO: 47317 - DNA, 2385 bp, Neisseria meningitidis
atggccgacaactacgtaatctggtttgaaaacctgcgtatgacagatgttgaacgcgtgggcggtaaaaacgcctcgctgggcgaaatgatcagtcagctgaccgaaaaaggcgttcgcgtccccggcggctttgccaccacagccgatgcctaccgcgcattcctcgcacacaacggtctgagcgaacgcatttccgccgcactggcaaaattagatgtcgaagacgttgccgaactggcacgcgtcggcaaagaaatccgccaatggattttggacacgcccttccccgaacagctcgatgccgaaatcgaagcggcatggaacaaaatggttgccgatgccggcggtgcggacatttccgttgccgtacgctcttccgcaaccgccgaagacctgcccgacgcatcatttgccggccaacaggaaaccttcttgaacatcaacggattggaaaacgttaaagaagcgatgcaccatgtattcgcctccctgtacaacgaccgcgccatttcctaccgcgtccacaaaggcttcgaacacgatatcgtcgccctttccgccggcgttcaacgcatggtgcgttccgacagcggcgcatccggcgtgatgttcactctcgacaccgaatccggctacgatcaagtcgtctttgttacctcctcttacggtctaggtgaaaacgtcgtccaaggcgcggtcaaccccgacgaattctatgtattcaaacccacactgaaagcaggcaaacccgccatcctgcgtaaaaccatgggttcaaaacacatcaaaatgatttttaccgacaaagcagaagccggcaaatcggtaaccaacgtcgatgtccccgaagaagaccgcaaccgcttctccattaccgacgaagaaatcaccgagttggcgcattacgcactgaccatcgaaaaacactacggccgcccgatggatatcgaatggggacgcgacggcttggacggcaaactctacatcctgcaagcccgtcccgaaaccgtaaaatcccaagaagagggcaaccgcaacctgcgccgcttcgccatcaacggcgacaaaaccgtattatgcgaaggccgcgccatcggtcagaaagtcggtcagggcaaggtgcgcctgattaaagatgcttccgagatggattccgtcgaagccggcgacgtactcgttaccgacatgaccgacccagattgggaaccggtgatgaaacgtgcttccgccatcgtgaccaaccgcggcggccgtacctgccacgccgccatcatcgcgcgcgaactgggcattcctgccgttgtcggctgcggcaatgcaaccgaattgctgaaaaacggtcaagaagttaccgtatcctgtgccgaaggcgataccggcttcatctatgccggcctgttggacgtacagattaccgatgtcgccttggacaatatgcccaaagcacccgtcaaagtcatgatgaacgtcggcaaccccgaactcgcattcagcttcgccaacctgcccagcgaaggcatcggcttggcgcgtatggaatttatcatcaaccgccaaatcggtatccacccgaaagccttgttggaatttgacaaacaagacgacgaattaaaagcggaaattacccgccgtatcgccggttacgcgtcccctgtcgacttctacgtcgataaaatcgccgaaggcgtggcgacattggccgcatcggtttatccgcgtaaaaccatcgtccgtatgtccgacttcaaatccaacgaatacgccaacctagtcggcggcaacgtatacgaaccgcatgaagaaaacccgatgttgggcttccggggcgcggcgcgttatgtcgccgacaacttcaaagactgtttcgccttggaatgcaaagccttgaaacgcgttcgtgacgaaatgggtctgaccaacgttgaaatcatgattccgttcgtccgcactttgggcgaagccgaagccgttgtcaaagccctgaaagaaaacggcttggaacgcggcaaaaacggcctgcgcctgattatgatgtgcgagctgccgagcaacgcggtattggcggaacaattcctgcaatacttcgacggcttctccatcggctcgaacgacatgacccaactgaccctcggtctcgaccgcgacagcggcttggtatccgaatcgtttgacgaacgcaaccctgccgtcaaagtgatgctgcatcttgccatctccgcctgccgcaagcagaacaaatatgtcggcatctgcggtcaaggcccgtccgaccatccggacttcgccaaatggctggttgaggaaggcattgaaagcgtttccctgaacccggataccgtcatcgaaacttggctatatttggcgaatgaattgaacaaataa

SEQ ID NO: 47318 - DNA, 1539 bp, Neisseria meningitidis
ttgatttcggttgcggcagcattgctcggcgttgctttgggtacaccttattatttgggtgtcaaagccgaagaaagcctgacgcagcagcaaaaaatattgcaggaaacgggcttcttgaccgtcgaatcgcaccaatatgagcgcggctggtttacctctatggaaacgacggtcatccgtctgaaacccgagttgctgaataatgcccgaaaatacctgccggataacctgaaaacagtgttggaacagccggttacgctggttaaccatatcacgcacggcccttttgccggcggatttggcacgcaggcgcacattgaaaccgagttcaaatacgcgcctgaaacggaaaaagttttggaacgcttttttgggaaacaagctccggtttcccttgccaataccgtttattttaacggcagcggtaaaatggaagtcagtgttcccgccttcgattatgaagagctgtcgggcatcaggctgcattgggaaggattgacgggaaaaacggtttatcaaaaaggtttcaaaagctaccgcaacagctatgatgcgcccttgttcaaaatcaagctggcagacaaaggcgatgccgcgtttgaaaaagcgcatttcgattcggaaacttcagacggtatcaatccgcttgctttgggcagcagcaatctgaccttggaaaaattctccctagaatggaaagagggtgtcgattacaacgtcaagttaaacgaactggtcaatcttgttaccgatttgcagattggcgcgtttatcaatcccaacggcagcatcgcaccttccaaaatcgaagtcggcaaactggctttttcaaccaagaccggggaatcaggctcatttatcaacagtgaagggcagttccgttttgacacgctggtgtacggcaatgaaaaatacggcccgctggacatccatatcgccgccgaacatctcgatgcttctgccttaaccgtattgaaacgtaagtttgcacaaatttccgccaaaaaaatgaccgaggaacaaatccgcaatgatttgattgccgccgtcaaaggcgaggcttccggactgttcaccaacaatcccgtattggacattaaaacttttcgtttcacacagccgtcgggaaaaatcgatgtgggtggaaaaatcatgtttaaagacatgaagaaggaagatttgaaccaattgggtttgatgctgaagaaaaccgaggcagacatcagaatgagtattcctcaaaaaatgttggaagacttggcggtcagtcaggcaggcaatattttcagcgtcaatgccgaagatgaggcggaaggcagggcaagtcttgacgacatcaacgagaccttgcgcctgatggtggacagtacggttcagagtatggcaagggaaaaatatctgactttgaacggcgaccagattgatactgccatttctctgaaaaacaatcagttgaaattgaacggtaaaacgttgcaaaacgaaccggagccggattttgatgaagccggtatggtttcagagccgcagcagtaa

SEQ ID NO: 47319 - DNA, 1809 bp, Neisseria meningitidis
atgcgtaccaactattgcggtctgatcagtgagcaatacttagaccaaaccgttaccgtcaaaggctgggtacaccgtcggcgcgaccacggcggtgtgatttttatcgacctgcgcgaccgcgaaggcatcgtccaagtcgtgattgaccccgacacgcccgaagcgtttgccgctgccgattccgctcgcaacgaatacgttttgagcattaccggccgcgtacgcaaccgtcccgaaggtacgaccaacgacaaaatgatttccggcaaaatcgaaatccttgccaaagaaatcgaagtcttgaacgccgccgccacgccgccgttccaaatcgacgatgaaaacatcagcgaaaacgttcgcctgaccaaccgcgttatcgacttgcgccgtccggtgatgcaacgcaacctgcgcctgcgttatcaagtcgctatgggcgttcgccgttatctggacgcgcaaggcttcatcgacatcgaaacgccgatgctgacccgctccactccggaaggcgcgcgcgactacctcgtgccgagccgcgttcatccgggcgagtttttcgcgctgccgcaatcaccgcaattatttaagcaactgttgatggtggccggtttcgaccgttactatcaaattaccaaatgtttccgtgacgaagacttgcgtgccgaccgtcagcctgaattcactcaaatcgacttggaaacctcgttcttgaacgaggatgaaattatggacatcaccgaaggtatggcgaaacaagtcttcaaagatgctttaaacgtagatttaggcgacttcccgcgtatgccttacgccgaagccatgttctactacggctctgacaaaccggatatgcgtatcaacttgaaatttaccgagttgaccgacctgatgaaaacggaagaattcaaagtcttccgtggcgcggcagatatgaaaggcggccgtgtagtcgccctgcgcgtaccgaacggcgcaaaattcagccgcaaagaaatcgacgaatacactaaatttgtcggcatctacggcgcgaaaggtctggcatacatcaaagtaaacgatgtgggcaacctctcaaacggcgaagacagcggcctgcaatctccaatcgtaaaattcctgtctgagaatgccctgaaagaaatcattgcgcgtaccggcgcggaaaacggcgacatcatcttcttcggtgcggacaaagccaaagtcgtgaacgaagccatcggcgcattgcgtatcaaagtcggcttggaacacggcgcggaaaacggctatttcacagacgaatggaaacctttgtgggttgtcgacttcccaatgtttgaatacgacgaagaagccgaccgctacgttgccgtacaccatccgtttactgcgccaaaagaaggtcatgaagacctgatggtttccgacccggcaaattgtttggcacgtgcctacgacatggtattgaacggctgggaaatcggcggcggctctatccgtatccaccgtgcagacgtacaagagaaagtgtttgccgcgctgaaaatcagccctgaagagcaacaagagaaattcggcttcctcttggacaacctgaaattcggtgcgcctcctcacggcggccttgcattcggcctcgaccgtttggttaccctgatgaccggcgccgaatctatccgcgacgtgattgccttcccgaaaacacaacgtgcccaatgcctgctgaccaacgcgcccaacagcgtggacgacaagcagttgcgtgaattgagcctgcgcctgcgccaaaaggcggctgaaaccaaagaagcataa

SEQ ID NO: 47320 - DNA, 729 bp, Neisseria meningitidis
atgataaaacttactgcacaacaaatatttgataagttgctggatgaagaaaaaatcttatcggccaatggtcaaattagatttttcttgggcgatgtggatattatcgtcaaacaaaaagatgttgtcggcaacatcattcaggaatggctcggcggattgagaaaaagggaaattgaatttgatgtttcaaccaatacccaaatgcctcccgatttctttttaaataaaaaagaccgcagcagagaattgttggaagtaaaggcgttcaaccgaaataccggcccgggttttgatattgcagattttaaaatgtattctgatgaaatcattcataagccctatatgctggatgtagactatttaatattcggttacgatatggacgacaacggcaatgtaaccatcaaggatttatggcttaaaaaagtatggcaaattacgagaagcatggatgggtgggcaattaatcttcaagtcaaaaaaggcgtggtgcataaaatccgcccgggtgtttggtacagcataaataaaaagaatatgcctatgtttgaatgcttggaagattttgtttccgcaattgaagaaaccgtttatcaaaacccggcaacacggcataacgcatccttatggaaaaagaaatttgaggaagcctataaaaaacactacaaccgatcgatttccatacctcgttggcacgaaattgcacacaaatacaaaaagaaataa

SEQ ID NO: 47321 - DNA, 1428 bp, Neisseria meningitidis
atgaacgagaactttaccgaatggctgcacggctgggtcggcgccatcaacgatccgatgtggtcatacttggtttatatgcttttgggtacggggcttttcttcaccgtaaccacgggctttgtccaattccgcctgttcgggcgcagcatcaaagaaatgctcggcggccgcaaacagggggacgaccctcacggcatcacgccgtttcaggcatttgtaaccggccttgccagccgcgtgggcgtgggcaatatcgcgggcgtggcaatcgccatcaaagtcggcgggccgggcgcggtgttttggatgtgggtaaccgccttaatcggtatgagttcggcgtttgtcgaatcttcgctggcgcagctctttaaagtccgcgactacgacaaccaccatttccggggcggccctgcctactacatcactcaagggctggggcagaaatggctgggcgtgttgttcgccctgagcctgattttctgtttcggctttgtgtttgaagcggttcagaccaataccattgccgataccgtcaaagcggcgtggggttgggagcctcattatgtcggcgtcgccctggtgattttaaccgcgccgattatcttcggcggcatcaggcgcatatctaaagcggcggaaatcgtcgtccccctgatggcggttttgtacctctttatcgcgcttttcatcattttgaccaatattccgatgattccggacgtgttcggtcagattttttcgggcgcgttcaaattcgacgcggcagcaggcggcttactcggcggtctgatttcgcaaacgatgatgatgggcatcaaacgcggcctgtattccaacgaggcgggtatgggttccgcgccgaacgccgccgccgccgccgaagtgaaacaccctgtttcgcaaggtatgattcaaatgctgggcgtgtttgtcgataccatcatcgtttgttcttgcaccgccttcatcatcttgatttaccaacagccttacggcgatttgagcggtgcggcgctgacgcaggcggcgattgtcagccaagtggggcaatggggcgcgggcttcctcgccgtcatcctgtttatgtttgccttttccaccgttatcggcaactatgcctatgccgagtccaacgtccaattcatcaaaagccattggctgattaccgccgttttccgtatgctggttttggcgtgggtctatttcggcgcggttgccaatgtgcctttggtctgggatatggcggatatggcgatgggcattatggcgtggatcaaccttgtcgccatcctgctgctctcgcccttggcgtttatgctgctgcgcgattacaccgccaagctgaaaatgggcaaagaccccgagttcaaactttccgaacatccgggcctgaaacgccgtatcaaatccgacgtttggtaa

SEQ ID NO: 47322 - DNA, 201 bp, Neisseria meningitidis; identical to SEQ ID NO: 38240

SEQ ID NO: 47323 - DNA, 1593 bp, Neisseria meningitidis
atgagggcgttcgccgtccgcaaccataaaggaagtttcatgaaccggacttatgccaatttctacgaaatgctcgccgccgcctgccgcaaaaacggcaacggcacggcagtgttcgacggcaaggaaaaaaccgcctaccgcgcgctcaagcaggaggccgaagccgtcgcggcgtatctgcaaaatatcggcgtgaagttcggcgacacggtcgcgctggcggtttccaattccacagaatttattaccgcctatttcgccgtctccgccatcggcgcggtcgccgtaccgatgaacacatttttgaaaaacagcgaatacgcgtatatcctgaacgactgcaaggcgcgcttcctgttcgcctcggcgggcctgtcaaaagagttggcgggcttgaaggcgcaaacgcccgtcgaaaaaatcatttggacggacaaaagccgtccggccggcgaaatggcggaaggcgatgccttttttgaagacgtgcgccgcttccccgaaaaacccgacttgggccgccaaccccggataaatgatttggcacacatcatctacacctccggcacgacggggcatcccaaaggcgcgctaatcagttacgccaacctgttcgccaacctgaacggcatcgaacgcatctttaaaatctccaagcgcgaccgctttatcgttttcctgccgatgttccacagcttcacgctgacggctatggtgctgctgccgatttatatggcgtgttcgattattttggtcaaatccgttttcccgttttccaacgttttgaaacaggccctgctcaaacgcgcgaccgtgtttttgggcatacccgcgatttacaccgcaatgagcaaggcgaaaatcccttggtatttcagatggttcaaccgcattcgcctgtttatcagcggcggtgcgcctttggcggaacaaaccatcctcgatttcaaagccaagttcccccgcgccaaattgctggaaggctacggactgagcgaagcctctcccgtcgtcgccgtcaatacgcccgagaggcaaaaagcccgcagcgtcggcatccccctgcccggtttggaagccaaagccgtcgatgaagaattggtcgaagtgccgcgcggcgaagtgggcgaactgatcgtcaggggcggttcggtgatgcggggctacctcaatatgcctgccgccaccgatgaaaccatcgtcaacggctggttgaaaacgggcgatttcgttaccatagacgaagacggctttatctttatcgtcgaccgcaaaaaagatttgattatttccaaaggtcaaaacgtctatccgcgcgaaatcgaagaagaaatctacaaactcgatgccgtcgaagccgctgccgtcatcggcgtgaaagaccgttatgccgacgaggaaatcgtcgccttcgtccaattgaaggaaggtatggatttgggcgagaacgaaatccgccgccacctgcgtaccgtgctggcaaatttcaaaatccccaaacaaatccactttaaagacgggctgccgcgcaacgctacgggcaaggtattgaaacgggtgttgaaggagcagtttgacggaaacaaatga

SEQ ID NO: 47324 - DNA, 660 bp, Neisseria meningitidis; identical to SEQ ID NO: 44330

SEQ ID NO: 47325 - DNA, 687 bp, Neisseria meningitidis
atgacggtgttgcaagaacgttatcgggaggtgtccgaccgtattggaaaattggttctgcaggcgggaaggaagccgcattccgtcagcctgattgccgtcggtaagactttcccttcagacggcatccgcgaagtttacgccgccggacagcgtgatttcggcgagaactatattcaggagtggtacggcaaaacggaagagttggcggatttgaccgacatcgtgtggcacgtcatcggcgatgtgcagtccaacaaaaccaagtttgtcgccgaacgcgcgcattgggtgcataccgtatgccgtctaaagaccgccgtccggctgagtgggcagcgtccttcttcaatgccgcctttgcaggtgtgtatcgaggtgaatattgcaggcgaggcggcaaagcacggtgttgctcccgaagaagcggtcgcgcttgcggtcgaagtggcgaagttgcccaaccttgtcgtgcgcggactgatgtgcgttgccaaagccaacagcagtgaaacggagttgaaaacccagtttcagaccatgcaaaagttgcttgccgacctcaatacggctggcgttaaggcggacgtgctgtctatggggatgtcggacgatatgcctgccgccattgagtgcggtgcgacacacgtccgtatcggcagcgcgattttcgggaaaaggggatga

SEQ ID NO: 47326 - DNA, 252 bp, Neisseria meningitidis; identical to SEQ ID NO: 37103

SEQ ID NO: 47327 - DNA, 231 bp, Neisseria meningitidis
atggaaacattagacgaacgaataaaaaatttaggaaaatctcttgaagatagaattgacgctaatctaattgatgccgcactagagtacattactttttcagaacgtttgctagcttttgaaacgctatgtgattatatagaagatttcaatatccagcttacggaaaaagaatcccaagaaatctcttttattaataaggaatttggaattgaaagtacatcagattaa

SEQ ID NO: 47328 - DNA, 318 bp, Neisseria meningitidis; identical to SEQ ID NO: 46008

SEQ ID NO: 47329 - DNA, 822 bp, Neisseria meningitidis
atgtctttgcaaaacatcatcgaaaccgcctttgaaaaccgcgcggacatcaccccgaccaccgttactcccgaagtcaaagaagccgtgttggaaaccatccgccaactcgattccggcaaactgcgcgttgccgaacgcttgggcgtgggtgagtggaaagtcaacgaatgggcgaaaaaagccgtgttgctgtccttccgcatccaagacaacgaagtcctcaacgacggcgtgaacaaatacttcgacaaagtgccgaccaagtttgccgactggtctgaagacgagttcaaaaacgcaggcttccgcgccgttccgggtgcggttgcccgacgcggcagctttgtggcgaaaaatgtcgtgctgatgccgtcttacgtcaacatcggcgcatacgtcgacgaaggcgcgatggttgatacttgggcgactgtcggctcttgcgcgcaaatcggtaaaaacgtgcacttgagtggcggcgtcggtatcggcggcgtactcgaacccctgcaggccgcccccaccatcattgaagacaactgcttcatcggtgcgcgttctgaaatcgttgagggcgtgattgtcgaagaaggcagcgtgatttcgatgggcgtgttcatcggtcaatccaccaaaatcttcgaccgcaccaccggcgaaatctaccaaggccgcgtaccgacaggttcggtcgtcgtgtccggcagtatgccttccaaagacggcagccacagcctttactgcgccgtcatcgtcaaacgcgtggacgcgcaaacccgtgcgaaaaccagcgtgaacgaattgttgcgcggcatctga

SEQ ID NO: 47330 - DNA, 867 bp, Neisseria meningitidis
gtgccatccgaaccgggtaaaaatatgattcaacacgcaggcttgggctaccgccgcgacttggcggaagactttctctcgctttccgaaaacagcccgatatgctttatcgaagccgcaccggaaaactggctgaaaatgggcggctgggcgcgcaaacagtttgaccgtgtggcggaacggctgccgctggcgttgcacggattgtctatgtcgctgggcgggcaagcaccgctggatactgatttgatagacggcatcaaagaaatgatgcgccgttacgattgcacgtttttctccgaccatttgagctactgccacgacggcggtcatctttacgatttgttgccgctgccctttaccgaggaaatggtgcatcatacggcgcggcgtatccgcgaagtgcaagaccgtttgggctgccgcatcgccgtggaaaacacgtcctactatctgcattccccgcttgccgagatgaacgaggtcgagttcctcaacgccgtcgcacgtgaggccgattgcggcattcatctggatgtgaacaatatctacgtcaacgccgtcaatcacggcctgttgtcgccggaggcttttttgaaaaacgttgacgcagatcgcgtgtgctatatccatattgccggacatgacgtggaaacgccggaattgttgattgatacacatggcgcggcagttttgccgactgtttgggacttgctcgaacttgcctatgccaagctgccgacgattccgcccaccctgttggaacgcgattttaatttcccgccttttgccgaactcgaagccgaagtcgccaaaatcgccgattatcaaacgcgtgccggaaaggaataccgccgtgcagcctga

SEQ ID NO: 47331 - DNA, 432 bp, Neisseria meningitidis; identical to SEQ ID NO: 45320

SEQ ID NO: 47332 - DNA, 1266 bp, Neisseria meningitidis; identical to SEQ ID NO: 45103

SEQ ID NO: 47333 - DNA, 1200 bp, Neisseria meningitidis
atgtccgaccaactcattcttgttctgaactgcggcagttcatcgctcaaaggcgccgttatcgaccgcaaaagcggcagcatcgtcctaagctgcctcggcgaacgcctgaccacgcccgaagccgtcattacgttcagcaaagacggcaacaaacgccaagttcccctgagcggccgaaattgccacgccggcgcggtgggtatgcttttgaacgaactggaaaaacacggtctgcacgaccgcatcaaagccatcggccaccgcatcgcccacggcggcgaaaaatacagcgagtctgttttgatcgaccaggccgtaatggacgaactcaatgcctgcattccgcttgcgccgctgcacaaccccgccaacatcagcggcatcctcgccgcgcaggaacatttccccggtctgcccaatgtcggcgtgatggatacttcgttccaccaaaccatgccggagcgtgcctacacttatgccgtgccgcgcgagttgcgtaaaaaatacgctttccgccgctacggtttccacggcaccagtatgcgttacgttgcccctgaagccgcacgcatcttgggcaaacctctggaagacatccgcatgattattgcccacttaggcaacggcgcatccattaccgccatcaaaaacggcaaatccgtcgataccagtatgggtttcacgccgatcgaaggtttggtaatgggtacacgttgcggcgacatcgatccgggcgtatacagctatctgacttcccacgccgggatggatgttgcccaagtggatgaaatgctgaacaaaaaatcaggtttgctcggtatttccgaactttccaacgactgccgcaccctcgaaatcgccgccgacgaaggccacgaaggcgcgcgcctcgccctcgaagtcatgacctaccgcctcgccaaatacatcgcttcgatggctgtggcctgcggcggcgttgacgcactcgtgttcaccggcggtattggcgaaaactcacgtaatatccgagccaaaaccgtttcctatcttgatttcttgggtctgcacatcgacactaaagccaatatggacaaacgctacggcaattcgggtattatcagcccgaccgattcttctccggctgttttggttgtcccgaccaatgaagaactgatgattgcctgcgacactgccgaacttgccggcatcttgtag

SEQ ID NO: 47334 - DNA, 678 bp, Neisseria meningitidis; identical to SEQ ID NO: 44616

SEQ ID NO: 47335 - DNA, 1485 bp, Neisseria meningitidis
atgccgtataatcaagcccctgattttttatgcgccgacactatgcatccgacctattccgccgtacaggcgcggctgctcgaagccaaccgcctttcccccgaactgctcgccaaaagcctgtgcatcatcggcgcgcaccacgtcgattacgccgacatctactgccagcgcaccgcttatgaaagctggcatttggaagagggcatcgtcaaatcgggcagcttccaaatcaatcagggcgtgggcgtgcgcgccgtttcgggcgacaaaaccgcctttgcctacgccgacagcctgtgcatcgattcgataaaccgttccgcccgcgccgtccgcgcgattggggcggcaggcggcaaggtgtccgccaaaatgccgtctgaaacgcgcggcaagccggtttgttccgcgtccgaccccattgccggcctcgattccgccgccaaagtcgcgctgttgaacaaagtggaagcaatcgccaaagccgccgatccgcgcatcgtgcaagtgatggccggtttgacctgcgaatacgatatggtttacctcgcccgtctggacggcaaacacgccgccgacatccgcccgatggtgcgcctgaacgttaccgtcatcgccaaacagggcgaacgccgcgaacagggcagcgcgggcggcggcggacgctacgacttggcttatttcgatgaaaacttggtgcggcagtttgtcgatgccgccgtcaaacaggcactcaccaacctcgaatcccgccccgcgcccgccggcgaaatgaccgtcgttttgggcaacggctggccgggcgtgttgctgcacgaagcggtcggacacggtttggaaggcgatttcaaccgcaaggggaccagcgtcttttccggcagaataggcgagcgcgtcgccgccaaaggcgttaccgtcgtcgatcagggcgatattgccggccggcgcggttcgctcaacatcgacgacgaaggcaacgaaacccgccgcaccgtattgattgaagacggcattttagtcggctatatgcaggacgaaaccaatgcccgcctgacgggtacgcaatccaccggcaacggccgccgcgaaagctacgcctccgtcccgatgccgcgcatgaccaatacctttatggaaaatggcagctatgagccggaagaaatcatcgcgtccatcgacaaaggcatttacgccgtcaactttggcggcggacaggtggacattaccagcggcaaatttgtgttcagcgcgtccgaagcatggtgggtggaaggcggcaggctgcaataccccgtcaaaggcgcgaccattatcggcaacgggcccgaagtgctgaaacacgtttcgatgataggcaacgataccgcgttggacagcggtgtcggcgtgtgcggcaaagaagggcagagcgtccccgtcggcgtggggcagccgaccctgcgtatcgatgccgggctgaccgtcggcggcagcgcaatctga

SEQ ID NO: 47336 - DNA, 1641 bp, Neisseria meningitidis
atgactgacaacagccctcctccaaacggacacgcccaagcacacgtccgcaaaaacaacaccttcctctctgccgtctggctggttccgctgatcgcgctgattgccggcggctggctgtggattaaggaaatccgcaacagggggcctgtggttacgctcttgatggacagcgcggaaggcattgaggtcaacaatacggtcatcaaagtattgagcatcgatgtcggacgcgttacccgaatcaaactgcgcgacgaccaaaaaggcgtggaagtaaccgcccaactcaatgcggacgtatccggcctcatccgcagcgatacccagttttgggtggtcaagccgcgtatcgaccaaagcggcgtaaccggtttgggtacgctgctttcgggttcgtacatcgcttttacacccggcaaaagcgacgaggcaaaagacgtgttccaagtgcaggacattccgcccgttaccgccatcgggcaaagcgggctgcgcttgaatttgattggtaaaaacgaccgcatcctcaacgtcaacagccctgttttgtatgaaaactttatggtcgggcaagtcgaaagcgcgcatttcgacccgtccgaccaaagcgtgcattacaccatcttcatccaaagccccaacgacaaactgattcattccgccagccgtttttggctggaaagcggcatcaatatcgaaaccacaggcagcggcatcaaactcaattccgcccctctgcctgccctgctgtcgggcgcgatttcatttgattcgccgaaaaccaaaaacagtaaaaacgtcaaaagcgaagacagcttcacgctttacgacagccgcagcgaagtcgccaacctgcctgacgaccgctcgctgtactacaccgcgtttttcaaacaatccgtgcgcggcctgaccgtcggttcgcccgtcgagtacaaagggctgaatgtcggcgtggtttccgatgtcccttattttgaccgcaacgacagcctgcatttatttgaaaacggctggattcccgtacgcatccgcatcgagccttcccgtttggaaatcaatgccgacgaacaaagcaaagagcattggaaacaacaatttcagacggctttaaacaaaggcctgaccgccaccatctccagcaacaacctgctgaccggcagcaaaatgattgagttgaacgatcagccttcgtcttcgcccaagctgcgaccgcataccgtttatgcagacgataccgtcatcgctacacaaggcggcggtttggacgacttacaggtcaaattggcggatttgctggacaaattcggcaaactgcctttagacaaaaccgtttcaggtttaaacgcttcgctcgccgaactcaaatccacgctgaaatccattaacacgctaagcaataatccgcaaacgcaaaacattccgaacgagttgaaccaaaccctgaaagagttgcgcacaaccctgcaaggcgtatcgccgcaatcgcctatctacggcgacgtacaaaatacgctgcaaagtttggacaaaaccttaaaagacgttcaacccgtcattaacactttgaaagaaaaacccaacgcgctgattttcaacagcagcagcaaagaccctatcccgaaaggaagccgataa

SEQ ID NO: 47337 - DNA, 408 bp, Neisseria meningitidis
atggaaattcgggcaataaaatatacggcaacggctgcgttgcttgcctttacggttgcaggctgccggttggcgggttggtatgagtgttcgtccctgtccggctggtgtaagccgagaaaaccggccgccatcgatttttgggatattggcggcgagagtccgccgtctttagaggactacgagataccgctttcagacggcaatcgttccgtcagggcaaaggaatatgaatccgcacaacaatcttacttttacaggaaaatagggaagtttgaagcctgcgggttggattggcgtacgcgtgacggcaaacctttgattgagacgttcaaacaggaaggttttgattgtttgaaaaagcaggggttgcggcgcaacggtctgtccgagcgcgtccgatggtaa

SEQ ID NO: 47338 - DNA, 330 bp, Neisseria meningitidis
atgagaaaaagtcgtctaagccggtataaacaaaataaactcattgaactgtttgtcgcaggtgtaactgcaagaacggcagcagagttagtaggcattaataaaaataccgcagcctattattttcatcgtttacgattacttatttatcaaaacagtccgcatttggaaatgtttgacggcgaagtagaagcagatgaaagttattttggcggacaacgcaaaggcaaacgcggtcgcggtgctgccggtaaagtcgccgtattcggtcttttgaagcgaaatggtaaggtttatacggttacagtaccgaatactcaaaccgcttaa

SEQ ID NO: 47339 - DNA, 273 bp, Neisseria meningitidis
atgaaacagacagtcaaatggcttgccgccgccctgattgccttgggcttgaaccaagcggtgtgggcggatgacgtatcggattttcgggaaaacttgcaggcggcagcacagggaaatgcagcagcccaatacaatttgggcgcaatgtattacaaaggacgcggcgtgcgccaagaccttgtgctcgctcaagaatggtttggtaaggcttgtcaaaacggagaccaagacggctgcgacatttaccaacgcctgaaggcaggttattga

SEQ ID NO: 47340 - DNA, 423 bp, Neisseria meningitidis
atgatgaaaagaattaagtgcttttgtgataaatttccatcaggagatacatttagaatgtgtatcattctggatgactatgataatagggttgattattatgtaggaatatatgattacattacgtctaccttaatgagcgatatttactatcgatccacgattgatgagcatttcaagattatagaattaatagaaaataatccaaatgaaatttatgatgatggcggtggtcaacaattttgcctagaatttcatcatgataaggtcattttttaccacaatgaatttgatgaagaagatggttatccagtattaagctgttcgctgcatacttttaaaactgctttaattgcttggaatgcttttttgcaattgcctaaaagtattcattcggtggtggagactgtgattgaggaataa

SEQ ID NO: 47341 - DNA, 804 bp, Neisseria meningitidis; identical to SEQ ID NO: 38447

SEQ ID NO: 47342 - DNA, 279 bp, Neisseria meningitidis; identical to SEQ ID NO: 36930

SEQ ID NO: 47343 - DNA, 1065 bp, Neisseria meningitidis
atggcactcgtatccatgcgccaactgcttgatcatgctgccgaaaacagctacggcctgcccgcgttcaacgtcaacaacctcgaacaaatgcgcgccattatggaagccgccgaccaagtcaacgcgcccgtcatcgtacaggcgagtgcaggtgcgcgcaaatatgcgggtgcgccgtttttacgccacctgattctggcggctgtcgaggaatttccacacatccccgtcgtcatgcaccaagaccacggcgcatcgcccgacgtgtgccaacgctccatccaactgggcttctcctccgtgatgatggacggttcgctgatggaagacggcaaaaccccttcttcttacgaatacaacgtcaacgccacacgtaccgtggttaatttctcccacgcttgcggcgtatccgtcgaaggcgaaatcggcgtgttgggcaacctcgaaactggcgaagccggcgaagaagacggtgtaggcgcagtgggcaaactttcccacgaccaaatgctcaccagcgtcgaagatgccgtgcgtttcgttaaagataccggcgttgacgcattggcgattgccgtcggcaccagccacggcgcgtacaaattcacccgtccgcccacaggcgacgtgttgcgtatcgaccgcatcaaagaaatccaccaagccctgcccaatacacacatcgtgatgcacggctccagctccgttccgcaagaatggctgaaagtcatcaacgaatacggcggcaatatcggcgaaacctacggcgtgccggttgaagaaatcgtcgaaggcatcaaacacggcgtgcgtaaagtcaacatcgataccgacttgcgccttgcttccaccggcgcggtacgccgctaccttgccgaaaacccgtccgacttcgatccgcgcaaatatttgagcaaaaccattgaagcgatgaagcaaatctgcctcgaccgctacctcgcgttcggttgcgaaggtcaggcaggcaaaatcaaaccggtttccttggaaaaaatggcaaaccgttatgccaagggcgaattgaaccaaatcgtcaaataa

SEQ ID NO: 47344 - DNA, 600 bp, Neisseria meningitidis
atgagcgagttggataacatccttgcccataaccggcagtttgtcgagtcgggcgaatatgaaaaatactttaccgacaaataccccgaacgcgggctggcagttttgtcctgtatggatgcgcggattatcgggctgctgcccgacgcgttgggtttgaaaaacggcgatgccaagctgattaaaaatgccggcgcgctggttacgcacccgtggggttcggtgatgcggagccttttggttgccgtgtttgaactgaaggtcagagagattatggtcatcgcccatcacgattgcggtatgcaggggctgaatgccgaagaattcctcgggcgcgtccgggaaagccggattcccgaagaccgtatcgaaaccctgcgttatgccggtatcgacctcgacggctggctgaccggtttcgacaacgtcgaagacagcgtgcgccacacggtggaccttatccgtaaccatccgctgatgccgcgccatatcgccgttcacggattggtcatccatcccgttaccggcaaactgacgctggttgtggacggcagtgtttcagacggcatggacttatcggaaggaatggaaacatcatga

SEQ ID NO: 47345 - DNA, 1377 bp, Neisseria meningitidis; identical to SEQ ID NO: 45407

SEQ ID NO: 47346 - DNA, 1002 bp, Neisseria meningitidis
ttgataatttgggaagcgcatccgccgtccgtcttgttttcgcgccgaccgcaaccatatagccgccatccgaacaatcagtcagagaaaatcatgaatcaaaccgccatcaaccgcgccgatgtgcgtacccgctttatcttcgacgatatgcccgtgcgcgggctgcacgtccgtctggaaaacgagtggcagcacattgtaaaacagaaaaactatcccgccgccatccgccgcgccttgggcgagctgttggctgccggtgttctgctgtcgggcaacctcaaaaacgaaggcacgctgattgtgcaggttcaggggcaggggcggctgaaaatgctggttgcggaagcgacttccgaccgtaccgtccgtgcgaccgcgcggtgggacgaggcggcagaaatcggtgaagatgaaagtttggtcgatcttttgggcgagggcggcgtattcgtgctgacgctgcagcccaaagacggcgaaccctggcagggcgtagtgcctttggaaggcgacggtatcgcgcaaatgttgatgaactatatgaaacgttccgaacagcttgatacgcacatcgtcctgtctgcaagcgatgaagcggcgggcggtctgctggtgcagcgtctgcctgaagaggtgttggatgaagaggcatgggaacacgtcagtacgctggcgcgcacgctgacggcgggcgagttggcagaattggatgcgcaacatgttttgtaccgcttgttccacgaaacgccgccgcgcgtgttcgagccggaaacgtttgaattttcatgcacctgttcgcgcggcaaagtcagcgatatgctgttgatgctgggcggggaagaagtcggcggcgtggtggtggaacaaggcagcatcgaagtcgattgcgatttctgccacagcaaatatgtgtttgacgaaaccgatgtcaacgcgctgttcggggaggatgtggtcggcgttgccaaagggctgccccggcataccgtccaataa

SEQ ID NO: 47347 - DNA, 1167 bp, Neisseria meningitidis
atgaatttacacgagtatcaggctaaagaactgctggctggctacggtttgcccgtacaaggcggtattttggcacacaacggcgaagaagccgctgcagcttacgacaaattgggcggcaaattcgctgttgtcaaagcacaagtacacgccggcggccgcggtaaagcgggcggcgtaaaagtcgttaaaagccgcgaagaagctaaagaagtggctgaaagcctgattggcaccaacttggtaacttaccaaactgatgccaacggccaacctgtcaacagcgttttggtttgcgaagacatgtatccggttcaaaccgagctgtacttgggcgcagtggttgaccgttctacccgccgcattacattcatggcctctaccgaaggcggcgtggaaatcgaaaaagttgctgccgaaactcctgaaaaaatcttcaaagtaaccgttgatccgctggtcggcctgcaaccttgccaagctcgcgaagttgcgttccaactgggcttgaaagacaaacaaatcaacgagttcgtcaaactgatgaccggtgcgtacaaagcgtttgtcgaaaatgacttcgccctgtttgaagtcaacccgctggcagttcgcgaaaacggcgcgctcgcctgcgtggacggcaaaatcggcatcgacagcaacgcgctctaccgcctgccgaaaatcgccgaattgcgcgacaaatctcaagaaaacgaacgcgagttgaaagcttctgaatttgacctgaactatgttgccctggaaggcaacatcggctgtatggtgaacggtgccggtttggcgatggccactatggacatcatcaaactgaaaggcggccaacctgccaacttcttggacgttggcggcggcgcaaccaaagaccgcgtggttgaagcgttcaaactgattctggaagacaaatccgttcaaggcgtattgatcaacatcttcggcggtatcgtacgttgcgacatgattgcggaagccatcgtggcagccgttaaagaaatcaacgtcgacgttcctgtcgttgttcgtttggaaggcaacaacgccgaactcggcgcgaaaatcctgaacgaatcaggtctgaaactgacttctgcagacggcctgaatgacgcagccgaaaaaattgtcgcagccgtaaacgcctaa

SEQ ID NO: 47348 - DNA, 966 bp, Neisseria meningitidis; identical to SEQ ID NO: 39761

SEQ ID NO: 47349 - DNA, 711 bp, Neisseria meningitidis; identical to SEQ ID NO: 45485

SEQ ID NO: 47350 - DNA, 1848 bp, Neisseria meningitidis; identical to SEQ ID NO: 41875

SEQ ID NO: 47351 - DNA, 1185 bp, Neisseria meningitidis; identical to SEQ ID NO: 45260

SEQ ID NO: 47352 - DNA, 1110 bp, Neisseria meningitidis; identical to SEQ ID NO: 44734

SEQ ID NO: 47353 - DNA, 834 bp, Neisseria meningitidis; identical to SEQ ID NO: 39098

SEQ ID NO: 47354 - DNA, 447 bp, Neisseria meningitidis
atggatcaggcaaaacgtacagcctatgttaaaattattaacgctttattcgacggagctgtcaaggtgcagcccagtcaaattaccgaaaccgtcgttgatatggtggacaagatgtttgacgaaattgcgacctgccatgagcgcatcaggccgatggcggtgttggcagacggtattgcaggaagtattgtcaaacttgcgccaaacgaaattccgcttatttttgggaattcgtcgtttggaagctatctgaaaagtaaaacccgtgatgaagtgtttaaagtgttgaagcaaagcaaggttaataatgccggtaaagtccttgaggcattttacgaaagctggttaaagtacactgcaaaagaccgccgtctgaaagtctgcatcgtaaccgcgcaatcccgttggcgttcgcgctttgaaatggaattgctgggaatttaa

SEQ ID NO: 47355 - DNA, 891 bp, Neisseria meningitidis
atgaatcctaaatcccctttatttttacgactgtccgatcgtttggatgtgtacctgcgcctgatgcgggcggacaagcccattgggacgctgcttttactgtggccgacctactgggcattgtggctggcttcagacggcattcccgatttggcggtattggcggcgtttacaatcggtacgtttttaatgcgcagtgccggttgcgtcatcaacgattttgccgaccgcgattttgacggtgctgtcgagcgcaccaaaaaccgtccgttcgcacagggcagggtcaagaaaaaagaagccctgctgctgacggcatttttgtgcctgcttgccgcattgtgcctgattccgctgaatcatctgacttggctgatgagcctgcccgccctgtttcttgcgctgacttacccgtttaccaaacgtttttttccgattccccaactctatctcgggcttgccttttccttcggtatcccgatggcgtttgccgcagtgggcaacagcgtccccgttgaagcatggatactttttaccgccaatgttttatggacactggcttacgacactgtttacgccatggcggacaaagaggacgatttgaaaatcggcatcaaaacctccgccgtcacgttcgggcgttacgacatcgccgccgttatgctgtgtcatggcggctttaccctgctgatggcagtattgggggcggttatcggtgcggcatgggcatattggacggcaatccccatcgtcctgctgctgcaataccgccaatatgccgcaatcaaaagccgcgtccggcaaatctgttttgaaacgtttttggcaaacaacagaattggttgggtgtggtttaccgccatttttgcccatacgtttttcgcgaaataa

SEQ ID NO: 47356 - DNA, 378 bp, Neisseria meningitidis; identical to SEQ ID NO: 36713

SEQ ID NO: 47357 - DNA, 978 bp, Neisseria meningitidis
atgatttatccgtggcataatgagcaatggcggcagattgcggaacattgggagcgccgtcccaatgcttggctgtttgccggcaaaaaaggcatagggaaaaccgagtttgcccgctttgcggcgcaagcattattgtgtgaaaacccaagtccggatcaccgggcttgcggggcttgtgcttcttgtcatttttttgaacaaggcagtcatccggatttttacgaaatcactcccttgtcggacgaatccgaaaacgggcgcaaactgttgcagatcaaaatcgatgccgtcagggaaatcatcgataatgtgtacctgacttcggtacggggcggtttgcgcgtggttctgattcatcctgcggaaagtatgaatatccaggccgccaacagtttgttgaaagtgttggaagagcctccgccacaagtggtctttttgctggtcagccacgcggcggacaaggttttaccgaccattaaaagccgctgccggaaaatggttttgcccgcgccttcccatgaagaggcattggcatatctgcgtgaaaggggtgtggcggaacctgaggaacgtctggctttccattccggagcgccgctgtttgatgaggcggacggtgtccgtgcgttgcggattaaactgttggatattttggcagaaccgaggttgttgaagattttggattacgccgcgcttttcgataaggaaaaacttccgctcgccgtatttgtcgggtggatgcagaaatggctggtcgatttgggattgtgcctgcaacacatgaaacccgtctattatcccgcttatgaagacaggctgcttcagacggcatccggtttccgcccgcgcaatgtatttgcggcggaggatatgctcaaacagcttgccccctacgggtttcatactttaaatgtcaaaatgcagatcgagcatctgctcatcaattatttggaattgaagaaagagaacgggtga

SEQ ID NO: 47358 - DNA, 603 bp, Neisseria meningitidis; identical to SEQ ID NO: 45681

SEQ ID NO: 47359 - DNA, 693 bp, Neisseria meningitidis; identical to SEQ ID NO: 39347

SEQ ID NO: 47360 - DNA, 213 bp, Neisseria meningitidis; identical to SEQ ID NO: 36410

SEQ ID NO: 47361 - DNA, 342 bp, Neisseria meningitidis; identical to SEQ ID NO: 39379

SEQ ID NO: 47362 - DNA, 798 bp, Neisseria meningitidis
atgaaccgtctttacccccacccgattatcgcccgtgagggctggccgattattggcggcggtttggctttgagcctgctggtgtcgatgtgttgcggctggtggtctttgccgttttgggtgtttaccgtatttgccctgcagtttttccgcgaccctgcgcgtgagattccgcaaaatcctgaagcagtgttgagtccggttgacggccgtatcgtggtggtcgagtgcgcacgcgatccgtatcgtgatgtcgatgctttgaaaatcagtatttttatgaacgtgttcaacgtgcattcgcaaaaatcgcctgccgattgtacggtaacgaaagtggtctataacaaaggcaaattcgtgaatgcggatttggacaaagccagcacggaaaacgaacgtaatgcggtgttggcgactacggcttccggtcgtgaaattacttttgttcaagtggccggtttggtggcgcgccgtattttgtgctacacccaagcaggtgcgaaactgtcccgcggcgaacgttatggctttatccgcttcggttcgcgcgtggatatgtatctgcctgtcgatgcgcaggcgcaagtggtgattggcgataaagtaactggcgttagcactgtattggcgcgtttgccgctgactgcgccgcaaatcgaatccgagcctgagtctgagcctgctttacaaactgctccggttgaaacagcggcaaacccatctgccgaacaacggcaaatcgaggcagcggcggctaagattcaggcggctgtgcaagatgtgttgaaagattaa

SEQ ID NO: 47363 - DNA, 930 bp, Neisseria meningitidis
atggattccatcatcgaactgcgccacctcaagaccctgctggcacttgaagaaaccggcagcgtctcccttgccgccaaacgggttttccttacccaatctgcactttcccaccaaatccgtatgcttgaaaaccactacggcgcaccgttgttcgaacgaaaatccacgcccttgcgctttaccccggttggagaaaggctgttacgcctcgctcacgacctgttgcctcaagttaccgatgcagaacgtgatttggcacgcattatagaaggagaggcaggagaattgcggattgccgtcgaatgccatacctgtttcgactggctcatgcccgcaatgggcgaattccgcccgatatggccccaaatcgaattggatatcgtatcgggattccaagcggaccctatcggactgctgctgcaacaccgtgccgaccttgccattgtttccgaagcggaaaaacaaaacggtatttctttccaaccgctgtttgcctacgaaatggtcggcatttgcgcaccagaccatccgcttgccgccaaaactgtctgggaagccgaagactttatcggggaaaccctgattacttatcccgttcccgacgagatgctggatttgcccaaaaaaatcctgattccgaaaaacatcaacccgccgcgccgacacagcgagctgaccatcgccattatccaactggttgccagcagacgtggcattgccgcccttccctattggacagtcatgccctaccttgaaaaaggctatgtcgttcaccggcagattactgccgacggattgcaaagcaaactgtatgccgccatccgtaccgaagatacggacaagagctatctgaacaatttttgccaaatcatacgcgaacgcggttttgcagatttgcccggactgagcgaactggaaccggtctga

SEQ ID NO: 47364 - DNA, 495 bp, Neisseria meningitidis; identical to SEQ ID NO: 44694

SEQ ID NO: 47365 - DNA, 183 bp, Neisseria meningitidis
atggaaaaaaaattcttagacatcctcgtctgccccgttaccaaaggcaggctggaatatcatcaggacaaacaggaattgtggagccgtcaggcgaagctggcgtatccgattaaagacggcattccctatatgctggaaaacgaagcgcgtccgttgggcgaagaggaactcgaagcatga

SEQ ID NO: 47366 - DNA, 4176 bp, Neisseria meningitidis; identical to SEQ ID NO: 45931

SEQ ID NO: 47367 - DNA, 891 bp, Neisseria meningitidis
atgatatttcaaaaccatgccgtccgaaccgcaacactttcccacttcacaacatctgcaatggcacattacgcaatcggcgacatacaaggctgtttcgacgaactgaccgcgctgctcggcaaaatcggtttcaaccacggcacggacaccctctggctgacgggcgacatcgtcaaccgcggcccgaaatccctcgaaacgctgcaattctgcatccggcacgaaaacagcgtgcaaatcgtcctcggcaaccacgacctgcacctgctcgctgtcggctgcggcgaaggtgcgcccaaacgcagcgacacaatcgaacccatactcaaacaccccgacggaaaaaaaatgctcgactggctgcgtgcgcaaccgctgttgatacgcgagggcagccgcgtgatggtacacgccggcatcctgccgcaatggcgcataaccaaagccgaatcgctcgctagagaagccgaagccgaactgcgcggcaaaaaatacgtcaaattcttctccaaaatgtacggcaacaaaccggccgcgtgggacgaaggtttgaaaggctatgcccgcctgcgcttcatcgtcaacgccttcacgcggatgcgcgccctgacctttaaaaacgaactggatttcgactacaaatccacagtgaaaaaaatgccgccttacctgcgcccgtggttcaaagcccccgaccggcaaaacctcgaccgcaccatcatcttcggacactggtcctcgctgggctacacgaatgccgacaacgtcatctcgctggacaccggcgcgctgtggggcggacagctgaccgccgtcaacctcgaaacggaagaaattacccaagtccaagccgccggcggcatagactggaaaagcttcgcaaaataa

SEQ ID NO: 47368 - DNA, 804 bp, Neisseria meningitidis
atgtgcgccgtttgcagccttaaggtgtttctgtatttttggagtatggaaacgcattcgggctgttttttgcggaagacggtaatgaaagacgatgttttgaaacagcaggcacacgcggcgatacagaagaaactgggctacgcgttccgcgatatttcgcttttgcggcaggctttgacgcacaggagccatcatgcgaagcacaacgagcggttcgagtttgtcggtgattcgattttgaattatacggtggcgcggatgctgtttgacgcgtttccgaagttgaccgagggcgagttgtcgcggttgcgggcaagtctggtcaatgagggcgtgctggcggaaatggcggcggaaatgaatgtcggcgacggcctgtacttgggggcgggcgagttgaagagcggcggcttcagacggccttcgatactggcagacgcgatggaggcgatgtttgctgccgtcagcttcgatgccgatttcaacacggcggaaaaggtggtgcgccatttgtttgccgatcgcgtccggcgcgccgattttcaaaatcaggcaaaagacggcaaaactgctttgcaggaggcgttgcaggcacgccgctttgctttgccgaaataccgtatcgaagagcaaatcggccatgccaacgacagtatgtttgtggtttcctgcgatttgggcgaactgggtttcgtgtgccgtgccaaagggacgagccgcaaggcggcggaacaggaggcggcgaaagaggctttgaaatggctggaagagaagctgccgctgaagaagaaaaagaaatga

SEQ ID NO: 47369 - DNA, 1104 bp, Neisseria meningitidis; identical to SEQ ID NO: 44993

SEQ ID NO: 47370 - DNA, 2889 bp, Neisseria meningitidis; identical to SEQ ID NO: 45492

SEQ ID NO: 47371 - DNA, 873 bp, Neisseria meningitidis; identical to SEQ ID NO: 38119

SEQ ID NO: 47372 - DNA, 264 bp, Neisseria meningitidis; identical to SEQ ID NO: 37542

SEQ ID NO: 47373 - DNA, 1743 bp, Neisseria meningitidis
atgaaattttttcctgctccatgtctgttggttatcctggctgtcataccccttaaaaccttagctgccgatgaaaacgatgcagaacttatccgttccatgcagcgtcagcagcacatagatgctgaattgttaactgatgcaaatgtccgtttcgagcaaccattggagaagaacaattatgtcctgagtgaagatgaaacaccgtgtactcgggtaaattacattagtttagatgataagacggcgcgcaaattttcttttcttccttctgtgctcatgaaagaaacagcttttaaaactgggatgtgtttaggttccaataatttgagcaggctacaaaaagctgcgcaacagatactgatcgtgcgtggctacctcacttcccaagctattatccaaccacagaatatggattcgggaattctgaaattacgggtatcagcaggcgaaataggggatatccgctatgaagaaaaacgggatgggaagtctgccgaaggcagtattagtacattcaataacaaatttcccttatataggaacaaaattctcaatcttcgcgatgtagagcagggcttggaaaacctgcgtcgtttgtcgagtgttaaaacagatattcagattataccgtccgaagaagaaggcaaaagcgatttacagatcaaatggcagcagaataaacccatacggttcagtatcggtatagatgatgcgggcggcaaaacgaccggcaaatatcaaggaaatgtcgctttatcgttcgataaccctttgggcttaagcgatttgttttatgtttcatatggacgcggtttggcgcacaaaacggacttgactgatgccaccggtacggaaactgcaagcggatccagaagttacagcgtgcattattcggtgcccgtaaaaaaatggctgttttcttttaatcacaatggacatcgttaccacgaagcaaccgaaggctattccgtcaattacgattacaacggcaaacaatatcagagcagcctggccgccgagcgcatgctttggcgtaacagacttcataaaacttcagtcggaatgaaattatggacacgccaaacctataaatacatcgacgatgccgaaatcgaagtgcaacgccgccgctctgcaggctgggaagccgaattgcgccaccgtgcttacctcaaccgttggcagcttgacggcaagttgtcttacaaacgcgggaccggcatgcgccaaagtatgcctgcaccggaagaaaacggcggcgatattcttccaggtacatctcgtatgaaaatcattactgccggtttggacgcagccgccccatttattttaggcaaacagcagtttttctacgcaaccgccattcaagctcaatggaacaaaacgccgttggttgcccaagataaattgtcaatcggcagccgctacaccgttcgcggatttgatggggagcagagtcttttcggagagcgaggtttctactggcagaatactttaacttggtattttcatccgaaccatcagttctatctcggtgcggactatggccgcgtatctggcgaaagtgcacaatatgtatcgggcacgcagctgatgggtgcagtggtcggcttcagaggagggcataaagtaggcggtatgtttgcttatgatctgtttgccggcaagccgcttcataaacccaaaggctttcagacgaccaacaccgtttacggcttcaacttgaattacagtttctaa

SEQ ID NO: 47374 - DNA, 687 bp, Neisseria meningitidis; identical to SEQ ID NO: 45522

SEQ ID NO: 47375 - DNA, 966 bp, Neisseria meningitidis; identical to SEQ ID NO: 46197

SEQ ID NO: 47376 - DNA, 1047 bp, Neisseria meningitidis
atgaaaatgcaggcagttgttgtgaataaaaatgtagcgggcgatgtggaaatagtcgaacgcgaggttcgcccgttggaatacggcgaggcgttggtcgaagtcgaatattgcggcgtgtgccacaccgacctgcacgttgcggcaggcgactacggcgaaaaaccgggccgcgtgctgggacacgagggcatcggtttggttaaagaagttgccgacggtgtgaaaaatctgaaagtcggcgaccgcgtcagcatcgcctggctgttccaaagctgcggctcttgcgaatactgcaataccggccgcgaaaccctgtgccgctctgtattgaacgctggctatactgccgacggcggcatggcgacccactgtatcgtgagtgccgattacgcggtcaaagtcccagaaggcttggatcctgcgcaagcttcgagcattacttgtgccggtgtaaccacttataaagccattaaagtttccagtgttcgtccgggacagtggattgccatctacggcgcgggcggtttgggcaacttgggggtccaatacgcgaaaaaagtatttggcgcacacgtcgtcgccatcgacatcaacgatgaaaaactggcttttgccaaagaaagcggcgcagatttagtcatcaacgctgccaaagaagatgccgccaaagtgattcaggaaaaaaccggcggtgcacacgtagccattgttaccgccgtatccgccgccgcattcaactctgccgtgaattgcgtccgcgcgggcggacgtgtggttgccatcggactgccgccggaatcgatggatttgtccatcccgcgtttggttttggacggcatcgaagtggtcggctctttggtcggcacgcgcaaagatttggaagaagccttccaattcggcgcggaaagtttggttgtgccgaaagtccaactgcgtgctttggatgaagcacccgccattttccaagaaatgcgcgaaggcaaaatcaccggccgtatggtgatcgatatgaaaaaagaatgcggctgcggtcatcaccactga

SEQ ID NO: 47377 - DNA, 1677 bp, Neisseria meningitidis
atgagcttcaaaaccgatgccgaaatcgcccaatcctccaccatgcgcccgattggcgaaattgccgccaagctgggtctgaatgccgacaacattgagccttacggtcattacaaggcgaaaatcaatcctgccgaagcgttcaaactgccgcaaaaacagggcaggctgattttggttaccgccattaatccgactccggcgggcgaaggcaaaaccaccgtaaccatcggtttggcggacgcgttgcgccacatcggcaaagatgccgtgattgccctgcgcgaaccttctctggggccggtgttcggcgtgaaaggcggcgcggcaggcggcggctatgcccaagttttgccgatggaagacatcaacctgcacttcaccggagattttcacgccatcggtgcggcaaataatctgcttgccgcgatgctcgacaaccatatctatcagggcaacgagttggacatcgaccccaaacgcgtgctgtggcggcgcgtggtcgatatgaacgaccgccagttgcgcaacatcatcgatggcatgggtaaacccgttgacggtgtgatgcgccccgacggttttgatatcaccgttgcctccgaagtgatggcggtattctgccttgccaaagacatcagcgatttgaaagagcgtttgggcaacatcctcgtcgcctacgccaaagacggcagccccgtttacgccaaagatttgaaggcacacggcgcgatggcggtcctgctcaaagatgcgattaagcccaatttggtgcaaaccatcgaaggcacgcccgccttcgtacacggcggcccgttcgccaacatcgcccacggctgcaactccgtaaccgcaacccgtctggcgaaacaccttgccgattacgccgtaaccgaagcaggcttcggcgcggatttgggcgcggaaaaattctgcgacatcaaatgccgccttgccggtttgaaacctgatgcggcggtcgtcgtggcgactgtccgcgctttgaaatacaacggcggcgtggaacgtgccaacctcggtgaagaaaacctcgaagccttggcaaaaggtttgcccaacctgctgaaacacatttccaacctgaaaaacgtattcggactgcccgtcgtcgttgcgctcaaccgcttcgtgtccgactccgatgccgagttggcgatgattgaaaaagcctgtgccgaacacggcgttgaagtttccttgaccgaagtgtggggcaaaggcggcgtgggcggtgcagacttggcgcgcaaagtcgtcaacgccatcgaaaaccaaccgaacaacttcaatttttcctacgatgttgagctgagtattaaagacaaaatccgtgcgattgcccaaaaagtgtacggcgcggaagatgttgatttcagcgcggaagcgtctgccgaaatcgcctcgctggaaaaactgggcttggacaaaatgccgatttgcatggcgaaaacccaatattctttgagcgacaacgccaaactcttgggctgccctgaaggcttccgcattaccgtgcgcggcattaccgtttcttccggtgctggtttcatcgttgcgttgtgcggcaatatgatgaaaatgccgggtctgcccaaagttcccgccgccgagaaaatcgacgtggacgcagaaggcgtgattcacggcttgttctga

SEQ ID NO: 47378 - DNA, 879 bp, Neisseria meningitidis
atgactgatattcggataagcatgaattacgccctagacgcattatggtggaagctcaccagccaacccgtccgcgacctcgcctcgctgctgactgcgccgcctttgtggcaaagcggttgcgaattgggcgtgcgcgaactattgggggaacgcggtttccgctatcttttggcattggatgccgatcccgcgccgctgacggaacacctcacccgacgcgccccgttcggacaccgcttgggcatttacgccgaagaactgctggcattttggtttgccaacgcgccacacgccgaactgctcgcgcacaacctcacggtttccggttcggacggcaatacgcaaggcgcggcggattttgtggtaaggcttaacggcaagccctaccatatcgagctgacctgcaaatattacggcggcggcacgggcaggctcgaagacatgcgcggactcgaccccaaagacacgctgttgggaaaagccgccaaactgaccgcccaactcggtctgccgcacacttcagacggcatccgaaccttgcggcaacacggtctgccgcttgacgtaaaacccgtttccatcgtgcgcggcatcggattttttccacaaagtttccatgcttttgagccgccgcttaacccatacggctggcgcggcatctatattcaagactgggcggaatacgggtttgaacgccaagaagtccgctaccatctgctcgaccgcatggcctacctcgcacctgcgcgtgccgccgaaaccgaaacattgaacgaaaccgaaatccgccgtatcgaccaaggcttgattgccgttttggaatgtcggccggacggcttttggcacgaaatcgaacgcattatgaaggccgtctga

SEQ ID NO: 47379 - DNA, 354 bp, Neisseria meningitidis
ttgaatttgatatgttcaggaaggatacagattatgttcggcaagcagctttttgaggaagtcggctcgaaaatcagcgaaaccatcgccaacagccctgccaaagatgtggaaaaaaatattaaggcgatgctgggcggcgcgttcaaccgtatggatctggttacgcgcgaagaattcgacatccagcagcaggttttaatcaaaacccgtaccaaactggcggctttggaagcgcgtttggcaaaactcgaagccgcgcaaaatcccgaacgggcagcattggaagcggctgaagccgctgccgaagaagccgtcgccgaaatcaggcagcaaaccgaagccggcgaataa

SEQ ID NO: 47380 - DNA, 1083 bp, Neisseria meningitidis
atgtttttatggctcgcacatttcagcaactggttaaccggtctgaatatttttcaatacaccacattccgcgccgtcatggcggcgttgaccgccttagcgttttccctgatgttcggcccgtggacgatacgcaggctgaccgcgctcaaatgcgggcaggcagtgcgtaccgacggtccgcaaacccacctcgtcaaaaacggcacgccgacgatgggcggttcgctgattctgaccgccattaccgtgtccaccctgttgtggggcaactgggcaaacccgtatatctggattctcttgggcgtattgctcgccacgggcgcactcggtttttacgacgactggcgcaaagtcgtctataaagaccccaacggcgtgtccgccaaattcaaaatggtgtggcagtcaagcgttgccattatcgccagtttggcattgttttaccttgccgccaattccgccaacaatattttgattgtcccgttcttcaaacaaatcgccctgccgctgggcgtggtcggctttttggtgttgtcttacctgaccatcgtcggcacatccaatgccgtcaacctcaccgacggcttggacggccttgcgaccttccccgtcgtcctcgttgccgccggcctcgccatcttcgcctatgccagcggccactcacaatttgcccaatacctgcaattaccttacgttgccggcgcaaacgaagtggtgattttctgtaccgccatgtgcggcgcgtgcctcggtttcttgtggtttaacgcctatcccgcgcaagtctttatgggcgatgtcggtgcattggcattgggtgccgcgctcggtaccgtcgccgtcatcgtccgccaagagtttgtcctcgtcattatgggcggattatttgtcgtagaagccgtatccgttatgcttcaggttggctggtataagaaaaccaaaaaacgcatcttcctgatggcgcccatccatcaccactacgaacaaaaaggctggaaagaaacccaagtcgtcgtccgcttttggattattaccatcgtcttggtgttgatcggtttgagtaccctcaaaatccgctga

SEQ ID NO: 47381 - DNA, 618 bp, Neisseria meningitidis; identical to SEQ ID NO: 45292

SEQ ID NO: 47382 - DNA, 1338 bp, Neisseria meningitidis
ttgctttttctttatcgggacggaaccgtgctgactttagatgcgtttgagcaatgcttgaaggattgttttcctcaaggtctgaatggaaaaaaaacagcggtggcattaagcggcggcttggattccgtggtcttgctgcacctgcttgtccgcgctgggaaacgggcaggatttgtgccggaggcattgcatatccatcacggcttgagcccccgtgccgacgattgggcggatttctgtcaaaactattgcgatatgctaggggtggggctggaaacggttaaggtctgcgtggaaaaaaacggtttgggcatcgaagcggcggcgcggcaaaagcgttatgccgcgtttgccgaaaaaggctttgacattttggcgttggcgcaccacagggacgatcaaatcgaaacctttatgctggcggtcgcgcgcggcggcggtttgcgcgctttggcggctatgcccgccgtccgcccttttggggaaaaaggcatcatttggcggcccttgctgcctttttcgcgccaagatatatgggattatgcccaaaaacacggtttgccgaatatcgaggatgaaagcaataccgatacggcttatttgcgaaaccgcttccggcaccgtattttgcccgaactttcggcgcagattccccatttcgggcgacatgtgctgaacaatgtccgcgctttgcaggaagatttggctttgttggacgaggtcgtcgttcaggactgccgttgggtttgcggggccggttatttcgatacggcgcggtggctgacgttttccccgcgccggaaaacccatattttgcggcattttctgaaggaaaacggcattcccgtgccgaatcagaatgcccttgccgacattgcccgggttttgacggaggcaaaaaccggacgttggaacttgcaaggctttgaattgcatcattatgcaggcaggctgtttgtgttccgacaggaaaaaacggataaactgcggtttttgaaagacaggcagataagcggaaatttaagggaaatattgacggggcagggatttgttttaaaacgtcatccgtttgggcttcctgagcatcttttggagcaggacggaattttgaggacggtagcggcatcggatacgttggctgtcggcggcatccataaggatgtgaaaaaaatccttcaggggaaacgggttttgcctgtcctgcgcccaatttggccgcttgttgccgacagcggaaaccgtccattggcgttggcaaactgttgtgcggatttccaatattcggtttcagacggcattttgcccgtccatcctgactttcccattttattttga

SEQ ID NO: 47383 - DNA, 312 bp, Neisseria meningitidis; identical to SEQ ID NO: 38659

SEQ ID NO: 47384 - DNA, 996 bp, Neisseria meningitidis
atgaaaacatctatccgatacgcactgcttgccgcagccctgaccgccgcaacccccgcgctggcagacattaccgtgtacaacggccaacacaaagaagcggcacaagccgttgcagatgcctttacccgggctaccggcatcaaagtcaaactcaacagcgccaaaggcgaccagcttgccggtcaaatcaaagaagaaggcagccgaagccccgccgacgtattctattccgaacaaatcccggcactcgccaccctttccgcagccaacctcctagagcccctgcccgcctccaccatcaacgaaacacgcggcaagggcgtgccggttgccgccaaaaaagactgggtggcactgagcggacgttcgcgcgtcgtcgtttacgacacccgcaaactgtctgaaaaagatttagaaaaatccgtcctgaattacgccacgccgaaatggaaaaaccgcatcggttacgcccccacttccggcgcgttcttggaacaggttgtcgccatcgtcaaactgaaaggcgaagcggccgcattgaaatggctcaaaggtctgaaagaatacggcaagccttacgctaaaaactccgtcgcccttcaagcggttgaaaacggcgaaatcgatgccgccctcatcaacaactactactggcacgctttcgcgcgtgaaaaaggcgtacaaaacgtccacacccgcctgaatttcgtccgccacagagatcccggcgcactcattacctattccggtgcagccgtgttaaaatcctcccaaaacaaggatgaggcgaaaaaattcgtcgccttcctcgccggcaaggaaggacagcgtgccctgaccgccgtccgtgccgagtatcctttgaatccgcacgtggtatccaccttcaatttggaacccatcgccaagttggaagcaccccaagtgtccgccaccactgtttccgaaaaagaacacgccacccggctgcttgagcaagccggtatgaaataa

SEQ ID NO: 47385 - DNA, 507 bp, Neisseria meningitidis
ttgaaggtagtacctgagcgtaccgtttcggcagatgcaaaaaccagagacccgatgtgggacaatgcggctttacagaccagcgaaggcgtaaattttattgctcgtttcctaggattttttagcgatggggaataccgctatgtggatgtcctgcaacccaaccattccgatattattcggtattcaggtaaagattttccgataaatcaaatatttaatcatatacaccccgcccgttatgcggtaacgttcgaaaacaatgtcgattccaagctgcgcaggcactgggtggcaggtgcgaccatacggattatcgaccgccaaactgacgaagtgattgccaagaaaaccatctatgtctttgaaaaaggcttggacggcacgggtggggcgagaatgccgtggaagtttgctatcttgtgcaataaagaaagacttacttcttcagagccgttatcggattttgttcttagcgttttaaaaccttatatattgcgtccctaa

SEQ ID NO: 47386 - DNA, 258 bp, Neisseria meningitidis; identical to SEQ ID NO: 36387

SEQ ID NO: 47387 - DNA, 411 bp, Neisseria meningitidis
atggttcagacggtctttttttatccaaaggaaaccatcatgtcaaaagacaaaaatcaaatcaccgtcggaatcaaccgtgaaatcatcgataccgaaaccgacagttctgccgagtttcacgtcatccgacatgtgtcgctggattatgcaaccggctttaatgtggtgttgttagacagctatgtgcgcaaatcgacatttgaacgtcgcggacgttcggtcggttcgatgcagttgaatattccgggcgtgccgcctcgcggtacggatgtattggactgggcataccaggctgttgtagcagcggttgaagggggcgcggtcgatgcctacggtcagcctatttccgccaacagcctgaccggcgcggagttggtctatgccgatttgcctgaagcagccatctga

SEQ ID NO: 47388 - DNA, 1497 bp, Neisseria meningitidis; identical to SEQ ID NO: 38911

SEQ ID NO: 47389 - DNA, 1080 bp, Neisseria meningitidis
atgaaaacactgaccgtacacaccccgtcccacagctaccccatctttatcggcaacggactgctgccgcaggcaggaagcctgctcaaaccgcatttgggcaaacgcgccgccatcatcgccaacgaaaccgtcgccccgctctacctcggcacgcttcagacggcattggatgcggcaggcgtatcccatttcagcatcatcctgcccgacggcgaggcgcacaaaaactggcagacgctcaacctcatctttgacgggctgatgcaaaaccgcgccgaacgcaaaaccacattaatcgcactgggcggcggcgtgatcggcgacatggtcggctttgccgctgccacctaccagcgcggcgcaccgttcgttcaaataccgaccacactgttgagtcaggtcgactcatcggtgggcggcaaaaccgccatcaaccacccgctcggcaaaaatatgattggcgcgttttaccagccgcaggcggtgcttgccgacttggacacgctgcacaccctgcccgcccgcgaattgtccgccggtatggcggaagtcatcaaatacggcgcgctcggcgacatcggcttttttgaatggctggaacagcatatgcccgaactgatgacgctcgatcgggaaaaactcgcccaagccgtgtaccgctgctgccaaatgaaggcagacatcgtcgcccaagacgaaaccgaacagggcatacgcgcatggctcaacctcggacacaccttcggacacgccattgaaaccgagatgggttacggcacttggctgcatggagaagccatcgccgccggctgcgtgttggcggcgcgtttgtccgaacaactgggcaaaacctccgccgcagataccgcgcggctcgccgccctgctcgaagccgccggactgccgtccgcgccacccgtgtttgcctttgaaaaatggctggaacacatgagccacgataaaaaagtcagcggcggcatcatgcgctttatcggtctgaaccggctgggcgaagccaacatcaccgaaattaccgacacggacatcctccgccgcaccctgcaaccgtatctctga

SEQ ID NO: 47390 - DNA, 1074 bp, Neisseria meningitidis; identical to SEQ ID NO: 39216

SEQ ID NO: 47391 - DNA, 273 bp, Neisseria meningitidis; identical to SEQ ID NO: 38717

SEQ ID NO: 47392 - DNA, 1542 bp, Neisseria meningitidis
atgaagtttttagaccgtgaggcaagcattgccaagccgggtttcaaccgttggctcgtaccgcccgcagcattggcggtgcaccttgccatcgggcagatttacgcctattccgtattcaacgcgccgctgaccaaacttatcggcataaccgaatcggcggccggagattggaagctgacgaccgtaggttggatttttagtatcgcactcgcgatgctgggcacgtcggctgccctgttcggcacatggatggaacgggtaggtccgcgcaaagccatatttgccgccgcctgctgtttcagcctgggcttcttcgtatccgcattcggcgtgcgtacgcacaacctcttcctgctctatttgggcaacggcgtcatcggcggcgtaggcttaggcttaggctacatcgggccggtttccacactgatgaaatggtttcccgacaagccgggtatggcgaccggtttggcgattatgggtttcggcggcggcgcaatgctggcctctccgctttccgtatcactgatgaacgccttttcaaacgccgcttcggtcggggttgccgaaacctttgccgtattgggcctgctttacctcgcactgatgatgttcggcgcgtttaccatccgcgtacctgccgacggctggaaacctgaaggctataccgcgccgaaaacgcaaaacaagctggtcagcagtaatcatgtcaacgtgtcccaagccatgaaaacgccgcagttttggctgttgttctgggtattgtgcctgaacgtaaccgccggcatcggcgtattgggtcaggcatccgtgatgattcaggaactcttttccgaaacctccataggcaggcaggcagcagtcggcgcaggtgcggcggcaggcttcgtcagcctcctgagcctgtttaacatgggcggacgctttttgtggtcgagcgtttccgacaaaatcggacgcaaaaacacctacaccatcttcttcgtactcggctcgctgctgtatttcgccgttccctccatcggcgagggcggcagcaaagccctgttcatcatcggcttttgcgtgattatttccatgtacggcggcggatttgccgccattcccgcctacctgaaagacctgttcggcacctatcaggtcggcgcgattcacgggcgcatcctgctggcctggtcaaccgccgccgtcatcggcccggtactggtcaattacatacgccaaagccaaatcgacagcggcataccggcggcacaggcatacggcgtaaccatgtacatcatggcgtgcctgctgattatcggtttgttgtgcaacctcgccgtcaaatccgtacacgaaaaacaccacgaaaaagacatcaaaaccgccgcacacagcggcaaccccgacgacgaaaccgccatatccgacgcttaccttgtgggcgaaaaagtttccggcggcggcatatcggtctggtggcgttgggcattggccgtcataccactcgcctacggcgtggtgatggtctttgtcaaagcactcgaccttttctcctga

SEQ ID NO: 47393 - DNA, 354 bp, Neisseria meningitidis; identical to SEQ ID NO: 44446

SEQ ID NO: 47394 - DNA, 486 bp, Neisseria meningitidis
atggacgcgctgcacaccatcgcccgaaacctgacgaaaaaacgtcaaaccgtaagctgtgccgagtcctgtacgggcggaatgcttgccgccgcattcacaagcgttgcaggcagttcgcaatggttcgaccagagttttgtaacatacagcaacaaagccaaagaagaccgcttgggcgtgttgcccgaaaccctgctcgaacacggcgcggtcagccgccaaaccgtctatgagatggcgcgcggcgcgaaagccgtggcgcaggcggattacgccgtcggtatttccggcatcgccggaccgggcggcggcagcgaaagcaaacccgtcggcacggtttggttcgggtttgcctttccgggcggaagttgcgaagcaatgcgccgttttgacggcaaccgcgaatccgtccgcgcgcaggcggtcgccttcgcgttggaacggttggcggggctgattgaaaacggcggcgatgctgtctaa

SEQ ID NO: 47395 - DNA, 1428 bp, Neisseria meningitidis
atggacacaaaagaaatcctcggctacgcggcaggctcgatcggcagcgcggttttagccgtcatcatcctgccgctgctgtcgtggtatttccccgccgacgacatcgggcgcatcgtgctgatgcagacggcggcgggactgacggtgtcggtattgtgcctcgggctggatcaggcatacgtccgcgaatactatgccgccgccgacaaagacaccttgttcaaaaccctgttcctgccgccgctgctgtctgccgccgcgatagccgccctgctgctttcccgcccgtccctgccgtctgaaatcctgttttcgctcgacgatgccgccgccggcatcgggctggtgctgtttgaactgagcttcctgcccatccgctttctcttactggttttgcgtatggaagggcgcgcccttgccttttcgtccgcgcaactcgtgcccaagctcgccatcctgctgctgctgctgctgccgctgacggtcgggctgctgcactttccggcgaacaccgccgtcctgaccgccgtttacgcgctggcaaaccttgccgccgccgcctttttgctgtttcaaaaccgatgccgtctgaaggccgtccggcacgcaccgttttcgcccgccgtcctgcaccgggggctgcgctacggcataccgatcgcactgagcagcatcgcctattgggggctggcatccgccgaccgtttgttcctgaaaaaatatgccggtctggaacagctcggcgtttattcgatgggtatttcgttcggcggggcggcattattgttccaaagcatcttttcaacggtctggacaccgtatattttccgcgcaatcgaagaaaacgccccgcccgcccgcctctcggcaacggcagaatccgccgccgccctgcttgcctccgccctctgcctgaccggcattttctcgcccctcgcctccctcctgctgccggaaaactacgctgccgtccggtttatcgtcgtatcgtgtatgctgccgccgctgttttgcacgctggtagaaatcagcggcatcggtttgaacgtcgtccgaaaaacacgcccgatcgcgctcgccaccttgggcgcgctggcggcaaacctgctgctgctggggcttgccgtaccgtccggcggcgcgcgcggcgcggcggttgcctgtgccacctcattctggttgttttttgttttcaagacagaaagctcctgtcgcctgtggcagccgctcaaacgcctgccgctttatacgcacacattgctctgcctgacctcctcggcggcctacacctgcttcggcacaccggcaaactaccccctgtttgccggcgtatgggcggtatatctggcaggctgcatcctgcgccactggaaagatttgcacaaactgtttcattatttgaaaaaacaagggtttccattatga

SEQ ID NO: 47396 - DNA, 1785 bp, Neisseria meningitidis
atggaactgatgactgttttgctgcctttggcggcgttggtgtcgggcgtgttgtttacatggttgctgatgaagggcaggtttcagggcgagtttgccgatttgaacgcgcaactggcggaaaaggcggcaagatgtgattttgtcgaacaggcacacgcagaaattgcatcggaattggccgttttggacgggaaataccgacatttgcaggacgaaaattatgctttgggcaaccgtttttccgcagccgaaaagcagattgcccatttgcaggaaaaagaggcggaatcggttcggctgaagcagtcgtatatcgagttgcaggaaaaggcacagggtttggcggttgaaaacgaacgtttggcaacgcagctcggacaggaacggaaggcgtttgccgaccaatatgccttggaacgccaaatccgccaaagaatcgaaaccgatttggaagaaagccgccaaactgtccgcgacgtgcaaaacgaccttgccgatgtcggcaaccgttttgccgcagccgaaaaacagattgcccatttgcaggaaaaagaggcggaagcggagcggttgaggcagtcgcataccgagttgcaggaaaaggcacagggtttggcggttgaaaacgaacgtttggcaacgcaaatcgaacaggaacgccttgcttctgaagagaagctgtccttactgggcgaggcgcgcaagagcttgagcgatcagtttcaaaatcttgccaacacgattttggaagaaaaaagccgccgttttaccgagcagaaccgcgagcagctccatcaggttttgaacccgctaaacgaacgcatccacggtttcggcgagttggtcaagcaaacctatgataaagaatcgcgcgagcggctgacgttggaaaacgaattgaaacggcttcaaggattgaatgcgcagctgcacagcgaggcaaaggccctgaccaacgcgctgaccggcacgcagaacaaggttcagggtaattggggcgagatgattctggaaacggttttggaaaattccggcctccagaaagggcgcgaatatgtggttcaggcggcatccgtccgaaaagaggaagacggcggcacgcgccgcctccagcccgacgttttggtcaacctgcccgacaacaagcagattgtgattgactccaaggtctcgctgacagcttatgtgcgctacacgcaggcggcggatgcggatacggcggcacgcgaactggcggcacacgttgccagcatccgtgcacacatgaaaggcttgtcgctgaaggattacaccgatttggaaggtgtgaacacattggatttcgtctttatgtttatccctgtcgaaccggcctacctgctggcgttgcagcatgacgcgggattgttccaagagtgtttcgacaaacggattatgctggtcggccccagtacgctgctggcgactttgaggacggtggcgaatatttggcgcaacgaacagcaaaatcagaacgcactggcgattgcggacgaaggcggcaagctgtacgacaagtttgtcggcttcgtacagacgctcgaaagcgtcggcaaaggcatcgatcaggcgcaaagcagttttcagacggcattcaagcaacttgccgaagggcgcgggaatctggtcggacgcgccgagaaactgcgtctgttgggcgtgaaggcaggcaaacaacttcaacgggatttggtcgagcgttccaatgaaacaacggcgttgtcggaatctttggaatacgcggcagaagatgaagcagtctga

SEQ ID NO: 47397 - DNA, 558 bp, Neisseria meningitidis; identical to SEQ ID NO: 45261

SEQ ID NO: 47398 - DNA, 1440 bp, Neisseria meningitidis
gtgttttaccacagtaaaacaggcgataaaaaatcagccgctaccgatgtgtccgccgcccgaatattaacgaaagtaaatatgaaaccactggacctaaatttcatctgccaagccctcaagcttccgatgccgtctgaaagcaaacccgtgtcgcgcatcgtaaccgacagccgcgacatccgcgcgggcgatgtgtttttcgcattggcgggcgggcggtttgatgcgcatgattttgttgaagacgtattggctgctggtgcggcggcggttgtggtttcgcgcgaagattgcgttgcaatggatggcgcgttgaaagtcgatgacacgcttgccgcattgcaaacgttggcaaaggtgtggcgtgaaaatgtgaatccgtttgtgttcggcattaccggttcggtcggcaagacgacggtgaaggagatgctggctgcggtattgcgccgccgtttcggcgataatgccgttttggcgacggcaggcaacttcaacaaccacatcggattgccgttgactttgttgaaattaaacgaaaaacaccgctatgccgtgattgaaatgggtatgaaccattttggcgaactggcggttttgacacaaatcgccaaacccgatgccgcattggtcaacaacgccatgcgcgcccatgtcggctgcggtttcgacggagtgggcgatattgccaaagcgaaaagcgagatttatcaaggcttatgttcagacggcatggcactgattcctcaagaagatgccaatatggctgtcttcaaaacggcaacgcttaatttgaatacgcgcactttcggcatcgatagcggcgatgtccacgcggaaaatatcgtgctgaaaccgttgtcgtgcgaatttgatttggtgtgcggcgacgaacgcgccgccgtggtgctgcctgttcccggccgccacaatgtccacaacgccgccgctgccgccgcgctgtctttggctgcaggtttgagtttgaacgatgtggcggaaggtttgaaaggcttcagcaatatcaaaggccgtctgaacgtcaaatccggaatcaagggcgcaaccctgattgacgatacttataatgcgaacccggacagcatgaaagccgcgattgacgtgttggcgcgtatgcctgcgccgcgtattttcgtaatgggcgatatgggcgaactgggcgaggacgaagccgccgctatgcacgccgaagtcggcgcgtatgcccgcgaccaaggcatcgaagcggcttattttgtcggcgacaacagcgtcgaagcggcggaaaaatttggcgcggacggtttgtggttcgccgccaaagacccgttgattcaagtgttgcgccacgatttgcccgaacgcgccaccgtgttggtgaaaggttcgcgctttatgcagatggaagaagtggtcgaggcattggaggataagtga

SEQ ID NO: 47399 - DNA, 1383 bp, Neisseria meningitidis; identical to SEQ ID NO: 44527

SEQ ID NO: 47400 - DNA, 2262 bp, Neisseria meningitidis; identical to SEQ ID NO: 45315

SEQ ID NO: 47401 - DNA, 1041 bp, Neisseria meningitidis; identical to SEQ ID NO: 45119

SEQ ID NO: 47402 - DNA, 1224 bp, Neisseria meningitidis; identical to SEQ ID NO: 39212

SEQ ID NO: 47403 - DNA, 1032 bp, Neisseria meningitidis; identical to SEQ ID NO: 36792

SEQ ID NO: 47404 - DNA, 1341 bp, Neisseria meningitidis
ttgcacacccttctagcttttatcttcgccatcctgattttggtcagcctgcacgagttcggacactacatcgttgccagattgtgcggcgtcaaagtcgtacgcttttccgtcggcttcggcaaaccgtttttcacccgaaagcgcggcgacaccgaatggtgcctcgccccgattccgttgggcggttacgtcaaaatggtcgacacgcgcgaaggcgaagtatcagaagccgatttaccctacgcttttgacaaacaacaccccgccaaacgcatcgccatcgtcgccgccggcccgctgaccaacctcgcactggcggttttgctgtacggactgagcttttccttcggcgtaaccgaactgcgcccctacgtcggcacagtcgaacctgacaccattgccgcccgcgccggcttccaaagcggcgacaaaatacaatccgtcaacggcacacccgttgcagattggggcagcgcgcaaaccgaaatcgtcctcaacctcgaagccggcaaagtcgccgtcggcgttcagacggcatcgggcgcgcaaaccgtccgcaccatcgatgccgcaggcacgccggaagccggtaaaatcgcaaaaaaccaaggctacatcggactgatgccctttaaaatcacaaccgttgccggcggcgtggaaaaaggcagccccgccgaaaaagcaggcctgaaaccgggcgacaggctgactgccgccgacggcaaacccatcgcctcatggcaggaatgggcaaacctgacccgccaaagccccggcaaaaaaatcaccctgaactacgaacgcgccggacaaacccataccgccgacatccgccccgatactgtcgaacagtccgaccacaccctgatcgggcgcgtcggcctccgtccgcagccggacagggcgtgggacgcgcaaatccgccgcagctaccgtccgtctgttatccgcgcattcggcatgggctgggaaaaaaccgtttcccactcgtggacaaccctcaaatttttcggcaaactaatcagcggcaacgcctccgtcagccatatttccggtccgctgaccattgccgatattgccggacagtccgccgaactcggcttgcaaagttatttggaatttttggcactggtcagcatcagcctcggcgtgctgaacctgctgcccgtccccgttttggacggcggccacctcgtgttttatactgccgaatggatacgcggcaaacctttgggcgaacgcgtccaaaacatcggtttgcgcttcgggcttgccctcatgatgctgatgatggcggtcgccttcttcaacgacgttacccggctgctcggttag

SEQ ID NO: 47405 - DNA, 1974 bp, Neisseria meningitidis
atgcaccccatcgaaacccccgataagaccttccacgacggcgacggcgtgtccgaattgggcaccatcctgcccgcgtggtggctcaaccaagtgcaatccgagctgctggccgtgctgactgcggccggtatccagccggataagtcgcagcctaatcaattactggcagcactgaatagactggctgtagttaccaccggcaaccaagaaatcggcggccaaaaaacctttaccgcccaaacccaattccaaagcggcatccatttatccgccaaccagacgaactggaacggcggccacaaagcctacatcggcgcggatgccgacaacgcccacatcgtcttcggcgacgacaccctgcgcctgcacggcgcaaacaaccgcatttcctacaacaaccacgacatcttccacaaagccaacaaaccgcgttttgccgaagacatcgaaggcaaaccgaacacactgtccggatacggcatcggcaatttcaaagtcgaaaccttccggggcgatttgaacaccctcaaaacagacggcatctattccctgtcgacggcggtcggcagctccaacctgcccgttgaaaacaccgcctgccatatccaagtcatcgccggcacgaaacacggctggtgcaggcagttgggttatcccgcctacacgtccgacgtgtacgaacgccaccaaacgagcagcgcaaacgacaactggtccgcatggaaaaaactcaattcggacggcatccccgtcggcgcgatcgtatcctttcccaaagccgtccgaaaccccgcaggctatctcaaagccaacggcacgacctttgcacaaaacaccttccccgacctctaccgcgccttgggcaacagcaaccgcctgcccgatttaagccgtaccgacatcggcatgaccgcgtggtttccgtccgaccaaatcccgaccggctggctggcgtttgacgacatccgcacgcgcgtaaccgaaaccgcttatcccgagctgtaccgtctgctgaccggaaaatacggcagcatccaaaacgtcccgcaggcggaagaccgctttatccgcaacgcaggcaacagcttggcagtcggaacgaagcaggaagacgaaatcaaacggcacgtccacaaagtattttcacactggacaaaccacacagacacggcagccgtcggttacgaagaccacaacgaaaggcagagaagcgcgctcgtatcgacttggacggacggcgatttaaacgacaacggctttttaaccccgcgcccggacagcaaaatggcgacaggcggcgacgaaaaccgccccaaagccctggttttaaaactgtgcatcaaagccgccgacaccttgggcgaagccgtgttttggataaagtcccacggcgaaaccatcaacgccggcgcgctggacgcgggcacgctggcgcaaaacctccaagacaaagcagaccgcgcccacacccacaccgccgcccaaatccaagggctggacgaaaaaatcagcaccgccgttgccgcgcaattcacacgccaaaccatcggcggcgtggatattgtcagattccccgacggcacaatgatacagaccggcagctacaggttcacacgaagcggcggccccatcgaaaacgaagtcgtcttccccgtcgcctttgccgacggcaacgtcaaatgcttcgtatccgaacgccattcgggacgcgttaccggcgatcgaaggcaacacaactggctgtttatccgcgcaaaaaaccacgccgccgccattattaccaactggtacgaaggcagttgcgactggatggccatcggcaaagccgcctcgggaaacgccgccagctccccgataggccccgaaatacctgaaaccaacgaagaaccgcaaagagagagtggaagaacatcaaccggaccccgaaaccgccgccgccgagacggcttgctcgaggcactgcaagactag

SEQ ID NO: 47406 - DNA, 795 bp, Neisseria meningitidis
gtgttacaccgtttgcagaaagtcgtgcgccatatcgcgcaaaccgaaattatgccgcgttttttgaatacgccgtcttgccgcaaggaagatggttcgatgttgagcgaggcggacattgccgcgcagacggcatttgccgccgcgttgccgcttctgatcgattgcccgatgttgggcgaggaaatgtcgcggcaggaacagtcggctttgtgggaacaatattcgggggaaaaggggctgtggattgtcgatccgatagacgggacgaacaattttgtcaacgggctgccgcattttgcggtgtcggtggcgtttgtccgcaacgggcgtgcggaattgggcgtaatctacaacccggtcagcggcgaatgtttttatgccgaacgggggcagggtgcgtttcttaatggaacccgcctgcctttgcgtctcgtggataaaaaactcaatgaggcgattgcgggcgtggaaatcaaatatttgcgttcgggcaaactgtccagccgcatgagtacgctcgcgccttttggaacgatacggagtatgggcagcagtacgttggactggtgttatctggcgtgcgggcgttatgatgtttatgtccacggcgggcagaagctgtgggattatgccgccggcgcgttgattttcgaggaggcgggcggcaggctgacgactttggaaggcgacgggttttggagtggtgaacacgtgttcaaacgctcggtcgtcgccgcgctcgaaccgaagctgtttgaacgctgggtcgagtggatacgggaaaaccaatag

SEQ ID NO: 47407 - DNA, 987 bp, Neisseria meningitidis; identical to SEQ ID NO: 45829

SEQ ID NO: 47408 - DNA, 423 bp, Neisseria meningitidis
atgaaaaaaacgttcctttctgccgtattgcttctgtcagctgcgacccaaaccgtgtgggcagatacggtgttttcctgtaaaacggacaacaacaaatatatagaagttcaaaaaattaaccgcaatctttacgaatattcgttcggcagtgcggcaaaaaaagaaattgccatacgcaacagcaaagctgatctgttggggcgttccgacaggtggcaaggctggggcagaggccgttgggcgacgatgaaattccaaaacggcgaatttatgtacaccgtagatgcaggcttcgattccgtgacccatgcagtaggcagcggtgtccttgtggagcgtaggggcaaggaaatcgcacggttcgactgtacgtcgaaaaccgcgcaggcgaatttcgacgatgacgattttgcctggtaa

SEQ ID NO: 47409 - DNA, 1575 bp, Neisseria meningitidis
atgaaaaaatcccttttcgttctctttctgtattcgtccctacttactgccagcgaaattgcttatcgctttgtattcggaattgaaaccttaccggctgcaaaaatggcagaaacgtttgcgctgacatttgtgattgctgcgctgtatctgtttgcgcgttataaggcgacgcgtttgttgattgcggtgtttttcgcgttcagcattattgccaacaatgtgcattacgcggtttatcaaagttggatgacgggcatcaattattggctgatgctgaaagagattaccgaagttggcggcgcgggggcgtcgatgttggataagttgtggctgcctgcgttgtggggcatgttggaagtcatgttgttttgcagccttgccaagttccgccgtaagacgcatttttctgccgatatactgtttgccttcctaatgctgatgattttcgtgcgttcgttcgacacgaaacaagagcacggtatttcgcccaaaccgacatacagccgtatcaaagccaattatttcagcttcggttattttgtcggacgcgtattgccgtatcagttgtttgatttaagcaaaatccctgtgttcaaacagtctgcgccaagcaaaatcgggcagggcagtgttcaaaatatcgtcctgattatgggcgaaagcgaaagcgcggcgcatttgaaattgtttggctacgggcgcgaaacttcgccgtttttgacccagctttcgcaagccgattttaagccgattgtgaaacaaagttattccgcaggctttatgacggcagtatccctgcccagtttctttaacgtcataccgcatgccaacggcttggaacaaatcagcggcggcgataccaatatgttccgcctcgccaaagagcagggctatgagacgtatttttacagtgctcaggctgaaaaccaaatggcaattttgaacttaatcggtaagaaatggatagaccatctgattcagccgacgcagcttggctacggcaacggcgacaatatgcccgatgagaagctgctgccgctgttcgacaaaatcaatttgcagcagggcaggcattttatcgtgttgcaccaacgcggttcgcacgccccatacggcgcattgttgcagcctcaagataaagtattcggcgaagccgatattgtggataagtacgacaacaccatccacaaaaccgaccaaatgattcaaaccgtattcgagcagctgcaaaagcagcctgacggcaactggctgtttgcctatacctccgatcatggccagtatgttcgccaagatatctacaatcaaggcacggtgcagcccgacagctatctcgtgccgctggtgttgtacagcccggataaggccgtgcaacaggctgccaaccaggcttttgcgccttgcgagattgccttccatcagcagctttcaacgttcctgattcacacgttgggctacgatatgccggtttcaggttgtcgcgaaggctcggtaacgggcaacctgattacgggtgatgcaggcagcttgaacattcgcgacggcaaggcggaatatgtttatccgcaatga

SEQ ID NO: 47410 - DNA, 381 bp, Neisseria meningitidis; identical to SEQ ID NO: 39549

SEQ ID NO: 47411 - DNA, 543 bp, Neisseria meningitidis
atgattaatcatattgaaaaatatataggcactatttctcatggctcgaaaagcgattcgggaagtcagtacaaattaaatatcgcagctattccctcttcccctaacagggatttaaaaacttatattactttagggttaagcaaacatgatctgaattataaaagcagatttgaaatacttttcgtatgttctttaaaatatgatgaaaatcagattttcccatttttaagatggttggcagaaaccatcattgagaacaaaaaaatccttcttcgggggcaggttgtttatttgcccagaagcattgttgattcaacaaaaatggatgcactgtatgtttccgccccattttatttcgacgatgattttcaggtctgttatggcgaacactacaatatcgttttccctttgcttgtccccttgtataaacaggaagccgaattggtggaaaagaaaggttggaatgcttttgagcagttcttgttggataatgaagttggcaacctttcggatatgaatcggaaaccgtttacttggtaa

SEQ ID NO: 47412 - DNA, 726 bp, Neisseria meningitidis
ttgatggataaggacaaggggtcttatgcgggtattcctgtacaaaataccaaagagttagtttggcagaaaatacaagacatacctatttctgaatgtggggaaccgttggtcagtgttggtaataccggacgcattcgtgtcaatcctgtttatttttctcagggtattgaaggggcgataaatagtgttttattgcgtagaagtgttgctgataggctgactcaggttgtctctttgctgccggaagtgtacgggttggaaatttttgatggttggcgtcctgtcatagtgcaaagagcattacgagaaaatatgaagcaagaaattgaaaaacgccatccggaatatgatgaagttcaagttagagaagcactggactgttttgctgctgatccagatcgggcaggaatgcctctgccccatttgacaggcggatctgttgatgtcggattgtttgatataaaaagtggcaaaagtttggatatgggaagtgagtttgatgcaactggacatttatcttatagcgatgctttagagaaagaaggtgagtatttctcctctgctcgtaatttacgccggattttgattcatgcgatgaaagaggcaggatttagtaatttgccaaccgaatggtggcatttcgattatggcaaccaaaattgggcttattttacccaacaaagcaacgcagtttttggggcggtagaagagcaggatacttaa

SEQ ID NO: 47413 - DNA, 2280 bp, Neisseria meningitidis
atgaatacaccgactgatttgaaagtaaccaaacgagacggaagattagaagccattgatttggataagattcaccgtgtcgtcacttgggcggcggacggattggaaaatgtttccgtatctcaggtcgagttgaaatcgcacatccagttctacaacggcatccgcaccgacgacatccacgaaaccatcatcaaagccgctgccgatttaatttcggaagataccccggactaccaataccttgccgcgcgtttggcgattttccatcttcgtaaaatagcctacggcgagtacgagccgccgcacctttacgaccacgttaaaaaacttaccgatgccggaaaatacgacaggcatatccttgaggattacagccgcgaagaatttgacgaactgaacgcctatatcgaccacgaacgcgatatgtccttttcctatgccgctgtcaaacagctcgaaggcaaatatctggtacagaaccgcgttacccgccaaatttacgaaacgccgcagtttttatatgttttggtggcgatgtgccttttcagcaaatacccgaaagaggcgcgcttgggttacgtcaaacggttttacgatgccgtttctacatttaaagtatcgctgccgactccgattatgagcggcgtgcgtacgcctacgcgccagttctcaagctgtgtgctgattgaatgcgacgatagtttggattccatcaatgccactaccagcgcgattgtgaaatacgtttcccagcgtgcgggcatcggcatcaatgccggacgtatccgcggtttggacagcgaaatccggggcggcgaagcgcggcataccggctgcattcccttctttaaaatgtttcaggcggcggtcaaatcctgttcgcaaggcggcgtgcgcggcggcgcggcaaccttgttctaccccttgtggcatatcgaagccgaaagcctgctggtgttgaaaaacaaccgcggtgtggaagacaaccgtatccgtcagcttgattacggcgtgcaaatcaaccgcctgctgtacacccgcctgattaagggcggcaacattacgctgttttcgcccaacgaggttccgggattgtacgaagcgttttttgccgaccaagacgaatttgagcggctctatacgaaatacgagcaagaccctgatatccgcaagcgcatcattccggctgccgacctgttttccacgctgatgcaggagcgtgccggaaccgggcgcatctacattcaaaacgtcgatcactgcaatacgcacagcccgttcgatccgcgcgtcgcgcctgttcatcagtccaacttgtgtatggaaatcgccctgccgaccaaaccgctggacaatatcaacgatccgaacggcgaaatcgccctgtgtacactgtctgcctttaacttgggcgcattaaacagcttggacgaattggaagggcttgccgacttgaccgttcgtgcgctcgatgcacttttagattatcagggatatccggtagaagccgcgcgtacctctactatgggccgccgttcgctcggcatcggcgtgattaactatgcttattatctggcgaaaaacggtgtccgctacagcgacggctccgcgctcggtctgacccaccgtacctttgaagccatacagtattacctgctcaaagcatcggcaaaccttgccaaagaatacggtgcgtgtacgctctttaaccaaaccgtttattcgcaaggcaaactgcccatcgacacctacaaaaaagatttggatgccgtctgcggcgagcctttgcattacgactgggaaagcctgcgtgccgaaatcgtcaaatacggcctgcgtaactctactctaaccgcactcatgccgtctgaaaccagttcgcaaatcgccaacgccaccaacggtatcgagccgccgcgcggattggtaacggtcaaagcatcaaaagacggtattttgaaacaagtcgtaccggaatttgaaaccctgaaagacgcctacgaaaccctgtggcagcttcccggcaacgaaggctacttgaaacttgtcggcgtaatgcaaaaattcgtcgatcaatcgatttccgccaataccgcctacgacccgaacaaattcgaaggcagcaaagtttccatgaaacaaatgctcaaagacttattgaccgcttacaaatacggcgtcaaaaccctgtactaccacaacacccgcgacggcgcggacgatacgcaagccgatattcaggatgacggctgcgcgggcggggcttgtaagatttaa

SEQ ID NO: 47414 - DNA, 369 bp, Neisseria meningitidis; identical to SEQ ID NO: 45474

SEQ ID NO: 47415 - DNA, 231 bp, Neisseria meningitidis
atgaacatcgttaaaaaatatgctgtaaaagcattgttggcagccggtatcttcacaccggctattgttatggcagatggctttgatgcatccgcgattggtacgcaagtggcgaatgtaatcatgggttttgtggcaatggtttccgccgtgggtatggcggcaattaccgtgattcttgcaatccaaggcttcaaaatggcttggagcatgatcaaatctgtcaaataa

SEQ ID NO: 47416 - DNA, 1587 bp, Neisseria meningitidis
atggcacttttcctcagcatattccccatcgtcctgctgatttggctgatggtgaaaaaaaacagtatgccctcctacgtcgcgctgccgattaccgcagtgctgatttacgccatcaaacttttctacttcggcgatgcgggcatgctgctcaacgccaccgccgcttccggcctcgtcaaaacgctcacgccgattaccgtgattttcggcgcgattatgttcaaccgtatgatggaaaccacgggctgcatcgatgtcatccgcaaatggctggcgaccatcagccccaaccccgtagcgcaactgatgattatcggctgggcttttgcctttatgattgaaggcgcatccggcttcggcacgcctgccgcgattgccgcgccgattctgatgagcttgggcttcaacccgttgaaagtggcgattttcactttggtgatgaactccgtccccgtctctttcggcgcggtcggtacgccgacctggttcggtttcgcaccgctgaacctgagtgccgaagacatcctcgccatcggcaggcagaccggcgtaatgcacttcttcgcaggtttcgtcatccccgtcatcggcttgggcttcatcgtaccttggtctgaaatccgcaaaaacttgggcttcgtcgccattgccgtcttctcctgcaccattccttatgtcgcattggcgatggtcaacgaagaattcccgtcgctcgtcgccggcgcaatcggcctgatggtgtccgtattcgccgccaaccaaggctggggcttgagcaaagaccacgccaaagacccgaatgccgaaaaagtgccgttcgcccaagtcgccaaagcactcgcccctttgggtatgctgatcggcatgctggtggttacgcgcatcaaacagctcggcatcaaaggcattttgaccagcaaagaagaatggttcagcttccaactgccgtttgatttgtccaaaatcaccgtcagcgactccctgacgattaccttcggcaatattttcggacaagatgtcagcgcgtcttaccaaacgctgtacgtcccggcttggattccgtttgtgctgaccgtttggatttgcatcctgctgtataaaaccaaattcaaagatgcctggacgatttattccgtaactttcaatcaaaccaaaaaaccgctgcttgccctgatgggcgcgctgattatggttcagctgatgctggtcggcggcgacaattcgatggtgaaaatcatcggtaaggaatttgccgcaatggcgggcgaacactgggtttatttctcgccgtatctgggcgcgatcggtgcgttcttctccggctccaacaccgtgtccaacctgactttcggcccgattcagcagcaaatcgccttggataccggcctgtccgttaccctgattctggcgttgcagtccgtcggcggcgcgatgggcaatatggtgtgcctcaacaacatcatcgccgtatgtaccgtattggatgtgaaaaattccgaaggtgcgattatcaagaaaaccgttatcccgatggcgatttacggcgtgattgccgtcgtcgcggcaatgattttcttcctctag

SEQ ID NO: 47417 - DNA, 1392 bp, Neisseria meningitidis; identical to SEQ ID NO: 45189

SEQ ID NO: 47418 - DNA, 174 bp, Neisseria meningitidis; identical to SEQ ID NO: 38579

SEQ ID NO: 47419 - DNA, 489 bp, Neisseria meningitidis; identical to SEQ ID NO: 38994

SEQ ID NO: 47420 - DNA, 600 bp, Neisseria meningitidis; identical to SEQ ID NO: 39827

SEQ ID NO: 47421 - DNA, 828 bp, Neisseria meningitidis
atgaaactgattgaacaacatcaaatttttggcggttcgcaacaagtttgggcgcatcatgcccaaacgctgcaatgcgaaatgaaatttgccgtctatttgccaaataatccagaaaatcgaccgcttggtgtgatttattggctttccggcttgacgtgtacggaacaaaatttcattaccaaatcaggctttcagcgttatgcggcagaacatcaagtaattgtggtggcctccgatagcagccctcgcggagagcaagtgccgaacgatgatgcttacgatttaggacagggtgcaggcttttatttgaatgcgaccgaacagccttgggcggcgaattatcaaatgtatgattacattttgaacgagctgccccgtctgattgagaaacactttcctaccaacggcaaacgttccattatggggcattcaatgggcggacacggcgcattggtattggcgctgcggaatcaggaacgttatcaaagtgtttctgccttttcgcctattttatcgccaagcctcgtgccgtggggagaaaaagcctttactgcttatttagggaaagaccgtgaaaaatggcagcaatatgatgcgaactcactcattcaacaaggctataaagtgcaaggtatgcgcatcgatcaaggcttggaagatgagtttttgccgacacaattgcgtaccgaagattttatcgaaacctgccgtgcggcaaaccagccggtcgatgtgcgtttccataaaggctacgatcacagctattacttcatcgccagttttattggcgagcatattgcttatcacgccgcgtttttgaagtaa

SEQ ID NO: 47422 - DNA, 1419 bp, Neisseria meningitidis; identical to SEQ ID NO: 44426

SEQ ID NO: 47423 - DNA, 510 bp, Neisseria meningitidis; identical to SEQ ID NO: 44287

SEQ ID NO: 47424 - DNA, 207 bp, Neisseria meningitidis; identical to SEQ ID NO: 45170

SEQ ID NO: 47425 - DNA, 1077 bp, Neisseria meningitidis; identical to SEQ ID NO: 45054

SEQ ID NO: 47426 - DNA, 219 bp, Neisseria meningitidis; identical to SEQ ID NO: 36291

SEQ ID NO: 47427 - DNA, 276 bp, Neisseria meningitidis; identical to SEQ ID NO: 44656

SEQ ID NO: 47428 - DNA, 303 bp, Neisseria meningitidis; identical to SEQ ID NO: 37201

SEQ ID NO: 47429 - DNA, 501 bp, Neisseria meningitidis; identical to SEQ ID NO: 39468

SEQ ID NO: 47430 - DNA, 516 bp, Neisseria meningitidis
gtgatgaaaaactttaacggcaaactcatcctcatcggactgatgggcgcgggcaaaaccacgctgggccggcaaatggcgcagcggctggattaccgtttttacgacagcgatcacgaaatcgccgcagccgccggcgttcccatccccaccatatttgaaatggaaggcgaacagggattccgttcgcgcgaaaccgccatactcaaaaagctggttatcctgccccatatcgtcctgtccaccggcggcggcgcggtgttaaaagaagaaaaccgcgcccttatccgcaaaagcggcacggtcgtctatctgcacgccccgcccgaaatcctgctcgaacgcacgcgctgcgacaacagccgtcctttgctgcaagttgccgatcctttggcgaaattacgtgaactctacgccgcacgcgaccccgtttaccgccaaaccgccgactttaccgtagaatcggcaaactgccgggaaaccgtgcaaaccctgctcaaacgcttatcccgataa

SEQ ID NO: 47431 - DNA, 201 bp, Neisseria meningitidis; identical to SEQ ID NO: 38240

SEQ ID NO: 47432 - DNA, 3615 bp, Neisseria meningitidis
atgtctgcacccatccaagcatttgacccgctgaccgtccccattgccggcaccaacctgattgaggcctctgccggcaccggaaaaacctacggcattgccgccctgtttacgcgcctgatcgtattggaacaaaaaaacgtcgagcgcgtattggtcgttaccttcaccaaagccgccaccgccgagttgaaaacacgcctgcgcgcacgtttggacgatgtgttgcaggttttagaaagtaaagaaattgccaaacttggagacgacacgctttcagacggcatcgccgcctactgcgccgaacaccacaaaggcgacaccttcctgcccgcactcttaaaacaggctttgcaaaaagagggccggacgcgtctgattgtccgcctcaaagccgccatcgggcaattcgacaacgccgccatctataccatccacggcttctgccagcgcatcctgcgcgactacgcgtttttgtgccaagcaccgttcgatgtcgaactgaccgaagaagacggcgaccgcctgcttgtcccggcgcaagatttttggcgggaacgcgtcagcaatgatccggtgcttgccgcattggcgtttaaacgcaaagctgtgccgcaaaccgtccttgcccaaatccgcgcctacctgtcccgcccgtacctgaatttccgccgtccgcaaaccgatttgccgcaagcccgggatgccgctttggcaagctggcaaaacatttgcggaaatctggctgaattaaaagaaactttttggcgcatccatccccttttaaacggcaattcatatcggaaaaacagttttgccgaactgtttgacgcattggaacaaaaagccctgtcgccggatttgccctttttggaggcaaagctgcacgaacggctcttgaaacttgcgtccgacaaactcgaagccggactgaaaaaaggcaaaacgcccgatgcggcagtatttgccgaattgcagaaactggcagacttcaggcgtgatttggacgcactcgaagaagcggaagaagcaacaataatccggctgcaactggatttaatcggatacctcaaccgcagccttgccgagatgaaaaaatcgcgccgcgaacgcggtttcgacgacctgctgctcgatgtccacaccgcgctgaccgacaatccgcacgccgaaaccctcgcccgcgccgttgccgaaaactgggaaaccgcgctgatcgacgagttccaagacaccgacccgctgcaatacgaaatcttccaaaaaatcttcatcgcccaaaaccgaccgctgttcctcgtcggcgatcccaaacaggcgatttacagctttcgcggagcggacatttacgcctaccttcaggcggcggaagacgcgcggcaccgctacacgctcgccaccaactaccgcagccacgccgcgcttatcggcagcataggcgcgctgttccgcctcaaagaacgcccgttcgttttggaaaacatcggctattcggaagtcggtgcggcgcgtgccgaaagcaggttgtcccccgaacgtcctgccgtacaggttcgttggctgcacgaaaacgacaatgaaaaagccaacaaagacgttttgcgccgccgtgccgccgactattgcgccgacgaaatcgcccacgcgctcaacgaagccgccgaatgccgtctgaatttcaaaggctgcccgttgcagtcgggcgatattgccgtgctggtacgcacgcacaacgaggcggtgatggtttccgctgccctgaaaaaacggcaggtgcaaagcgtcctgctttcgcgcgaatccgtgttcgcctcgcccgaagccgccgccctttccgcactcatcggcttctggctcgaaccgcgccgcgccggaacgctgcgctttgtcctgacaagcggcatattcggttatgacgcgcagcaattgcacgacttcaaccaaaacgaaagcgagattttgcattgggcggaatctgcccgaaccgcgctcgacaactggaatcaatacggcattttcgccgccatgcagcaattttcccaaacacacggcatcgaaacgcgcctcttaagccggaacaacgggcgcagcctgaccaattatttccaactgctcgaactgcttgccgccgaagacgcgcaaaaccgcaaccccgccgcgctgcacaaatggttgcgcgaccaaatcagcctggccggcaacaacagcggcgacaaccgcgccatccgtctggaaagcgacgaagatttggtcaaaatcgttaccatgcacgcctcgaaaggtttgcagtatccgctggtgtactgcccgtttgcgtgggacgcgcaagataccgggccgtccgactggcaaatcctccaccaaagcgcaaatcgaaccgaactgttggcaaaggcgcaactgtcggaagacgaacagaagcaatacgccgatgaggaaatggcggaacgcctgcgcctgctttatgtcgcgctgacgcgtgccgaggaacagctcaacatctacgccgcctattcttccgataccgccgacaaccccctcgcctacctgattgaaggcttgccgcaagacagccgcgaaaccgtccgccaaacctatgactgggaaaaagacggcatcgcgatgctcaaacgcaactggcggcgtttgacggacaatgccccggccggcacggatttcgccttcacagaagatgcgccgccccctgccgcctatcgcggcaacgccggtcaaaccgccgaatttgccgcaaacagcattcccgaacgcagattccgatttgtccgccacaccagctttaccgccttaagccgccatacccaaacgcccgacggcggcgaagaagatgcctgcccgtccttggatgccgccgaaacctcggtgccggcgatgccgtctgaaacgccgacggcttcagacggcatatcgatacacgattttccgaaaggcacgcaggcggggctgtgcctgcacgaaattcttgaagatttcaaattcggacaagcagccgccggacaggaaactctcattgccgacaagctgaaaaaatacggatttgaagaaatatggctgcctgccgttgccgaaatggcggaagcctgccgcaaaacgccgctgacgggggcatactgcctgtccgacatcccgcccgagtgccgctgtcccgaaatgggctttaccctccacaccgaagacttcggcctcaaacggctgcgcgactggtttgcccgcgacgatatccgattgcccgaagtctgccgtgccgccgccgaaacgctcgacttccacaccgtcaacggctttttaaacggctttatcgatatggtctgccaagaccccgacggcaatatctgcgtcatcgactacaaatcaaaccatctcggcgcggacgcatccgcctacacgcaacaggcgatggacgaagccgtcgcgcaccaccactattaccttcaggcgctgatttacgccgttgccgccgcacgctacttcaaactgcgcggacaaccgcccgccgccgtttccgtccgctacctgtttttgcgcggattggatggcaaaggcggcggcgtttggcgttgggacatagatgccgccgctttggaacagataaaataa

SEQ ID NO: 47433 - DNA, 330 bp, Neisseria meningitidis; identical to SEQ ID NO: 40782

SEQ ID NO: 47434 - DNA, 1719 bp, Neisseria meningitidis
atgaacctacatcaaaccgtcgaacacgaagccgccgccgcctttgccgccgcaggcatcgccgacagtcccgttgttttgcagccgaccaaaaatgccgaacacggcgatttccaaatcaacggcgtgatgggtgcggcgaaaaaagccaaacaaaacccgcgcgaactggcgcaaaaggtcgccgacgcattggcaggcaacgccgtcatcgaaagcgcggaagtcgccggtcccggttttatcaacctgcgcctgcgccccgaatttctcgcgcaaaacattcagacggccttgaacgacgcacgtttcggcgtggcaaaaaccgacaaaccgcaaaccgtcgttatcgactattcttcgcccaatctggcgaaggaaatgcacgtcggccacctgcgttccagcatcatcggcgacagcatttcgcgcgtgttagaatttatgggcaataccgttatccgtcaaaaccacgtcggcgactggggtacgcagtttggcatgttggtcgcttatttggtcgagcagcaaaaagacaatgccgcgttcgagttggcggatttggagcagttttaccgcgccgccaaagtgcgctttgacgaagaccctgcctttgccgacaccgcacgcgaatacgttgtgaagctgcaaggcggcgatgaaaccgttttggcattgtggaaacagtttgtcgatatttcgctctcgcacgcccaagccgtttacgacacgctgggcttgaagctgcgccctgaagacgtggcaggcgaatcgaaatacaacgacgatttgcaagccgtggtcgatgatttggttcaaaaaggcttggcggtcgaagacgacggcgcgaaagtcgtgttcttggacgagtttaaaaacaaagaaggcgaacccgccgcatttatcgtgcaaaaacaaggcggcggcttcctttatgcttccaccgatttggcgtgtctgcgctaccgtgtcggcacgcttcatgccgaccgcctgctgtacgtcgtcgaccaccgccaagccctgcactttgagcaactctttaccacttcacgcaaagccggctatctgccggaaaacgtcggcgcggcatttgtcggcttcggcacgatgatgggcaaagacggcaaaccgttcaaaacacgcagcggcgacaccgtgaaactggtcgatctgctgaccgaagccgtcgaacgcgccaccgctttggtgaaagaaaaaaatcccgaattgggtgcagacgaagcggcaaaaataggcaaaaccgtcggcatcggcgcggtcaaatacgccgacttgagcaaaaaccgcaccagcgattatgtgttcgactgggacgccatgctctcgtttgaaggcaacaccgccccctatctgcaatacgcctacacccgcgtgcaaagcgtgttccgcaaagcaggcgaatgggacgcggacgcgccaaccgttttgaccgaacctttggaaaaacaactggccgccgagcttttgaaatttgaaaacgtgctgcaaagcgtggcggacacggcgtatccgcactacctcgccgcctacctctatcaaatcgctaccttgttcagccgcttctacgaagcctgcccgattttgaaagccgaaggcgcaagccgcaacagccgcctgcaactggcgaagctcaccggcgacacgctgaaacaaggcttggatttgctgggcatcgatgtgttggacgtaatgtaa

SEQ ID NO: 47435 - DNA, 1272 bp, Neisseria meningitidis; identical to SEQ ID NO: 44534

SEQ ID NO: 47436 - DNA, 456 bp, Neisseria meningitidis; identical to SEQ ID NO: 45645

SEQ ID NO: 47437 - DNA, 279 bp, Neisseria meningitidis
atgagtaacgatgaaaatttacttttttctcaaccacacttaacaaaggtgaatattatgcaagttttgactttgaatgaaattcaagtttctggtgctgcttgtaactggcgtgatttctcaaaaaataccattggtagtgcattaggtggagcagctggtggggcaattgttggttcatttgcaggtggtattggtgctattccaggtgcgaaattcggagctattggtggtgcaatcactggtgctgtacaatatggaagcacttgttggtggtaa

SEQ ID NO: 47438 - DNA, 1770 bp, Neisseria meningitidis; identical to SEQ ID NO: 45392

SEQ ID NO: 47439 - DNA, 660 bp, Neisseria meningitidis
atgaccacgcccaaactcatcatcttcgactgggacggcacgcttgccgatacgacccaacccatcatcgacaccatgcgccgcagcttcgccgaatgcggttttccgccgcccgaagcggaacgcgtccgcagcctgattggctacagcctgcccgaaatcatccgcgacctgctcgaaatgccgtctgaaaccgccgttgccgacatcgcgcgcacttattccgcgcattacctcaatcccaacaaccgcaatatgacgctctttcccgatgccctgccctgtctggacaagctcaaagcacaaggcttccggcttgccgtcgccacgggcaaagggcgggcgggtttggacaacgccatcagccaaaccgccaccggcggctattggctcgccaccgcctgcgcgggggaatatccctccaaaccctcgcccgaaatggtattcggaatctgcggcgaactggggttcgacccgaaagaggcattggtcgtcggcgatacggcgcatgacctgcatatggcggcaaacgcaggcgcggcggcagtcggcgtggccaccggcgcacattcgcgcgaacagctccttagcgcaccgcatctcgccgtattggacggtttgtccgaactgcccggttttcttgcacgacattacgcctga

SEQ ID NO: 47440 - DNA, 900 bp, Neisseria meningitidis
atgcctgccttaactgttacttggatgatatacacaaaatatttggtataccaaatatatttggtaatattttgcggtgtttttatggaacgcattgatttagcattgaatttagttgaagagagaagccgacttggatactctcgaaagaattttgctgagcaaactggatgtagtgcagaaagtttgagactgtatgaaagcgggcaggtcaacattcctgcggactttttacttgctgctgtccaattaggggtggatattcaatttgtctttacaggcattcattcggcaaatttaaatgctgtttcagacgaccttaataaaaaattggacgacgctattggcaaatcaaacgttgagaatcagattaacggcaacgtcagtaacgctgttatcgcctcatctggttcggttgttcatcaaattaatacccaaaatcacgtcatcagaacccgtgtcgattcaaaacccggcaaggaacatataacgcttgagcaagcttcaaagctgcaacaacttgttaaacaagttgccgcagcagaagagattgccaaacggtcgccaaaatcaatccgtgcaatttgggctagtctgaatgctcactgtaaagttccaagttacaaactaatcgcattgagcgattacgacaaagcagaaacttatctcagaaaatggctgggtaggttgagcaatacagcaacatcaaagaacaacgatcccgactggcgaaaaaagaaatacgcttatatcaaattaaatgtaaaacagcttgagcttgaagattggttgaaaagttacctcgaaaaaaatttctcagtagaaagcctgactgaattaagtgatgaagatttgcaaaaaacatatgcagcagtatcgactaaaaaacggaaaaaatag

SEQ ID NO: 47441 - DNA, 1077 bp, Neisseria meningitidis
ttgccaaaaccgtcaaacactatgccgtctgaaacacgcctgccgaactttatccgcgtcttgatatttgccctgggtttcatcttcctgaacgcctgttcggaacaaaccgcgcaaaccgttaccctgcaaggcgaaacgatgggcacgacctataccgtcaaatacctttcaaataatcgggacaaactcccctcacctgccgaaatacaaaagcgcatcgatgacgcgcttaaagaagtcaaccggcagatgtccacctatcagcccgactccgaaatcagccggttcaaccaacacacagccggcaagcccctccgcatttcaagcgacttcgcacacgttactgccgaagccgtccgcctgaaccgcctgacacacggcgcgctggacgtaaccgtcggccccttggtcaacctttggggattcggccccgacaaatccgttacccgtgaaccgtcgccggaacaaatcaaacaagcagcatcttatacgggcatagacaaaatcattttgaaacaaggcaaagattacgcttccttgagcaaaacccaccccaaggcctatttggatttatcttcgattgccaaaggcttcggcgttgataaagttgcgggcgaactggaaaaatacggcattcaaaattatctggtcgaaatcggcggcgagttgcacggcaaaggcaaaaacgcgcgcggcgaaccttggcgcatcggcatcgaacagcccaacatcgtccaaggcggcaatacgcagattatcgtcccgctgaacaaccgttcgcttgccacttccggcgattaccgtattttccacgtcgataaaagcggcaaacgcctctcccatatcattaatccgaacaacaaacgacccatcagccacaacctcgcctccatcagcgtggtcgcagacagtgcgatgacggcggacggcttgtccacaggattattcgtattgggcgaaaccgaagccttaaagctggcagagcgcgaaaaactcgctgttttcctgattgtcagggatacaggcggctaccgcaccgccatgtcttccgaatttgaaaaactgctccgctaa

SEQ ID NO: 47442 - DNA, 1122 bp, Neisseria meningitidis; identical to SEQ ID NO: 44832

SEQ ID NO: 47443 - DNA, 855 bp, Neisseria meningitidis
atgaaaatcgtcctgattagcgggttgtccggttcgggcaaatccgtcgcactgcgccaaatggaagattcgggttatttctgcgtggacaacctgcccttggaaatgttgcccgcgctggtgtcgtatcatatcgagcgtgcggacgaaaccgaattggcggtcagcgtcgatgtgcgttccggcatagacatcggacaggcgcgggaacagattgcctctctgcgcggactggggcacagggttgaagttttgtttgtcgaggcggaagaggccgtgctggtccgccggttttccgaaaccaggcgaggccaccctctgagtaatcaggatatgaccttgttggaaagcttaaagaaagaacgggaatggctgttcccgcttaaagaaatcgcctattgtatcgacacttccaagatgaatgcccaacagctccgccatgcagtccggcagtggctgaaggtcgaacgtaccgggctgctggtgattttggagttcttcgggttcaaatacggtgtgccaaacaacgcggattttatgttcgatatgcgcagtctgcccaacccgtattacgatcccgagttgaggccttacaccggtatggacaagcccgtttgggattatttggacggacagccgcttgtgcaggaaatggttgacgacatcgaaaggtttgttacgcattggctgccgcgtttggaggatgaaagcaggagctacgttaccgtcgccatcggctgtaccggcgggcagcaccgttccgtctatgttgtcgaaaaactcgcccgaaggttgaaagggcgttatgaattgctgatacggcacagacaggcgcaaaacctgtcagaccgctaa

SEQ ID NO: 47444 - DNA, 1317 bp, Neisseria meningitidis
atgaaggcagccgccgcctttgcggcaggtttggatgcacaggctgttcgcatcgtcatcgacatttacggctcgctcgcactgaccggatacggacacggtacatttgacgcgctgatgctcggtttggaaggcagcctgccgcacgacatcccgcttgccggcattcccgaacgcctcgaacgcatccgcacgcagcacatcctccggctcaacgggcaagaaatccgcttcatccccgaccgcgacctgaacatactcggcaatcaagtgctgcccaaacaccccaacagcctgcgttttaccgcctatgcttcagacggcacggtattgaatgaacaggtttattattcggtcggcggcggctttgtcgttaccgaagaagattttgaccggcaggcggaaacggaaaaagccgttccctatccctataccagttgcgccgaactgcttgcccgatgccgtctgaaccggctcgacatctccgaagtcgtgttggcaaacgaagccgcgcttgccggatgcggcgaagccgaaatccgccgccgcgccgctgccgttgccgaggttatggaaggctgcatcaaacgcggcttgggtgcggacggcgaactgcccggcttgaacgtccgccgccgcgccccgcagcttgccgccaagctcaaagtcctgcgcgaaaccgaaatcgtcaacacccagctctggccgatggtgtacgccatggcggtcaacgaagaaaacgccgccggcggacgcgtcgttaccgcaccgaccaacggcgcggcaggcatcattcccgccgtattgcactatttccgcaagttcaatccgcacgccacacaggaacgcgtcgaaaacttcctgctcaccgcaggcgcaatcggcatcctctacaagaccaacgcctccatttccggtgcggatgtcggctgtcagggcgaagtcggcgtagcgtgttcgatggcggcgggcgcatacgccgaagtcatcggcggcacgcccaaacaagtggaaaacgccgccgaaatggcgatggaacaccatttggggctgacttgcgaccccgtcggcggactggtgcaaatcccctgcatcgagcgcaacggcatcgccgccgaaaaagccctcaaactcggcacgctcgcgcttttggaagacggcacggacaaaaaagtctcgctcgacgaagtcatccgaaccatgctgcaaaccggccgggatatgaaggcgacctacaaagaaacctcgcttgccggactcgccgccacgctccggaaaaaagccgtccccgtatccgtgcgcgtggtcgagtgctga

SEQ ID NO: 47445 - DNA, 1416 bp, Neisseria meningitidis; identical to SEQ ID NO: 44158

SEQ ID NO: 47446 - DNA, 519 bp, Neisseria meningitidis; identical to SEQ ID NO: 36474

SEQ ID NO: 47447 - DNA, 399 bp, Neisseria meningitidis
ttgatgatgtattcgtttgaagcgaatgcaaatgcagtaaaaatatctgaaactgtttcagttgataccggacaaggtgcgaaaattcataagtttgtacctaaaaatagtaaaacttattcatctgatttaataaaaacggtagatttaacacacatccctacgggcgcaaaagcccgaatcaacgccaaaataaccgccagcatttcccgcgccggcgtattggcggggggcggcaaacttgcccgcttaggcgcgaaattcagcacaagggcggttccctatgtcggaacagcccttttagcccatgacgtatacgaaactttcaaagaagacatacaggcacgaggctaccaatacgacaccgaaaccgacaaatttgtaaaggtctcaggctaa

SEQ ID NO: 47448 - DNA, 315 bp, Neisseria meningitidis; identical to SEQ ID NO: 37950

SEQ ID NO: 47449 - DNA, 792 bp, Neisseria meningitidis
atggcaagacatccctaccgccgcctccgtcctgcaaaatccggctttcccgaagtcggcatttccgaagaaggcaatatccgttcgcttcacttgggcagcgacaccatccaaagctcaatgaacctcgaccacccgtccgagctggtactttcttacagccgcgcgatgatgggctggctgctgcttgcggaacgcctgccgcagcatatcacccaaatcggcttgggcggcggctcgtttgcacgctggatagacacctacctgcccgacacgcgccaaaccgccgtggacatcaatcctcaggttatcgccattgcccgcaacctgtttgagttgcctttcgagggcgagaaatttgaaattattgaagcagacggtgcggaatatatcaaagtcttccgccacaacaccgatgtgattttggtggacggattcgacggcgaacaaatcatcgatacgctggttgaagaaccgttcttccgagactgccgcaacgcgctttcttcagacggcatattcgttaccaactggtggagcggcgacaaacgctaccaacgcttcatcgaacggttgttgagcgtttttgaagggcgcgtcttggaacttcctgccgaaagccacggcaatgtcgcggtaatggccttccaaagcagccccaaagagcaaaacatagacaaactcaagaaacgcgccgacaaactgagcaacgcatacggattggacttccaccgcatgctcgccgacctgaaagcatccaaccccaacaacggcaagcatttctacctttaa

SEQ ID NO: 47450 - DNA, 966 bp, Neisseria meningitidis; identical to SEQ ID NO: 45729

SEQ ID NO: 47451 - DNA, 1980 bp, Neisseria meningitidis
atgtctcaactggcaaacgcaatccgcttcctctcggccgatgccgttcaaaaagccaattccggccaccccggcgcacctatgggtatggcggaaatggcggaaacattgtggacgaaattcctcaatcacaaccccgccaaccccaaattctacaaccgcgaccgcttcgtcctctccaacggccacgcgtctatgctgttgtacagcctgctgcacctgaccggctacaacctaagcattgaagacttgaaaaacttccgccaactgcacagcaaaacccccggccatcccgaatacggctacaccgacggcgtggaaaccacgaccggcccgttggggcaagggattgccaacgcggtgggtatggcattggcagaaaaaatccttgccgccgaatttaataaagacggtttgaacatcgtcgatcattacacctacgtctttatgggcgacggctgtctgatggaaggcgtatcgcacgaagcctgttcgctcgccggcaccttgggcttgggcaaactgattgttttatatgatgacaacaatatttccattgatggtaaagtggacggctggtttaccgaaaacatcccgcaacgctttgaaagctacggctggcacgtcgttcctaacgtaaatggtcatgacaccgccgccattcaagccgccatcgaagccgcacgtgccgaaaccggcaaaccgtccatcatctgctgtaaaaccttaatcggcaaaggcagtgccaataaagaaggcagccacaaaacccacggcgcacctttgggtgcggacgaaatcgaagccacgcgcaaacatttgggctggacttaccctgcctttgaaatcccgcaagaaatttacgatgcgtggaatgccaaagaaaaaggcgcgaaactggaagccgaatgggacaaactgttcgcgcaataccaagccaaatatcctgccgaagccgcagaatttgtgcgccgtatggataaaaaactgccggaaaactttgacgggtacgttcagacggcattgaaagaagtgtgcgccaaagccgaaaccgtcgccacccgcaaagccagccaaaacagcatcgaaatcttggcaaaagagctgcccgaactggtgggcggctctgccgacctgaccccgtccaatctgaccgactggtcaaacagcgtctccgttacccgcgacaaaggcggcaactacatccactacggcgtgcgcgagttcggcatgggtgcgattataaacggcttggtattgcacggcggcgtgaaaccctttggcgcgaccttcctgatgttcagcgaatacgagcgcaacgccctgcgtatggcggcactgatgaaaatcaaccccgtgttcgtgttcacccacgattccatcggtttgggcgaagacggcccaacccaccagccgattgagcaaaccgccaccctgcgcctgattccgaatatggacgtatggcggccgtgcgacaccgccgaatccttggtcgcttgggcagaagccgtcaaagccgccgatcacccgtcctgcctgattttcagccgtcaaaacctgaaattccaagcgcgcagcgaacaacaactgaacgacatcaaacgcggcggctacgtcatcagcgaagcccaaggcaacgcccaagccgtcatcattgccaccggttccgaagtcgagctggctttggaagcgcaaaaagcactcgccgcgcaaaacatcgccgtgcgcgtcgtttccatgccgtccaccaacgtattcgaccgccaagacaccgcctatcaagccgccgtcctgcccgaaggcctgccgcgcattgccgtagaagccggacacgccgacggctggtacaaatacgtcggcctgaacggcgcagtcgtcggcatcaaccgcttcggcgaatccgcccctgccgatctgctgttcaaagaattcggctttaccgtggacaatgtggtcgatacagtgaaatcagtgctgtaa

SEQ ID NO: 47452 - DNA, 2295 bp, Neisseria meningitidis
atgcgacgagaagccaaaatggcacaaactacactcaaacccattgttttatcaattcttttaatcaacacacccctcctcgcccaagcgcatgaaactgagcaatcggtggatttggaaacggtcagcgtcgtcggcaaaagccgtccgcgcgccacatccgggctgttgcacacttcgaccgcttccgacaaaatcctctccggcgataccttgcgccaaaaagccgtcaacttgggcgatgctttggacggcgtgccgggcattcacgcctcgcaatacggcggcggcgcgtccgctcccgttattcgcggtcaaacaggcaggcggattaaagtgttgaaccatcacggcgaaacgggcgatatggcggatttttcgcccgatcacgccattatggtagataccgccttgtcgcaacaggtcgaaatcctgcgcgggccggttacgctcttgtacagctcgggcaatgtggcggggctggtcgatgttgccgatggcaaaatccccgaaaaaatgcctgaaaacggcgtatcgggcgaactcggattgcgtttgagcagcggcaatctggaaaaactcacgtccggcggcatcaatatcggtttgggcaaaaactttgtattgcacacggaagggctgtaccgcaaatcgggggattacgccgtaccgcgttaccgcaatctgaaacgcctgcccgacagccacgccgattcgcaaacgggcagcatcgggctgtcttgggttggcgaaaaaggttttatcggcgtagcgtacagcgaccgtcgcgaccaatatggtctgcctgcccacagccacgaatacgatgattgccacgccgacatcatctggcaaaagagcttgattaacaaacgctatttacagctttatccgcacctgttgaccgaagaagacatcgattacgacaatccgggcttgagctgcggcttccacgacgacgatgatgcacacgcacacacccacagcggcagaccgtggatagacctgcgcaacaaacgctacgaactccgtgccgaatggaagcaaccgttccccggttttgaagccctgcgcgtacacctgaaccgcaacgactaccgccacgacgaaaaagcaggcgatgcagtcgaaaacttttttaacaaccaaacgcaaaacgcccgcatcgagttgcgccaccaacccataggtcgtctgaaaggcagctggggcgtgcaatatttacaacaaaaatccagtgctttatctgccatatccgaagcggttaaacaaccgatgctgcttgacaacaaagtgcaacattacagctttttcggtgtagaacaggcaaactgggacaacttcacgcttgaaggcggcgtacgcgtggaaaaacaaaaagcctccatccgctacgacaaagcattgattgatcgggaaaactactacaaccatcccctgcccgacctcggcgcgcaccgccaaaccgcccgctcattcgcactttcgggcaactggtatttcacgccacaacacaaactcagcctgaccgcctcccatcaggaacgcctgccgtcaacgcaagagctgtacgcacacggcaaacacgtcgccaccaacacctttgaagtcggcaacaaacacctcaacaaagagcgttccaacaatatcgaactcgcgctgggctacgaaggcgaccgctggcaatacaatctggcactctaccgcaaccgcttcggcaactacatttacgcccaaaccttaaacgacggacgcggccccaaatccatcgaagacgacagcgaaatgaagctcgtgcgctacaaccaatccggtgcggacttctacggcgcagaaggcgaaatctacttcaaaccgacaccgcgctaccgcatcggcgtttccggcgactatgtacgaggccgtctgaaaaacctgccgtccctacccggcagggaagatgcctacggcaaccgtcctttcatcgcacaggacgaccaaaatgcccctcgcgttccggctgcgcgcctcggcgtccacctgaaagcctcgctgaccgaccgcatcgatgccaatttagactactaccgcgtgttcgcccaaaacaaactcgcccgctacgaaacacgcacgcccggacaccatatgctcaacctcggcgcaaactaccgccgcaatacgcgctatggcgagtggaattggtacgtcaaagccgacaacctgctcaaccaatccgtttacgcccacagcagctttctctctgatacgccgcaaatgggccgcagctttaccggcggcgtgaacgtgaagttttaa

SEQ ID NO: 47453 - DNA, 2277 bp, Neisseria meningitidis; identical to SEQ ID NO: 45398

SEQ ID NO: 47454 - DNA, 4266 bp, Neisseria meningitidis; identical to SEQ ID NO: 44768

SEQ ID NO: 47455 - DNA, 546 bp, Neisseria meningitidis; identical to SEQ ID NO: 39790

SEQ ID NO: 47456 - DNA, 963 bp, Neisseria meningitidis; identical to SEQ ID NO: 44668

SEQ ID NO: 47457 - DNA, 2037 bp, Neisseria meningitidis
atgactgacaacgcactgctccatttgggcgaagaaccccgttttgatcaaatcaaaaccgaagacatcaaacccgccctgcaaaccgccatcgccgaagcgcgcgaacaaatcgccgccatcaaagcccaaacgcacaccggctgggcaaacactgtcgaacccctgaccggcatcaccgaacgcgtcggcaggatttggggcgtggtgtcgcacctcaactccgtcgccgacacgcccgaactgcgcgccgtctataacgaactgatgcccgaaatcaccgtcttcttcaccgaaatcggacaagacatcgagctgtacaaccgcttcaaaaccatcaaaaattcccccgaattcgacaccctctcccccgcacaaaaaaccaaactcaaccacgatctgcgcgatttcgtcctcagcggcgcggaactgccgcccgaacagcaggcagaactggcaaaactgcaaaccgaaggcgcgcaactttccgccaaattctcccaaaacgtcctagacgcgaccgacgcgttcggcatttactttgacgatgccgcaccgcttgccggcattcccgaagacgcgctcgccatgtttgccgccgccgcgcaaagcgaaagcaaaacaggctacaaaatcggcttgcagattccacactacctcgccgtcatccaatacgccgacaaccgcgaactgcgcgaacaaatctaccgcgcctacgttacccgcgccagcgaactgtcagacgacggcaaattcgacaacaccgccaacatcgaccgcacgctcgcaaacgccctgcaaaccgccaaactgctcggcttcaaaaactacgccgaattgtcgctggcaaccaaaatggcggacacccccgaacaagttttaaacttcctgcacgacctcgcccgccgcgccaaaccctacgccgaaaaagacctcgccgaagtcaaagccttcgcccgcgaaagcctcggcctcgccgatttgcaaccgtgggacttgggctacgccagcgaaaaactgcgcgaagccaaatacgcgttcagcgaaaccgaagtcaaaaaatacttccccgtcggcaaagtattaaacggactgttcgcccaaatcaaaaaactctacggcatcggatttaccgaaaaaaccgtccccgtctggcacaaagacgtgcgctattttgaattgcaacaaaacggcaaaaccataggcggcgtctatatggacctctacgcccgcgaaggcaagcgcggcggcgcgtggatgaacgactacaaaggccgccgccgtttttcagacggcacgctgcaactgcccaccgcctacctcgtctgcaacttcgccccacccgtcggcggcagggaagcccgcctgagccacgacgaaatcctcatcctcttccacgaaaccggacacgggctgcaccacctgcttacccaagtggacgaactgggcgtatccggcatcaacggcgtagaatgggacgcggtcgaactgcccagccagtttatggaaaatttcgtttgggaatacaatgtcttggcacaaatgtcagcccacgaagaaaccggcgttcccctgccgaaagaactcttcgacaaaatgctcgccgccaaaaacttccaacgcggcatgttcctcgtccggcaaatggagttcgccctctttgatatgatgatttacagcgaagacgacgaaggccgtctgaaaaactggcaacaggttttagacagcgtgcgcaaaaaagtcgccgtcatccagccgcccgaatacaaccgcttcgccttgagcttcggccacatcttcgcaggcggctattccgcaggctattacagctacgcgtgggcggaagtattgagcgcggacgcatacgccgcctttgaagaaagcgacgatgtcgccgccacaggcaaacgcttttggcaggaaatcctcgccgtcggcggatcgcgcagcgcggcagaatccttcaaagccttccgcggccgcgaaccgagcatagacgcactcttgcgccacagcggtttcgacaacgcggcttga

SEQ ID NO: 47458 - DNA, 1059 bp, Neisseria meningitidis
atgattacaccgcaacaggccatcgaacgattaatcagcaataacgagttgttttacgatgaaatgaccgacttgatgcgtcagattatgagaggacaggttctgccggagcagatagcggccattttgacaggattgcgtatcaaggttgaaaccgtttccgaaattaccgcagctgcagccgtcatgcgtgagtttgcgacaaaagtgccgctggagaatgcagaggggctggtcgatatcgtcggtacgggcggggatggcgcgaaaaccttcaatatttcgacgacttcgatgtttgttgccgcagcggcaggcgcgaaggttgccaaacacggaggccggtcggtctcttcctccagcggtgcggctgacgtggtggagcagatgggcgcaaacctcaacctgactcccgaacaggttgcccaaagtatcaggcagaccggcatcgggtttatgttcgcgcccaatcaccacagtgccatgcgccatgtcgcccctgtacgccgttcgctcggtttccgaagtattttcaacatattgggtccgttaacgaatcctgcgggcgcgccgaaccagcttttgggcgtgttccacaccgatttgtgtggcattttgtcgcgggtcttgcaacaacttggttcaaaacacgttttggttgtttgcggggagggcggtttggatgaaattacactgacgggcaaaacacgcgttgccgagctcaaagacggaaaaatcagcgaatacgacatccgcccagaagatttcggtatcgaaacccgccgcaatttggatgaaatcaaagttgccaatactcaggaatctttgttgaaaatgaatgaggtgctggaaggaagagaaggggctgcgcgcgatatcgtattgctcaacaccgccgccgccctgtatgccggaaatgtcgctgcttcgctttcagacggcatatctgccgcacgggaagccatcgattcaggcagggccaaatcgaaaaaagaggagtttgtcggttttcaaccacaacaaagatgccattttcttggaaagatggagcttgggtga

SEQ ID NO: 47459 - DNA, 357 bp, Neisseria meningitidis; identical to SEQ ID NO: 39963

SEQ ID NO: 47460 - DNA, 210 bp, Neisseria meningitidis; identical to SEQ ID NO: 40404

SEQ ID NO: 47461 - DNA, 1071 bp, Neisseria meningitidis
ttgtccaaccctgccccacgccggacgaagtcgccgccaaacttaccgcacaccttgaaacacaattcacaccgaaagcagataacaatgagtgaaatcaaaaccgacgaccccaaacgcggcatcaaactcagaggcgcggacaaaaccgcgcgcatccccatcaaagtcgtcccccttcaggaaaaactgaaaaagcccgaatggatacgcgccaaactcccatcgcgcaaattctttgaaatcaaagacattttgcgcgaacaaaagatgcacaccgtttgcgaggaagcctcctgccccaacatcggcgaatgcttcagcaaaggcacggcgaccttcatgattatgggcgatatctgcacccgccgctgcccgttctgcgacgtgggacacggtcggcccaatatgctcgaccccgacgaaccgaaaaacctcgccgaatccgtcaaagccatgaacctgcgttacgtcgtcatcacctccgtcgaccgcgacgacctgcgcgacggcggcgcacagcatttcgccgactgcatcaaagccatccgcgaaaccagcccgaacaccaaaatcgaaatcctcgtccccgacttccgaggacgcttggacatcgcactcaaaatccttgccgaaaccccgcccgacgtgatgaaccacaacctagaaacccatccgagcctgtacagaaaagcccgtcccggtgccaattatcaacattctttagacttattaaaacgttataaagaaatgatgccgcacatcccgaccaaatccggcatcatggtcggcttgggcgaaacagacgaagacgtgcgtgaaattatgcgcgatatgcgggcgcacaatatcgaaatgattaccatcggacagtacctccagccttcagacggacacctgcccgtcctgcgctacgttacgcccgagcagttcaaaatctttgaaaaagaagcatacgaactgggcttcagcaatgccgccatcggcgcgatggtacgttccagctaccacgccgacgaacaggctgccgaagccttacgcgaaagccacggcggttgcgggcatcattaa

SEQ ID NO: 47462 - DNA, 591 bp, Neisseria meningitidis
atgtcagcaatgaacctgcgcgatgatttgcaactgatttacgaccggatacccgaaggcagccgcgtcttggacttgggctgcggcgacggcgaactgcttgccgcattggtcgaacacaaaaaatgcagcggctacggcatcgaaatcgacaccgacagcgtgattgccgcgatgtcgcgcggcgtgaatgttatccaagccgatttggaagaaggtttaaccgcattcaacgatcaaagttttgatgtgattgtgttgagccaaaccatccaagcgatgcagaataccgaaaaaatcctgcgctgcctgatgcgcgttgccaaacaggcgattgtcagcttcccgaatttcggctactggcgcaaccgcgtccaaatcgcactcggcggacatatgccggtttccgaacgtatgccctaccattggtacgacacgcccaatatccattggtgcacgctcaaagactttgatttgttgtgcgccaaaaacaacatccgcgtcctcgaacgcgccgtgatgacgggcaacagacaggtcaaacatttccccaaccttttgggcagccttgcgttttaccgcgtcggctaa

SEQ ID NO: 47463 - DNA, 954 bp, Neisseria meningitidis
atgaatcagaagaaagtagtcgtattggatgcggatactttacccggtcggacttttcacttcgatttcccacacgagcttgcggtttacggtacgacagatgctgcggaaacggcagggcgggtgcgcgacgcgcatattatcatcaccaataaggtgatgatttccgccgacattattgcggctaatcctcagcttgagctgattgccgtcagtgcgaccggtgtgaacaatgtcgatattggggcggcggaggcggcgggcgttgcggtatgcaatgtccgcgcctacggaaacgaatcggttgcggaacatgcctttatgctgatgattgccctgatgcggaatttgcctgcctatcagcgtgatgttgcggcaggattatgggaaaaatcgccgtttttctgccattacggcgcgccgattcaggatttgaacggcaaaacgctggcggttttcggacgcggcaatatcggacggacgctggcaggatacgcgcaggcgttcgggatgggggtggtgtttgccgaacacaaacacgcgcccgctgtgcgcgaaggctatgttgcctttgaaaatgcggtacggactgccgatgtgttgtcgctgcactgtccgctgaacgcacaaactgaaaatatgataggcgaaaatgagttgcggcagatgaagcccggtgcggttttgattaattgcgggcgcggcgggctggtggatgaaaacgcgctgcttgccgcactcaaatacgggcagatcggcggggcgggcgtggatgttttgacgaatgagccgcctaaaaacggcaatcctctgttgaaggcacgacttcccaatctgattgttacgccgcataccgcgtgggcaagccgcgaggctttggacaggctgtttgatatattgttggcgaacattcacgcctttgtgaaaggcgaggcgcaaaaccgggtggtttga

SEQ ID NO: 47464 - DNA, 774 bp, Neisseria meningitidis; identical to SEQ ID NO: 44195

SEQ ID NO: 47465 - DNA, 507 bp, Neisseria meningitidis; identical to SEQ ID NO: 45448

SEQ ID NO: 47466 - DNA, 180 bp, Neisseria meningitidis
atgagtacgggtcaaccccaatgccgccgaaaccgtcgaagccgccttcaacattgccgccgccaaagccgcaaagttggcaaaaacggtaaaactggggagataaaagccgatggcaggaaagtaaatgtgaggatagacagtacggaggcagacctgctttatccggcagggcaataa

SEQ ID NO: 47467 - DNA, 591 bp, Neisseria meningitidis; identical to SEQ ID NO: 39124

SEQ ID NO: 47468 - DNA, 1311 bp, Neisseria meningitidis
atgatcgtgcccgacctctttgtcgcccacttccgcgaagccgtcccctacatccgccaaatgcgcggcaaaacgctggtcgccggcatagacgaccgcctgctcgaaggtgataccttaaacaagctcgccgccgacatcgggctgttgtcgcaactgggcatcaggctcgtcctcatccacggcgcgcgccacttcctcgaccgccacgccgccgcgcaaggccgcacgccgcattattgccggggcttgcgcgttaccgacgaaacctcgctcgaacaggcgcagcagtttgccggcaccgtccgcagccgttttgaagccgcattgtgcggcagcgtttccgggttcgcgcgcgcgccttccgtcccgctcgtatcgggcaacttcctgaccgcccgtccgataggtgtgattgacggaaccgatatggaatacgcgggcgttatccgcaaaaccgacaccgccgccctccgtttccaactcgacgcgggcaatatcgtctggctgccgccgctcggacattcctacagcggcaagaccttctatctcgatatgcttcaaaccgccgcctccgtcgccgtctcgcttcaggccgaaaaactcgtttacctgaccctttcagacggcatttcccgccccgacggcacgctcgccgaaaccctctcggcacaggaagcgcaatcgctggcggaacacgccggcggcgaaacgcgacggctgatttcgtccaccgttgccgcgctcgaaggcggcgtgcatcgcgtccaaatcctcaacggtgcctccgacggcagcctgctgcaagaactcttcacccgcaacggcatcggcacatccattgccaaagaagccttcgtctccatccggcaggcgcacagcggcgacatcccgcacatcgccgccctcatccgcccgctggaagaacagggcatcctgctgcaccgcagccgcgaatacctcgaaaaccacatttccgaattttccatcctcgaacacgacggcaacctgtacggttgcgccgccctgaaaacctttgccgaagccgattgcggcgaaatctcctgccttgccgtctcgccgcaggcacaggacggcggctacggcgaacgcctgcttgcccacattatcgataaggcgcgcagtatgggcataagcaggctgttcgccctctccacaaataccggcgaatggtttgccgaacgcggctttcagacggcatcggaagacgagttgcccgaaacgcggcgcaaagactaccgcagcaacggacgaaactcgcatattctggtacgtcgcctgcaccgctga

SEQ ID NO: 47469 - DNA, 501 bp, Neisseria meningitidis; identical to SEQ ID NO: 44822

SEQ ID NO: 47470 - DNA, 1341 bp, Neisseria meningitidis
atgttgaatccatcccgaaaactggttgagctgatccgtattttggacgaaggcggttttattttcagcggcgatcccgtgcaggcgacggaggctttgcgccgcgtggacggcagtacggaggaaaaaatcatccgtcgggcggagatgatcgacaggaaccgtatgctgcgggacacattggaacgtgtgcgtgcggggtcgttctggttgtgggtggcggcggcgacgtttgcgttttttaccggtttttcaggcacttatcttctaatggacaatcagggtctgaatttctttttggttttggcgggcgtgttgggcatgaatacgctgatgctggcagtatggttggcaatgttgttcctgcgcgtgaaagtggggcgttttttcagcagtccggcgacgtggtttcggggcaaagaccctgtaaatcaggcggtgttgcggctgtatgcggacgagtggcggcaaccttcggtacgttggaaaataggcgcaacgtcgcacagcctgtggctctgcacgctgctcggaatgctggtgtcggtattgttgctgcttttggtgcggcaatatacgttcaactgggaaagcacgctgttgggcgattcgtcttcggtacggctggtggaaatgttggcatggctgcctgcgaaactgggttttcccgtgcctgatgcgcgggcggtcatcgaaggccgtctgaacggcaatattgccgatgcgcgggcttggtcggggctgctggtcggcagtatcgcctgctacggcatcctgccgcgcctcttggcttgggcggtatgcaaaatccttttgaaaacaagcgaaaacggattggatttggaaaaaccctattatcaggcggtcatccgccgctggcagaacaaaatcaccgatgcggatacgcgtcgggaaaccgtgtccgccgtttcgccgaaaatcgtcttgaacgatgcgccgaaatgggcggtcatgctggagaccgaatggcaggacggcgaatggttcgagggcaggctggcgcaggaatggctggataagggcgttgccgccaatcgggaacaggttgccgcgctggagacagagctgaagcagaaaccggcgcaactgcttatcggcgtgcgcgcccaaactgtgcccgaccgcggcgtgttgcggcagatcgtccgactttcggaagcggcgcagggcggcgcggtggtgcagcttttggcggaacaggggctttcagacgacctttcggaaaagctggaacattggcgtaacgcgctggccgaatgcggcgcggcgtggcttgagcctgacagggcggcgcaggaagggcgtttgaaagaccaataa

SEQ ID NO: 47471 - DNA, 384 bp, Neisseria meningitidis; identical to SEQ ID NO: 38550

SEQ ID NO: 47472 - DNA, 321 bp, Neisseria meningitidis
atgatgggcaacaaattgactctgcctgccgaactgcctgacgagcaggatttgcgggcggtattggcatacaatatgcggcttttccgcgtgaacaagggttggtcgcaagaagaattggcgcggcaatgcggtttggacaggacttatgtgtcggcagtcgagcgcaaacgctggaacatcgccctgtcgaatatcgaaaaaatggcggcggccttgggcgtggcggcgtatcagttgctgctgccgccgcaggaacggttgaacctgatgaccaattccgccgatacccgacaaatgccgtctgaaagcggtatttga

SEQ ID NO: 47473 - DNA, 747 bp, Neisseria meningitidis; identical to SEQ ID NO: 44685

SEQ ID NO: 47474 - DNA, 975 bp, Neisseria meningitidis
atgctcgaaaatctgccctatttccagcgacatctgcctgaagaccttgccaaagtcaatgaagtcatcaaccgtgcggtgcaatccgatgtcgcactgatttcgcaaatcggtacatatatcatcagcgcgggcggcaaacgcctgcgtccgattatgacgattttggcgggtaaggcggtcggttatgatgacgggaaactgtattcgctggcggcgatggtcgaatttatccacacttcgacgctgctgcacgacgatgtcgtcgatgaaagcgatttgcgccgtggacgggcaacggcaaacaatctgttcggcaatgcggcggcagtgttggttggcgactttttatacacgcgcgcctttcaactgatggttgactcggacagtatgcgcgttttggaagtgatggcggatgcaaccaacattattgccgagggcgaagtcatgcagctgatgaacatcggcaatacggacattaccgaagaacaatatatccaagtcatccaatataaaacggcaaaattgtttgaagctgccgctcaagtcggcgcaattttgggcaaggcttcccccgaacacgaacgggcgttgaaagactacggtatgtatgtcggtacggcattccaaattattgacgatgtgctggactattctggcgaaaccgaagaaaccggcaaaaacgtcggcgacgatttggcggaaggaaaaccgactttgcctttgatttatctgatgcgtcagggttccgaacaggttgcgaacgatgtgcgtactgctttggaaaatgcagatcgcagctattttgagaaaatccacgattatgtcgtccgttcggatgctttggcatattcaataggcgaggcgcgcaaagcagtcgattgtgccgttgccgccttggatgccctgcccgacagcgaagtgaaggatgccatgattcagctggcgaaggaatctttggtcagggtgtcttga

SEQ ID NO: 47475 - DNA, 480 bp, Neisseria meningitidis
atgaaacacatactccccctgattgccgcatccgcactctgcatttcaaccgcttcggcacatcctgccagcgaaccgcaaacccaaaacgaaaccgctatgaccacgcataccctcacctcaaaatacagttttgacgaaaccgtcagccgccttgaaaccgccataaaaagcaaagggatggacatttttgccgtcatcgaccatcaggaagccgcccaccgaaacggtttaacgatgcagccggcaaaagtcatcgtcttcggcacgcccaaagccggcacgccgctgatggtcaaagaccccgccttcgccctgcaactgcccctgcgcgtcctcgttaccgaaacagacggcaaagtacgcgccgcctataccgatacgcgcgccctcatcgccggcagccgcatcggttttgacgaagtggcaaacactttggcaaacgccgaaaaactgatacaaaaaaccgtaggcgaataa

SEQ ID NO: 47476 - DNA, 807 bp, Neisseria meningitidis
atgtggcattgggacattatcttaatcctgcttgccgtaggcagtgcggcaggttttattgccggtctgttcggcgtaggcggcggcacgctgattgtccctgtcgttttatgggtgcttgatttgcagggtttggcacaacatccttacgcgcaacacctcgccgtcggcacatccttcgccgtcatggtcttcaccgccttttccagtatgttggggcagcacaaaaaacgggcggtcgactggaaaaccgtatttgcgatgatgccgggtatgatattcggcgtattcacgggcgcactctccgcaaaatatatccccgcgttcgggcttcaaattttcttcatcctgtttttaaccgccgtcgcattcaaaacactgcataccggtcgtcagacggcatcccgcccgctgcccaagctgcccggactgactgcggtttccacactgttcggcacaatgtcgagctgggtcggcataggcggcggttcactttccgtccccttcttaatccactgcggcttccccgcccataaagccatcggcacatcatccggccttgcctggccgattgcactctccggcgcaatatcgtatctgctcaacggcctgaatattgcaggattgcccgaagggtcactgggcttcctttacctgcccgccgtcgccgtcctcagcgcggcaaccattgcctttgccccgctcggtgtcaaaaccgcccacaaactttcttctgccaaactcaaaaaatccttcggcattatgctgcttttgattgccggaaaaatgctgtacaacctgctttaa

SEQ ID NO: 47477 - DNA, 564 bp, Neisseria meningitidis; identical to SEQ ID NO: 36962

SEQ ID NO: 47478 - DNA, 342 bp, Neisseria meningitidis; identical to SEQ ID NO: 38375

SEQ ID NO: 47479 - DNA, 2307 bp, Neisseria meningitidis; identical to SEQ ID NO: 44601

SEQ ID NO: 47480 - DNA, 144 bp, Neisseria meningitidis
atggaatgggctgaaaatgagaccgtgaaattagcccaaaaatgggaacaagagcagaaaaaacaacaaattcaacagaaaaaggaaactgaaaaatcgccaaaacacaaagccagtcgtgatgattgggaaatggaacgttaa

SEQ ID NO: 47481 - DNA, 182 bp, Neisseria meningitidis
atgaacacaaacttaaatgacaaagacaaagccatggataccgcaatcaggtttcagaaaaggatgaggattccgaaatttttctttttaattctctgaatcacaatggttttggcatttatccaagacgtgataacgggttctaattttctgcaaataacaattaatgtaaaattttcgta

SEQ ID NO: 47482 - DNA, 168 bp, Neisseria meningitidis; identical to SEQ ID NO: 38803

SEQ ID NO: 47483 - DNA, 1692 bp, Neisseria meningitidis; identical to SEQ ID NO: 39144

SEQ ID NO: 47484 - DNA, 1671 bp, Neisseria meningitidis; identical to SEQ ID NO: 44650

SEQ ID NO: 47485 - DNA, 354 bp, Neisseria meningitidis; identical to SEQ ID NO: 40032

SEQ ID NO: 47486 - DNA, 1227 bp, Neisseria meningitidis
atgacctttttacaacgtttgcaaggtttggcagacaataaaatctgtgcgtttgcatggttcgtcgtccgccgctttgatgaagaacgcgtaccgcaggcggcggcaagcatgacgtttacgacgctgctggcactcgtccccgtgctgaccgtgatggtggcggtcgcttcgattttccccgtgttcgaccgctggtcggattcgttcgtctccttcgtcaaccaaaccattgtgccgcagggcgcggacatggtgttcgactatatcaatgcgttccgcgagcaggcgaaccggctgacggcaatcggcagcgtgatgctggtcgttacctcgctgatgctgattcggacgatagacaatacgttcaaccgcatctggcgggtcaattcccagcgtccgtggatgatgcagtttctcgtctattgggctttactgacgttcgggccgctgtctttgggcgtgggcatttcctttatggtcggctcggtacaggatgccgcgcttgcctcaggtgcgccgcagtggtcgggcgcgttgcgaacggcggcgacgctgaccttcatgacgcttttgctgtgggggctgtaccgcttcgtgccaaaccgcttcgttcccgcgcggcaggcgtttgtcggggctttggcaacagcgttctgtctggaaaccgcacgttccctcttcacttggtatatgggcaacttcgacggctaccgctcgatttacggcgcgtttgccgccgtgccgttttttctgttgtggctgaacctgttgtggacgctggtcttgggcggcgcggtgctgacttcttcactctcctactggcggggagaagcgttccgcaggggcttcgactcgcgcggacggttcgacgacgtgttgaaaatcctgctgcttctggatgcggcgcaaaaagaaggcaaagccttgcctgttcaggagttcagacggcatatcaatatgggctacgacgagttgggcgagcttttggaaaagctggcgcggcacggctacatctattccggcagacagggttgggtgttgaaaacgggggcggattcgattgagttgaacgaactcttcaagctcttcgtttaccgtccgttgcctgtggaaagggatcatgtgaaccaagctgtcgatgcggtaatgacaccgtgtttgcagactttgaacatgacgctggcggagtttgacgctcaggcgaaaaaacagcagcaatcttga

SEQ ID NO: 47487 - DNA, 639 bp, Neisseria meningitidis
atgcaaaccgccattatcgattacggtatgggcaacctgcattccgtattgaaatccgtccggacggcggggcagcttgccggaaaaaataccgaaatctttttaagcggcgaccccgaccgcgtgtcccgcgccgacaaagtcatttttcccggtcagggcgcgatgcccgactgtattgcggcactgacgcgcggcggcttggacgaggcagtcaaagatgccttaaaaaacaaaccctttttcggaatctgcgtcggcgcgcaacttttattcgaccacagcgaagaaggaaacaccgacggcttgggctggttcggcggcaaagtcagacgctttgagcgcgacctccgcgacccgcagggatgccgtctgaaagtcccgcatatgggctggaacaccgtgcgccaaacccaaaaccacccgctttttcaaggcatcccccaagacacgcgtttttacttcgtccacagctactatttcgcccccgaaaatcccgaaaccatattgggcgaaagcgactacccgtccccgtttgcctgcatcgtcggcaaagacaacgtattcgccacgcaatttcacaccgaaaaaagccacgatgccgggctgacgatgttgaaaaactttttaaactggtaa

SEQ ID NO: 47488 - DNA, 1248 bp, Neisseria meningitidis; identical to SEQ ID NO: 39099

SEQ ID NO: 47489 - DNA, 720 bp, Neisseria meningitidis
atgctgaccacgccgccgctcgcccccaaaaccgtcgccgccctacacaggctcggtatccgtacgctcgaagaactgcggcaaaacggcgcggttcaaaccttcttgttattgaaggcatcaggtttgaccctcacgaaaagcacgctgtggcagcttcagtcgctgctggacggcacgccgccgcaagaaatggcgcaacacgataaaacccgcctgcttgccgagttgaaaaaccatccgcccgtcgccgcctttcccccgcaaggcgaaatggcgcatttcatgggtttggcattggaacaggcgaaactgtccgcattaatgggcgaaatacccgtcggggcagtcatcgtttcagacggcaaaatcatcgcatcggcacacaacacctgcattgccgactgcaatgtcagccggcacgccgaaatcaacgccttggcacaggcaggcagcgaaatgcaaaactaccgccttgacggatgcgacatctacatcaccctcgaaccatgcgccatgtgcgcgtccgcactgatacaggcacgaatcaggcgcgtgatctacggtgcggcagaacccaaaaccggcgcggcaggaagcatcgtcaacctgtttgccgacaaacgcctcaatacgcacaccgccatacggggcggaatcctgcaagaagaatgccgcgccgtattaagccgttttttccaaaacaaaagaaaaggttga

SEQ ID NO: 47490 - DNA, 189 bp, Neisseria meningitidis
atgggcagccgcgcacgggcgacaggcgatgacaagccgtccgtgcgtgtgatggggcgcggaatgcgccccttgtcgtatctgcaaacgcctacaaatccccaatcagcctttcaatcaaggctgttttggacaaacccgcctttgccgcctcctgttccagtttggctatcgttgtgtccgccttaa

SEQ ID NO: 47491 - DNA, 867 bp, Neisseria meningitidis; identical to SEQ ID NO: 37866

SEQ ID NO: 47492 - DNA, 654 bp, Neisseria meningitidis
atgaagataacgcactgcaaattaaagaaaaaagtacagaaagaactgctccgtttttttgtgctggaagttaccgcccgttctgccgccgatattttgggtatccatcccaattcggcagcactgttctaccgtaaaatccgcacggttatcaaccatcatttggccttggctgccgatgaggtttttgagggccctgtcgagccggacgaaagcgatttcggcggacggcgtaaaggcagacgtggtcgcggtgcggcaggaaaagtggttgtcttcggcattctgaaacgcaacggacgggtctataccgttgtggtggataatgccaagtctgaaacgttactccctgtcatcaagaagaaaatcatgccggacagcattgtttataccgatagtctgagcagctgcgacaagttggacgtgagcggttttatccattaccgcattaaccattccaaggagtttgcagaccgtcaaaaccacattaacggcattgagaacttttggaatcaggcaaaacgcgtcttgcgaaaatacaatggaatcgatcgcaaatctttcccgctgttcttgaaagaatgcgaatttcgatttaacttcggcacaccgtcccggcagctaaaaatcctacaggattggtgtgggatttag

SEQ ID NO: 47493 - DNA, 546 bp, Neisseria meningitidis; identical to SEQ ID NO: 38361

SEQ ID NO: 47494 - DNA, 396 bp, Neisseria meningitidis
ttgttaatccactatacctccgccaatgcccatgagtgcaaacacctgtcgccgttgttggaaggactgcccaaaggtacgaccgtctatgccgacaaaggctatgacagtgcggaaaaccggcaacatctggaagaacatcagttgcaggacggcattatgcgcaaagcctgccgcaaccgtccgctgtcggaaacgcaaaccaaacgcaaccggtatttatcgaagacccgttatgtggtcgaacaaagcttcggtacgctgcaccgtaaattccgctatgcgcggtcaacctatttcggactgattaaagtgagtgcgcaaagccatctgaaggcgatgtgtttgaacctgttgaaagccgccaacaggctaagtgcgcccgctgccgcctaa

SEQ ID NO: 47495 - DNA, 339 bp, Neisseria meningitidis; identical to SEQ ID NO: 37943

SEQ ID NO: 47496 - DNA, 438 bp, Neisseria meningitidis
ttggctcggttgccgcgcccgctggtgtttaccaacggctgtttcgacatcctccacagggggcacgttacttatctggcgcaggcgcgttcggcaggggcggcgttggtgctggcgttgaataccgatgcttcggtgcggcgtttgggcaaggacggcgaccgcccgattaatcctttggagaaccgtgccgccgttgccgccgctttggaaagtgtggatttggtaacgtggtttgacggggatacgccggcggcgttgattgaggcggtcaaacctgagattttggtcaagggcggcgattgggctgcggataagattgtcggtgcggcagaaacgttggcgcgcggcggtcaggtgttttcaattccgtttctgcaccagacttcgacaacgaagactttggcaaaaatccgtgcggcagagggcggaaaatga

SEQ ID NO: 47497 - DNA, 1410 bp, Neisseria meningitidis
ttgaagcaaggaaacattatgagcggtcatatgggaaaaggggcggatgcgcctgatttggtgtacggtttggaggataggccgccgttcggtaatgcgctgttgagcgcggttacccatcttttggcgattttcgtgccgatgattacgcccgcgctgattgtgggcggcgcgctggaactgccggtggagatgacggcgtatctcgtgtcgatggcgatggttgcgtcgggtgtcggcacttatttgcaggtcaaccgcttcgggccggtcggttcggggatgctgtctatccagtcggtgaatttctcgttcgttaccgtcatgattgcgctgggcgcggggatgaaagagggcggtttgactaaggatgcgatgatttcgacgctcttgggcgtatcgtttgtcggcgcgtttttggtgtgtttctcggcgtggcttctgccgtatttgaaaaaagtgattacgccgacggtcagcggtgtggtggtgatgctgatcggcttgagtttggtacacgtcggtattaccgatttcggcggcggcttcggcgcaaaggcggacggcacgttcggctcgatggaaaacttggggctggcatcgccggtgctgctgattgtgctggtgttcaactgcatgaaaaacccgctgctgcggatgagcggcattgcggtcggtctgattgccggctatatcgtcgcgctgtttttgggcaaggtggatttttcggcactgcaaaacctgccgctggttacgctgcccgtaccgtttaaatatggttttgcttttgactggcacgcatttattgtggcgggtgcgattttcctgttgagcgtgtttgaggcggtcggcgatttgaccgcaacggcaatggtgtccgatcagccgattgaaggcgaggaatacaccaaacgcctgcgcggcggcgtgttggcagacggcttggtgtcggtgattgcgacggctttgggttcgctgccgctgacaacgtttgcgcaaaacaacggcgtgattcagatgaccggcgtggcttcgcgccatgtgggcaaatatattgccgtgattttggtgctgttgggtctgttccccgttgtcggacgcgcgtttacgacgattccgagtccggttttaggcggcgcgatggttttgatgttcggcttgattgcgattgcgggtgtgcggattttggtcagccacggcatccgcaggcgcgaggcggtgattgcggcgacttcggtcggcttgggcttgggcgtggcgtttgagccggaagtgtttaaaaacctgcctgtcttgttccaaaactctatttccgccggcggcattacggcagtcttgctgaatttggtcttgcccgaagataaaaccgaggcggcggtcaagtttgataccgaccacttggaacactga

SEQ ID NO: 47498 - DNA, 789 bp, Neisseria meningitidis; identical to SEQ ID NO: 44945

SEQ ID NO: 47499 - DNA, 1347 bp, Neisseria meningitidis
ttgaataagatgctgccttccagtcggagcagtaaagaagcggaaagtaaaacggtcattcctgccgaaagacacaacatccgtgccgaaatgttgagctttgccgccgaaaacgtcatacgccgcctgaaagaggcagggtttcaggcttatgtggtcggcggcgcggtcagggacctgctgctcggcatcgaacccaaggatttcgatgtcgcaaccgatgccacgcccgaacaggtgcacaaactcttccgccgcagccgcatcatcggcaggcgttttcaaatcgtccatgtgatgaacggtgcggagattatcgaagtaacgacgtttcgcggcggtgcgaaggttcatcagaacgcgcacggcagaatcatgaaggacaacacctacggcagcatcgaagaagatgcgatgcggcgcgattttacctgcaatgccttgtattacgatcctgaaaaagaagagattttggatttccacaacgggattgccgatgttgccgcccgcaggctggttatgattggcgatgccgccgaacgctatcaggaagaccctgtcaggattttgcgcgccatccgcctgtcgggcaaattgggatttgatctgtcggaagaaaccgccgcaccgattgccgaatcaatatgccgtctgaagcacgaacctgtggcaaggctgttcgacgaaattatgaaactgctgttttcagggcacgcgcgcgagtgtctaaaacgtttgaacggatttgacataccggacgacatccatccgctgctcaatgccttgcgcgtttcagacggcatcgccggaaaaatgacggtgcttgccctgaaaaataccgatgagcggctgcgtgccgacaaatcggtttcggtcggtttcgtactggcggccctgatgtggcccgagttggaacgccattggaaaagcaatctgcaacagggtttgaaacccgtgcccgccctgtccgatgcaatcaatacgatgcgcgaaaccgtcgaacgcggttggggcgtaccgcaacgcttttccgccacgatgcgcgaaatttggatgttccagccgcagtttgaaaaccgcaaaggcgcaaggccgcacaaactgtttgcacaggcgcgtttccgtgccgcctatgatttcctgctcttgcgcgccgaaaccggcaatgcggaccgcgcccttgccgagtggtggacggcgtttcagacggcatcgcaggaacaacggacggagatgaccaaaaacgaggccgccgcccgacacgaaaaaaacgaaggacaggcgaaaaaacgccgccgtcgcaggcgcaaacccaagccgaaggttgagggaacggattgggaataa

SEQ ID NO: 47500 - DNA, 87 bp, Neisseria meningitidis
gcatacgaaaactaccatctcaaagaaataatggatgcagtcatcaaccatattccggtttgtcggagaaagatgcatacgctgtga

SEQ ID NO: 47501 - DNA, 510 bp, Neisseria meningitidis; identical to SEQ ID NO: 36289

SEQ ID NO: 47502 - DNA, 936 bp, Neisseria meningitidis; identical to SEQ ID NO: 44916

SEQ ID NO: 47503 - DNA, 2124 bp, Neisseria meningitidis
atgggcaaagccaacgcctttaccgcgccgattaccgtcgtcaactacgacgaacaagccctcaacaacaccgaagcgcgtactttggtggatgccgtagcgaaaaaagacgcttccgtttggcagttcggcggagaaagcaacacgctgaccggactgtatttcagaggttatcagcttgatgcgcgccaattcagcgtcaacggtttggcaggtatgtacggcacgcaaggcacggccagcgtgcaagtcggctccgcacaactgattaaaggcgcgtccaccgccgtaaacggcatgaaccctgaaggtgcggtatccggttccgtcaatatcgaaaccaaaaaagccgccgatgaaggcaaccgcaaaatcggtttgggccggtttagcaacaaccgcgcccaaggtacgttcgacttgggtcaacgcttcggcgaaaacaaagcattcggcgtacgcgccaacggcaaactgcgccacggcgacactccgcgccacggttacagcgaagacaacaaagaatttgcggtaaatgccgactatcgcggcgaaacactgcgcgtagcgttcgattccatctacgcaaaacgcaaaaccaacggcggtcgcgcgcgtatgcaggacattcaaaacgccggcggacgcttgtttggcgcgcccgatggtaaaaccaacctgctgccttcttggaactggcaaaataccgccggccaaaccaatatgcttacgtttgaatgggatgcgtttgataatgcacagattacaggcggtatcggctacaacaaggcacgctattacggcacgctgatttccccgaccgtatgtttgaatgctaccagcacttgtaccgatatgcaaaacacaaacgccagcggcaaagtaacggcacgcaactatgactacaataccggtactgcgcgcctgaccgaccaatatttccgcacattgagtatgaacctgaccgcacgcggcgaatttgaaaccagcccggtaacacataactggagtacggctttcgaccgcgttatccgccagcggaaaaccattcgcggaacggcagccggcgctggcaaggtagaagtgaaggcaaacgaaaatattgcgaatcaattggcatcgttcaaagccgactatcccaattcttgggagaactctgccaacttggatgccaatatcaaagtcaacagcctggctttgtccgacaccttgggcttcgtggataacaaataccgcctgactttgggcggacgtttccaagcggttgaatacaccaataagaaaaaatcacagagcggcgatgccaaacgcttcagcccgatgctgatggcggcgtgggtgccgcaacctgatttggttgtgtacggcaactatatggaagacttggagcctgccgatatcaaaaccgatgattccggcgaaacgacaatggcgaaaccgcgtgtcagccgtcagtttgaagtgggcgtgcgtaaaaactggggcaatttcgtaaccacgttaaacgcgttccaaatcaaacgcccgggctactggcgcggtcatacaactaccaagacaacaaaaggggtaacaacaacgctgacctatggcaacaattccgatttcgcccgctataaggcgcaaggcggcgcggccggcgacgagcaaggtatggaacgcaatcgcggtattgagttcaacacctacgcgaacttgctcaacaatactttgcgtccgactttgggtctgatgtatctgcaatcgaccgtgaaagagtatccaaattcacgcgatatgctggttaacggcgtacaagtcgccaatccgcgcgtaattgccaaggcaggtttggaatgggatacaccgtttgccaaaggcttgactttaaacagcaatgtttcgtatttcggcaagtcttaccaagacacgcaaaaacaatacgctttcccgtcttacactttggttgacgtaggcgcgcgctacaaaaccaagctcggcaaaaatacgttgaccgtcagcagctcggtggaaaacctgttcaacaaaaactactggcaggtacagcgcggccaatacgaccgcagcttcgccgtcgtcggtatgccgcgtacttactggttgaaagcggaattggatttctga

SEQ ID NO: 47504 - DNA, 444 bp, Neisseria meningitidis; identical to SEQ ID NO: 45126

SEQ ID NO: 47505 - DNA, 753 bp, Neisseria meningitidis; identical to SEQ ID NO: 39622

SEQ ID NO: 47506 - DNA, 939 bp, Neisseria meningitidis; identical to SEQ ID NO: 44742

SEQ ID NO: 47507 - DNA, 693 bp, Neisseria meningitidis
atgaccgcctttgtccacaccctttcagacggcatggaactgaccgtcgaaatcaagcgccgtgccaagaaaaacctgattatccgccccgccggcacacataccgtccgcatcagcgtcccaccctgcttctccgtctccgctctaaaccgctggctgtatgaaaacgaagccgtcctgcggcaaacactggcgaaaacaccgccgccgcaaactgccgaaaaccggctgcccgaacatatctggttccacggcagacagcttgccctcaccgcccatcaagacacgcaaatcctgctgatgccgtctgaaatccgtgttcccgaaggcgcacccgaaaaacagcttgcgctgctgcgggactttttggaacggcaggcgcacagttacctgattccccgcctcgaacgccacgcccgcaccacacaactgttccccgccccctcctcgctgacctctgccaaaaccttctggggcgtgtgccgcaaaaccacaggcatacgcttcaactggcggctagtcggcgcaccggaatacgttgccgactatgtctgcatacacgaactctgccacctcgcccacgccgaccacagccgcgcgttctgggcactgacccgccgcttcgcaccctacacgcccgaagcgaaacagtggctcaaaatccacggcagggaacttttcgccttaggctga

SEQ ID NO: 47508 - DNA, 348 bp, Neisseria meningitidis; identical to SEQ ID NO: 39706

SEQ ID NO: 47509 - DNA, 318 bp, Neisseria meningitidis; identical to SEQ ID NO: 39119

SEQ ID NO: 47510 - DNA, 540 bp, Neisseria meningitidis; identical to SEQ ID NO: 38423

SEQ ID NO: 47511 - DNA, 936 bp, Neisseria meningitidis; identical to SEQ ID NO: 45520

SEQ ID NO: 47512 - DNA, 303 bp, Neisseria meningitidis; identical to SEQ ID NO: 43286

SEQ ID NO: 47513 - DNA, 543 bp, Neisseria meningitidis
gtgaatatgtcggcaaccgtccgtatcttaggtatcgacccgggcagccgcgtaacgggtttcggcatcatcgatgtcagggggcgcgatcatttttacgtcgcctccggctgcatcaaaacgcctcccgatgcgcctctggcagacaggattgccgtgattgtgcggcacatcggcgaagtcgttgccgtttacaagccgcagcaggcggcggtggaacaggtgttcgtcaacgtcaatccggcatcgacgctgatgctgggtcaggctaggggcgcggcattggcggcattggtcagccataagctgcccgtttcggaatacacggccttgcaggtcaaacaggcggtagtcggcaaaggcaaggcggcgaaagaacaggtgcagcatatggtggtgcagatgctggggctttcgggaacgccgcaggcggatgcggcggacggtcttgccgtcgcgctgacccacgccttacgcaaccacgggcttgccgccaaactcaatccttcggggatgcaggtcaagcgcggcaggtttcaatag

SEQ ID NO: 47514 - DNA, 369 bp, Neisseria meningitidis; identical to SEQ ID NO: 45568

SEQ ID NO: 47515 - DNA, 777 bp, Neisseria meningitidis
atgcgcgcagtccccccgccccatatctccatcacaggcctaggttacctcggcctgccgctggcacaaaagttttaccaacacggcagccgcgtcgccgccataaaacgcagcctgacttcggacgacatcaacctgcccatacatctcgacaccttcgacctcggcagcaccgatgcctttcagacggcattgtggcggcaccacgccgacaaacccgtctggttcttcctgctaccgccctcctcgctgacgcattacgccgacaccgtcaaacaatgggcagaacttgcccgggcgtgcaacgtgcaacacctgattttcacaagcagcaccagcgtttacggcgatacagcgcgcgaatgcgacgaaaccgccacacccgatccgcaaaccgagtccgcccgccaaatcctcgccgccgaacaacacctgctcgacagcggcatctccaacatcgacatcctgcggctgggcgggctttattgcgccgaacgccatcccgtcagccgccttgttcaaaagcaaaacatcccgggcggcaaccgccccatcaacatcgtccaccgtaatatcgccgtcgaaagcctgtttcagacggcatttaaccccggcggcaggcggctgaaaaacattatcgaaccgcgccacccgacacgacgcgaattctacacggaagaagccgccaaactcggcctgcccgcgccggatttcgcacccgacgacagcgtgggcaaaatcatccgtaccgtttgcgataacggcttaagcctgtaa

SEQ ID NO: 47516 - DNA, 1554 bp, Neisseria meningitidis
atgccgtctgaaaagccggcggattgttgcccggcgcactttgtggtaaagtttagaaaatcaactctaaactgtggcaggcggtttgaccggccgccgattaatgggaaccgacagaggaagccgatgatacacaccgaaccgagcgcgcagccgtcaactatggacacggctgcttttttaaagcacatcgaatccgcattccgccgcattttttcagacggtatcgacctgatgcgatacctgcccgaagacaaatggcttgccttgaagcaggcgggtttgctgttgcccttcctcgacaaaagacacggcggccgcaagggcagccagtttgaaattcaggaagtattgcggattgcggggcattacggcgtacccgttacgctgcgtaccggcatcgaaggcgcgctggtgttgcagccactgcaagagttcggcgatgaagcgcaaatcgcacagggtttggacatggttttcaaaggcgagggcggcggtttgggcgttaccgaacccgaaacctccggcgcggcgattgcccgagaaatgcagtcttactacgaatataccgacggacaaaccatttacgtcaacgccgcaaaatactggcagggcaactcgcaaagcgacttcctcctcgttgccgccaaagaacgcaaaaacggcaaactcgccaaagtcatcgacctgctgctcgtccccaaaacatacatccgctgcgaaaccctcgcatccgaaggcttgcgcgccgtccgttacgccgtcaaccgcatcgatgccgaaatgcctgcaaccgccgtgatgaaactctcccagagcgacgccgcaggtttgcgcgcgttccaaaacatctttatccgcagccgcctgcaactgatcggcatgacgcacggcattatggaatacatccttgaaaacctggaacgatacgtccgcaacgacatcagattcgtcgattacgaacgccgcgaaatccggcgccgccatcaggtttccgagattctttaccgctacgtctgccattccgtttcgcccgttgcacccgtcgcccatcagctgatggaggcgaacatcgtcaaaaccctcgccacggaatacacttacgccgccgcgcaaatgttgcaaaaacttttgggcgcgaagggttttgaacgcggacacaccgccggcaatatcgctatcgacatccgtcccttcacgatttttgaaggcccgaacgatatgctttatgccgaaatttacgaccagttcgtccgcgccaccgccgaagaaaaagaagcaggcatgaagttggacaaaaaccaaaccctgctcgaccgcctgcaaaccgatgcccgctttgccgccgtcgcccgcgactacactttgcccgaagacatccgcagcttcctgcaggaacacaccctgaccgacgcctgcgccctgcaaaaagtcttcatcggcaaaatcatcgcccgactctttgtcttcgtacaggcggaacacgaagacaccgcagccttcctgctgaacgacatccgcaaagatatattggactgccgatattgcggatag

SEQ ID NO: 47517 - DNA, 801 bp, Neisseria meningitidis; identical to SEQ ID NO: 38785

SEQ ID NO: 47518 - DNA, 510 bp, Neisseria meningitidis; identical to SEQ ID NO: 45486

SEQ ID NO: 47519 - DNA, 1026 bp, Neisseria meningitidis
ttgaatcaaatacctacccgaatcatgattgacggacaaacaaccgaacccaaacaaaaaacccgaatcatccttgcccctatgcagggtctggtcgatgacgtgatgcgcgacctgctgacgcgtattggcggctacgacgaatgcgtcagcgaatttgtacgcattacccataccgtgcattcccgatccatatggttaaaatatgtccccgaaatcgccaacggaaacaaaacgttttccggcacgccctgcaccgtccaacttttgggcagcgatgcggacaatatggcggcgaatgcgctggaagccgtccgcttcggtgcgaacaaaatcgatttgaacttcggctgccccgcgcccaccgtcaacaaacacaaaggcggcgcaatccttttaaaagagccggaactgatattccacatcgtcaaaacgctgcgcggacgtttgcccgcacatattccgctcaccgcaaaaatgcggctcggttacgaagacaaaagccgggctttggaatgcgcctgtgcgattgccgaagggggcgcatgcggactgaccgtacacgcgcgtaccaaagccgagggttacgaaccgccggcgcattgggaatggataaggaaaatccgagacagcgtcaatattcccgttaccgccaacggcgacgttttcagcctgcaagactatatcggcatcaaaacaatcagcggctgcaacagcgtgatgctcggtcgcggcgcggtcatccgccccgatttggcgcggcaaatcaagcaatacgagaacggcgggccggtcaaagacacggattttgccgaagtttctaaatggatacggcagtttttcgagctgtgcctgacaaaagaggcaaacaataaatacccgatcgcccgtcttaagcaatggttgggcatgatgaaaaaaacgttcgacccggcgcaaacgctgtttgaccgcgtccgaacggttaaggatgcggatgaagtccgccgaatcctgaacgcatttgagcatgagataaatgtttga

SEQ ID NO: 47520 - DNA, 288 bp, Neisseria meningitidis
atgaacaaagaaatagtcggtattttctttataccggcgggcatcatcagcatgtgtatggccgcattgtggcagatgtatgtgatgatgaccgaaacttatacgctcaaccgtttcaaagataaagaattggtttggcgcgtggcattgttgtttatcagtttcagccttgccgtttatctgctctgcccgaattcgcgtaaaaaaggcatcgtcttttttattctcgggggaggcggtgcagccatgtatctgctggcgcggatgtggttgcctttcagcaagtga

SEQ ID NO: 47521 - DNA, 735 bp, Neisseria meningitidis; identical to SEQ ID NO: 44212

SEQ ID NO: 47522 - DNA, 852 bp, Neisseria meningitidis
atgtttatgaacaaattttcccaatccggaaaaggtctgtccggttttttcttcggtttgatactggcgacggtcattattgccggtattttgttttatctgaaccagagcggtcaaaatgcgttcaaaatcccggcttcgtcgaagcagcctgcagaaacggaaatcctgaaaccgaaaaaccagcctaaggaagacatccaacctgaaccggccgatcaaaacgccttgtccgaaccggatgctgcgacagaggcagagcagtcggatgcggaaaaagctgccgataaagccgacgaggttgaagaaaaggcgggcgagccggagcgggaaaagtcggacggacaggcagtgcgtaagaaagtgctgacggaagagcgtgaacaaaccgtcagagaaaaagcgcagaagaaagatgccgaaacggttaaaaaacaagcggtaaaaccgtctaaagaaacagagaaaaaagctccaaaagaagagaaaaaggcggaaaaggaaaaagttgcacccaaaccgaccccggaacaaatcctcaacagcggcagcatcgaaaaagcgcgcagtgccgccgccaaagaagtgcagaaaatgaaaacgtccgacaaggcggaagcaacgcattatctgcaaatgggcgcgtatgccgaccgccggagcgcggaagggcagcgtgccaaactggcaatcttgggcatatcttccaaggtggtcggctatcaggcgggacataaaacgctttaccgggtgcaaagcggcaatatgtctgccgatgcggtgaaaaaaatgcaggacgagttgaaaaaacatgaagtcgccagcctgatccgttctatcgaaagtaaataa

SEQ ID NO: 47523 - DNA, 2259 bp, Neisseria meningitidis; identical to SEQ ID NO: 38664

SEQ ID NO: 47524 - DNA, 786 bp, Neisseria meningitidis; identical to SEQ ID NO: 44566

SEQ ID NO: 47525 - DNA, 483 bp, Neisseria meningitidis; identical to SEQ ID NO: 44469

SEQ ID NO: 47526 - DNA, 984 bp, Neisseria meningitidis; identical to SEQ ID NO: 40053

SEQ ID NO: 47527 - DNA, 1185 bp, Neisseria meningitidis; identical to SEQ ID NO: 37431

SEQ ID NO: 47528 - DNA, 798 bp, Neisseria meningitidis
atgctgaaacaacgggtaataaccgctatgtggctgctgccgctgatgctgggcatgctgttttacgcgccgcaatggttgtgggctgcattttgcggactgattgccctgattgccttgtgggaatatgcccgtatgggcggcttgtgcaaaatcaaaaccaaccattacctcgtcgcaaccttggttttcggcgtggttgcctatgcgggcggctggatgctgcctaatttggtttggtatgttgttttggcattttggctcgccatcatgcctttatggttgagatttaaatggaggctcaacggcggttggcaggtttatgccgtcggctggcttctgatcatgccgttttggttcgcgctcgtatccctgcgcccgcatcccgataatgccctgccgctgctcgccgtcatgggtttggtgtggattgccgatgttttcgcgtatttcagcggcaaggcgttcggcaaacacaaaatcgcaccggcaatcagccccggcaagagctgggaaggcgcaatcggcggcgcggtttgcgtggccgtgtacatgaccgccgtacgaagtgccggctggctggcattcgatacaggctggttcgataccgtgttaatcggtttggtgttgaccgttgtcagcgtatgcggcgaccttttggaaagctggctcaagcgcgcggcaggcatcaaagacagcagcaagctactgccaggacacggcggcgtgttcgaccgtaccgacagcctgattgccgttatcagcgtctatgcggcgatgatgtcggttttaaattga

SEQ ID NO: 47529 - DNA, 1101 bp, Neisseria meningitidis; identical to SEQ ID NO: 45724

SEQ ID NO: 47530 - DNA, 480 bp, Neisseria meningitidis; identical to SEQ ID NO: 45212

SEQ ID NO: 47531 - DNA, 828 bp, Neisseria meningitidis
atgcaaaaccacgttatcagcttagcttccgccgcagaacgcagggcgcacattgccgcaaccttcggcgcgcgcggcatcccgtttcagtttttcgacgcactgatgccgtctgaaaggctggaacaggcaatggcggaactcgtccccggcttgtcggcgcacccctatttgagcggagtggaaaaagcctgctttatgagccacgccgtattgtggaaacaggcattggacgaaggtctgccgtatatcgccgtatttgaggacgacgttttactcggcgaaggcgcggagaaattccttgccgaagacgcttggctaaaagaacgctttgaccccgattccgcctttatcgtccgcttggaaacgatgtttatgcacgtcctgacctcgccctccggtgtggcggactactgcgggcgtgcctttccgctgttggaaagcgaacactgggggacggcgggctatatcatttccaaaaaagcgatacggtttttcctgcaacatttcgtaatgttgcagccggaacagataaaacctatcgacttaatgatgttcagtgattttttcgataaggaggggatgcctgtttatcaggtcagtccggccttatgcgcccaagagctgcattatgccaagtttcacgaccaaaacagcgcattgggcagcctgatcgaacacgaccgcctcctgaaccgcaaacagcaaaggcgcgattcccccgccaacacattcaaacgccgcctgatccgcgccttgaccaaaatcagcagggaaagggaaaaacgccggcaaaggcgcgaacagttcattgtgcctttccaataa

SEQ ID NO: 47532 - DNA, 1188 bp, Neisseria meningitidis; identical to SEQ ID NO: 46933

SEQ ID NO: 47533 - DNA, 918 bp, Neisseria meningitidis
ttgggcaaaaacatcaaacaccttatgaaatgggcgaaacgcaacggcattgaagcctggcgcatttacgaccgcgacatcccccaattcccctttgccgccgatgtttacggcgatcgaatccaccttcaggaatacgataccggctggctgatgcggcccgaagaatacgaagcgtggcttgccgaagtcttggaagccgtcgctttcgttaccggttttgaacccgaacaaatccgcctcaaacgccgcgaacgccaaaaaggtttgcagcaatacgaaaaaaccggcaaggcgggcgacgatttcgtcatcaccgaaaacggccgcaagttttgggtcaaccttgataagtatttggatacggggctttttttggatcatcgaaacacgcgcaaaaaagtcggcgaaacggcggcgggcaaacgttttttaaacctgttttcctacaccggcagcttcactgtctatgccgccaccggcggcgcggcatccagcgaaactgtcgatttgtctaacacttatctcgattgggcgagacgcaattttgaattgaacggcatcgatacggaacggcataaaatcgtccgcgccgacgtgttccaatatcttcagacggcatatggggaaggcaggcggttcgacctcattgtgatggacccgcccagtttttccaacagcaagaaaatgtccgacatcctcgacatccagcgcgaccacaaaaagctgattgacggcgcggtgaagctgctcgcttcagacggcattttgtacttttccaacaacctgcgcagcttcgtcttagacgacttggtatcggaacaatacgccgtcaaagacatttccaaacaatccgttcccgaagatttccgcaacaaaaaaatccataggtgctgggaaatccgccacaaatcttaa

SEQ ID NO: 47534 - DNA, 1125 bp, Neisseria meningitidis; identical to SEQ ID NO: 45383

SEQ ID NO: 47535 - DNA, 1287 bp, Neisseria meningitidis; identical to SEQ ID NO: 45698

SEQ ID NO: 47536 - DNA, 567 bp, Neisseria meningitidis; identical to SEQ ID NO: 45719

SEQ ID NO: 47537 - DNA, 912 bp, Neisseria meningitidis; identical to SEQ ID NO: 37999

SEQ ID NO: 47538 - DNA, 1302 bp, Neisseria meningitidis; identical to SEQ ID NO: 39130

SEQ ID NO: 47539 - DNA, 585 bp, Neisseria meningitidis
atgcacatactgaccgccggcgtggacgaggcagggcgcgggcctttagtcggcagcgtgtttgccgccgccgtcatccttccggaaatattcgacctgcccggactgaccgactccaaaaaactcagcgagaaaaaacgcgacgcgcttgccgaaatgataaaaaatcaggcggttgcgtggcacgtcgccgccgccgggcccgaagaaatcgccagcctcaacatcctgcacgccaccatgctcgcgatgaaacgcgccgttgacggtttggctgtgcgtcccgaaaaaatattcatcgacggcaaccgcattcccgaacatttgaacatccctgccgaagccgtcgtcaaaggcgacagcaaaatcatcgaaatatccgccgcatccgttttggcaaagaccgcccgcgatgcggaaatgtacgcactggcgcaacgccatccccaatacggtttcgacaaacacaaaggttacggcacgaagcagcatttggaagccctcgaaaaatacggcgtgctgcccgaacaccgccgcgacttcgcccccgtcagaaacctgttcgcgcagcaggccttgttttaa

SEQ ID NO: 47540 - DNA, 609 bp, Neisseria meningitidis; identical to SEQ ID NO: 39049

SEQ ID NO: 47541 - DNA, 324 bp, Neisseria meningitidis; identical to SEQ ID NO: 39252

SEQ ID NO: 47542 - DNA, 1446 bp, Neisseria meningitidis; identical to SEQ ID NO: 38178

SEQ ID NO: 47543 - DNA, 603 bp, Neisseria meningitidis; identical to SEQ ID NO: 38953

SEQ ID NO: 47544 - DNA, 1842 bp, Neisseria meningitidis; identical to SEQ ID NO: 44310

SEQ ID NO: 47545 - DNA, 1098 bp, Neisseria meningitidis; identical to SEQ ID NO: 39446

SEQ ID NO: 47546 - DNA, 1116 bp, Neisseria meningitidis; identical to SEQ ID NO: 39575

SEQ ID NO: 47547 - DNA, 1071 bp, Neisseria meningitidis; identical to SEQ ID NO: 39005

SEQ ID NO: 47548 - DNA, 648 bp, Neisseria meningitidis; identical to SEQ ID NO: 36887

SEQ ID NO: 47549 - DNA, 633 bp, Neisseria meningitidis; identical to SEQ ID NO: 45242

SEQ ID NO: 47550 - DNA, 447 bp, Neisseria meningitidis
atgaaagcaatccaaaaaggtttcaccctgatcgagctgatgatcgtcatcgccatcgtcggtatcttggcagccgtcgccctgcccgcataccaagactacaccgcgcgcgcccaaatgtccgaagccctgactttggcagaaggtcaaaaatccgcagtgatcgagtattattccgacaacggcacattcccgaacagcaatacttccgcaggtattgctgcctctaacgagattaaaggtaagtatgtggcatcggttaaggttgaaggtaatgcctctgttgcttctattaccgctaccatgaactctagtaatgtgaataaggacatcaaaggtaaaaccttggtactcgtcggcaaacaaaactccggctcgttctcttggggatgtaaaaaaggttctgtggacgaaaaattcttgccatctacctgccgcaccaaataa

SEQ ID NO: 47551 - DNA, 687 bp, Neisseria meningitidis; identical to SEQ ID NO: 38997

SEQ ID NO: 47552 - DNA, 1311 bp, Neisseria meningitidis; identical to SEQ ID NO: 39855

SEQ ID NO: 47553 - DNA, 636 bp, Neisseria meningitidis
atgattgtttccattgatgttgatgcacaaaaaacgtttacgccactgtgtcctgacgaactgcccgtgaacgaggggcatttgattgtcgaggagttgaatgctcaagccgctttggcggatttgcgcgtgatgacgaaagatgcgcatcatatggtagcgaaatggcttgtggataaccctgttgatatgttgaagccgacaggtttgcctgatgcggatttgacttgggtggctcatgcgatggtcggtacgcgcggctatgaattattggacggactgccttctgctaaagaatatgattattgcgtttggaaaggtgttgatcctgaattgcatccttacggcgcgtgttttcacgatattgaggaaaaactaagcacagggctgattgaatggctgcgttgtcaaaatacggatacggttattatcggtgggttagctacggattattgtgttaaaacaacggttttgcagttacttaaaggtggtaattggcaggttatcgtcaatgaagcggcttgtcggggcattgcgccggataccattgaaacggcatggcaggaaatgagttctgccggtgcagtcatcttaaaaaacgctgaagaaattaaaaaatatattaataatcaataa

SEQ ID NO: 47554 - DNA, 291 bp, Neisseria meningitidis
ttgaggaaaacaatgaatatccgaactgcttttgctttgtgcgccatcgccttatccgccgctgcggctgcctacgccaaagaaatcaaaatcgatgccaacaacacgccttattccgaagccgacgcgcaaaagctggcggcaacggcagtcggtatgggtgttaaggaacctatcagcctgaacggcggcagcggcagcattaccgtgtccggcagcagcgcgacgcagtgcgtgttcaaagtcggcaacggaggcgcgttgcagattcaagggctaaactgcaagtaa

SEQ ID NO: 47555 - DNA, 1344 bp, Neisseria meningitidis; identical to SEQ ID NO: 39017

SEQ ID NO: 47556 - DNA, 312 bp, Neisseria meningitidis; identical to SEQ ID NO: 39461

SEQ ID NO: 47557 - DNA, 2832 bp, Neisseria meningitidis
atgaataagaaacacggttttcagcttaccctgactgccttggctgttgccgccgccttcccgtcatatgcggcaaaccctgaaacggcggcacctgatgcggcgcagacccaatccctgaaagaggttaccgtccgtgctgccaaagtgggacggcgatcgaaagaggcgaccggtttgggcaaaatcgtcaaaacgtcggaaacgttgaacaaagaacaggtactcggtatccgcgacctgacgcgctacgatccgggcgtggcggttgtcgaacagggcaacggcgcgagcggcggctactcgatacgcggcgtggataaaaaccgtgtggcggtttcggttgacggcgttgcccaaatacaggcgtttaccgtgcagggatcgttgagcggatacggcggacgcggcggcagcggtgcaatcaacgaaatcgaatatgaaaacatcagcacggtggaaatcgacaaaggtgccggttcgtccgatcacggcagcggcgcactcggcggcgcggtcgctttccgcaccaaagaggcggcagacctgatttcagacggcaaaagctgggggatacaggcaaaaaccgcctacggcagtaaaaaccgccaatttatgaagtcgctcggcgcgggtttcagtaaagacggttgggaagggctgctaatccgaaccgaacgtcaggggcgggaaacgcacccgcacggcgatattgcggatggggtggcatacggcataaaccgtttggacgcgttccgccagacatacggcattaaaaaaccaagtgaaggaggggaatatttcctggcggagggcgagagtgagctcaagcctgtggcaaaagtggcaggcaacggaaactatttgaacaaccagctcaaccgctgggtaaaagaacgtattgaacaaaatcagcctttaagtgctgaagaagaagcgatggtgcgggaggcgcaggcgcgccacgaaaacctgtccgcccaagcttacacgggcggcggcaggatattgcccgatccgatggattaccgcagcggttcgtggcttgccaagctgggctaccgcttcggcggcaggcattatgtcggcggcgtgtttgaggataccaaacagcgttacgatatccgcgatatgacggaaaaacagtattacggtacggacgaggcgaaaaagtttagagacaagagcggggtgtacgacggcgacgatttccgcgacggcttgtattttgtgccgaatatagaagagtggaagggcgatcaaaagttgattaggggcataggtttgaaatattcccgcaccaaatttattgacgaacatcaccgccgccgccgtatgggtttgctgtaccgttatgaaaatgagaaatactcggataactgggcggataaggcggtgttgtcgtttgacaaacagggcgtggcaaccgacaacaacacgctgaagctgaattgcgccgtgtatcctgccgtggacaaatcctgccgcgcgtcggcggacaaaccgtattcctacgacagcagcgaccgtttccactaccgcgaacagcacaatgttttgaatgcctcgtttgagaaatcgctgaaaaacaaatggacgaaacaccatctgactttgggcttcggttacgatgcttccaacgcgatttcccgccccgaacagctttctcacaatgcggcaaggatttcggaatactcggattacaccgataagggagacaagtatcttttgggtaagcccgaagtcgtcgaagggtcggtctgcggctacatcgaaaccctgcgttcccgcaaatgcgtgccaagaaaaatcaacggcagcaatatccacatttctttgaacgaccgtttttcaatcggcaaatatttcgatttcagcttgggcggcaggtacgaccggaaaaacttcaccacgtcggaagaactcgtccgcagcgggcggtatgttgaccgttcgtggaacagcggcatcgtgttcaaaccgaaccggcatttttctttgtcttaccgcgcctccagcggcttcagaacgccctcattccaagaacttttcgggatagacatttatcacgattatccgaaaggctggcagcgtcccgccctgaaatcggaaaaggcagccaaccgcgaaatcggtttgcagtggaagggcgatttcggctttttggaaatcagcagcttccgcaaccgttataccgatatgattgccgttgccgatcacaaaaccaaattgccgaatcaggcaggacaattgacagagattgatatacgcgattattacaatgcccaaaatatgtcgctccaaggcgttaatatattgggaaaaatcgactggaacggtgtgtacggcaaactgcccgaaggtttgtacacgactttggcgtacaaccgtatcaaaccgaaatcggtatccaaccggccgggactgtctctccgcagctatgctttggatgcggtacagccgtcgcgttatgttttggggttcggatacgaccagcccgaggggaaatggggcgcaaacattatgctgacctattccaaagggaaaaaccctgacgagcttgcttatctggcaggcgatcaaaaacgatattcgacaaaaagagcgtcgtcttcttggtcgacggcagacgtttccgcctatctgaatctgaaaaaacggctgaccttgagggcggctatctacaatatcggcaactaccgctacgttacttgggaatccttgcgccagaccgcggaaagcacggcaaaccggcacggcggcgacagcaactatggaaggtatgccgcaccgggcaggaacttcagtctcgcgctcgaaatgaagttttaa

SEQ ID NO: 47558 - DNA, 219 bp, Neisseria meningitidis; identical to SEQ ID NO: 36510

SEQ ID NO: 47559 - DNA, 1170 bp, Neisseria meningitidis; identical to SEQ ID NO: 39478

SEQ ID NO: 47560 - DNA, 1056 bp, Neisseria meningitidis
atgagcggacaaaaactgacggctgctaatttggtcagtgcgattgatagcttgaaaaaaaatgtcaattataactatgtgaacagctcaaatacgcataccatacaaatcgtccatgttgaaaaaccggaaggtccgattaagattaaaaggggagatacggaaacttcgatatcgaaacaagcaatttggcggttggcagatgcgttgtccacgggggagcctgtcaatgtggacagggtgtttggcgcaagttataactttcgttccgcactggaggcattgcttgcccatacacctgaaatttactggtgcaaattgcagcggatacaaccgggtctgaataaaagcgaggtggtggaagggcacaagcacattatttggcttcccgataggccacatgaaaaaggcgtaatgaaggaatatgagacagatgtcgttatttcggaaatcccctccaacaatgtggtttacgatgctttatcccttccttcaacccattcagaaatagatatagatgtaaaacgccgccacgtgcaaatccagattgccctttcagcaataggttttcaacttggtttcaggacgtggattgcgagaaacgaccaaggtattagttatggggataagaaaattgctgatttggatggtatcgtacaaaagatagaaagcgagaaactgatcagttcgtttgacggcgcggttcaggcggcaatgaatattgattgcatctggttcaggaatggaaaactgatgccggcggtgatggaagtggaacatagtacgggtgtacgttccggccttgcacggatgaagcagttgaaagacctgttgccaccatatgctaatacgcgctgggttatcgttgctcctgatgaagatagggataaagtttttaaagaagcgaatgttccgatgtttaaaaatttagatacccaatattttccttattccgcagttgaagagttgtattccttgtgcattcgccggaaattgacaaataaagctgtcaatgaagaatttttagactgctttatggaaaaatgtgtaatgtaa

SEQ ID NO: 47561 - DNA, 252 bp, Neisseria meningitidis; identical to SEQ ID NO: 41525

SEQ ID NO: 47562 - DNA, 852 bp, Neisseria meningitidis
atgaccttactcggatataagctcaaacagacccagcagctcaaccagcggctgcaacaatctttgcgcgtattgcagatgtcaggtatcgaactggaacgcgaggtcgaggactggctgtcggacaaccccctgctcgaacgcaaagacacggatgaattttccgatgccgagttcagccattacactgcgcctgcccgtcaaatcggcggagacgaaggcgaagatatgctgtccaacatcgccggcgaacaggatttcaagcaatacctgcacgcgcaagtgtgcgaacaccccctttccgaccaagaagccgcctgcgtccacatccttatcgatttccttgacgagcagggctacctgaccgacagcatcgaagacatcctcgaccatacgcccttggagtggatgttggatgaagcaatgctgaaacaagccctgaccgcattgaaaaaattcgacccggcaggcgtggccgccgccgatttgaacgaatcgctgatactgcagatagaaagattgggcgaatgtgctgccaaaccctccgccctgcatatcgtccgaaacgccctcgacagcattgacggcaaccgcagccaaaccctcgcacgaataaaaaaacacctgccccaaaccgacagcggcacactcgaagccgcactcgacctcattgcttcgctcaatccctttcccgccgccggttttgcctcgtccacacccacgccgtattctgacgaggcactcgccaacctgctggctttccgcggcatggaggtttctcgccgcaccattgccaaatacagagaatcccttgagattccggcagcacacaaacgcaaaaccgcagaataa

SEQ ID NO: 47563 - DNA, 630 bp, Neisseria meningitidis; identical to SEQ ID NO: 44175

SEQ ID NO: 47564 - DNA, 1407 bp, Neisseria meningitidis
atgaccgccgctcctgatatcctctaccggcaagccgccgcccttttggaacaatccaataccgcccaagccctgcccctgttgcaacaggcggcagagcaaggttatgcggaagctgctttcgtattgggcaaccatctgctgcaaaacggccaaccggagcaggcactttcatggttggaagccgccgcggcccaacgccatcccaaagcactcttctccctgctgcaacaacgcgaacacaacggcaccccgaccggacagcttctcaacgactatgcctggctgggtgagcaggggcactcagaagcccaattaatcctcatgcgttaccacgcgcaacgcaacgatccacaatcgctctactgggcggaacttgctgccgcccgatatgccgcacctgcgtattaccatctggcacgccatcatcaacgccaaggcgacgttgaaacagccatcgaacaatacgaaaaagcggcagcactcggcgtaactgccgcctgctggcaacttggtcaaatctacttctacggtacaggtgtcagcctcaaccacgcacaagccgaacactatctcgaaccagccgcacaagccggccacatcgccgcacaaacgctgctggctgaccttcttgccgcccaacgcaaacctgaagccttggaatggtatcgtcgtgccgccgataaggaacaagcggaagcacagtctaagctggcccaatacgccctgaccggcgaactttccgaacgcgatccgttccaagcggcacgatatgccaaagccgctgccgagaaaaaccatcctgaagccctgaaaatcatgggcgacctctaccgctacggtctcggtatcaaagccgacaaccatatcgcgcaagattactaccaccgtgccgccgcgctgggttctgccgccgcagcacaaaaactcatcagcgacgccgcgctgtaccatccgcaacaatacgaacaaatcaaaactgccgccctgcaacaacaacaaaccgaaaccatctaccgtttggcggaagcacaagcctgcgccatcggccgtcccgccgactacaatgccgcgcgaaaaaattacatggaagctgccgggttccaccataaaaacgcagcggcagccttaggccgcatctaccattacggcctcggtacggcgcaagatcctcgggcggctgcacactggtacgccattgctgccgaacaaaaccacccttccgcccaataccacctcgcctgtttttactatcacggacaaggtatcggctgtcatgttccgaccgcctgctactggctgcaggccgccatcagcaacggccacacttcggccgaatcattaatatccctattagaacaatggcgacgcgaagcacaccatgccatcggacaaaaggccgtctga

SEQ ID NO: 47565 - DNA, 618 bp, Neisseria meningitidis; identical to SEQ ID NO: 45040

SEQ ID NO: 47566 - DNA, 1398 bp, Neisseria meningitidis; identical to SEQ ID NO: 45793

SEQ ID NO: 47567 - DNA, 702 bp, Neisseria meningitidis
atgttcagacggcatcggcatttgaaaaatatgcagattaaaaaaatcatgaaatggcttcccgtcgccctgtcgcttttgggtgcgttgggttatacggggtacggcagcgaggcggtgcggacggcggttgccgtactcgacgtactcggcgcggcaggggacgcgggttccgacgcgcccgcccgccgccgagcatcggcgaaatccggccaccgctacacaggcacggtgtccaaagtctatgacggcgacacccttcacgttatcgacggcgacggcgcgaaacacaaaatccggatggcgtatatcgacgcgccggagatgaaacaggcttacggcacgcgttcgcgcgacaacctgcgcgcggcggcggaaggcaggaaagtcagcgtgcgcgtgttcgacaccgaccgctaccagcgcgaagtggcgcaggtttctgtcggcaaaaccgatttgaacctgatgcaggtgcaggacggggcggcgtggcattataaaagttatgctaaagaacagcaggataaggcggattttgccgattatgccgacgctcaaattcaggcggaaagggaacgcaaaggattgtggaaagctaaaaatccgcaagcgccgtgggcgtaccgccgggcaggcaggagcggcgggggcaataaggattggatggatgccgtgggcgaatggttgggcatttggtaa

SEQ ID NO: 47568 - DNA, 1395 bp, Neisseria meningitidis; identical to SEQ ID NO: 45357

SEQ ID NO: 47569 - DNA, 891 bp, Neisseria meningitidis
atgagcgtattgattaataaagacaccaaagtattggttcaaggtttcaccggtaaaaacggtactttccactccgaacaagctctggcttacggcactaaagttgtcggcggcgttaccccgggcaaaggcggtcaaacccacctgaacctgcctgtattcaacaccatgaaagaagcggttaaagaaaccggcgcggatgcatctgtaatttacgttcccgctccgtttgtgttggattctatcgttgaagccgttgattcaggcgtaggcttggtcgttgtgattaccgaaggcgtgcctactctggacatgctcaaagccaaacgttatttggaaaccaacggcaacggtacccgcttggtcggccctaactgcccaggcgtgattactccggatgagtgcaaaatcggtattatgccgggccacatccacactccgggccgcatcggtattatttcccgttccggtacattaacttacgaagccgtggcacaaaccaccaaactgggcttgggtcaatcaacctgtatcggtatcggcggcgacccgattcctggtatgaatcaaatcgacgcactgaaactcttccaagaagacccggataccgacgccatcatcatgatcggtgaaatcggcggtactgcggaagaagaagcagccgaatacatccaatccaacgtaaccaaacctgttgtaggttacattgctggtgttaccgctcctaaaggcaaacgtatgggccacgccggtgcgattatttccggcggtaaaggtactgccgaggaaaaattcgccgctttcgaaaaagccggtatcgcttacacccgcagccctgccgagttgggcactaccatgctggaagtgttgaaaacaaaaggtttggcataa

SEQ ID NO: 47570 - DNA, 1161 bp, Neisseria meningitidis
atgaatatggaaaattatttttctaacttaaatttagacatcagaacacataaactcggcacatttaccgatcaaaaagtaaccccggatgtattatgtgccgtagcagaatgtatcatcgaatatattgaaaatattggagaaatatttagcattaacgatattcgttattcagattatgccgaatatatcgccaccgccgtatttaaaaaaccatccattgaaaatgccggtagcgaatacaataaatttttttcacaaccgattaaaatgctgagctattgtggcgtattaagcgaagaaaagttttctagatactatcggtacggcgtacagaataataaaatcctgcaatatattgccaatcgtgaaagaaatgccctaaatttcatccaagcatttagtgaaaaattattaaaagacagtggtatttatccaaaatttgccgatttttttgcccagcctaataaaaatacgtttgaaagtatgaaaacggcgtttaccgatcttgttatccaaaacacacccaaaaataccgaagtagaagttcgccgtatttttaccaaaatcattaatccattggcttataaacataatacttttggtacaagaaaagggagtatttccaatacccccattacattagacgagctttattacaatcgcctaaactggcgagataaaggcaaagaaaaatcgctcactcgcaaagaagctcaaactctatttgccgatagtgcaaatgccgcaaatttgaattatttagttaataaagccacaaaatttgtcaaaacgctacacaaaaccagcgaagttcaacgttttgatcccacagaagccaatcaggcacatcatatttttatggcaagcgaatttcctgatttagcatcgctgcctgaaaatctgatttgcctgacaccaaaccagcatttcaatttagcacacccaagcaataaaaccaccgttattgacaaacattaccagcgtatttgcctgatggcgaaattggacagtattgagcaagataaccgtgctaatacaggaaattacgattaccatgaatttattcatgtactcaatacaggatttaatacagatcagtttgatgtttctatgagttacgaaacattgaagcatcgtattttaatgtttgatttttaa

SEQ ID NO: 47571 - DNA, 147 bp, Neisseria meningitidis
ttgaagggaaagttgatgcgtgttttgctggtggaagacgatgcgatgattgcggaggcggtgtcggcaagtttgaaagacggcggctatgcggtggattgggtcaaaaacggcgcgcggttgccgctgcccagccttatgacttga

SEQ ID NO: 47572 - DNA, 252 bp, Neisseria meningitidis
atggataacacgcgtattatggcagcacgtgaagcaggggtaaaagtggaagcgaatgttcataattttaatgaccgattatcatcaaaagagagaatcaggtttaagcatgatggtattgagcctcaaacttggggagaagctatccagctacgaattagaaagcaagaaacacaaaaaggagttccagaagggtggagcaaaagatttcctaacggaagtatttatgatgtaaaggtacttaggaaatga

SEQ ID NO: 47573 - DNA, 246 bp, Neisseria meningitidis; identical to SEQ ID NO: 38743

SEQ ID NO: 47574 - DNA, 807 bp, Neisseria meningitidis; identical to SEQ ID NO: 45706

SEQ ID NO: 47575 - DNA, 750 bp, Neisseria meningitidis
ttggagtgggcggttcgtcagatgggagggaaaatgtccgacaaaaaatataatgtcgatgagggggaaatcgccaaattcagccggattgccgacaaatggtgggacaagtcgggcgagttcaaaaccttgcacgacatcaatccgctgcggctggattatatcgacggacacgcggatttgtgcggcaaacgggttttggatgtgggctgcggcggcggcatcctggcggaaagcatggcgcggcgcggcgcggcgtttgtaaagggtatcgacatggcggagcagtcgctggaaaccgcccgcctgcacgcggctttgaacaatgtcgccgatatcgaatacgaatgtatccgcgtggaagaccttgccgaggcggaaccgcactcgttcgatgtggtaacgtgcatggaaatgatggaacacgtccccgatcccgccgccatcgtgcgtgcttgtgccaatctggtcaaaccggacggcatggtgtttttttctaccatcaataaaaacccgaaatcgtacctgcatctgattgtggcggcggaatatctgttgaagtttgtccccaaaggcacgcacgactggaaaaaattcatcgcacctgccgagctggcgcgaatgtgccgtcaggcaggcttggatgtggcggatacgaagggtatgacttaccatgtgttgtcgcaaacttatgccctgtgcgattcgaccgatgtgaattatatgtttgcctgccgtccggcgttctga

SEQ ID NO: 47576 - DNA, 573 bp, Neisseria meningitidis
atggacaatcacgccgaagcacactggcaaaacggctggcttcaaagcatacgccataccccgtcacccaatttcagcccgagggaaacgggggaaacggtttccctgattgtgttgcacaacatttcgctgccgccgttcgaatatggtacggatgcggttgagaggctttttgccaatcgcctagacccgaacgaccacccgtttttcggattgatacacactttgcgcgtatccagccatttcttaatcaaacgcgacggcaaaacggtacagttcgtttcctgcgacaatatggcataccatgccggcgtatcttcattcggcggcagggaaaaatgcaacgcattttcaatcggcatcgaactggaaggctgcgatttcgaaccgtttgccgaagcgcaataccgttcgctcgaagccttgttggacgcaatctgccgccactaccccgtcacggcggtaacggggcaccaagacatcgcgcccggccgcaaaaccgaccccggccattttttcgactggcggcggatacgggagaaagggtttctcgtggacagaaatgccgtctga

SEQ ID NO: 47577 - DNA, 1305 bp, Neisseria meningitidis; identical to SEQ ID NO: 45795

SEQ ID NO: 47578 - DNA, 1266 bp, Neisseria meningitidis; identical to SEQ ID NO: 39430

SEQ ID NO: 47579 - DNA, 1056 bp, Neisseria meningitidis
atgacacaccattaccccacagacgatattaagattaaagaagttaaagagttgttgccgccgattgcccatctttacgagctgccgatttccaaagaggcttcgggcttggttcaccgcacccgtcaggaaatttccgatttggttcacggcagggacaagcggctgttggttattatcgggccgtgttcgattcacgatccgaaagcggcgttggaatatgcggagcgtttgttgaaactccgcaagcagtatgaaaacgagcttttgattgtgatgcgcgtttatttcgagaagccgaggacgacggtgggttggaaaggtttgattaacgacccgcatttggacggtacgtttgacatcaatttcggtttgcgtcaggcgcgcagcctgttgttgtcgctgaacaatatgggtatgcctgcctctaccgagtttttggatatgattacgccgcaatattatgcggacttgatttcttggggggcaatcggtgcgcggacgaccgaaagccaagttcaccgcgaattggcaagcgggctgtcctgccccgtcggctttaaaaacggtacggacggcaatttgaagattgccatcgacgcaatcggtgcggcgagccattcgcatcatttcctgtctgtaaccaaggccgggcattccgccattgtccataccggcggcaatcctgactgtcatgtcattttgcgcggcggaaaagagccgaattatgatgcgggacacgtcagcgaggcggcggaacaactgcgtgcggcaggggtaaccgacaagctgatgatagattgcagccacgccaacagccgcaaggattacacccggcagatggaagtggcacaagatattgccgcccaattggaacaggacggcggcaatatcatgggcgtgatggtggaaagccatttggtcgaaggcaggcaggacaagccggaagtgtacggcaaaagcattaccgatgcgtgtatcggttggggcgcgactgaagaactgttggcattgttggcaggtgcaaacaaaaaacgtatggcgcgcgccggttga

SEQ ID NO: 47580 - DNA, 2151 bp, Neisseria meningitidis
atgccgtctgaaaccggcgcagatgccgccaagccttcagacggcattgcctgcccgctccgaccgaacaacaaccatctttgggagaaccttatgcccgaacaaaaccgcatcctctgccgcgaactaagcctgctggcattcaaccgccgcgtgttggcacaggcggaagacaaaaacgtcccccttttggaacgcctgcgcttcctgtgcatcgtgtcgtccaatcttgacgagtttttcgaagtccgcatggcgtggctcaagcgtgaaaacaagctgcacccccggcgcaggctggacaacggcaaaatgccgtctgaaaccatcgccgacgttaccgaagcggcgcgctccctgatacggcatcagtacgacctgttcaacaacgtccttcagcccgagttggcgcgggaaagcatccatttttaccgccgccgcaactggacgggcacgcagaaaaaatggatcgaagactatttcgaccgcgaactgctgccgatcctgacccccatcggactcgacccgtcccaccccttcccgcgaccgctgaacaaatcgctcaacttcgccgtcgaactcgacggcacggacgcattcggcaggccttcggggatggcgattgtgcaggcaccgcgcatcctgccgcgcgtcgttcccctgccgtccgaactgtgtggcggcggacacggcttcgtcttcctgtcgtccatcctccacgcccacgtcggcaaactcttcccgggcatgaacgtcaaaggctgccaccagttccgcctgacgcgcgacagcgacttgaccgttgacgaagaagacctgcaaaacctccgcgccgccatccaaaacgaactgcacgaccgcgaatacggcgacggcgtgcggctcgaagtcgccgacacctgtcccgcctacatccgcgactttctgctcgcgcaattcaaactgaccgccgccgaactctatcaggtcaaaggcccggtcaacctcgtgcgcctcaacgccgtccccgacctagtcaaccgccccgatttgaaatttcccacacacacgccgggcagactgaaagccttgggcaaaaccgcgtccatattcgatttggtgcgccaatcgcccatcctgctgcaccacccctaccaatcgttcgaccccgttgtcgaaatgatgcgcgaagctgccgccgaccccgacgtgcttgccgtcaaaatgacgatttaccgcaccggcacgcgttccgaactcgtccgcgccctgatgaaggcggcactcgccggcaaacaagtaaccgtcgtcgtcgaactgatggcgcgttttgacgaagccaacaacgtcaactgggcgaagcagctcgaagaggcgggcgcgcacgtcgtgtacggcgtgttcggctacaaagtccacgccaagatggcactggtcatccgccgcgaagacggcgtactcaagcgttacgcccacctcggcacgggtaactaccaccaaggcacatcgcgcatctacaccgacttcggcatcattaccgccgacgaacaaatcaccgccgatgtgaacacattgtttatggaaatcacaggcttgggcaaacccgggcggctgaacaaactctaccaaagcccgtttaccctgcacaaaatggttatcgaccgcatcgcacgcgaaaccgaacacgcaaaagccggcaaaccggcgcggattaccgccaagatgaattcgctcatcgaaccgaccgtcatcgaagccctgtatcgggcaagcgcggcaggcgtacaaatcgatttgattgtgcgcggtatgtgcaccttgcgcccgggtgtaaaaggcttgtccgaaaacatccgcgtccgctccatcatcggcaggcagctcgaacacgcgcgcgtgtattgcttccacaacaacggcgcggacgatacctttatctccagcgcggattggatggggcgcaacttcttccgccgcatcgaaaccgccgcgccgattgccgcgcccgaactcaaaaaacgcgtcatccgcgaaggtttggaaatggcactggcagacaatacgcacgcgtggctgatgcagcccgacggcggctatatccgcgccgcgcctgccgagggcgaaagcgaagccgacctgcaaaacgatttgtggacactgctcggaggctga

SEQ ID NO: 47581 - DNA, 621 bp, Neisseria meningitidis
atggctgtacgttccaaatcctcaaaagcgtggctgcacgaacacgtcaacgaccactacgtccatatggcgcaaaaagacggctaccgcgcccgtgccgcatacaaacttttggaaatcaacgaaaaagacaaattaatcaaacccggcacggtacttgccgacttgggcagcgcaccgggaagctggtcgcaggttgccgccaagctgacgggtacttccggagcagttttcgccttggacatcctgcctatggaagccatagggggcgtctccttcattcagggcgacttcagggaaaacgacgttttggcgcaatttgaaggcttattaaacaaccgccccttagaccttgtaatctgcgatatggcgcccaatatgtcgggaaacgccgtaagcgatcaggcgcgcagcttttatttgtgcgaactggctttggacttcgcctcgcaacacctgaaaaccggcggcagctttttggtcaaagtctttcagggtgcaggctatcaggaatacatggcagccatgcgcgaatttttcggcacggtgcagacgcgcaaacccgaagcctcgcgcaatcgctccagtgagatttatttattgggcaaaaataaacgctga

SEQ ID NO: 47582 - DNA, 2625 bp, Neisseria meningitidis; identical to SEQ ID NO: 45426

SEQ ID NO: 47583 - DNA, 1323 bp, Neisseria meningitidis
ttggcaggttcggcactcgtcgccctgaccgcgctgttttttgcccatcttgccgattttgcgctggaactgaacgccaaactggttcaacaatacccgtggttcgcgtgggtcgcgcttcctttgggtttgccgcttattgcgtggctcacacgcaaattcgcccccttcaccgtcggcagcggcatcccgcaggtcatcgcctcactgtcgctgccctacggcgcacagaaaacgcggctgatccgcctcgggcagacgctgctgaagattccgctgacctttttgggtatgctgttcggcgtgtccatcggacgcgaaggtccgtccgtgcaggtcggcgcggcagtgatgggcgcgtggggcgcgtggtgcaagaaacacggcttggcattcaaagggatgcaggaaaacgatttgatggcggcgggcgcggcgggcggtttggcagccgcgttcaacgcgccgctggcgggcgtgattttcgccattgaggaactcgggcgcggcatcatgttgcgctgggagaggcaaattcttttgggcgtgctcgcctccggtttcatacaggtcgccattcagggcaacaacccgtatttttccggcttcaacggcggcgtattggaacatatctttctgtgggtcgcactgtccggcctggtttgcggcgcggcgggcggcctgttcggacgtttgctctatcgcggtgcggcggcgtttgcaccgcgcaagatacgcggcttcatccgcaaccgtccgctgctgctggcggcactgatggggctgctgctcgccctgctcggcacgttctaccaaggcaaaacctacggcaccggctaccacgaagccgcccaagccctgcacggcatctacgaagcccccttcggactcgccgccgccaaatggctcgccaccgtattcagctattgggcaggcgttccgggcggcattttcactccctcgctgaccataggcgcggttttgggcgagcatatcgccgccatcgccgacatatcgcagggtgcaaacatcatcgtcctcatctgcatggcggcatttctggcgggcgcgacacaatccccgattacttccgccgtcgtcgtcatggaaatgacgggcggacaaagcctgctgttttggatgctaattgcctgcattttcgcctcgcaggtttcgcgccagttttcgccgcgtccgttctaccacgcatcgggaatgcgcttccgccagcgcgtgcttcaagaaaccgccgcccaaaccggcaatgcgcccgcaagaccgcaaacagcaaacagcaaaacgggaatgccgtctgaaaattaa

SEQ ID NO: 47584 - DNA, 1620 bp, Neisseria meningitidis; identical to SEQ ID NO: 44361

SEQ ID NO: 47585 - DNA, 468 bp, Neisseria meningitidis; identical to SEQ ID NO: 38530

SEQ ID NO: 47586 - DNA, 360 bp, Neisseria meningitidis; identical to SEQ ID NO: 44131

SEQ ID NO: 47587 - DNA, 1305 bp, Neisseria meningitidis
atggctatggctaaaaatgttgtagtaatcggcgcacagtggggcgacgagggtaaaggtaaaatcgttgactggctggcggaagaagccggcggcgtggtgcgcttccaaggcggccacaatgcgggtcatactttggtcgtcggcggcaaaaaaaccattttgcgcctgattccgagcggcatcctgcatgaaagtctggactgcttcatcggttcgggcgttgtcgtctcccccgaagccctgttgggcgaaatcgacgagttaaacgctgcaggcgtgaaaaacgtcgaaggccgtctgaaaatcgcgccgacctgcccgctgatcctgccttaccacatcgcgctcgaccaagcccgcgaagcatcgcgcggcaaaggcaaaatcggcacgaccggccgcggcatcggccctgcctacgaagacaaagtggcacgccgcgccattcgcgccgccgatttgctgcatcctgaaaaactgcgtgaaaaactggatgccatccttgcctattacaatgtccaactgcaacatctgcacaatgccgagccggttaaagcggaagacgtgatggcggttatcgaaaaagtcgcgctgcgcattgcgccgatgattaccgacgtgtcccgcgtgttgaacgagaaaaacaaaaacggcgaaaaactgctgtttgaaggcgcgcaaggtgcgttgttggacatcgactacggcacttatcccttcgttacctcgtccaactgtctggcgggagccgcttccgcaggcgcgggcgtaggccctcaaatgctggattatgttttgggcatcgtcaaagcctataccacgcgcgtcggttcaggcccgttcccgaccgaattgttcgacgaagtaggcgcaggtttggcggaacgcggacacgaattcggctcggtaaccggccgcgcacgccgctgcggctggtttgatgccgccgccctgaaacgctccatccaaatcaacggcatttccggtatgtgcattaccaaactcgatgtaatggacggcgttgaaaccatcaatatctgcgtcggctacgaattgcccgacggcggcaaaaccgatatcctgccttgcggttccgatgcggtggaaacctgcaagccgatttacgaaaccatgcccggctggcgtgaatccactttcggcgtgaaaagctacgacgcattacctgccaatgccaaagcatatttgaaacggattgaagaagtctgcggtgcgccggtcgccatcgtctccaccggccccgaccgagaagaaacgattgtgctgcatcatccgttcgcataa

SEQ ID NO: 47588 - DNA, 2145 bp, Neisseria meningitidis
atgaacgccccgtttttccgcctcagcctgctctcgcttaccctggcggcaggttttgcccatgcggcagaaaataatgccaaggtcgtactggataccattaccgtaaaaggcgaccgccaaggcagcaaaatccgtaccaacatcgttacgcttcaacaaaaagacgaaagcaccgcaaccgatatgcgcgaactcttaaaagaagagccctccatcgatttcggcggcggcaacggcacgtcccaattcctgacgctgcgcggcatgggtcagaactctgtcgacatcaaggtggacaacgcctattccgacagccaaatcctttaccaccaaggcagatttattgtcgatcccgctttggttaaagtcgtttccgtacaaaaaggcgcgggttccgcctctgccggtatcggcgcgaccaacggcgcgattatcgccaaaaccgtcgatgcccaagacctgctcaaaggcttggataaaaactggggcgtgcgcctcaacagcggctttgccagcaacgaaggcgtaagctacggcgcaagcgtattcgggaaagagggcaacttcgacggcttgttctcttacaaccgcaacaatgaaaaagattacgaagcaggtaaaggcttccgtaataatttcaacggcggcaaaaccgtaccgtacagcgcgctggacaaacgcagctacctcgccaaaatcggaacaagcttcggcgacggcgaccaccgcatcgtattgagccatatgaaagaccagcaccggggcatccgtaccgtccgtgaagaatttaccgtcggcggcgataaagagcgaataagtatggaacgccaagcccctgcttaccgcgaaaccacacaatccaacaccaatttggcgtacacgggtaaaaacctgggctttgtcgaaaaactggatgccaacgcctatgtgttggaaaagaaacgctattccgccgatgacaaaggcagcggctacgcaggcaatgtagaaggccctaaccatacccgaatcaccactcatggtgcgaacttcaactttgacagccgccttgccgaacaaaccctgttgaaatacggtatcaactaccgccatcaggaaatcaaaccgcaagcatttttgaacggcgaatttaaaattaaagataaaagtggtgcaactcaggctgagaaacagaagaaccgtgatgatgaaaacattgtcaaagcctaccgcctgaccaacccgaccaaaaccgataccggcgcgtatatcgaagccattcacgagattgacggctttaccctgaccggcggactgcgttacgaccgcttcaaggttaaaacccacgacggcaaaaccgtttcaagcagcagccttaacccgagtttcggtgtgatttggcagccgcacgaatactggagcttcagcgcaagccacaactacgccagccgcagcccgcgcctgtatgacgcgctgcaaacccacggtaaacgcggcatcatctcgattgccgacggcacaaaagccgaacgcgcacgaaataccgaaatcggcttcaactacaacgatggcacgtttgccgcaaacggcagctacttctggcagaccatcaaagacgcgcttgccaatccgcaaaaccgccacgactctgtcgccgtccgtgaagccgtcaacgcaggctacatcaaaaaccacggttacgaattgggcgcgtcctaccgcaccggcggcctgactgccaaagtcggtgtcagccacagcaaaccgcgcttttacgatacgcacaaagacaagctgttgagcgcgaatcctgaatttggcgcacaagtcggccgcacttggacagcctcccttgcctaccgcttcaaaaacccgaatctggaaatcggctggcgcggacgctatgttcaaaaagccgtgggttcgatattggtggcaggtcaaaaagaccgccaaggcaacttggaaaacgttgtacgcaaaggtttcggtgtgaatgatgtcttcgccaactggaaaccgctgggcaaagacacgctcaatgttaatctttcggttaacaacgtgttcaacacgttctactatccgcacagccaacgctggaccaataccctgccgggcgtgggacgtgatgtacgcttgggcgtgaactacaagttctaa

SEQ ID NO: 47589 - DNA, 789 bp, Neisseria meningitidis; identical to SEQ ID NO: 43700

SEQ ID NO: 47590 - DNA, 474 bp, Neisseria meningitidis; identical to SEQ ID NO: 45148

SEQ ID NO: 47591 - DNA, 828 bp, Neisseria meningitidis; identical to SEQ ID NO: 45312

SEQ ID NO: 47592 - DNA, 3216 bp, Neisseria meningitidis
atgcccaaacgtaccgacctaaaatccatccttatcatcggcgccggccctatcgttatcggtcaggcctgcgaatttgactattcgggcgcacaggcctgtaaggctttgcgtgaagaaggctataaagtcattctggtgaattccaaccccgccaccatcatgaccgaccctgaaatggcggatgttacctacatcgagccaattatgtggcagacggtggagaagattatcgccaaggagcgtcctgatgcgattctgcccacgatgggcggtcagaccgcgctgaactgtgcgctggatttggcgcgcaacggcgtgctggcgaaatacaatgtcgagctgatcggcgcgacggaagacgcgattgacaaggcggaagaccgcggtcgttttaaagaagcgatggaaaaaatcggcctctcctgcccgaaatcttttgtctgccacacgatgaacgaagctttggcagcgcaagaacaggtcggcttccctaccctgattcgtccgtctttcacgatgggcggttcgggcggcggcattgcctacaataaagatgagtttttggcgatttgcgaacgcggtttcgatgcgtcgcctacgcacgagctgctgattgagcagtctgttctcggctggaaagagtacgagatggaagtggtgcgcgacaagaacgacaactgcatcattatctgctcgattgaaaacttcgacccgatgggcgtgcatacgggcgactcgattacggttgcgcctgcgcaaacgctgacggacaaagaataccaaatcatgcgtaatgcttcgttggcagtattgcgcgaaatcggcgtggataccggcggctcgaacgtgcagtttgcggtgaaccctgaaaacggcgagatgattgtgattgagatgaacccgcgcgtgagccgttcgtccgcgctggcttccaaagcgacgggcttcccgattgcgaaggtggcggcgaaactggcggtcggctttaagctggacgagttgcgcaacgacatcaccggcggcaaaacccccgcgtcattcgagccgtccatcgactatgtggtaaccaaaatcccgcgttttgcgtttgaaaaattccctgccgcagacgaccgcctgaccacgcagatgaaatccgtgggcgaagtgatggcgatgggccgcacgattcaggaaagcttccaaaaagccctgcgcggcttggaaacaggcttgtgcggcttcaatccgagaagctccgacaaagcggaaatccgccgcgaactggcaaaccccggccccgaacgtatgctgtttgtggcagacgcgttccgcgccggcttcacgctggaagaaatccacgaaatctgcgccatcgacccttggttcctggcgcaaatcgaagacttgatgaaggaagaaaaagcggtttcagacggcattttgagtgatttggatttcgccgccctacgccgtctgaaacgcaaaggcttctccgacaaacgtttggcacaattgttgaacgtaagcgaaaaagaagtgcgcgaacaccgctacgcgctgaagctgcatccggtttacaaacgcgttgacacctgcgccgccgagttcgccaccgaaaccgcctatctttactccacttacgaagaagaatgcgaatcccgtccttccgaccgtaaaaaagtgatgattctcggcggcggcccgaaccgcatcggtcagggcatcgagtttgactactgctgcgttcacgccgcactcgccctgcgcgaatcgggctttgaaacgattatggtgaactgcaacccagaaaccgtgtccaccgacttcgacaccagcgaccgcctctatttcgagccgctgacattggaagacgtgttggaaatcgtccgcaccgaaaacccgtggggcgtgattgtgcattacggcggtcaaaccccgctcaaactcgccaacgcgctggttgaaaacggcgtaaacatcatcggcacatccgccgacagcatcgacgccgccgaagaccgcgaacgcttccaaaaagtgttgaacgacttaggtctgcgccaaccgcccaaccgcatcgcccacaacgaagaagaagcactcgtcaaagccgaagaaatcggctatccgctggtcgtgcgcccgtcttatgttttgggcggccgcgccatgcagattgtccactctgccgaagccttgcaaaaatacatgcgcgaagccgtgcaggtttccgaagacagccccgtgttgctcgatttcttcctcaacaacgcgattgaagtcgatgtggactgcgtttcagacggcaaagacgtggttatcggcggcattatgcagcacgtcgaacaggcgggcatccactccggcgactccggctgctcgctgccgccctactccttaagcgaagaaatccaagacgaaatccgccgccaaaccaaagcgatggcgtacgcgctgggcgtggtcggtctgatgaacgtgcagtttgccgtgcaggacggcgtggtgttcgtgttggaagtgaacccgcgcgccagccgtaccgtgcccttcgtctccaaagccaccggcgtgccgctcgccaaagtcggcgcacgctgcatggcaggtatttccctgaaagaacaaggcgtggaaaaagaagttgtccccgatttctatgccgttaaagaagccgtgttcccattcatcaaattcccgggcgtagacacgattttgggaccggaaatgcgctccaccggcgaagtgatgggcgtgggcgcaagcttcggcgaagcctactacaaagcccaactcggtgcgggcgaacgcctcaacccgaccggcaaaatcttcctctccgtgcgcgaagaagacaaagaacgcgttatcaaaaccgctaaaaacttccaggttttaggctacggcatctgcgccacacgcggcacggcgcaatacctgaccgaacagggactgattgtacaaaccatcaataaagtccccgaaggccgcccgcacatcggcgacgcactgaaaaacggtgaaatcgcactggtcgtgaataccgtttccagcgatccgcaatccgtgtccgacagccacatcatccgccaaagcgcattgcagcaacgtgtgccgcaatacaccaccactgccggcggcgaagcgatgagcgaaggtgcgaaaagccgagaccatctgggcgtgtacagcgttcaagagttgcacgggcgtttgaaaaaccgcaactga

SEQ ID NO: 47593 - DNA, 1368 bp, Neisseria meningitidis; identical to SEQ ID NO: 44374

SEQ ID NO: 47594 - DNA, 1470 bp, Neisseria meningitidis
ttgataatggttattttttatttttgtgggaagacatttatgcctgcacgaaacagatggatgctgctgcctttattggcaagcgcggcatatgccgaagaaacaccgcgcgaaccggatttgagaagccgtcccgagttcaggcttcatgaagcggaggtcaaaccaatcgacagggagaaggtaccggggcaggtgcgggaaaaaggaaaagttttgcagattgacggagaaaccctgctgaaaaatcccgaattgttgtcccgcgcgatgtattccgcagtggtctcaaacaatattgccggtatccgcgttattttgccgatttacctacaacaggcgcagcaggataagatgttggcactttatgcacaagggattttggcgcaggcagacggtagggtgaaggaggcgatttcccattaccgggaattgattgccgcccaacccgacgcgcccgccgtccgtatgcgtttggcggcggcattgtttgaaaacaggcagaacgaggcggcggcagaccagttcgaccgcctgaaggcggaaaacctgccgccgcagctgatggagcaggtcgagctgtaccgcaaggcattgcgcgaacgcgatgcgtggaaggtaaatggcggcttcagcgtcacccgcgaacacaatatcaaccaagccccgaaacggcagcagtacggcaaatggactttcccgaaacaggtggacggcacggcggtcaattaccggctcggcgcggagaaaaaatggtcgctgaaaaacggctggtacacgacggcgggcggcgacgtgtccggcagggtttatccggggaataagaaattcaacgatatgacggcaggcgtttccggcggcatcggttttgccgaccggcgcaaagatgccgggctggcagtgttccacgaacgccgcacctacggcaacgacgcttattcttacaccaacggcgcacgcctttatttcaaccgttggcaaaccccgaaatggcaaacgttgtcttcggcggagtgggggcgtttgaagaatacgcgccgggcgcgttccgacaatacccatttgcaaatttccaattcgctggtgttttaccggaatgcgcgccaatattggatgggcggtttggatttttaccgcgagcgcaaccccgccgaccggggcgacaatttcaaccgttacggcctgcgctttgcctgggggcaggaatggggcggcagcggcctgtcttcgctgttgcgcctcggcgcggcgaaacggcattatgaaaaacccggctttttcagcggttttaaaggggaaaggcgcagggataaagaattgaacacatccttgagcctttggcaccgggcattgcatttcaaaggcatcacgccgcgcctgacgttgtcgcaccgcgaaacgcggagtaacgatgtgttcaacgaatacgagaaaaatcgggcgtttgtcgagtttaataaaacgttctga

SEQ ID NO: 47595 - DNA, 342 bp, Neisseria meningitidis; identical to SEQ ID NO: 45956

SEQ ID NO: 47596 - DNA, 447 bp, Neisseria meningitidis; identical to SEQ ID NO: 45533

SEQ ID NO: 47597 - DNA, 219 bp, Neisseria meningitidis; identical to SEQ ID NO: 36380

SEQ ID NO: 47598 - DNA, 630 bp, Neisseria meningitidis
gacggcgaggcgcaactgatggccgcccccgccggtgtggccaccgaatgccgccttaccgtacaaggcggcaccgaccgagaaagcgatgcctcactgctggcgcgtctgttgaaaatcatccgccgaccgcccgcaggcggcaaccgttacgactataaaaactgggcgttgagtgttgacggcgtaaccagcgcatatgtttatccgctgcgccgcggcttgggtacggtggatattgccattacctccgccgacggtgtgccatcggaagaaactgtgcgccgcgtacaggcttatatcgacgagatgcgcccggtaacggcaaaaaatgcgctggtactcaagccaaccgtaacggcggtgcctgttaccgtgcaagtcaagctcgacggcatcgacttggacgaggccaagcgccgcatacggacggccctaaaagaatatttcgacaccctgatccccggcgacggcctgactgtgtcgcaaatcgaggcggctatcagcaatgtggatggtgtgatcgaccgccgtctgactgcgccgacggccaaccgtgccgccgatacggttaaccgcatcgagtggtttaaagcgggcgcgattaatgtaacggagatgccgtcatga

SEQ ID NO: 47599 - DNA, 771 bp, Neisseria meningitidis; identical to SEQ ID NO: 44165

SEQ ID NO: 47600 - DNA, 489 bp, Neisseria meningitidis; identical to SEQ ID NO: 39373

SEQ ID NO: 47601 - DNA, 195 bp, Neisseria meningitidis; identical to SEQ ID NO: 39661

SEQ ID NO: 47602 - DNA, 1305 bp, Neisseria meningitidis
ttgccgcgtcgggaggacggcattatgaaatccctttttattcggctgctcctgttgggttcggcggcaggcgttttctatcatacccaaaaccaatccctgcccgcgggcgaacttgtctatccgtccgcaccgcaaatcagggacggcggcgatgcgctgcactacctcaaccgcatccgcgcccaaatcggtttgcacaagctggcacacgcgccggttttggaaaattccgcccgcaggcacgcacgctatctcacgctcaatcccgaagacggacacggcgaacaccatcccgacaatccgcactacaccgcacaaaagctgaccgaacgcacacgccttgccgggtatctctacaacggcgtgcatgaaaacatcagcacggaagaggaagccgccgaatcgtccgacagcgacatccgcacgcagcaacgccaagtggacggattaatgagcgcaatctaccaccgcctttccctacttgaccgccatacggatgaggcaggagcggcatttgtgcgcgaaaacggtaaaaccgttctcgtattcaatcagggcaacagcaggtttgagcggcattgcgcccaaggcagaaatcagccggaagcaggacggaaatattaccgcaacgcctgccataacggtgcggtcgtgtacaccgacgaagccatgcccgcacaggagctgctctatacagcctatcccgtcggcagcggcgcactgccttatttccacggcgagcgtccagaccccgtgccggaatatgaaatcacgggcaatcctgccagcattgatttttccgaggcggcaggcaaaattacgatgaaaagtttcaagctgtatcagggtaaaaacgaaatccgccccgtcagggttttaaccgccggcaacgaccccaacggcaggctgaccgcgtaccaattcgcgctttttccgctcaagcctttggaatacggcacgctttatacggcggtattcgactatgtccgcaacggacggcgcgcgcaggcgaaatggcagtttagaacccgaaaacccgattacccttattttgaggtaaacggcggcgagacacttgcggttagaaaaggcgaaaaatatttcatccactggcgcggacgctggtgtttggaagcgtgtacccgttatacctaccggcagcgacccggcagccgcctgtccataggaaggcacgaggcgggcggcatcgtcttcagcgttgacggaatggcgggcagccgcatcacgcttgcaccggaaggagaaacggaacgaggcgtaaccctttatttacaggattga

SEQ ID NO: 47603 - DNA, 915 bp, Neisseria meningitidis; identical to SEQ ID NO: 44569

SEQ ID NO: 47604 - DNA, 1758 bp, Neisseria meningitidis
ttgatagttatgattcattataaaataaccccgtcccctctcgaccacgagtggcacatcctgctgacattcacacaagatgatgatcttcctatagaaataagcctgccgaattgggtaccgggcagctatctgattcgggatttttcccgccacatcacttctatccatgcatcctgtaacggcacgtccatgccgctcgaacaaattgcaaaaaaccgctggcacgctgccgccgtacgcggcgagtggcaaatccgctacaccgtatatgcattcgatttgtcggttcgaggttctttcctgacgacagaacgcggtttttttgacggatcgtgcctgtttttgaaagtcgaaggaacggaaacgctgccgcaccgcttggaattgacgggtattccgtccgaatggcgtattgccacaacgctgccggaaacagggagatttgtctttcaggcggcatcttatgccgaattgattgaccgacctgtcgagatgggcttgattgaatttttagattttgaggcggcaggcattccgcacacaattgccttaagcggcatatatcccgatttcgaccgcaacaggctggtttcggatatcaaaaaaatctgcgaaacagaactggcggtgttttcctcccctgccccgtttcaaaaatatttgttcctgctccacgtcggcgaccatatttacggcggtttggaacacaccgacagcaccgccctgctcgccgaccgccacagccttccgccgtacggtatgaccgatgccgacgatacctacaccacattgctcggacttttctcccacgaatattttcacgcgtggaacgtcaaatccatcaaacctgccgcgttcgtcccttatgacctcgacaaagaaaactataccgaacaactatgggcattcgaaggtattacatcctattacgacgatttgtttttggcacgcagccgcaccatctcgcccgaatcttatttaaacctgctggcacaaggcattacgcgcgtacaacaaacccgcggccgtttgaggcagaccttggcggaatcgagttttaccgcgtggaacaaattttacaaaccggatgaaaacagccccaacgccatcgtcagctactaccagaaaggcgcgcttgccgcattgtgccttgatctgataatacgcaaccgaagcaacggcagacattctctcgatacgttaatggacaaactctatcgggagtggagggacacacactcgggtattccggaaaaacactggcaaatccgctgtcaggaaattaccggcttggatttggaagattttttccaaaaagcgttatacagtaccgaagatttgccgcttgccgaatgcctggcaaccgcaggcgtgggactgaccttcctgccacttccccgacaacacggcggcggatacgcagaacacatctgccccgtcccgccggcaggcgattttggcgcacgtttcaaacaaaacaccgaccacatcgtcctgacccatgtcttcaacagcggcagcgcggaatctgcggcactgtgcccgcaagacaaaatcattgctttagacggttatgcctgcaccgactttaccgcacaatgggcccgataccacgtcaatgcaaaaatcaatatccacttcttccgtgccggcatattgcgtcaaaccgtcttgacggttcaggcagcggcagcggatactgccatcctacatatcacagaccggaacctgttggacaactggttgttcggttaa

SEQ ID NO: 47605 - DNA, 312 bp, Neisseria meningitidis; identical to SEQ ID NO: 39211

SEQ ID NO: 47606 - DNA, 483 bp, Neisseria meningitidis; identical to SEQ ID NO: 36693

SEQ ID NO: 47607 - DNA, 2829 bp, Neisseria meningitidis; identical to SEQ ID NO: 45633

SEQ ID NO: 47608 - DNA, 114 bp, Neisseria meningitidis; identical to SEQ ID NO: 37148

SEQ ID NO: 47609 - DNA, 207 bp, Neisseria meningitidis; identical to SEQ ID NO: 39219

SEQ ID NO: 47610 - DNA, 1269 bp, Neisseria meningitidis; identical to SEQ ID NO: 44605

SEQ ID NO: 47611 - DNA, 1173 bp, Neisseria meningitidis
atgaaacgtgatttgagcaaaatgacctgcatcgaagacttgcgccgcgttgccaagcgcaaaatgccgcgtatgttttacgattacatcgattcgggttcgtggacggaaacgacttatcgggaaaatacttcggatttcaaagacatccgcttccgtcaaaaagtattggtcaatatggagggacgcagccttgagactaaaatgatcgggcaggatgtgaaaatgccggtggcgattgcgccgacgggttttaccggcatggcacacgcagacggcgaaattttggcggcgcgggcggcggagaagttcggtattccgtttacgttgtccaccatgtccatctgctcgattgaagacgttgccgagaacaccagcgcgccgttttggtttcagctttatgtgatgcgcgaccgcgagtttatggaaaacctgattaagcgcgcgaaggatgccaaatgttcggcattggtattgaccgccgatttgcaggttttgggtcaacgccacaaagacatcaaaaacggcctgtccgcgccgccgaaaccgaccatcgccaatttaatcaatctggcgaccaaaccggaatggtgcatgaaaatgctgaacacggaacgccgcacgttccgcaatatcgtcggacacgcgaagaacgtcggcgatttgtcttcgctgtcttcatggacttccgaacaattcgacccgcgcctgagctgggacgatgtggcgcgcattaaagatttgtggggcggcaagctgattatcaaaggcattatggaacccgaagacgcggaaaaagcagcgaaaagcggcgcggacgcattgattgtttccaaccacggcggccgacagctcgacgataccgtgtctgccatcaaagccttgcccgacatcgtcagcgcagtgggcagcgacatcgaagtttggatggacagcggcatccgcagcggtcaggatattttgaaggcgtgggctttgggcgcgaaaggtacaatgataggtcgggcgttcctgtatggcttgggcgcgtatggcgaagaaggcgtaacccgtgcgctggaaattctatataaagaaatggatatatctatggcgtttacgggacaccgcgatattcaagatgtcgatgcctcgattttaaggggtaaagattggggtagggaaacggtttag

SEQ ID NO: 47612 - DNA, 1662 bp, Neisseria meningitidis
atgacagaatccatcacccgcgacagtatgcaatacgatgtcgtgattgtcggcgcaggcccatcgggtttgtccgccgccatcaaactcaagcagcttgccgaacaaaatgggcgcgaaatcagcgtttgcgtggtggagaaaggttcggaggcgggtgcacattcgctggcgggcgcggttatcgatccgattgcgctgaatgagttgattcccgactggaaagaaaaaggcgcgccgctgacgcgtacggtaacgcaggacaaagtgttgttcctgactgagaaaaaagcgttcaatctgcctattaccccaaatttcgacaatcacggcaactacatcgtcagcttgggcgaagtcgtgcgctggttggcggagcaggcggaaaatttgggcgtggaaatttatccgggctttgccgctgccgaagtgctgtatcacaaagacggttcggtcaaaggcattgcaaccggcaatatgggcgtgggcaaaaacggcgagccgaccgattcattccagcccggcatggagctttgggcacggcaaaccctgtttgccgagggctgccgaggttcgctttccaaacaaatcatcgaacgcttcaaactcgaccaaaacagccagccgcaaacttacggcttgggcattaaagaagtttgggaagtgccgtccgaacagcatcagcccggtttggtggtgcacagcgcaggctggccgctggacagcaaaacctacggcggcgcgtttgtttaccatttcgacgacaacaaagttgccgtcggcttcgtggtcggtttggactatcaaaatccttatctgtcgccgtttgaagagttccaacgtttcaaaacccatcccgaaatccgcaaaacctttgaaggcggccgccgcattgcttacggtgcgcgttcgctgattgaaggcggttttcaaagtttgccgaagctctcgttcaaaggcggcgttttggtcggcgatgcggcgggtttcctcaatatgccgcgcatcaaaggcattcataccgcgatgaaatccgccatgctcgccgccgaagccgtgttccccttgttggaaaaccttgaagaagtggaaaacttcgacagcggcaaagaggcggcggattatcagcaacgttttgaacaaagctggctgtatcaagagctttacgccgcgcgcaatgtccgtccgtcattcaaatggggcgtttacctcggctcaatctacaccggcatcgatcagatgattttcagaggcaaagccccgtggaccttgaaacatcacggcaaagacaacgagcagcttaaaaaagccgccgcgtgcaagccgattgattatccgaaacccgacggcgtattgaccttcgaccgcttgagcagcgtcttccttgccaatctcgcgcacgaagaaaaccagcccgaccatttggtgctgaacaatccgcaaacgatgatagacgtgaactacaaagaatacgcctcacccgaaacgcgctattgtccggtcggcgtgtatgaaatcgtcgaagaaaacggcagcccgcgcctgcaaatcaacgcggcaaactgcgtgcactgcaaaacctgcgacatcaaagacccgacgcaaaacatcacttggatttgccccgaaagcgcgagcgggccgaattacggcgggatgtaa

SEQ ID NO: 47613 - DNA, 843 bp, Neisseria meningitidis; identical to SEQ ID NO: 45847

SEQ ID NO: 47614 - DNA, 237 bp, Neisseria meningitidis; identical to SEQ ID NO: 45833

SEQ ID NO: 47615 - DNA, 612 bp, Neisseria meningitidis; identical to SEQ ID NO: 45466

SEQ ID NO: 47616 - DNA, 729 bp, Neisseria meningitidis; identical to SEQ ID NO: 44541

SEQ ID NO: 47617 - DNA, 1035 bp, Neisseria meningitidis; identical to SEQ ID NO: 45939

SEQ ID NO: 47618 - DNA, 447 bp, Neisseria meningitidis; identical to SEQ ID NO: 38678

SEQ ID NO: 47619 - DNA, 678 bp, Neisseria meningitidis
ttggtcaaaacggcagacggctacaaagccattgcccgtatccgaaccggcgaccgcgtcttcgccaaggacgaggcaagcggaaaaacgggatacaaacccgttaccgcccgatacggcaatccgtatcaagaaaccgtttacattgaaatttcagacggcatcggcaacaaccaaaccctgatttccaataaaatccacccgttttacagtcaaggaaaatggatacaggcaggtcgtctgaaaaaaggcgacaccctgctttccgaaagcggcgcaaaacagacggttcaaaacattaccttcaaacagcagccgctcaaagcctacaatctgaccgtcgccgattggcatacctacttcgtcaagggcagtcaggcggaaacggaaggggtttgggttcataatgcgtgtccgccaagaaaaacaccatctacccccgtatatgggaatgattcagaagcatatgcagcagcaaagaaattgggatatagaaaaataaaagaaagaacgagaaatgatgctgctatttttaaaaaaggaaagagttatatatcacgcgatgtagattcacataatggaggggcttggaaagaagcatcttcacccaaaaatctgaacagaaaagaaacaagaaacggtacatttgataaaaacctaaatcgtattggagattaa

SEQ ID NO: 47620 - DNA, 2607 bp, Neisseria meningitidis
atggctgccaaccaacgttaccgcaaaccgctgcccggtacggatttggaatactacgacgcgcgtgcggcgtgtgaggacatcaagcccggctcttacgacaagctgccttatacaagccgtatcttggctgagaacttggtcaaccgcgcggacaaagtcgatttgccgacgctgcaaagctggctgggccagttgatagaagggaagcaggaaatcgactttccgtggtatcccgcgcgggtggtgtgccacgatattctggggcagaccgcgctggtggatttggcgggcttgcgcgatgcgattgccgaaaaaggcggcgatcctgccaaagtgaatccggtggtgcaaacccagcttatcgtcgaccactctctggcggtggagtgcggcggttacgatcctgatgccttccgcaaaaaccgcgaaatcgaagatcgacgcaacgaagaccgtttccacttcatcaactggacaaaaaccgcgtttgaaaatgtggacgtgattccggcgggcaacggcatcatgcaccaaatcaatctagaaaaaatgtcgccggttgttcaagttaaaaacggcgtggctttccccgatacctgcgtcggcacggattcgcacacgccgcacgtcgatgcgctgggcgtgatttccgtgggcgtgggcggattggaagcggaaaccgtaatgctgggacgcgcgtccatgatgcgcctgcccgatattgtcggcgttgagctgaacggcaaacggaaggcgggcattacggcgacggatattgtgttggcactgaccgagtttctgcgcaaagaacgcgtggtcggggcgtttgtcgaattcttcggcgagggcgcgagaagcctgtctatcggcgaccgcgcgaccatttccaacatgacgccggagttcggcgcgactgccgcgatgttcgctattgatgagcaaaccattgattatttgaaactgaccggacgcgacgacgcgcaggtgaaattggtggaaacctacgccaaaaccgcaggcttgtgggcagatgccttgaaaaccgccgtttatcctcgcgttttgaaatttgatttgagcagcgtaacgcgcaatatggcaggtccaagtaacccgcatgcccgttttgccaccgtcgatttggcggcgaaagggctggcgaagccttacgaagagccttcagacggacaaatgcccgacggcgcggtcatcatcgccgcgattaccagttgcaccaacacttccaacccgcgcaacgtcgttgccgccgcgctcttggcgcgcaacgccaaccgcttcgggctgaaacgcaaaccgtgggtcaaaacctcgtttgcccccggttcgaaagtggcggaaatttatttgaaagaagcaggcctgctgcccgaaatggaaaaactcggcttcggtatcgtcgccttcgcctgcaccacctgcaacggcatgagtggcgcgctggatccgaaaatccagaaagaaatcatcgaccgcgatttgtacgccaccgccgtattatcaggcaaccgcaacttcgacggccgtgtccatccgtatgcgaaacaggctttcctcgcttcgcctccgttggtcgttgcctacgcgctggcaggcagtatccgtttcgatattgaaaacgacgtactcggcgttgcagacggcaaggaaatccgcctgaaagacatttggcctgccgatgaagaaatcgatgccgtcgttgccgaatatgtgaaaccgcagcagttccgcgatgtgtatgtaccgatgttcgacaccggcacagcgcaaaaagcacctagtccgctgtacgattggcgtccaatgtccacctatatccgccgcccaccttactgggaaggcgcattggcaggggagcgcacattgagcggtatgcgtccgctggcgattttgcccgacaacatcaccaccgaccacctctcgccatccaatgcgattttggcaagcagtgccgcaggcgaatatttggcgaaaatgggtttgcctgaagaagacttcaactcttacgcaacccaccgcggcgaccacttgaccgcccaacgcgcaacctttgccaatccgaaactgtttaacgaaatggtgagaaacgaagatggcagtgtacgccaaggttcgctggcacgcgttgaacccgaaggccaaaccatgcgcatgtgggaagccatcgaaacctatatgaaccgcaaacagccgctcatcatcattgccggtgcggactacggtcaaggctcaagccgcgactgggctgcaaaaggcgtacgcctcgccggtgtggaagcgattgttgccgaaggcttcgagcgtatccaccgtaccaacttgatcggtatgggcgtattgccgctgcagttcaaaccgggtaccaaccgccacaccttgcaactggacggtacggaaacctacgacgtggtcggtgaacgcaaaccgcgctgcgatctgaccctcgtgattcaccgtaaaaacggcgaaaccgtcgaagttcccgttacctgccgcctcgatactgcagaagaagtattggtatatgaagccggcggcgtgttgcaacggtttgcacaggattttttggaagggaacgcggcttag

SEQ ID NO: 47621 - DNA, 633 bp, Neisseria meningitidis
atgccgatgtatgctgatgccggagacgtatattgcgtctataacatcagactgaagcagtacactgcctgccaggttacccgagttgaagaacacggtggcaaaaaaacacatgcgaccctgctggctttggactggcagggcaacaaaccgcttggggcggaggagctggcggatttgaaaccactttacaaagacttaaagaatatgtattgggaacgcggtctgcacatgtataaggcaagtgctgtcgtgccaacgggatatgtacgggttgggaataccgcgccgctggtcggcgaagacacgcaacggtatgcctctttttggggcgacggctacgacgtgtaccgtcagttgagatggcagcagatacccgaaaaacagagaaaggcattcaaaaaagccgccaaaagcaaaaagaccgtgatgtttgccggacgggaatacggcatatccaaacagaatttgagcgatgtttgggatgattttgaagacgcgatggaactgaaggcgtttccctgcctgtcttcgctgtttctgaccaagtggcataaaaatctatatgatagtggattaacaaaaaccagtacggcgttgcctcgccttagctcaaagagaacgattctctaa

SEQ ID NO: 47622 - DNA, 2397 bp, Neisseria meningitidis; identical to SEQ ID NO: 39059

SEQ ID NO: 47623 - DNA, 561 bp, Neisseria meningitidis; identical to SEQ ID NO: 36282

SEQ ID NO: 47624 - DNA, 564 bp, Neisseria meningitidis; identical to SEQ ID NO: 38634

SEQ ID NO: 47625 - DNA, 1713 bp, Neisseria meningitidis
ttggcggtgtaccgaaaagagttatatatgtctatggaaaattttgctcagctgttggaagaaagctttaccctgcaagaaatgaacccgggtgaggtgattaccgctgaagtagtggcaatcgaccaaaacttcgttaccgtaaacgcaggtctgaaatcagaatccctgattgatgtagctgaattcaaaaacgctcaaggcgaaattgaagttaaagtcggcgacttcgttaccgttaccatcgaatccgtcgaaaacggcttcggcgaaaccaaactgtcccgcgaaaaagccaaacgtgcagccgattggattgccctggaagaagccatggaaaacggcgacatcctgtccggcatcatcaacggaaaagtcaaaggcggcctgaccgttatgattagcagcatccgcgcattcctgccgggttctttggtcgacgtacgtcctgtaaaagacacttctcacttcgaaggcaaagagatcgaattcaaagtgatcaaactggacaaaaaacgcaacaacgtcgttgtttcccgccgcgccgttctggaagccactttgggtgaagaacgcaaagccctgctggaaaacctgcaagaaggctccgtcatcaaaggcatcgttaaaaacattaccgattacggtgcattcgttgacttgggcggcatcgacggtctgttgcacatcaccgatttggcatggcggcgcgtgaaacacccgagtgaagtcttggaagtcggtcaggaagttgaagccaaagtattgaaattcgaccaagaaaaacaacgcgtttccttgggtatgaaacaactgggcgaagatccttggagcggtctgacccgccgttatcctcaaggcacccgcctgttcggcaaagtatccaacctgaccgactacggcgcattcgtcgaaatcgaacaaggcatcgaaggtttggtacacgtctccgaaatggactggaccaacaaaaacgtacacccgagcaaagtcgtacaactgggcgacgaagtcgaagtcatgattttggaaatcgacgaaggccgccgccgtatctctttgggtatgaaacaatgccaagccaatccttgggaagaatttgccgccaaccacaacaaaggcgacaaaatctccggcgcggttaaatccattaccgatttcggcgtattcgtcggcctgcccggcggcatcgacggtttggttcacctgtccgacctgtcctggaccgaatccggcgaagaagccgtacgcaaatacaaaaaaggcgaagaagtcgaagccgtcgtattggcaatcgacgtggaaaaagaacgcatctccttgggtatcaaacaactggaaggcgatccgttcggcaacttcatcagcgtgaacgacaaaggttctttggttaaaggttccgtgaaatctgttgacgccaaaggtgctgttatcgccctgtctgacgaagtagaaggctacctgcctgcttccgaatttgcagccgaccgcgttgaagatttgaccaccaaactgaaagaaggcgacgaagttgaagccgtcatcgttaccgttgaccgcaaaaaccgcagcatcaaactttccgttaaagccaaagatgccaaagaaagccgcgaagcactgaactccgtcaatgccaccgccaatgcgaatgccggcaccaccagcttgggcgacctgctgaaagccaaactctccggcgaacaagaataa

SEQ ID NO: 47626 - DNA, 561 bp, Neisseria meningitidis
gtgggaatccaggacgaaaaatctccagaaaccgttttacccgataagtttccgcaccgacaggtctggattcccgcctgcgcgggaatgacgatgcaggtatttctgacgattcccggctatgatgttgaggcagaaatcgaaaaattcgtttggatggatgctgtgatttggcagatgccgagctggtggatgcacgagccttggacagtgaaaaaatacatagacgaagtattaaccgctggacacggcaaactctaccaaagcgacggcagacacagcgtcaatccgactgagggctacggcacaggcggcttgttgcaaggcaaaaaacatatgctttcactgacttggaatgcgccgattgaggcgtttacccgcgaaggcgatttctttgagggcaaaggcgttgatgttttgtatatgcacttccacaaagccaacgagtttttgggtatgacccgcctgccgacattcttatgtaacgatgtggttaaaaatccgcaagtggaaaaatacttggcagattatcaggcacacttggaaaaagtgttcggctaa

SEQ ID NO: 47627 - DNA, 822 bp, Neisseria meningitidis
atgatgaaaggtatggataaattgagataccaacaggattttttaaatatccgccccatttttacagccggcgaacaagaatacctgaccggattgtccgatcggcttcctttatctgttttaacgggctccgtgcgtaatattgaagaaatcggtatcgattttgtatatagttctgccaaattggaaggaaacacttataatcaatacgatacgcaggcattgcttaaactcgggcaaaccgcaggcgggaagttatattcggatgccgtaatgttaatcaacctgagggaaagttaccggcacctgctgtccggtttggacagccccgagccgtttgactggttggatttcttaaaaaccacccacagcctgatttccgaaaacttactggaaaaaggctccggcggcgtagtccgccgcgacagcgttaccataagcgggacagactacacccctttatctaacccgcaaagtttggatacggaattaaaatggttgcttcaagaagctcccaaaatagaaaatcctttcgaccgcgccgtttatctccataataatttggcgtatcttcaatattttaaagattgcaataaacgtactgccagaaactgcatgaccttgtcgctgatgcgctccggtttttttccttgcgtattctcccccgacagttatcccgcctatgccgaggctgtcgtagcctattacgaaaccggcgattacggtttattcaagaaatattttatttcggcatacgaaaataccgtaaataagtacggtccccagcctgatatggatatttcccgcaacttctccctttaa

SEQ ID NO: 47628 - DNA, 156 bp, Neisseria meningitidis; identical to SEQ ID NO: 37714

SEQ ID NO: 47629 - DNA, 456 bp, Neisseria meningitidis
atgcttgcaaaacccactgttttgcaggcattttcctattttggcgtacaacacggaaccattatgcccacttccaccaaaccctacatcctccgcgccctctgcgaatggtgcagcgacaacagcctcacaccgcacatccttgtctgggtcaacgaacacacgcgcgttcctatgcagtatgtccgcgacaacgaaattatgctcaacatcggcgcgaccgccacgcaaaaccttcaaatcgacaacgattggatcagtttttccgcccgcttcggcggacaggcgcacgatatatggatacctgtcggacacgtcctcagccttttcgcacgggagaccggagaaggtatggggtttgaattggaagcgtatcgccccgacacgccgcctgaaaacacctctgccgaaaccgcgccccggcccgccaaaaaaggcttgaaattggtcaaataa

SEQ ID NO: 47630 - DNA, 1215 bp, Neisseria meningitidis; identical to SEQ ID NO: 45657

SEQ ID NO: 47631 - DNA, 4707 bp, Neisseria meningitidis; identical to SEQ ID NO: 45682

SEQ ID NO: 47632 - DNA, 1563 bp, Neisseria meningitidis; identical to SEQ ID NO: 39009

SEQ ID NO: 47633 - DNA, 666 bp, Neisseria meningitidis
gtggacaatatgatgaagttcaaatatgtttttctgttggcgtgtgttgtcgtttctttatcttatcgtttgaatgctgcaccgatgtttaacgataatcctgttgtttacggaaaaatcaaagtgcagagttggaaagaaaggcgggatttcaatattgtaaagcaggatttggatttttcctgtggggcggcttcggtggcgacgcttttgaacaatttttacgggcaaacgctgacggaagaagaagtgttgaaaaagctggataaggagcagatgcgcgcgtcgtttgaggatatgcggcgcattatgccagatttgggttttgaagcgaaaggctatgccctgtctttcgagcagctcgcacagttgaaaatccccgtcatcgtgtatctgaaataccgcaaagacgaccatttttcggtattgcgcgggatagacggcaatacggttttgcttgccgacccgtcgctgggtcatgtttcaatgagcagggcgcagtttttggatgcttggcaaacccgtgagggaaatttggcaggtaagattttggcggtcgtgccgaaaaaagccgagacaatttcaaataaattgtttttcacacatcatcccaagcggcagacagagtttgcagtcggacaaatcaggcaagcacgtgcagagtaa

SEQ ID NO: 47634 - DNA, 864 bp, Neisseria meningitidis
atgagaatcctattgacaggctcgaaaagccaactggcacgctgcctgcgcgaccgtcttccggaagactgggaaaccattgcgacggattccgcatccctagacattaccgatgccgatgccgtctgcaacatggtcaaaagtttccaacccgacgctattgtcaacacggctgcctatactgccgtcgacaaagcggaaggcaatgcggcagcggcatttgccgtcaatgcttccgccgtttacaaccttgccttggcagcacatcgcgcccatgcccgattcatccacatctcaaccgactatatctttgacggtaaagggaaaaggccctatcaggaaagcgactttaccaatccttccaatgtatacggacaatccaaaaccgcaggcgagctgctcgcactgtctgccaatcccgacagccttatcctgcggacttcttggctgtttagcgaatacggggacaactttgtccgcacgatgctgaaccttgcgcgggaacgttccccgctgtccgccgtccacaaccaaatcggctgcccgacctatgccggcgatttagctgccgccatcatccgccttttgcagcaaacgtcgcccgtgcgcggcatttaccactacgccggcggcaaatccgtatcctggtacgaatttgcccaacatattttccaagcggcatcgcaacagcagacatccttccccgttcccgaattgactgccgtttcagacaaggaatatccgaccgccgcccccaggcccgcatacagcattttggactgccgcaaaatcgaaaacgacttcagcatcaaaccgtcagactggcaaaaagcccttgcacaggtcgtttccaagctgctctga

SEQ ID NO: 47635 - DNA, 774 bp, Neisseria meningitidis
atgagtgcgaacatccttgccatcgccaatcagaagggcggtgtgggcaaaacgacgacgacggtaaatttggcggcttcgctggcatcgcgcggcaaacgcgtgctggtggtcgatttggatccgcagggcaatgcgacgacgggcagcggtatcgacaaggcgggtttgcagtccggcgtttatcaggtcttattgggcgatgcggacgtgaaatcggcggcggtacgcggcaaagagggcggatacgctgtgttgggtgcgaaccgcgcacttgccggcgcggaaatcgaactggtgcaggaaatcgcccgggaagtgcgtttgaaaaacgcactcaaggcagtggcggaagattacgactttatcctgatcgactgtccgccttcgctgacgctgttgacgcttaacggcttggtggcggcgggcggcgtgattgtgccgatgttgtgcgaatattacgcgcttgaggggatttccgatttgattgcgaccgtgcgtaaaatccgtcaggcggtcaatcccgatttggacatcacgggcatcgtgcgcacgatgtacgacagccgcagcaggctggttgccgaagtcagcgaacagttgcgcagccatttcggggatttgctgtttgaaaccgtcatcccgcgcaatatccgccttgcggaagcaccgagccacggtatgccggtgatggcttacgacgcgcaggcaaagggtaccaaggcgtatcttgccttggcggacgagctgatggcgagggtgtcggggaaatag

SEQ ID NO: 47636 - DNA, 768 bp, Neisseria meningitidis; identical to SEQ ID NO: 44841

SEQ ID NO: 47637 - DNA, 1257 bp, Neisseria meningitidis; identical to SEQ ID NO: 38146

SEQ ID NO: 47638 - DNA, 2214 bp, Neisseria meningitidis; identical to SEQ ID NO: 44862

SEQ ID NO: 47639 - DNA, 396 bp, Neisseria meningitidis; identical to SEQ ID NO: 39569

SEQ ID NO: 47640 - DNA, 1722 bp, Neisseria meningitidis; identical to SEQ ID NO: 39869

SEQ ID NO: 47641 - DNA, 420 bp, Neisseria meningitidis; identical to SEQ ID NO: 44898

SEQ ID NO: 47642 - DNA, 429 bp, Neisseria meningitidis
agagccgtccaacatgctttcggtgcagcttgttatgataacgggattggttggaggcttgcccgatttgcttgtccgcagaccaacggtaaggcggagcgggttatccgtaccttgatggagatgtggcatgaggaacagtcgtttgacagtccggaacatcggcaaaaggagttgtgctgctttattaatttaggggctgccctagatcacttggatgcgggcgaatttagccatttccgtatcaatcacagcacacattttgccgaacgacaaaaccatattaatggaactgagaacttttggaatcaagcaaaatgtcatttacgcaagtttaacggcattcccaaagcgcattttgagctgtatttaaaggagtgcgaatggcgttttaacaacagtgaaataaaagttcttgttccattttaa

SEQ ID NO: 47643 - DNA, 519 bp, Neisseria meningitidis; identical to SEQ ID NO: 44928

SEQ ID NO: 47644 - DNA, 1071 bp, Neisseria meningitidis; identical to SEQ ID NO: 44790

SEQ ID NO: 47645 - DNA, 2169 bp, Neisseria meningitidis
atgggacagtttatgtcagttttccgcatcaatatgaccgccgccacggttttggcagcactttcgtcttcggtttttgccgcacaaacggcggatttggaaaccgtccatattaagggtcagcgttcgtacaacgcgattgccaccgagaaaaacggcgattacagctcgtttgccgccaccgtcggcacaaaaatccccgcttctttgcgcgaaattccgcaatctgtcagcatcatcaccaatcaacaggtcaaagaccgcaatgttgatacgtttgaccagttggcacgcaaaacgcccggcctgcgcgtgttgagcaacgacgacggacgctcttcggtttacgcgcgcggttacgaatacagcgaatacaacatcgacggcctgcccgcgcagatgcagagtatcaacggcacgctgcccaatctgtttgccttcgaccgtgtggaagtgatgcgcgggccgagcggcttgttcgacagcagcggcgagatgggcggcatcgtaaatctggtgtgcaaacgcccggccaaagcgttccaaggtcatgctgcggcagggttcggtacgcacaaacaatataaagccgaggcggacgtatcgggcagcctcaattcagacggcagcgtgcgcggccgcgtgatggcgcagaccgtcggcgcgtctccgcgtcccgccgagaaaaacaaccggcacgaaaccttctacgcggcggcggattgggacatcaaccccgatacggttttgggcgcgggctatctttaccagcaacgccacctcgcgccgtacaacggcttgccagccgatgccaataacaaattaccgtccctgccgcaacacgtatttgtcggcgcggattggaacaaatttaaaatgaacagccacgacgtgtttgccgatttgaaacattacttcggcaacggcggctacggcaaagtcggtatgcgctattccgaccgcgatgccgactccaactatgcctttgccggcagcaagctgggcatgaaaaccctggcaggccgcccgggctgcaatacggctgacgacaaagcctgcgcggtgggtttgggtacagaaatcaaacaaaaagccctcgcgtttgacgccagctacagcaggcctttccgcttgggcaatacggccaacgaatttgtcatcggcgccgattacaaccgcttccgcagcaccaacgaacaaggccgtactactttatatgcacgcggcggcctggctttaaacgagttccgcagcataccgcaggttgatttgattgccaacgcgcgcaaaggcgtgcgcggttacagccataccgtcgctaccgaaaacctcgacgaattcggcatttacggcaaatccaccttccatcctgccgacgggctgtcgcttatcggcggcggacgtttgggacactataaaatcgagttgggcgaaggcaaaaccctgcacaaagccagcaaaaccaagttcaccggctacgcaggcgcggtttacgacttgaacgacaacaacagcctctacctgagcctgtcccagctctacacaccgcaaaccaacctcgatgccgacggcaagctgctcaaaccgcgccaaggcaaccagtttgaagtcggttacaaaggcagctacatggacgaccgcctcaatgcccgagtttcgttctaccgcatgaaagacaaaaacgccgccgcaccgttgaacccgaacaacaaaaaaacccgttacgccgcattgggcaaacgcgtgatggaaggcgttgagaccgaaatcagcggcgcggttacaccgaaatggcaaatccatgcaggttacagctatctgcacagccaaatcaaaaccgcctccaattcacgcgacgacggcatcttcctattgatgcccaaacacagcgcaaacctgtggacgacttaccaagttacgcccgagctgaccatcggcggcggcgtgaacgcgatgagcggcattacttcatctgcagggatgcatgcaggcggttatgccacgttcgatgcgatggcggcataccgcttcacgcccaagctgaagctgcaaatcaacgccgacaacatcttcaaccgccattactacgcccgcgtcggcggcgcgaacacctttaacattcccggttcggagcgcagcctgacggcaaacctgcgttacagtttttaa

SEQ ID NO: 47646 - DNA, 1395 bp, Neisseria meningitidis
atgcagggaaaaccgatggcaaaaacgcttaaaaccctttaccaatgcaccgaatgcggcggcacttccccgaaatggcagggcaaatgcccgcattgcggcgagtggaacacacttcaggaaagcttggccgcgcccgagccgaaaaacgcccgcttccaatcttgggcggcggatacctcgaccgtccaatccctctcctctgttaccgcgaccgaagtgccgcgcaatccgaccggtatgggcgaactcgaccgcgtattgggcggcggtttggtcgatggtgcggtcatcctgctcggcggcgatcccggcatcggcaaatccacgctgctgttgcaaaccattgccaaaatggcgcaaagccgcaaagtgctgtacgtttccggcgaggaatctgcccaacaggtcgccctgcgcgcgcaacgtttggaactgcccacagaaggtgtgaacctgcttgccgaaatccgcatggaggcgattcagacggccttgaaacagcatcagcccgaggtcgtcgtcatcgactccatccaaaccatgtattccgaccaaatcacttccgccccaggctccgtgtcgcaggtgcgcgagtgtgccgcccaactgacgcgcatggcgaaacagatgggcatcgccatgatactggtcggacacgtgaccaaagacggcgcgattgccggcccgcgcgtgctggaacacatggttgataccgtgctgtatttcgagggcgaccaacattccaactaccgcatgatacgcgccatcaaaaaccgcttcggcgcggcaaacgaactgggcgtgttcgcgatgacggaaaacggtttgaaaggtgtgtccaacccgtccgccatcttcctcgccagctaccgcgacgatacgcccggctcgtgcgttttggttacacaggaaggcagccgcccgcttttggtcgaaattcaggcattggtcgatgacgcgcacggcttcacgcccaaacgcctcaccgtcggactggaacaaaaccgtcttgcgatgctgcttgccgtgttaaaccgccacggcggcatcgcctgtttcgatcaggatgtgttcctcaacgccgtcggcggcgtgaaaatcggcgaaccggcggcggatttggcggtcatcctcgcgatgctttccagcttccgcaaccgccctatgcctgaaaaaaccgtggttttcggcgaaatcggcttaagcggcgaagtccgccccgtcgcacgcgggcaagagcggctcaaagaagcggaaaaactcggcttcaaacgcgccatcgttcccaaagccaatatgccgcgcaacgccaaagagtttccgaacctgaaaatctacggcgtttcgagtttgcaggaagccatcgatatttgccgtgacagcagggaataa

SEQ ID NO: 47647 - DNA, 378 bp, Neisseria meningitidis; identical to SEQ ID NO: 45994

SEQ ID NO: 47648 - DNA, 243 bp, Neisseria meningitidis
atgactaatttaaaattagatttctactctgaagttattataaaagattcttgccctaatgatttgttagaaaatggtgagactattaaaggaaaaaaaggagtggtattaggtataagcgaagaagatggtataatctatggctatactattttactttttgatataaaatattgtagatatatagataagaaatatattataccgactggaaaaaaattctctcgcgatgatttttattag

SEQ ID NO: 47649 - DNA, 681 bp, Neisseria meningitidis; identical to SEQ ID NO: 45005

SEQ ID NO: 47650 - DNA, 1260 bp, Neisseria meningitidis; identical to SEQ ID NO: 38128

SEQ ID NO: 47651 - DNA, 921 bp, Neisseria meningitidis; identical to SEQ ID NO: 44807

SEQ ID NO: 47652 - DNA, 1188 bp, Neisseria meningitidis; identical to SEQ ID NO: 46933

SEQ ID NO: 47653 - DNA, 588 bp, Neisseria meningitidis; identical to SEQ ID NO: 39526

SEQ ID NO: 47654 - DNA, 1197 bp, Neisseria meningitidis
atgaaacactttccatccaaagtactgaccacagccatccttgccactttctgtagcggcgcactggcagccacaaacgacgacgatgttaaaaaagctgccactgtggccattgctgctgcctacaacaatggccaagaaatcaacggtttcaaagctggagagaccatctacgacattgatgaagacggcacaattaccaaaaaagacgcaactgcagccgatgttgaagccgacgactttaaaggtctgggtctgaaaaaagtcgtgactaacctgaccaaaaccgtcaatgaaaacaaacaaaacgtcgatgccaaagtaaaagctgcagaatctgaaatagaaaagttaacaaccaagttagcagacactgatgccgctctggatgcaaccaccaacgccttgaataaattgggagaaaatataacgacatttgctgaagagactaagacaaatatcgtaaaaattgatgaaaaattagaagccgtggctgataccgtcgacaagcatgccgaagcattcaacgatatcgccgattcattggatgaaaccaacactaaggcagacgaagccgtcaaaaccgccaatgaagccaaacagacggccgaagaaaccaaacaaaacgtcgatgccaaagtaaaagctgcagaaactgcagcaggcaaagccgaagctgccgctggcacagctaatactgcagccgacaaggccgaagctgtcgctgcaaaagttaccgacatcaaagctgatatcgctacgaacaaagataatattgctaaaaaagcaaacagtgccgacgtgtacaccagagaagagtctgacagcaaatttgtcagaattgatggtctgaacgctactaccgaaaaattggacacacgcttggcttctgccgaaaaatccattaccgaacacggtacgcgcctgaacggtttggatagaacagtgtcagacctgcgtaaagaaacccgccaaggccttgcagaacaagccgcgctctccggtctgttccaaccttacaacgtgggtcggttcaatgtaacggctgcagtcggcggctacaaatccgaatcggcagtcgccatcggtaccggcttccgctttaccgaaaactttgccgccaaagcaggcgtggcagtcggcacttcgtccggttcttccgcagcctaccatgtcggcgtcaattacgagtggtaa

SEQ ID NO: 47655 - DNA, 1464 bp, Neisseria meningitidis; identical to SEQ ID NO: 38299

SEQ ID NO: 47656 - DNA, 4365 bp, Neisseria meningitidis
atgaaaacaaccgacaaacggacaaccgaaacacaccgcaaagccccgaaaaccggccgcatccgcttctcgcctgcttacttagccatatgcctgtcgttcggcattcttccccaagcttgggcgggacacacttatttcggcatcaactaccaatactatcgcgactttgccgaaaataaaggcaagtttgcagtcggggcgaaagatattgaggtttacaacaaaaaaggggagttggtcggcaaatcaatgacaaaagccccgatgattgatttttctgtggtgtcgcgtaacggcgtggcggcattggtgggcgatcaatatattgtgagcgtggcacataacggcggctataacaacgttgattttggtgcggaaggaagcaatcccgatcaacatcgttttacttataaaattgtgaaacggaataattataaagcagggactaacggccatccttatggcggcgattatcatatgccgcgtttacataaatttgtaaccgatgcagaacctgttgaaatgaccagttatatggatgggcggaaatatatcgatcaaaataattaccctgaccgtgttcgtattggggcaggcaggcaatattggcgatctgatgaagatgagcccaataaccgcgaaagttcatatcatattgcaagtgcgtattcttggctcgttggtggcaatacctttgcacaaaatggatcaggtggtggcacagtcaacttaggtagtgaaaaaattaaacatagcccatatggttttttaccaacaggaggctcatttggcgacagtggctcaccaatgtttatctatgatgcccaaaagcaaaaatggttaattaatggggtattgcaaacgggcaacccctatataggaaaaagcaatggcttccagctggttcgtaaagattggttctatgatgaaatctttgctggagatacccattcagtattctacgaaccacgtcaaaatgggaaatactcttttcacgacaataataatggcacaggaaaaatcgacgccaaacatgaacacaattctctgcctaatagattaaaaacacgaaccgttcaattgtttaatgtttctttatccgagacagcacaagaacctgtttatcatgctgcaggtggtgtcaacagttatcgacccagactgaataatggagaaaatatttcctttattgacgaaggaaaaggcgaattgatacttaccagtaacatcaaccaaggtgctggaggattatatttccaaggagattttacggtctcgcctgaaaacaacgaaacgtggcaaggcgcgggcgttcatatcagtgaagacagtaccgttacttggaaagtcaatggcgtggcaaacgaccgcctgtccaaaatcggcaaaggcacgctgcacgttcaagccaaaggggaaaaccaaggctcgatcagcgtgggcgacggtaaagttattttagatcaacaagcagatgaaaataataaaaaacaagcctttagtgaaatcggcttggtcagcggcaggggtacggtgcaactgaatgccgataatcagttcaaccccgacaaactctatttcggctttcgcggcggacgtttggatttgaacgggcattcactttcgttccaccgtattcaaaataccgatgaaggggcgatgattgtcaaccacaatcaagacaaagaatccaccgttaccattacaggcaataaagatattgctacaaccggcaataacaacagcttggatagcaaaaaagaaattgcctacaacggttggtttggcgagaaagatacgaccaaaacgaacgggcggctcaaccttgtttaccagcccgctgcagaagaccgcaccctgctgctttccggcggaacaaatttaaacggcaacatcacgcaaacaaacggcaaactgtttttcagcggcagaccaacaccgcacgcctacaatcatttaaacgaccattggtcgcaaaaagagggcattcctcgcggggaaatcgtgtgggacaacgactggatcaaccgcacatttaaagcggaaaacttccaaattaaaggcggacaggcggtggtttcccgcaatgttgccaaagtgaaaggcgattggcatttgagcaatcacgcccaagcagtttttggtgtcgcaccgcatcaaagccacacaatctgtacacgttcggactggacgggtctgacaaattgtgtcgaaaaaaccattaccgacgataaagtgattgcttcattgaccaataccgacatcagcggcaatgtcagccttgccgatcacgctcatttaaatctcacagggcttgccacactcaacggcaatcttagtgcaaatggcgatacacgttatacagtcagccacaacgccacccaaaacggcgaccttagcctcgtgggcaatgcccaagcaacatttaatcaagccacattaaacggcaacacatcggcttcgggcaatgcttcatttaatctaagcgaccacgccgtacaaaacggcagtctgacgctttccggcaacgctaaggcaaacgtaagccattccgcactcaacggtaatgtctccctagccgataaggcagtattccattttgaaagcagccgctttaccggacaaatcagcggcagcaaggatacggcattacacttaaaagacagcgaatggacgctgccgtcaggcacggaattaggcaatttaaaccttgacaacgccaccattacactcaattccgcctatcgccacgatgcggcaggggcgcaaaccggcagtgcgacagatgcgccgcgccgccgttcgcgccgttccctattatccgttacacctccggcttcggtagaatcccgtttcaacacgctgacggtaaacggcaaattgaacggtcagggaacattccgctttatgtcggaactcttcggctaccgcagcgacaaattgaagctggcggaaagttccgaaggcacttacaccttggcggtcaacaataccggcaacgaacctgcaagcctcgaacaattgacggtagtggaaggaaaagacaacaaaccgctgtccgaaaaccttaatttcaccctgcaaaacgaacacgtcgatgccggcgcgtggcgttaccaactcatccgcaaagacggcgagttccgcctgcataatccggtcaaagaacaagagctttccgacaaactcggcaaggcagaagccaaaaaacaggcggaaaaagacaacgcgcaaagccttgacgcgctgattgcggccgggcgcgatgccgtcgaaaagacagaaagcgttgccgaaccggcccggcaggcaggcggggaaaatgtcggcattatgcaggcggaggaagagaaaaaacgggtgcaggcggataaagacaccgccttggcgaaacagcgcgaagcggaaacccggccggctaccaccgccttcccccgcgcccgccgcgcccgccgggatttgccgcaactgcaaccccaaccgcagccccaaccgcagcgcgacctgatcagccgttatgccaatagcggtttgagtgaattttccgccacgctcaacagcgttttcgccgtacaggacgaattagaccgcgtatttgccgaagaccgccgcaacgccgtttggacaagcggcatccgggacaccaaacactaccgttcgcaagatttccgcgcctaccgccaacaaaccgacctgcgccaaatcggtatgcagaaaaacctcggcagcgggcgcgtcggcatcctgttttcgcacaaccggaccgaaaacaccttcgacgacggcatcggcaactcggcacggcttgcccacggcgccgttttcgggcaatacggcatcgacaggttctacatcggcatcagcgcgggcgcgggttttagcagcggcagtctttcagacggcatcggaagcaaaatccgccgccgcgtgctgcattacggcattcaggcacgataccgcgccggtttcggcggattcggcatcgaaccgcacatcggcgcaacgcgctatttcgtccaaaaagcggattaccgctacgaaaacgtcaatatcgccacccccggccttgcgttcaaccgctaccgcgcgggcattaaggcagattattcattcaaaccggcgcaacacatttccatcacgccttatttgagcctgtcctataccgatgccgcttcgggcaaagtccgaacgcgcgtcaataccgccgtattggctcaggatttcggcaaaacccgcagtgcggaatggggcgtaaacgccgaaatcaaaggtttcacgctgtccctccacgctgccgccgccaaaggcccgcaactggaagcgcaacacagcgcgggcatcaaattaggctaccgctggtaa

SEQ ID NO: 47657 - DNA, 549 bp, Neisseria meningitidis; identical to SEQ ID NO: 36303

SEQ ID NO: 47658 - DNA, 306 bp, Neisseria meningitidis; identical to SEQ ID NO: 38913

SEQ ID NO: 47659 - DNA, 444 bp, Neisseria meningitidis
ttggtgatgcctgtgaaaaaagttgaaaaaaacatcttggtgctgcacggcgcggacaaaatgttcgagctggtcgataaggttgaagactatccgcactttctgccgtggtacagcaagaccgaggtcatcgggcgtagcggcaacgaactgaaggcgcggctgtttatggactatatgcacgttcgccaatcattcgccacgcacaaccgcaacattccgggcagggaaatccgtatggaactgctcgagggtccgttcaaaaccttacgtggaacgtggaaatttatcgatttgggcgacgatatgtgcaaaatcgaattcaatttggaatacgatttttccaatgccgttttgtccgccttaatttcccccgtcttcaaccacctttccgtcacgctggtcgaagcgttcgtcaaagaggcagaccgccgttatgcttga

SEQ ID NO: 47660 - DNA, 852 bp, Neisseria meningitidis
atggtcggatgcgtttggcaggcaggacggtttgaaatcggtttggacaaaccgaaaatcatgggtatcgtgaatctcacgcccgattctttgtccgacggcggcgcgtattcgcaaaacgcccaaacagctttggcgcatgccgaacggcttttgaaagagggcgcggacattctcgacatcggcggcgaatcgacgcggccgggtgcggattatgtttcgcctgaagaagaatgggcgcgggttgagtctgtattggcggaagtggcagggtggggcgttcccgtcagtttggacacgcgccacacggtggttatggaaaaagcgttggcactcggcggcatcgatattattaacgatgtggcggcgttgaccgacgaaggcgcgctcgaattgctggcgtgtcaggcggatacgggcatttgcctgatgcatatgcagggcttgcctaagaatatgcagattaatccgaaatatcaggatgttgtcggtgaagtggcgcggtatttgaaagcgcgggcggcggaatgcatcgcggcaggcatcgccccgcaacgcattacactcgaccccggtttctgcttcggcaaaaccttgcaacacaatatcacactgatgcggcatctgcccgaattgatggcggaaacgggctatccgctgctgatcggcgtgtcgcgcaaaagcatgataggcgaactgacgggcgaaaccgacgcggcggcgcgcggacacggcagcgtggcggcggctttggcggctgtggcacgcggcgcgaaaatcgtgcgcgtgcacgatgtgaaggcgacggcggatgctttgaaggcgtgggaagcgttgggcatcaatctgtaa

SEQ ID NO: 47661 - DNA, 576 bp, Neisseria meningitidis
gtgtttttgcctgcttctgatgccgaaattttatttttcttgccgaacaatttgttttctcaaggcaaacttgattataatgggggcatgaaaaaataccttatccctctttccattgtggcagttctttccggctgccagtctatttatgtgcccacattgacggaaatccccgtgaatcctatcaataccgtcaaaacggaagcacctgcaaaaggtttccgccttgcctcttcgcattggacggatgttgccaaaatcagcgatgaagcgacgcgcttgggctatcaggtgggtatcggtaaaatgaccaaggttcaggcggcgcaatatctgaacaacttcagaaaacgcctggtcggacgcaatgccgtcgatgacagtatgtatgaaatctacctgcgttcggcgatagacagccagcggggcgcaatcaatacggaacagtccaagctgtatatccagaatgccttgcgcggctggcagcagcgttggaaaaatatggatgtcaaacccaacaaccccgcatttaccaactttttgatggaagtgatgaagatgcagcccttgaaatga

SEQ ID NO: 47662 - DNA, 687 bp, Neisseria meningitidis; identical to SEQ ID NO: 45770

SEQ ID NO: 47663 - DNA, 1827 bp, Neisseria meningitidis
ttgggcatttcccgcaaaatatcccttattctgtccatactggcagtgtgcctgccgatgcatgcacacgcctcagatttggcaaacgattcttttatccggcaggttctcgaccgtcagcatttcgaacccgacgggaaataccacctattcggcagcaggggggaacttgccgagcgcagcggccatatcggattgggaaaaatacaaagccatcagttgggcaacctgatgattcaacaggcggccattaaaggaaatatcggctacattgtccgcttttccgatcacgggcacgaagtccattcccccttcgacaaccatgcctcacattccgattctgatgaagccggtagtcccgttgacggatttagcctttaccgcatccattgggacggatacgaacaccatcccgccgacggctatgacgggccacagggcggcggctatcccgctcccaaaggcgcgagggatatatacagctacgacataaaaggcgttgcccaaaatatccgcctcaacctgaccgacaaccgcagcaccggacaacggcttgccgaccgtttccacaatgccggtagtatgctgacgcaaggagtaggcgacggattcaaacgcgccacccgatacagccccgagctggacagatcgggcaatgccgccgaagctttcaacggcactgcagatatcgtcaaaaacatcatcggcgcggcaggagaaattgtcggcgcaggcgatgccgtgcagggtataagcgaaggctcaaacattgctgtcatgcacggcttgggtctgctttccaccgaaaacaagatggcgcgcatcaacgatttggcagatatggcgcaactcaaagactatgccgcagcagccatccgcgattgggcagtccaaaaccccaatgccgcacaaggcatagaagccgtcagcaatatctttatggcagccatccccatcaaagggattggagctgttcggggaaaatacggcttgggcggcatcacggcacatcctatcaagcggtcgcagatgggcgcgatcgcattgccgaaagggaaatccgccgtcagcgacaattttgccgatgcggcatacgccaaatacccgtccccttaccattcccgaaatatccgttcaaacttggagcagcgttacggcaaagaaaacatcacctcctcaaccgtgccgccgtcaaacggcaaaaatgtcaaactggcagaccaacgccacccgaagacaggcgtaccgtttgacggtaaagggtttccgaattttgagaagcacgtgaaatatgatacgaagctcgatattcaagaattatcggggggcggtatacctaaggctaagcctgtgtttgatgcgaaaccgagatgggaggttgataggaagcttaataaattgacaactcgtgagcaggtggagaaaaatgttcaggaaataaggaacggtaataaaaacagtaactttagccaacatgctcaactagagagggaaattaataaactaaaatctgccgatgaaattaattttgcagatggaatgggaaaatttaccgatagcatgaatgacaaggcttttagtaggcttgtgaaatcagttaaagagaatggcttcacaaatccagttgtggagtacgttgaaataaatggaaaagcatatatcgtaagaggaaataatagggtttttgctgcagaataccttggcaggatacatgaattaaaatttaaaaaagttgactttcctgttcctaatactagttggaaaaatcctactgatgtcttgaatgaatcaggtaatgttaagagacctcgttataggagtaaataa

SEQ ID NO: 47664 - DNA, 453 bp, Neisseria meningitidis; identical to SEQ ID NO: 44422

SEQ ID NO: 47665 - DNA, 747 bp, Neisseria meningitidis; identical to SEQ ID NO: 38219

SEQ ID NO: 47666 - DNA, 639 bp, Neisseria meningitidis
ttgcacggcacgccgaacccatcggccggcaggatggcatccgttaaggaaattctgatgaaacacactgtatccgcatcggtcatcctgcttttgaccgcttgcgcgcaattacctcaaaataacgaaaacctgtggcagccgtccgaacacacccgcagtttcacggcggaagggcggttggcagtgaaagcggaagggaaaggttcgtatgcaaatttcgattggacataccaaccgcccgtggaaaccatcaatatcaatacccctttgggcagtacgctcgggcagttgtgtcaagacagggacggcgcattggcagtggacggcaaaggaaatgtctatcaggcggaaagtgcggaagaattaagcaggcagctggtcggtttcaaactaccaatccaatatctgcatatctgggcagatggcaggcgtgtggcgggcgcgccttaccgcatcctgccggacggcatattggaacaatacggttggactgtcggcagaaccgccgacagtggggggcaagtccgaacgttgcaactgaataacggaaatttgaacatcaggctggttttcaccgaaatcggtatgccgtctgaaactgaaaccccggaacgctgtgcggcgcgcacgagataa

SEQ ID NO: 47667 - DNA, 1080 bp, Neisseria meningitidis
gtgcgtataatggcggcttgcccgaacgagagtgtaaaaatggatatttcagattttgattttaccctgcccgaaaagctgattgcccagcatccgcccgaagtgcgcggcagcagccgccttttggttgcgttgcccgatatgccgctgcaagaccgggtgttcggcgatttgccggattatgttgaggcgggcgacgttttggtgttcaacaacaccaaagtcatgaaggcgcggctgtttgggcagaaagacagcggcggcaggatcgaagccctgattgagcgcgtgttggacaaccataccgcactggcgcacatccgttcgtccaaatcgcccaagcccggtatggggctggtgtttgaaggcggcatccgcgccgtgacggtcgggcgtgagggcgaactgttctgcctgcgttttgaaggcggtcaaaccgtttacgaacttttggaacagaacggacacctgcccctgccgccttatatcgaacgcgccgccgatgcggatgacgacagccgttatcaaaccgtttatgccaaatatcagggcgcggtcgccgcgccgacggcgggtctgcattttacggaagaacttttgcgccgcctgaaagacaaaggcgcagtaaccgcagaagtaaccctacacgtcggtgcggggacattccaacccgtgcgtgtggacaaaatcgaagagcataaaatgcacagcgaatggtttgaagtgccgtctgaaaccgccgccgccgttgaggcggcaaaagcccgggggaacaaagtctgggcagtcggcacgacttccatgcgcgccctcgaatctgccgcgcgtgcgacgggtcgtctgaaagcggggcagggcgacaccgatattttcatcacgccgggctaccgttttaatgttgtcgacaggctggttaccaattttcatttgccgaaatcgacgctgctgatgcttgtcagcgcgttttcgggtatgggtcatatccgcgccgcgtatcgttatgcggtcgaacgcgaataccgtttcttcagctacggcgatgcgatggttttggggtggaacgaaggggtggtacgttag

SEQ ID NO: 47668 - DNA, 1170 bp, Neisseria meningitidis
atgccgcaaattaaaattcccgccgtttactaccgtggcggtacatcaaaaggcgtgtttttcaaacgttccgacctgcccgaggcggcgcgggaagcgggcagcgcacgcgacaaaatcctcttgcgcgtactcggcagcccggatccctacggcaagcagatagacggtttgggcaacgccagctcgtccaccagcaaggcggtgattttggacaagtccgaacgcgccgatcacgatgtcgattaccttttcgggcaagtttccatcgacaaaccttttgtcgattggagtggcaactgcggcaacctcaccgccgccgtgggcgcatttgccatcgagcaaggcttggtcgataaaggcaagattccttcagacggcatctgcacagtcaaaatctggcagaaaaacatcggcaaaaccattattgcccatgtaccgatgcaaaacggcgcagttttggaaacaggcgattttgagctcgacggcgtaacgttcccggcagccgaagtacaaatcgaatttcttgatccagccgacggcgaaggcagtatgttcccaaccggcaatttggtcgatgaaattgatgtgccgaatataggccgtttgaaagccacgctcatcaacgcgggcattccgaccgttttcctgaatgccgccgacttgggctacacgggcaaagagttgcaagacgacatcaacaacgatgccgcagctttggaaaaattcgagaaaatccgcgcttacggtgcgctgaaaatgggtctaatcagcgacgtatccgaagctgccgcccgcgcgcacacgccgaaagtcgccttcgtcgcgcccgccgccgattacaccgcctccagtggcaaaaccgtgaatgccgccgacatcgatttgctggtacgcgccctgagcatgggcaaattgcaccacgcgatgatgggtaccgcctctgttgccattgcgaccgccgccgccgtgcccggtacgctggtcaaccttgccgcaggcggcggaacgcgtaaagaagtgcgcttcgggcatccttccggcacattgcgcgtcggtgcagccgccgaatgtcaggacggacaatggacggccaccaaagcggttatgagccgcagcgcacgcgtgatgatggaaggttgggtcagggtgccggaagattgtttttaa

SEQ ID NO: 47669 - DNA, 1557 bp, Neisseria meningitidis; identical to SEQ ID NO: 44681

SEQ ID NO: 47670 - DNA, 966 bp, Neisseria meningitidis; identical to SEQ ID NO: 46197

SEQ ID NO: 47671 - DNA, 825 bp, Neisseria meningitidis; identical to SEQ ID NO: 44232

SEQ ID NO: 47672 - DNA, 378 bp, Neisseria meningitidis
ttgaaggaaaccgatatggatatccgatatttcggcacaacgccccgctattccgaagccgtcggcgcaaacggcttgattttcctctccggcatggttcccgaaaacggtgaaacggctgccgaacagactgccgacgtgcttgcccaaatcgaccgctggctggcggaatgcggctcggacaaggcacacgttttagatgcggtcatctatctgcgcgatatgggcgactacgcggaaatgaacggcgtgtgggacgcttgggttgccgccggcagaacgcctgcccgcgcctgcgtggaagctcggctcgcccgtccggagtggcgcgtcgaaatcaaaataaccgccgtgaagaaagacgcggcaaccgaataa

SEQ ID NO: 47673 - DNA, 1008 bp, Neisseria meningitidis; identical to SEQ ID NO: 39286

SEQ ID NO: 47674 - DNA, 159 bp, Neisseria meningitidis; identical to SEQ ID NO: 44687

SEQ ID NO: 47675 - DNA, 702 bp, Neisseria meningitidis; identical to SEQ ID NO: 44204

SEQ ID NO: 47676 - DNA, 654 bp, Neisseria meningitidis; identical to SEQ ID NO: 45527

SEQ ID NO: 47677 - DNA, 654 bp, Neisseria meningitidis
atgaagataacacactgcaaattaaagaaaaaagtacagaaagaactgctccgtttttttgtgctggaagttaccgcccgttctgccgccgatattttgggtatccatcccaattcggcagtactgttctaccgtaaaatccgcacggttatcaaccatcatttggccttggctgccgatgaggtttttgagggccctgtcgagccggacgaaagcgatttcggcggacggcgtaaaggcagacgtggtcgcggtgcggcaggaaaagtggttgtcttcggcattctgaaacgcaacggacgggtctataccgttgtggtggataatgccaagtctgaaacgttactccctgtcatcaagaagaaaatcatgccggacagcattgtttataccgatagtctgagcagctgcgacaagttggacgtgagcggttttatccattaccgcatcaaccattccaaggaatttgcagaccgtcaaaaccacattaacggcattgagaacttttggaatcaggcaaaacgcgtcttgcgcaaatacaacgaaattgatcgtaaatctttcccgctgttcttgaaagaatgcaaatttcggtttaacttcggcacaccgtcccgacagctaaaaattttgcgggattggtgtggaatttag

SEQ ID NO: 47678 - DNA, 693 bp, Neisseria meningitidis; identical to SEQ ID NO: 42313

SEQ ID NO: 47679 - DNA, 942 bp, Neisseria meningitidis
atgaaaaccctgcttctcctcatccccctcgtcctaaccgcctgcggcacactgaccggcatacccgcccacggcggcggcaaacgctttgccgtcgaacaagaactcgtcgccgcatcgtcccgcgccgccgtcaaagaaatggatttgtccgccctgaaaggacgcaaagccgccctttacgtctccgttatgggcgaccaaggttcgggcaacataagcggcggacgctactctatcgacgcactgatacgcggcggctaccacaacaaccccgaaagtgccacccaatacagctaccccgcctatgacactaccgccaccaccaaagccgacgcgctctccagcgtaaccacttccacatcgcttttgaacgcccccgccgccgccctgactagaaacagcggacgcaaaggcgaacgctccgccggactgtccgtcaacggcacgggcgactaccgcaacgaaaccctgctcgccaacccccgcgacgtttccttcctgaccaacctcatccaaaccgtcttctacctgcgcggcatcgaagtcgtaccgcccgaatacgccgacaccgacgtattcgtaaccgtcgacgtattcggcaccgtccgcagccgtaccgaactgcacctctacaacgccgaaacccttaaagcccaaaccaagctcgaatatttcgccgtcgaccgcgacagccggaaactgctgattgcccctgaaaccgccgcctacgaatcccaataccaagaacaatacgccctctggatgggaccttacagcgtcggcaaaaccgtcaaagcctcagaccgcctgatggtcgatttctccgacatcaccccctacggcgacacaaccgcccaaaaccgtcccgacttcaaacaaaacaacggtaaaaaacccgatgtcggcaacgaagtcatccgccgccgcaaaggaggataa

SEQ ID NO: 47680 - DNA, 888 bp, Neisseria meningitidis
atgcagaaatccaaattatcttggttcttgaaactgatgttggcactgtcgctggcgtttctgtatatcccgctggttgttttggtcatctattcgtttaacgaatccaagctggtaaccgtttggggcggcttttcgaccaagtggtacggcgcattgctggaaaacgacaccatcttggaagccgcttggctgtcgctgcggattgccgttgtgtcttcgcttgccgccgtcgttttgggcacgctggcaggctatgcgatggcgcggattaaacgttttcgcggcagtaccttgttcgccggtatgatttccgcacctatggtgatgcccgacgtgattaccggtctgtctatgctgctgctgattattcaggtacagatatttttgcagggcagcgaatggttacaacatctctacttcgatcgtggctttttcactattttcttaggacatacgacgctgtgcatggcatacattaccgttgttatccgttcgcgtctggttgagcttgaccaatcgctcgaagaagccgcaatggatttgggcgcgcgtccgctgaaaatcttttttgtcatcactttgcctttgattgcccctgccatcgcttcaggctttctgctcggcattaccctgtctttggatgatttggtgattacctcattcctctccggccccggttcatccacattgccgcaggtgattttctccaaaatcaagctgggtcttgatccgcagatgaacgttttggcaaccatcctgatcggcatcatcggaacattggtcatcatcgtcaattattggatgatgaggcaggcaaccaagcgtgaccgagaagcggcagaagcctaccgccaagaaaaattggctgccgagaaagcaaattaa

SEQ ID NO: 47681 - DNA, 492 bp, Neisseria meningitidis
atgcgtgcggtcatacagaaaacggtaggtgcaaaggtggatgtcgtgtccgaagccggcacggaaacctgcggcaaaatcgacggcggattcgtcgtgctactcggtgtaacgcatagcgacacagaaaaagatgcacgctatatcgccgacaaaatcgcccatttgcgcgtgtttgaagacgaagcgggcaagttgaacctgtctttgaaagatgtcggcggcgcggtgctgctggtgtcgcagtttacactttatgccgatgcggcaagcgggcggcggccttcgttttcccaagccgcacctgcagaacaggcgcagcagctttacctgcgaacggcggaactgttgcgcggacacgggattcatgtcgaaacagggcgtttccgcacgcatatgcaggtgtcgctctgcaacgacgggccggtaaccatactgctggactctttcatgacgcggatttccccaaaaatgaaggttgttccggattga

SEQ ID NO: 47682 - DNA, 726 bp, Neisseria meningitidis; identical to SEQ ID NO: 38250

SEQ ID NO: 47683 - DNA, 660 bp, Neisseria meningitidis
ttgtgtgcgtcctgtttgaatgttaacaaaatcgttataatcgcaacattctaccgcaatcctgaaaggccgtctgaaatgaggaacgaggaaaaacacgccctgcgccgcgaattacgcgggcggcgttcgcaaatggggtgggacgtgcgggcggcggcaacggtaaaaattaaccgcctgctcaaacgttatatcaagcacggtcggaaaatcggcgtgtattggccgatgggcaaggaattgcgtttggacggctttgtccgcgcggcgcaaaaacgcggcgcaaaactttatctgccttatatcgaaccgcgttcgcggcggatgtggtttacgccgtatcctgaaagcggaatggaacgggagcgcatacggggcagggcgaggttgaacgtgccgcagtttgcagggcgcaaaatccgcgtgcacggtttgtcggtattgctcgttccgcttgtcggcatagaccgcgaaggctaccgtttggggcaggcaggcggctattacgatgcgacgcttgcagcgatgaaataccgtttgcaggcaaaaaccgtgggcgtgggctttgcctgccagttggtggacagactgtcggtcgaggcgcacgacctgccgctggacggttttgtgtcggaggcggggatattgtgtttttag

SEQ ID NO: 47684 - DNA, 996 bp, Neisseria meningitidis
ttgaaggctgcctatcaaaatattgcaactgtctggcagggcgatttccacaatgccaaacaggtgctttctgcaatgaagaagagggctcgcaaacctgccgccgtccgttccgatgcggatatcgccgcccttttccatgcccaccgtatgaagcaggcgcagcagagccgtattctgaatatgcttgccgttgaaatccgccccggttttgtgttggacaacaaacgcgcgcccgatatacgcgccgccctgctcgacgtgtacggagaggcggacggcaaaccgtttttcctgccgctcaatctgctgctggggtttatgggtgcgcacgagtggcataagaaaggggttgccgttccgcagctgggcggcagcatacacgttcctttcggcgtattctcgccgttgcgcggcgaatacctcgacctgctcgcccatgcgccgtcaacgggttttcagacggcattcgatatcgggacgggctcgggcgtgcttgccgccattttggcgaaacagggcattccttccgtcatcggcacggataccaatccgaaagccgtcgcctgcgcccgtgccaatattgcccgtttgggctttgaaaaacaggttgagatacgggaaaccgatctgtttcccgaagggtttgccgatctgattgtctgcaatccaccctggcttcccgccaagccgacttccgccgtcgaatccgcgttatacgaccccgaatctgcgatgctggctgcgtttttgcgggatgcgccgaaacatctgaatcccgacggagaaatccgcctgattatttccgaccttgcagagcatttggggctgcgccctgccgattttttggaaaaggcatttatccgggcgggtttgcgtgttgccgatatgatgaaaaccaagccgaagcacaaaaaagccgcgaatccgagcgatccgcttgcttttgcgcgaacctgggaaaccactttcctataccgtttgaaaaaggcataa

SEQ ID NO: 47685 - DNA, 801 bp, Neisseria meningitidis; identical to SEQ ID NO: 44476

SEQ ID NO: 47686 - DNA, 246 bp, Neisseria meningitidis; identical to SEQ ID NO: 44126

SEQ ID NO: 47687 - DNA, 363 bp, Neisseria meningitidis; identical to SEQ ID NO: 37674

SEQ ID NO: 47688 - DNA, 459 bp, Neisseria meningitidis; identical to SEQ ID NO: 45546

SEQ ID NO: 47689 - DNA, 483 bp, Neisseria meningitidis; identical to SEQ ID NO: 44210

SEQ ID NO: 47690 - DNA, 522 bp, Neisseria meningitidis; identical to SEQ ID NO: 39913

SEQ ID NO: 47691 - DNA, 498 bp, Neisseria meningitidis; identical to SEQ ID NO: 45274

SEQ ID NO: 47692 - DNA, 996 bp, Neisseria meningitidis; identical to SEQ ID NO: 38514

SEQ ID NO: 47693 - DNA, 375 bp, Neisseria meningitidis; identical to SEQ ID NO: 41186

SEQ ID NO: 47694 - DNA, 957 bp, Neisseria meningitidis; identical to SEQ ID NO: 39269

SEQ ID NO: 47695 - DNA, 378 bp, Neisseria meningitidis; identical to SEQ ID NO: 38701

SEQ ID NO: 47696 - DNA, 492 bp, Neisseria meningitidis; identical to SEQ ID NO: 45059

SEQ ID NO: 47697 - DNA, 756 bp, Neisseria meningitidis; identical to SEQ ID NO: 44689

SEQ ID NO: 47698 - DNA, 936 bp, Neisseria meningitidis; identical to SEQ ID NO: 44359

SEQ ID NO: 47699 - DNA, 1011 bp, Neisseria meningitidis
ttgcgggcaagcagtgtgcagccttgggattggaggaaggcaagcgcggcatcttcccctgcctcgccctgtttgtggtttaggcgcataatcggtttaacctttataatgtctgtttttcagacggcattttttatgtttcagaaacacttgcagaaagcctccgacagcgtcgtcggagggacattatacgtggttgccacgcccatcggcaatttggcggacattaccctgcgcgctttggcggtattgcaaaaggcggacatcatctgtgccgaagacacgcgcgttaccgcgcagcttttgagcgcgtacggcattcagggcaaacttgtcagcgtgcgcgaacacaacgaacggcagatggcggacaagattgtcggctatctttcagacggcatggttgtggcacaggtttccgatgcgggtacgccggccgtgtgcgacccgggcgcgaaactcgcccgccgcgtgcgtgaggtcgggtttaaagttgtccctgttgtcggcgcaagcgcggtgatggcggctttgagtgtggccggtgtggcgggatccgatttttatttcaacggttttgtaccgccgaaatcgggagagcgcaggaaactgtttgccaaatgggtgcgggcggcgtttcccgtcgtgatgtttgaaacgccgcaccgcatcggtgcgacgcttgccgatatggcggaactgttctccgaacgccgattaatgctggcgcgcgaaattacgaaaacgtttgaaacgttcttaagcggcacggttggggaaattcagacggcattgtctgccgacggcaaccaatcgcgcggtgagatggtgttggtgctttatccggcgcaggatgaaaaacacgaaggcttgtccgagtccgcgcaaaacatcatgaaaatcctcacagccgagctgccgaccaaacaggcggcggagcttgccgccaaaatcacgggcgagggaaaaaaagctttgtacaatctggcactgtcttggaaaaacaaatga

SEQ ID NO: 47700 - DNA, 474 bp, Neisseria meningitidis; identical to SEQ ID NO: 44295

SEQ ID NO: 47701 - DNA, 1410 bp, Neisseria meningitidis
atggatacacaaatcaaaactgaagccgacaatcagagcaaccggcgttatctgaccgtttggcggtggcatttttatgccggtctgctggttatgccttttcttaccctgcttgccgttacgggtttgggtatgctgctgtttgccaatattaccggtaaggagggcgagcggattcatgttgtgccgcaggcaacggtacaacctctgtctgttcaggcggaagcggcacgcagtgccgttaatccggaaacttcgtccgtcgttcagtatattgcgccgcgtgccgatgatatggttgccgtgttccgtgtcaacaatgagggcaaggcaacgatggtcgcggtcgatccttatacggcaaaagtggtcaacaccatgccgcgcaatcagggttggtatcacacgatggatgaaatccacagcgatatgatgctcggttcgacaggcgattatcttttggaaacggctgcatcgctgacgattatcatgataatcagcggtttgtacctttggtgggtgaaacggcgcggcatcaaggcgatgctgctgccgtcaaaaggcagggcgcgttcttggtggcggaatctgcacggcacgtttggaacttgggtgtcgttgattttgctgttgttctgcctgtcgggtattgcttgggcgggtatttggggcggcaagttcgtacaggcttggagtcagttccctgccggtaaatggggtgtcgaaccgaaccccgtttcagtcgtgccgacccacggcgaggtattgaatgacggcaaggttaaggaagtgccgtgggttttggagcttacgcctatgcctgtttcagggacgactgtgggcaaagacggcattaaccctgacgagccgatgacattggaaaccgtcgaccgctttgcgcgggaaatcggtttcaaagggcgttatcagttgaatttgcccaaaggcgaggacggcgtatggactttgtcgcaggattctatgagttacgacatgatcagcccgtttgccgaccgcacggtacatatcgaccagtacagcggcaaaatccttgccgacatccgttttgacgattacaacccgttcggcaaatttatggcggcaagcattgcgctgcatatggggactctgggctggtggagcgtgttggcgaacgtcttgttctgccttgccgtcatttttatcggtatcagcggctgcgtgatgtggtggaaacgccgtccgaccggagcggtgggcatcgttccgccggcgcagaaagtcaagctgccggtttggtggatgatggcattgccgctattggcaatcgcactgctcttcccgaccgcactgcttgccattgccgtgatttggctgttggatacgctgctgttgtcgcggattcctgttttgaggagatggtttaaatga

SEQ ID NO: 47702 - DNA, 687 bp, Neisseria meningitidis; identical to SEQ ID NO: 44235

SEQ ID NO: 47703 - DNA, 540 bp, Neisseria meningitidis
atgtcccaagtttttaaagattttgatttgtcctccgtatgggaatccgacagttgggcagatgaaaactacaaagaagccccgtttacccctgaaattttggctgccgtagaaagtgaactgggctataaattgccgcaaagttttattgaattgatggcggtacaaaacggcggaatatttgtcaaaaactgttttccgaccacacagagaaattcgtgggcgaaagatcatgtgcaaatttgcgaggtatcgggcatcggctttgaaaaagaagggagtttgtgcggcgaaacagggcaaaaactttggatggaagaatgggaatatccgcccatcggcgtgtattttgccaacgacccgtcaggcggtcatgccatgtttgccttggactatcgggagtgtggaaaagacggcgagccgaaagtggtgtttgtcgagcaagaatcggattttgaaatcgtcgaacttgcccccgattttgaaacctttatccgcagcttgcggcatgaagatgagtttattgacgaggaaatataa

SEQ ID NO: 47704 - DNA, 372 bp, Neisseria meningitidis
atgaataaaaccttgtctattttgccggtggcaatcttactcggcggctgcgccgccggaggcggtaacacattcggcagcttagacggtggcacaggcatgggcggcagcatcgtcaaaatggcggtcgggagccaatgccgtgcggaattggacaaacgcagcgaatggcgtttgaccgcgctggcgatgagtgccgaaaaacaggcggagtgggaaaacaagatttgcgcttgcgtcgcccaagaagcacccgaacggatgaccggcaacgatgtgatgcagatgctggctccgtccacgcgcaatcaggcacttgccgccctgaccgccaaaacggtttccgcctgcttcaaacacctgtaccgctaa

SEQ ID NO: 47705 - DNA, 1104 bp, Neisseria meningitidis
atgatggaaacacagctttacatcggcatcatgtcgggaaccagcatggacggggcggatgccgtactgatacggatggacggcggcaaatggctgggcgcggaagggcacgcctttaccccctatcccgacaggctgcgccgccaattgctggatttgcaggacacaggcgcagacgaactgcaccgcagcaggattttgtcgcaagaactcagccgcctgtacgcgcaaaccgccgccgaactgctgtgcagtcaaaacctcgcaccgtccgacattaccgccctcggctgccacgggcaaaccgtccgacacgcgccggaacacggttacagcatacagcttgccgatttgccgctgctggcggaacggacgcggatttttaccgtcggcgacttccgcagccgcgaccttgcggccggcggacaaggcgcgccactcgtccccgcctttcacgaagccctgttccgcgacaacagggaaacacgcgcggtactgaacatcggcgggattgccaacatcagcgtactcccccccgacgcacccgccttcggcttcgacacagggccgggcaatatgctgatggacgcgtggacgcaggcacactggcagcttccttacgacaaaaacggtgcaaaggcggcacaaggcaacatattgccgcaactgctcgacaggctgctcgcccacccgtatttcgcacgaccccaccccaaaagcacggggcgcgaactgtttgccctaaattggctcgaaacctaccttgacggcggcgaaaaccgatacgacgtattgcggacgctttcccgttttaccgcgcaaaccgttttcgacgccgtctcacacgcagcggcagatacccgtcaaatgtatatttgcggcggcggcatccgcaatcctgttttaatggcggatttggcagaatgtttcggcacacgcgtttccctgcacagcaccgccgaactgaacctcgatcctcaatgggtggaggcagccgcatttgcgtggttggcggcgtgttggattaaccgcattcccggcagcccgcacaaagcaaccggcgcatccaaaccgtgtattctgggcgcgggatattattattga

SEQ ID NO: 47706 - DNA, 1011 bp, Neisseria meningitidis; identical to SEQ ID NO: 45544

SEQ ID NO: 47707 - DNA, 837 bp, Neisseria meningitidis; identical to SEQ ID NO: 44139

SEQ ID NO: 47708 - DNA, 900 bp, Neisseria meningitidis
atgtggttcaagcagattagtttttatccgctcaacaaagaaaagctgcctgaggcagacgtacttgccgacaaacttgctgaagctgaatttacccattgccaaggcttagactggttcagcgaaggctttaccgcaccggtttcattctcccctgaactcgttttccctgccgactttaccttgcgcgtcgccctgaaaaaagaagaaaaagtcctgcctgccggcgtcatccgcgatattttggaagagaaggtagcggaaatccaaaacaatgaagcccgcaatgtcggtcgcaaagaaaaacaagagcttaaagagcaaattacagacgacctgctgccccgagcgtttacccgcagcagccgtacagaagcggtgtttaacacccgccacggctacctgctcgtcaataacgcggcttccgccaaagcagaaaacatcctgaccaagctgcgcgaagctttgggcggtttggaagcctcgctgccgaataccaagcaatcgccctcttccttgatgaccggctggctgttgcaagggcattgcgaaggcggttttgaattagacagcgattgcgaactcaaaggtacgggcgatattgttcccgtcgtcaaagtatccaaacaagatttaaccgccgacgaagtggttcaacacgtcaaaaacggtaaaaccgttacccaactgggcttggtgtggcgcgaacaaattgcctttatcctcactcaagacttcacactcaagcgcatccaatacctcgacgtattgcaggaagaagccgaaagcaacggcgacgatgccgccggccttgccttcgcctcgcaaatcctgatggctgaatccgtcagcaccatgttggaagagctggtttcctatttgggcggctggcaagattga

SEQ ID NO: 47709 - DNA, 741 bp, Neisseria meningitidis; identical to SEQ ID NO: 39171

SEQ ID NO: 47710 - DNA, 348 bp, Neisseria meningitidis; identical to SEQ ID NO: 38212

SEQ ID NO: 47711 - DNA, 189 bp, Neisseria meningitidis; identical to SEQ ID NO: 40016

SEQ ID NO: 47712 - DNA, 606 bp, Neisseria meningitidis; identical to SEQ ID NO: 39881

SEQ ID NO: 47713 - DNA, 642 bp, Neisseria meningitidis
atgctgaaacccgaaaccatacacatatccggtcctgccggcattttagaaaccatccatatcccgtccgaacaagtactggcacgcggtgttgccgtcatcaatcatcccaaccccctccagggcggaacaaacaccaacaaagtcatccaaaccgccgccaaagccttaagcaaacttggcttccactgctacctgcccaaccttcgcggcgtaggcaacagcgaaggcacacacgattacggacgcggcgaaacgcaagactgcctcgccgtcatcgactatgcccgcgcccaacatcccgaagcccccgaatttgccttatccggcttctccttcggcggttatgtcgccacatttgccgcacaagcgcgcatacccgatttattgctgctcatcggcgcggcagtctgccactataccggccgccccgagccgtccgccgttcccaatgttgccaaaacgctgatgatacacggcgcggaagacgaagtcgtcgaaatcgaaaaagccctgaaatgggcggaaccgcaagatttgcccgtcattaccatcgccggttccacgcatttctttcacggcaaactcatcgtcctgcgcgacaccatcctccgcttcgcgcccgtatgcctgaacggataa

SEQ ID NO: 47714 - DNA, 771 bp, Neisseria meningitidis; identical to SEQ ID NO: 37153

SEQ ID NO: 47715 - DNA, 474 bp, Neisseria meningitidis
atgaaaggcgaccgtctggttatccgcgagctaaacaaaaacttaggcttgctgctggtaaccatcaaccaatatttccttcacgcccgtattttgaaaaactggggctttgaagaactgggcgaacatttcttcaaacagtccatcgttgaaatgaaagctgccgacgatttgatcgagcgcattctgttcctcgaaggtctgccgaacctgcaagaactgggcaagcttctgattggcgagtccaccgaagaaatcatcgcctgcgatttggaaaaagagaaagaaaaacatgaggcattgattgcggcaatttccgtggcagaagcgcaacaggattatgtcagccgtgatttgttggaaaaacaaaaagacaccaacgaagaacacatcgactggctcgaaacccagcaggaactgatcggcaaaatcggtttgccgaactacctgcaaacagcggcgcaagaggactaa

SEQ ID NO: 47716 - DNA, 402 bp, Neisseria meningitidis
gtgaagattaaaccattacaattttctaacaataatcacagattttacgtagacaaaatttgtgttaccgaacaagatgtgaacattttggcatccgaccgaaattatgaattaaatattgaaatatttattgacaatataattcattttcaaataacagatgaatcttataaagtaaaattttcagaatatttatttgaaaataaagaagaaaataattcagatgggaatcctactgcaaattattttttcgagataatagatgacagttatatggactggttgaaagaagaaagttttgatttttttgaaaagaaatattataaggcttatattttcttttttagcgattctgtaatagacgttatcagctcgacagaacctgtattttattcaaaataa

SEQ ID NO: 47717 - DNA, 879 bp, Neisseria meningitidis; identical to SEQ ID NO: 44706

SEQ ID NO: 47718 - DNA, 528 bp, Neisseria meningitidis; identical to SEQ ID NO: 39057

SEQ ID NO: 47719 - DNA, 486 bp, Neisseria meningitidis; identical to SEQ ID NO: 37074

SEQ ID NO: 47720 - DNA, 696 bp, Neisseria meningitidis; identical to SEQ ID NO: 45623

SEQ ID NO: 47721 - DNA, 1923 bp, Neisseria meningitidis; identical to SEQ ID NO: 45754

SEQ ID NO: 47722 - DNA, 408 bp, Neisseria meningitidis; identical to SEQ ID NO: 44814

SEQ ID NO: 47723 - DNA, 1296 bp, Neisseria meningitidis; identical to SEQ ID NO: 39281

SEQ ID NO: 47724 - DNA, 1161 bp, Neisseria meningitidis
ttgaacgaaaggtcgaaaaccatgaaaaaaacactggtggcggcggcaatcctgagcctcgccttgactgcgtgcggcggcggaagcgataccgccgcccaaaccccctccgccaagcccgaagccgaacaatcgggcaaactcaatatctacaactggtcggattatgtcgatcccgaaaccgtcgccgcctttgaaaaagaaaccggcatcaagacgcgttccgattattacgacagcaacgaaacactggaggcaaaagtcctgaccggcaaatccggctacgacctgactgcgccgtccatcgccaacgtcggccggcaaatcaaagcgggcgcgtatcagaaaatcgacaaggcgcaaattccccattacggcaacatcgataaagatttgttgaaaatgatggaagccgtcgatccgggcaacgaatacgccgtcccctatttctggggcatcaacaccttggcaatcaacacgcggcaggtgcaaaaggcattgggtacggacaagctgcccgaaaacgaatgggatttggtgttcaaccctgaatacaccgccaaactcaaatcctgcggcatcagctatttcgacagcgcaatcgaacagattcccttggcgttgcactatttgggcaaagatcccaacagtgagaatcccgaagacatcaaagccgccgtcgatatgatgaaagccgtccggggcgacgtgaaacgcttcagctcttccggctacatcgacgatatggcggcaggtaacctgtgtgccgccatcggttacggcggcgatttgaacattgccaaaacccgtgccgaagaagcggcaaacggcgtggaaatcaaagtattgaccccgaaaaccggcgtgggcgtgtgggtggattcctttatgattccgcgcgacgcgcaaaacgtcgccaacgcccaccgctatatcgactacacgctccggcccgaggtggcggcgaaaaacggcagcttcgttacctacgcgcccgccagccgtcccgcgcgcgagctgatggatgaaaaatacacctccgacgcatcgattttcccgaacaaagaactgatggaaaaaagtttcatcgtatcgcccaaatccgcagaatccgccaaattgggcgtgaagctgtggcaagggctcaaagcgggcaaataa

SEQ ID NO: 47725 - DNA, 291 bp, Neisseria meningitidis; identical to SEQ ID NO: 38283

SEQ ID NO: 47726 - DNA, 1179 bp, Neisseria meningitidis; identical to SEQ ID NO: 44657

SEQ ID NO: 47727 - DNA, 1104 bp, Neisseria meningitidis
atggaagccgaagtaatcaaccagctcaacaataccctgaatgatttggaaaagcgcagcgaagacatccgagtttatatggattatcagggtaagaaagaccgattggaagaagttatcggtctttccgaagaccccgaactttggaacgacccgaaacgcgcccaagaaatcggcaaagagcgcaaaatcctcgaaggcatcgtgttgacgctcgacaacatcgcttcgggcatcgaagacaaccgcatgctgattgaaatgaccgtcgaagaaaacgacgaagaaggttttgccgccgtgcaggaagatgtggcggggctggaaaaacagatggcggatttggagttcaaacggatgttcaaccagcccgccgacccgaacaactgctttatcgacatcaccgcaggcgcgggcggtacggaagcggaagactgggcgggtatgctgttccgcatgtacagccgctacgccgagcgcaaaggcttcaaaatcgaaatcctcgaagaagacgacggcgaaatcgcgggcatcaaccgcgcgactatccgagtggaaggcgaatacgcctatggtttgctgcgtaccgaaactggcgttcaccgcttggtgcgctattcaccgtttgactcgaacaacaaacgccatacttcgtttgcctccgtgttcgtttaccctgaaatcgatgattccatcgaaatcgaaatcaaccccgccgatttgcgtatcgacacctatcgcgcatcgggcgcgggcggtcagcacatcaacaaaaccgactccgccgtgcgtattacccacgagccgacggggattgtggtgcaatgtcaaaacgaccgttcgcaacacgccaacaaagccgccgcgatggaaatgttgaagtccaaactgtatgaattggaaatgcgcaaacgcaatgaagagaaacaggcgttggaagaaggtaaatccgatgtaggttggggtagccaaatccgttcgtatgttttggattcctcacgtatcaaagacttgcgtacaggctacgaagtcggcaacaccaaagccgtattggatggcgatttggacggctttatcgaagccagcctgaaacagggcgtgtag

SEQ ID NO: 47728 - DNA, 699 bp, Neisseria meningitidis; identical to SEQ ID NO: 45382

SEQ ID NO: 47729 - DNA, 1980 bp, Neisseria meningitidis
atggaatatatggatctcaaaagcctgcttaattttgggttgccaaatatgccaagaacagtaatagggctgagaaaaaaagcgcaaagggatggttggcaaacgagaaggcgtcaaggtaagggtggtggtgttgaatatgccctccctgccgaaatccgagcagccatcatgaaacggcagtcggacgagctggcggagaagatgccgaaaaccctgccccaagtcagaccggggacggcgatgtcggctcaggcactggctgaagcggccaagctgttgaacgagaaacaacggtcggtggcggatgcgcgatgtgcggtggtggcggcggtgttggggattaaataccaatacgattgctctgccaaggctgcggtggctcagtttttgggcttgctggcagaaggtaaattggacgcggtcacgcttgggaacttggaaaaggccaatgaccgcagccggtcggcgaaggttggcgaacgtactttagacggctggatttctgcttatttgaaagcggaaaacgcgacggagcggttggttgctttggctccgaagacgacgaaggcggtcaagccgattgaaagttacggatggttgccgatgtttatgcagtttcacaatattccgtccgcgccaaagctggcgcacagctaccgccggtttgtgcagtgggcggaagcggaaaatatgccggtcaatgatgtgcctaacttgagtatggtgcggcgcgtttgggacaagctgccgctgattatgcaggagcgcggcaggaaaacgggggcggcttataaatcgctgctgccttatgtgaaacgtgattggggggctttgaagccgaacgatgtttggatcggcgacggccacagctttaaggcgaaggtggctcatccggtacacggcaggccgtttaagccggaagtgacggtgattattgatggttgtacgcggtttgtggtgggtttttcggtgtcgttggctgaaagttgtgtggcggtatcggacgctctgcgtatcggggtcaagcactttggtttgccgattatctactactcggataacggtggcggccaaaccggcaagacgatagaccatgaaatcacgggtattacgtcccgattgggtatccggcatgaaacgggtatcgcgggcaacccgcaaggccgaggcatcatcgagcgatggtggaaagacaatctgattgagatggcgcgccagtatgagacgtttgcgggcgcggggatggacagcagtaccaagaacctgatgtaccgcaagatggaaagtgcgtttaacgctttggaaaaaggcaaggatttgacggaggaacaacagaaatatttgaaaaaactgccgggctggtcgcgttttatcgcggatgtggtcaagtgtatcgacgaatacaacaaccgcccgcacggcgagctgccccgacatccggacggcgggcattattcgccgaaggcttatcgggaaatgaggctggaacaggacggtatcgcgccggatatgttgtcggcgcaagagctggcgacgatgtttatgccgcaagaggtgcgaaaggtacagcgcggttggctggatttgttcaacaactcttatttttcggtggagctggcggagtatcacaaagacgaggtacgggtcagctacgatttgagcgatgcgtcggcggtcaatgtgtttgatatggacggcaagtttatcactaaggcgcaggccaacggcaatacccgcgaggctttcccgacggctcgtatcgaccaactggcggaaaaacgccgaaaaggcaaaatcaagcgggcggaaaatgcaatcaagctcgcaaatgcagaagtcaatcctgctttggaacaggctgcggtttgggacgagctgggacatttgggcggaaacgtcatcgaggcggagtatgcggtattgccgaaaacgggcacggacgacgggattttcttgtttgaggcggatagaagttaa

SEQ ID NO: 47730 - DNA, 423 bp, Neisseria meningitidis; identical to SEQ ID NO: 38711

SEQ ID NO: 47731 - DNA, 789 bp, Neisseria meningitidis; identical to SEQ ID NO: 44470

SEQ ID NO: 47732 - DNA, 222 bp, Neisseria meningitidis; identical to SEQ ID NO: 45776

SEQ ID NO: 47733 - DNA, 846 bp, Neisseria meningitidis; identical to SEQ ID NO: 44327

SEQ ID NO: 47734 - DNA, 273 bp, Neisseria meningitidis; identical to SEQ ID NO: 39724

SEQ ID NO: 47735 - DNA, 1554 bp, Neisseria meningitidis
atgacacaggccaaccgcgttatcattttcgacaccaccctgcgcgacggcgaacaatcgcccggcgccgctatgaccaaagaggaaaaaatccgcgtcgcccgccagctggaaaaattgggtgtggacatcatcgaagcgggttttgccgctgccagcccgggcgatttcgaggcggtcaatgcgattgcgaaaaccattaccaaatcaacggtctgttcattgtcccgtgccatcgagcgggacatccgtcaggcgggtgaggccgttgcgcccgcgccgaaaaaacgcatccacaccttcatcgccaccagccccatccatatggagtacaaattgaagatgaagccgaagcaggtgattgaggcggcggtcaaagcggtgaaaatcgctcgtgaatacaccgacgatgtggaattttcctgcgaagacgcgttgcgttcggaaatcgatttccttgccgaaatctgcggcgcggtaattgaagcgggcgcgaccaccatcaatattcccgataccgtcggctattccatcccgtacaaaaccgaagaatttttccgcgaactgattgtcaaaacgcccaacggcggcaaagtcgtttggtcggcacactgccacaacgatttgggcttggcggttgccaattcgcttgccgcattaaaaggcggtgcgcgtcaggtggaatgtactgtcaacggcttgggcgaacgtgcaggcaatgcttcggttgaagaaatcgtgatggcgttgaaagtgcgccacgacttgttcggcttggaaaccggcatcgataccacgcaaatcgtgccttcgtccaaactggtgtccaccattacgggctatcccgtgcagcccaacaaagccattgtcggtgccaatgccttttcgcatgaatcgggcatccatcaggacggggtgctgaaacaccgcgaaacttacgagattatgtccgccgaatcggtcggctgggcaacaaaccgtttgagcttgggcaaattgtccggccgcaacgccttcaaaaccaagctggcggatttgggcatcgagttggaaagcgaagaggcactgaacgccgcgtttgcccgcttcaaagaactcgccgacaaaaaacgcgaaatcttcgatgaagacctgcacgcactggtatccgacgaaatgggcagcatgaatgccgagagctacaaattcatctcccaaaaaatcagcaccgaaaccggcgaagagccgcgcgccgacatcgtgttcagcatcaaaggcgaagaaaaacgcgcttccgcaaccggttccggtccggttgatgcaattttcaaagcgattgaaagcgtggcgcaaagcggcgcgactttgcagatttattccgtcaacgccgtcacgcaaggtacggaaagccaaggcgaaaccagcgtccgtctggcacgcggcaaccgcgtcgtcaacggtcagggcgcggataccgacgttttggttgccactgccaaagcctacctttccgctttgagcaaactggaatttagtgccgccaaaccgaaagcgcaaggcagcggtacgatttga

SEQ ID NO: 47736 - DNA, 888 bp, Neisseria meningitidis; identical to SEQ ID NO: 39159

SEQ ID NO: 47737 - DNA, 672 bp, Neisseria meningitidis
atgatgaagacttttaaaaatatattttccgccgccattttgtccgccgccctgccgtgcgcgtatgcggcagggctgccccaatccgccgtgctgcactattccggcagctacggcattcccgccacgatgacatttgaacgcagcggcaatgcttacaaaatcgtttcgacgattaaagtgccgctatacaatatccgtttcgagtccggcggtacggttgtcggcaataccctgcaccctacctactatagagacatacgcaggggcaaactgtatgcggaagccaaattcgccgacggcagcgtaacctacggcaaagcgggcgagagcaaaaccgagcaaagccccaaggctatggatttgttcacgcttgcctggcagttggcggcaaatgacgcgaaactccccccggggctgaaaatcaccaacggcaaaaaactttattccgtcggcggtttgaataaggcgggtacaggaaaatacagcataggcggcgtggaaaccgaagtcgtcaaatatcgggtgcggcgcggcgacgatacggtaatgtatttcttcgcaccgtccctgaacaatattccggcacaaatcggctataccgacgacggcaaaacctatacgctgaaactcaaatcggtgcagatcaatggccagtccgccaaaccgtaa

SEQ ID NO: 47738 - DNA, 354 bp, Neisseria meningitidis; identical to SEQ ID NO: 41639

SEQ ID NO: 47739 - DNA, 285 bp, Neisseria meningitidis
atgttcggcggtcgtctgaaaaacgctccatccattaccgccaaacactttttgaaggaaaatatcatgaaatttattaacacctgccgtaaatacggcgcaaaactggctgttgtaacagctgtcccgctggctttggcgacacaggcaaatgcaacgttgcccgatacggcaaaaaacgctttggaagccgcaaaagccgacggtatggaagccggttggattgtagtgggcattttcgccgcgctttttgtcttttccatcgttaagagagtgatgaagtaa

SEQ ID NO: 47740 - DNA, 855 bp, Neisseria meningitidis; identical to SEQ ID NO: 44941

SEQ ID NO: 47741 - DNA, 558 bp, Neisseria meningitidis; identical to SEQ ID NO: 41264

SEQ ID NO: 47742 - DNA, 270 bp, Neisseria meningitidis; identical to SEQ ID NO: 43524

SEQ ID NO: 47743 - DNA, 780 bp, Neisseria meningitidis; identical to SEQ ID NO: 38884

SEQ ID NO: 47744 - DNA, 942 bp, Neisseria meningitidis
atgagacgtaaaatgctaaacgtaccaaaaggcaattatgatggtatgaagggttttaccattattgaatttttggttgcgggcatgctcagtatgattgtcctgatggcggtcggatcgagttacttcacatcccggaaattaaatgatgcggcaaacgagcgtctttccgagcaacaggatttgcggaatgcggcaacattgattgtccgcgatgcaagaatggcggggagcttcggttgtttcaatatgtccgagcatcctgcaattgatgttatttccgatacgacgcaacaaaattctcctttttccttaaaaaggaacggtatagataaacttattcccatagcggaatcttcaaatatcaattatcagaattttttccagtttggtagcgcattgatttttcaatacggaatcgatgatgttaatgcaagcaccgcgactaccgtcgtcagcagctgtgccgcaatatcgaaaccgggcaagcaaatccctactttagaagatgcaaaaaaagaattgaagattccggatcaggataaggagcaaaatggcaatatagcgcgtcaaaggcatgtggtcaatgcctatgcggtcggcaagattgccgatgaggaaggtttgttccgcttccaattggatgataagggcaagtggggtaatcctcagttgctcgtgaaaaaggttagacgtatgaaagtgcggtatatctatgttttcggctgtcctgaagatgacgatgccggcaaagaggaaacattcaaatatacggataaattcgacagctccacaaatgctgttacgcccgccggggtggaggttttattgagtagcggtactgataccaagattgccgcttcttcagacaatcatatttatgcttaccgtatcgatgcgacaatacgcgggggaaatgtatgcgcaaacagaacactttga

SEQ ID NO: 47745 - DNA, 1011 bp, Neisseria meningitidis; identical to SEQ ID NO: 38121

SEQ ID NO: 47746 - DNA, 462 bp, Neisseria meningitidis; identical to SEQ ID NO: 44882

SEQ ID NO: 47747 - DNA, 633 bp, Neisseria meningitidis
atgacggtatgggtcgggctgaccggcggaatcggcagcggcaaatcggcagccgcgcaatgttttgccgatttgggcgtgccgcgcatcgatgcggacgcggcggcgcactcgctgacggcttcagacggcatcgccctgccggaaatcaggcggctgttcggcgacaccgtttttgacacacagggtttgttgcggcgcgacatattgcgtaaagaagtctttgcctccccatcgcgaaaagccttgctcgaatccgtgatgttgccgctgattttctcagaaatcaaaaaacagcaagaaacctttaccgatgcggtttacggcattgtcgaaattccgctgctgacggaaaagcgtcaatttgtcagcctgatacggcgtgtcctgaccataagcgcacctttggaaaaacgtatcggcagggtgatggcccgcagcgggctgacgcgcggcgaggtggcggacatcatcagccatcaggcatccgaatccgaacgcctgctgcttgcagacgatgtgctgctcaatgacggcagcctcaaaagcctgtgtgagaaaacaatgcgcctgcacgcgttttattcagggattttcgcctcaaaaccaacacaaggaaaacacaatgactga

SEQ ID NO: 47748 - DNA, 1860 bp, Neisseria meningitidis; identical to SEQ ID NO: 45769

SEQ ID NO: 47749 - DNA, 879 bp, Neisseria meningitidis
ttgaccgtccgaacgaaaaagacggcgcattataccctattccattccgaccgaaaaccgaacatgactactctcaaacccgccctgcccgcttatctggacaacatccgcatcatcctcacgcgcaccagccatcccgccaacatcggctctgccgcgcgcgcgatgaaaacaatgggtctgcacaaactgaccatcgtcgccccaaatctgatggcaacgccgatgacggaaaacccgcccgtgtttgacccggagcatcctcaatcgtttaaattaccggaagaaagcttcatcctcgcttccggcgcggcagacgttttggaaaatgccaccattgccgcttctttggacgaagcccttgccgacaccaccatcgcctgcgccctgaccagccgccgccgcgaaattactgcgccgctgcaaaccccgcgcgatttggtatccgaattactgcagaccgcaaaccgaggcgagaaagtggcactggttttcggcaacgagactttcggcttgagcatcgaagaagtccaagcctgcaaccgactgatgaccatcaacggcaatcccgactatttctcgctcaacctcgcccaagccgtgcaggtcgtgtgctacgaaatcttcagccaaaccggttcgcccatgacccatcttcaacaagaagaccacgctgcgacccacgagcaaatcaaaggcatggtcgcccacatggaaagcgtgatgaacgacatcggctttttcaaccgccgcaacggcgagcgtctgatgcgccgtatgcagagcctgttcggacgcgccaacacgcaaaccgaagacatcgatatcctgcgcggttttttcaataccgtcagccatcgtatccataaaaaagactga

SEQ ID NO: 47750 - DNA, 1230 bp, Neisseria meningitidis
atggcgttcggcaaatccttatttcatgcgatcggccgcgtcagcctggtcaggcagattgccgccggtttggcgttgggcatcgtaatcggttcggtttccccgcaactgggcttggcggcaggcttgttcggcagcctgtttgtcggcgcgctcaaagcggtcgcgccggttttggtatttattttggtggcggccacaatcgcgcagcaccaaaaaggcaacaaggcgcatatcaggccgattatcgtcctttacctcatcggtacgttttccgcagccctgaccgccgtcatcgccggtatggttttcccgacgcacattgttttggcgggcgcgggcgatgtgtccgccgcgccgccttccggcattgtggaagtattgaaatcgctgctgatgaacctggtcgccaacccgattaacgcgattgccaatgccaactatatcggcattttggcttgggctttggttttgggcgcggcgttgcggaatcacggttcggacgttacgcggcaggtcgttgccgatttggcggaagcggtttccaccgtcgtgaaatggattatccgttttgcccctttgggcattttcgggctggtgtcgtccacaatcgcggagacgggtttcggcgcgctggcgggttatgcgaagctgcttgcggtactgttgggctgtatggcgtttatcgcgctggtggtcaatcccgccatcgtgtggtggaaaatccgccgcaacccttatccgctggtgtttacctgcctgcgcgaaagcggcgtgtatgccttctttacccgttcttccgccgccaatatccccgtgaatatggctttggcgaaaaaactggggctgcacgaagacacttattcgatttccatcccgttgggggcgaccgtcaatatgggcggcgcggcgattacgattaccgttttggctatggcggcggcgtacacccaaggcatacaggttgattttgccaccgcgctgctgttgagcctggtggcgacggtcagcgcgtgcggcgcgtccggtgtggcgggcggttcgctgctgctgattccgctggcgtgcagcctgttcggcatcagcaacgatgtcgctatgcaggtggtcgccgtcggctttatcatcggcgtgattcaggattcggcggaaacggcgttgaattcttcaaccgatgttttgtttaccgccgccgccgatttgggcagacagagaaaccgggcggaataa

SEQ ID NO: 47751 - DNA, 594 bp, Neisseria meningitidis; identical to SEQ ID NO: 38781

SEQ ID NO: 47752 - DNA, 591 bp, Neisseria meningitidis
atgcttttgtttatcgacaattacgacagttttacttacaacatcgtccagtatttcactgaattggggcaggaagttgccgtgcgccgcaacgatgatattacgttggaggaaatcgaggcattgaatccgcaatatctcgttatcggccccggtccgtgttcgcccaaagaagcggggatttccgtggcggcgatgcgccattttgccggcaggctgccgattatgggcgtgtgcctcgggcatcagacgataggcgaggcgttcggcggcaggatagtccgcgccaaaacgctgatgcacggcaaggtgtcgcccgtgtaccattcgggcaagggtatgtttaagggtttgcccaatccggttacctgtacgcgttatcacagcctcgttatcgaacgcggcacgctgcccgaatgtttggaaatcacggcatggacggaagacggcgagattatgggcgtgcgccataaggaatatgccgttgagggggtacaattccaccctgaagctctgctgaccgaatacggacatgatatgttgaacaatttttttatcgaatttcaaaacttcaaaccgcaaaaaatctga

SEQ ID NO: 47753 - DNA, 663 bp, Neisseria meningitidis; identical to SEQ ID NO: 45156

SEQ ID NO: 47754 - DNA, 1326 bp, Neisseria meningitidis; identical to SEQ ID NO: 44490

SEQ ID NO: 47755 - DNA, 729 bp, Neisseria meningitidis; identical to SEQ ID NO: 39209

SEQ ID NO: 47756 - DNA, 138 bp, Neisseria meningitidis
atgattgggctgtggtcggccaaaagccgtgaggcaagcgaacaggcagacttggcggcgtttgaatttgcggagggcgaactggccaattatcaggaaatgctgaaacggcacctgcaaaccaaaagtgtggaatag

SEQ ID NO: 47757 - DNA, 957 bp, Neisseria meningitidis
gtgatgggttttctgattggtttgagccgcaacctgacgcggtttacggctttggtcattttgcttgcgtcggcggttgcgtttatcggaccggcttcgtttgcgtgggttaagggcgatgttcaggtcttggtgctgggcatcattatgctgggtatggggatgactttgggcagggaggactaccggattttggcgcagcgtcctttggatgtgtttatcggtgcggcggcgcaatataccgtgatgccgttgctcgccatcggtattgccaagctgttcgacctttcgccggggctgactttggggctggtgttggtggggacgtgtccgggcggcgtgtcgtccaacattatgagtttccttgccaaaggcgatgtggcgttttcagtcggtatgacgacggtgtctacggtgctggctccggccgttacgcctttgtggatgacctgcctggtcggtcagacggtggatatggacggttgggggatgttccggtttatgctgctggtcacgcttttgccggtggtgctgggttcggcggcaaatatcctgctgcacggaaaacattggtttgaaaatgtccgtgccgttatgccgggcgtggcggtattggcatttgcctgcattgtcggcggcgtggcttcggttcacggacaccgttttgccgaatcggcgttggtaatggtgttggcgattgcggtacacaatatcgccggctatgtgtcaggctattacgccgccgcgctgtttggtatggatacggcaaaaaaacgcaccttggcaatcgaagtcggcgtgcagaatgccggtttggcaacaggattgagcgcgaaatttttcccaggcaaccccgaatcggcggttgcggcggcggtcgcctgcgtgtggcattcggtttcggggacggtattgggcaacttgttcgctctgtgggacaagcgtcgggacgcttag

SEQ ID NO: 47758 - DNA, 474 bp, Neisseria meningitidis
atgttatccgcagagtccttaaaacaaatcgacacagaactggcgaaatatcccgccgaccaacgccgttccgccatcatgggtgcgttgcgtatcgcccaaaccgaaaaaggctggctcgcccccgaaaccatcgcttttgttgccgactatatcggcatcacgcctgcacaagcctacgaagtcgctaccttctacaatatgtacgatcttgagcctgtcggcaaatacaaactgaccgtttgtaccaacctgccctgcgccctgcgcggcggtatggcgaccggcgaatacctcaaacaaagactcggtatcggctacggcgaaaccacgcccgacggcaaatttacccttgtcgaaggcgaatgcatgggcgcgtgcggtgatgcccccgttatgctggtcaacaaccacagcatgtgcagctttatgactgaagaggcgattgagaagaaactggcggagttggagtag

SEQ ID NO: 47759 - DNA, 369 bp, Neisseria meningitidis; identical to SEQ ID NO: 46057

SEQ ID NO: 47760 - DNA, 300 bp, Neisseria meningitidis; identical to SEQ ID NO: 39866

SEQ ID NO: 47761 - DNA, 813 bp, Neisseria meningitidis
atggacaaaatcagagttgccgccgtgcagatggtgtcgggcgtgtcgccggaaaccaacgtcgctgccatgaaacgcctggtcgcacgggcggcggagcagggtgtggattgggtgctgctgcccgaatattgggtgctgatgggcgcaaacgataccgacaaactcgcgcttgccgagcctttgggcggcggacgctttcagacggcattgagcgaaacggcgaaagaatgcggcgtggtgctgtttggcggaaccgtgccgctgcaaagccccgaggcgggcaaggtcatgaatactttattggtgtacgggcgcgacggcaaacggacggggctgtaccacaaaatgcacctcttcggcttttccggtttgggcgaacgctatgccgaagccgataccatccgcgcgggcggggaagtgccgcacttgtcggcagagggcgtgccggtggcagcaggtatttgttacgatgtccgctttcccgaatttttccgccgccagctgccgtttgacgtattgatgctgcccgctgcgtttacgcacacgacgggcaaggcgcattgggagctgctgctgcgcgcgcgtgccgtcgaaaaccaatgttacgtcgtggcggcggcacagggcggtttgcacgaaaacggacggcgcacgttcggacacagcatgattgtcgatccgtggggcgacgtattggacgtattacccgaaggcgaaggcatcgttacggcagacattgatgccaaccgcctgaacagcgtccgcaaccgcctgcccgccctgaaataccgggttttggatgccgtctga

SEQ ID NO: 47762 - DNA, 717 bp, Neisseria meningitidis
gtgataatgctgtttgaaggcttgccgtgtttggcggtttggtgcaaaaaccggctgtctgccgttttgcctgttggaggattgaacgtgtctgaaaatctgcttgaaatcgaaacccatcccttcgattccgtgttgccgccgaaggctgcggtcatgatgatggggacgtttccgcccaaggaagacaaacgcgcgatgcagtttcattatccgaatttccaaaacgatatgtggcgcgtttacgggctggtgtttttcggcgatgcggattatttcaaagtgccgtccaacggggaggctgcgcactctgaaaaagcgtttgatgccgagaaaatcaaggcgtttttgcacgaacgggggattgcgtcctgtccgaccgttttgaaggcggtacgtcagcacggcaatgcgtccgacaagtttttaaaggtagttgaaaccgtcgatttggcggcggtgttggcaaaaatacccgagtgccgccatatttgtacgacaggcggcaaggcgacggaaatcctgctcgatattcaaggtggcggcatcaaaatgccgaaaacgggcgaaaccgtgccgtttccgtttgccggacgggatttgacgctgacgcgcctgccttcgacttcgcgtgcctatcctttgagtttggcgaaaaaggcggcggcgtatcgggcgtttttcgaaatggcgggtttgtgtgaaaaacagttataa

SEQ ID NO: 47763 - DNA, 1977 bp, Neisseria meningitidis; identical to SEQ ID NO: 45611

SEQ ID NO: 47764 - DNA, 867 bp, Neisseria meningitidis; identical to SEQ ID NO: 37866

SEQ ID NO: 47765 - DNA, 1332 bp, Neisseria meningitidis; identical to SEQ ID NO: 44408

SEQ ID NO: 47766 - DNA, 474 bp, Neisseria meningitidis; identical to SEQ ID NO: 44352

SEQ ID NO: 47767 - DNA, 822 bp, Neisseria meningitidis; identical to SEQ ID NO: 44933

SEQ ID NO: 47768 - DNA, 432 bp, Neisseria meningitidis
atgaatttgtctgattttgcacccctcctgatacagatgaagcggcaacaggataaaaaaatgttatttgaagaaaatccgatagacgaacattttgcagagtatgaccgccgcacgggtgaaatccggctgtccggcagacatttcaataagcctgtgctgctgcatagggattctgccggcctctcgaaatggcagtcattgtcagaactgactccggataatctgttgtctgatgtcaaagcggatgactatccggaaatattgattatcgggacgggcgcggctcaggagtttatccatcccaaaatcatggcggatttttcccgaatcggaatcggcgtggaatgtatgaataccgattcggcattcaggacattggttttcctgcactcggaagggcgcagggcttgggcttggcttcagccgtaa

SEQ ID NO: 47769 - DNA, 240 bp, Neisseria meningitidis
gtgagggattctatgaaaaactggaagcaatttacatttttcgtaatattagtaatagcttgttatcaagtgctatattttttatcagatatgtttcttctcgactacattaacaaatatagttggaatttgaattttattcagggtactttgaattttttttcaatatatctgccatatgtttttgttagccgaatttttaggaataccaaccaagaaaaggagtataaaaatgattga

SEQ ID NO: 47770 - DNA, 564 bp, Neisseria meningitidis; identical to SEQ ID NO: 39293

SEQ ID NO: 47771 - DNA, 735 bp, Neisseria meningitidis
atgttaagcgcgcgctacctccacctgcacgaagctttgggtttgggtccgatgtggctgaaacaggccgctgccgtcctgccgcccaaaaacacacccgcaaccccggcacaggcacgtcctcaaaccgtccgcgccgccccgatccgcccttcccaaccccataacggtcaggcgcggctcgaaacgatgaaagcgttggaaaccgccgccgtacctacgcgcaaacccgcgcctgaaaccgaaacgcctctgcccggcctttcagacggcatcgcccccgttcccgccgcttcgggcatcaccaagcttgccgtcgtcagcctttgcccaccgatcgaggatgcggtttacgggcaactgttccacggcaaagcgggtgtcctgcttgacaacatactcaaagccgtaggactggatgccgcttatgtacacaagaccagctgggtgaaaaccgccgccgtcggcaacccgatgccgtctgaacaggccgtcgcgaatgcgctgggtcaaatcgccagggaactcgacggctgccgtgcccccgccgtccttttcctcgggcaggcttttgtccagcctgaacggcaaacgatgattgaaactttgtgcggcagccgtcccttcttcatcatcgaccatcccgctcggcttttacgccaacccgaacttaaagcccgaaactggcaggtgttgaaacagttgaaacacgccttgcaggcaggcggcagttga

SEQ ID NO: 47772 - DNA, 1437 bp, Neisseria meningitidis; identical to SEQ ID NO: 44194

SEQ ID NO: 47773 - DNA, 729 bp, Neisseria meningitidis; identical to SEQ ID NO: 44242

SEQ ID NO: 47774 - DNA, 504 bp, Neisseria meningitidis; identical to SEQ ID NO: 38374

SEQ ID NO: 47775 - DNA, 2628 bp, Neisseria meningitidis
atgcccgccggccgactgccccgccgatgcccgatgatgacgaaatttacagactgtacgcggtcaaaccgtattcagccgccaacccacaggggatacatcttgaaaaacaacagacaaatcaaactgattgccgcctccgtcgcagttgccgcatcctttcaggcacatgctggactgggcggactgaatatccagtccaaccttgacgaacccttttccggcagcattaccgtaaccggcgaagaagccaaagccctgctaggcggcggcagcgttaccgtttccgaaaaaggcctgaccgccaaagtccacaagttgggcgacaaagccgtcattgccgtttcttccgaacaggcagtccgcgatcccgtcctggtattccgcatcggcgcaggcgcacaggtacgcgaatacaccgccatcctcgatcctgtcggctactcgcccaaaaccaaatctgcactttcagacggcaagacacaccgcaaaaccgctccgacagcagagtcccaagaaaatcaaaacgccaaagccctccgcaaaaccgataaaaaagacagcgcgaacgcagccgtcaaaccggcgtacaacggcaaaacccataccgtccgcaaaggcgaaacggtcaaacagattgccgccgccatccgtccgaaacacctgacgctcgaacaggttgccgatgcgctgctgaaggcaaacccaaatgtttccgcacacggcagactgcgtgcgggcagcgtgcttcacattccgaatctgaacaggatcaaagcggaacaacccaaaccgcaaacggcgaaacccaaagccgaaaccgcatccatgccgtccgaaccgtccaaacaggcaacggtagagaaaccggttgaaaaacctgaagcaaaagttgccgcgcccgaagcaaaagcggaaaaaccggccgttcgacccgaacctgtacccgctgcaaatactgccgcatcggaaaccgctgccgaatccgccccccaagaagccgccgcttctgccatcgacacgccgaccgacgaaaccggtaacgccgtttccgaacctgtcgaacaggtttctgccgaagaagaaaccgaaagcggactgtttgacggtctgttcggcggttcgtacaccttgctgcttgccggcggaggcgcggcattaatcgccctgctgctgcttttgcgccttgcccaatccaaacgcgcgcgccgtaccgaagaatccgtccctgaggaagagcctgaccttgacgacgcggcagacgacggcatagaaatcacctttgccgaagtcgaaactccggcaacgcccgaacccgctccgaaaaacgatgtaaacgacacacttgccttagatggggaatctgaagaagagttatcggcaaaacaaacgttcgatgtcgaaaccgatacgccttccaaccgcatcgacttggatttcgacagcctggcagccgcgcaaaacggcattttatccggcgcacttacgcaggatgaagaaacccaaaaacgcgcggatgccgattggaacgccatcgaatccacagacagcgtgtacgagcccgagaccttcaacccgtacaaccctgtcgaaatcgtcatcgacacgcccgaaccggaatctgtcgcccaaactgccgaaaacaaaccggaaaccgtcgataccgatttctccgacaacctgccctcaaacaaccatatcggcacagaagaaacagcttccgcaaaacctgcctcaccctccggactggcaggcttcctgaaggcttcctcgcccgaaaccatcttggaaaaaacagttgccgaagtccaaacaccggaagagttgcacgatttcctgaaagtgtacgaaaccgatgccgtcgcggaaactgcgcctgaaacgcccgatttcaacgccgccgcagacgatttgtccgcattgcttcaacctgccgaagcaccgtccgttgaggaaaatataacggaaaccgttgccgaaacacccgacttcaacgccaccgcagacgatttgtccgcattacttcaaccttctaaagtacctgccgttgaggaaaatgcagcggaaaccgttgccgatgatttgtccgcactgttgcaacctgctgaagcaccggccgttgaggaaaatgtaacggaaaccgttgccgaaacacccgatttcaacgccaccgcagacgatttgtccgcattacttcaaccttctgaagtacctgccgttgaggaaaatgcagcggaaaccgttgccgatgatttgtccgcactgttgcaacctgctgaagcaccggccgttgaggaaaatgcagcggaaatcactttggaaacgcctgattccaacacctctgaggcagacgctttgcccgacttcctgaaagacggcgaggaggaaacggtagattggagcatctacctctcggaagaaaatatcccaaataatgcagataccagtttcccttcggaatctgtaggttctgacgcgccttccgaagcgaaatacgaccttgccgaaatgtatctcgaaatcggcgaccgcgatgccgctgccgagacagtgcagaaattgctggaagaagcggaaggcgacgtactcaaacgtgcccaagcattggcgcaggaattgggtatttga

SEQ ID NO: 47776 - DNA, 1557 bp, Neisseria meningitidis
atggatttcagttggttggcagaaccgcatacctggataggttttgccacgcttttggtgttggaagttgtattggggatagacaatcttgtctttgtggcgattttggcaaacaaggtccagcccgcacggcgcgaccgcgcacggattatcgggctggggctggcagtcgtcatccgcatcattatgcttgcttttatggcgcacatcatcacgctgaccgagccgctgttccaaatcggcggcctcgccgtttccggcaaggacatgattatgctcgcgggcggtattttcctgctttacaaagccaccaccgaactgcatgaacgcctcgaagggcacaaccgttttaccgttgccgacaaccaaaaaaaacacgcgccgttttggggcgtggtcgcgcaaatcctgatactggatgccgtgttttccatcgattcggtcattactgcggtggcgatggtcgatcatatcgtcgtggcgatgggtgcggtcgtcgtcgcgatggctgtaatgatttctgccagcaaactcttgaccgaatttgtcgacagacaccctaccgtcgtgatgctctgccttggttttttgttgatgatcggtttcagcctgattgccgaagccttccatttccacattcccaaaggctacctctacgccgccatcggcttctcgattttaatcgaattgtttaaccagatttcgcagcgcaacagccgcaaaaacgactacatcggcagctcgtggcgcaagcgcaccgccgaaaacgtcttgggtatgatgggtatacgcgaaagcgtgcttgccgacgcgggcggcgaatccggggacgacgcgcattttgaagaaaacgaaaaatcgatgatacgcagcgtgctgacgcttgccgaacgcccgattatgggggtgatgatcccacgccgcgacatcgaacggctggacatttcccaaagccgcgaagaacagtgtgcccaactgcaaaacacgccttacagccgcctgctcgttgtcggtaaggcgggcgtggacgaacctttgggctacatcaacaaaaaagacctgctgtcccaactgctggaaacaggcggtctcgacattcagacggcattgcgccagccactcgtcctgcccgacagcaccaccgcgctgggcgcaatcgaactcttccgccaaagcagcgcggattatgctttggtggtggacgagttcggcgcggtattgggcatggtaaccatgaaagacctgctcgaaaccatcgcaggcgagttccccgaagaatttgagcgcgaagaagaaccagccgttcaggggaatcccgatgaaagcctgacggtggaaggcgcgttggaatatgtggaactcgcaccgcaactcaacctgccgcagcaggaggaagatgccgatttccatacggttgccgggctgattatggaagaattgcaaaccatccccgatgtcggcgattttgccgatttccacggctggcggtttgaagtggtcgaaaaagaagggcagcgcatcgagcgggtcaaaatcaccaaattgcccgaagaataa

SEQ ID NO: 47777 - DNA, 282 bp, Neisseria meningitidis
ggctgtaaccttcaatcggaatttgttgcctgcgggatatgcggtatgaatgtttgggatatatggggcaggatggtggaaatctatcataagtataagaagccgtgcctggttttggcggtggattttgtgatgggtatggtattcatagagccgaatgaggagctgtgcatcggtagatgctatgcgcctatgtcggagtcccctgattttgctaacgctgttgcgatggctgttgctatgatctgtatcgtatggattgccgttttgtctatgactgat

SEQ ID NO: 47778 - DNA, 279 bp, Neisseria meningitidis; identical to SEQ ID NO: 37183

SEQ ID NO: 47779 - DNA, 324 bp, Neisseria meningitidis; identical to SEQ ID NO: 37053

SEQ ID NO: 47780 - DNA, 1635 bp, Neisseria meningitidis
atgataaaaccgaacctgaggccgaagctcggctcttccgcgctgattgccttcctttccctgtattcctcgctggtattgaattacgccttttttgccaaagttgtcgagcttcatccttttaacggcaccggggcggatatcttcctctatacgatgccggtggtgctgttttttttaagtaatttcgtttttcacgtcattgccctgcctttcgtgcataaggtattgattccgttgatattggttatcagtgcggcggtgtcttaccaagaaatatttttcaatatctatttcaacaagtcgatgttgaataatgtcttgcaaactacggctgccgaaagcgcgcgcctgattacgccgggctatgtgctgtggattgtatgtttgggcgtattgcccgcgctggcgtatatcgccgtcaaggttaaataccgcgtttggtataaggagcttttgacgcgccttgtgcttgccgccgtttcctttttgtgcgcgttgggcatcgcaatgttgcaatatcaggattacgcctcgtttttccgcaacaataaatcagtaacccatctgattgtgccgtctaatttcatcggcgcgggcgtgtcgaaatacaaagattggaagcgttccaatattccttatacgcaattggatatggcggtcgtgcaaaaccggccggccggcagcctgcgccgtttcgtggtgctggtcgtgggcgagaccacgcgtgccgccaactggggtttgaacggttacagccgccaaactacgccgctgcttgccgcgcgcggcgatgaaattgtcaatttcccgcaggtcagaagctgcggcacatcgaccgcgcactccctgccgtgtatgttctcaaccttcgaccgcacggattatgacgaaatcaaagccgaacaccaagacaacctgctggacatcgtgcagcgcgccggcgtggaagttacttggttggaaaacgattccggctgcaagggcgtgtgcggcaaagtgccgaataccgacgttacctcgctcaacctgcccgaatactgccgcaacggcgagtgcctcgacaatatcctgctgaccaagttcgacgaagtcctcaacaaaaacgataaagacgcggttttaatcctgcataccatcggcagccacgggccgacgtattacgaacgctataccgaagccgaacgcaaattcacgccgacctgcgacaccaacgaaatcaacaaatgcacccgcgccacgctggtcaacacttacgacaatacggttttgtatgtggaccagtttatcgacaaggttatccgcaaacttgaaaaccgcgacgatttggaaagcgtggtgcattatgtttccgaccacggcgaaagtttgggcgaaaacgggatgtacctgcacgccgcgccttacgccatcgcgccttccgggcagacgcatatcccgatggttatgtggttttccaaagccttccgccaacacgggggcatagatttccaatgcctcaaacaaaaagcggcggaaaacgaatattcgcacgaccactatttcagcacggtattggggctgatggacatttccaacagccaaacctatcggaaggaaatggatatattggcagcctgccgccgtccgcgctga

SEQ ID NO: 47781 - DNA, 2112 bp, Neisseria meningitidis
atgaaaatatcatttcatttagctttattacccacgctgattattgcttccttccctgttgctgccgccgatacgcaggacaatggtgaacattacaccgccactctgcccaccgtttccgtggtcggacagtccgacaccagcgtactcaaaggctacatcaactacgacgaagccgccgttacccgcaacggacagctcatcaaagaaacgccgcaaaccatcgatacgctcaatatccagaaaaacaaaaattacggtacgaacgatttgagttccatcctcgaaggcaatgccggcatcgacgctgcctacgatatgcgcggcgaaagcattttcctgcgcggttttcaagccgacgcatccgatatttaccgcgacggcgtgcgcgaaagcggacaagtgcgccgcagtactgccaacatcgagcgcgtggaaatcctgaaaggcccgtcttccgtgctttacggccgcaccaacggcggcggcgtcatcaacatggtcagcaaatacgccaacttcaaacaaagccgcaacatcggagcggtttacggctcatgggcaaaccgcagcctgaatatggacattaacgaagtgctgaacaaaaacgtcgccatccgtctcaccggcgaagtcgggcgcgccaattcgttccgcagcggcatagacagcaaaaatgtcatggtttcgcccagcattaccgtcaaactcgacaacggcttgaagtggacggggcaatacacctacgacaatgtggagcgcacgcccgaccgcagtccgaccaagtccgtgtacgaccgcttcggactgccttaccgcatggggttcgcccaccggaacgattttgtcaaagacaagctgcaagtttggcgttccgaccttgaatacgccttcaacgacaaatggcgtgcccaatggcagctcgcccaccgcacggcggcgcaggattttgatcatttctatgcaggcagcgaaaatggcaacttaatcaaacgtaactacgcctggcagcagaccgacaacaaaaccctgtcgtccaacttaacgctcaacggcgactacaccatcggccgttttgaaaaccacctgaccgtaggcatggattacagccgcgaacaccgcaacccgacattgggtttcagcagcgccttttccgcctccatcaacccctacgaccgcgcaagctggccggcttcgggcagattgcagcctattctgacccaaaaccgccacaaagccgacgcctacggcatctttgtgcaaaacatcttctccgccacgcccgatttgaaattcgtcctcggcggtcgttacgacaaatacacctttaattccgaaaacaaactcaccggcagcagccgccaatacagcggacactcgttcagccccaacatcggcgcagtgtggaacatcaatcccgtccacacactttacgcctcgtataataaaggcttcgcgccttatggcggacgcggcggctatttgagcatcaacacgtcgtcttccgccgtgttcaacgccgaccccgagtacacccgccaatacgaaaccggtgtgaaaagcagttggctggacgaccgcctcagcactacgttgtctgcctaccaaatcgaacgcttcaatatccgctaccgccccgacgagcaaaatgatccctacacttgggcagtcggcggcaaacaccgttcgcgcggcgtggaattgtccgccatcgggcaaatcatccccaaaaaactctatctgcgcggttcgttgggcgtgatgcaggcgaaagtcgttgaagacaaagaaaatcccgaccgagtgggcatccatttgaataacaccagcaacgttaccggcaacctgtttttccgttataccccgaccgaaaacctctacggcgaaatcggcgtaaccggtacaggcaaacgctacggttacaactcaagaaataaagaagtgactacgcttccaggctttgcccgagttgatgccatgcttggctggaaccataaaaatgttaacattacctttgccgcagccaatctgctcaatcaaaaatattggcgttcggatgccatgcccggcgcgccgcgcacttatacggcgcgggttaattacagtttctaa

SEQ ID NO: 47782 - DNA, 321 bp, Neisseria meningitidis; identical to SEQ ID NO: 38269

SEQ ID NO: 47783 - DNA, 372 bp, Neisseria meningitidis; identical to SEQ ID NO: 39277

SEQ ID NO: 47784 - DNA, 696 bp, Neisseria meningitidis; identical to SEQ ID NO: 44720

SEQ ID NO: 47785 - DNA, 1245 bp, Neisseria meningitidis; identical to SEQ ID NO: 45677

SEQ ID NO: 47786 - DNA, 960 bp, Neisseria meningitidis
atgatgaaagtcctctttatcgccgacccgatggcaagtttcaaaacctacaaagacaccacctacgccatgatgcgcgagatggcaaaacgcggttggcggctgtttcataccttgagcggggaattgtcggttaaaaacggtctggtggttgctgatgcgtctgcttttgagtttctcggcgcacaagacgaccacgacaaaaactggtttgccgccgccgacaaagttcagacggcattgaaagcatttgatgccgtgattatgcgtaccgatccgccgttcgatatgcaatacctctacgccacacagcttctgacgctggcggagcagcagggcgcgaaggtctttaacagcggacaggcgatgcgtgatttcaatgaaaaactggcgattttgaacttcagccgctttaccgcgcccacgctggtaacgacccgttccgccgatgtccgcgcatttttgaaagaacacggcgacatcatcattaaaccgctggacggtatgggcggtatgggtattttccgcctgaccgaaaaagatcccaacatcggcagcatcctcgaaaccctgatgcggcttgattcccgcaccattatggcgcaacgctacattcccgaaatcgtacacggtgacaaacgcatcctgattatcggcggcgaagtcgtcccctatgctttggcgcgtatcccgcaaaacggcgaaacacgcggcaaccttgcggcaggcggacgcggcgtggcgcaggaattggacggacgcgaccgcgaaattgccgaaacgctcgcccccgaactcaaacggcgcggcatcctgctggccggtttggacgttatcggcagcaacctgaccgaagtcaacgtaaccagcccgaccggattccaagaaattatgaaacaaaaaggtttcgacgtggcggcaatgtttgccgatgccgttgccgcgtggtcggtacgttaa

SEQ ID NO: 47787 - DNA, 285 bp, Neisseria meningitidis; identical to SEQ ID NO: 46657

SEQ ID NO: 47788 - DNA, 612 bp, Neisseria meningitidis; identical to SEQ ID NO: 39023

SEQ ID NO: 47789 - DNA, 876 bp, Neisseria meningitidis; identical to SEQ ID NO: 37005

SEQ ID NO: 47790 - DNA, 717 bp, Neisseria meningitidis; identical to SEQ ID NO: 44750

SEQ ID NO: 47791 - DNA, 591 bp, Neisseria meningitidis; identical to SEQ ID NO: 38699

SEQ ID NO: 47792 - DNA, 792 bp, Neisseria meningitidis; identical to SEQ ID NO: 39568

SEQ ID NO: 47793 - DNA, 1152 bp, Neisseria meningitidis
ttgacggataaaagctgcaatttggatataagcatacggcaggaaagaaaaaaaactttgattttttcttttttctctggtgcgggctttttggatttgggcttcgagttgtcaggatttgatattgccttcgttaatgaagtccatcccccatttttggaagcatataaatactctcgaagcagaatggatatcccgaagcctaaatacggatattttaagggtagtattgacgaatgtctttatgctgagaaagcaaaagatttggctggctgggttaaaaaggaaaaacaaaatggcattattgtcggatttattggaggtcccccatgtccggatttttctattgcagggaaaaataaaggtaaggatggggagaatggtaagttatcacaaagttatgtggatttaatttgtaaaaaccagcctgatttttttgtatttgagaatgtgaaaggactatataggactgccaagcatagggagtttttcaatgcgttgaaacggcaactttctgattttggatatgtatgcactgaaaaactcatcaatgccatcgaatacggcgtaccgcaagacagggaaaggattatcctagtgggttttttgagtcagcatgttgatgctttgcagaagtttgattgggatgctcatatttcattccctgatgccttggaaaaagattggcctacgacagaagaagtaggaagagtggtcagtcagcctgcaaacatataccctgagttgaccgttcagtattggttcaatcgcaatggggtggatacacacccgaatgcgagcaaacacttccaaccaagagcgggtttagaaaaatttcaaaccataagcgaaggggatgataaaaagaagtcctataaacgcctacaccgctggcgttattctccgactgctgcatacggaaacaacgaagtccacattcatccctatctgccaagaaggatttccgctgcggaggcattggcaatacagtctttgccgaaggagtttgagctgcctgataacatgacattgagcaatatgttcaaaactataggcaacggtgtaccgtttttggcagcaaaagggatagcgatgacattaaaatcttatttggagaatcactatgagcggacaaaaactgacggctgctaa

SEQ ID NO: 47794 - DNA, 579 bp, Neisseria meningitidis; identical to SEQ ID NO: 45076

SEQ ID NO: 47795 - DNA, 663 bp, Neisseria meningitidis; identical to SEQ ID NO: 45178

SEQ ID NO: 47796 - DNA, 1647 bp, Neisseria meningitidis; identical to SEQ ID NO: 45597

SEQ ID NO: 47797 - DNA, 768 bp, Neisseria meningitidis
gtgccggaaaggaataccgccgtgcagcctgaaacctccgcccaataccagcaccgtttcgcccaagccatacgcgggggcgaagccgcagacggtctgccgcaagaccgactgaacgtctatatccgcctgatacgcaacaatatccacagctttatcgaccgctgctataccgaaacgcggcaatactttgacagcgaagaatggagccgtctgaaagaaggtttcgtccgcgacgcgcacgcccaaacgccctattttcaagaaatccccggcgagttcctacaatattgccaaagcctgccgcttttagacggcattttggcactgatggattttgaatatacccaattgctggcagaagttgctcaaattccggatattcccgacattcattattcaaatgacagcaaatacacaccttcccctgcggcctttatccggcaatatcgatatgatgttaccgatgatttgcatgaagcggaaacagccttgttaatatggcgaaacgccgaagatgatgtgatgtaccaaacattggacggcttcgatatgatgctgctagaaataatgggttcctccgcgctttcgtttgacaccctcgcccaaacccttgtcgaatttatgcctgaggacgataattggaaaaatattttgcttgggaaatggtcaggctggactgaacaaaggattatcatcccctccttgtccgccatatccgaaaatatggaaggcaattccccgggccaaaaccatctatccgcataa

SEQ ID NO: 47798 - DNA, 501 bp, Neisseria meningitidis
ttgttaatccactatacctccgccaatgcccatgagtgcaaacacctgtcgccgttgttagaagggatagctgaaggtacgaccgtctatgccgacaaaggctatgacagtgcggaaaaccggcaacatctggaagaacatcagttgttggacggcattatgcgcaaagcctgccgcaaccgtctgctgacggaagtgcaaaccaaacgcaaccggtatttgtcgaagacccgttatagtggattaaatttaaatcaggacaaggcgacgaagccgcagacagtacaaatagtacggcaaggcgaggcaacgccgtactggtttaaatttaatccactatatgtggtcgaacagagcttcggtacgctgcaccgtaaattccgctatgcccgggtagcctatttcgggctgattaaagtgagtgcgcaaagccacctgaaggcgatgtgtttgaacctgttgaaagcggccaacaggctaagtgcgcccgctgccgcctaa

SEQ ID NO: 47799 - DNA, 801 bp, Neisseria meningitidis
atgaatccagcccccaaaaaccttctcttctcttctcttctcttctcttctcttctcttctcttctcttctcttctcttccgcagcgcaggcggcaagtgaagacggcagccgcagcccgtattatgtgcaggcggatttagcctatgccgccgaacgcattacccacgattatccgaaagcaaccggtgcaaacaacacaagcacagtaagcgattatttcagaaacatccgtgcgcattccatccacccccgagtgtcagtcggctacgatttcggcgactggagaatagcggcagattatgccagttacagaaaatggaacaacaataaatattccgtcaacacaaaagagttggaaaacaagcataacaataagaaagacctgaagacggaaaatcaggaaaacggtacattccacgccgcttcttctctcggcttatccgccatttacgatttcaaactcaacgataaattcaaaccctatatcggtgcgcgcgtcgcctacggacacgtcagacacagcatcgattcgaccaaaaaaacaacagaggttgttacctccacccatggtggtgctgacacaaaacctacgatttataatggggaaagtacgcaaaacgcctatcacgaaagccacagcatccgccgcttgggtcttggtgtcgtcgccggtgtcggtttcgacatcacgcccaagctgaccctggacaccggataccgttaccacaactggggacgcttggaaaacacccgcttcaaaacccacgaagtctcattgggcatgcgctaccacttctga

SEQ ID NO: 47800 - DNA, 1218 bp, Neisseria meningitidis; identical to SEQ ID NO: 44261

SEQ ID NO: 47801 - DNA, 1434 bp, Neisseria meningitidis
atgaacgaatattcccaattaatcaagcatcccgatatttccctttccccgatttcagacagcatcgggatcggcaatccggcgacgggtgaaattttggcgtatgtccgcaacacgggttcggacaaactgaaaaacctgattcaaaaggcggcggcagcgcaaaaattatgggcggcgaaaactgctttggaacgcgccgacatattgtggcgttggtattttttagttaaagaaaacaaagaagcactggcgcgcctgatgacgatggagcagggcaaaagcctgaccgaggcgcgcggcgagattgattatgcggcttcgtttgtgcgctggtttgcggaagaggcgcggcggattgacggcgatgtgttaacgagtgtaaaagcgtcgcaaaaactggttgtgttgaaacagcctgtcggcgttaccgccgcgattacgccgtggaacttcccatctgcgatgattgcgcgcaaggccgcgcctgctttggcggtgggttgcgcgatgatcgtcaaacccgcatcgctcacgcctttgagtgcgtatgccttggcttcgttggcttacgaagcgggcataccgcaggatttgttgcctgttgtcagcggcagtgcttcggaaatcggccatgaatttgctacgaacccgattatccgcaaaatcagcttcaccggctcgaccgaagtcggcgcaaaaatttttgccgacagcgcggcggacattaaaaaactcagtttggagctgggcggcaacgcgccgtttatcgtgtttgacgatgccgatttggacaaagccgtcgaaggcgcgctcgccagcaagttccgtaacagcggtcagacctgcgtctgcaccaaccgcgtttacgctcaatccgccatttacgacgaattttgccgcaaattgagtgaaaaagcagccgcgctcaaattgggcaacggcttggaggatggtgtgaaccaagggccgctgattgaggaaaaagcggtggagaaagtcgagcagcacatcgccgacgcgcttgctaaaggtgcaagctgcctgaccggcggcaaacgcagcgcgttgggcggaacgtttttcgaaccgactgttttaagcggcgtaacggcgcaaatggcggtggcacgcgaagaaaccttcgggccgttgtgtccggtattccgttttgaaaccgaagccgaggtcatcgaggctgcgaacaatacggaatacggtttggcagcttaccttttcaccgccgacaccgcccgccaatggcgcgtcggcgaagccttggaatacggtatggtcggcatcaatacgggcttaatcagcaatgaagcggcaccgttcggcggcgtgaaacgtagcggtttgggacgtgaaggcagcaaatacggtgcggacgaatatctagaattgaaatatctgtgtatggatgtcgggtga

SEQ ID NO: 47802 - DNA, 870 bp, Neisseria meningitidis
atgaaatttatattttttgtactgtatgttttgcagtttctgccgtttgcgctgctgcacaaacttgccgacctgacgggtttgctcgcctaccttttggtcaaaccccgccgccgtatcggcgaaatcaatttggcaaaatgctttcccgagtgggacggaaaaaagcgcgaaaccgtattgaagcagcatttcaaacatatggcgaaactgatgcttgaatacggcttatattggtacgcgcctgccgggcgtttgaaatcgctggtgcgttaccgcaataagcattatttggacgacgcgctggcggcgggggaaaaagtcatcattctgtacccgcacttcaccgcgttcgagatggcggtgtacgcgcttaatcaggatgtaccgctgatcagtatgtattcccaccaaaaaaacaagatattggacgcacagattttgaaaggccgcaaccgctacgacaatgtcttccttatcgggcgcaccgaagggctgcgcgccctcgtcaaacagttccgcaaaagcagcgcgccgtttctgtatctgcccgatcaggatttcggacgcaacgattcggtttttgtggattttttcggtattcagacggcaacgattaccggcttgagccgcattgccgcgcttgcaaatgcaaaagtgatacccgccatccccgtccgcgaggcggacaatacggttacattgcatttctacccggcttgggaatcctttccgagtgaagatgcgcaggccgacgcgcagcgcatgaaccgttttatcgaggaacgcgtgcgcgaacatcccgagcagtatttttggctgcacaagcgtttcaaaacccgtccggaaggcagccccgatttttactga

SEQ ID NO: 47803 - DNA, 840 bp, Neisseria meningitidis; identical to SEQ ID NO: 38805

SEQ ID NO: 47804 - DNA, 1476 bp, Neisseria meningitidis; identical to SEQ ID NO: 39164

SEQ ID NO: 47805 - DNA, 717 bp, Neisseria meningitidis; identical to SEQ ID NO: 40289

SEQ ID NO: 47806 - DNA, 1839 bp, Neisseria meningitidis
atgtgcggtatcgtcggcgccatccgcgcccatcacaacgtcgtcgattttctgaccgacggtctcaaacgcctcgaataccggggttatgactcatcaggcattgccgtcaacaccgacggcaaaatcaaacgcgtgcgccgcgtcggacgcgtgcagcttatggaggacgcggcacgcgaaaaaggcatcagcggcggcatcggcatcgggcatacgcgctgggcgacacacggcggcgttaccgagccgaacgcccacccgcacatcagcggcgggatgattgcggtcgtccacaacggcatcatcgaaaactttgaaagcgaacgcaaacgcttggaaggtttgggataccgttttgaatcgcaaacggataccgaagtcatcgcacacagcatcaatcacgaatacgcgcaaaacggcggcaggctgtttgaagcggtacaagaagcggtcaaacgtttccacggcgcatacgccatcgcggttattgcccaagacaagcctgatgaattagttgtggcgcgtatgggctgcccgcttttggtcgctttgggcgacgatgaaacctttatcgcttcggacgtatccgccgtcatcgcctttacgcgccgcgtggcgtacctcgaagacggcgacatcgcgctgctggcttcagacggcatcaaacggctgaccgataaaagcggcctgcctgccgaacgcaaagtcaaggtatccgaactctcgctcgcctctttggaactgggaccgtacagccactttatgcaaaaggaaatccatgagcagccgcgcgcgattgcagacacggcggaggttttcctcgacggcggcttcatccccgaaaacttcggcaaaaacgccaaaagcgtgtttgaaagcatccgcagcgtcaaaatccttgcctgcggcacgtcctattacgccgcgctgaccgccaaatattggttggaatccatcgccaaaatcccggccgatgtcgaaatcgccagcgaataccgataccgcagcgtgattgccgatccggaccaactggtcattaccatttcccaatccggcgaaacgctggacacgatggaggcgttgaaatacgcaaaatccttgggacaccgccacagcctctccatctgcaacgtgatggaatccgccctgccgcgcgaaagcagcctcgtgctttatacccgtgccggtgcggaaatcggcgtcgcctcaaccaaagcatttaccacgcagctggttgcgctgttcggtttggcggtaacgctggcgaaagtgcgcggtttggtttccgaagaagacgaagcacgttacaccgaagaactccgccagcttcccggcagcgtgcagcacgctttaaacctcgaaccgcaaattgccgcctgggcgcaacagtttgccaagaaaaccagcgcgctgtttttggggcgcggcatccattacccgattgccctcgaaggcgcgttaaaactgaaggaaatcacctacatccacgccgaagcctatcctgccggcgaactgaagcacgggccgcttgccttggtggacgaaaacatgcccgtcgtcgtcatcgcacccaacgacagcctgttggacaaagtcaaagccaatatgcaggaagtcggcgcgcgcggcggcgaacttttcgtctttgccgacctcgacagtaattttaatgccaccaaaggtgtgcacgttatccgcgcaccgcgccacgtcggcaaactgtcccccgtcgtgcatactatccccgtgcagctcctcgcctaccacaccgccctcgcacgcggtaccgatgtggacaagccgcgcaacctggcgaaatccgtaaccgtcgaataa

SEQ ID NO: 47807 - DNA, 1317 bp, Neisseria meningitidis
atgatgctgacgtttatcggactgctgattatcggggtcatcgtatggttgctgctgacggaaaaagtgtcgcccatcatcgcattaatcttggtgccgctgtttggggcgttgctggcggggtttgatgtatcccaattaaaagaattttattcgggcggcaccaaatcggtgatgcagattgtgattatgtttatgttttccattttgttttttggaatcatgaacgatgtggggctgttccgtccgatgataggcggtttgattaagctgactcggggtaatatcgtggcagtgagtgtggggacggtcttggtgtcggtggtggcgcagttggacggggcgggtgcgacgacgtttttattggtcgtccccgcccttttgccgctttacaagcgtctgcatatgaatccttacctgctgtttttgctgctgacttccagtgcgggattgattaaccttctgccgtggggcgggccgactgggcgggttgcaagcgtgttgggcgcagatgtgggcgaattgtataaacctttgttgacggtgcaaattatcggtgtagtgtttatccttgcgctgtccctgcttttgggtgtgcgtgaaaaaaggcggattgtccgggagttgggcgcgttgcccgccgtggcggatttgataaagccggtgcctttgtcggaagaagaacaaaaattggcgcgtccgaaactgttttggtggaatgtcctgctgtttttggcggcgatgagcctgcttttttcgggcatcttcccgccgggttatgtatttatgctggctgcaacggcggcgttgcttttgaattaccgcagcccgcaggaacagatggagcggatttatgcccacgccggcggcgcggtgatgatggcgtccattattttggcggcaggtacgtttttggggattttgaagggtgcggggatgttggacgcgatttccaaagaccttgtgcatatcctgccggacgcgctgctgccttatctgcatattgccatcggtgtgttgggcattccgcttgagttggttttgagtacggacgcttattatttcggactgtttccgattgtggagcagattacctcgcaggcgggcgtggcgcctgaagcagcaggttatgcgatgttgatcggcagtatcgtcggcacttttgttacgccgctttcgccggctttgtggatgggcttgggtttggcgaaattgtcgatgggcaaacacatccgttattcgtttttctgggcgtggggtttgtcgctggcgatattggccagttcgatagcggcaggaatcgtgcctctgccgtaa

SEQ ID NO: 47808 - DNA, 834 bp, Neisseria meningitidis
atgttcatcagccgcctgccgcgcacgtttgcgattgtgctgacgggcgcgtcgatggcggtggcggggatgattatgcagattttgatgcgtaaccgttttgtcgagccttctatggcgggcgcgggtcagagtgcggctttgggtttgcttctgatgtccctgctgctgcctgccgcgccgctgccggtcaaaatgtcggttgccgccgttgccgcgttaatcgggatgttggtgtttatgatgcttatccgccgcctgccgccgaccgcgcaactgatggtgccgctggtggggattattttcggcggtgtgattgaggcagtggcgacgtttgtcgcgtatgagtttgagatgctgcaaatgctcggcgtgtggcagcagggcgatttttcgagcgtgctgctggggcggtacgagctgctttggattacgggcggtttggcggtgtttgcctatctgattgccgaccggctgacgattttggggctgggcgagacggtcagcgtgaatttgggtttgaaccggacggcggtgttgtggtcggggctgattattgtggctttgattacgtcgctggttatcgttacggtcggcaatattccgtttgtcgggctggtcgtgccgaacatcatcagccgcctgataggcgacaggctgcgccaaagcctgcctgcggtggctttgttgggcgcgtctttggtgttgctgtgcgacattatcggacgcgtgattgtgtttccgtttgaaattccggtctctacggtttttggtgtgttggggacggctttgtttttgtggcttttattaaggaaacctgctcatgccgtctga

SEQ ID NO: 47809 - DNA, 1539 bp, Neisseria meningitidis
atgttccattccatcgaaaaatacagaacgcccgcccaagtccttttggggctgattgcattaaccttcgtcggcttcggggtcagcacggtatcccatccgggtgccgactacatcgtccaagtgggcgacgaaaaaatcagcgaccactccatcaacaacgctatgcaaaatgaacaggcggacggcggcagcccttcgcgcgacgcggtgttccaatccctgctgcaacgcgcctacctgaaacagggcgcgaagctgatgggcatttcggtttcttccgaacaaatcaagcagattatcgtggacgatcccaatttccacgacgcaaacggcaaattcgaccacgcgcttttaaaccgctacctttcccaacgtcatatgtctgaagaccagtttgtcgaagaaatccgcgatcagtttgccttgcagaatttggtaaacctcgtccaaaacggcgtattggtcggcgacgcgcaggcggaacagctgatcaggctgacgcaggtcaaccgcaccatccgttcgcacactttcaaccccgacgaattcatcgcccaagtcaaagtgtctgaagccgatttgcagaagttttataacgcaaacaaaaaagactacctgcttcccaaagcggtcaaattggaatatgtcgccttgaatctgaaagactttgcagacaaacagaccgtcagcgaaacagaagtgaaaaatgcgtttgaagagcgcgtggcgcgtttgccggcaaatgaagccaaaccttctttcgagcaggaaaaagccgccgtagaaaacgaattgaaaatgaaaaaggcggttgccgacttcaataaggcaaaagaaaagctgggcgatgacgcgttcaaccatccttcctcgcttgccgaagccgccaaaaacagcggtttgaaagtcgaaacccaagaaacttggctgagcaggcaggatgcgcaaatgtccggtatgcccgaaaacctgatcaatgccgttttcagcgacgacgtattgaagaaaaaacacaattcagaagtgctgaccatcaacagcgaaaccgcgtgggtcgtccgcgccaaagaagtccgcgaagagaaaaccctgccgtttgccgaagccaaagacgcggtacgtcaggcttatatccgtaccgaagccgccaaacttgccgaaaacaaggcaaaagacgtgcttacccaactgaacggcggcaaggctgttgacgtgaaatggtcggaagtgtccgttttgggcgcacagcaggcaaggcagtccatgccgcccgaggcttatgcggaactgctgaaagcaaaaccggcaaacggcaaacccgcctacgtcaggctgatcggtctgccggcacccgtgattgtcgaagtacaggctgtaaccccgccggatgatatcgccgcacagcttccgcttgcaaaacaggctttggcgcaacagcagtctgccaatactttcgacttgttgatacgttatttcaacggcaaaatcaaacagaccaaaggagcgcaatcggtcgacaacggcgacggtcagtaa

SEQ ID NO: 47810 - DNA, 1071 bp, Neisseria meningitidis
atgaccaaacatatcgccatcctccgaggtgacggcatcggtcccgaaatcgtcgccgaaaccgtccgcgtactcgacaaactcatcgcccaaggtttggatgccggctacgaatacgccccattgggcggcgaagcctatgacgaatacggtcatccttatcccgaatttacgcaaaacctctgccgcaaagccgatgccgtcctgcttggtgcagtcggttctcctcaatacgacaacctcgaccgtccgttgcgccctgagcgcggcctgttggcaatccgtaaggatttgaacctgtttgccaatttgcgtcctgctgttttatatcccgaattagccaacgcctccacgctgaagcctgaaatcgttgccggtttggatattttgattgtgcgcgaactcaccggcgacatctatttcggcgaaccgcgcggcatccgcgttctggaaaacggcgaacgcgaaggctacaacaccatgaaatacagcgaaagcgaaatccgccgtatcgcccacgtcgctttccaatccgcccaaaaacgcagcaaaaaagtctgctccgtcggcaaagccaacgttttggaaaccaccgaactgtggcgcgaaatttttgaagaaatcggcaaacaataccctgatgtcgagctttcccatatgtatgtggacaatgccgctatgcagttggtacgcgcgcccaaacaatttgacgtgattgccaccggcaacatcttcggcgatattttatcggacgaggcctctatgctgaccggctccatcggtatgctgccttctgcttctttggacgaaaacggcaaaggcctgtacgaaccgtctcacggctccgctcccgacatcgccggacaaaacaaagccaacccgctggccaccatcctctcgctcgcaatgttgctgcgttacagcctgaacgacgaagcgcgcgcgcaacaagttgaaaacgccgtccaaaaagtgctgcaacaaggcttgcgtaccagcgacatttacgaagaaggcacaaaactcgtttcctgctccgaaatgggcgatgcggtactcgccgccttgtaa

SEQ ID NO: 47811 - DNA, 1773 bp, Neisseria meningitidis; identical to SEQ ID NO: 44305

SEQ ID NO: 47812 - DNA, 1188 bp, Neisseria meningitidis; identical to SEQ ID NO: 46933

SEQ ID NO: 47813 - DNA, 2751 bp, Neisseria meningitidis; identical to SEQ ID NO: 45512

SEQ ID NO: 47814 - DNA, 1125 bp, Neisseria meningitidis
atgtttaaaaaattcaaaccggtattgttgtcattttttgcgcttgtatttgccttttggctgggaacgggtattgcctatgagattaatccgcgttggtttttgagcgatacggcaactgaaaatccgaatgcttttgtggcgaaacttgcccgcctgttccgaaatgccgacagggcggttgtcatcgtgaaggaatcgatgaggacggaggaaagtcttgccgaaactgtggatgacggtccgttgcagtcggagaaggattatctcgcgctcgctatccggctcagtcgtttgaaagaaaaggcgaaatggtttcacgtaacggagcaggaacatgggaaagaggtttggctggattaccatatcggcgagggcggtttggttgcggtttcgctttcgcaacgctcgccggaagcgtttgttaatgccgaatatctgtatcggaacgatcgtccgttttctgtaaatgtgtacggcggaacggctcacggagaaaattatgaaacgacaggagaatatcgggttgtttggcaaccggacggttcggtatttgatgcgtcggggcgcggaaaaatcggggaagatgtttatgagcattgcctcgggtgttatcagatggcccaggtatatttggcgaaataccgggatgtcgcgaatgacgagcagaaagtttgggacttccgcgaagagagcaaccggattgcatcagactcgcgcgattatgtgttttatcagaatatgcgggaattgatgccccgggggatgaaggcaaacagtcttgtggtcggctatgatgcggatggtctgccgcagaaagtctattggagtttcgacaatggaaaaaaacgccagagtttcgaatattatttgaaaaacggaaatctttttattgcacaatcttcgacggtagcattgaaagcggatggcgtaacggcggatatacagacctatcatgcgcaacagacgtggtatttggatggcgggcggattatccgcgaagagaaacagggagacagactgcctgattttcctttgaacttggaaaatttggaaaaagaggtgcgccgttatgcagaggctgcggcgagacgttcgggcggcaggcgcgacctttctcactga

SEQ ID NO: 47815 - DNA, 1569 bp, Neisseria meningitidis; identical to SEQ ID NO: 36917

SEQ ID NO: 47816 - DNA, 2376 bp, Neisseria meningitidis
atgaataaaaatattaaatctttaaatttacgggaaaaagacccgtttttaagtcgtgaaaaacagcgttatgaacatcctttgcccagtcgggaatggataatcgaattgttggagcgcaaaggtgtgccttcaaaaatcgaatcgcttgcgcgcgagctgtcgattacggaagacgagtatgtctttttcgaacgccgtctgaaggcgatggcgcgggacggtcaggttttaatcaaccgccggggcgcggtttgcgcggcggacaaattggatttggtcaaatgccgtgtcgaggcgcacaaagacggtttcggttttgccgtgccgctcacgcccgccaaagacggtgattttgttttgtatgaacgccagatgcgcggcattatgcacggcgatattgtcactgttcgtcctgccggcatggaccgtaggggccgccgcgaagggacagttctggatattgtcgaacgcgcgcaaagcaaagtggtcggccgtttctatatggataggggcgtggcgattttggagccggaagacaagcgtctgaaccaaagcatcgtattggaaccggacggcgtggcgcgtttcaaacctgaatccggtcaggtcatcgtcggcgaaattgaggtttatcctgagcaaaaccggccggcagtggcaaaaatcatcgaagttttgggcgattatgccgacagcggcatggagattgaaattgccgtgcgcaagcatcatttgccgcaccaattcagtgaagcgtgtgccaaagccgtgaaaaaaattcccgaccatgtacgcaaaagcgatttgaaaggccgcgtcgatttgcgcgacctgcctttggtaacgattgacggcgaaacggctcgagattttgacgatgcggtgtttgccgaaaaaatcggacgcaattaccgtctggtcgtggcgattgccgatgtcagccattatgtccgccccgatgacgctatcgacacggacgctcaggaacgcagcaccagtgtttacttcccgcgccgcgtgattcccatgttgccggaaaacctgtccaacggcatctgctcgctcaatcctaatgtcgagcgtttgtgtatggtgtgcgatatggttatcacttacgcgggcaatattaaagaataccgcttctaccccgccgtgatgcgctctcatgcccgcctgacctacaaccaagtttggaaatggctttcaggcggcatcgggcatccgttcaaagcccaaatcgacacgctttacaaactcttcaaaatccttcagaaaaagcgtttcgaacgcggggcggtggagtttgacagcatcgaaacccaaatgcttttcgacgacaacggtaaaattgaaaaaatcgtccccgttgtccgcaacgatgcccacaagctgattgaagaatgtatgttggcggcaaacgtttgcgcagcggattttctgttgaaaaacaagcataccgcattgttccgcaaccatttggggcccacgcccgaaaaactcgccgccttgcgcgagcagttcggtctgttggggcttcaacttggcggcggcgacaacccgtcgccgaaagactatgccgcgcttgccggacagttcaaaggcaggccggatgccgaattgctgcaagtcatgatgttgcgctccatgcaacaggcggtttacgaaccgcattgcgacggacactttggtcttgcctacgaagcatacgcccacttcacctcgcccatccgccgctatcccgacctgaccgtacaccgcgccatcaaagccgtgttgaatcagcaaacctacacgccaaaaaaaagctggcaggctttgggcgtgcatacctcgttctgtgagcgccgtgccgacgacgccagccgcgacgtggaaaactggctgaaaacctactatatgcgtgacaaagtcggcgaaatatttgaaggcaaaatttccggggtggcaaattttggaatatttgtcactttggacgatatccatatcgacggtctggtgcatatcagcgatttgggcgaagactatttcaacttccgccccgaaatcatggcaatcgaaggtgaacgcagtggcatccgtttcaatatgggcgacagggttgccattaaagtggcccgtgccgatttggatgatggaaaaatcgattttgtcctgattgccgaggggagcggcagagggcggaaagttaaatcatccgcgtctgccaaaccggcagggacggcggggaaagggaagccgaaaaccgccgccgggaaaaaaacagcccgaggcggcaaagtaaggggaaggggcgcgtctgccgccgcagaatcggggaaaaaggcaaagaaaccggttccgattaaggtaaaaaaacggaaaggcaaatcataa

SEQ ID NO: 47817 - DNA, 633 bp, Neisseria meningitidis; identical to SEQ ID NO: 41857

SEQ ID NO: 47818 - DNA, 924 bp, Neisseria meningitidis
atggaaaaccaaaggccgctcctaggcttcgcgttggcacttttggcggcgatgacgtggggaacgctgccgattgccgtgcggcaggtattgaagtttgtcgatgcgccgacgctggtgtgggtgcgttttaccgtggcggcggcggtattgtttgttttgctggcattgggcgggcggctgccgaagtggcgggatttttcttggtgctcattcaggctgctgctgctcggcgtggcgggcatttcggcaaactttgtgctgattgcccaagggctgcattatatttcgccgaccacgacgcaggttttgtggcagatttcgccgtttacgatgattgttgtcggtgtgttggtgtttaaagaccggatgactgccgctcagaaaatcggcttggttttgctgcttgccggtttgcttatgttttttaacgataaattcggcgagttgtcgggtttgggcgcgtatgcgaagggcgtgttgctgtgtgcggcaggcagtatggcatgggtgtgttatgccgtggcgcaaaagctgctgtcggcgcaattcggaccgcaacagattctgctgttgatttatgcggcaagtgccgccgtgttcctgccgtttgccaaaccggcacacatcggaagtttggacggtacgttggcgtgggtttgttttgcgtattgctgcttgaatacgttaatcggttacggctcgttcggcgaggcgttgaaacattgggaggcttccaaagtcagcgcggtaacaaccttgctccccgtgtttaccgtaatattttctttgctcgggcattatgtgatgcctgatacttttgccgcgccggatatgaacggtttgggttatgttggcgcactggtcgtggtcgggggtgcggttacggcggcggtgggggacaggctgttcaaacgccgctag

SEQ ID NO: 47819 - DNA, 1977 bp, Neisseria meningitidis
gtgcgtccaaacgcaaaccgtcggcatcttgccaacagaaagcagacaatgtccaaaaaccaaaatcacgaagaataccaagacgatgcccgacccctgacgattgaggaacaacgcgcgcgcctgcgccaactcatcattatgggcaaagaacgcggctacatcacctactccgaaatcaatgacgcactgcccgacgatatgtccgatgccgatcaaatcgacaacatcgtcagtatgatttccggtttgggtatccaagttaccgaacacgcccccgatgcggaagacatattgttaagcgacaatgccgccgttaccgacgatgatgccgtcgaagaagccgaggccgccctttccagcgccgactccgagttcggcaggacgaccgaccccgtccgtatgtatatgcgcgaaatgggacaggtcgacctgctgacccgcgaagacgaaatcatcatcgccaaaaaaatcgaaaacgccctgaaaaatatggttcaggccatctccgcctgcccgggatccattgcggaaatcttagaactcatcgaaaaaatccgcaaagacgaaatccgcgtcgacgaagtcgtagaagccattatcgacccgaatgaagtattgctcaacgaattgggcttggggcacttggaaaccacagcgcccgagaaaccttccaacgacaattcggacgaaaacgaagacgacgaagaatcggaagaagatgcggatgaaatctcggcagccaatctcgccgaattgaaacaaaaagtcatcggccactttgcccaaatcgaaaaagactacaaaaaaatgatcggtcgtttggaaaaacaccacagccggcacaaagactatctcgcctaccgcgacgcgattgccaacaaactgctggaagtccgtttcgccacccggcaaatcgacagcctcagcagcagcctgcgcggaaaagtagaaaacatccgcaaactcgaacgcgaaatccgcgacatctgcctcgaccgcgtccatatggagcgcgactacttcatccaaaacttcctgcccgaaatcaccaatctggaatggattgaagaagaaatcgccaaaggcagggtttggagcgacgcgctcgaccgcttccgccacgccatcctcgaaaaacaaaccgagttggcagatatggaaaaagaaacccgcatttccatcgaagagttgaaagaaatcaacaaaaatatggtgtcgagcgaaaaagaaaccgcagccgccaaacaggaaatgattcaggcaaacttgcgcctcgtcatttccattgccaaaaaatacaccaaccgtggcttgcagttccttgatttgattcaggaaggtaacatcggcctgatgaaagcggtcgacaagttcgaataccgccggggctacaaattctccacctacgcaacctggtggatccgccaggcaatcacccgttcgattgccgatcaggcgcgtaccatccgcattccggtacatatgattgaaaccatcaacaagatgaaccgcatctcgcgccaacaccttcaagaaaccggcgaagaacccgattccgccaaacttgccgaactgatgcagatgcccgaagacaaaatccgcaaaatcatgaaaatcgccaaagagccgatttcgatggaaacccccatcggcgacgacgacgattcgcacttgggcgacttcatcgaagatgccaacaatgttgcgccggccgatgcggcaatgtacaccagcctgcacgaagtaaccaaagaaatcctcgaaagcctgacaccgcgtgaggcaaaagtcctgcgtatgcgtttcggcatcgatatgaacaccgaccacacgctggaagaagtcggcagacagtttgacgtaacgcgcgaacgcatccgacaaatcgaggcaaaagcactccgcaagctgcggcatccgacaagaagcgaccgtttgagaagtttcttggacagcgaagacagcaagctgtaa

SEQ ID NO: 47820 - DNA, 1779 bp, Neisseria meningitidis; identical to SEQ ID NO: 45269

SEQ ID NO: 47821 - DNA, 402 bp, Neisseria meningitidis
atgcagcaacatattgaaaagtggcaacacttgagccgggaagaacagaaaatccttgccgaagtatggggtctcgtgcaaaacgatgatcaggaggttcactatgaaatgcttaaattgaacgcacccgacgaagccagtggcgaattttggttcagaatggcagaaacactcagcaccctgccgcccaaccgttccctcgaccttagaatgaacggcggcaggctggcgaccgccgtatccatcctttccgtcatgattgaagacaatcccgacataccgcagctttgggcgcaaaaaattaccgccctcaattatagtggattaaatttaaaccagtacggcgttgcctcgccttgtcgtactatctgtactgtctgcggcttcgtcgccttgtcctga

SEQ ID NO: 47822 - DNA, 723 bp, Neisseria meningitidis; identical to SEQ ID NO: 44930

SEQ ID NO: 47823 - DNA, 2298 bp, Neisseria meningitidis; identical to SEQ ID NO: 39011

SEQ ID NO: 47824 - DNA, 561 bp, Neisseria meningitidis; identical to SEQ ID NO: 38271

SEQ ID NO: 47825 - DNA, 624 bp, Neisseria meningitidis; identical to SEQ ID NO: 37310

SEQ ID NO: 47826 - DNA, 585 bp, Neisseria meningitidis
atgcccaaatcaccgccacccaagccgacaccgttcccatcgccggcaaaaatagaagtcgatgaaaaaggacaaatcaacggccaaaccacaccgagtaaggacagcgatgcccgttggataaagaaaaacggcctctacaaactcggttacaaacaacatacccgtaccgatgcagaaggctatatcgagaaactgcacattacccccgccaatgcccatgagtgcaaacacctgtcgcctttgctggaagggttacccgaaggtacgaccgtctatgccgacaaaggctatgacagtgcggaaaatcggcaacatctggaagaacatcagttgcaggacggcattatgcgcaaagcctgccgcaaccgtccgctgtcggaagcgcaaaccaaacgcaaccgatatttatcgaagacccgttatgtggtcgaacaaagctttggtacgctgcaccgtaaattccgctatgcccgggcagcctatttcggactgattaaagtgagtgcgcaaagccacctgaaggcgatgtgtttgaacctgttgaaagccgccaacaggctaagtgcgcccgctgccgcctaa

SEQ ID NO: 47827 - DNA, 810 bp, Neisseria meningitidis; identical to SEQ ID NO: 37887

SEQ ID NO: 47828 - DNA, 432 bp, Neisseria meningitidis; identical to SEQ ID NO: 38610

SEQ ID NO: 47829 - DNA, 813 bp, Neisseria meningitidis
atggaaaatatcggcaggcagcgacccatcggcgtttttgactcgggaatcggcggtttgaccaatgtgcgagcgctgatggaacggctgccgatggagaacatcatttatttcggcgacacggcgcgcgtgccttacgggacgaaatctaaggcgaccatcgaaaatttctcgatgcagattgtcgattttttattggaacacgatgtcaaggcgatggttatcgcgtgcaatacgattgcggcggtggcggggcagaaaatccgtcaaaaaaccggcaatatgcccgttttggacgtgatttccgccggcgcgaaagccgcgctggcaacgacgcgcaacaataaaatcggcattatcgccaccaatacgacagtcaacagcaacgcctatgcgcgcgccatccacaggaacaaccccgatacgctcgtccgcacgcaggccgcgccgctgctcgtccctttggtggaggaaggttggttggaacatgaagttacccgcctgaccgtatgcgaatacctcaaaccattgcttgcggacggcatcgatacgctggtgttgggctgcacgcactttcccttgctcaaacccttaatcggcagggaggcgcacaatgtcgcactggtcgattccgcgattacgactgccgaagaaaccgcacgcgtccttgcgcaggagggattactcaataccgacaacaacaatcccgactaccgtttttatgtcagcgatattcctttgaaattcagaaccatcggcgagcgttttctgggcaggacgatggagcagattgaaatggtgtctttgggttag

SEQ ID NO: 47830 - DNA, 1068 bp, Neisseria meningitidis; identical to SEQ ID NO: 46312

SEQ ID NO: 47831 - DNA, 1515 bp, Neisseria meningitidis
atgactacctccaaatgccccgtaacccatctgaccatgaacaacggcgcgcctgttgccgacaatcaaaacagcctgaccgccggtcctcgcggccctctgctggcgcaggatttgtggctgaatgaaaaactcgccgacttcgtgcgcgaagtcatccccgaacgccgtatgcacgccaaaggttcgggcgcgttcggtacgtttaccgtaacgcacgacatcaccaaatacacccgcgccaaaatcttcagcgaagtcggcaaaaaaaccgagatgttcgcccgtttcaccaccgtggcaggcgaacgcggcgcagccgatgcggaacgcgacatccgcggctttgccttgaagttctataccgaagaaggcaactgggatgtggtcggcaacaacacgcccgtgttcttcctgcgcgacccgcgtaagttccccgacctgaacaaagccgtcaaacgcgacccgcgcaccaatatgcgctctgccacaaacaactgggacttctggacgctgctgcccgaagcactgcaccaagttaccatcgtgatgagcgaccgcggcatccccgccggctaccgccatatgcacggcttcggttcgcatacctacagcttctggaacgaagcaggcgagcgtttttgggtgaaattccatttccgcacccaacaaggcattaaaaacctgaccaacgaagaagccgccaaaatcatcgccgacgaccgcgaaagccatcagcgcgacttatacgaagccatcgaacgcggcgagtttccgaaatggacgatgtacatccaagtcatgcctgaagcagacgcggaaaaagtaccttatcatccgtttgacttgaccaaagtttggccgaaaaaagactatccgctgattgaagtgggcgaattcgagttgaaccgcaatcccgaaaacttcttcgccgatgtggaacaatccgccttcgcaccgagcaacctcgttcccggtatcggcgcgagcccagataaaatgttgcaagcccgtttgttcaattacgccgacgcgcaacgctaccgcttgggcgtgaacttccgccaaatccctgtcaaccgtccgcgttgccctgttcacagcaaccagcgcgacggacaaggacgcgccgacggcaactacggcagcctgccgcactacgaacccaatagcttcggccaatggcagcaacaacccgacttcgccgaaccgcctttgaaaatcaacggcgacgcggcgcactgggactaccgccaagacgatgacgactatttcagccaaccgcgcgccctgttcaacctgatgaacgacgcgcagaaacaggcattgttcggcaacaccgccgccgcaatgggcgacgcgcccgacttcatcaaataccgccatatccgcaactgctaccgttgcgatccggcatacggcgaaggcgtggcaaaagccctcggactgactgtcgaagacgcacaagccgcccgcgcgaccgaccccgcactcggccagcccggtttgctgtaa

SEQ ID NO: 47832 - DNA, 627 bp, Neisseria meningitidis; identical to SEQ ID NO: 45142

SEQ ID NO: 47833 - DNA, 441 bp, Neisseria meningitidis
gtgaacatccgccgcgccgtttatgccgattgcgcggcactcgccgcactcgatgccgtctgcaacccgtccgcgtggacgcaacgccaatttgagtctgcattggtttcgctgtccgaacaggttttcctcgcggaaaaagacggcgggttggccgcctttatcgtttggcagaacctgcccgacgaatccgaactgcacctgattgccaccgcgcccgaatgccgccgccaaggaattgcgtccgccctgctcgaatattggttcgcacatctgcccgaaggcacgcaacgcctgctgctcgaagtccgcgcaggcaacaccgccgcgcaggcactgtacgcggcgcacggcttcagcattgcgggcaggcggaaaaactattaccgcgccaccgacgggcaaaccgaagatgccgtcttaatggagaaaatatgttaa

SEQ ID NO: 47834 - DNA, 957 bp, Neisseria meningitidis
ttgttaattcactatatcgacatcgccaaacgaaacttcgtcatcgccgtttcgtctttgtctaaaaccaaaaccgaaaccaacaaccccaaaggtatcgcccatactatcgaataccttaaaaaacacaaggtcgccctcgtcgtgacggaaagtactggcggtctcgaaatccccgccgccaaagccatccgccgagcaggcatagccgtgattatcgccaacccgcgtcagacgcatcagtttgcccaatcgcagccgctgaccaaaaccgacgccaaagatgccaaaatgcccgccttcttcgcacagatgacggcacagaaagaagattcgcaaaccatgccctaccaaccgcccaccgaagcggaagaagtgttggaagccttggttaaccgccgcaaccaaccggcggatatgcggactgccgagaaaaaccgtctgcatcaggttcacgaaacgcaagtcggaagcgtcaaacaactgattgcccattttgaccggctgattgacgaattggacaaacaaatcgacgaccacacccacacgcattttgacggcaaagcccaagtggcggagcaaatcaaaggcatcggttcgataacgacggctacgctgatggtgatgttgcccgaattggggcggctgtcgcacaaacggatagcgggtttggccggcattgccccgcacccgagggagagcggggaaaccaaattcaaaagccgctgcttcggcggaaggtctgcggtacgtaaggcgctgtatatggctaccgtggcagcgacacgttttgaaccgcttattcgggatttctaccaacgcctgctgtccgagggtaagccgtataaggttgccgttacggcatgtatgcgcaaactgctgacgatatcgaatgcccggatgcgtgattattttgccgaaaacgataccgccgaaaacggtatccggacggcttga

SEQ ID NO: 47835 - DNA, 3033 bp, Neisseria meningitidis
atgttttggatagttttgatcgttattttgttgcttgcgcttgccggcctgttttttgtccgcgcacaatccgaacgcgagtggatgcgcgaggtttctgcgtggcaggaaaagaaaggggaaaaacaggcggagctgcctgaaatcaaagacggtatgcccgattttcccgaacttgccctgatgcttttccatgccgtcaaaacggcagtgtattggctgttcgtcggtgtcgtccgtttctgccgaaactatctggcgcacgaatccgaaccggataggcctgttccgcctgcttctgcaaaccgtgcggatgttccgaacgcatccgacggatattcagacagtggaaacgggacggaagaagcggaaacggaagcagcagaagctgcggaggaagaggctgccgatacggaagacattgcaactgccgtaatcgacaaccgccgcatcccattcgaccggagtattgctgaagggttgatgccgtctgaaagcgaaatttcgcccgtccgtccggtttttaaggaaatcactttggaagaagcaacgcgtgccttaaacggcgcggctttaagggaaacgaaaaaacgctatatcgatgcatttgagaaaaacgaaacagcggtccccaaagtccgcgtgtccgataccccgatggaagggctgcagattatcggtttggacgaccctgtgcttcaacgcacgtattcccgtatgttcgatgcggacaaagaagcgttttccgagtctgcggattacggatttgagccgtattttgagaagcagcatccgtctgccttttctgcagtcaaagccgaaaatgcacggaatgcgccgttccgccgtcatgcagggcaggcggaggcaaaatccccggatgtttcccaaggacagtccgtttcagacggcacagccgtccgcgatgcccgccgccgcgtttccgtcaatttgaaagaaccgaacaaggcaacggtttctgcggaggcgcggatttcgcgcctgattccggaaagtcggacggttgtcgggaaacgggatgtcgaaatgccgtctgaaaccgaaaatgttttcacggaaaccgtttcgtctgtgggatacggcggtccggtttatgatgaaactgccgatatccatattgaagaacctgccgcgcccgatgcttgggtggtcgaaccacccgaagtgccgaaagttcccatgcccgcaatcgatattccgccgccgcctcccgtatcggaaatctacaaccgtacctatgaaccgccgtcaggattcgagcaggcgcaacgcagccgcattgccgaaaccgaccatcttgccgatgatgttttgaatggaggttggcaggaggaaaccgccgctattgcggatgacggcagtgagggtgcggcagagcggtcaagcgggcaatatctgtcggaaaccgaagcgttcgggcatgacagtcgggcggtttgtccgtttgaagatgtgccgtctgaacgcccgtcctgccgggtatcggatacggaagcggatgaaggggcgttccaatcggaagaaaccgatgcggtatacgaacacctgccgacaaccgacctgcttctgccgccgctgttcaatcccggggcgacgcaaaccgaagaagaactgttggaaaacagcatcaccatcgaagaaaaattggcggagttcaaagtcaaggtcaaggttgtcgattcttattccggccccgtgattacgcgttatgaaatcgaacccgatgtcggcgtgcgcggcaattccgttctgaatctggaaaaagacttggcgcgttcgctcggcgtggcttccatccgcgttgtcgaaaccatccccggcaaaacctgtatgggtttggaacttccgaacccgaaacgccaaatgatacgcctgagcgaaatcttcaattcacccgagtttgccgaatccaaatccaagctgacgctcgcgctcggtcaggacatcaccggacagcccgtcgtaaccgacttgggaaaagcgccgcatttgttggttgccggcacgaccggttcgggcaaatcggtgggtgtcaacgcgatgattctgtctatgcttttcaaagccgcgccggaagacgtgcgtatgattatgatcgatccgaaaatgctggaattgagcatttacgaaggcatcccgcacctgctcgcccctgtcgttaccgatatgaagctggcggcaaacgcgctgaactggtgtgttaacgaaatggaaaaacgctaccgcctgatgagctttatgggcgtgcgcaatcttgcgggtttcaatcaaaaaatcgccgaagccgcagcaaggggggagaaaatcggcaacccgttcagcctcacgcccgacaatcccgaacctttggaaaaattgccgtttatcgtggtcgtggttgatgagtttgccgacctgatgatgacggcaggcaagaaaatcgaagaactgattgcccgcctcgcccaaaaagcccgcgcggcaggcatccatctgattcttgccacacaacgccccagcgtcgatgtgattacagggttgattaaggcgaacatcccgacgcgtatcgcgttccaagtgtccagcaaaatcgacagccgcacgattctcgaccaaatgggcgcggaaaacctgctcggtcagggcgatatgctgttcctgccgccgggtactgcctatccgcagcgcgttcacggcgcgtttgcctcggatgaagaggtgcaccgcgtggtcgaatatttgaaacagtttggcgagccggactatgttgacgatattttgagcggcggcggcagcgaagagctgcccggcatcgggcgcagcggcgacggcgaaaccgatccgatgtatgatgaagccgtatccgttgtcctgaaaacgcgcaaagccagtatttcgggcgtacagcgcaccttgcgcatcggctacaaccgcgccgcgcgtctgattgaccagatggaggcggaaggcattgtgtccgcaccggaacacaacggcaaccgtacgattctcgtccccttggacaatgcttga

SEQ ID NO: 47836 - DNA, 738 bp, Neisseria meningitidis; identical to SEQ ID NO: 42917

SEQ ID NO: 47837 - DNA, 2790 bp, Neisseria meningitidis
atgaccgattacagcaaaaccgtaaacctgctcgaaagcccgtttccgatgcgcggcaatcttgccaagcgcgagcctgcatggctgaaaagctggtacgagcaaaaacgctaccaaaaactgcgcgaaatcgccaaaggtcgtccgaagttcatcctgcacgacggcccgccgtatgccaacggcgacatccacatcggtcacgccgtcaacaaaattctcaaagacatcattatccgcagcaaaacccaagccggttttgacgcgccttatgtgccgggttgggactgtcacggtttgcctatcgaagtgatggtagaaaagctgcacggcaaagacatgcccaaagcgcgtttccgcgaattgtgccgcgaatatgccgccgaacaagttgcctgccagaaaaaagacttcatccgtctgggcgtgttgggcgactgggacaagccctacctgaccatggattttaaaaccgaagccgataccgtgcgtatgctcggcgaaatctacaaatccggctatctctaccgcggcgcgaaaccggttcagttctgcttggactgcggctcttcattggccgaagccgaagtggaatacaaagacaaagtatcgcctgcgattgacgtgggctatccgtttaaagacaccgctgcgcttgccgctgcattcggtttggcaggcatcgagggcaaagcgtttgccgtcatctggacgaccacgccttggacgctgccagcgagccaagccgtgtctgccggtgcggacgtggtgtatcaattaatcgatacgcccaaaggcaaattggtgctggcgaaagatttggcagaagacgcgctcaaacgttacggtttttcagacggcattgctattcttgccgaaaccaccggcgacaagctggaaaacctgcacatgaatcatccgttcctcgaacgcgatattcccatgctcaacggcgaccacgttaccaccgacgccggtaccggtttggtgcatactgcgcctgctcatggtttggaagactacgccgtctgcaataaatacggcatcgagctttacaaccccgtcaacgccgaaggcaaatacatcagtgaaacgccgcgcgttgccggcatgagcgtttgggaggccaatcccgttatcctgcaatggttggaagaaaccggcaacctcttggcaagcagcaaaatcgaacacagctacgcgcactgctggcgtcacaaaacgccgttgatttaccgtgcgaccggccaatggtttgtcggtatggataaagcaggtgccgatggtaaaaccctgcgcgataaagccatcaaagccgttgatgacactgaatttttcccatcatggggtcgtgcgcgtttggaagccatgattgaaggccgccccgactgggtggtttcgcgccaacgctattggggcacgccgatgactttctttgttcacaaagaaacgggcgagctgcatccgaactctgccgaacttttggaaaaagtcgcgcaacgcatcgaagaaaaaggcatcgaggcttggttctccctcgataagggcgaattgttgagcgcggaagattgcgaacattacgacaaactctccgacacgatggacgtatggttcgactccggttcgacccattattccgttgtgaaacagcgcgaagaattggactggcctgctgacttgtacctcgaaggcagcgatcaacaccggggctggtttcagtcgtccatgctgaccggctgcgcctcatcaatgggtcgcgcgccgtacaaacagctgctgacccatggtttcgtggtggatcaaaacgggcgcaaaatgtcgaaatccatcggcaacgtcgtcgcgccgcaagaagtgtataacgagttcggcgcggacatcctgcgcctgtgggcggcatccaccgattacagcggcgaattggcgatttccaaagaaatcctcaagcgcgtaaccgaaagctaccgccgtatccgcaacaccttgagcttcctgtttgccaacctcagcgacttcaatcctattgaagatgccgtgcaacaggcagacatggtggaaatcgaccgctacgccgtggtattggcacgtcagctgcaagagcgtctggcaggcgattactatccgcgctataccttccactttgctgtaaaagacattgtttctttctgctcggaagacttgggcgcgttctacctcgatatcctgaaagaccgcctctacaccaccaaagccgacagccgcgcccgccgcagcgcgcaaaccgccctgtaccacatcacgcgcagtttggttctcttgattgcgccgattttgtgctttaccggcgaagaagcgtgggacatcatcggcggcggcgaagaagacagcgtcctcttccacacctggcacgagttcccgaccatcaacgaaaaagccgaagccgaactggtgaaaaaatggacggcaatccgcgaagcccgcgaagcggtaaccgccgccatcgagcctttgcgcgccgacaaaaccgtcggttcgtccttgcaagccgaagccgaaatcactgcgccggaagaaatggccggctacctgaacgctttgggcgaagaattgcgctttgccttgctggtgtctaaagcagaagtgaaagtaggcagcgaacttgccgttgccgctaaagccagtgatggtgaaaaatgcgaacgctgctggcactacacccgcgatgtgggcgcggttgcaggctatgaaaccgtctgcaaacgctgtgcagagaatgtcggcagagaaggcgaaacgcgccattacgcctga

SEQ ID NO: 47838 - DNA, 1119 bp, Neisseria meningitidis
ttgttaattcactatatcgacatcgccaaacgaaacttcgtcatcgccgtttcgtctttgtctaaaaccaaaaccgaaaccaacaaccccaaaggtatcgcccatactatcgaataccttaaaaaacacaaggtcgccctcgtcgtgacggaaagtactggcggtctcgaaatccccgccgccaaagccatccgccgagcaggcatagccgtgattatcgccaacccgcgtcagacgcatcagtttgcccaatcgcagccgctgaccaaaaccgacgccaaagatgccaaaatgcccgccttcttcgcacagatgacggcacagaaagaagattcgcaaaccatgccctaccaaccgcccaccgaagcggaagaagtgttggaagccttggttaaccgccgcaaccaatcggcggatatgcggactgccgagaaaaaccgtctgcattaggttcatgaaacgcaagtcggaagcgtcaaacaactgattgcccattttgaccggctgattgacgaattggacaaacaaatcgacgaccacacccacacgcattttgacggcaaagcccaagtggcggagcaaatcaaaggcatcggttcgataacgacggctacgctgatggcgatgctgcccgaattggggcggctgtcgcacaaacggatagcgagtttggccggcattgccccgcacccgagggagagcggggaaaccaaattcaaaagccgctgctttggcggaaagtctgcggtacgtaaggcgctgtatatggctaccgtggcagcgacacgttttgaaccgcttattcgggatttctaccaacgcctgctgtccgagggtaagccgtataaggttgccgttacggcatgtatgcgcaaactgctggagacctttgcaaaattcctttccctcccgacagccgaaacccaaacacaggttttcagctgttttcgccccaaataccgcctaattttacccaaatacccccttaatcctgcccagatacccgataatcaggcatccgtgctgccttttaggcggcagcgggcgcacttagcctgttggcggctttcaacaggttcaaacacatcgccttcaggtggctttgcgcactcactttaa

SEQ ID NO: 47839 - DNA, 330 bp, Neisseria meningitidis; identical to SEQ ID NO: 37077

SEQ ID NO: 47840 - DNA, 531 bp, Neisseria meningitidis; identical to SEQ ID NO: 38478

SEQ ID NO: 47841 - DNA, 384 bp, Neisseria meningitidis; identical to SEQ ID NO: 38324

SEQ ID NO: 47842 - DNA, 1335 bp, Neisseria meningitidis
atggcaaaaaaatatttcggcacggacggcgtgcgcggcgaagtcgggcagtttccgattacgcccgattttgtattgaaactcggctatgcggcgggtcaggttttggttcagcacgacaccgaccagaaaccgaccgttttaatcggcaaggatacgcgtatttccggttatatgttggaagccgctttggtggcaggttttacggcggcgggtgtgaatgtggtacagaccggaccgctgcccacgcccggcgtggcttatctgacccgcgcgttgcgcctgtccgccggcgtgatgatttccgcgtcgcacaatgcctattccgacaacggcatcaaattcttcgccgaaggcggcgtgaaactttccgatgaagtcgagttggaaatcgaagccaaaatcgacggcgaaatgaaaaccctcccgtccgcccgcctcggtcgcgcacgccgcatcagcggtgcggacgaccgctatatcgaattttgcaaatccacctttcccagccattccgaccttcggggtttgaagttggttatcgatactgccaacggcgcggggtacggtgtcgcacccaaggtgtttcacgaactgggcgcacaagtcgtcagcatcggcgacgaacccaacggctacaatatcaatgaaaaatgcggtgcgacttataccaagacactccaggcagccgttttacagcatgaagccgactacggcatcgccttagacggcgacggagaccgcctgatgatggtcgataaaaacggtaaggtttacgacggcgacagcctgatttacgtcattgctaaagcccgcgcccgagaaggtatcaacatcggcggcgtggtcggcacggtcatgaccaatatggcgatggaaatcgccctgaaagagcagggcgtggatttctgccgcgccaaagtcggcgaccgctatgtgttggcacagctgaaccaacgcagctggctcatcggcggcgaagccagcggccatattttgtgcatggacaaacacaacaccggcgacggcattatttccgcgctgcaagttttggcggcactgcaaacgctgaaccaagacctcgccaccgtttgcgccgattggcagccgtatccgcaaacgatgattaacgtgcgcatccaaaaaggtcagaaatggcaggaagcctcaaaagacgtgttggcggaagtggaaaaagaactcgaaggcaaagggcgtgtcgtgttgcgcgcttcgggaaccgaacccgtcgtgcgtgtgatggtggaggcgcggcaggcggattgggcgcgcgacggtgcggaacgtattgcttccgccatcggcagcctttag

SEQ ID NO: 47843 - DNA, 2433 bp, Neisseria meningitidis
atgcccatccccttcaaacccgtattggctgtcgccgccatcgcccaagcgtttcccgcctttgcggcagaccccgcgccgcagtccgcccaaacgctgaacgaaatcaccgttaccggcacgcacaaaacccaaaaactcggcgaagaaaaaatccgccgcaaaaccttagacaagctcttggtcaacgacgaacacgacctggtgcgctacgaccccggcatttccgtcgtcgaaggcggcagggcgggttctaacggctttaccatacgcggcgtggacaaagaccgcgtcgccatcaacgttgacgggctggcgcaggcggaaagccgctcttccgaagccttccaagaattgttcggcgcgtacggcaacttcaacgccaaccgcaacacttccgagccggaaaacttttccgaagtaaccatcaccaaaggcgcggactcgctcaaatccggcagcggcgcattgggcggcgcagtcaattaccaaaccaaatccgcaagcgattatgtttccgaagacaagccctaccatttggggataaagggcggcagcgtcggcaaaaacagccaaaaattcagcagcatcaccgccgccggcaggctctttggtttggatgccttattggtttatacccgccgcttcggcaaagaaaccaaaaaccgctcgaccgagggcaatgtcgaaattaaaaacgacggatatgtctataacccgaccgatacaggcggacccagcaagtacctgacctatgtagccacaggggttgcgcgctcccaacccgacccacaggaatgggtaaacaaaagcaccctgttcaagctgggctacaacttcaacgatcaaaaccgtatcggctggatttttgaagactcgcgcaccgaccgttttaccaacgagctgtctaatttgtggacgggtacgaccacgtctgccgcaacgggcgactaccgccaccgccaagacgtgagctaccgccgccgctccggcgtcgaatacaaaaacgaattggaacacggcccgtgggacagcctcaagctgcgttacgacaaacaacgcatcgatatgaacacttggacttgggacatcccgaaaaattacgatttgcgcggtatcaacagtgaagtttaccattcgttccggcatatccgccaaaacaccgcgcaatggactgccgattttgaaaaacaactcgacttttccaaagccgtttgggcggcgcaatacggcttgggcggcggcagaggggacaatgccaactcggattacagctatttcgtaaaactttacgaccccaaaatcctcacttccaaccaagccaaaatcacaatgctgatcgaaaaccggtcgaaatataaatttgcctattggaacaatgtgtttcacttgggcggcaacgaccgcttccgcctgaatgcgggcatacgctacgacaaaaacagcagcagcgcgaaagacgatccgaaatacaccaccgccatccgggggcagattccccatttgggttcggaacgcgcgcacgcgggcttcagctacggcacggggttcgactggcggtttaccaagcatctgcacttgttggcaaaatacagcaccggcttccgcgcaccgacttcggacgaaacctggctgctgttcccacaccccgatttctacctgaaagccaacccaaacctgaaagccgaaaaagccaaaaactgggaattgggtctggcgggcagcggcaaagcgggcaacttcaagctctcgggcttcaaaaccaaataccgcgactttatcgaattgacgtatatgggcgtttcgtcagacaaccctaacaagcccacctacgccccgctttcagacggtacggcattggtcagctcgcccgtttggcaaaaccaaaaccgctcctcggcatgggtgaaaggtttggaatttaacggcacatggaacctcgacagcatcggtttgccgcaaggcacgcacgcaggtgtcaatgtcagctacatcaaaggcaaggccaaacaaaccaacggacaggaaacccctattaacgccctttcgccatggagtgcggtttacaatctgggctacgacgctccttccaaacgttggggcatcaacgcctacgccacgcgcaccgccgccaaaaagccgtccgacaccgtccacagcaacgacgacttgaacaacccgtggccttatgccaaacacagcaaggcctatacgctgttcgacctttccgcctacctcaacatcggcaaacaggttacgctccgcgccgccgcgtacaacattaccaacaagcagtactacacttgggaatctttacgcagcatccgcgagttcggcacggtcaaccgcgttgacaacaaaacccacgccggcatccaacgctttacctcgccgggcaggagctacaatttcaccatcgaagcgaagttctaa

SEQ ID NO: 47844 - DNA, 2394 bp, Neisseria meningitidis
atgaaactgaaacagattgcttccgcactgatgatgttgggcatatcgcctttggcatttgccgacttcaccatccaagacatccgtgtcgaaggcttgcagcgtaccgagccgagcaccgtattcaactacctgcccgtcaaagtcggcgatacctacaacgacacacacggcagtgccatcatcaaaagcctgtacgccaccggtttctttgacgacgtacgcgtcgaaactgcggacgggcagctcctgctgaccgttatcgaacgccccaccatcggctcgctcaacatcaccggcgcaaaaatgctgcaaaacgacgccattaagaaaaacctcgaatcgttcgggctggcgcagtcgcaatactttaatcaggcgacactcaatcaggcagtcgccggcctgaaagaagaatacctcgggcgcggcaaactcaatatccaaatcacgcccaaagtaaccaaactcgcccgcaaccgcgtcgacatcgacatcacgattgacgagggcaaatccgccaaaatcaccgacatcgaatttgaaggcaaccaagtctattccgaccgcaaactgatgcggcagatgtcgctgaccgaaggcggcatttggacatggctgacacgaagcaaccaattcaacgagcagaaatttgcccaagacatggaaaaagtaaccgacttctaccagaacaacggctacttcgatttccgtatcctcgataccgacatccaaaccaacgaagacaaaaccaagcagaccatcaaaatcaccgtccacgaaggcggacgtttccgttggggcaaagtctccatcgaaggcgacaccaacgaagtccccaaagccgaactggaaaaactgctgaccatgaagcccggcaaatggtacgaacgccagcagatgaccgccgttttgggtgagattcagaaccgcatgggctcggcaggctacgcatacagcgaaatcagcgtacagccgctgccaaacgccgaaaccaaaaccgtcgatttcgtcctgcacatcgaaccgggccggaaaatctacgtcaacgaaatccacatcaccggcaacaacaaaacccgcgacgaagtcgtgcgccgcgaattgcgccaaatggaatccgcgccttacgacacctccaagctgcaacgctccaaagagcgcgtcgagcttttgggctacttcgacaacgtacagtttgatgccgtcccgcttgccggcacacccgacaaagtcgatttgaacatgagcctgaccgaacgttccaccggctcgctcgacttgagcgcgggctgggtacaggataccggcctggtcatgtccgcaggcgtttcccaagacaacctgttcggtacgggcaagtcggccgccctgcgcgcctcacgaagcaaaaccacgctcaacggctcgctgtcgtttaccgacccgtacttcacggcagacggggtcagcctgggctacgatgtttacggaaaagccttcgacccgcgcaaagcatcgaccagcatcaaacaatataaaaccaccacggcaggcgcaggcatccgcatgagcgtgcctgttaccgaatacgaccgcgtgaatttcggtttggtggcagaacacctgaccgtcaacacctacaacaaagcgcccaaacactatgccgactttatcaagaaatacggcaaaaccgacggcacagacggcagcttcaaaggctggctgtacaaaggtaccgtcggctgggggcgcaacaaaaccgacagcgcgttatggccgacgcgcggctacctgacgggcgtgaacgccgaaatcgccctgcccggcagcaaactgcaatactactccgccacccacaaccaaacctggttcttccccttaagcaaaaccttcacgctgatgctcggcggcgaagtcggcattgcgggcggctacggcagaaccaaagaaatccccttctttgaaaacttctacggcggcggcctgggttcggtgcgcggatacgaaagcggcacgctcggtccgaaagtgtatgacgaatacggcgaaaaaatcagctacggcggcaacaaaaaagccaacgtctccgccgagctgctcttcccgatgcctggcgcgaaagacgcgcgcaccgtccgcctgagcctgtttgccgacgcaggcagcgtgtgggacggcaaaacctacgacgacaacagcagttccgcgaccggcggcagggttcaaaacatttacggcgccggcaatacccataaatccacctttaccaacgaattgcgctattccgccggcggcgcggttacctggctctcgcctttaggcccgatgaaattcagctacgcctacccgctgaagaaaaaaccggaagacgaaatccaacgcttccaattccaactcggcacgacgttctaa

SEQ ID NO: 47845 - DNA, 4476 bp, Neisseria meningitidis
atgcgcttcacacacaccaccccattttgttccgtattgtccaccctcggtctttttgccgtttcccctgcttactcatccattgtccgcaacgatgtcgattaccaatattttcgcgactttgccgaaaataaaggcgcgttcgccgtaggtgcaagcaatatttccatccaagacaagcaaggcaaaatattaggcagggttctcaacggcatccccatgcccgacttccgagtcagcaaccggcaaaccgccatcgccaccctgattcacccccaatacgtcaacagtgtcaaacacaacgtcggctacggttccatacaattcggcaacgacacccaaaatccagaagaacaagcctatacctaccgcctcgtatcacgcaacccgcacccggactacgactaccaccttccccacctcaacaaactggttaccgaaatctcacctgccgcactcagcagcgtacccttgcttggaaacggccagccaaaggccaatgcctacctcgataccgaccgcttcccctactttgtacgactcggctcaggcacgcaacaagtccgcaaagcagacggcacgcgtacacgaaccgccccggcataccaatacctgaccggcggcacgccgctgaaagtattggggttccaaaaccacggcttactcgtcggcggcagcctgaccgaccaaccccttaacacctacgcaatcgccggagacagcggttcccccctgtttgccttcgacaagcatgaaaaccgctgggtgcttgcgggcgtactcagcacctacgccggcttcgataatttcttcaacaaatacatcgtcacgcaacccgaattcatccgttccaccatccgccaatacgaaacccggctggatgtcgggctgaccaccaacgaactcatatggcgcgacaacggtaatggcgacagcaccctgcaagggctcaacgaacgcatcaccctgcccattgcaaacccttcgcttgccccacaaaacgacagcaggcacatgccgtctgaagatgccggcaaaacgctcatcctatccagcaggttcgacaacaaaacactgatgctggcagacaatatcaaccaaggcgcaggcgcattgcagttcgacagcaacttcaccgtcgtcggtaaaaaccacacatggcaaggtgcaggcgttatcgtagccgacggcaaacgcgtcttctggcaagtcagcaaccccaaaggcgaccggctctccaaactgggcgcaggcacgcttatcgccaacggacaaggcatcaaccagggcgacatcagcatcggggaaggcactgtcgtactcgcccaaaaagctgcttcagacggcagcaaacaagcattcaaccaagtcggcatcaccagcggcaggggtacggccgtcctcgccgacagccagcaaatcaaatccgaaaacctctatttcggcttcaggggcggacggctcgacctcaacggcaacaaccttgcctttacccatatccgccatgcggacggcggcgcgcagatcgtcaaccacaaccctgaccaagccgcgacactgacgctgaccggcaaccccgtcctcagtcctgagcatgtcgagtgggtgcaatggggcaaccgtccgcaaggcaacgcggcggtttacgaatacatcaacccgcaccgcaaccgtcggaccgactacttcatactcaaacccggcggcaacccgcgcgaatttttcccgttaaatatggaaaactcaacaagctggcaatttatcggcaacaacaggcaacaggccgccaaacaagtcgcccaagccgaaaatgcccgccccgacctaattaccttcggcggatacttgggtgagaacgcgcaaacgggcaaagccgcaccgagttacagcaaaaccaatatcgaatgggtgaatggtccaaacaccccacacaagccctcgccctatacgaatacgccaacccgcacaggggcaggcgtaccgacgattaccgcctcaaagaaggcggcaaccccggcgcctacttcccatggaatgcctacagcacccaagactgggaatttctcggacatgaccggcgaagcagccatagaaaaaaaccgccatatcgcaaatgccgccgtatacggccggcccgaataccgttacaacggcgcactcaacctgcactatcgtcccaaacgcaccgacagcacgctgttgctcaacggcggcatgaaccttaacggggaagtcttgattgagggcggcaatatgattgtgtcaggcaggcccgtaccccatgcctacgaccaccaggccaaacgcgaacccgttcttgaaaacgaatggaccgacggcagcttcaaggctgcacggttcaccctacgaaaccatgcccgactgacagcagggcgcaataccgcgcatctggacggcgacataaccgcatacaatctgtccggcatcgacctcggctttatccaaggcaaaacaccggaatgctaccgctcctaccatagcggcagcacccactgcacacccaacgccgttttaaaagccgaaaactatcgtgcactacctgtaacgcaagtacgcggcgacattacccttaacgaccgttcagagctccgcctgggcaaagcacacctgtacggcagcatccgtgccggcaaagacaccgcagtccgcatggaagcagacagcaactggacactttcccagtccagccacaccggcgcactgacgcttgacggcgcacaaattaccctgaaccccgatttcgccaataatacacacaacaaccgcttcaacacactgaccgtcaacggcacacttgacgggttcggcacattccgattcctgaccggcatcgtccgaaaacaaaatgccccccccctcaaactggaaggggacagccgcggcgcattccaaatccacgtcaaaaacaccggacaagaacctcaaacaaccgaatcgcttgcacttgtgagcctcaatccgaaacacagccaccaagcccgattcaccctccaaaacggctatgccgatttgggtgcctaccgctacatcctccgcaaaaacaacaacggatacagcctgtacaacccgctcaaagaggccgaacttcaaattgaagccacgcgtgcggaacatgagcgcaaccaacaggcatacaaccaattacaggcaaccgacatcagcagacaggttcaacatgactctgacgcgaccaggtaggcactacaggcctggcagaacagtcaaaccgaacttgcccgcatcgacagccaagtccaatatctgtccgcccaattgaaacagacagacccgctgaccggcattctgacgcgtgcccaaaacctgtgtgccgcacaaggatacagtgtcgatatctgccgtcaggttgccaaagccgccgacacgaacgacctgacactcttcgaaaccgaactggatacgtatatagaacgtgtagaaatggccgaatccgaacttgacaaagcacggcaaggcggcgatgcgcaagccgtcgaaacagcccggcacgcctacctgaacgcactcaaccgtctgtcccgacaaatccacagtttgaaaaccggcgttgccggcatccgtatgccgaacctggccgaactgatcagccggtcggccaacaccgccgtttccgaacaggccgcctacaataccggccggcaacaggcgggacgccgcatcgaccgccaccttaccgatccgcagcagcaaaacatctggctggaaaccggtacgcaacaaaccgactaccatagcggcacacaccgtccctaccaacaaactaccaactatgcacatatcggcatccaaaccggcatcaccgaccgtctcagtgtcggtacgattttaaccgatgagcgcacaaacaaccgttttgatgaaggcgtatccgcccgaaaccgcagcaacggcgcacatctgttcgtcaaaggggaaaacggcgcactctttgccgcggcagatttaggctacagcaacagccgtacccgatttaccgattatgacggggctgccgtccgccgccacgcatgggatgcaggcatcaacaccggcatcaaaatcgataccggcatcaacctcagaccctatgccggcatccgtataaaccgcagcaacggcaaccggtacgtactcgacggcgcagagataaacagcccggcgcaaatccaaaccacatggcatgccggcatccgtctcgataaaaccgtcgaactgggtcaagccaagctgacccccgctttcagcagcgattactaccatacccgccaaaacagcggttccgccctcagcgtcaacgaccgtaccttactgcagcaagccgcccacggcacactgcataccctgcaaatcgacgccggatacaaaggctggaacgccaaacttcatgccgcttacggcaaagacagcaacaccgcccgccacaaacaggcaggaatcaaaataggctacaactggtaa

SEQ ID NO: 47846 - DNA, 843 bp, Neisseria meningitidis; identical to SEQ ID NO: 37164

SEQ ID NO: 47847 - DNA, 519 bp, Neisseria meningitidis; identical to SEQ ID NO: 37482

SEQ ID NO: 47848 - DNA, 1194 bp, Neisseria meningitidis; identical to SEQ ID NO: 39147

SEQ ID NO: 47849 - DNA, 1011 bp, Neisseria meningitidis
atgcacatcggcggctattttatcgacaaccccatcgcacttgcaccgatggcgggcattaccgacaaacccttccgccgcctctgccgcgatttcggcgcgggttgggcggtgtgcgaaatgctgaccagcgacccgacacttagaaataccaaaaagaccctgcaccgcagcgattttgccgatgaaggcggcatcgttgccgtgcagattgccggcagcgatccgcagcagatggcggatgccgcgcgttacaacgtcagccttggggcgcaggttatcgacatcaacatgggctgtcccgccaagaaagtgtgcaatgcccaagccggcagcgcgctgatgcagaacgagccgctggttgccgccattctcgaagccgtcgtccgtgcggtggacgtacccgttaccctcaaaacccgtttgggctggcacgacgaccacaaaaacctgcctgccgtcgcccgcatcgccgaagattgcggcattgccgcccttgccgtccacggacgcactcgcacgcaaatgtacaaaggtgaagcggcttacgacctgattgccgaaaccaaatgccgtctgaacatcccggtctgggtcaacggcgacatcacttcgccgcaaaaagccgccgccgtcttcaaacaaaccgccgccgacggcatcatgatagggcgcggcgcgcaaggcagaccgtggttcttccgcgatttgaaacattacgccgaacacggtgttttaccgcctgccttgagtttggcagaatgcagtgccgccattttgaaccacgtccgcgccatgcacgcgttttatggtgagaccgccggtgtgcgcattgcacgcaaacacataggctggtacatcggcgaaatgcccgacggcgaacaggcgcggcgtgaaatcaaccgcttggacagtgcggcggcgcaatacgacatgcttgcaggttatcttgaaagacttgccggaaaaaccgaccgttgggcgtgcggctaccgcacaaatgccttctga

SEQ ID NO: 47850 - DNA, 504 bp, Neisseria meningitidis; identical to SEQ ID NO: 44607

SEQ ID NO: 47851 - DNA, 324 bp, Neisseria meningitidis
atgcaaaacgaaaccatcaacccgaaacagcaccttgccgccatcaaagaatactggcagcccgaaatcatcaaccgccacgggttccaattccgcttggtcaaacttttgggcgattacggctggcatacgcacggatacagcgacaaagtgctgtttgccgtggagggcgacatggcggtggacttcgccgacggcggcagcatgacgatacgcgagggcgagatggcggtcgtgccgaagtcggtgtcgcaccgcccgcgttcggaaaacggctgctcgttggtgctgattgagttgtccgacccgtccgaggccgtctga

SEQ ID NO: 47852 - DNA, 903 bp, Neisseria meningitidis
atggaaaatatggtaacgttttcaaaaatcagaccgcttttggcaatcgccgccgccgcgttgcttgccgcctgcggcacggcgggaaataatgccgcccgcaagccggtgcaaaccgccaaacccgccgcagtggtcggtttggcactcggtggcggcgcatctaaaggatttgcccatgtaggtattattaaggttttgaaagaaaacggtattcctgtgaaggtggttaccggcacatcggcaggttcgattgtcggcagcctttttgcatcgggtatgtcgcccgaccgcctcgaattggaagccgaaattttaggcaaaaccgatttagtcgatttaaccttgtccaccagtggttttatcaaaggcgaaaagctgcaaaattacatcaaccgaaaagtcggcggcaggcagattcagcagtttcccatcaaatttgccgctgttgctactgattttgaaaccggcaaggccgtcgctttcaatcaagggaatgccgggcaggctgtgcgcgcttccgccgccattcccaatgtgttccaacccgttatcatcggcaggcatacatatgttgacggcggtctgtcgcagcccgtgcccgtcagtgccgcccggcggcagggggcgaatttcgtgattgccgtcgatatttccgcccgtccgggcaaaaacatcagccaaggcttcttctcttatctcgatcagacgctgaacgtaatgagcgtttccgcgttgcaaaatgagttggggcaggcggatgtggttatcaaaccgcaggttttggatttgggtgcagtcggcggattcgatcagaaaaaacgtgccatccagttgggtgaggaggcagcacgtgccgcattgcctgaaatcaaacgcaaactggcggcataccgttattga

SEQ ID NO: 47853 - DNA, 723 bp, Neisseria meningitidis; identical to SEQ ID NO: 45345

SEQ ID NO: 47854 - DNA, 390 bp, Neisseria meningitidis
atgtggaaaattagtaaagaaaattgtgaagatttaggatttgcaatagtctgtatgttctatgatgctattaatctttctgaatttaaattatggttggatatagttgtcagagatactcctattgatacaattccattgtatatttttgatttgattgattttgataagagtataggggaaatttatgatgtaattggagtcgttaattatggttacatttcaaatgatcaaaaaaatgcattaacgggcattgccttcttaagggggatagatgtctatgatccgcctatttcaaaagaaaaagcattaaaagccttagagaaatatcctgaaatttatcagaggtttcagcatttctttccttttgtagagcttccgcttttttaa

SEQ ID NO: 47855 - DNA, 1401 bp, Neisseria meningitidis; identical to SEQ ID NO: 44335

SEQ ID NO: 47856 - DNA, 435 bp, Neisseria meningitidis; identical to SEQ ID NO: 39950

SEQ ID NO: 47857 - DNA, 1542 bp, Neisseria meningitidis
atgaaaatcggtatcccacgcgagtcattatccggcgaaacccgcgtcgcctgcacgcccgccaccgtcgccctgctgggcaaactgggctttgaaaccgttgtcgaaagcggtgcaggtttggcggcaagtttggacgatgccgcttaccaaacagcaggcgcaaccgttgccgacaaagcggcggtttgggcctgccctttgatttataaggttaacgcgccgtccgaaggcgagctgccgcttttgaacgaaggtcaaaccatcgtcagcttcctgtggccgcgccaaaacgaggctttggtcgaagccttgcgcgccaagaaagtcaatgcgctggcgatggacatggtgccccgtatttcccgcgcgcaggctttggacgctttgtcttcgatggcaaacatcagcggctaccgcgccgtgattgaagccgccaacgccttcggccgtttcttcaccggtcaaattactgccgccggcaaagtgccgcctgcgcaggttttggtgattggtgcaggtgtggcaggtttggcggcaatcggtacggcaaattcactaggcgcagtggtacgcgcgttcgatacccgcttggaagtggcggaacaaatcgaatcgatgggcggcaagttcctgaaactcgacttcccacaagaatcgggcggcagcggagacggctacgccaaagtgatgagcgacgaatttatcgccgccgagatgaagctctttgccgagcaggcgaaagaagtggacatcatcatcaccaccgccgccattccgggcaaacccgcgcccaagctgattaccaaagaaatggtggaaagcatgaaatccggctccgtcatcgtcgatttggcggcggcgacgggcggcaactgcgaactcacccgcccgggcgaattgtccgtaaccggcaacggcgtgaaaatcatcggctacaccgacatggcaaaccgccttgccggacagtcttcccagctttacgccaccaacttggtcaacctgaccaagctgttaagcccgaacaaagacggcgaaatcacgttggacttcgaagacgtgattatccgcaacatgaccgttacccacgacggcgaaatcaccttcccgcctccgccgattcaagtttccgcccagccgcagcaaacgccgtctgaaaaagccgcgcctgccgccaagcccgagccgaaacctgtttccctgtggaaaaaactcgcgcccgccgtcatcgccgccgtattggtgctgtgggtcggcgcggtcgcacccgcagcattcctgaaccactttatcgtgttcgtccttgcctgcgtcatcgggtactacgtcgtttggaacgtcagccactcgctgcacacaccgctgatgtcggtaaccaacgccatctccggcatcatcgtcgtcggcgcgctgctgcaaatcagccaaggcaacggtttcgttaccctgcttgccttcatcgccatcctgattgccagcatcaatatcttcggcggcttcttcgtaacgcgccgcatgttgaatatgtttaggaaaggataa

SEQ ID NO: 47858 - DNA, 1005 bp, Neisseria meningitidis
atgagcaccttctttcaacaaaccgcgcaagccatgattgctaaacacatcgaccgtttccctctattgaagttggatcaagtgattgattggcagccgatcgaacaatacctgaatcgtcaaaaaacccgttaccttcgagaccaccgcggccgtcctgcctatcccctgctgtccatgttcaaagccatcctgcccggacaatggcacagcctctccgatcccgaactcgaacacagcctcattacccgcatcgatttcaacctgttttgccgttttgacgaactaagcatccccgattacagcaccttatgccgttaccgcaactggctggcgcaagacgacaccctgtccgaattgctggaactgattaaccgccaactgaccgaaaaaggcctaaaaatagagaaagcatccgccgtcgttggcgccaccattattcaaaccgccggcagcaaacagcgccaggccatagaagtcgatgaagaaggacaagtcagcggccaaaccacaccgagtaaggacagcgatgcccgttggataaagaaaaacggcctctacaaactcggttacaaacaacatacccgtaccgatgcggaaggctatatcgagaaactgcacattacccccgccaatgcccatgagtgcaaacacctgccgccgttgttggaaggggtacctagaggtacgaccgtctatgccgacaaaggctacgacagtgcagaaaaccggcaacatctggaagaacatcagttgcaggacggcattatgcgcaaagcctgccgcaaccgtccgctgacggaagcgcaaaccaaacgcaaccggtatttatcgaagacccgttatgtggtcgaacaaagcttcggtacgctgcaccgcaaattccgctatgcgcgggcagcctatttcggactgattaaagtgagtgcgcaaagccatctgaaggcgatgtgtttgaacctgttgaaagccgccaacaggctaagtgcgcccgctgccgcctaa

SEQ ID NO: 47859 - DNA, 159 bp, Neisseria meningitidis
atgcccgcaaacagacaaggagcagcgatgcaaaaccaaaatacacgccccgtcaaaatcgagcttaaaggcgaagcaggcaaacgcgtactgcttgccgccgcccgccgcattgccaaaacccatcaaaaagccgtcaaggcacttgccgacaaatga

SEQ ID NO: 47860 - DNA, 981 bp, Neisseria meningitidis
gtgcagccggggctttgggcttcagacggcatattttcggaatggcggcattcttgccgtcggcgcggcagccgtatggggaagggaggggatattgtggtcggtaacggcaaaaaatatgccgcaccattgctggtgctgggttgcgtggtgttcggtctgggcagtctgattgtcagatccgtccccgtcggttcgtatgcaatcgcattttggcggttgctgatttcggtgttcgtattttggtttttagcacggtttttcaggcaaaaattcccaaaaaacaggaaaaccgtccgatatgccctgacggcgggcgtgtttctcgctttcgatttggcgttgtggcacgaaagcatacacgcggtcgggccgggtatttccaccctgctcaacagcctgcaaatctttttcttgtcggcaatcggtgttttctttttcggcgagcgtttgagcgggctgaaaaaggcaggcttaatatcggcagttgccggcgtggcgatgattgccggtgcggaattcggctacaacggtaatgcggtttggggattcgtcagcggtttggtatcgggactgatgctcgccctgtcgatggtgttcgtccgcaaaacccatgaaatcgagacggtggcgcttttcccttcaatgatgattttgagtttgggcggcgcggtatcgctggttgttccggcattgctgatggatggcggcgcgctttatccgacgacttggaaagatgcgggtttggtgcttgtgtacggcgtggtgatgcagtgcttcgcgtgggcgatggttgcctatgcgattccgctgctttcgctgtcgctgacggggctgctgcttttgtccgaaccggttgccgccctgttcatcgattatttcgggttgggcaaaccgattgaaggcgtgcagtgggcaggggtggcgctgacgctttcggcaatttatctcggttcgctgaaacagcagtccgagccttga

SEQ ID NO: 47861 - DNA, 606 bp, Neisseria meningitidis
atgacccgtcaatctctgcaacaggctgccgaaagccgccgttccatttattcgttaaataaaaatctgcccgtcggcaaagatgaagttgtccaaatcgtcgaacacgccgttttgcacacaccttcttcgttcaattcccaatctgcccgcgtggtcgtgctgtttggcgaagagcatgataaggtgtggcaatttgtcgaagacgcgctgcgtgccgtcgtgcctgccgacagttttgaaccgaccgcgcaaaaattgaacctgtttaaggcgggtgcggcaaccattttgttttatgaagatcaaaatgtcgtcaaaggtttgcaggagcagttccctgcttatgccgctaacttccccgtttgggcggaccaggcaaacgcgatggtgcagtatgccgtttggacgacacttgccgcggtcggcgtaggtgcaaacctgcaacattacaatcccttgcccgatgcggcgattgccaaagcgtggaatatccccgaaaactggttgttgcgcgcacaaatggttatcggcggtattgaaggggcggcaggtgaaaagacctttgaaccagttgcagaacgtttgaaagtgttcggcgcataa

SEQ ID NO: 47862 - DNA, 360 bp, Neisseria meningitidis; identical to SEQ ID NO: 36598

SEQ ID NO: 47863 - DNA, 303 bp, Neisseria meningitidis; identical to SEQ ID NO: 46295

SEQ ID NO: 47864 - DNA, 201 bp, Neisseria meningitidis; identical to SEQ ID NO: 38240

SEQ ID NO: 47865 - DNA, 1548 bp, Neisseria meningitidis
atgcagcttaatcctgctgaaattagcgatttgattaaagccaagatcgaaaatctgtctgtaaatgccgaagtgcgtactcgtggtaccgttgtttctgttacagacggcattgtgcgcattcatggcttgtcagacgcgatgcaaggtgagatgctcgaattccccggtaacactttcggtctggccatgaacttggagcgcgactccgtcggtgccgtagtgttgggtgagtacgaacacattaaagaaggcgatacagttacttgtaccggtcgtatcttggaagtgccggtcggacgcgaactggtcggacgcgtcgttgatgcattgggtcggcctatcgacggcaaaggcccgattaatacaactttgaccgcccctatcgaaaaaatcgcaccgggcgtgattgcgcgcaaatcggttgaccagccgatgcaaaccggtctgaaggcgattgactctatggttcctgtcggtcgcggtcagcgtgagttgattattggcgaccgtcagacaggtaaaacggccgtagcattggatgccatcgtcaaccaaaaaggtacgggtgttatctgtatctatgtcgctatcggtcaaaaagcatcttctattgccaacgtggtccgcaaattggaagagcatggcgcgatggagcataccatcgtggttgctgcaactgcatctgaagcggcggcattgcaatatatcgcaccttactccggttgtacgatgggtgaattcttccgcgaccgcggcgaagatgccttgattgtttatgacgatttgtccaaacaggctgtggcttaccgtcaaatttccctgcttttgcgccgtccgcccggccgcgaagcctatcccggcgatgtgttctacctgcactcccgtctgttggaacgtgcagcacgtgtcaatgaacacgaagtggagaaattgaccaacggcgaagtaaaaggcaaaaccggttctctgaccgcgttgccgattatcgaaacccaagcgggcgacgtatctgctttcgttccgactaacgtcatttcgattaccgacggtcagattttcttggaaaccgacctcttcaacgccggtatccgtcctgcaatcaatgccggtatttccgtatcccgcgtaggcggtgctgcacaaaccaaagtgattaaaaagctgggtggcggtatccgtttggcgttggcgcaatatcgtgaattggcggctttctcgcaatttgcatccgatttggatgaagctacgcgcaaacaattggagcatggcgaagtcgtaaccgaactgatgaaacagaaacagttcagtacgttgaatacggctgaaatggctttgaccctttgggcaatcaacaacggttcgtattctgatgttccggttgccaaagctctggcttttgaatctgaatttttgagctttgtccgtacccaacatccggaagttttggaagccgtcaatgcttcaggtgcaatgtccgacgagagcgagaaaacgcttgaagcagccatgaaatccttcaaatcttcttacgcctatcaggcataa

SEQ ID NO: 47866 - DNA, 621 bp, Neisseria meningitidis; identical to SEQ ID NO: 36557

SEQ ID NO: 47867 - DNA, 795 bp, Neisseria meningitidis; identical to SEQ ID NO: 45782

SEQ ID NO: 47868 - DNA, 1893 bp, Neisseria meningitidis; identical to SEQ ID NO: 37559

SEQ ID NO: 47869 - DNA, 768 bp, Neisseria meningitidis; identical to SEQ ID NO: 39902

SEQ ID NO: 47870 - DNA, 1098 bp, Neisseria meningitidis; identical to SEQ ID NO: 44280

SEQ ID NO: 47871 - DNA, 276 bp, Neisseria meningitidis; identical to SEQ ID NO: 45473

SEQ ID NO: 47872 - DNA, 726 bp, Neisseria meningitidis
atgccccgattccacctgcccgaaaacctttccgtcggacaaaccgtcgccttgcccgacaacatcgtccgccacctcaacgtcctgcgcgtccgccccaacgaaaacatcaccctcttcgacggcaaaggcaaggcacacgccgcacggctgtcttttttggaaaaacgccgcgccgaagccgaaatcctgcacgaagacacaaccgacaacgaatccccgctcaacattacactgatacaatccatctcctccggcgatcgcatggatttcaccctgcaaaaaagcgtcgaactcggcgtaaccgccatacagcccgtcatcagcgaacgctgcatcgtccgcctcgacggggaacgcgccgccaaacgcctcgcacgctggcaggaaatcgtcatctccgcgtgcgaacaaagcggcagaaacaccgttccccccgtactgcccatcatcggctatcgtgaagcactcgacaaaatgccgtctgaaagcaccaagctgattatgagcatcaaccgcgcccgcaaactcggcgacatccgccacccatccggcgcaatcgtctttatggtcgggcccgaaggcggctggacagaacaggaagaacaacaggcatttgaagccggctttcaggcggttacactcggcaaacggattttacgcacagaaaccgccccactcgccgccctcgccgcgatgcagacgctttggggcgatttcgcataa

SEQ ID NO: 47873 - DNA, 2391 bp, Neisseria meningitidis
atgactgaacaaaaacacgaagaatacggcgccgacagcattcaggtgctcgaaggcttggaagcggtacgcaaacgccccggcatgtacatcggcgacacgcaggacggcagcggcctgcaccatatggtgttcgaagtattggacaacgccattgacgaagcactcgccggacattgcgacaaaatcacggtaacgatacacgccgaccattccgtcagcgtcgccgacaacgggcgcggtatgcccaccggcatccacccgaaagaaggacgctccgccgccgaagtcatcatgaccgtattgcacgcgggcggtaaattcgacaacaacagctacaaaatctccggcggcctgcacggcgtgggcgtgtccgtcgtcaacgcgctgtccgactgggtaacgctgaccatctaccgcgacggcaaagaacacttcgtccgcttcgtgcgcggcgaaaccgaagagccgctgaacgttgtcggcgattccgataaaaaaggcacgaccgtgcgcttcctcgccagtacggaaaccttcggcaacgtcgaatacagcttcgacatccttgccaaacgcatccgcgaactttcgttcctgaacaacggcgtggacatcgaattgaccgacgagcgcgacggcaaacacgaaagcttcgccctttccggcggcgtggctggattcgtgcaatacatgaaccgcaaaaaaacgcccttgcacgaaaaaatcttctacgcgttcggcgagaaagacggcatgagcgtcgaatgcgcaatgcaatggaacgacagctatcaggaaagcgtgcagtgcttcaccaacaacatccctcagcgcgacggcggtacgcacctgaccgcgttgcgccaagtgatgacgcgcaccatcaacagctacatcgaagccaacgaagtcgccaaaaaagccaaagtggaaaccgccggcgacgatatgcgcgaaggtttgacctgcgtgttgtccgtcaaactgcccgaccccaaattttcgtcccaaaccaaagacaaactggtttccggcgaaatcggtcccgtcgtcaacgaagtcatcagccaagccctgaccgacttcctcgaagaaaaccctgccgaagccaaaatcatcaccggcaaaatcgtcgatgccgcccgcgcgcgcgaagccgcccgcaaagcccgcgaaatcacccgccgcaaaggcgtaatggacggcttggggctacccggcaaactcgccgactgccaagaaaaagaccccgcattgtcagaactttatttggtcgagggcgattctgcaggcggttccgccatgcaggggcgcgaccgcaaattccaagcgattttgccgcttaagggcaagattttgaacgtggaaaaggcgcgctttgaaaaaatgctcgccagtcaggaagtcgccgctttgattactgcgttgggtgcaggtatcggcaaggaagaattcaatgccgagaagctgcgttaccaccgcatcatcattatgaccgatgccgatgtggacggcgcgcacatccgcaccctgcttttaaccttcttctaccgccaaatgcccgagctggtcgaacgcggctacatctacattgcccagccgcctttatacaaagccaaatacggcaaacaagaacgatatctcaaagacgaattggaaaaagaccaatggctgctcggtttagccttggaaaaagccaaaatcgtttcagacagccgcaccatcgaaggcgaagagcttgccaataccgccaaacaattcctgttggccaaaaccgtcatcgaacaggaaagccgcttcgtagacgaactcgtcctgcgcgccatgctacacgcgtcgcccattgatttgacgtcgtctgaaaacgccgataaagccgttgccgaactttccggtctgcttgacgaaaaagaagtcgccctcgaacgcatcgaaggtcatgaaggacaccgattcatcaaaatcacgcgcaagctgcacggcaacgtcatggtcagctacatcgaacccaagttcctcaacagcaaagcctaccaaaccctcacccaaaccgccgccgcgctcaaaggcatggtcggcgagggtgccaagctttacaaaggcgaaaacgggtacgacgcggacagctttgaaaccgctttggacatcttgatgagcgttgcccaaaaaggtatgtccatccaacgatacaaaggcttgggcgagatgaaccccgaacagctgtgggaaaccacgatggatcccgccgtgcgccgcctgttgaaagtgcgcatcgaagacgccatcgccgccgacgaagtgttcgttacgctgatgggcgacgaggtcgagccgcgccgtgcctttatcgaaaacaacgcgctgattgcccaaaatatcgacgcataa

SEQ ID NO: 47874 - DNA, 411 bp, Neisseria meningitidis; identical to SEQ ID NO: 37452

SEQ ID NO: 47875 - DNA, 723 bp, Neisseria meningitidis
gtggattataaggaatgctgtagtattttttctgatttcagaatggaacggtataaaaatgccgttggggaagacaaagcagctgaattgtatttattgaatttatctttatcaagagaactttttcatgttgtttcaatatttgagattgttttaagaaacaaaattgacatttgccttcagcaggcgtttaaagacagaaactggttatataacagcatacagccacagacgaatcccgcattaaaatatcaaggttgctttttaagaaatggcacgaaagaatctgctgaattaatcaaggttgcattatctaaaatacaaaataatagcgggggaaagtttgaccacaaccaattggttgcaggactaggattcggtttttggcggtatctgtttgcaggagggaaagatgcccaatttgatgctacagggaaagtattgatgaaagtttttccaaaaaagcccaaatctacaccaagtgtgcaatataaccaaaaatggatttttcgagaactttccaatattaacaaattccgtaatcgtttggcacatcacgagccgatttgttttaaaggtgcaataaaagataccaactacgctagaaatattcaccaatctatttttgaactgcttaattacatggatgtagatactgcttcagtatttagccattttagcgatcaagtgattgcggtctgcgatgaaatcgacaaactgtaa

SEQ ID NO: 47876 - DNA, 1152 bp, Neisseria meningitidis; identical to SEQ ID NO: 39535

SEQ ID NO: 47877 - DNA, 747 bp, Neisseria meningitidis
atggattttcgttttgacattatttacgaataccgctggatgttcctttacggcgcactgacgaccttggggctgacggtcgtggcgacggcgggcggttcggtattgggtctgttgttggcgttggcgcgcctgattcacttggaaaaagccggtgcgccgatgcgcgtgctggcgtgggcgttgcgtaaagtttcgctgctgtatgttacgctgttccggggtacgccgctgtttgtgcagattgtgatttgggcgtatgtgtggtttccgtttttcgtccatccttcagacggcattttggtcagcggcgaggcggcaatcgcgctgcgtcgcggatacgggccgctgattgccggttctttggcactgatcgccaactcgggggcgtatatctgtgagattttccgcgcgggcatccagtctatagacaaaggacagatggaggcggcgcgttctttggggctgacctatccgcaggcgatgcgctatgtgattctgccgcaggcattgcgccgcatgctgccgcctttggcgagcgagttcatcacgctcttgaaagacagctcgctgctgtcggtcattgctgtggcggagttggcgtatgttcagaatacgattacgggccggtattcggtttatgaagaaccgctttacaccgtcgccctgatttatctgttgatgacgactttcttaggctggatattcctgcgtttggaaaaacgttacaatccgcaacaccgctga

SEQ ID NO: 47878 - DNA, 1518 bp, Neisseria meningitidis
atgttgtatttcagatacggctttttggttgtttggtgtgcggcaggtgtttctgccgcctatggggcggatgcgcccgcgattttggatgacaaggcattgttgcaggtgcagcggtcggtgtcggataagtgggcggaatcggattggaaagttgaaaatgatgccccgcgcgtggttgacggggattttttgttggtgcatccgaaaatgttggaacatagtttgcgcgacgcgctcaacggcaatcaggcggatttgatcgcttcgttggcggatttgtatgccaagctgccggattatgacgcggttttgtacggcagggcgcgggctttgctggcgaaattggcgggaaggccggcggaggcggtggcgcggtatcgggaactgcacggggaaaatgcggcagacgagcggattttgctggatttggcggcggcggagtttgacgatttccgactgaagtcggcagaaaggcattttgcggaggcggcaaaattggatttgccggcaccggttttggaaaatgtggggcgttttcggaaaaaaacggaggggctgacgggctggcgtttttcgggcggcatcagtccggcggtcaatagaaatgccaataatgccgcgccgcagtattgccggcaaaacggaggcagtcagatatgcagtgtcagccgggcggagcgggcggcaggcttgaattatgaaatcgaggcggaaaaactgacggcgttggcagataatcattatttgttgttccgttccaatatcggcggcacgagctattatttcagtaaaaaatcagcttatgacgacgggttcggcagagcgtatttgggttggcagtataaaaatgcacggcagacggcggggattttgccgttttatcaggtgcagttgtcgggcagcgacggctttgatgcgaaaacaaaacgggtaaacaaccgccgcctgccgccgtatatgctggcgcacggagtcggcgtgcagttgtcccatacttaccgcccaaacccgggatggcaattttcggtcgcgctggaacattaccgccaacgctaccgcgaacaggatagggcggaatacaataacggcaggcaggacgggttttatgtttcgtcggcaaaacgtttgggcgaatcggcaactgtgttcggcggctggcagtttgtgcggtttgtgccgaaacgcgaaacggtgggcggcgcggtcaataatgccgcctaccggcgcaacggtgtttatgccggttgggcgcaggagtggcggcagttgggcggtttgaacagtcgggtttctgcgtcttatgcccgccgcaactataagggcattgcggctttctcgacagaggcgcaacgcaaccgcgaatggaatgtctcgctggctttgagccacgacaagttgtcgtacaaaggtatcgtgccggcgttgaattatcgtttcggcaggacggaaagtaatgtgccgtatgcgaaacgccgcaacagcgaggtgtttgtgtcggcggattggcggttttga

SEQ ID NO: 47879 - DNA, 657 bp, Neisseria meningitidis; identical to SEQ ID NO: 45433

SEQ ID NO: 47880 - DNA, 525 bp, Neisseria meningitidis
atgaaaaaagcacttgccacactgattgccctcgctctcccggccgccgcactggcggaaggcgcatccggcttttacgtccaagccgatgccgcacacgcaaaagcctcaagctctttaggttctgccaaaggcttcagcccgcgcatctccgcaggctaccgcatcaacgacctccgcttcgccgtcgattacacgcgctacaaaaactataaagccccatccaccgatttcaaactttacagcatcggcgcgtccgccatttacgacttcgacacccaatcgcccgtcaaaccgtatctcggcgcgcgcttgagcctcaaccgcgcctccgtcgacttgggcggcagcgacagcttcagccaaacctccaccggcctcggcgtattggcgggcgtaagctatgccgttaccccgaatgtcgatttggatgccggctaccgctacaactacatcggcaaagtcaacactgtcaaaaacgtccgttccggcgaactgtccgccggtgtgcgcgtcaaattctga

SEQ ID NO: 47881 - DNA, 1287 bp, Neisseria meningitidis
atgagcgcaatcgttgatattttcgcccgcgaaattttggactcacgcggcaaccccacagtcgagtgtgatgtattgctcgaatctggcgtaatgggacgtgcagccgtaccgagcggtgcgtccaccggtcaaaaagaggctttggaactgcgcgacggcgacaaatcccgttattcgggcaagggcgtattgaaggcggtcgaacacgtcaacaaccaaatcgcccaagccctcattggtatcgatgccagcgaacaatcttatatcgaccaaatcatgatcgaattggacggtactgaaaacaaaggtaacttgggtgccaacgcgactttggccgtttctatggccgtagcacgcgcagccgctgaagatgcagggctgccgctttaccgctacttgggcggcgcaggtccgatgtccctgcccgtaccgatgatgaacgtcatcaacggcggcgaacacgccaacaacagcctgaacatccaagagtttatgattatgcccgtcggcgcaaaatctttccgcgaagcgttgcgctgcggtgcggaaattttccacgccttgaaaaaactgtgcgacagcaaaggcttcccgaccacagtcggcgacgaaggcggtttcgcccccaacctgaacagccacaaagaagccctgcaactgatggtcgaggcgaccgaagccgccggctacaaagcgggcgaagacgtattattcgcattggactgcgcctccagcgagttctacaaagacggcaaataccacttggaagccgaaggccgctcctacaccaacgcggaatttgccgaatatctggaaagtctggtcaacgagttccccatcatctccatcgaagacggcatggatgaaaacgactgggaaggctggaaactgctgaccgaaaaactgggcggcaaagtccaactcgttggcgacgacctcttcgttaccaacccgaaaatccttgccgaaggcattgaaaaaggcgtggcaaacgcactattggtcaaagtcaaccaaatcggtactttgagtgaaaccctgaaagccgtcgacttagccaaacgcaaccgctacgccagcgtaatgagccaccgctccggcgaaaccgaagacagcaccattgccgacttggcagtcgccaccaactgtatgcagatcaaaaccggttctttgagccgttccgaccgcatggcgaaatacaaccaactgctgcgtatcgaggaagaattggcggaagccgccgactaccccggcaaagccgcattctaccaactgggcaaataa

SEQ ID NO: 47882 - DNA, 924 bp, Neisseria meningitidis; identical to SEQ ID NO: 46119

SEQ ID NO: 47883 - DNA, 795 bp, Neisseria meningitidis; identical to SEQ ID NO: 45834

SEQ ID NO: 47884 - DNA, 834 bp, Neisseria meningitidis
atggttgccgacctgcgcgctgctaccggcctgggcatgatggaatgcaaaaaagccttggttgaagccgaaggcaacttcgacaaagccgaagaaatcctgcgtattaaatctggtgcgaaagccggtaaactggctggccgtactgctgccgaaggcgtattggcttacgcgatcaacggcaatgtcggcgcattggtcgaagtaaactgcgaaaccgacttcgttgctaaagacgcgggcttcgtagaatttgccaacttcgttgcgaaaactgccgccgagaaaaaaccggcttctgttgaagaactgagcgaactggttgaagcagaacgcaaagccatcatcgccaaattgggcgagaacatgtctgtccgtcgcttccaagtgatcgacactgccaaccaactggttgcctacatccacggcgcattggcgaccgaaggcgtattggttgagtacaaaggctctgaagacgtagcacgcaaaatcggtatgcacattgttgccgctaaaccacaatgcgtaagcgaagccgaagtagatgccgaaaccgttgaaaaagaacgccacatctacaccgaacaagccatcgcttccggcaaacctgccgacatcgccgctaaaatggttgaaggccgtattcgcaaattcttggctgaaatcactctgaacggccaagcattcgtgatgaaccccgatcaaactgttgcccaattcgccaaagaaaacggcactgaagtggtcagcttcgtccgctacaaagtaggcgacggtatcgagaaagccgttgtcgactacgcagccgaagtagccgcagccgccaaagtgtaa

SEQ ID NO: 47885 - DNA, 423 bp, Neisseria meningitidis; identical to SEQ ID NO: 44621

SEQ ID NO: 47886 - DNA, 3219 bp, Neisseria meningitidis
atgaataacgaaaccaagatttatattaccgccgaaactggcggtgtcgtcagcggcgtagaaaaggcaaaacaatccatcaagtctttgggggatgtggcatcttcccaggggcggcgtatttctgacggattggtacatagtggcgacggagcagagaaatcatcgacggtagtgtcggcggcatcgaagcggacggaacggtctttggcttctctggagaatgccatccgccgcgatatagccgttaagattgcaggcggtaaggcaaaccgagagtattacgaagagcttgcgcgccagcgcggtatcgatattgcacggcttaatccgctactgtcccaattggacaggcataatacgcagaccaatcgcgctacgcagtctgtcaagcagttcaataacgcattgcggcaaaccccggcacaaattaccgacatcgttacccagcttgcaggcgggcaaagcccgtttctgatcatgattcaacagggtgggcagttgcgtgatatgtatggcggcttcggtggtatgcttaagggactggccacggtcatttcccctatgcgccttgctgtcgcggggttgggcggcggcattgcggcattgggttatgcgatgtatcagggggcagaggaatcgtgcgaataccgtaaagccttgatacttgccggagatgcagcagggattactgcagacaggatgcaggaaatcgctgtttcggtcggggcagcgacgggcggctatgctgatgcgcgtgctgcaattacggccttggtctcaagcggcaaggttgcaacggacaattacgaacagttcgcccggagtattaccctccagtcgcaggcaacggggcaaagtattgacgatttggttgagaaatatactgaaatcgccaaagacccgctgaaagctgtggtatccctatcagccacctaccggacaatgactgccgatgtttaccagcaggtcaaggctttgcaggcacaaggtcgggaacaggacgcggttgcattggtgcagcggaaattctccgaagagtcggaggatatggcaaaacgcgtactgggtaatcttgggttgattgagcgggcgtggaaggatattaaagaaagtgcgtcggaggcatgggatgctgttaaatccataggtagggacaagaccaagctggatgaaattgccgcgctagattcgtttatttcccaaatcgaaaccagcaagaaacatccggttacacaattgttttggggtgaagagggtgagcgtaagctgcaggaagcctatgcgcggcgtgcccggttgcgtgccgaaatcgacaaggaggcagccgctgctgaaactttgcggcagaaacagaagcagaaccaaaatcgaactgaaggtatagccgaattggaggctgtttcggaacgttatgccactcgagagcagcaacggcagcgcgaactgcttaaaaacgacaaagcacggaaaaaggcgttggacggcatcactgacgcgaaaaagcggcaagaaatcattaataagcacgcggcaaatgccaagctgattaatgaaagttttgccgagaaaaaacacgaacgacagaaagaaaaaacggataaaacaagctaccccactgtttcgaacggcttgaggattaaaccgggagccgaagcgggcggcaaagcgctaggcggaacatatgccttcgcgcatgccatgcagcagatgctgggagaccgtctgttccgtttcggcgccttccgagatcgataccacattgggaaaaacagcctgcataacagtggattggcatttgatgccactccttctcccggtatggggatgaagcagaaacaggaagttgtcgcccaaatgacccgttatcttgagtcgttggggtttaaaaacgggcaggattttaaccttaaactggaacttgccggacagcgcaataaaaacggtacggtagcaaccggcgaccactggcatttcaactggcgttctcgagaggcggctgcgcgatttgccggcggtgttgagggccaggtgaaaaatatggcgcacctcgggttgtttaagggagtggagaaagaacctctttccggctacgaaaaatggcacgaggattttaaccgtcgggcggcggaggcgggagcgaagcgggtgctggaaattttaaacggcaaccgcgccatcggcgaacagttgaagttgttgtccgacccgactttcggcgattggacgctgaagcagcaggccgatgcccgcgagctggcggagaaggccgatgcgcaggatagtttgacggccgcctccaaaaaatattccgacatagtgaagcaaatgaccgacgattcgaaagaaaagttggatgacaggctgtttgaaatttcgcttatcggcaaaacccgtgaagaaatcgagaaactgacgctggcgagactgtgggacagacagatagcgaaagcccgtgaagaaggtgcgccgttggaaagtatcgatttattggagcgcggcaaggcggaagggatgagcaatctttctcaaatgcagaaggcgcgtgcagacagcgacaatgattggcgcggcggtatcgagtccggcttgaaaagctacatcgattcattcggaacgatgaggcaggcgatggaaaatgccaccgtacaaaccttcgacaaaatgggggatgcgctggcagactttgttgccacaggcaaacttgattttcgaagcctgactgtttccattttgcaggatttgtcaaaaatgctgattaaaatggcgattgtcaatgcaatgaagtcggcgttgggttatgccgacggcggtattgtcggtggaggaagtacgcagttcgacgcgttgttttccggcggcggctataccggctacggcgggaagtatgagcctgccggcattgttcacaagggcgaagtcgtattttcccagcgggacgtacgtaatcacggcggcgttgcggctgtcgagcggctgcggttgaatggttatgccggtggcggcgcagtaggactgccgtccgttttgaccggagtccgttcggccggggctggaagcatgcaggtcaacatcactataaatcgggacggtagcaccgaatcggacagcagtgccgatacggagatggcgaagcatcttgccgctgccataccgggcatggtggaacagtggtatgtcaagaatgtgtaccgtgaaaacggtacttaccataaatag

SEQ ID NO: 47887 - DNA, 204 bp, Neisseria meningitidis
atgaacggattaaaagcagatcgtcctagtgcaaacaaagcaaacttatctattgatgatgtgatcaagcaagaagaaatcaagagaatcagttttgatatgtctgaatctctgcatagagaattgaagaaatacgcggctgagaatggtgtaactattcgcgtcgtgctcaataaactcgtttcagatttattgaataaataa

SEQ ID NO: 47888 - DNA, 2028 bp, Neisseria meningitidis; identical to SEQ ID NO: 39197

SEQ ID NO: 47889 - DNA, 846 bp, Neisseria meningitidis
atgaatattgcggacggacggcaggcgtttcccgcacctgcaaaactgaatctcgatttgaggattaccggcaggcgggaagacggttatcacaatatcgaaagcatattctgcctgatagatttgcaggataccgtatatttgaaatcgagggatgacggcaaaatcatcctgcacaatccggttgatggaatgccgcaggaagcggatttaagctaccgtgccgcatcgttgctgcaaaaatatgcgcgcaaccccgccggcgtggaaatatggctggacaaaaaaatcccgacaggggcgggtttgggcggcggaagctcggatgcggcaaccgttttgctggtgttgaaccgttggtggcagtgcggtctgacgcagcggcagctcattgattcgggcgcggctctgggggcggacgtaccgttttttattttcggcaaaaatgcgtttgcgcggggtataggcgacaggctggacgaaatggatattccgaaacagtggtatgtcatcgtcaaaccgcccgtccacgtttccactgcaaaaattttcacacacgaaggcttgacacgaaattccgcctcaagcataatgccgactttccaaaacctgcaaccgtttagaaatgatatgcaggcagttgtatttaaagaataccctgaagtttggaaagcctattccgagttgtcccgatatggatttgccttaatgacaggttctggtgcgtgtgtattcacggcgtgtcaagataggaatagcgcatacaatatataccgacaagtttcagatttgtacgaggcatatttggcagagggtctttcaaaacatccttggttgtccgtataa

SEQ ID NO: 47890 - DNA, 258 bp, Neisseria meningitidis
atggtattgttattaattgtaaataaatattggaaggtaaatgatatgaaaaatgaaattcaaaaaatcatggacaaatataatccatggcatgaagatgattttaagtcgtatgaagacattgccagagatgtatcgctgacgacagataaaacgttcattgaacattatttgttagaagtttattcagaagaaaacggacattttgaccaagagaatgtccatgcaatgatagaagaaattaaaaatgcaatttag

SEQ ID NO: 47891 - DNA, 1113 bp, Neisseria meningitidis; identical to SEQ ID NO: 45363

SEQ ID NO: 47892 - DNA, 786 bp, Neisseria meningitidis
atgggttttctgcaaggcaaaaaaattctgattaccggcatgatttccgagcgttccatcgcttacggcatcgccaaagcctgccgcgaacaaggcgcggaactggcgtttacctacgttgtggacaaactggaagagcgcgtccgcaaaatggcggcggaattggattccgaactcgtgttccgctgcgatgtcgccagcgacgacgaaatcaaccaagtgttcgccgatttgggcaaacattgggacggcttggacggtttggtgcattccatcggttttgcgccgaaagaagccttgagcggcgacttcctcgacagcatcagccgcgaagcgttcaacaccgcacacgaaatttccgcatacagcctgcccgcattggcaaaagccgcccgtccgatgatgcgcggcagaaactccgccatcgttgccctgagctacttgggcgcggtgcgcgcgattccgaattacaacgtgatgggtatggcaaaagccagccttgaggcgggcatccgttttaccgccgcctgtctgggcaaagaaggcatccgctgcaacggcatttccgcaggcccgatcaaaacgcttgccgcctccggcatcgccgatttcggcaaactcttgggacacgtcgccgcccacaatccgctccgccgcaacgttaccatcgaagaagtcggcaataccgccgccttcctgctgtccgacctgtcgtccggcattaccggcgaaatcacttacgttgacggcggttacagcattaatgccttgagcaccgagggataa

SEQ ID NO: 47893 - DNA, 828 bp, Neisseria meningitidis; identical to SEQ ID NO: 45164

SEQ ID NO: 47894 - DNA, 885 bp, Neisseria meningitidis
ttgcagcggggctgcattatcgaagggcatatcattatgttaagcaaaatcagcgaatcactggcaaacctttccggtgcggaacgcaaagtcgccgaatgtgcattggcggaacccaaatggttcgttcatgccgccgttgccgaaattgccgaacgtgcgtccgtcagccagccgaccgtcatccgattctgccgcagcttgggttataaagggctgcccgagttcaagctcgccttgtccgccagcatcggtcatgagggtatgccctatgtccacgaagaactcaatgccgacgacgatatggcaagcgtggtcgagaaagtgttgggcaatgccgccgcctcgctgttgggcgaacgccgcttcctgaaagagtcggagctggaaaacgccattgccacgctgatgcacgcccgtcgcgtcgagttttacggtgtcggcaattccggtatcgttgcgcaggacgcgcaacacaagtttttccgtttcggaatgtccacggtcgcctatgtcgatacgcacacgcagctgatggcagcatccgttttgagcgatcaggatgttttggttgccatttccaacacgggttcgtctatcgaacttttggatgcggtcagcatcgccaaagaaaacggcgcgtccgtcatcgcactgacccgcaacgattcgcctctggcgcaacttgccgactgcgtgttgagcgttgccacacaggaaaatgccgaactctacacgcccatggtttcccgcctcttgcagcttgccgtcatcgacattctcgccatcggacttgccctgcgcttgggcgatgctgccagcctgcaattgcagaaaagcaaaaaaagcatacacaacaagcacatcgattacgacaaagattga

SEQ ID NO: 47895 - DNA, 483 bp, Neisseria meningitidis; identical to SEQ ID NO: 40363

SEQ ID NO: 47896 - DNA, 216 bp, Neisseria meningitidis; identical to SEQ ID NO: 38426

SEQ ID NO: 47897 - DNA, 2526 bp, Neisseria meningitidis
atgaatccaaactcaaaacataacactaactttaccaatcttcttaaaccgtctgatagtgatataaaacaatttgccgcacaacacatccgccacctcaccgacctgctcaaccgctatgcctacgaatactacaccctcgacgcgcccagcgtacccgatgccgaatacgacaaattattccgcgagctcgaagcgttggaattaaaccatcccgagctcaaactgcccgacagtccgacccagcgcgtcggcggcgagcctttggcgggatttgccgaagtgcgccacgaagtgccgatgctgtcgctgaccaacgctttttccccgcaagatgaaaacggcgtgttcgaccatgccgaaatgtacgctttcgaccaacgcgtgcgcgacggtttggacggcggcaaacccgaatacgttatcgaacccaaattcgacggcctcgccatcagcctgctctaccgcgacggcgtattggtgcaggcggcaacgcgcggcgacggcacgacgggcgaagacgttacccaaaacatcaaaaccgtatccaacatccccttgcggctgcacggcgaaaatacgcccgaactcatcgaggtacgcggcgaagtgctgatgctcaaagccgattttgtcgccctcaataaaagacaagccgaaaacgggcaaaaaccctttgccaatccgcgcaacgccgccgccggcagcctacgccaactcgattcgcgcatcaccgcgcaacgcaaactgcactttttcccctactccgtcgcccgccagcaagatggtttcgtcgcggaagaacacatccaggaactcgcctatttccaagcactcggcttcagtctgcccaatggcaatttcggctgtttcaaaaatatcgacgaagtattggcgttttacgaacacatgcagcaaaaacgccccgaactgccctacgaaatcgacggcatggtggttaaagtcaacagcttggcgcaacagcacgaactcggcttcatctcccgcgcgccgcgttgggcggttgcccacaaattccctgccgaagaagccctgaccattgtcgaagcgattgacgtgcaaatcggcaggacgggcgcggtaacgccggttgcccgattacagcccgtattcgtcggtggcgtaactgttaccaacgccaccctgcacaatcaggacgaagtatcgcgcaaagacgttcgcgtcggcgataccgtcgtcgtacgccgtgccggagacgtgattcccgaagttgtgcgcgtgatttttgaacgccgcccgatgcgggaaaccgccgttgccgtttcagacggcatcgggcatcggcaggacgatttgtttgccgaaacaccgtccgccaatcaaacccaatccgttccgctccacaagccctaccgcctgccgacccactgccccatctgccgcagcgaaatcgaacgcgaagaaggcgaagccgtcgcccgatgcagcggcggtatgctttgtcaggcacaacgcgcgcaaggcttaatccacttcgcctcgcgcaaagcgatggacatcgacggcttgggtgaaaaacaaatcgaacagcttgtcgcgcaagacctcgtccgccacttcgccgatctctaccgcctcgacatcccgaccttgcaaaaaatgaaggaaacagcggacaaaaccgttgccgaatcggatcaaatgccgtctgaaggcagttcggtcggcgcgtcgggcaaacataaaaaacaaccagtcaagtgggcggaaaacatcctcgcaggcatagaagccagcaaaacgcccgaactcgcccgcttcctgttcgcgctcggcatccgccacgtcggcgaacgcaccgccaaaacgctggcacaggcattcggcacattggaacgcgtccgccgcgcccccgaacccgtcctcgcctgcctgcccgacatcggtacggtagtggcgcgttccattgcccacttcttcgcccaagccgaacagcaggcgatgatagacgaactgctcgccgcaggcgttgccccgcaaacccaagccgttaccatcccgcccgcccgccacgccgaaccgcaacgctggatcgcccgcctgcccggtttcaaaatcagcgaaaacaaagcccaagccttatgggaactcgccggcaaaaacatagaagggctgcaaaccgacaaagccctccccaccgactggcaggcgtggcgcagcgaaccacaaaacgccgccctgctcgaaaacctgaaaaccttcttcgcgcaaatgccgtctgaagacgaggcggcgcaaggttcagacggcatcaataaagccgtggcgggcaaaaccttcgtgttaaccggcaccctgcccaccctcaaacgcgaccaagcccaatccctaatcgaagccgcaggcggcaaagtttccggcagcgtgtccaaaaaaaccgattacgtcgtcgccggagaagccgcgggcagcaagctggaaaaagccaatgccttgggcgtttccgtcctcagcgaagccgaactgcttaccctgctcggctga

SEQ ID NO: 47898 - DNA, 1329 bp, Neisseria meningitidis
atgaaaaaagtatttatccgtaccttcggctgccagatgaacgaatacgacagcgacaaaatgctcgccgtcctcgccgaagaacacggcggcatcgaacaggttacccaagccgacgaagccgacatcatcttgttcaacacctgctccgtgcgcgaaaaagcacaggaaaaagtgttctccgatttggggcgcgtgcgtccgctcaaagaaaaaaaccccggcctcatcatcggcgttgccggctgcgtcgcctcgcaagaaggcgaaaacatcatcaaacgcgcgccttatgttgacgtggtcttcggcccgcaaacgctgcaccgcctgcccaaaatgattgtggacaaagaaaccagcgggctgtcgcaagtcgatatttccttccccgaaatcgaaaaattcgaccacctgccgcccgcccgcgtcgaaggcggcgcggcatttgtatcgattatggaaggctgttccaaatactgctcattctgcgtcgtcccctacacgcgcggcgaagaattctcccgcccgctcaacgacgtattgacagaaatcgccaaccttgcccagcaaggcgtgaaagaaatcaacctcttgggacaaaacgtcaacgcctatcgcggcgaaatggacgacggcgaaatctgcgacttcgccaccctgctgcgcatcgtccacgaaatccccggcatcgaacgtatgcgcttcaccaccagccacccgcgcgagtttaccgactcgattatcgagtgctaccgcgacctgcccaaattggtttcccacctgcacctgccgattcaaagcggttccgaccgcgtattgagcgcgatgaaacgcggctacaccgctttggaatacaaatccatcatccgcaaactgcgtgccatccgtcctgatttatgcctgagcagcgatttcatcgtcggcttccccggcgagaccgaacgcgagttcgagcaaaccttgaaactggtgaaagacattgccttcgacttgagcttcgtgtttatttacagtccgcgccccggcacgcctgccgccaacctgcacgacgacacgccgcacgaagaaaaagtgcgccgcctcgaagccttgaacgaagtcatcgaagccgaaaccgcgcgcatcaaccaaaccatgatcggcacggttcaacgctgcctggtcgaaggcatctccaaaaaagaccccgaccaactgcaagcccgtaccgccaacaaccgcgtcgtcaacttcaccggcacgcccgacatgattaaccaaatgatcgatttggaaatcaccgaggcctacaccttctccctgcgcggcaaagttgtcgaagcctaa

SEQ ID NO: 47899 - DNA, 1797 bp, Neisseria meningitidis
ttgccccgaattgccatgccttatttcgccctgtttgacgatgccgtaagcggccgcgcaaaacgctatcaaaatcatgtggaaagccgttttttccgtcccgaagaactcgatgctttggacggcgcgctgcaatcgggctggcaaaaagggctgcatgccgtgttgtttgcagactacggattcggtttgccgctgacgggggttgagtccgagcgcggcggcaaccttgccctgcactggtttgccgactgcgccgacaccgatgccgcaagctggcttgcccgacactcagacgaccttcccgccggcatttccacgccgcaatcctccgtatccgaagccgattacctcgaccatatccgccaaatccacgaagccatccgacgcggcgacacctatcaaatcaactacactacccgcctgcacctgcaagcctacggcaatcccgtcaaactttaccaacgcctgcgccagcccgtcccctatgccgttttgtcccacctgcccgatgcacaagggcaatccgcgtggacgctgtgtttctcgcccgaactcttcctcaaaatcggttcggacggcaccatcagcaccgaaccgatgaaaggcaccgcgccgattttgggcgacggacaagacgaacgccgcgccgccgagttgcaagcagacccgaaaaaccgcgccgaaaacgtgatgattgtcgatttgctgcgtaacgatctcggcaaaatcgcccaaaccggcacagtatgcgtacccgaaccgtttaaagtatcgcgtttcggcagcgtttggcagatgaccagcaccatccaagcccaagccttgccgcacacctcgttcgccgacatcctccgcgccgccttcccctgcggcagcatcaccggcgcgcccaaaaaaatgagtatgcagattatcgaatcgctcgaagccgaagcgcgcggactttatacgggcagcatcggctatttgaacccgtgttccggcggcttggggtttgaaggcacgttcaacgtcgttatccgcaccttgtcgctcacgccgctttcagacggcatttatcaaggcgtgtacggtgtcggttccggcatcgtcatcgacagcgaccccgccgccgaatatcgggaatgcggctggaaagcccgtttcctcaacgaattgcgccccaacttcggcatttttgaaaccctgcgcgcggaaaacggacgctgcaccctgctcgaccgccacctatgccgtctgaaaacctccgcacgcgccctcaacctgcccctgcccgacggctgcgaaaatcaaatcaaacaatacattgccgacttgcccgatggcgcgttccgcgtcaaagccctgctcgcttcagacggcatcagcctgtcccgcgccgttttaaaccgtctgaccgacaaacaacgcgtcatcatttcgccgaccatcctgcccgcacaaaactacctgcgccgcttcaaaaccacacaccgcgccctcttcgaccaagcgtggcaaaccgccgaaacacaaggcgcgttcgacagcctgtttttcaattcagacggcatcctgctcgaaggcggcagaagcaacgtgttcgtcaaataccaagggcaatggctcacaccgtctttagatttagacattttaaacggcataatgcgccaagccgtattggacgaaccgcaaaaatatttgcaaacaaatcaagtaatcgaaacacacatcacacaaaaaacactgcaagaagccgaagaaatccgcctctccaacgccttgcgcggcgtatttgccgccgcccttgcctga

SEQ ID NO: 47900 - DNA, 666 bp, Neisseria meningitidis; identical to SEQ ID NO: 45929

SEQ ID NO: 47901 - DNA, 1137 bp, Neisseria meningitidis; identical to SEQ ID NO: 38656

SEQ ID NO: 47902 - DNA, 1137 bp, Neisseria meningitidis
atggaaatgaaacaagccgattcaaccatcaaatctcgtgcggcggtggcattcgcccctaaccaacccttacaaattgtggaaatcgacgtagaaatgccgcgtaaaggcgaggtgttaatccgcaatacccacactggcgtgtgccatactgatgcgtttacgttatcaggaagcgatcctgaaggcgtattccctgtggtgcttggacacgaaggtgcgggtgtggtcgttgctgtgggcgaaggtgtgtcaagcgtaaaaccgggtgatcacgtgattccgctttacaccgccgaatgtggcgaatgtgagttttgttgttcaggtaaaaccaacttgtgcgtctcagtgcgtgatacacaaggtaaaggcttaatgccggacggcacgacgcgtttttcttatcaaggtcagccgatttatcactatatgggctgttcgactttcagtgaatactccgttgttgccgaagtttcactggcgaaaatcaaccctgaagccaaccatgaacaagtatgtttgctcggctgcggcgttaccacaggtattggtgcggtacataatacggcaaaagtgcaagaaggcgactctgttgccgtgtttggcttaggcgcgattggtttggcggtggtgcaaggtgcgcgtcaagccaaagccggccgcattatcgccattgataccaatccatcaaaatttgagttggcaaaacagtttggtgcaacggattgtttgaacccgaacgattacgataaaccgatcaaagatgtgttgttagacattaataaatggggcattgaccatacctttgaatgtatcggcaacgtaaacgtaatgcgtcaggcattagaaagtgcacatcgtggttggggtcaatccattatcatcggcgtagcaggtgcaggacaagaaatttcaacgcgtccgttccagttggtaacaggtcgtgtttggaaaggttcagcatttggcggtgtgaaaggtcgctctgaactgccgaaaatggtggaagattcaatgaaaggcgacattgagttagaaccgtttgtaacccacacaatgacactcgatcaaatcaataaagcctttgacttaatgcacgaaggtaaatcgatccgcgccgttattcactactaa

SEQ ID NO: 47903 - DNA, 1344 bp, Neisseria meningitidis; identical to SEQ ID NO: 38748

SEQ ID NO: 47904 - DNA, 1098 bp, Neisseria meningitidis
ttgaccgtgaagaaaataaggtcgtctgaagagtctgatatgtcaggctatacaggcggcctcgttgtttcaggtggcatatcattaattgacagacttgatattatggaaaatgtaaaccgcatcgttgcagaaggcattgccgcagtagaagctgcgcaagacttcaacgctctagaacaaatcaaagcccgttatcttggcaaaaccggcgagttgaccggacttctgaaaactttggggcaaatgtcgcctgaagagcgcaaaaccataggtgcgcatatcaatgaatgcaaaaaccggtttcagacggcttttaatgccaaacgcgatgccctcaacgaagccaagctgcaagcccgacttgccgccgaagccctcgacattaccctgcccggacgcgctcaggaaggcggcagcctgcatcccgtaaccctgaccttgcaacgtgtggtcgaactctttcacggaatgggtttcgaagtggcggacgggcctgaaatcgaagacgattttcacaatttccaagccctgaacatccctgcaaaccatcctgcccgtgcgatgcaggatacgttttacgttgaaaacggtgatgttttgcgtacgcacacttccccgattcaaatccgctatatgctcgataaaaaagagccgcccatccgcattatcgcccccggccgcgtttaccgtgtggacagcgatgccacgcactcgcctatgttccatcaggcggaaggtttgtgggtagaagagggtgtaacttttgccgacttaaaagcagtgttcacggattttatccgtcgcttctttgaacgcgatgatttgcaagtacgtttccgcccgtctttcttcccgttcaccgaaccgtctggcgaaatcgacattatgggcgaaaacggcaaatggctggaagtcggcggctgcggcatggtgcatcccaacgtgttgagaaatgtgaatatcgatcccgaaaaatacaccggtttcgctttcggtatcggtctcgaccgtttcgcgatgctgcgttacaacgtgaacgatttgcgcttgttttttgataacgatttgaattttttgaagcagtttgcgaaataa

SEQ ID NO: 47905 - DNA, 1602 bp, Neisseria meningitidis; identical to SEQ ID NO: 39640

SEQ ID NO: 47906 - DNA, 885 bp, Neisseria meningitidis; identical to SEQ ID NO: 44343

SEQ ID NO: 47907 - DNA, 564 bp, Neisseria meningitidis
atgccttggaatctccctatcttcctcacatggttgagggtcttgctcattcctgtcatgacagcccttttttacctgccttttccgtggttcgcggaggaaacgattaatctcaccgccgccgtcatttttgccgttgccgccttaaccgactggtttgacggatttttggcaagactgtggaaacagacttccgatttcggcgccttcctcgatcccgtcgccgacaagctgatggttgccgtatcgctacttttactggtcaaactcgaccggacctatgttttgtttgccatgatcattatcggcagggaaattaccatttccgcattgcgcgaatggatggcgcaaatgggcaaaaggaacagcgttgccgtcgccaccgtcggtaagttcaaaaccgccgcgcaaatgctggcaattttcctgctgctgctgaatattcccgatttttacggatttaatcttgttgttatcggcaatgtattgatgtttatcgcatctttgctgacagtctggtcgatgctgtattatctgaaaatggcgtggaaagaaatcgcctga

SEQ ID NO: 47908 - DNA, 552 bp, Neisseria meningitidis; identical to SEQ ID NO: 45190

SEQ ID NO: 47909 - DNA, 852 bp, Neisseria meningitidis; identical to SEQ ID NO: 45281

SEQ ID NO: 47910 - DNA, 1059 bp, Neisseria meningitidis; identical to SEQ ID NO: 37985

SEQ ID NO: 47911 - DNA, 1152 bp, Neisseria meningitidis
gctaagaggccgtctaaaaacagaaaaaccgtttcagacggtctttgtttaacgccaccgatccagcgggttacaaagcgcagtcaatgccgctgcgcctccacaggaagaattaccgaatgtcgtcaaaatataggacgcattatcgaatttacccaagacaaacgctttgacagtaggtttaaggacttaaaaaaagaatccttatattacctaaataaacatcctgatttagtagcctcttatttgaaggctgaatacgaaaagctggatagggaagacaaaagtatcctgcaccgctacatctcacccggggctgaaatcgtttcgggcagtttgggggttgttctttcaggagtagccggaggcggatcttgtgccgagactttcggcttaggctgtgccgccgctttggttggggtaacgtcttcctacgatcatgtcattactgggacgaaaaacttcggaaaaaaagccagcgagcaacgaccgacgattgcggttcaggccttgaagcagttggggctgtcggagcaggctgcggaatatgttcagttctctatagatttgttcagtgtgggtaaatcggggggcggtatacctaaggctaagcctgtgtttgatgcgaaaccgagatgggaggttgataggaagcttaataaattgacaactcgtgagcaggtggagaaaaatgttcaggaaacgagaagaaggagtcagagtagtcagtttaaagcccatgcgcaacgagaatgggaaaataaaacagggttagattttaatcattttataggtggtgatatcaataagaaaggcacagtaacaggagggcatagtctaacccgtggtgatgtacgggtgatacaacaaacctcggcacctgataaacatggggtttatcaagcgacagtggaaattaaaaagcctgatggaagttgggaggtgaaaacgaaaaaaggtgggaaagtgatgaccaagcacaccatgttcccaaaagattgggatgaggctagaattagggctgaagttacttcggcttgggaaagtagaataatgcttaaggataataaatggcagggtacaagtaaatcgggtattaaaatagaaggatttaccgaacctaatagaacagcatatcccatttatgaatag

SEQ ID NO: 47912 - DNA, 567 bp, Neisseria meningitidis; identical to SEQ ID NO: 37645

SEQ ID NO: 47913 - DNA, 1647 bp, Neisseria meningitidis
atgaaacaatccgcccgaataaaaaatatggatcagacattaaaaaatacattgggcatttgcgcgcttttagccttttgttttggcgcggccatcgcatcaggttatcacttggaatatgaatacggctaccgttattctgccgtgggtgctttggcttcggttgtatttttattattattggcacgcggtttcccgcgcgtttcttcagttgttttactgatttacgtcggcacaaccgccctatatttgccggtcggctggctgtatggtgcgccgtcttatcagatagtcggttcgatattggaaagcaatcctgccgaggcgcgtgaatttgtcggcaatcttcccgggtcgctttattttgtgcaggcattatttttcatttttggcttgacagtttggagatattgtgtatcggggggggtatttgctgacgtaaaaaactataaacgccgcagcaaaatatggctgactatattattgactttgattttgtcctgcgcggtgatggataaaatcgccagcgataaagatttgcgagaacctgatgccggcctgttgttgaatattttcgacctgtattacgatttggcttccgcgccggcacaatatgccgccaagcgcgcccacattttggaagcagcaaaaaaagcgtcaacatggcatatccgtcatgttgcgcccaagtataaaaattatgttgtggttatcggtgagagcgcgcgttcggattatatgaatgtttacggtttcccattgcccgatacgccttttttgagtcagaccaaagggctgttgataaacggttaccaatcgaccgcccacgcgacgaatctttcgctgccgcagactttggggctgccgggagaaccgaacaataacatcgtcagcttggcgaagcaggcgggttttcggacggcgtggctgtctaatcaaggaatgttggggcattttgccaacgaaatttccacctatgccctacgcagcgattatccgtggtttacccaaaggggtgattatggcaaaagcgcggggttgagcgaccgccttttgttgccggcgttcaaacgggttttgataggaaatgcaggcacgaagcctcggctgattgtgatgcacctgatgggttcgcacagtgatttttgcacacgtttggataaggatgcgcggcggtttcagtatcaaactgaaaaaatatcctgctatgtttccaccatcgcgcaaaccgataaatttttagaagatacagttaagatattgaatgaaaataaagaaagctggtctttggtttacttttccgaccacggtttgatgcatgtcggtaaaggcggcgagcgaacgttgacacatggtgcgtggaagcgtcaaagctacggcgtgccgctggttaaaatttcgtccgatgacacgcggcgcgaaatgattaaagtgaggcgcagcgcgtttaattttttacgcggattcggcagttggacgggtatcgaaaccgacgagttgcccgatgacggctatgatttttgggggaatgttcccgatgtgcagggcgaaggcaataaccttgcctttatcgacggactgcccgacgaccccgcgccgtggtatgcgggaaaaggcaaatcgactaaaaatacgtctaaaaaatga

SEQ ID NO: 47914 - DNA, 450 bp, Neisseria meningitidis; identical to SEQ ID NO: 39994

SEQ ID NO: 47915 - DNA, 264 bp, Neisseria meningitidis
atggataaagaaattaaaatttgcccaagatgtgagcaaggctacctttatcatgcaaagcctaaatatttctctggggaggtcattttatgcgatgaatgttatgctatgtggcttggggatatgaaaattttttacggacaatatggaaaagatttttatgattatcatgagtttatgaaagataaaggcatagaagaaataaatatgtgggaaggagagctttttgatcacccatattatgaggatgaaaaatttaaataa

SEQ ID NO: 47916 - DNA, 450 bp, Neisseria meningitidis
atggacgtacaactccccatcgaagccaaagacatccaaaaactcatcccccaccgctatccgtttctccagctcgaccgcatcaccgccttcgagccgatgaaaaccctgaccgcgattaaaaacgtcagcataaacgagccccagttccaaggccactttcccgacctgcccgtgatgcccggcgtactcatcatcgaagcgatggcgcaagcctgcggcacgttggcgattttgagcgaaggcgggcgcaaagaaaacgaattcttcttcttcgccggcatagacgaagcccgtttcaaacgccaagtcatccccggcgaccaactcgtctttgaagtcgagctgctgaccagccggcgcggcatcggcaaattcaacgccgttgccaaagtggacgggcaagtcgccgtcgaagccatcatcatgtgtgccaaacgcgtggtttga

SEQ ID NO: 47917 - DNA, 2208 bp, Neisseria meningitidis; identical to SEQ ID NO: 44834

SEQ ID NO: 47918 - DNA, 1086 bp, Neisseria meningitidis; identical to SEQ ID NO: 38486

SEQ ID NO: 47919 - DNA, 729 bp, Neisseria meningitidis; identical to SEQ ID NO: 45825

SEQ ID NO: 47920 - DNA, 201 bp, Neisseria meningitidis; identical to SEQ ID NO: 38240

SEQ ID NO: 47921 - DNA, 924 bp, Neisseria meningitidis
atgaaaaaacgcaataatcctcttcctctgttgaacggtgtcaaacccagttatttggtgctgccgcatgaaaagcagttttacgggctgccgctgctgcattttctgtgcatccgctttccttttgtgggcgcggacgattggcgcaggcggttgaacagcggttttgtggtcggttcggatggtgcggcgttggacgaacattctttgttcgagccgggtaaggtgatgttttattatcgggaaaccagcagtgaggatgagccgcgtattccgtttgaagaaaagattttgcatattgatgagcatttgattgtggtggacaagccgcattttctgcccgtcatccccagcgggcgttttttaagggaaacgctgctcacacgtctgcgcctgcgtcccgaattgcagcatttgaatgttgaagacattacgccgctgcaccgcttggacaaggatacggcaggcgtgatgttgttgtcgcacaatcctgccacgcgcggggcttatcagacgatgtttcaaaacaaaacggtatggaaaacgtatgaggcgcttgcgctgacaaggacggatttgccgtatccgctcgatgtggtttcgcgtttggtaaggggtgaaaaattttttacaacgcaagaggtggaaggcgtgccaaacgcacatacgacggtcgaactgattgaaaacaggggggaattcagcctttaccgccttacgccgcataccggcaagaaacaccagttgcgcgtgcatatgatgggtttgggtatgccgctgttgaatgacgcgctctatcccgtgctgtctgaagcgggaagcgaggattatcggaaacctttgaagctattggcaaaaaagattgcgtttgcagatcctttgtcgggtcgggaaagggtgttttgcagcgggttttgcctataa

SEQ ID NO: 47922 - DNA, 678 bp, Neisseria meningitidis
atgagcatcaagcaatggccggagggggaaaggcccagggaaaagctgttggaacgcggggcggcggctttgagtgatgccgaacttttggcaatcctgctgcgcgtcggcacgcgcggaatgagtgcggttgatttggcgcgttatttgctgcaggagttcggcagtttggggaggctgatgagcgcggaggtcggcaaactgtcggcatacaaagggatggggacggcaagtttcacacagtttgccgtggtcagggaaatcgggcggcggatattggcggaagaattgcaggagagcatcgtcctgtccgatccggatacggtggccgattatttacgctttcatttggggcaggaaaaagtcgaagtcagcgtcgcgctgctgctgaaccgccaaaaccaactgattgcggtcagagagctgtcgcgcggtacggttgcggaaaacacgatttacatccgcgaaatcgtcaaactggcattggacgaatatgccgacagcctgattatcgcgcacaaccatccgggcggctcgcccgaaccttcgcaggaagacatcatgttcacaaggcggctggcacaggcaatgtcgctggtcgatgtgtcgctgctcgaccattttatcgttacctcgcaaagcgtccgttcgttcagacagctcgggttgatgccctga

SEQ ID NO: 47923 - DNA, 1503 bp, Neisseria meningitidis; identical to SEQ ID NO: 45130

SEQ ID NO: 47924 - DNA, 651 bp, Neisseria meningitidis
gtgctatttgtactgcctgcggcttcgtcgccttgtcctgatttaaatttaatccactataaactcattgaactgtttgtcgcaggcgtaactgcaagaaaggcagcagagttagtaggcgttaataaaaataccgcagcctattattttcatcgtttacgattacttatttatcaaaacagcccacatttagaaatgtttgatggcgaagtagaagcagatgaaagttattttggcggacaacgcaaaggcaaacgtggtcgcggtgctgccggtaaagtcgccgtattcggtcttttgaagcgaaatggtaaggtttatacggttacagtaccgaatactcaaaccgctactttatttcctattatccgtgaacaagtgaaacctgacagcattttttgtagctatgatgtattagatgtgcgcgaatttagccattttagcttcgctgaaacttcgtttcgtatcaatcacagcacacattttgccgaacgacaaaaccatattaatggaattgagaacttttggaatcaagcaaaacgtcatttacgcaagtttaacggcattcccaaagcgcattttgagctgtatttaaaggagtgcgaatggcgttttaacaacagtgagataaaagttcttgttccatcttaa

SEQ ID NO: 47925 - DNA, 654 bp, Neisseria meningitidis
atgttttccgtaccgcgttcctttttgccgggcgttttcgtacttgccgcgcttgccgcctgcaaacctcaagacaacagtgcggcgcaagtcgcttcttcaagtgcatccgcgtcggctgcggaaaatgcggcaaagccgcaaacgcgcggtacggatatgcgtaaggaagacatcggcggcgatttcacgctgaccgacggcgaaggcaagcctttcagcctgagcgatttgaaaggcaaggtcgtgattctgtctttcggctttacgcactgtcccgatgtctgcccgacagagcttttgacgtacagcgacacgttgaagcagttgggcgggcaggctaaggacgtgaaagtggtgttcgtcagcatcgatccggaacgcgacacgcctgaaatcatcggcaagtatgccaaacagttcaatccggactttatcggtctgacggcaacgggcgaccaaaacctgccggtcatcaagcagcaataccgcgtggtttctgccaaagtcaatcaaaaagacgacagcgaaaactatttggtcgaccactcttccggtgcgtatctcatcgacaaaaacggtgaggttgccattttctcgccttacggaagcgagccggaaacgattgctgccgatgtaaggactctgctctga

SEQ ID NO: 47926 - DNA, 2097 bp, Neisseria meningitidis
atgctaatatacctttctcgcctatcattcggctttttgcgccgtttgccagttgtcttgcaaacggaagcagcggaatgtggtctggcgtgtttggtatcggtattggggtttcatggtttttatacggatttgcgctatttaagggggcgtttttctttgtcgcttaaaggcgccacattggcagatttggtacggttcgctacgagcatgaatttaaccgctcgagctgttcggttagatttagatgaattggtaaatttgcgcttaccctgtattttacattgggatttaaatcattttgtagtgttgcatgaagttcatcgcaatcacattataattatgaatcccgcttcgggttggcaaaaaatacgtatggaagaagtctctcgctgttttacaggagtagcgttggaactatttcctaacacgcaatttgaagagaaacaagaaacgcgcaaaattcgcgtattaccaatgttgcgcggagtggtgggattaaaaagatctttatttcagcttttactgttggctactgtattacaggtgtttgctttggcaagccctttttttatgcaatgggtaatagaccatgccattgtatcggcagaccgtgatttattgctgacattggcattgggttttggcttgttgatgattgtgcagcagttagtgtcattgttgcaaacttgggcgggtatgtacttatctacctctttgaatatccaatggaaagctaacgtattcagccacttaatggatttgcctatttcttatttcgctaaacgacatttaggtgatgtggtttcgcgttttggctcggtggacagtattcaaagtacgctcacttctactttctttgtgctggtgatcaacagcattctggccgtatttacattaggattaatgtatttgtacagcccgagtttaatggcagttgtgctggttgttttgctgatttatattggtattcgttgggtggcatattatccattacgccatgcaaccgaagaaaatattgttcatgctgccaagcagagcagttatttcatggaaaccatacgaggtattcaaacggttaaattatttgataaaaatacacaacgtcatgcggcttggctgaatttatttattgacacgattaacacaggtttaacgacacaaaaactttccgcgctgttcggttttgcgaacagccttttatttggtatcgctaatattttaattgtgtattttggtgcggtttctgtattgaacggtggttttaccgttggggcgttaatggcgtttatgtcctacaaaagtcagtttgagagtaaagcaggttcattgattgaccagtttgtacaaatcaaaatgctaggattacacgcggaacgcttggcggatattgtgctagaagaaacggaaaatgaacaaaacaacgatttcagtctgcctaaaaatttagaacattttgatattcaaatagaaaatgtatcatttagctatgctgaaaatgaaccatacattttgcaaaatttcagtttaatcatcaaacaaggaacagccattgcgtttgctggacattcaggctgtgggaaatctacgctcattcaaattctgacaggcagtctgaaacctgaaagcggtcatgtgttattaggtgggcatgacattcatgcgttaccacctgcatttatccgcacatggagcgcaagtgtgatgcaaaatgatgtgttatttactggctcaatcgcagaaaacatcagtttttttgatgatacgcccaatatggaaaaaatcgcattttgcgctcaaatggcgaatattcatcatgaaattgtcgctatgcctatggcgtatgaaacattgattggcgacatggggagtgcattgagtggtgggcaaaagcagcgcatcgtactagctcgtgctttatatcgtgaaccaaaaattttgtttttagatgaagccagtagccatttggacatcaacaatgaacgtgtgattaacgataatctacgccaactcaacattaccaaaatcatggtcgcgcatcgtcaggaaactttaaatactgctgatagcgtagtttatttagacaaggtagcctga

SEQ ID NO: 47927 - DNA, 318 bp, Neisseria meningitidis
atggcggaaaagctggcgatgtcggcaggagggtatgccaaaatcgaacggggcgaaacgcagttgaatgtcccgcgtttggagcagttggctcagattttcaaaatcgatatgtgggacttgctcaaatcgggcggtggtgggatggtgtttcagattaatgaaggtgatagtggtggcgatattgcgttgtatgcgtcgggtgatgtttcgatgaaaatagaatttttaaaaatggagttgaaacactgcaaagaaatgttggaacaaaaagacaaagaaatcgagctgctccgcaagctgaccgaaaccgtttaa

SEQ ID NO: 47928 - DNA, 435 bp, Neisseria meningitidis; identical to SEQ ID NO: 39366

SEQ ID NO: 47929 - DNA, 744 bp, Neisseria meningitidis; identical to SEQ ID NO: 45966

SEQ ID NO: 47930 - DNA, 1185 bp, Neisseria meningitidis
atgagtttacacagcgacatcctcgtcgtcggcgcaggcccggcgggtttaagttttgcagccgaacttgccggcagcggtttgaaagttaccctgatcgaacgcagcccactgactgttctgcaaaatcctccatatgacggacgcgaaatcgccctgacccatttttcccgcgaaatcatgcagcgtttgggtatgtgggacaaaattcccgaaaacgaaatctaccctttgcgcgatgccaaagtgctgaacggacgttccgactaccagctccactttccccaaccgactgaagcgcgcggcgaacctgccgactgtttgggctatctgatttccaaccacaatatccgccgcgccgcctatgaagtcgtatcacaactcgacaatgtcagcattctgaccgatacggttgtcaaagaagtcaaaacatctgacaacgaagcacaagtcattttggaaaacggcaaaatcctgactgcacgcctgcttttggcggcagacagccgcttctcgcaaacccgtcgacaactcggtatctcctccgatatgcacgattacagccgaaccatgttcgtctgccgtatgaaacataccctttccaaccaacataccgcttacgaatgcttccattacggacgcaccatcgcactgctgccgctggaagagcacctgaccaataccgtcattaccgtcgataccgataaaatcaacagcgttcaaaacctttcgcccgaagaattggcggcaagcgtaaaagaacaactcaagggtaggcttggcgacatggaactggtcagcagcatccaccattacccccttgtcggtatgattgccaaacgtttctacggcaaacgcagcgcgctgatcggcgatgcggcggtcggtatgcaccctgtaacggcacacggcttcaacttgggtctttccagcgcagatattctggcaaaactgatactcgaagccgaacaacgcggtcaggacatcggcgcatcttccttgttggaaaaatacagcaacaaacatatgctgcacgcccatccgctttatcacggaaccaatatgatgctgaaactgtttaccaacgaaaccgcgccggcaaaactgctgcgcggtttggtattgcgtgccggcaacaacttcccgccgctgaaaaagctgattaccaaacaactgaccggttga

SEQ ID NO: 47931 - DNA, 3606 bp, Neisseria meningitidis
atgtttcattttgcatttccggcacaaactgccctgcgccaagcgataaccgatgcctaccgccgtaatgaaatcgaagccgtacaggatatgttgcaacgtgcacagatgagcgacgaagagcgcaacgccgcctccgagcttgcccgccgtttggttacccaagtccgcgccggccgcaccaaagccggcggcgtggatgcgctgatgcacgaattctcactctccagcgaagaaggcatcgcactgatgtgtctggcggaagccctgctgcgtatccccgacaacgccacgcgcgaccgcctgattgccgacaagatttcagacggcaactggaaaagccatttgaacaacagcccttccctcttcgtcaatgctgccgcctggggcctgctgattaccggcaaactgaccgccacaaacgacaaacaaatgagttccgcactcagccgcctgatcagcaaaggcggcgcaccgctcatccgccaaggcgtgaattacgccatgcgcctgttgggcaaacagttcgtcaccggacagaccattgaagaagccctgcaaaacggcaaagaacgcgaaaaaatgggctaccgcttctccttcgatatgttgggcgaagccgcctacacccaagccgatgccgaccgctactaccgcgactatgtcgaagccatccacgccatcggcaaagatgcggcaggacaaggcgtttacgaaggcaacggcatttccgtcaaactctccgccatccatccgcgctactcgcgcgcccaacactgccgcgtgatgggcgaactgttgccgcgcctgaaagagctgttccttttgggcaaaaaatacgatatcggtatcaacatcgatgccgaagaagccaaccgcttggagctgtctttggatttgatggaggctttggtttcagaccctgacttggctggctacaaaggtatcggtttcgttgtccaagcctaccaaaaacgttgtccgttcgttatcgactacctgattgacctagcccgccgcaacaaccaaaaactgatgatccgcctcgtcaaaggcgcgtattgggacagcgaaatcaaatgggcgcaagtggacggcttgaacggctatccgacctacacccgcaaagtccacaccgacatctcctacctcgcctgcgcgcgcaaactgctttccgcgcaagacgcggtattcccgcaatttgccacgcacaacgcctacaccttaggcgcaatctaccaaatgggcaaaggcaaagactttgaacaccaatgcctgcacggcatgggcgaaaccctgtacgaccaagtcgtcggcccgcaaaacttaggccgccgcgtgcgcgtgtacgccccggtcggcacacacgaaaccctgctcgcctacttggtgcgccgcctgttggaaaacggcgcgaactcgtctttcgtcaaccaaatcgtcgatgaaaacatcagcatcgactgcctgattaagagcccgttcgacaccatcgccgaacaaggcatccacctgcacaacgccctgccgctgccgcgcgatttgtacggcaaatgccgtctgaactcgcaaggcgtggacttgagcaacgaaaacgtattgcagcagcttcaagaacagatgaacaaagccgccgcacaagacttccacgccgcatccatcgtcaacggcaaagcccgcgatgtcggcgaagcgcaaccgattaaaaatcctgccgaccacgacgacatcgtcggcacagtcagctttgccgatgccgcgcttgcccaagaagcggttggcgcagccgttgccgcgttccccgaatggagtgcgacacctgccgccgaacgcgccgcctgcctgcgccgtttcgccgacctgctcgaacagcacacccccgcgctgatgatgcttgccgtgcgcgaagcgggcaaaacgctgaacaacgccattgccgaagtgcgcgaagccgtcgatttctgccgctactacgcaaacgaagccgaacacaccctgcctcaagacacaaaagccgtcggcgcgattgtcgccatcagcccgtggaacttcccgctcgccatctttaccggcgaagtcgtgtccgcattggcggcaggcaacaccgttatcgccaaacccgccgaacaaaccagcctgattgccggttatgccgtttccctcatgcacgaagccggcatcccgacttccgccctgcaactcgtcctcggcgcaggcgacgtgggtgcggcattgaccaacgatgcccgcatcggcggcgtaattttcaccggctcgaccgaagtggcgcgcctgatcaacaaagcccttgccaaacgcaacgacaatcccgtcctgattgccgaaaccggcggacaaaacgccatgattgtcgattccaccgcacttgccgaacaagtctgcgccgacgtattgaactccgccttcgacagcgcgggacaacgctgctccgccctgcgtatcttgtgcgtccaagaagacgttgccgaccgtatgctcgacatgatcaaaggcgcgatggacgaactcgtcgtcggcaaaccgattcaactcaccaccgatgtcggctccgtcatcgatgccgaagcgcagcaaaacctgttgaaccacatcaacaaaatgaaaggcgttgccaagtcttaccacgaagtcaaaaccgctgccgatgtcgattccgaaaaatccacgttcgtccgccccatcctgtttgaattgaacaacctcaacgaactgcaacgcgaagtcttcggtcccgtcctgcacgtcgtccgctaccgcgccgacgaactcgacagcgtcatcgaccaaatcaacagcaaaggctacgccctgacccacggcgtacacagccgcatcgaaggcacggtacgccacatccgcagccgcatcgaagccggcaacgtttacgtcaaccgcaacatcgtcggcgcagtcgtcggcgtacagcccttcggcggacacggtctgtccggcacaggtcccaaagcaggcggttcattctacctgcaaaaactgacccgcgccggcgaatgggttgccccgaccctgagccaaatcggacaggcggacgaagccgcactcaaacgcctcgaagcactggttcacaaactaccgttcaacgccgaagagaaaaaagccgcagcggccgctttgggacacgcccgcatccgcaccctgcgccgtgccgaaaccgtccttaccggaccgaccggcgagcgcaacagcatctcatggcacgcgcccaaacgcgtttggatacacggcggcagcctcctgcaagccttctgcgccctaaccgaacttgccgcctccggcgtacaggcagtggtcgaacccgacagcccgctggcttcctacaccgccgacttggaaggtctgctgctggtcaacggcaaacccgaaaccgccgacatcagccacgttgccgccctgtcgcctttggacagcgcgcgcaaacaggaacttgccgcccacgacggcgcactcatccgcatcctcccttcggaaaacggactcgacatcctgcaagtgtttgaagaaatctcttgcagcgtcaacaccacagccgccggcggcaacgccagcctgatggcggttgccgactga

SEQ ID NO: 47932 - DNA, 1074 bp, Neisseria meningitidis; identical to SEQ ID NO: 44272

SEQ ID NO: 47933 - DNA, 786 bp, Neisseria meningitidis
atgagcagaatccggcaggcttttgccgctttggatggcggaaaggcattgattccctatattacggtgggcgaccccgatattcggacaactttggcattgatgcacggcatggttgcaaacggtgcggatattttggagttgggcgtgccgttttccgatccgatggcagacgggtcggttattcagcgtgcggcggagcgggcgttggcaaacgggatttcgctgcgcgatgtcttggatgtcgtcagaaaattccgtgaaaccgacacgcaaacgccggttgttttgatgggatatttgaaccctgtacataagatgggttatcgggagtttgctcaggaagccgcaaaggcgggtgtggacggcgtgttgacggtggattcccctgtcgaaaccatcgatccgctctatcgcgagctgaaggataacggggtcgactgtattttcctgattgcgccgacgacgacggaagaccgtattaaaaccattgccgagctggcaggcggatttgtctattatgtttcgctcaagggcgtaacgggcgcggcaagtttggatacggatgaggtttcgcgtaaaatagagtatttgcatcagtatatcgatattcccatcggtgtcggtttcggcatcagcaatgcggaaagtgcacgcaaaatcggccgggttgccgacgcagttattgtcggcagccggattgtgaaagaaatcgaaaacaatacaggcaacgaggctgcggtcgtcggtgctttggtcaaagagttgaaggatgccgtgcgctga

SEQ ID NO: 47934 - DNA, 864 bp, Neisseria meningitidis; identical to SEQ ID NO: 44142

SEQ ID NO: 47935 - DNA, 363 bp, Neisseria meningitidis; identical to SEQ ID NO: 45230

SEQ ID NO: 47936 - DNA, 2115 bp, Neisseria meningitidis
atggatttattatcggtcttccacaaataccgtctgaaatatgcggtagccgtgctgacgatactgcttttggcggcaatcgggctgcacgcttccgtatatcgcatcttcacacctgaaaacatccgaagccgcctccaacaaagcattgcccatacgcaccggaaaatctcgtttgatgcggatatacagcgcaggcttctgccccggccgaccgtcatcctgaaaaacctgaccattaccgaacccggcggcgaccggactgccgtttccgtccaagaaaccaaaatcggattgagctggaaaaacctgtggtcggatcagatacagattgaaaaatgggtggtttcgagtgcggaacttgccctgacgcgcgacgggaaaggtgtttggaacatccaagacctgatcgacagccaaaaacgccaagcctcagtcaaccgcattatcgtcgaaaacagcaccgtccgcctcaatttcctgcaggaacagcttatcctgaaggaaatcaacctcaacctgcaatcccccgattcgtcggggcagccgtttgaaagttcgggcatactggtttggggaaagctgtccgtcccgtggaaaagcagggggctgttcctttcagacggcatcggcacgcccaaaatctcaccgttccattttgaagcttccacttcgctggacggacacggcattaccatttccaccaccggcagcccttctgtccgcttcaacgccggcggagcggatgccgccggcctcggcctgcgtgcagacacttccttccgcaacctccacctgaccgcccaaatccctacgctggcactcaggaacaacagcattaaaattgaaaccgtcaacggcgcatttaccgccggcggcgaatatgcccaatgggacggttcgttcaaactcgacaaagccaacctgcactccggcatcgccaacatcggcaacgccgaaatctccggcagcttcaaaacaccgcgccaccagaccaacttctccctcaattcgccgctcgtatggacggaaaacaaagggctggacgcgccgcgcctgtatgtatcgacccttcaggataccgtcaaccgcctgccgcaaccccgtttcatcagccggctcgacggttcgctgtccgtaccgaatctgcaaaattggaatgccgaattaaacggcacattcgaccgccaaaccgttgccgcgaaattcagatacacacatgaagacgcaccgcatctggaagccgccgtcgcactgcaaaaattgaacctgaccccctatcttgacgacgtgcggcaacaaaacggcaaaatatttcccgacaccctcgccaagctgtccggcgacatcgaggcgcacctgaaaatcggaaaagtccaacttcccggcctgcaactggacgatatggaaacctacctccacgccgacaaaggccatatcgcgctcagccgtttcaagtcagggctttacggcggccataccgaaggcggcatcagcatcgccaacacccgtcccgccacttaccgcctgcaacagaatgcaagcaacatccaaatccaaccgctgctgcaagacctgttcggcttccacagcttcagcggcaacggcgacgcggtcatcgacctgaccgcgggcggcgaaacccgaaaagagcttatccgctcgcttcaaggcagcctgtcgctgaatatttccaatggcgcatggcacggtatcgacatggacaatatcctgaaaaacggcatttcgggcaaaactgccgacaatgccgcacccagcacacccttccaccgattcacgctcaacagcgaaatttcagacggcatcagccgccacatcgataccgaactcttctccgacagcctctatgttaccagcaacggctataccaatctggatacgcaggaattgtctgaagatgtccttatccgcaacgccgtccatccgaaaaacaaaccgattcccctgaaaatcaccggtacggtggacaagccgtccattaccgtcgattacggcaggctgaccggcggcatcaattcgcgcaaagagaaacagaaaatcctcgaagacaccctgctggaacaatggcagtggctcaaacctaaagaaccgtaa

SEQ ID NO: 47937 - DNA, 822 bp, Neisseria meningitidis; identical to SEQ ID NO: 45969

SEQ ID NO: 47938 - DNA, 375 bp, Neisseria meningitidis; identical to SEQ ID NO: 39975

SEQ ID NO: 47939 - DNA, 300 bp, Neisseria meningitidis; identical to SEQ ID NO: 45972

SEQ ID NO: 47940 - DNA, 300 bp, Neisseria meningitidis
atgaagaaaatgttcgtgctgttctgtatgctgttctcctgcgccttctcccttgcggcggtaaacatcaatgcggcttcgcagcaggagttggaggcgctgccgggcataggccctgcgaaggcgaaggccattgcggaataccgtgcgcaaaacggtgcgttcaagtctgtggacgatttgaccaaggtaaagggcatcggccctgcggtgctggcgaagctgaaggatcaggcttctgtcggcgcgcccgcaccaaaagccccagccaaaccggtgctgcccgcggataaaaaataa

SEQ ID NO: 47941 - DNA, 300 bp, Neisseria meningitidis; identical to SEQ ID NO: 45972

SEQ ID NO: 47942 - DNA, 396 bp, Neisseria meningitidis; identical to SEQ ID NO: 44155

SEQ ID NO: 47943 - DNA, 249 bp, Neisseria meningitidis; identical to SEQ ID NO: 38918

SEQ ID NO: 47944 - DNA, 1272 bp, Neisseria meningitidis
atgttccaatggctttatgatgtattgtggctgcttgcgccgatatggatacggcgttatttggacaaacgctccggaagtgccccggcatatcgggcgcatcggggcgagcgtttcggcaagccgtatccgaatcccgttaccggcgcggtttggatacacgccgtttcggtcggggaaacgcgtgccgcccaacctttgatacgcgagttgcggcagcgttttcccgatgcgccgctgctgatgacgcagatgaccccgacgggacgggaaaccgcgcaagttctgtttcccgatgcgcaatgccgctatcttccgtatgacaaaaaaacgtgggtacggcagtttttgcgcgaacaccgcccgatgttcggcgtattgatggaaacggaaatctggcccaacctaatgaaggaatgccggcgcgcgggtgtgccgctgtttttggcgaatgcgcggctgtcggaaaaatcgttgaacggttatctgaaagtccgcagcctgatccgtcctgctgtcgcttcgctgacgggctgtctggtacagacggaggcggatgcggcgcggttggcgaaattgggcgcggcatccgtgcaggtgtgcggcaataccaaatacgacctgatgccgtcggaacagatgaaaacgctggcggggcagtttgaaaaacgcatcggagaccggccggttgccgtgtgcggcagcacgcgcgtttatcggggtgaagacgaggcggagaaactgctggcggcgtggcaacaatatcgcggcgatgccctgctggtcgtcgtgccgcgccatcccgagcattttcagacggcatttgaaacggcaaaacgcttcgggtttaaggttcagcggcgcagcgacggtttgccggtcgaacccgatacgcaggtgtggataggcgacagtatgggcgagctgtatgcgtattacctgtgcgccgatgttgcttttgtcggcggcagtctggtcgattcgggctgtcagaacatcatcgaaccgctttcctgcggcgttccgacgatattcggcttttcgacctacaatttttccgaagcctgccggcacgccttggcatcgggtgcggcggttcaagtcgaatcggcggacgcgtggcgggaagccgttgaaaaaaccttatcgtacgaggggggcggaatgcagatgcaggcgcgcgtggacagctttatcgcacaacatcgcggagcgggcgcgagaatcgccgaggcggtgcgggaagcggtatgcggacatcgggggcgatag

SEQ ID NO: 47945 - DNA, 525 bp, Neisseria meningitidis; identical to SEQ ID NO: 45948

SEQ ID NO: 47946 - DNA, 540 bp, Neisseria meningitidis
atgaacatcattgataccgccattcctgacgtaaaactgcttgagccccaagtcttcggcgacgcgcgcggcttttttatggaaaccttccgcgacgagtggtttaaaacccaagtctgcgaacgcaccttcgtgcaggaaaaccactccaaatccggcaaaggcgtattgcgcggcctgcactaccaaaccgaaaacacacaaggcaaactcgtacgcgtagttgtcggcgaagtattcgacgtggccgtcgatatgcgtaaagactcccccactttcggcaaatgggtaggcgagattctgtccgcagaaaacaaacgccaactgtgggtacccgaaggtttcgcacacggcttctatgtactgagcgatgaagccgagttcgtctataaatgcacagactattacaaccctgaagccgaacactcactaatttggaatgatccgaccgtcggcatcgactggccgcttcaaaccgcgccgaacctgtcgcctaaagacttggccggcaaagtattggccgaagcagtcacgttttaa

SEQ ID NO: 47947 - DNA, 522 bp, Neisseria meningitidis
atgtcctgtttttcaatcaaacgtatgtccgcgtttcgggcgcggataacagtgttttttaccgcctttgtctttttgacggcggcactgcccgcttatgcggagcgtctgcctgattttctggcgaaaatacagccttcggaaatttttccgggtgcggaccgttacggcaagccggaaggcaagcctatggttgcccgcgtttacaaaggcgatgagcagttgggcttggtctatatcacgaccgatgcggtcaatacgcgcggttattcgaacaaaccgatcgatacgctgatggctttggcaaatgacggcacgatagccggagcgaaactggtcgatcatcacgaaccgattatgctgatcggtatcccgcatttgcccgcgcccatgcgggcgatacgctcaaactggcttccggcgtatatcaaaccaaactttatatcgacaaaccgattacgattgaagggcctgctgaccgttctgcaaccatcgaaggagacaggagcggacgtacgatag

SEQ ID NO: 47948 - DNA, 2274 bp, Neisseria meningitidis
atgaacattactcaaattctttcccaagaactctccgcgactgccgcgcaaatcaccgccgccgtcgagcttttggacgacggcgcgaccgtgccgtttatcgcccgctaccgcaaggaagcgacgggcgggttggacgatacgcagttgcgccggcttgccgagcggctgcaatatctgcgcgagttggaagagcgcaaagccgttgttttaaaaagcattgaagagcaaggcaagctttcagacgacctcagggcgcaaatcgaagccgccgataacaaaaccgcgctggaagacctgtatctgccctacaaacccaaacgccgcaccaaagcgcaaatcgcgcgcgaacacggtttgcagccgctggcggacgtgttgcttgccgagcagtcgcaggacgtggaagccgccgcacaaggctacctgaacgaaaacgtccccgatgccaaagccgcgttggacggcgcgcgtgcgattctgatggagcagtttgccgaagacgcggaactcatcggcacgctgcgcgacaagctgtggaacgaagccgaaatccacgcgcaagttgttggaggcaaagaaaccgaaggcgaaaaattcagcgattattttgaccaccgcgaacctattcgtgcgatgcccagccatcgtgcgctagcggttttgcgcggacgcaacgaaggcgtgttgaacatcgcgctcaaatatcagcccgacgacacgccgattacgcagcaaagcgaatacgagcaaatcatcgcccgccgcttcaaagtttcagacggccacaaatggctgcgcgacaccgtgcgcctgacttggcgcgcgaaaatctttttgtcgttggaacttgaagctctcaatcgtttgaaagaagccgccgacaccgacgcgattaccgtgttcgcccgcaatctcaaagacttgctgcttgctgcgcccgccggacggctgaccacgctgggtctcgaccccggctaccgcaacggcgtgaaatgcgccgtggtggacgacaccggcaagctgctggataccgtcatcgtctatttgcatcaagaaaacaatatgttggcaacgctgtcgcgcctgattaaacagcacggcgtgaagctcatcgccatcggtaacggcaccgccagccgtgaaaccgacaaaatcgcgggcgaactggtgcgtgaaatgtcgaaaatggggctgcataaaatcgtcgtgtccgaagccggcgcgtcgatttattccgcgtccgaactggcggcgcgcgagttccccgacttggacgtttccctgcgcggcgcggtgtccatcgcccgcaggctacaagacccgcttgccgagttggtcaaaatcgaccccaaatccatcggcgtggggcagtatcagcacgacgtgaaccaaagccggctcgccaaatcgctggacgcggtggtcgaagactgcgtgaacgccgtcggcgtggacgtgaacaccgcctccgccccgctcttggcgcgaatttccggtttgaatcaaacccttgcccaaaacatcgttgcctaccgcgatgaaaacggcgcgttcgacagccgcaaaaaattgctgaaagtaccgcgtttgggcgaaaaaaccttcgagcaggcggcaggctttttgcggattaacggcggtaaagagccgttggacgcgagcgccgtccaccccgaagcctatcccgtcgtcgccaaaatgctggcgcaacaaggcattaacgccgccgaactcatcggcaaccgcgagcgcgtgaagcaaatcaaagcgtccgacttcaccgacgaacgcttcggcctgccgaccattttggacatcctgtccgaactggaaaaacccggccgtgatccgcgcggcgagtttcagacggcatcgtttgccgaaggtatccacgaaatcagcgacttgcaagtcggtatgatactcgaaggcgtggtttccaacgtcgccaacttcggcgcgttcgtggacatcggcgtccatcaggacggcttggtgcacatctccgccctgtccaacaagttcgtccaagacccgcgcgaagtggtgaaagctggcgacgtggtgaaagtgaaagtgctggaagtcgatgctgcacgcaaacgcatcgcgctgaccatgcgcttggatgacgaaccgggcggcgcaaaacataaaatgccgtctgaaaaccgcagccgcgaacggacagccggccgcaaaccccaacgcaacgaccgcgccccagccaattcggcgatggcggatgcgtttgcgaagctgaagcggtaa

SEQ ID NO: 47949 - DNA, 4179 bp, Neisseria meningitidis; identical to SEQ ID NO: 38984

SEQ ID NO: 47950 - DNA, 1185 bp, Neisseria meningitidis
atgacaccacaagtcctgaccatattaggcagtaccggcagcataggcgaaagcacgctggacgttgtctcccgccaccccgaaaaattccgcgtattcgcgctggcagggcataagcaggtcgagaaattggcggctcaatgtcaaacgttccgccccgaatatgccgtcgttgccgatgcggaacacgccgctcggcttgaagccctgttgaaacgcgacggcacggcgacgcaggttttacacggcgcgcaggcattggttgacgttgcgtctgccgacgaagtcagcggtgtcatgtgcgccatcgtcggggcagtggggctgccttccgcgctcgcagcggcgcaaaaaggcaaaaccatttatctggcgaacaaagagacgctggtggtttccggcgcgttgtttatggaaaccgcccgtgcaaacggcgcggcagtgctgcccgtcgacagcgaacacaacgccgttttccaagttttgccgcgcgattacgccggccgtctgaacgaacacggcatcgcttcgattatcctgaccgcttccggcggcccgtttctgaccgccgatttaaacacgttcgacagcattacgcccgcccaagcggtcaaacaccccaattggagcatggggcgcaaaatctccgtcgattccgccaccatgatgaacaaaggtttggagctgattgaagcgcattggctgttcaactgtccgcctgacaagctcgaagtcgtcatccatccgcaatccgtgatacacagcatggtgcgctaccgcgacggctccgtgttggcacaactgggcaatcccgatatgcgaacgcccatcgcctattgtttgggcttgcccgagcgcatcgattcgggtgtcggcgaccttgatttcgacgcattgtccgcgctgaccttccaaaagcccgactttgaccgcttcccctgcctgaagctcgcctatgaagccatgaacgcaggcggagccgcgccctgcgtattgaacgccgccaacgaagccgccgtcgccgcctttttggacggacagattaagtttaccgacattgccaaaaccgtcgcccattgtctttcacaagacttttcagacggcataggcgacataggggggctcttggcgcaagatgcccggacacgcgcacaagcgcgggcatttatcggcacactgcgctga

SEQ ID NO: 47951 - DNA, 747 bp, Neisseria meningitidis
atgaaaagcagcacgcaggccgttttggaacacaccgccattcccaagcatatcgccgtgattatggacggcaacggccgttgggcgaaaaaacgtttcctcccgcgcataatgggacacaaacgcggtttggacgcattggaaaatatggtgaagcattgcgccaaactgggtgtgcaatatctgaccgtgtttgccttttcaaccgaaaactggcgccgccccgaagacgaagtttcgttcctgatggggctgtttttacaggctttgcaaaaacaggtacgccgtctgcacgaaaacaatatgcgcctgaaaatactgggcagccgcgaacgcttcaaccggcagattctgcaaggcatcgaagaagcggaggcgttgacggcaaacaataccggcctgaccctgagcattgccgccgattacggcggccgctgggatattttgcaggcggcaaacaaactgattgccgaaggcgtatccgagattacagaagacacgctggcgaaacacttgatgctgggcgatgcaccggaaccggatttgttcatccgcaccggcggagaaacgcgcatcagcaatttcctgctctggcagatggcgtatgcagaactgtatttcaccgacatcctgtggcctgatttcgacgaaaccgccttagatgccgccgtcgcttcgttccaaaaacgcgaacggcggttcggacgcacctccgagcaactgcctatcgaacagcaaaggaactaa

SEQ ID NO: 47952 - DNA, 1887 bp, Neisseria meningitidis
atgatttaccccaaaacctacgacgttatcgtcgtcggcggcggacacgcaggcacggaagccgcgctcgccgccgcccgtatgggcgcgcagacgcttttgctcacacacaatatcgaaacgctcggacaaatgtcgtgcaacccctctatcggcggcatcggcaaagggcatttggtacgcgaactcgacgcgctcggcggcgcgatggcgttggccaccgacaaatcaggcatccagttccgccgcctaaacgccagcaaaggcgcggcagtgcgagccacgcgcgcgcaggccgaccgtatcctgtacaaagccaccatccgcgaaatgttggaaaaccaagaaaacctcgaccttttccaacaagccgtcgaagacgtaacgctcgacggcgaacgcatcagcggcgtggttaccgcgatgggcgtggagtttaaagcacgcgccgtcgtgctaactgctggcacgtttttgtccggcaaaatccacatcggtttggaaaactacgaaggcggccgcgctggcgaccccgccgccaaatcgctgggcggccgtttgcgcgaattgaacctgccgcaaggccgtctgaaaaccggcacgccgccgcgtattgacgggcgcacgattgacttctcccaactgaccgaacagcccggcgacacgcccgttcccgtaatgtccgtacgcggcagcgccgatatgcaccctcgccaagtgtcctgctggattacgcataccaacacgcaaacccacgacatcatccgttcaggcttcgaccgcagccccatgtttactggcaaaatcgaaggtgtgggtccgcgttattgtccgtctatcgaagacaaaatcaaccgcttcgccgacaaagacagccaccagattttcctcgagcccgaaggcctgaccacgcacgaatactatccaaacggtatctccactagcctgccgttcgacatccaaatcgcgctcgtgcgcagcatgaaaggccttgaaaacgcccatatcctgcgccctggctacgccatcgaatacgactacttcgacccgcgcaacctcaaagccagcctcgaaaccaaaaccatccaaggcctcttcttcgccggacaaatcaacggcacaacgggctacgaagaagccgccgcgcaaggactgctggcaggcgcgaacgccgtgcaatacgtccgcgaacaagacccgctcctgctgcgccgcgaacaagcctatctcggcgtattggtggacgacctcatcaccaaaggcgtgaacgaaccctaccgaatgttcaccagccgtgccgaataccgcctgcaactcagggaagacaacgccgatatgcgcctgaccgaagacggctacaaaatcggcttggtgggtgaagcgcaatggcgcatgttcaacgaaaaacgcgaagccatcgaacgcgaaatccaacgtttgaaaacaacgtggtacacgccgcaaaaactcgccgaagacgaacaaatccgcgtattcgggcaaaagctcagccgcgaagccaacctgcacgacctcctgcgccgcccgaacctcgactacgccgcgctgatgacgctcgaaggcgcgatgccgtctgaacgcctctccgccgaagtggtcgaacaagtcgaaatccaagtcaaataccaaggctatatcgaccgccaaaacgaagaaatcgacagccgccgcgacatcgaaaccttaaaactgcccgacggcatcgattacggcaaagtcaaaggcttgtcggcagaagtgcagcaaaagctcaaccagcacaaacctgaaaccgtcgggcaggcaagccgcatttccggcgtaacgcctgcggcagtggcattgctgatggtgcatttgaagcgcgggtttaaagacgcgaaataa

SEQ ID NO: 47953 - DNA, 873 bp, Neisseria meningitidis
atggaaatatggaataggttggacacttggctcggtgccgtcccgatacgtgcggaggcggtcgaatccgtggcggcggttgcggctttgctgctggcgcgcgcccttctgttgaatatccacttcaaacggcatccggatttcggcatcgaaagcaagcggcggtttttggttgccagccgcaatataacgctgcttttggtgctgttttcgctggcatttatctggtcggcgcaaatccaaacgctggctttgtcgatgtttgcggtggcggcggcggtcgtcgtggcgacgaaggaactgattatgtgtctgtcgggcagtattttaaggtctgccacccagcaatactcggtcggcgactatatcgaaatcaacggcctgcgcgggcgcgtggtcgacatcaacctgttgaacacgctgatgatgcaggtcggtccgaaccccttggtcggacagcttgcgggaaccaccgtttctttccccaacagcctgttgttgagccaccccgtgcgccgcgacaatattttgggcgactatgtcatccatacggtcgaaatccccgtccccatccatttggattcggatgaagccgtatgccgtctgaaagccgtactcgagcccttgtgcgcgccctacatccccgccatccaacggcatttggaaaacgtgcaggcggaaaaactgtttatcacgcccgccgccagaccgcgcgttacccgcgtgccgtacgatgacaaggcataccgcatcatcgtccgcttcgcctcccccgtttcaaagcggctggaaatccaacaggcggttatggacgaatttttgcgcgtacaataccgcctgttaaattaccccgccggctccgaaacactttaa

SEQ ID NO: 47954 - DNA, 621 bp, Neisseria meningitidis; identical to SEQ ID NO: 37903

SEQ ID NO: 47955 - DNA, 1452 bp, Neisseria meningitidis
atgctttctttccttagcggcttattgagcttgggtatagaagtcttgtgggtgaggatgttttcgttcgcagcacagtccgtgcctcaggcattttcatttacccttgcctgttttctgaccggtatcgccgtcggcgcgtattttggcaaacggatttgccgcagccgctttgttgatattccctttatcgggcagtgcttcttgtgggcgggtattgccgactttttgattttgggtgctgcgtggttgttgacgggtttttccggcttcgtccaccacgccggtatcttcattaccctgtctgccgtcgtcagagggttgattttcccgctcgtacaccatgtgggtacggatggcaacaaatccggacgacaggtttccaatgtttatttcgccaacgttgccggcagtgcattgggtccggtccttatcggctttgtgatacttgatttcttgtccacccaacagatttacctgctcatctgtttgatttctgctgctgtccctttgttttgtacactgttccaaaaaagtctccgactgaatgcagtgtcggtagcagtttccctaatgttcggcatcctcatgttcctactgccggattctgtctttcaaaatattgctgaccgtccggataggctgattgaaaacaaacacggcattgttgcggtttaccatagagatggtgataaggttgtttatggggcgaatgtatacgacggcgcatacaataccgatgtattcaatagtgtcaacggcatcgaacgtgcctatctgctaccctccctgaagtctggcatacgccgcattttcgtcgttggattgagtacaggttcgtgggcgcgcgtcttgtctgccattccggaaatgcagtcgatgatcgttgcggaaatcaatccggcataccgtagccttatcgcggacgagccgcaaatcgccccgcttttgcaggacaaacgtgttgaaattgtattggatgacggtaggaaatggctgcgtcgccatcctgatgaaaaattcgacctgattttgatgaatacgacttggtactggcgtgcctattccaccaacctgttgagtgcggaatttttaaaacaggtgcaaagccaccttaacccggatggtattgtaatgtttaataccacgcacagcccgcatgcttttgctaccgccgtacacagtattccctatgcataccgctatgggcatatggtagtcggctcggcaaccccggtagttttccctaataaagaactgctcaagcaacgtctctcccggttgatttggccggaaagcggcaggcacgtatttgacagcagcaccgtggatgctgcagcacaaaaggttgtctctcgtatgctgattcagatgacggaaccttcggctggggcggaagttattaccgacgataatatgattgtagaatacaaatacggcagagggatttaa

SEQ ID NO: 47956 - DNA, 1077 bp, Neisseria meningitidis; identical to SEQ ID NO: 45890

SEQ ID NO: 47957 - DNA, 300 bp, Neisseria meningitidis; identical to SEQ ID NO: 39584

SEQ ID NO: 47958 - DNA, 327 bp, Neisseria meningitidis; identical to SEQ ID NO: 39180

SEQ ID NO: 47959 - DNA, 2379 bp, Neisseria meningitidis; identical to SEQ ID NO: 45987

SEQ ID NO: 47960 - DNA, 489 bp, Neisseria meningitidis; identical to SEQ ID NO: 45541

SEQ ID NO: 47961 - DNA, 198 bp, Neisseria meningitidis
atgtcctatgatttatcgaaacgacttgtaatcggcttagcatcaagtgccctattcgacttatccgaatcggataatatatttagaatggaaggggcagaaacctataggcaatatcagagagaaaaacaaaaccatcccctaaaaaaggcgttgtctttccatttattaaaaaacttctgtcaatcaatgaaataa

SEQ ID NO: 47962 - DNA, 1422 bp, Neisseria meningitidis; identical to SEQ ID NO: 38326

SEQ ID NO: 47963 - DNA, 450 bp, Neisseria meningitidis; identical to SEQ ID NO: 46109

SEQ ID NO: 47964 - DNA, 618 bp, Neisseria meningitidis
atgccctatacggaagatatgcgcccgggcgataccgctaatccttatggcgcatccaaagcgatggtggaacggatgttaaccgacatccaaaaggccgatccgcgttggagcgtgattttgttgcgctatttcaacccgattggggcgcacgaaagtggtttgattggcgagcagccaaacggcatcccgaataatttgttgccttatatctgccaagtggcggcaggcaaactgccgcaattggcggtatttggcggcgattatccgacccccgacggtacgggaatgcgcgactatattcatgtgatggatttggcagaaggccatgtcgcggctatgcaggcgaaaagcaatgtagcaggcacgcatttgttgaacttaggttccggccgcgcttcttcggtattggaaatcatccgcgcatttgaagcagcttcgggtttgacgattccgtatgaagtcaaaccgcgccgtgccggtgatttggcgtgcttctatgccgacccttcctatgcaaaggcgcaaatcggctggcaaacccagcgtgatttaacccaaatgatggaagactcatggcgctgggtgagtaataatccgaatggctacgacgattaa

SEQ ID NO: 47965 - DNA, 951 bp, Neisseria meningitidis; identical to SEQ ID NO: 45991

SEQ ID NO: 47966 - DNA, 558 bp, Neisseria meningitidis; identical to SEQ ID NO: 45463

SEQ ID NO: 47967 - DNA, 774 bp, Neisseria meningitidis
atgaacactattgcagacgtgcaatccagccgagatttgcgcaatctgccgatcaatcaggtcggtatcaaagacctgcgctttccgattaccctgcaaactgcagaaggcatccagtccaccattgcccgtctgaccatgacggtttacctgcctgctgagcagaaggggacgcatatgtcgcgttttgtcgcattgatggagcaacatgccgaagccttggattttgcacaattgcgcaagctgactaccgaaatggtcgcgcttttagattcccgcgccggcaaaatcagcgtttcttttccgtttttccgcaagaaaaccgcgccggtttccggtattcggtccttactggattatgatgtctgtctcacgggcgaaatcaaagacggggcatacggccacagtatgaaggtcatgattcccgtaacctcgctttgcccgtgttccaaagaaatttcccaatacggcgcgcacaaccagcgttcgcatgttaccgtcagcctgactgccgatgcagaagtcggtatcgaggaagtcattgattatgtggaggcgcaggcaagctgccaactctacggtttgctcaaacgccccgatgaaaaatacgttaccgaaaaagcctacgaaaacccgaaattcgtggaagatatggtgcgtgatgtcgctacttcgctgatcgccgacaaacgcatcaagagtttcgttgtcgagagcgagaatttcgagtctatccacaaccattcggcttatgcctatatcgcctacccgtag

SEQ ID NO: 47968 - DNA, 1158 bp, Neisseria meningitidis
atgaaattcgccacgaaagccattcattccagctacgattgcgacgaacacaaccgcgcgctgatgccgccgatttatcaaaacagtatgtttgcgttgcacgagattggcgaaaatgtgccttaccgttattcgcgcctgagcaacccgacccgtcagattttagaagacaccgttgccgatttggaacacggtgcggcaggttttgcgttttccagcggtatggcgggaattgatgccgtatggcgcactttcctgcgcccgggcgataccattgtcgccgtcgccgatatttacggcggcgcgtatgatttattggtcgatgtttatcaaaaatggggggtgaacgttgtttttgccgatttgggcaatctggataatttggacaagctgcttaaagcgcacaaggtcaaactggtttggctggaaacgccgtccaatccgcttttgcgcttggtagacatcaaagcgcttgccgcgaaagccaaagcggccggcgcactggtcggcatcgacaacacctttgccacgccgtatctgcaacagcccttggatatgggttgcgattttgtgttccattccgctaccaaatatttgtgcggccattccgacgtgttgatgggcatcgtcgttgccaaaaccaaagagctggcgcagcctttgcacgatatgatggtgcataccggcgcggttgccggcccgatggactgctggctggtgttgcgcggcatcaaaacactggctctgcgcatgaacgcccattgccaaaacgcactcgaaatcgcgcgccgtttggaagcccatcctgccattgaaaaagtgttccatcccggcctgccgtctcacgaacattatgaactcgcccaagcgcaaatgcctaaaggcatcggcggcgtggtgacggtttatctcaaaaacgacacgcgcgaagcggcaaacagcgtgattaaaaacatgaaactggtcaaaatggcttccagcctcggcggcgtggaaagtttggtcaaccattgctattcccagtcccacagcggcgtgccgcataatgtgaaaatggaaatgggcatcaaagtcggcctgctgcgtttctccatcggcatcgaagacgcggacgatatttggaacgatatttccgccgcactcgatacaactttgtaa

SEQ ID NO: 47969 - DNA, 759 bp, Neisseria meningitidis; identical to SEQ ID NO: 39453

SEQ ID NO: 47970 - DNA, 171 bp, Neisseria meningitidis; identical to SEQ ID NO: 45116

SEQ ID NO: 47971 - DNA, 207 bp, Neisseria meningitidis; identical to SEQ ID NO: 39999

SEQ ID NO: 47972 - DNA, 573 bp, Neisseria meningitidis
atgatggtacggcgtttgataatcggcatcagtggggcgagcggtttccaatacggcgtgaaggctttggaacttttacgcgcgcaagatatcgaaacgcaccttgtggtatcgaaaggtgcggagatggcgcgcgcttcggaaacggcttatgcgagagatgaggtatatgccttggcggacttcgtgcatccgatcggcaatatcggggcgtgcattgccagcggtacgtttaaaacggacgggatgctggtcgccccctgttcgatgcggacgcttgcctcggtcgcgcacggcttcggcgacaacctcttgacgcgtgcggcggatgtggttttgaaggaaaggcggcggctggtgctgatggtgcgcgaaacgccgctgaaccttgcccatttggacaatatgaagcgggtaacggaaatgggcggcgtggtgtttccccctgttcctgcgatgtaccgcaaaccgcagacggcggacgacatagtggcgcacagtgttgcacacgctttgtcgctgttcggaatcgatacgccggattcggcggaatggcagggaatggcggattaa

SEQ ID NO: 47973 - DNA, 543 bp, Neisseria meningitidis
atgaggacacaccgcaagacctgctctgcggtgtgttttgcttttcagacggcatcgaaacccgccgtttccatccgacatcccagcgaggacattatgagcctgaaaatccgccttaccgaagacatgaaaaccgcgatgcgcgccaaagaccaagtttccctcggcaccatccgcctcatcaacgccgccgtcaaacagtttgaagtggacgaacgcaccgaagccgacgatgccaaaatcaccgccatcctgaccaaaatggtcaaacagcgcaaagacagcgcgaaaatctacactgaagccggccgccaggatttggcagacaaagaaaacgccgaaatcgaggtactgcaccgctaccttccccaaatgctctctgccggcgaaatccgtactgcggtcgaagccgccgttgccgaaaccggcgcggcaggtatggcggatatgggcaaagtgatgggcgtattgaaaacccgacttgccggcaaagccgatatgggcgaagtcaacaaaatcctgaaagccgtactgaccgcctga

SEQ ID NO: 47974 - DNA, 933 bp, Neisseria meningitidis; identical to SEQ ID NO: 45962

SEQ ID NO: 47975 - DNA, 291 bp, Neisseria meningitidis
atgaacatccaacttcaaggccacatcgtcggcgttaaaaaattcaacggacaaatcgaaggcaggagcttcgactattgccgcctgattgtcgccacacccttagacagctcccaaggcaacgcattgggcagctctactactgaatacgatttcggcggctctgccaatttcgagcagttccgaaacgcccaatttccgatcgaagcaaaccttaacgtagaaatcgttactacgggcaaaacccaaaaactgaaagtcatcggttttcaactcgtgaagaaaggctga

SEQ ID NO: 47976 - DNA, 291 bp, Neisseria meningitidis; identical to SEQ ID NO: 38495

SEQ ID NO: 47977 - DNA, 468 bp, Neisseria meningitidis
atgcaaatagataatatatccgatgaacaggttgtgattgtcagaatgtcttgttatcttaagaaagatgaaatttttaagaatatagaaagatatggatatcagtcatcagatattaagaaaattagtcctccttttccattaaatattttacctgttcccaaaccttattatttttatctttatgatacccatttgaatcaaatttatgatttggcttggtcatgtaatgattttttaatgtttgaaatatttattttggatagggaaagcatcaaatatatagataaagataaactttttaaatctggagaaacactatattcaaattttaaatctattaaaaatcaatgcaaaaattattttttttgcggttttgattttgatgccccttactttaaaagcggtgtgagtcaggtggcagattataattttgttcctgatgcattttctttattctttatttaa

SEQ ID NO: 47978 - DNA, 537 bp, Neisseria meningitidis
ttgacatatcgaatcctagttttggtaacgcgggaggtttgcgaaccgcgaagttggacagtaaagacgcggattatacaggcaaacgcgttcagacggcatctgaacgccatgccgtctgaacacgcggcttatgccgacttgatggcgagttccgccaagcgtttgctttgtgcgaaggcgatattgttttcttcggcggtcaggacgggagccgctgtcgggaatatcttttttgacggcttcgcagacggcggagactttggggacggtgcgcaatacggcttcgcaaccttcaacgctgtcgatgccgcgagcgattcggcgggcgggattgcgggtgctaccgttttggaaatagtagaggacgaggattttgagggggatttgggttcatgggcggattccgttaaaatggttcggtcttcagacggcataacagttgttccgatgccgtctgaaacagccgcagttcaggcatttgttcctgacggcaaaattggctataacatcgggcatcaatgcccaacttactga

SEQ ID NO: 47979 - DNA, 981 bp, Neisseria meningitidis; identical to SEQ ID NO: 45967

SEQ ID NO: 47980 - DNA, 621 bp, Neisseria meningitidis
atggcacagtttttcgctattcatcccgacaatccccaagaacgcctcatcaagcaggcggttgaaatcgtcaatcaaggcggcgtggtggtttatccgaccgattcgtgttacgccttgggttgcaaactcggcgataaggcggcgatggaacgcatactctccatccgcaaaatcgatttgaaacaccacctgaccctgatgtgcgccgatttgagcgagttgggcacgtacgccaaaattgacaacgtacagtttcgtcagcttaaagccgccacgcccgggccttatacctttatcttgcaggcgacgaaggaagtgccggcgcgcacgctgcacccgaaacgcaaaaccatcgggctgcgtattcccgataatgccattgcacaagccctgctgggggaattgggcgagccgcttttaagctgcaccctgatgctgcccgaagacggcgaaccattgaccgatccttatgaaatccgcgagcgtttggaacacgccgtcgatttggtgattgacggcggctggtgcggaaccgagccgaccaccgtcgtcgatatgaccgacggcacggaactggtgcgccggggttgtggcgatacggcggtgttcggtttgtag

SEQ ID NO: 47981 - DNA, 318 bp, Neisseria meningitidis; identical to SEQ ID NO: 45861

SEQ ID NO: 47982 - DNA, 1503 bp, Neisseria meningitidis
atgagtcgtgaaatgttacagctggcagaagcactggcaagcgaaaaaaacgttgatgcggaagtcgtcttccaagcactggaattcgccctgtctaccgccgccaagaaaaaggcagaccgcgaacacatggacgtgcgcgtccaaatcaaccgcgacaccggcgaataccaaaccttccgccgctggctgattgtcgccgatgaagactatacctatcccgatgtcgaaaaaaccatcgaggaaatccaagaggaaattcccggcactaccatccaaatcggcgaatactacgaagagcagctacccaacgaaggcttcggccgccaagccgcgcaaaccgccaaacaaatcatcctgcaacgcatccgcgatgcggagcgcgagcaaaatctgaacgagtttctcgccgtcaaagaagacatcgtgtccggcacggtcaaacgcgtcgaacgccacggcatcatcgtcgaagtcgttgccggcaaactggacgcgctgattccgcgcgaccaaatgattccgcgcgaaaacttccgcagcggcgaccgcatccgcgccctcttcctgcgcgtcgaagaaatcggcaacaccggccgcaaacaagtcatcctgagccgtacttccggcgatttcctcgtcaaactgtacgccaatgaagtacctgaaattgcagacggcatgcttgaaatccgcgctgtcgcccgcgacccgggccaacgtgccaaagtcgccgtcaaagccaacgaccagcgcatcgatccgcaaggcacctgtatcggcgttcgcggttcgcgtgtcaatgccgtcagcaatgaattatccggcgagcgcatcgacgttgtcctttggtcgcccgagcctgcccaattcgtcatgagcgcgctctcacccgccgaagtcagccgcatcgtgattgacgaagacaaacacgccgttgacgtgattgttgatgaaaaccaactggcgctagccatcggacgcggcggtcaaaacgtgcgccttgcttccgacctgaccggctggcagctcaacatcatgacttccgccgaggcagacgaacgcaatgcggcagaagatgccgccatccgccgcctgtttatggatcacttgaacgtggacgaagaaaccgccgacgtactggttcaagaaggttttgcaaccttggaagaagtcgcctatgttcctgccgccgaactgcttgccattgaaggatttgacgaagaaatcgtcgatatgctccgcaaccgcgcccgcgatgccatcctgaccatggcgattgccgccgaagaaaaactgggcgaagtatccgacgatatgcgcaacctcgaaggcatagatgccgatatgctccgcagccttgccgaagcaggcattaccacccgcgacgacttggcagagcttgctgtggacgaactgattgaaatcaccggtgtaaacgaagaaaccgcaaaagccgtcatcctgaccgcacgcgaacactggtttaccgaagacaaataa

SEQ ID NO: 47983 - DNA, 1536 bp, Neisseria meningitidis; identical to SEQ ID NO: 40021

SEQ ID NO: 47984 - DNA, 429 bp, Neisseria meningitidis; identical to SEQ ID NO: 41701

SEQ ID NO: 47985 - DNA, 216 bp, Neisseria meningitidis; identical to SEQ ID NO: 37963
